United States Patent Application Publication US 2005/0244851 A1 - sequence listing, part 52

SEQ ID NO: 2017158 - DNA, 25 bp, Homo sapien
ctgaaattctgccagtgcaaccgtc

SEQ ID NO: 2017159 - DNA, 25 bp, Homo sapien
tctgaaattctgccagtgcaaccgt

SEQ ID NO: 2017160 - DNA, 25 bp, Homo sapien
aatatccacatttaggataatagct

SEQ ID NO: 2017161 - DNA, 25 bp, Homo sapien
aaagttatgcagctctaatgcttcc

SEQ ID NO: 2017162 - DNA, 25 bp, Homo sapien
tccactccacgggtagtgccatcaa

SEQ ID NO: 2017163 - DNA, 25 bp, Homo sapien
gttatgcagctctaatgcttccact

SEQ ID NO: 2017164 - DNA, 25 bp, Homo sapien
ctcaccctgaggctaggacattcag

SEQ ID NO: 2017165 - DNA, 25 bp, Homo sapien
aaggggacgcctctaggtcgactca

SEQ ID NO: 2017166 - DNA, 25 bp, Homo sapien
ttacactccgacaaggggacgcctc

SEQ ID NO: 2017167 - DNA, 25 bp, Homo sapien
taggtcgactcaccctgaggctagg

SEQ ID NO: 2017168 - DNA, 25 bp, Homo sapien
cattatgacagaggtagttggtccc

SEQ ID NO: 2017169 - DNA, 25 bp, Homo sapien
ggcatagccttagtcccagtgtaga

SEQ ID NO: 2017170 - DNA, 25 bp, Homo sapien
catgatgatcaaggtagatggtccc

SEQ ID NO: 2017171 - DNA, 25 bp, Homo sapien
cgtgataatagaggtggatggtccc

SEQ ID NO: 2017172 - DNA, 25 bp, Homo sapien
cgtgctgtaacttcagatagggaac

SEQ ID NO: 2017173 - DNA, 25 bp, Homo sapien
tcacgatccgtgctgtaacttcaga

SEQ ID NO: 2017174 - DNA, 25 bp, Homo sapien
tgctgtaacttcagatagggaacaa

SEQ ID NO: 2017175 - DNA, 25 bp, Homo sapien
gatccgtgctgtaacttcagatagg

SEQ ID NO: 2017176 - DNA, 25 bp, Homo sapien
ttcccttgagaggagctgtcattct

SEQ ID NO: 2017177 - DNA, 25 bp, Homo sapien
ccttgagaggagctgtcattctgca

SEQ ID NO: 2017178 - DNA, 25 bp, Homo sapien
tcttcccttgagaggagctgtcatt

SEQ ID NO: 2017179 - DNA, 25 bp, Homo sapien
gcatcttcccttgagaggagctgtc

SEQ ID NO: 2017180 - DNA, 25 bp, Homo sapien
ccttagggtgtaccacctcaggaca

SEQ ID NO: 2017181 - DNA, 25 bp, Homo sapien
catgaggcatggctcataagtagcg

SEQ ID NO: 2017182 - DNA, 25 bp, Homo sapien
tttactcacactcaagcagatgggc

SEQ ID NO: 2017183 - DNA, 25 bp, Homo sapien
tgtcattccaatgggcaaagcttca

SEQ ID NO: 2017184 - DNA, 25 bp, Homo sapien
caagagtaactaacgtgccaccagg

SEQ ID NO: 2017185 - DNA, 25 bp, Homo sapien
gactctcatgcagcacagcctaaaa

SEQ ID NO: 2017186 - DNA, 25 bp, Homo sapien
tgttgatgcaacagcctgaagaccc

SEQ ID NO: 2017187 - DNA, 25 bp, Homo sapien
tatgtagggtaagcctctattccac

SEQ ID NO: 2017188 - DNA, 25 bp, Homo sapien
cagacctgaatgcatagtttaagca

SEQ ID NO: 2017189 - DNA, 25 bp, Homo sapien
agacctgaatgcatagtttaagcat

SEQ ID NO: 2017190 - DNA, 25 bp, Homo sapien
ttatgtgcgaattatttcagtcagc

SEQ ID NO: 2017191 - DNA, 25 bp, Homo sapien
tatgtgcgaattatttcagtcagcc

SEQ ID NO: 2017192 - DNA, 25 bp, Homo sapien
gaatctctggcaatgtccggcttga

SEQ ID NO: 2017193 - DNA, 25 bp, Homo sapien
tctgctgaagactagaacaatagct

SEQ ID NO: 2017194 - DNA, 25 bp, Homo sapien
aacaatagctatgaaaatccatggg

SEQ ID NO: 2017195 - DNA, 25 bp, Homo sapien
gggcttgcggactggtgatcattgt

SEQ ID NO: 2017196 - DNA, 25 bp, Homo sapien
ctgtgacatcagtcatcactgattt

SEQ ID NO: 2017197 - DNA, 25 bp, Homo sapien
gacatcagtcatcactgattttgac

SEQ ID NO: 2017198 - DNA, 25 bp, Homo sapien
gtgacatcagtcatcactgattttg

SEQ ID NO: 2017199 - DNA, 25 bp, Homo sapien
tcagtcatcactgattttgacctca

SEQ ID NO: 2017200 - DNA, 25 bp, Homo sapien
gatacctcctggtactgggcatcct

SEQ ID NO: 2017201 - DNA, 25 bp, Homo sapien
atcctgccatcctatttcccttctc

SEQ ID NO: 2017202 - DNA, 25 bp, Homo sapien
ctagatacctcctggtactgggcat

SEQ ID NO: 2017203 - DNA, 25 bp, Homo sapien
tacctcctggtactgggcatcctgc

SEQ ID NO: 2017204 - DNA, 25 bp, Homo sapien
agcttcccgaaatgtcctcactttc

SEQ ID NO: 2017205 - DNA, 25 bp, Homo sapien
taagcttcccgaaatgtcctcactt

SEQ ID NO: 2017206 - DNA, 25 bp, Homo sapien
aagcttcccgaaatgtcctcacttt

SEQ ID NO: 2017207 - DNA, 25 bp, Homo sapien
ctaagcttcccgaaatgtcctcact

SEQ ID NO: 2017208 - DNA, 25 bp, Homo sapien
ttcatcaattaacactgttctactg

SEQ ID NO: 2017209 - DNA, 25 bp, Homo sapien
atagttgaggacctggtaggaaagt

SEQ ID NO: 2017210 - DNA, 25 bp, Homo sapien
ttttatagttgaggacctggtagga

SEQ ID NO: 2017211 - DNA, 25 bp, Homo sapien
ttatagttgaggacctggtaggaaa

SEQ ID NO: 2017212 - DNA, 25 bp, Homo sapien
tttcttcagctttttatagttgagg

SEQ ID NO: 2017213 - DNA, 25 bp, Homo sapien
gccgtagcacagaagcctaaatttg

SEQ ID NO: 2017214 - DNA, 25 bp, Homo sapien
cagccatatcttgcagtcgccgtag

SEQ ID NO: 2017215 - DNA, 25 bp, Homo sapien
aaatttgagccttgaatcctgatta

SEQ ID NO: 2017216 - DNA, 25 bp, Homo sapien
ctatatcagccaggaataaagtgtt

SEQ ID NO: 2017217 - DNA, 25 bp, Homo sapien
tcattgggattctatttctaaagct

SEQ ID NO: 2017218 - DNA, 25 bp, Homo sapien
gagtactgtgtaaaaactcttgtaa

SEQ ID NO: 2017219 - DNA, 25 bp, Homo sapien
ttgccctttcgccttgcttatatgg

SEQ ID NO: 2017220 - DNA, 25 bp, Homo sapien
gattaactgtagaactacaatgagt

SEQ ID NO: 2017221 - DNA, 25 bp, Homo sapien
tgaagatccggaaaatcaggcggcg

SEQ ID NO: 2017222 - DNA, 25 bp, Homo sapien
ttgtgccgacgataataaccgatga

SEQ ID NO: 2017223 - DNA, 25 bp, Homo sapien
tactgaaggataccgggaagactgg

SEQ ID NO: 2017224 - DNA, 25 bp, Homo sapien
actatacggcccagttgtctgtgca

SEQ ID NO: 2017225 - DNA, 25 bp, Homo sapien
taaaatccaatgttttcctctcagc

SEQ ID NO: 2017226 - DNA, 25 bp, Homo sapien
tgtaaaatccaatgttttcctctca

SEQ ID NO: 2017227 - DNA, 25 bp, Homo sapien
aaatccaatgttttcctctcagcag

SEQ ID NO: 2017228 - DNA, 25 bp, Homo sapien
tctgtaaaatccaatgttttcctct

SEQ ID NO: 2017229 - DNA, 25 bp, Homo sapien
taaatcagagtagtgaagcccaggg

SEQ ID NO: 2017230 - DNA, 25 bp, Homo sapien
gtcctctttggagttgctgagccct

SEQ ID NO: 2017231 - DNA, 25 bp, Homo sapien
cgtgcacttgtcgttgtatttccca

SEQ ID NO: 2017232 - DNA, 25 bp, Homo sapien
ccctcattgacatgttggacaaagc

SEQ ID NO: 2017233 - DNA, 25 bp, Homo sapien
tatctccaatgctatatgaagcgcc

SEQ ID NO: 2017234 - DNA, 25 bp, Homo sapien
tcagcattgccttatcctcgaaaaa

SEQ ID NO: 2017235 - DNA, 25 bp, Homo sapien
ttcattttaaatgccggccaccggc

SEQ ID NO: 2017236 - DNA, 25 bp, Homo sapien
cctcgaaaaaatcaaacggatatgt

SEQ ID NO: 2017237 - DNA, 25 bp, Homo sapien
tgctgctgtattgaaatcagagagc

SEQ ID NO: 2017238 - DNA, 25 bp, Homo sapien
catagaatagagatcagcgaacttt

SEQ ID NO: 2017239 - DNA, 25 bp, Homo sapien
catagtttgcaaacccctgtcccaa

SEQ ID NO: 2017240 - DNA, 25 bp, Homo sapien
agagcaatttgcgaatgagtctggc

SEQ ID NO: 2017241 - DNA, 25 bp, Homo sapien
ctgtgcaggtcaagtccctctcagg

SEQ ID NO: 2017242 - DNA, 25 bp, Homo sapien
tcaagtccctctcagggacagccat

SEQ ID NO: 2017243 - DNA, 25 bp, Homo sapien
caggtcaagtccctctcagggacag

SEQ ID NO: 2017244 - DNA, 25 bp, Homo sapien
gtgcaggtcaagtccctctcaggga

SEQ ID NO: 2017245 - DNA, 25 bp, Homo sapien
tgtaaactggctgctctagcagagt

SEQ ID NO: 2017246 - DNA, 25 bp, Homo sapien
cttcacatacaggagcttctgaggg

SEQ ID NO: 2017247 - DNA, 25 bp, Homo sapien
acttccagggaaggcatcttcacat

SEQ ID NO: 2017248 - DNA, 25 bp, Homo sapien
aggccctccaggcttcggtgcactt

SEQ ID NO: 2017249 - DNA, 25 bp, Homo sapien
cacagccgccggcaacaggctttgc

SEQ ID NO: 2017250 - DNA, 25 bp, Homo sapien
gagcacagccgccggcaacaggctt

SEQ ID NO: 2017251 - DNA, 25 bp, Homo sapien
cagagcacagccgccggcaacaggc

SEQ ID NO: 2017252 - DNA, 25 bp, Homo sapien
agcacagccgccggcaacaggcttt

SEQ ID NO: 2017253 - DNA, 25 bp, Homo sapien
cacggggatgctgagaagagtggcc

SEQ ID NO: 2017254 - DNA, 25 bp, Homo sapien
cagaagcgtagtgacagcacgggga

SEQ ID NO: 2017255 - DNA, 25 bp, Homo sapien
cgtagtgacagcacggggatgctga

SEQ ID NO: 2017256 - DNA, 25 bp, Homo sapien
tgacagcacggggatgctgagaaga

SEQ ID NO: 2017257 - DNA, 25 bp, Homo sapien
aaaggaagttgcaggcgggcttgag

SEQ ID NO: 2017258 - DNA, 25 bp, Homo sapien
ctgatgacgaatgaaaggaagttgc

SEQ ID NO: 2017259 - DNA, 25 bp, Homo sapien
agtgaagtgctcagactgatgacga

SEQ ID NO: 2017260 - DNA, 25 bp, Homo sapien
gagagaacgtctagcagtgaagtgc

SEQ ID NO: 2017261 - DNA, 25 bp, Homo sapien
tgtttggatctctcaagaccgccta

SEQ ID NO: 2017262 - DNA, 25 bp, Homo sapien
gaccgcctagtctgtgagtattcca

SEQ ID NO: 2017263 - DNA, 25 bp, Homo sapien
ggatctctcaagaccgcctagtctg

SEQ ID NO: 2017264 - DNA, 25 bp, Homo sapien
tctcaagaccgcctagtctgtgagt

SEQ ID NO: 2017265 - DNA, 25 bp, Homo sapien
aagattatgaaggcaaagcgccttt

SEQ ID NO: 2017266 - DNA, 25 bp, Homo sapien
gattatgaaggcaaagcgccttttc

SEQ ID NO: 2017267 - DNA, 25 bp, Homo sapien
atgaaggcaaagcgccttttcttgc

SEQ ID NO: 2017268 - DNA, 25 bp, Homo sapien
ttatgaaggcaaagcgccttttctt

SEQ ID NO: 2017269 - DNA, 25 bp, Homo sapien
tttgtggtttggcaaagtactggct

SEQ ID NO: 2017270 - DNA, 25 bp, Homo sapien
agtactggcttccaccaccataggg

SEQ ID NO: 2017271 - DNA, 25 bp, Homo sapien
tgtggtttggcaaagtactggcttc

SEQ ID NO: 2017272 - DNA, 25 bp, Homo sapien
tgcctccaaaatttactctcttcat

SEQ ID NO: 2017273 - DNA, 25 bp, Homo sapien
gagaaaaactggagaaggtcatttg

SEQ ID NO: 2017274 - DNA, 25 bp, Homo sapien
caggccacaaagagacccagtaagg

SEQ ID NO: 2017275 - DNA, 25 bp, Homo sapien
cagctcggttttagtcttcagtgac

SEQ ID NO: 2017276 - DNA, 25 bp, Homo sapien
cagtaagggatacggacagctcggt

SEQ ID NO: 2017277 - DNA, 25 bp, Homo sapien
caattacatcatctgtatgatactc

SEQ ID NO: 2017278 - DNA, 25 bp, Homo sapien
gatactcatatcttagcattggtcc

SEQ ID NO: 2017279 - DNA, 25 bp, Homo sapien
ccacaagaggcataaacctggacat

SEQ ID NO: 2017280 - DNA, 25 bp, Homo sapien
gcctgaactgaggttgacaattaca

SEQ ID NO: 2017281 - DNA, 25 bp, Homo sapien
ctggcagaaagaattatctgatgct

SEQ ID NO: 2017282 - DNA, 25 bp, Homo sapien
aattatctgatgctgataactagtc

SEQ ID NO: 2017283 - DNA, 25 bp, Homo sapien
aaagaattatctgatgctgataact

SEQ ID NO: 2017284 - DNA, 25 bp, Homo sapien
agaattatctgatgctgataactag

SEQ ID NO: 2017285 - DNA, 25 bp, Homo sapien
gaggttgtcagtgtcattcttgcac

SEQ ID NO: 2017286 - DNA, 25 bp, Homo sapien
ggttgtcagtgtcattcttgcactg

SEQ ID NO: 2017287 - DNA, 25 bp, Homo sapien
ggtggctgtaggaaactctgcatta

SEQ ID NO: 2017288 - DNA, 25 bp, Homo sapien
gtggctgtaggaaactctgcattag

SEQ ID NO: 2017289 - DNA, 25 bp, Homo sapien
gcagtggtccaagggtgtttctcta

SEQ ID NO: 2017290 - DNA, 25 bp, Homo sapien
tccgcatcggacacctgggatggtg

SEQ ID NO: 2017291 - DNA, 25 bp, Homo sapien
tgcttcatcttcatccgcatcggac

SEQ ID NO: 2017292 - DNA, 25 bp, Homo sapien
ttctgcaaggtttccacatgggcag

SEQ ID NO: 2017293 - DNA, 25 bp, Homo sapien
acagcaagatgagagctaatgttaa

SEQ ID NO: 2017294 - DNA, 25 bp, Homo sapien
gataactgagttggtttccttctgt

SEQ ID NO: 2017295 - DNA, 25 bp, Homo sapien
gtaagacttgtgtacagcaaacaat

SEQ ID NO: 2017296 - DNA, 25 bp, Homo sapien
gctaatgttaataatgccccaggga

SEQ ID NO: 2017297 - DNA, 25 bp, Homo sapien
tgtggagtatgggtaatatagcatc

SEQ ID NO: 2017298 - DNA, 25 bp, Homo sapien
ctgccaatggaccaggaagatgtgg

SEQ ID NO: 2017299 - DNA, 25 bp, Homo sapien
gggtaatatagcatctgtttgacag

SEQ ID NO: 2017300 - DNA, 25 bp, Homo sapien
tgtttgacagccatgtgaactggca

SEQ ID NO: 2017301 - DNA, 25 bp, Homo sapien
ctttgctgctcatgggttgggcccc

SEQ ID NO: 2017302 - DNA, 25 bp, Homo sapien
ccgaggctgggatatcaagcctaca

SEQ ID NO: 2017303 - DNA, 25 bp, Homo sapien
gggatacagctgtgctctcatggct

SEQ ID NO: 2017304 - DNA, 25 bp, Homo sapien
cagctcggcctacagcagctctatg

SEQ ID NO: 2017305 - DNA, 25 bp, Homo sapien
gttgatggctgaaggttctctgtcc

SEQ ID NO: 2017306 - DNA, 25 bp, Homo sapien
tgattgaacgggacacagccagttg

SEQ ID NO: 2017307 - DNA, 25 bp, Homo sapien
gacacagccagttgatggctgaagg

SEQ ID NO: 2017308 - DNA, 25 bp, Homo sapien
cttgtctgattgaacgggacacagc

SEQ ID NO: 2017309 - DNA, 25 bp, Homo sapien
tctgttttgtcaataccctcccttc

SEQ ID NO: 2017310 - DNA, 25 bp, Homo sapien
tgtggcatttgagcctgaagaaagc

SEQ ID NO: 2017311 - DNA, 25 bp, Homo sapien
aattgtgaagccattgcttaatctc

SEQ ID NO: 2017312 - DNA, 25 bp, Homo sapien
gaagccattgcttaatctcttgtgg

SEQ ID NO: 2017313 - DNA, 25 bp, Homo sapien
tgtgcaaaccagaaacaaggacaca

SEQ ID NO: 2017314 - DNA, 25 bp, Homo sapien
aaacaaggacacaaaggctgtgtct

SEQ ID NO: 2017315 - DNA, 25 bp, Homo sapien
tcatgtgcaaaccagaaacaaggac

SEQ ID NO: 2017316 - DNA, 25 bp, Homo sapien
gaaacaaggacacaaaggctgtgtc

SEQ ID NO: 2017317 - DNA, 25 bp, Homo sapien
ccagaaccctgatggatttatcctc

SEQ ID NO: 2017318 - DNA, 25 bp, Homo sapien
ttccagaaccctgatggatttatcc

SEQ ID NO: 2017319 - DNA, 25 bp, Homo sapien
gaaccctgatggatttatcctcttc

SEQ ID NO: 2017320 - DNA, 25 bp, Homo sapien
cagaaccctgatggatttatcctct

SEQ ID NO: 2017321 - DNA, 25 bp, Homo sapien
tctgtagtcccgcagcggctgccag

SEQ ID NO: 2017322 - DNA, 25 bp, Homo sapien
atagtctgaggcttgatgcaggagt

SEQ ID NO: 2017323 - DNA, 25 bp, Homo sapien
gagtgtagcaacatccaaagatctg

SEQ ID NO: 2017324 - DNA, 25 bp, Homo sapien
caggtgccttctaccgagtgtagca

SEQ ID NO: 2017325 - DNA, 25 bp, Homo sapien
ctgactcggttaaaggaggaggctc

SEQ ID NO: 2017326 - DNA, 25 bp, Homo sapien
ctggaacatgctgtgcatgggccag

SEQ ID NO: 2017327 - DNA, 25 bp, Homo sapien
gggatttagactttatgtgtaggca

SEQ ID NO: 2017328 - DNA, 25 bp, Homo sapien
tccacagccatgacaggggatttag

SEQ ID NO: 2017329 - DNA, 25 bp, Homo sapien
acatgctgtgcatgggccagactgg

SEQ ID NO: 2017330 - DNA, 25 bp, Homo sapien
cagcaccacctgtactgtagcttca

SEQ ID NO: 2017331 - DNA, 25 bp, Homo sapien
caccacctgtactgtagcttcatga

SEQ ID NO: 2017332 - DNA, 25 bp, Homo sapien
acctgtactgtagcttcatgatgac

SEQ ID NO: 2017333 - DNA, 25 bp, Homo sapien
ccacctgtactgtagcttcatgatg

SEQ ID NO: 2017334 - DNA, 25 bp, Homo sapien
ttgtgcaatcacttcatagcgctga

SEQ ID NO: 2017335 - DNA, 25 bp, Homo sapien
aaggccattcacttgttgtgcaatc

SEQ ID NO: 2017336 - DNA, 25 bp, Homo sapien
ttgcacagggggaaaatcagccagc

SEQ ID NO: 2017337 - DNA, 25 bp, Homo sapien
catagcgctgaatctcatgattttt

SEQ ID NO: 2017338 - DNA, 25 bp, Homo sapien
ctgtagaataattagcataatactc

SEQ ID NO: 2017339 - DNA, 25 bp, Homo sapien
tgtagaataattagcataatactca

SEQ ID NO: 2017340 - DNA, 25 bp, Homo sapien
cactgtagaataattagcataatac

SEQ ID NO: 2017341 - DNA, 25 bp, Homo sapien
tagcataatactcaatgaatgtata

SEQ ID NO: 2017342 - DNA, 25 bp, Homo sapien
ccatgatggatcctccacttgccat

SEQ ID NO: 2017343 - DNA, 25 bp, Homo sapien
tcccatgatggatcctccacttgcc

SEQ ID NO: 2017344 - DNA, 25 bp, Homo sapien
cccatgatggatcctccacttgcca

SEQ ID NO: 2017345 - DNA, 25 bp, Homo sapien
tgcttgcttcattcccacacactgt

SEQ ID NO: 2017346 - DNA, 25 bp, Homo sapien
aattgcggttttaaggctgcagtca

SEQ ID NO: 2017347 - DNA, 25 bp, Homo sapien
tgttgaactaggagtcctctccctg

SEQ ID NO: 2017348 - DNA, 25 bp, Homo sapien
taatgatatttgtgtgctcagagct

SEQ ID NO: 2017349 - DNA, 25 bp, Homo sapien
taaacttatctagcgaattctctcg

SEQ ID NO: 2017350 - DNA, 25 bp, Homo sapien
tttgggagcccatatggagtcaggc

SEQ ID NO: 2017351 - DNA, 25 bp, Homo sapien
cacgattttgcttggcggtaggaaa

SEQ ID NO: 2017352 - DNA, 25 bp, Homo sapien
tgtctgacctgtggcatggtgccgc

SEQ ID NO: 2017353 - DNA, 25 bp, Homo sapien
acagctccatcacacccttgtgaag

SEQ ID NO: 2017354 - DNA, 25 bp, Homo sapien
atgaggtgtgtgacgtgctcacgta

SEQ ID NO: 2017355 - DNA, 25 bp, Homo sapien
tgacgtgctcacgtagccacagctc

SEQ ID NO: 2017356 - DNA, 25 bp, Homo sapien
ccatcacacccttgtgaagtgcact

SEQ ID NO: 2017357 - DNA, 25 bp, Homo sapien
ccccacaagggattttcacacgaag

SEQ ID NO: 2017358 - DNA, 25 bp, Homo sapien
ccacaagggattttcacacgaaggc

SEQ ID NO: 2017359 - DNA, 25 bp, Homo sapien
cacaagggattttcacacgaaggcc

SEQ ID NO: 2017360 - DNA, 25 bp, Homo sapien
cccacaagggattttcacacgaagg

SEQ ID NO: 2017361 - DNA, 25 bp, Homo sapien
cgggtgtgggtggccggacgggatg

SEQ ID NO: 2017362 - DNA, 25 bp, Homo sapien
tgggtggccggacgggatggcttcc

SEQ ID NO: 2017363 - DNA, 25 bp, Homo sapien
cggcttcttcgccgccacagtcccc

SEQ ID NO: 2017364 - DNA, 25 bp, Homo sapien
gtgtgggtggccggacgggatggct

SEQ ID NO: 2017365 - DNA, 25 bp, Homo sapien
caagtaagacctaacaaatcacaac

SEQ ID NO: 2017366 - DNA, 25 bp, Homo sapien
catacataggcagggcaagtaagac

SEQ ID NO: 2017367 - DNA, 25 bp, Homo sapien
tcacaactatatcctgtgtgctaat

SEQ ID NO: 2017368 - DNA, 25 bp, Homo sapien
tcaaggattgccaacggaaatacat

SEQ ID NO: 2017369 - DNA, 25 bp, Homo sapien
ttctttatgttgttggtaggacttc

SEQ ID NO: 2017370 - DNA, 25 bp, Homo sapien
tcttgctacaagtttatctggctaa

SEQ ID NO: 2017371 - DNA, 25 bp, Homo sapien
tgctcatattctctacgctgttttt

SEQ ID NO: 2017372 - DNA, 25 bp, Homo sapien
cttctattggtctgcttgagttcta

SEQ ID NO: 2017373 - DNA, 25 bp, Homo sapien
gaggaagcaaagcacgccttacata

SEQ ID NO: 2017374 - DNA, 25 bp, Homo sapien
agcaaagcacgccttacataccagc

SEQ ID NO: 2017375 - DNA, 25 bp, Homo sapien
acgccttacataccagcaggaagga

SEQ ID NO: 2017376 - DNA, 25 bp, Homo sapien
aaagcacgccttacataccagcagg

SEQ ID NO: 2017377 - DNA, 25 bp, Homo sapien
tgttcatgcacttctatccgtatat

SEQ ID NO: 2017378 - DNA, 25 bp, Homo sapien
caaattctgcttgtagtcactttaa

SEQ ID NO: 2017379 - DNA, 25 bp, Homo sapien
tagttatgaatcctaagttgtatgc

SEQ ID NO: 2017380 - DNA, 25 bp, Homo sapien
taattttgcatttggtattccagaa

SEQ ID NO: 2017381 - DNA, 25 bp, Homo sapien
tccagcaagtctttgcaacatgcat

SEQ ID NO: 2017382 - DNA, 25 bp, Homo sapien
cttccagcaagtctttgcaacatgc

SEQ ID NO: 2017383 - DNA, 25 bp, Homo sapien
gtttcgcttctccagacacctggtc

SEQ ID NO: 2017384 - DNA, 25 bp, Homo sapien
tcgcttctccagacacctggtccct

SEQ ID NO: 2017385 - DNA, 25 bp, Homo sapien
tctggtggatcataaccatctgcag

SEQ ID NO: 2017386 - DNA, 25 bp, Homo sapien
cagagatgctggtgctcttgcagca

SEQ ID NO: 2017387 - DNA, 25 bp, Homo sapien
cagtgtccgccctagcattttagct

SEQ ID NO: 2017388 - DNA, 25 bp, Homo sapien
ccacagatgcaaggtacaaagaggg

SEQ ID NO: 2017389 - DNA, 25 bp, Homo sapien
tcttctccgtgaagtcactcaggga

SEQ ID NO: 2017390 - DNA, 25 bp, Homo sapien
cactcagggatcgaggtttaaaagc

SEQ ID NO: 2017391 - DNA, 25 bp, Homo sapien
tccgtgaagtcactcagggatcgag

SEQ ID NO: 2017392 - DNA, 25 bp, Homo sapien
tgaagtcactcagggatcgaggttt

SEQ ID NO: 2017393 - DNA, 25 bp, Homo sapien
gaggttagggacacgagcttcttga

SEQ ID NO: 2017394 - DNA, 25 bp, Homo sapien
caatgatcctgtcacggactttggg

SEQ ID NO: 2017395 - DNA, 25 bp, Homo sapien
caaggtgaggttagggacacgagct

SEQ ID NO: 2017396 - DNA, 25 bp, Homo sapien
cagtttggcgggcaaggtgaggtta

SEQ ID NO: 2017397 - DNA, 25 bp, Homo sapien
gagatagaacggacagtttcttttc

SEQ ID NO: 2017398 - DNA, 25 bp, Homo sapien
agtgtcaatcggtttttgaattcac

SEQ ID NO: 2017399 - DNA, 25 bp, Homo sapien
ttgaattcacttgagtggagctccc

SEQ ID NO: 2017400 - DNA, 25 bp, Homo sapien
gaccccaagattaaaagtgtgccca

SEQ ID NO: 2017401 - DNA, 25 bp, Homo sapien
cagagaacaatttaacgggattcca

SEQ ID NO: 2017402 - DNA, 25 bp, Homo sapien
ggagccaatctacctgctgtatgca

SEQ ID NO: 2017403 - DNA, 25 bp, Homo sapien
tgcatcttggtgtacctcttactgg

SEQ ID NO: 2017404 - DNA, 25 bp, Homo sapien
tgacctcacccacgcaaacttgtgt

SEQ ID NO: 2017405 - DNA, 25 bp, Homo sapien
gaagttatcatccatcagtgtcatt

SEQ ID NO: 2017406 - DNA, 25 bp, Homo sapien
aaaactatgaagttatcatccatca

SEQ ID NO: 2017407 - DNA, 25 bp, Homo sapien
tatcatccatcagtgtcattgtcat

SEQ ID NO: 2017408 - DNA, 25 bp, Homo sapien
catttctaaaactatgaagttatca

SEQ ID NO: 2017409 - DNA, 25 bp, Homo sapien
tgtgtgtccacattaccatagagta

SEQ ID NO: 2017410 - DNA, 25 bp, Homo sapien
aaatttactaggagagcttccgctc

SEQ ID NO: 2017411 - DNA, 25 bp, Homo sapien
ccagcagcgtgtgaatactgtagtc

SEQ ID NO: 2017412 - DNA, 25 bp, Homo sapien
ctttctcattatgcatggacctgga

SEQ ID NO: 2017413 - DNA, 25 bp, Homo sapien
aaagccccctcgtctgcagccactc

SEQ ID NO: 2017414 - DNA, 25 bp, Homo sapien
cccctcgtctgcagccactcccatt

SEQ ID NO: 2017415 - DNA, 25 bp, Homo sapien
ctgaaatcagcaccaaagccccctc

SEQ ID NO: 2017416 - DNA, 25 bp, Homo sapien
accaaagccccctcgtctgcagcca

SEQ ID NO: 2017417 - DNA, 25 bp, Homo sapien
acccaggtaccaggacagctgctca

SEQ ID NO: 2017418 - DNA, 25 bp, Homo sapien
ccaggtaccaggacagctgctcatg

SEQ ID NO: 2017419 - DNA, 25 bp, Homo sapien
ctaggccagcacccaggtaccagga

SEQ ID NO: 2017420 - DNA, 25 bp, Homo sapien
aggtaccaggacagctgctcatgcc

SEQ ID NO: 2017421 - DNA, 25 bp, Homo sapien
cgctcctgctggatctgcccagcca

SEQ ID NO: 2017422 - DNA, 25 bp, Homo sapien
catgagcagctgccgctcctgctgg

SEQ ID NO: 2017423 - DNA, 25 bp, Homo sapien
tgagcagctgccgctcctgctggat

SEQ ID NO: 2017424 - DNA, 25 bp, Homo sapien
agcagctgccgctcctgctggatct

SEQ ID NO: 2017425 - DNA, 25 bp, Homo sapien
ctattcctgatggtcgctcagggac

SEQ ID NO: 2017426 - DNA, 25 bp, Homo sapien
attctattcctgatggtcgctcagg

SEQ ID NO: 2017427 - DNA, 25 bp, Homo sapien
ttctattcctgatggtcgctcaggg

SEQ ID NO: 2017428 - DNA, 25 bp, Homo sapien
tctattcctgatggtcgctcaggga

SEQ ID NO: 2017429 - DNA, 25 bp, Homo sapien
tataggcagtgatgcctcttgactt

SEQ ID NO: 2017430 - DNA, 25 bp, Homo sapien
tggatctctctggtataggcagtga

SEQ ID NO: 2017431 - DNA, 25 bp, Homo sapien
tttgctgtgcattggtccatggagt

SEQ ID NO: 2017432 - DNA, 25 bp, Homo sapien
tggtccatggagtctaatctacccc

SEQ ID NO: 2017433 - DNA, 25 bp, Homo sapien
gaggacgggttcaaaggctgtatcc

SEQ ID NO: 2017434 - DNA, 25 bp, Homo sapien
ggacgggttcaaaggctgtatcctc

SEQ ID NO: 2017435 - DNA, 25 bp, Homo sapien
agaggacgggttcaaaggctgtatc

SEQ ID NO: 2017436 - DNA, 25 bp, Homo sapien
gacgggttcaaaggctgtatcctct

SEQ ID NO: 2017437 - DNA, 25 bp, Homo sapien
ggagcatcttcagcctcatagcagg

SEQ ID NO: 2017438 - DNA, 25 bp, Homo sapien
gagcatcttcagcctcatagcagga

SEQ ID NO: 2017439 - DNA, 25 bp, Homo sapien
gggagcatcttcagcctcatagcag

SEQ ID NO: 2017440 - DNA, 25 bp, Homo sapien
gagaggcttgttcactgcacacggt

SEQ ID NO: 2017441 - DNA, 25 bp, Homo sapien
aaagttttcattagcatctgcacgc

SEQ ID NO: 2017442 - DNA, 25 bp, Homo sapien
caagttctttagctcgagccagagg

SEQ ID NO: 2017443 - DNA, 25 bp, Homo sapien
gttctaaacccgacagagaggcttg

SEQ ID NO: 2017444 - DNA, 25 bp, Homo sapien
gccttcgagtaaaaactcagtgatc

SEQ ID NO: 2017445 - DNA, 25 bp, Homo sapien
tctggccttcgagtaaaaactcagt

SEQ ID NO: 2017446 - DNA, 25 bp, Homo sapien
ttatggtctggccttcgagtaaaaa

SEQ ID NO: 2017447 - DNA, 25 bp, Homo sapien
tggtctggccttcgagtaaaaactc

SEQ ID NO: 2017448 - DNA, 25 bp, Homo sapien
ggtctcctacgacattattcgattt

SEQ ID NO: 2017449 - DNA, 25 bp, Homo sapien
tctcctacgacattattcgatttga

SEQ ID NO: 2017450 - DNA, 25 bp, Homo sapien
cctacgacattattcgatttgagtt

SEQ ID NO: 2017451 - DNA, 25 bp, Homo sapien
taggtctcctacgacattattcgat

SEQ ID NO: 2017452 - DNA, 25 bp, Homo sapien
agaagtgcaagtggagtggatggcg

SEQ ID NO: 2017453 - DNA, 25 bp, Homo sapien
atggaagggctgatgtcagaagtgc

SEQ ID NO: 2017454 - DNA, 25 bp, Homo sapien
gaggactgtcccacagcatttgcag

SEQ ID NO: 2017455 - DNA, 25 bp, Homo sapien
catttgcagctctatctaggaaaca

SEQ ID NO: 2017456 - DNA, 25 bp, Homo sapien
cagaactgtcacttaggaggaactg

SEQ ID NO: 2017457 - DNA, 25 bp, Homo sapien
aaataaatctggactaggcacagtg

SEQ ID NO: 2017458 - DNA, 25 bp, Homo sapien
cacttgtgctcacaagtggcctcat

SEQ ID NO: 2017459 - DNA, 25 bp, Homo sapien
ccacttgtgctcacaagtggcctca

SEQ ID NO: 2017460 - DNA, 25 bp, Homo sapien
tgccagtgctcttccccacttgtgc

SEQ ID NO: 2017461 - DNA, 25 bp, Homo sapien
gctcttccccacttgtgctcacaag

SEQ ID NO: 2017462 - DNA, 25 bp, Homo sapien
cattcctggaaccatgtaccaggag

SEQ ID NO: 2017463 - DNA, 25 bp, Homo sapien
tcattcctggaaccatgtaccagga

SEQ ID NO: 2017464 - DNA, 25 bp, Homo sapien
ctcctggtgctcatcaacaggtcca

SEQ ID NO: 2017465 - DNA, 25 bp, Homo sapien
tcctggaaccatgtaccaggagaag

SEQ ID NO: 2017466 - DNA, 25 bp, Homo sapien
gaatgccgaatagccttgagcctgg

SEQ ID NO: 2017467 - DNA, 25 bp, Homo sapien
ttcagcgatgttctcatgaagcatc

SEQ ID NO: 2017468 - DNA, 25 bp, Homo sapien
gcatcgaatgtagatccacatggtt

SEQ ID NO: 2017469 - DNA, 25 bp, Homo sapien
gggaattatcacagccgatgtaaaa

SEQ ID NO: 2017470 - DNA, 25 bp, Homo sapien
cagagggccaggtactcagaaacgg

SEQ ID NO: 2017471 - DNA, 25 bp, Homo sapien
caggtactcagaaacggggggagag

SEQ ID NO: 2017472 - DNA, 25 bp, Homo sapien
cccacttcattcttaacagagggcc

SEQ ID NO: 2017473 - DNA, 25 bp, Homo sapien
cattcttaacagagggccaggtact

SEQ ID NO: 2017474 - DNA, 25 bp, Homo sapien
gggagagttggcaactctgtaaact

SEQ ID NO: 2017475 - DNA, 25 bp, Homo sapien
tagtcataattgtggctggcttcct

SEQ ID NO: 2017476 - DNA, 25 bp, Homo sapien
tctgtaaactgtcctatagggccat

SEQ ID NO: 2017477 - DNA, 25 bp, Homo sapien
tgtagggtgacttctggctctcatc

SEQ ID NO: 2017478 - DNA, 25 bp, Homo sapien
tcactgctctgttgatttgctaatg

SEQ ID NO: 2017479 - DNA, 25 bp, Homo sapien
ctctctcaccataacaaacaccaag

SEQ ID NO: 2017480 - DNA, 25 bp, Homo sapien
agcccaacacattctggaagcacat

SEQ ID NO: 2017481 - DNA, 25 bp, Homo sapien
gatacagatgaaattcactgagccc

SEQ ID NO: 2017482 - DNA, 25 bp, Homo sapien
cagattgcacatgcaaatggtagag

SEQ ID NO: 2017483 - DNA, 25 bp, Homo sapien
caaatggtagaggatgcaacacccc

SEQ ID NO: 2017484 - DNA, 25 bp, Homo sapien
tgcacatgcaaatggtagaggatgc

SEQ ID NO: 2017485 - DNA, 25 bp, Homo sapien
gcttgtggagctgccgcttgtgtct

SEQ ID NO: 2017486 - DNA, 25 bp, Homo sapien
catcattagtcatgctttgtcgtgg

SEQ ID NO: 2017487 - DNA, 25 bp, Homo sapien
catgctttgtcgtggacagtcagca

SEQ ID NO: 2017488 - DNA, 25 bp, Homo sapien
tagtcatgctttgtcgtggacagtc

SEQ ID NO: 2017489 - DNA, 25 bp, Homo sapien
gctccccatcattagtcatgctttg

SEQ ID NO: 2017490 - DNA, 25 bp, Homo sapien
atgaaactggttaatcaactacatt

SEQ ID NO: 2017491 - DNA, 25 bp, Homo sapien
tattaaacataaatacgatgtcaac

SEQ ID NO: 2017492 - DNA, 25 bp, Homo sapien
cattagtccaaactcaacttaacag

SEQ ID NO: 2017493 - DNA, 25 bp, Homo sapien
tttttagaagtagcgattattgggc

SEQ ID NO: 2017494 - DNA, 25 bp, Homo sapien
cttctagtgttcgtccatatccttc

SEQ ID NO: 2017495 - DNA, 25 bp, Homo sapien
tctcctccaaattcaaggattttga

SEQ ID NO: 2017496 - DNA, 25 bp, Homo sapien
agtgttcgtccatatccttctcctc

SEQ ID NO: 2017497 - DNA, 25 bp, Homo sapien
cctccaaattcaaggattttgatga

SEQ ID NO: 2017498 - DNA, 25 bp, Homo sapien
aagaaactgacgcttacttggatca

SEQ ID NO: 2017499 - DNA, 25 bp, Homo sapien
tgctgctgaaagaaactgacgctta

SEQ ID NO: 2017500 - DNA, 25 bp, Homo sapien
gaaactgacgcttacttggatcaca

SEQ ID NO: 2017501 - DNA, 25 bp, Homo sapien
gctgaaagaaactgacgcttacttg

SEQ ID NO: 2017502 - DNA, 25 bp, Homo sapien
aagttgaagcccataacctattgat

SEQ ID NO: 2017503 - DNA, 25 bp, Homo sapien
gcccataacctattgatgtcacatt

SEQ ID NO: 2017504 - DNA, 25 bp, Homo sapien
gttgaagcccataacctattgatgt

SEQ ID NO: 2017505 - DNA, 25 bp, Homo sapien
gaagcccataacctattgatgtcac

SEQ ID NO: 2017506 - DNA, 25 bp, Homo sapien
tgtttcccacggtataagggacagc

SEQ ID NO: 2017507 - DNA, 25 bp, Homo sapien
cacgagtcttcagcgtgagtttttc

SEQ ID NO: 2017508 - DNA, 25 bp, Homo sapien
cagcgtgagtttttctatgtttccc

SEQ ID NO: 2017509 - DNA, 25 bp, Homo sapien
tagtctctccatagtgtgagatgcc

SEQ ID NO: 2017510 - DNA, 25 bp, Homo sapien
aagatctctctctcagtatatattt

SEQ ID NO: 2017511 - DNA, 25 bp, Homo sapien
aaagatctctctctcagtatatatt

SEQ ID NO: 2017512 - DNA, 25 bp, Homo sapien
agatctctctctcagtatatatttt

SEQ ID NO: 2017513 - DNA, 25 bp, Homo sapien
taatgccccggtgggattcgtggct

SEQ ID NO: 2017514 - DNA, 25 bp, Homo sapien
gattcgtggctgtaaggacgataag

SEQ ID NO: 2017515 - DNA, 25 bp, Homo sapien
ggctgtaaggacgataagaaattgc

SEQ ID NO: 2017516 - DNA, 25 bp, Homo sapien
gtaaggacgataagaaattgcactg

SEQ ID NO: 2017517 - DNA, 25 bp, Homo sapien
cggctggcagtgactagtctttggt

SEQ ID NO: 2017518 - DNA, 25 bp, Homo sapien
gaatgtgtcatagctccggctggca

SEQ ID NO: 2017519 - DNA, 25 bp, Homo sapien
tttccacgtagcaaaagggctttca

SEQ ID NO: 2017520 - DNA, 25 bp, Homo sapien
actagtctttggtcatgttctggag

SEQ ID NO: 2017521 - DNA, 25 bp, Homo sapien
ggtagccagaccctatagatgtgtg

SEQ ID NO: 2017522 - DNA, 25 bp, Homo sapien
ggtaaaaacattcacggtagccaga

SEQ ID NO: 2017523 - DNA, 25 bp, Homo sapien
gtttctgaaaaccacgaagccattg

SEQ ID NO: 2017524 - DNA, 25 bp, Homo sapien
tcagttgacgtgaggagaggaaaac

SEQ ID NO: 2017525 - DNA, 25 bp, Homo sapien
ctgggatgactaggaattttggttt

SEQ ID NO: 2017526 - DNA, 25 bp, Homo sapien
ttttggtttctgctcaccacctcca

SEQ ID NO: 2017527 - DNA, 25 bp, Homo sapien
ggaattttggtttctgctcaccacc

SEQ ID NO: 2017528 - DNA, 25 bp, Homo sapien
caccacctccactgagacgctccat

SEQ ID NO: 2017529 - DNA, 25 bp, Homo sapien
tctgggatgactaggaattttggtt

SEQ ID NO: 2017530 - DNA, 25 bp, Homo sapien
ccatctgggatgactaggaattttg

SEQ ID NO: 2017531 - DNA, 25 bp, Homo sapien
gagacgctccatctgggatgactag

SEQ ID NO: 2017532 - DNA, 25 bp, Homo sapien
cacctccgctgagacgctccatctg

SEQ ID NO: 2017533 - DNA, 25 bp, Homo sapien
ctgggatgactaggaattttggttt

SEQ ID NO: 2017534 - DNA, 25 bp, Homo sapien
ttttggtttctgctcaccacctcca

SEQ ID NO: 2017535 - DNA, 25 bp, Homo sapien
ggaattttggtttctgctcaccacc

SEQ ID NO: 2017536 - DNA, 25 bp, Homo sapien
caccacctccactgagacgctccat

SEQ ID NO: 2017537 - DNA, 25 bp, Homo sapien
actgagacgctgcatctgggatgac

SEQ ID NO: 2017538 - DNA, 25 bp, Homo sapien
acctccactgagacgctgcatctgg

SEQ ID NO: 2017539 - DNA, 25 bp, Homo sapien
gagacgctgcatctgggatgactag

SEQ ID NO: 2017540 - DNA, 25 bp, Homo sapien
tccactgagacgctgcatctgggat

SEQ ID NO: 2017541 - DNA, 25 bp, Homo sapien
aaggctgccctaagggcacatttga

SEQ ID NO: 2017542 - DNA, 25 bp, Homo sapien
ctgccctaagggcacatttgagcat

SEQ ID NO: 2017543 - DNA, 25 bp, Homo sapien
tcagagcatgcaaggctgccctaag

SEQ ID NO: 2017544 - DNA, 25 bp, Homo sapien
ttcagagcatgcaaggctgccctaa

SEQ ID NO: 2017545 - DNA, 25 bp, Homo sapien
tgaggaatataaagcctcgtagccc

SEQ ID NO: 2017546 - DNA, 25 bp, Homo sapien
ccctgacgtaagagcagctggcagc

SEQ ID NO: 2017547 - DNA, 25 bp, Homo sapien
tcaagctctccggagcatgacatat

SEQ ID NO: 2017548 - DNA, 25 bp, Homo sapien
ccggagcatgacatatattgaggaa

SEQ ID NO: 2017549 - DNA, 25 bp, Homo sapien
cgtgattccaagtgagtgtgtaact

SEQ ID NO: 2017550 - DNA, 25 bp, Homo sapien
tgagtgtgtaactggagatactgat

SEQ ID NO: 2017551 - DNA, 25 bp, Homo sapien
ttatcagattcacctgttgattcct

SEQ ID NO: 2017552 - DNA, 25 bp, Homo sapien
gatactgattgtgagatgaatttta

SEQ ID NO: 2017553 - DNA, 25 bp, Homo sapien
cattctaacctctatccggagagcc

SEQ ID NO: 2017554 - DNA, 25 bp, Homo sapien
gcactaactaacattctaacctcta

SEQ ID NO: 2017555 - DNA, 25 bp, Homo sapien
taactaacattctaacctctatccg

SEQ ID NO: 2017556 - DNA, 25 bp, Homo sapien
ctaacattctaacctctatccggag

SEQ ID NO: 2017557 - DNA, 25 bp, Homo sapien
tctatcactgtacaatctgtggtat

SEQ ID NO: 2017558 - DNA, 25 bp, Homo sapien
ctatcactgtacaatctgtggtatg

SEQ ID NO: 2017559 - DNA, 25 bp, Homo sapien
gtctatcactgtacaatctgtggta

SEQ ID NO: 2017560 - DNA, 25 bp, Homo sapien
ccattagctttgaatttcctttctg

SEQ ID NO: 2017561 - DNA, 25 bp, Homo sapien
gcatgataccattagctttgaattt

SEQ ID NO: 2017562 - DNA, 25 bp, Homo sapien
gaatttctaccatggctagattctg

SEQ ID NO: 2017563 - DNA, 25 bp, Homo sapien
tcagtgcatgataccattagctttg

SEQ ID NO: 2017564 - DNA, 25 bp, Homo sapien
tgtccttacagagcaactctgggac

SEQ ID NO: 2017565 - DNA, 25 bp, Homo sapien
gctctgagtcttttaacatatgtct

SEQ ID NO: 2017566 - DNA, 25 bp, Homo sapien
ggacatacatcatgatcatgtgaag

SEQ ID NO: 2017567 - DNA, 25 bp, Homo sapien
cagtaatatccatatgctctgagtc

SEQ ID NO: 2017568 - DNA, 25 bp, Homo sapien
ttttgcttgaaactgacagccccga

SEQ ID NO: 2017569 - DNA, 25 bp, Homo sapien
ttaactggctcgcagtcaatggagc

SEQ ID NO: 2017570 - DNA, 25 bp, Homo sapien
gtggcatcctttcccttttgcttga

SEQ ID NO: 2017571 - DNA, 25 bp, Homo sapien
ttgtggccacgtcccgacctgtgtc

SEQ ID NO: 2017572 - DNA, 25 bp, Homo sapien
gaggtgtgttctggtcaagtttttc

SEQ ID NO: 2017573 - DNA, 25 bp, Homo sapien
gggattgagccatttactatattga

SEQ ID NO: 2017574 - DNA, 25 bp, Homo sapien
tacaccaaagctaaactacctggct

SEQ ID NO: 2017575 - DNA, 25 bp, Homo sapien
taatgtctggcgtgttttaacacag

SEQ ID NO: 2017576 - DNA, 25 bp, Homo sapien
ggcaccaaatttcatccgtgtccct

SEQ ID NO: 2017577 - DNA, 25 bp, Homo sapien
atctttctcacagggcaaagaaaag

SEQ ID NO: 2017578 - DNA, 25 bp, Homo sapien
acagggcaaagaaaaggagtacagg

SEQ ID NO: 2017579 - DNA, 25 bp, Homo sapien
accaaatttcatccgtgtccctgtg

SEQ ID NO: 2017580 - DNA, 25 bp, Homo sapien
tgtgggtatataatcagagagtcat

SEQ ID NO: 2017581 - DNA, 25 bp, Homo sapien
cccaggaaagcggaacttgtggcta

SEQ ID NO: 2017582 - DNA, 25 bp, Homo sapien
atgtgggtatataatcagagagtca

SEQ ID NO: 2017583 - DNA, 25 bp, Homo sapien
ggaacttgtggctaagggtgaagga

SEQ ID NO: 2017584 - DNA, 25 bp, Homo sapien
ccggcacgtgtagcaagctcctgtg

SEQ ID NO: 2017585 - DNA, 25 bp, Homo sapien
gaacacctggccgctgcggttcagg

SEQ ID NO: 2017586 - DNA, 25 bp, Homo sapien
cacctggccgctgcggttcaggcgt

SEQ ID NO: 2017587 - DNA, 25 bp, Homo sapien
gttctggaggaacacctggccgctg

SEQ ID NO: 2017588 - DNA, 25 bp, Homo sapien
ggaatagttcagaagtcaatatttc

SEQ ID NO: 2017589 - DNA, 25 bp, Homo sapien
aggaacagacttcacataaaagaca

SEQ ID NO: 2017590 - DNA, 25 bp, Homo sapien
tcttagttaacaaccacaaggaata

SEQ ID NO: 2017591 - DNA, 25 bp, Homo sapien
ggaacagacttcacataaaagacaa

SEQ ID NO: 2017592 - DNA, 25 bp, Homo sapien
tcagatctggctctgctggtattgc

SEQ ID NO: 2017593 - DNA, 25 bp, Homo sapien
cccagctcagatctggctctgctgg

SEQ ID NO: 2017594 - DNA, 25 bp, Homo sapien
tcccagctcagatctggctctgctg

SEQ ID NO: 2017595 - DNA, 25 bp, Homo sapien
agctcagatctggctctgctggtat

SEQ ID NO: 2017596 - DNA, 25 bp, Homo sapien
tatagcagtagatctcttaaaacaa

SEQ ID NO: 2017597 - DNA, 25 bp, Homo sapien
tgtgtttatagaattcccttttgtg

SEQ ID NO: 2017598 - DNA, 25 bp, Homo sapien
gaattcccttttgtgttcagtccac

SEQ ID NO: 2017599 - DNA, 25 bp, Homo sapien
cagagaaacacgtgatgaacatcgg

SEQ ID NO: 2017600 - DNA, 25 bp, Homo sapien
gcgtgacatacaaagcagcgattaa

SEQ ID NO: 2017601 - DNA, 25 bp, Homo sapien
ttgcttgagccagtagatgcgttac

SEQ ID NO: 2017602 - DNA, 25 bp, Homo sapien
tagtagcaaaactcgaaaccttagc

SEQ ID NO: 2017603 - DNA, 25 bp, Homo sapien
gggcagggccacattgttcaagatg

SEQ ID NO: 2017604 - DNA, 25 bp, Homo sapien
tgtcgcattgataaaacatcctgtt

SEQ ID NO: 2017605 - DNA, 25 bp, Homo sapien
gatgattccaccgacaggcttgcta

SEQ ID NO: 2017606 - DNA, 25 bp, Homo sapien
gcataaatcactggcacatagagaa

SEQ ID NO: 2017607 - DNA, 25 bp, Homo sapien
gagtccaactctgtgcgggcattac

SEQ ID NO: 2017608 - DNA, 25 bp, Homo sapien
tcctgacatgcaaccaaagaactgg

SEQ ID NO: 2017609 - DNA, 25 bp, Homo sapien
tacaagatgatcctgacatgcaacc

SEQ ID NO: 2017610 - DNA, 25 bp, Homo sapien
aagacaagactctaagtattatgaa

SEQ ID NO: 2017611 - DNA, 25 bp, Homo sapien
tgaggcagccacaccatcgtttgct

SEQ ID NO: 2017612 - DNA, 25 bp, Homo sapien
tgaaaggaagtctctacccagaatc

SEQ ID NO: 2017613 - DNA, 25 bp, Homo sapien
tctttcaggcacataaggagcccag

SEQ ID NO: 2017614 - DNA, 25 bp, Homo sapien
tatgactaagcttctgctagagcct

SEQ ID NO: 2017615 - DNA, 25 bp, Homo sapien
aacattttccttggccgtctgtcaa

SEQ ID NO: 2017616 - DNA, 25 bp, Homo sapien
tatatgtaaaatggctcctcccttg

SEQ ID NO: 2017617 - DNA, 25 bp, Homo sapien
caggacggtaacattaaaggcagta

SEQ ID NO: 2017618 - DNA, 25 bp, Homo sapien
taagagcgtgtctcatcccacaaca

SEQ ID NO: 2017619 - DNA, 25 bp, Homo sapien
atccactgacttcaagtctagagtt

SEQ ID NO: 2017620 - DNA, 25 bp, Homo sapien
gatccactgacttcaagtctagagt

SEQ ID NO: 2017621 - DNA, 25 bp, Homo sapien
tggcaccaagcacgcagaaaacttc

SEQ ID NO: 2017622 - DNA, 25 bp, Homo sapien
caaaagtacggcactgagatcctca

SEQ ID NO: 2017623 - DNA, 25 bp, Homo sapien
cactgcagcgggtgattgtcaggct

SEQ ID NO: 2017624 - DNA, 25 bp, Homo sapien
ggaccatttatgaacctgagcgtca

SEQ ID NO: 2017625 - DNA, 25 bp, Homo sapien
tactttgtacccacgaggttgaggc

SEQ ID NO: 2017626 - DNA, 25 bp, Homo sapien
tttgtacccacgaggttgaggctgc

SEQ ID NO: 2017627 - DNA, 25 bp, Homo sapien
gatagcgccgttgcattttagcctg

SEQ ID NO: 2017628 - DNA, 25 bp, Homo sapien
gccatgatcatgatagcgccgttgc

SEQ ID NO: 2017629 - DNA, 25 bp, Homo sapien
cccactgaaatcttgatctcatcca

SEQ ID NO: 2017630 - DNA, 25 bp, Homo sapien
cttcccactgaaatcttgatctcat

SEQ ID NO: 2017631 - DNA, 25 bp, Homo sapien
tcccactgaaatcttgatctcatcc

SEQ ID NO: 2017632 - DNA, 25 bp, Homo sapien
ccactgaaatcttgatctcatccat

SEQ ID NO: 2017633 - DNA, 25 bp, Homo sapien
tctccagcgattgtctgtccacact

SEQ ID NO: 2017634 - DNA, 25 bp, Homo sapien
ctctccagcgattgtctgtccacac

SEQ ID NO: 2017635 - DNA, 25 bp, Homo sapien
caaagtcatccgaaagtttctgaag

SEQ ID NO: 2017636 - DNA, 25 bp, Homo sapien
ttagttgttacaacggtcaaagtca

SEQ ID NO: 2017637 - DNA, 25 bp, Homo sapien
tgttacaacggtcaaagtcatccga

SEQ ID NO: 2017638 - DNA, 25 bp, Homo sapien
caacggtcaaagtcatccgaaagtt

SEQ ID NO: 2017639 - DNA, 25 bp, Homo sapien
gctggaagaacaatgtcacatctga

SEQ ID NO: 2017640 - DNA, 25 bp, Homo sapien
atcagacatttaagtaaagggttgg

SEQ ID NO: 2017641 - DNA, 25 bp, Homo sapien
ggtattgtttctaggttcagtacag

SEQ ID NO: 2017642 - DNA, 25 bp, Homo sapien
tcaagatgatggtgctctttttcat

SEQ ID NO: 2017643 - DNA, 25 bp, Homo sapien
ttttcaatagaataagtctggtttg

SEQ ID NO: 2017644 - DNA, 25 bp, Homo sapien
tttccacacttcatcctaagctatt

SEQ ID NO: 2017645 - DNA, 25 bp, Homo sapien
ccacacttcatcctaagctatttac

SEQ ID NO: 2017646 - DNA, 25 bp, Homo sapien
atagaataagtctggtttggaactg

SEQ ID NO: 2017647 - DNA, 25 bp, Homo sapien
tagttactgtgagtacatgaggcac

SEQ ID NO: 2017648 - DNA, 25 bp, Homo sapien
tctctattgtgtgaatttgcgattc

SEQ ID NO: 2017649 - DNA, 25 bp, Homo sapien
tgaggcactagaagacatctcggtt

SEQ ID NO: 2017650 - DNA, 25 bp, Homo sapien
ttctaaaactagagtccatgggcat

SEQ ID NO: 2017651 - DNA, 25 bp, Homo sapien
tctcatggtgccgatcaccctgcat

SEQ ID NO: 2017652 - DNA, 25 bp, Homo sapien
aactctcatggtgccgatcaccctg

SEQ ID NO: 2017653 - DNA, 25 bp, Homo sapien
gataactctcatggtgccgatcacc

SEQ ID NO: 2017654 - DNA, 25 bp, Homo sapien
attaagataactctcatggtgccga

SEQ ID NO: 2017655 - DNA, 25 bp, Homo sapien
taaaaatcaagagctggcagctctc

SEQ ID NO: 2017656 - DNA, 25 bp, Homo sapien
tctttatctctgtagccagtaaaaa

SEQ ID NO: 2017657 - DNA, 25 bp, Homo sapien
agtaaaaatcaagagctggcagctc

SEQ ID NO: 2017658 - DNA, 25 bp, Homo sapien
tctctgtagccagtaaaaatcaaga

SEQ ID NO: 2017659 - DNA, 25 bp, Homo sapien
aaagcgacgtctgcctttccagatg

SEQ ID NO: 2017660 - DNA, 25 bp, Homo sapien
tgaactgagatggaaagcgacgtct

SEQ ID NO: 2017661 - DNA, 25 bp, Homo sapien
cccatgatgcttgcattcttgccaa

SEQ ID NO: 2017662 - DNA, 25 bp, Homo sapien
agtgaaaagacgctggataactctc

SEQ ID NO: 2017663 - DNA, 25 bp, Homo sapien
caaacttgacttctttctttggcat

SEQ ID NO: 2017664 - DNA, 25 bp, Homo sapien
acaaacttgacttctttctttggca

SEQ ID NO: 2017665 - DNA, 25 bp, Homo sapien
tgaacaaacttgacttctttctttg

SEQ ID NO: 2017666 - DNA, 25 bp, Homo sapien
ctgaacaaacttgacttctttcttt

SEQ ID NO: 2017667 - DNA, 25 bp, Homo sapien
tcgaacattatagttgtgcccacaa

SEQ ID NO: 2017668 - DNA, 25 bp, Homo sapien
taagatgttatttgatggcccatga

SEQ ID NO: 2017669 - DNA, 25 bp, Homo sapien
cattttctgatgctcgaacattata

SEQ ID NO: 2017670 - DNA, 25 bp, Homo sapien
cccatgatttgagaagcaccagcaa

SEQ ID NO: 2017671 - DNA, 25 bp, Homo sapien
tcttattttgagcttggcaactgaa

SEQ ID NO: 2017672 - DNA, 25 bp, Homo sapien
ttttgagcttggcaactgaaaagtt

SEQ ID NO: 2017673 - DNA, 25 bp, Homo sapien
ctagcatgtttctcttattttgagc

SEQ ID NO: 2017674 - DNA, 25 bp, Homo sapien
gtttctcttattttgagcttggcaa

SEQ ID NO: 2017675 - DNA, 25 bp, Homo sapien
ctcagggagtgataatctgaagcct

SEQ ID NO: 2017676 - DNA, 25 bp, Homo sapien
tgaagcctgtggtaactgtgccact

SEQ ID NO: 2017677 - DNA, 25 bp, Homo sapien
tccttttcgtcacacttgagctggg

SEQ ID NO: 2017678 - DNA, 25 bp, Homo sapien
tgccacttggcatcgaattaatcaa

SEQ ID NO: 2017679 - DNA, 25 bp, Homo sapien
gacatgacgatggttgtatctcagc

SEQ ID NO: 2017680 - DNA, 25 bp, Homo sapien
gatggttgtatctcagctgggttct

SEQ ID NO: 2017681 - DNA, 25 bp, Homo sapien
ccattcttggacatgacgatggttg

SEQ ID NO: 2017682 - DNA, 25 bp, Homo sapien
tgaggatagtatgagagattcctgg

SEQ ID NO: 2017683 - DNA, 25 bp, Homo sapien
tcatctccaagaatgtccatggtca

SEQ ID NO: 2017684 - DNA, 25 bp, Homo sapien
gtcatctccaagaatgtccatggtc

SEQ ID NO: 2017685 - DNA, 25 bp, Homo sapien
agctgcttcctaatgtgatgcccca

SEQ ID NO: 2017686 - DNA, 25 bp, Homo sapien
ccaggtatggagcatgaggttatcc

SEQ ID NO: 2017687 - DNA, 25 bp, Homo sapien
tgtgaccaatgtggtttcaagctgc

SEQ ID NO: 2017688 - DNA, 25 bp, Homo sapien
gctttagtaatgacctcagcactgg

SEQ ID NO: 2017689 - DNA, 25 bp, Homo sapien
ctctgctgtcagtaagaattcaaaa

SEQ ID NO: 2017690 - DNA, 25 bp, Homo sapien
agctcaattttataccatcctccat

SEQ ID NO: 2017691 - DNA, 25 bp, Homo sapien
tggtagcagacctcatggtgtgtgc

SEQ ID NO: 2017692 - DNA, 25 bp, Homo sapien
cagcaggcctttccacaagaattcc

SEQ ID NO: 2017693 - DNA, 25 bp, Homo sapien
tggaaaatcctctatcctcttcttc

SEQ ID NO: 2017694 - DNA, 25 bp, Homo sapien
agaaagaaagaggcattgatgtgga

SEQ ID NO: 2017695 - DNA, 25 bp, Homo sapien
gaggcattgatgtggaaaatcctct

SEQ ID NO: 2017696 - DNA, 25 bp, Homo sapien
aaagaggcattgatgtggaaaatcc

SEQ ID NO: 2017697 - DNA, 25 bp, Homo sapien
ccaccatcctaattcggatgtggat

SEQ ID NO: 2017698 - DNA, 25 bp, Homo sapien
accatcctaattcggatgtggatgc

SEQ ID NO: 2017699 - DNA, 25 bp, Homo sapien
catcctaattcggatgtggatgctt

SEQ ID NO: 2017700 - DNA, 25 bp, Homo sapien
tcctaattcggatgtggatgcttct

SEQ ID NO: 2017701 - DNA, 25 bp, Homo sapien
gaggtcccagggatatcaggctagc

SEQ ID NO: 2017702 - DNA, 25 bp, Homo sapien
gggatatcaggctagctggcactgc

SEQ ID NO: 2017703 - DNA, 25 bp, Homo sapien
ccactgagaataggacgggtgatga

SEQ ID NO: 2017704 - DNA, 25 bp, Homo sapien
tgatgatgggtaggtagctgcccag

SEQ ID NO: 2017705 - DNA, 25 bp, Homo sapien
tttagccacgcaggagaagcggatg

SEQ ID NO: 2017706 - DNA, 25 bp, Homo sapien
gacatagtaattggcagttcccaga

SEQ ID NO: 2017707 - DNA, 25 bp, Homo sapien
gcagaatgatagagcccggtgctta

SEQ ID NO: 2017708 - DNA, 25 bp, Homo sapien
tgcatccaagccacgtggcacagct

SEQ ID NO: 2017709 - DNA, 25 bp, Homo sapien
tatcttgtgcagaaactatcgtctg

SEQ ID NO: 2017710 - DNA, 25 bp, Homo sapien
gaaactatcgtctgtaacaatggtg

SEQ ID NO: 2017711 - DNA, 25 bp, Homo sapien
cgtctgtaacaatggtgtgaacaca

SEQ ID NO: 2017712 - DNA, 25 bp, Homo sapien
cagtaaccgagtatcttgtgcagaa

SEQ ID NO: 2017713 - DNA, 25 bp, Homo sapien
gtgacccaccaagagatcctgtctc

SEQ ID NO: 2017714 - DNA, 25 bp, Homo sapien
gacgctctgctcaataaagctcagg

SEQ ID NO: 2017715 - DNA, 25 bp, Homo sapien
ctgtctcaacctcggagctgacgct

SEQ ID NO: 2017716 - DNA, 25 bp, Homo sapien
tcctctagggttggactgtgaccca

SEQ ID NO: 2017717 - DNA, 25 bp, Homo sapien
gcaacagagatatctggatatccca

SEQ ID NO: 2017718 - DNA, 25 bp, Homo sapien
tcacattacccaacgtaaattcata

SEQ ID NO: 2017719 - DNA, 25 bp, Homo sapien
aaggcaacagagatatctggatatc

SEQ ID NO: 2017720 - DNA, 25 bp, Homo sapien
tatgattaaggttaggaatattttg

SEQ ID NO: 2017721 - DNA, 25 bp, Homo sapien
ttaatccctgtgcatattcttgaaa

SEQ ID NO: 2017722 - DNA, 25 bp, Homo sapien
catattcttgaaagttcccttgagt

SEQ ID NO: 2017723 - DNA, 25 bp, Homo sapien
actagtctctccttctttaatccct

SEQ ID NO: 2017724 - DNA, 25 bp, Homo sapien
ttcttgaaagttcccttgagttcag

SEQ ID NO: 2017725 - DNA, 25 bp, Homo sapien
gaagctctgtaatgggcaataccct

SEQ ID NO: 2017726 - DNA, 25 bp, Homo sapien
gaaagtctgagcaattgacaaagct

SEQ ID NO: 2017727 - DNA, 25 bp, Homo sapien
tctgtcgcatgggaatacatgaagc

SEQ ID NO: 2017728 - DNA, 25 bp, Homo sapien
gccttgtagacttaacttcagatga

SEQ ID NO: 2017729 - DNA, 25 bp, Homo sapien
ctcagtttggagcaaggaaataaac

SEQ ID NO: 2017730 - DNA, 25 bp, Homo sapien
taaactttgcggcactgttaactaa

SEQ ID NO: 2017731 - DNA, 25 bp, Homo sapien
aggaaataaactttgcggcactgtt

SEQ ID NO: 2017732 - DNA, 25 bp, Homo sapien
aagggagctgactcagtttggagca

SEQ ID NO: 2017733 - DNA, 25 bp, Homo sapien
gattaggatccaaattatagccgta

SEQ ID NO: 2017734 - DNA, 25 bp, Homo sapien
ttcctgctgtgatttgagaaggcct

SEQ ID NO: 2017735 - DNA, 25 bp, Homo sapien
ttccaggtattgctaaaaagttgcg

SEQ ID NO: 2017736 - DNA, 25 bp, Homo sapien
gttgcgagctatcatgtaatcaata

SEQ ID NO: 2017737 - DNA, 25 bp, Homo sapien
gccgttggaataatgcaccactaga

SEQ ID NO: 2017738 - DNA, 25 bp, Homo sapien
taatgcaccactagatgcatttttc

SEQ ID NO: 2017739 - DNA, 25 bp, Homo sapien
cgttggaataatgcaccactagatg

SEQ ID NO: 2017740 - DNA, 25 bp, Homo sapien
tggaataatgcaccactagatgcat

SEQ ID NO: 2017741 - DNA, 25 bp, Homo sapien
cacagctgcctcttggatggcccat

SEQ ID NO: 2017742 - DNA, 25 bp, Homo sapien
gatgggtatcggagattaagagaca

SEQ ID NO: 2017743 - DNA, 25 bp, Homo sapien
cattaggtccaactcaatttttggg

SEQ ID NO: 2017744 - DNA, 25 bp, Homo sapien
tatcggagattaagagacaggatgt

SEQ ID NO: 2017745 - DNA, 25 bp, Homo sapien
cacagtaatagcatggtaatacctg

SEQ ID NO: 2017746 - DNA, 25 bp, Homo sapien
gtaatagcatggtaatacctgtaat

SEQ ID NO: 2017747 - DNA, 25 bp, Homo sapien
cagtaatagcatggtaatacctgta

SEQ ID NO: 2017748 - DNA, 25 bp, Homo sapien
acagtaatagcatggtaatacctgt

SEQ ID NO: 2017749 - DNA, 25 bp, Homo sapien
aggtgagggagacttacttgctttt

SEQ ID NO: 2017750 - DNA, 25 bp, Homo sapien
ggaggtgagggagacttacttgctt

SEQ ID NO: 2017751 - DNA, 25 bp, Homo sapien
gaggtgagggagacttacttgcttt

SEQ ID NO: 2017752 - DNA, 25 bp, Homo sapien
ggtgagggagacttacttgcttttc

SEQ ID NO: 2017753 - DNA, 25 bp, Homo sapien
gaaggctgctgagctaacaggtctg

SEQ ID NO: 2017754 - DNA, 25 bp, Homo sapien
aaggtctggaatactggaatactgg

SEQ ID NO: 2017755 - DNA, 25 bp, Homo sapien
agaagatgggacattactctccgca

SEQ ID NO: 2017756 - DNA, 25 bp, Homo sapien
gccgtggaacattgtaccaggaaga

SEQ ID NO: 2017757 - DNA, 25 bp, Homo sapien
cacaggcactgcaaacacatcctta

SEQ ID NO: 2017758 - DNA, 25 bp, Homo sapien
caaacacatccttatgggcagagaa

SEQ ID NO: 2017759 - DNA, 25 bp, Homo sapien
ggcactgcaaacacatccttatggg

SEQ ID NO: 2017760 - DNA, 25 bp, Homo sapien
tgcaaacacatccttatgggcagag

SEQ ID NO: 2017761 - DNA, 25 bp, Homo sapien
tgggaaatccagtactcactgccct

SEQ ID NO: 2017762 - DNA, 25 bp, Homo sapien
ctttctgctagaacgatgccgaagc

SEQ ID NO: 2017763 - DNA, 25 bp, Homo sapien
ctgtggcgtaaaactccggcagctg

SEQ ID NO: 2017764 - DNA, 25 bp, Homo sapien
tttgtatcctcaggcgttccccttg

SEQ ID NO: 2017765 - DNA, 25 bp, Homo sapien
ttcttgtctcccactccggatctgt

SEQ ID NO: 2017766 - DNA, 25 bp, Homo sapien
ttcttcttgtctcccactccggatc

SEQ ID NO: 2017767 - DNA, 25 bp, Homo sapien
ctgtttccccttcctaggacagcgt

SEQ ID NO: 2017768 - DNA, 25 bp, Homo sapien
ttgtctcccactccggatctgtttc

SEQ ID NO: 2017769 - DNA, 25 bp, Homo sapien
tcacccactcccgaaagtcactgtt

SEQ ID NO: 2017770 - DNA, 25 bp, Homo sapien
tttcacccactcccgaaagtcactg

SEQ ID NO: 2017771 - DNA, 25 bp, Homo sapien
ttcacccactcccgaaagtcactgt

SEQ ID NO: 2017772 - DNA, 25 bp, Homo sapien
cacccactcccgaaagtcactgttt

SEQ ID NO: 2017773 - DNA, 25 bp, Homo sapien
ggctgaggaactcgtaaggaagctg

SEQ ID NO: 2017774 - DNA, 25 bp, Homo sapien
gctgaggaactcgtaaggaagctgt

SEQ ID NO: 2017775 - DNA, 25 bp, Homo sapien
agccaggtatggtgcccagtcattt

SEQ ID NO: 2017776 - DNA, 25 bp, Homo sapien
aggctgaggaactcgtaaggaagct

SEQ ID NO: 2017777 - DNA, 25 bp, Homo sapien
cacatcttatgaagaactaatgaag

SEQ ID NO: 2017778 - DNA, 25 bp, Homo sapien
ggattcagtggctgtctggattccc

SEQ ID NO: 2017779 - DNA, 25 bp, Homo sapien
ggattcccttgtatcagcattcact

SEQ ID NO: 2017780 - DNA, 25 bp, Homo sapien
gaactaatgaagctcttccagactt

SEQ ID NO: 2017781 - DNA, 25 bp, Homo sapien
gcatatcttgaaagccagccttcag

SEQ ID NO: 2017782 - DNA, 25 bp, Homo sapien
tgctcctcgtggcactgcttgaaag

SEQ ID NO: 2017783 - DNA, 25 bp, Homo sapien
gatgctccatatggcagaggccctg

SEQ ID NO: 2017784 - DNA, 25 bp, Homo sapien
aatggaggcactttaaccaccggtg

SEQ ID NO: 2017785 - DNA, 25 bp, Homo sapien
gcaggaaagatttggtccaggtcct

SEQ ID NO: 2017786 - DNA, 25 bp, Homo sapien
gatttggtccaggtcctccaaagtg

SEQ ID NO: 2017787 - DNA, 25 bp, Homo sapien
ggtccaggtcctccaaagtgcaatt

SEQ ID NO: 2017788 - DNA, 25 bp, Homo sapien
ggtcctccaaagtgcaattcctatt

SEQ ID NO: 2017789 - DNA, 25 bp, Homo sapien
gcactagtgacggtgaactgcccaa

SEQ ID NO: 2017790 - DNA, 25 bp, Homo sapien
ctgcactagtgacggtgaactgccc

SEQ ID NO: 2017791 - DNA, 25 bp, Homo sapien
cactagtgacggtgaactgcccaaa

SEQ ID NO: 2017792 - DNA, 25 bp, Homo sapien
tagtgacggtgaactgcccaaaggg

SEQ ID NO: 2017793 - DNA, 25 bp, Homo sapien
cacagttcggtgtgcggctggctct

SEQ ID NO: 2017794 - DNA, 25 bp, Homo sapien
tcacaaatgactcttgaccgacaag

SEQ ID NO: 2017795 - DNA, 25 bp, Homo sapien
cagcgcctccgcgtttgatgcggga

SEQ ID NO: 2017796 - DNA, 25 bp, Homo sapien
tggcattacagcgtttcttcacaaa

SEQ ID NO: 2017797 - DNA, 25 bp, Homo sapien
gaacgttgctgaggagattgccaca

SEQ ID NO: 2017798 - DNA, 25 bp, Homo sapien
tccaagcttccgaagggccatggct

SEQ ID NO: 2017799 - DNA, 25 bp, Homo sapien
taggatgggttttgccaatcggaac

SEQ ID NO: 2017800 - DNA, 25 bp, Homo sapien
ggctcaggctgcttgtattcgtaga

SEQ ID NO: 2017801 - DNA, 25 bp, Homo sapien
gtcttcaggtgagccttcggctggc

SEQ ID NO: 2017802 - DNA, 25 bp, Homo sapien
cttcggctggctggacccgaatgac

SEQ ID NO: 2017803 - DNA, 25 bp, Homo sapien
cttcaggtgagccttcggctggctg

SEQ ID NO: 2017804 - DNA, 25 bp, Homo sapien
cggctggctggacccgaatgacacc

SEQ ID NO: 2017805 - DNA, 25 bp, Homo sapien
gccagatgtggtagagtccttcact

SEQ ID NO: 2017806 - DNA, 25 bp, Homo sapien
gacttgaagacagaggtggaaagaa

SEQ ID NO: 2017807 - DNA, 25 bp, Homo sapien
agtgcagacacctcagccacatagc

SEQ ID NO: 2017808 - DNA, 25 bp, Homo sapien
ggtggctattcgcatgcataatccc

SEQ ID NO: 2017809 - DNA, 25 bp, Homo sapien
tggtggctattcgcatgcataatcc

SEQ ID NO: 2017810 - DNA, 25 bp, Homo sapien
tgcagacacctcagccacatagctc

SEQ ID NO: 2017811 - DNA, 25 bp, Homo sapien
aatccaaaagatcagttagattttt

SEQ ID NO: 2017812 - DNA, 25 bp, Homo sapien
ataaacgtgacctcatattcagagt

SEQ ID NO: 2017813 - DNA, 25 bp, Homo sapien
tataaacgtgacctcatattcagag

SEQ ID NO: 2017814 - DNA, 25 bp, Homo sapien
ttttataaacgtgacctcatattca

SEQ ID NO: 2017815 - DNA, 25 bp, Homo sapien
aagacgatgatggaaagggcgagcc

SEQ ID NO: 2017816 - DNA, 25 bp, Homo sapien
cagggtagaaagacgatgatggaaa

SEQ ID NO: 2017817 - DNA, 25 bp, Homo sapien
tggaaagggcgagccagtcctgccc

SEQ ID NO: 2017818 - DNA, 25 bp, Homo sapien
agcagggtagaaagacgatgatgga

SEQ ID NO: 2017819 - DNA, 25 bp, Homo sapien
caggacttgaagatcattacaggta

SEQ ID NO: 2017820 - DNA, 25 bp, Homo sapien
taaggctgtgtagaagtcaccagga

SEQ ID NO: 2017821 - DNA, 25 bp, Homo sapien
tgagctcaaaaccttcggtctgaac

SEQ ID NO: 2017822 - DNA, 25 bp, Homo sapien
tagttgtgcgacacacaggtgcatg

SEQ ID NO: 2017823 - DNA, 25 bp, Homo sapien
attaaagggagcctgtcctgaaaat

SEQ ID NO: 2017824 - DNA, 25 bp, Homo sapien
tgattaaagggagcctgtcctgaaa

SEQ ID NO: 2017825 - DNA, 25 bp, Homo sapien
aaagggagcctgtcctgaaaataag

SEQ ID NO: 2017826 - DNA, 25 bp, Homo sapien
ctgttgattaaagggagcctgtcct

SEQ ID NO: 2017827 - DNA, 25 bp, Homo sapien
cattacccatgatggtgttttctga

SEQ ID NO: 2017828 - DNA, 25 bp, Homo sapien
tatgatgtcagccttacatgactca

SEQ ID NO: 2017829 - DNA, 25 bp, Homo sapien
accacctcaggaacattacccatga

SEQ ID NO: 2017830 - DNA, 25 bp, Homo sapien
gtctggcagacctgccgcctgagct

SEQ ID NO: 2017831 - DNA, 25 bp, Homo sapien
ggtgaaggcatgagtccttctggac

SEQ ID NO: 2017832 - DNA, 25 bp, Homo sapien
tgaaggcatgagtccttctggacac

SEQ ID NO: 2017833 - DNA, 25 bp, Homo sapien
aaggcatgagtccttctggacacat

SEQ ID NO: 2017834 - DNA, 25 bp, Homo sapien
tgaaggtgaaggcatgagtccttct

SEQ ID NO: 2017835 - DNA, 25 bp, Homo sapien
gacagcctgattgctgcttcccaac

SEQ ID NO: 2017836 - DNA, 25 bp, Homo sapien
gggctgtccatcttcatgaggtcag

SEQ ID NO: 2017837 - DNA, 25 bp, Homo sapien
gctgtccatcttcatgaggtcagtg

SEQ ID NO: 2017838 - DNA, 25 bp, Homo sapien
gaggtcagtgacagcctgattgctg

SEQ ID NO: 2017839 - DNA, 25 bp, Homo sapien
ccagggcagtttgtgttgaggcatc

SEQ ID NO: 2017840 - DNA, 25 bp, Homo sapien
accatccagggcagtttgtgttgag

SEQ ID NO: 2017841 - DNA, 25 bp, Homo sapien
ctggcaccatccagggcagtttgtg

SEQ ID NO: 2017842 - DNA, 25 bp, Homo sapien
ttgaggcatcaggtgacaatgcttc

SEQ ID NO: 2017843 - DNA, 25 bp, Homo sapien
gcacttcaagcacgtttcgttccat

SEQ ID NO: 2017844 - DNA, 25 bp, Homo sapien
ctgtggccagcacttcaagcacgtt

SEQ ID NO: 2017845 - DNA, 25 bp, Homo sapien
caagcacgtttcgttccattgctgt

SEQ ID NO: 2017846 - DNA, 25 bp, Homo sapien
ttccattgctgtcttgcttgtctgc

SEQ ID NO: 2017847 - DNA, 25 bp, Homo sapien
tcctcatgtggctccataaaccagg

SEQ ID NO: 2017848 - DNA, 25 bp, Homo sapien
agggtgtctttgtccagaaatttga

SEQ ID NO: 2017849 - DNA, 25 bp, Homo sapien
tctgtgggcactgcattgacagaca

SEQ ID NO: 2017850 - DNA, 25 bp, Homo sapien
cgatttgtcttgggtgagcttcact

SEQ ID NO: 2017851 - DNA, 25 bp, Homo sapien
aacactgggcagtagttggtgctca

SEQ ID NO: 2017852 - DNA, 25 bp, Homo sapien
taagtgacccagacttgatggtctg

SEQ ID NO: 2017853 - DNA, 25 bp, Homo sapien
ggtctagtgcacgatcaccgctttg

SEQ ID NO: 2017854 - DNA, 25 bp, Homo sapien
tccatgatgggagaagaatccttcc

SEQ ID NO: 2017855 - DNA, 25 bp, Homo sapien
tcaaattgtgattcccggtgctggg

SEQ ID NO: 2017856 - DNA, 25 bp, Homo sapien
tcccttgagatacgagtgtttaaaa

SEQ ID NO: 2017857 - DNA, 25 bp, Homo sapien
tgcttgctgttcttgcggtaaatgt

SEQ ID NO: 2017858 - DNA, 25 bp, Homo sapien
gtttagcaaccatccctggtgcttg

SEQ ID NO: 2017859 - DNA, 25 bp, Homo sapien
agtaaatactagagctcacagcagc

SEQ ID NO: 2017860 - DNA, 25 bp, Homo sapien
gcagaaaattttcggaatccatcca

SEQ ID NO: 2017861 - DNA, 25 bp, Homo sapien
gtcctaaaagcagtaggaagctggc

SEQ ID NO: 2017862 - DNA, 25 bp, Homo sapien
gctggcctctgatcagcagaaaatt

SEQ ID NO: 2017863 - DNA, 25 bp, Homo sapien
tcaggtggcttctgcaccagctggg

SEQ ID NO: 2017864 - DNA, 25 bp, Homo sapien
caccagctggggctcctggaactga

SEQ ID NO: 2017865 - DNA, 25 bp, Homo sapien
ctgcaccagctggggctcctggaac

SEQ ID NO: 2017866 - DNA, 25 bp, Homo sapien
accagctggggctcctggaactgac

SEQ ID NO: 2017867 - DNA, 25 bp, Homo sapien
cagaggttcacgctttttccaaaag

SEQ ID NO: 2017868 - DNA, 25 bp, Homo sapien
ccaaaagcaacttcccaagtattgc

SEQ ID NO: 2017869 - DNA, 25 bp, Homo sapien
aatttatagctgacagaggcctcca

SEQ ID NO: 2017870 - DNA, 25 bp, Homo sapien
tgtagcccactggatgggaagagcc

SEQ ID NO: 2017871 - DNA, 25 bp, Homo sapien
taagcctacaagatcggcactgccg

SEQ ID NO: 2017872 - DNA, 25 bp, Homo sapien
tgattcagggaactctctagtgact

SEQ ID NO: 2017873 - DNA, 25 bp, Homo sapien
gatgttgaaagctttaggtgcaccc

SEQ ID NO: 2017874 - DNA, 25 bp, Homo sapien
gcactgccgctccagatgagaaggc

SEQ ID NO: 2017875 - DNA, 25 bp, Homo sapien
ggtagcaaccatggcctgataaggg

SEQ ID NO: 2017876 - DNA, 25 bp, Homo sapien
tacaaaggaagtaacgcagtctgcc

SEQ ID NO: 2017877 - DNA, 25 bp, Homo sapien
gataagggctcagcaaccaagcact

SEQ ID NO: 2017878 - DNA, 25 bp, Homo sapien
tctggatctgagtaggacacgctgt

SEQ ID NO: 2017879 - DNA, 25 bp, Homo sapien
ccaatagcccagtatccaagccctg

SEQ ID NO: 2017880 - DNA, 25 bp, Homo sapien
gcccagtatccaagccctgcatcca

SEQ ID NO: 2017881 - DNA, 25 bp, Homo sapien
tgccaatagcccagtatccaagccc

SEQ ID NO: 2017882 - DNA, 25 bp, Homo sapien
gccaatagcccagtatccaagccct

SEQ ID NO: 2017883 - DNA, 25 bp, Homo sapien
gcaggacattacttgaggcaggtgt

SEQ ID NO: 2017884 - DNA, 25 bp, Homo sapien
ttgccgtccttaagatcggctctac

SEQ ID NO: 2017885 - DNA, 25 bp, Homo sapien
ggagaccttgcaggacattacttga

SEQ ID NO: 2017886 - DNA, 25 bp, Homo sapien
gggcttgccgtccttaagatcggct

SEQ ID NO: 2017887 - DNA, 25 bp, Homo sapien
cagtctccagtccaggatgctcagc

SEQ ID NO: 2017888 - DNA, 25 bp, Homo sapien
aggagacctggtattgcttgtagag

SEQ ID NO: 2017889 - DNA, 25 bp, Homo sapien
agttcagtggctacaggattcctta

SEQ ID NO: 2017890 - DNA, 25 bp, Homo sapien
gattctccaggctgcaaagagcgtg

SEQ ID NO: 2017891 - DNA, 25 bp, Homo sapien
catttgcagggctagcatgaacgat

SEQ ID NO: 2017892 - DNA, 25 bp, Homo sapien
tctgggatgctctgcgttaggactt

SEQ ID NO: 2017893 - DNA, 25 bp, Homo sapien
cacgattggctgtggaatagcagca

SEQ ID NO: 2017894 - DNA, 25 bp, Homo sapien
taggacttctaagcagaacgcagcc

SEQ ID NO: 2017895 - DNA, 25 bp, Homo sapien
cttctgttgtcttagacacttgatc

SEQ ID NO: 2017896 - DNA, 25 bp, Homo sapien
catgtcccttgataactgagttctt

SEQ ID NO: 2017897 - DNA, 25 bp, Homo sapien
tgataactgagttcttcttccccaa

SEQ ID NO: 2017898 - DNA, 25 bp, Homo sapien
ttgatcacaaaacaggaagcctgag

SEQ ID NO: 2017899 - DNA, 25 bp, Homo sapien
tggtctgacccgctgatgagagcca

SEQ ID NO: 2017900 - DNA, 25 bp, Homo sapien
tctatgtactgctgaggtcattgcg

SEQ ID NO: 2017901 - DNA, 25 bp, Homo sapien
catttttgccgacgctgggaggtgc

SEQ ID NO: 2017902 - DNA, 25 bp, Homo sapien
tactttgtaacagcactcaggatcc

SEQ ID NO: 2017903 - DNA, 25 bp, Homo sapien
tactttcaaccaggagaggagcttg

SEQ ID NO: 2017904 - DNA, 25 bp, Homo sapien
tctcgacatatgcaaaccctggtaa

SEQ ID NO: 2017905 - DNA, 25 bp, Homo sapien
attgggccctcctgtaactgcacgg

SEQ ID NO: 2017906 - DNA, 25 bp, Homo sapien
tgtcccaacgacctcacaatggctg

SEQ ID NO: 2017907 - DNA, 25 bp, Homo sapien
agcagccatacttcagagtggaaaa

SEQ ID NO: 2017908 - DNA, 25 bp, Homo sapien
cagccatacttcagagtggaaaaag

SEQ ID NO: 2017909 - DNA, 25 bp, Homo sapien
gcagccatacttcagagtggaaaaa

SEQ ID NO: 2017910 - DNA, 25 bp, Homo sapien
tgggatttcccatgggtgagtcttt

SEQ ID NO: 2017911 - DNA, 25 bp, Homo sapien
ctggccagaggtagctccaccagaa

SEQ ID NO: 2017912 - DNA, 25 bp, Homo sapien
tcctctgtaattaatgcattatggg

SEQ ID NO: 2017913 - DNA, 25 bp, Homo sapien
cttgccccggtcaacagctctaggg

SEQ ID NO: 2017914 - DNA, 25 bp, Homo sapien
tttgtttttgcctctgacctttggc

SEQ ID NO: 2017915 - DNA, 25 bp, Homo sapien
cctaacttgggctgtgtttgtgctt

SEQ ID NO: 2017916 - DNA, 25 bp, Homo sapien
taacttgggctgtgtttgtgctttt

SEQ ID NO: 2017917 - DNA, 25 bp, Homo sapien
ctcctaacttgggctgtgtttgtgc

SEQ ID NO: 2017918 - DNA, 25 bp, Homo sapien
gcagccccacatgacttctttcagg

SEQ ID NO: 2017919 - DNA, 25 bp, Homo sapien
attagcaacatggtcttttccttgt

SEQ ID NO: 2017920 - DNA, 25 bp, Homo sapien
gccccacatgacttctttcaggtgc

SEQ ID NO: 2017921 - DNA, 25 bp, Homo sapien
atacagcagccccacatgacttctt

SEQ ID NO: 2017922 - DNA, 25 bp, Homo sapien
taagcaggtgaaatccagtgtctgg

SEQ ID NO: 2017923 - DNA, 25 bp, Homo sapien
aagggttgctaagaggcaggcctct

SEQ ID NO: 2017924 - DNA, 25 bp, Homo sapien
caatgatgaccagtgcatatgagcc

SEQ ID NO: 2017925 - DNA, 25 bp, Homo sapien
cagtgtctgggagcatttgggcaat

SEQ ID NO: 2017926 - DNA, 25 bp, Homo sapien
tactggcctcgtccactgtggctct

SEQ ID NO: 2017927 - DNA, 25 bp, Homo sapien
gctgcctgcaatgcccagtctggcg

SEQ ID NO: 2017928 - DNA, 25 bp, Homo sapien
tgagaagggctcgttactggcctcg

SEQ ID NO: 2017929 - DNA, 25 bp, Homo sapien
cttggcgcttggcagagtttgtgct

SEQ ID NO: 2017930 - DNA, 25 bp, Homo sapien
ggcaccactgtatcagtgctcattt

SEQ ID NO: 2017931 - DNA, 25 bp, Homo sapien
tcagtgctcattttgctgcttgggc

SEQ ID NO: 2017932 - DNA, 25 bp, Homo sapien
gtgggccctggtaagcggacattcc

SEQ ID NO: 2017933 - DNA, 25 bp, Homo sapien
agtatctctcgctgccctgggtggg

SEQ ID NO: 2017934 - DNA, 25 bp, Homo sapien
acacctgcaagaagctggttactgt

SEQ ID NO: 2017935 - DNA, 25 bp, Homo sapien
gggtgaagagcatttgccactctat

SEQ ID NO: 2017936 - DNA, 25 bp, Homo sapien
aaagcaagatgtgtgcaggtcaggt

SEQ ID NO: 2017937 - DNA, 25 bp, Homo sapien
caagaagctggttactgtagtaacg

SEQ ID NO: 2017938 - DNA, 25 bp, Homo sapien
tcacaggacaaagggacaaatcgca

SEQ ID NO: 2017939 - DNA, 25 bp, Homo sapien
tttttgggcgttgaaaggcaccagc

SEQ ID NO: 2017940 - DNA, 25 bp, Homo sapien
gaacggcatcaaaggtgctctgtca

SEQ ID NO: 2017941 - DNA, 25 bp, Homo sapien
tgctgatggcagcagcgtctactcc

SEQ ID NO: 2017942 - DNA, 25 bp, Homo sapien
tgccaggacccagatatgctcattt

SEQ ID NO: 2017943 - DNA, 25 bp, Homo sapien
gatctgctacacttctagaatgcca

SEQ ID NO: 2017944 - DNA, 25 bp, Homo sapien
tatgagtgagactcaggtcctgcca

SEQ ID NO: 2017945 - DNA, 25 bp, Homo sapien
gaaaaggccccgaaaatatgagtga

SEQ ID NO: 2017946 - DNA, 25 bp, Homo sapien
ctccccaacatttccgtgtgagaac

SEQ ID NO: 2017947 - DNA, 25 bp, Homo sapien
caacatttccgtgtgagaactggcc

SEQ ID NO: 2017948 - DNA, 25 bp, Homo sapien
cccaacatttccgtgtgagaactgg

SEQ ID NO: 2017949 - DNA, 25 bp, Homo sapien
acatttccgtgtgagaactggccat

SEQ ID NO: 2017950 - DNA, 25 bp, Homo sapien
gtgttgctactgatgcactcttcat

SEQ ID NO: 2017951 - DNA, 25 bp, Homo sapien
gagaccacttctcaatcaatctcat

SEQ ID NO: 2017952 - DNA, 25 bp, Homo sapien
tatttgatcgctgttctgagaccac

SEQ ID NO: 2017953 - DNA, 25 bp, Homo sapien
gtttggctatttgatcgctgttctg

SEQ ID NO: 2017954 - DNA, 25 bp, Homo sapien
ggggggcggtggtgtgggcagaagc

SEQ ID NO: 2017955 - DNA, 25 bp, Homo sapien
ctgcaggggcggggggcggtggtgt

SEQ ID NO: 2017956 - DNA, 25 bp, Homo sapien
tgcaggggcggggggcggtggtgtg

SEQ ID NO: 2017957 - DNA, 25 bp, Homo sapien
ggcggggggcggtggtgtgggcaga

SEQ ID NO: 2017958 - DNA, 25 bp, Homo sapien
cagcggttggataggaggcacctca

SEQ ID NO: 2017959 - DNA, 25 bp, Homo sapien
tggtttttctgatgtcttagttctg

SEQ ID NO: 2017960 - DNA, 25 bp, Homo sapien
ggtaattttgacagcggttggatag

SEQ ID NO: 2017961 - DNA, 25 bp, Homo sapien
ggtttttctgatgtcttagttctga

SEQ ID NO: 2017962 - DNA, 25 bp, Homo sapien
ggattgggctacagattctaaacca

SEQ ID NO: 2017963 - DNA, 25 bp, Homo sapien
ggcctggtgggttagtgtgggctgc

SEQ ID NO: 2017964 - DNA, 25 bp, Homo sapien
tgggtctgggcctggtgggttagtg

SEQ ID NO: 2017965 - DNA, 25 bp, Homo sapien
gtgaggattgggctacagattctaa

SEQ ID NO: 2017966 - DNA, 25 bp, Homo sapien
tcatagggtgttgacgttttctcta

SEQ ID NO: 2017967 - DNA, 25 bp, Homo sapien
atccttctcatagggtgttgacgtt

SEQ ID NO: 2017968 - DNA, 25 bp, Homo sapien
ttctctaaatccttcttactcaaag

SEQ ID NO: 2017969 - DNA, 25 bp, Homo sapien
gtgaaaccaaaggcacatccttctc

SEQ ID NO: 2017970 - DNA, 25 bp, Homo sapien
tccaccctgctatccgtgacatcat

SEQ ID NO: 2017971 - DNA, 25 bp, Homo sapien
accctgctatccgtgacatcatcag

SEQ ID NO: 2017972 - DNA, 25 bp, Homo sapien
gcgcctccaccctgctatccgtgac

SEQ ID NO: 2017973 - DNA, 25 bp, Homo sapien
ctgctatccgtgacatcatcagctc

SEQ ID NO: 2017974 - DNA, 25 bp, Homo sapien
gcattttctgccatatgcaggcagc

SEQ ID NO: 2017975 - DNA, 25 bp, Homo sapien
agccctgaaccctgagatctgctga

SEQ ID NO: 2017976 - DNA, 25 bp, Homo sapien
ttctgccatatgcaggcagcagtag

SEQ ID NO: 2017977 - DNA, 25 bp, Homo sapien
gccatatgcaggcagcagtagcctt

SEQ ID NO: 2017978 - DNA, 25 bp, Homo sapien
tgagcacagacaccctcgcagtgcc

SEQ ID NO: 2017979 - DNA, 25 bp, Homo sapien
agcacagacaccctcgcagtgcctt

SEQ ID NO: 2017980 - DNA, 25 bp, Homo sapien
cagacaccctcgcagtgccttcatt

SEQ ID NO: 2017981 - DNA, 25 bp, Homo sapien
gacaccctcgcagtgccttcatttt

SEQ ID NO: 2017982 - DNA, 25 bp, Homo sapien
gaccctgggtacagttcaatcctta

SEQ ID NO: 2017983 - DNA, 25 bp, Homo sapien
ttgttctgaccctgggtacagttca

SEQ ID NO: 2017984 - DNA, 25 bp, Homo sapien
cccgaggatggagccaccttgctct

SEQ ID NO: 2017985 - DNA, 25 bp, Homo sapien
ttcaatccttactgaggaagggtgg

SEQ ID NO: 2017986 - DNA, 25 bp, Homo sapien
ttggactgctgaattcgtcccccct

SEQ ID NO: 2017987 - DNA, 25 bp, Homo sapien
caacttggctttcagccttgccaag

SEQ ID NO: 2017988 - DNA, 25 bp, Homo sapien
tgctgaattcgtccccccttgggtg

SEQ ID NO: 2017989 - DNA, 25 bp, Homo sapien
gcaacttggctttcagccttgccaa

SEQ ID NO: 2017990 - DNA, 25 bp, Homo sapien
gaggaaattgatgggaatacactcc

SEQ ID NO: 2017991 - DNA, 25 bp, Homo sapien
aaattgatgggaatacactcctggg

SEQ ID NO: 2017992 - DNA, 25 bp, Homo sapien
cagaggaaattgatgggaatacact

SEQ ID NO: 2017993 - DNA, 25 bp, Homo sapien
ggaaattgatgggaatacactcctg

SEQ ID NO: 2017994 - DNA, 25 bp, Homo sapien
ccacaaacggatcatcaggacttca

SEQ ID NO: 2017995 - DNA, 25 bp, Homo sapien
ccatgggtgagggtttcagacgtcc

SEQ ID NO: 2017996 - DNA, 25 bp, Homo sapien
tgctcctgtgcacgtttcccatggg

SEQ ID NO: 2017997 - DNA, 25 bp, Homo sapien
caggtcctccagatgggtgctgagc

SEQ ID NO: 2017998 - DNA, 25 bp, Homo sapien
gggcttatcgtcctgtggctggtca

SEQ ID NO: 2017999 - DNA, 25 bp, Homo sapien
cctgtgggccccgtgaattggtaga

SEQ ID NO: 2018000 - DNA, 25 bp, Homo sapien
tagaaagggcacagtctggtggccg

SEQ ID NO: 2018001 - DNA, 25 bp, Homo sapien
tgttacacgcttcatgggggcttga

SEQ ID NO: 2018002 - DNA, 25 bp, Homo sapien
tccttctccggaggcatgagcaggg

SEQ ID NO: 2018003 - DNA, 25 bp, Homo sapien
tagtgcagtaaagaggtatttaaaa

SEQ ID NO: 2018004 - DNA, 25 bp, Homo sapien
ggcaggcaagtcctttagtgcagta

SEQ ID NO: 2018005 - DNA, 25 bp, Homo sapien
gaaatgtctggcaggcaagtccttt

SEQ ID NO: 2018006 - DNA, 25 bp, Homo sapien
tgtctggcaggcaagtcctttagtg

SEQ ID NO: 2018007 - DNA, 25 bp, Homo sapien
ttggagaggtgacaacgcttcccac

SEQ ID NO: 2018008 - DNA, 25 bp, Homo sapien
tcagcccatggagccggctggtttc

SEQ ID NO: 2018009 - DNA, 25 bp, Homo sapien
tgtgttctgcgtccaaatggttcca

SEQ ID NO: 2018010 - DNA, 25 bp, Homo sapien
ggctgcacagccctccaaaggatgc

SEQ ID NO: 2018011 - DNA, 25 bp, Homo sapien
attttagcaagacagccagggcccc

SEQ ID NO: 2018012 - DNA, 25 bp, Homo sapien
ttttagcaagacagccagggcccct

SEQ ID NO: 2018013 - DNA, 25 bp, Homo sapien
gttggcggcggtgctactgaagaga

SEQ ID NO: 2018014 - DNA, 25 bp, Homo sapien
atggactggaagttggcggcggtgc

SEQ ID NO: 2018015 - DNA, 25 bp, Homo sapien
actggagctcttgttggtgctatct

SEQ ID NO: 2018016 - DNA, 25 bp, Homo sapien
ctggagctcttgttggtgctatctg

SEQ ID NO: 2018017 - DNA, 25 bp, Homo sapien
gctctcagcactgccgcgtggggac

SEQ ID NO: 2018018 - DNA, 25 bp, Homo sapien
ctcagcactgccgcgtggggactca

SEQ ID NO: 2018019 - DNA, 25 bp, Homo sapien
gcactgccgcgtggggactcagcac

SEQ ID NO: 2018020 - DNA, 25 bp, Homo sapien
cagcactgccgcgtggggactcagc

SEQ ID NO: 2018021 - DNA, 25 bp, Homo sapien
tgatacagttaggtggtaccacgtg

SEQ ID NO: 2018022 - DNA, 25 bp, Homo sapien
tgtgctacttcccagtgaactggag

SEQ ID NO: 2018023 - DNA, 25 bp, Homo sapien
tgaactggaggctgtcctgagaagc

SEQ ID NO: 2018024 - DNA, 25 bp, Homo sapien
taccacgtggtgtgttcgctgggaa

SEQ ID NO: 2018025 - DNA, 25 bp, Homo sapien
caaaggcgctgatggtgctcaatgc

SEQ ID NO: 2018026 - DNA, 25 bp, Homo sapien
tacacagaagtgagacgagtcaggg

SEQ ID NO: 2018027 - DNA, 25 bp, Homo sapien
tggaggacccaggataaacatggac

SEQ ID NO: 2018028 - DNA, 25 bp, Homo sapien
tcagtagtagagctgtgaccagaag

SEQ ID NO: 2018029 - DNA, 25 bp, Homo sapien
aggctttgccagtaagagccaagaa

SEQ ID NO: 2018030 - DNA, 25 bp, Homo sapien
gctttgccagtaagagccaagaagg

SEQ ID NO: 2018031 - DNA, 25 bp, Homo sapien
agagccaagaaggtgcatgcttcat

SEQ ID NO: 2018032 - DNA, 25 bp, Homo sapien
gcatgcttcatggagagctttcccc

SEQ ID NO: 2018033 - DNA, 25 bp, Homo sapien
cacagataggacacatgctgccgtg

SEQ ID NO: 2018034 - DNA, 25 bp, Homo sapien
caacacggaagctcttgcaagtgcc

SEQ ID NO: 2018035 - DNA, 25 bp, Homo sapien
gaagctcttgcaagtgcctcacaga

SEQ ID NO: 2018036 - DNA, 25 bp, Homo sapien
aggcatgggcaacacggaagctctt

SEQ ID NO: 2018037 - DNA, 25 bp, Homo sapien
tgcgccgtgcttgtaaatcccagag

SEQ ID NO: 2018038 - DNA, 25 bp, Homo sapien
tacactacctgccaatgtttagatg

SEQ ID NO: 2018039 - DNA, 25 bp, Homo sapien
tgtggtgctattgaaaatatgcgcc

SEQ ID NO: 2018040 - DNA, 25 bp, Homo sapien
tattgaaaatatgcgccgtgcttgt

SEQ ID NO: 2018041 - DNA, 25 bp, Homo sapien
gtgaggtcattagaacagtgtttac

SEQ ID NO: 2018042 - DNA, 25 bp, Homo sapien
tcctagcatggctcctggcatagag

SEQ ID NO: 2018043 - DNA, 25 bp, Homo sapien
gatgtcctcactggacctactggag

SEQ ID NO: 2018044 - DNA, 25 bp, Homo sapien
atagcatgtctttgcatgattgttg

SEQ ID NO: 2018045 - DNA, 25 bp, Homo sapien
gagcacctgcttccctgcgtcttta

SEQ ID NO: 2018046 - DNA, 25 bp, Homo sapien
tgtgtgcttggatcattaagtcttg

SEQ ID NO: 2018047 - DNA, 25 bp, Homo sapien
ttgctccatgttctagtgccccggg

SEQ ID NO: 2018048 - DNA, 25 bp, Homo sapien
tgcttccctgcgtctttagctctca

SEQ ID NO: 2018049 - DNA, 25 bp, Homo sapien
gctggctctgtgacaagatgggatc

SEQ ID NO: 2018050 - DNA, 25 bp, Homo sapien
ggctggctctgtgacaagatgggat

SEQ ID NO: 2018051 - DNA, 25 bp, Homo sapien
aggctggctctgtgacaagatggga

SEQ ID NO: 2018052 - DNA, 25 bp, Homo sapien
tgaaagtcaggtaggaacctgttgg

SEQ ID NO: 2018053 - DNA, 25 bp, Homo sapien
aaagtcaggtaggaacctgttggag

SEQ ID NO: 2018054 - DNA, 25 bp, Homo sapien
gaaagtcaggtaggaacctgttgga

SEQ ID NO: 2018055 - DNA, 25 bp, Homo sapien
cttgaaagtcaggtaggaacctgtt

SEQ ID NO: 2018056 - DNA, 25 bp, Homo sapien
tgaagggcactgttagtccactttg

SEQ ID NO: 2018057 - DNA, 25 bp, Homo sapien
tttgctcctgctttcaaagaagcca

SEQ ID NO: 2018058 - DNA, 25 bp, Homo sapien
gaggtgaagggcactgttagtccac

SEQ ID NO: 2018059 - DNA, 25 bp, Homo sapien
gggcactgttagtccactttgtggg

SEQ ID NO: 2018060 - DNA, 25 bp, Homo sapien
ggtccaggtagaaattagagcatag

SEQ ID NO: 2018061 - DNA, 25 bp, Homo sapien
ccacacagaaccacagtagcaaggg

SEQ ID NO: 2018062 - DNA, 25 bp, Homo sapien
ggccccatcaggaccttctcggtga

SEQ ID NO: 2018063 - DNA, 25 bp, Homo sapien
aggtagaaattagagcataggtggc

SEQ ID NO: 2018064 - DNA, 25 bp, Homo sapien
tcttgatctatgctgtggatacacc

SEQ ID NO: 2018065 - DNA, 25 bp, Homo sapien
gatctatgctgtggatacacctgga

SEQ ID NO: 2018066 - DNA, 25 bp, Homo sapien
cttgctcttgatctatgctgtggat

SEQ ID NO: 2018067 - DNA, 25 bp, Homo sapien
tgctcttgatctatgctgtggatac

SEQ ID NO: 2018068 - DNA, 25 bp, Homo sapien
ccactgggcagtgagtgtcatggct

SEQ ID NO: 2018069 - DNA, 25 bp, Homo sapien
gcagtgagtgtcatggctacccatc

SEQ ID NO: 2018070 - DNA, 25 bp, Homo sapien
cagaatgggtatgttgcagggtgca

SEQ ID NO: 2018071 - DNA, 25 bp, Homo sapien
cattgtgtagggaggtgtctgccac

SEQ ID NO: 2018072 - DNA, 25 bp, Homo sapien
agtcaatgttccctacagccagcag

SEQ ID NO: 2018073 - DNA, 25 bp, Homo sapien
gtcaatgttccctacagccagcagc

SEQ ID NO: 2018074 - DNA, 25 bp, Homo sapien
gaatctccaagccacggaattattt

SEQ ID NO: 2018075 - DNA, 25 bp, Homo sapien
tcagtcaatgttccctacagccagc

SEQ ID NO: 2018076 - DNA, 25 bp, Homo sapien
gtcctctggctgaaggtaatgcctc

SEQ ID NO: 2018077 - DNA, 25 bp, Homo sapien
gctgaaggtaatgcctcttttgtcc

SEQ ID NO: 2018078 - DNA, 25 bp, Homo sapien
tgccatccctccagcgttctctttg

SEQ ID NO: 2018079 - DNA, 25 bp, Homo sapien
ccctccagcgttctctttgccatta

SEQ ID NO: 2018080 - DNA, 25 bp, Homo sapien
ctgtggcatggggtggtctgctcat

SEQ ID NO: 2018081 - DNA, 25 bp, Homo sapien
actagcaatatctgtagcatctgtg

SEQ ID NO: 2018082 - DNA, 25 bp, Homo sapien
tggtgagtcactagcaatatctgta

SEQ ID NO: 2018083 - DNA, 25 bp, Homo sapien
tctctggtgagtcactagcaatatc

SEQ ID NO: 2018084 - DNA, 25 bp, Homo sapien
ctgcatttcttgcctgtcactcttc

SEQ ID NO: 2018085 - DNA, 25 bp, Homo sapien
gcatttcttgcctgtcactcttcac

SEQ ID NO: 2018086 - DNA, 25 bp, Homo sapien
tgcatttcttgcctgtcactcttca

SEQ ID NO: 2018087 - DNA, 25 bp, Homo sapien
cttgaatgtagtagcctaatgttcc

SEQ ID NO: 2018088 - DNA, 25 bp, Homo sapien
ttattttaaagtctcgatctggcag

SEQ ID NO: 2018089 - DNA, 25 bp, Homo sapien
ctcgatctggcagttctatcatttc

SEQ ID NO: 2018090 - DNA, 25 bp, Homo sapien
gggcttttctcccttgaatgtagta

SEQ ID NO: 2018091 - DNA, 25 bp, Homo sapien
cagtattacttctctgaataggaca

SEQ ID NO: 2018092 - DNA, 25 bp, Homo sapien
cacccagtctatacttattatctta

SEQ ID NO: 2018093 - DNA, 25 bp, Homo sapien
tttcagtattacttctctgaatagg

SEQ ID NO: 2018094 - DNA, 25 bp, Homo sapien
taatttcagtattacttctctgaat

SEQ ID NO: 2018095 - DNA, 25 bp, Homo sapien
ctttctgttatcacaaaaattggta

SEQ ID NO: 2018096 - DNA, 25 bp, Homo sapien
gctctttctgttatcacaaaaattg

SEQ ID NO: 2018097 - DNA, 25 bp, Homo sapien
aactctgagttggatatttagttta

SEQ ID NO: 2018098 - DNA, 25 bp, Homo sapien
ttctgttatcacaaaaattggtatg

SEQ ID NO: 2018099 - DNA, 25 bp, Homo sapien
caccgcgtccagccacctttttctt

SEQ ID NO: 2018100 - DNA, 25 bp, Homo sapien
gtccagccacctttttcttttatga

SEQ ID NO: 2018101 - DNA, 25 bp, Homo sapien
tgaaccaccgcgtccagccaccttt

SEQ ID NO: 2018102 - DNA, 25 bp, Homo sapien
cacctttttcttttatgatataagg

SEQ ID NO: 2018103 - DNA, 25 bp, Homo sapien
ggtgctctttatatatcataggtat

SEQ ID NO: 2018104 - DNA, 25 bp, Homo sapien
aggtgctctttatatatcataggta

SEQ ID NO: 2018105 - DNA, 25 bp, Homo sapien
cctttgcccattttcctattaagtg

SEQ ID NO: 2018106 - DNA, 25 bp, Homo sapien
cctattaagtgtatttttgcttgtt

SEQ ID NO: 2018107 - DNA, 25 bp, Homo sapien
gatcaagctgttcgtccctaagcct

SEQ ID NO: 2018108 - DNA, 25 bp, Homo sapien
ctggaatctgtcgtggtccttctcg

SEQ ID NO: 2018109 - DNA, 25 bp, Homo sapien
tctcggagggctaagatcaagctgt

SEQ ID NO: 2018110 - DNA, 25 bp, Homo sapien
gctgttcgtccctaagccttgcttt

SEQ ID NO: 2018111 - DNA, 25 bp, Homo sapien
tattgaaggtacaagagtgaaggaa

SEQ ID NO: 2018112 - DNA, 25 bp, Homo sapien
ctccctggaccatgtcgtgattgga

SEQ ID NO: 2018113 - DNA, 25 bp, Homo sapien
gattggacaacttcagctccaatat

SEQ ID NO: 2018114 - DNA, 25 bp, Homo sapien
gctccaatatgcacacagctcctgt

SEQ ID NO: 2018115 - DNA, 25 bp, Homo sapien
gtgtgttttgcccatttggtctggt

SEQ ID NO: 2018116 - DNA, 25 bp, Homo sapien
ttttgcccatttggtctggtttcca

SEQ ID NO: 2018117 - DNA, 25 bp, Homo sapien
ccagctataaccctttgttctgggt

SEQ ID NO: 2018118 - DNA, 25 bp, Homo sapien
tctggtttccagctataaccctttg

SEQ ID NO: 2018119 - DNA, 25 bp, Homo sapien
agggggtgacgacatccttctttgc

SEQ ID NO: 2018120 - DNA, 25 bp, Homo sapien
tgctcactgaaggccggggggtctt

SEQ ID NO: 2018121 - DNA, 25 bp, Homo sapien
aaggcaagcagagcctacgagagag

SEQ ID NO: 2018122 - DNA, 25 bp, Homo sapien
caagcagagcctacgagagaggagt

SEQ ID NO: 2018123 - DNA, 25 bp, Homo sapien
ggccagcatggagataggacatctg

SEQ ID NO: 2018124 - DNA, 25 bp, Homo sapien
tcagcgagactcaaaccttcctgct

SEQ ID NO: 2018125 - DNA, 25 bp, Homo sapien
acacactcagcgagactcaaacctt

SEQ ID NO: 2018126 - DNA, 25 bp, Homo sapien
ggcacacactcagcgagactcaaac

SEQ ID NO: 2018127 - DNA, 25 bp, Homo sapien
ggcaactgttggccctgggtgtttc

SEQ ID NO: 2018128 - DNA, 25 bp, Homo sapien
gcacctgcttgcctcgatggctctt

SEQ ID NO: 2018129 - DNA, 25 bp, Homo sapien
tgcctcgatggctcttcccacttcc

SEQ ID NO: 2018130 - DNA, 25 bp, Homo sapien
ttcctggcacctgcttgcctcgatg

SEQ ID NO: 2018131 - DNA, 25 bp, Homo sapien
tgcagattaaatctcagtgtgatgg

SEQ ID NO: 2018132 - DNA, 25 bp, Homo sapien
gattaaatctcagtgtgatggacca

SEQ ID NO: 2018133 - DNA, 25 bp, Homo sapien
aatctcagtgtgatggaccacacac

SEQ ID NO: 2018134 - DNA, 25 bp, Homo sapien
taaatctcagtgtgatggaccacac

SEQ ID NO: 2018135 - DNA, 25 bp, Homo sapien
ggggtgaggaggcatcaccgagact

SEQ ID NO: 2018136 - DNA, 25 bp, Homo sapien
tgctggcggggtgaggaggcatcac

SEQ ID NO: 2018137 - DNA, 25 bp, Homo sapien
gtgaggaggcatcaccgagactgtt

SEQ ID NO: 2018138 - DNA, 25 bp, Homo sapien
ggcggggtgaggaggcatcaccgag

SEQ ID NO: 2018139 - DNA, 25 bp, Homo sapien
tctgcgtgcagtggtctctgtgccc

SEQ ID NO: 2018140 - DNA, 25 bp, Homo sapien
tacagtgggctccacatgctgtggt

SEQ ID NO: 2018141 - DNA, 25 bp, Homo sapien
gctgtggtctctgcgtgctatggct

SEQ ID NO: 2018142 - DNA, 25 bp, Homo sapien
tggtctctgtatgctgtggccgctg

SEQ ID NO: 2018143 - DNA, 25 bp, Homo sapien
gcatctacacgtgggaggcactggt

SEQ ID NO: 2018144 - DNA, 25 bp, Homo sapien
tgcccgtggcagtggattattgcag

SEQ ID NO: 2018145 - DNA, 25 bp, Homo sapien
ggctggccctgcatctacacgtggg

SEQ ID NO: 2018146 - DNA, 25 bp, Homo sapien
ttattgcagagctaatgggaggaag

SEQ ID NO: 2018147 - DNA, 25 bp, Homo sapien
cagtatttactctatcacactctat

SEQ ID NO: 2018148 - DNA, 25 bp, Homo sapien
ctacagtatttactctatcacactc

SEQ ID NO: 2018149 - DNA, 25 bp, Homo sapien
tgtgattcaatagtaatttcactgt

SEQ ID NO: 2018150 - DNA, 25 bp, Homo sapien
ctgtgattcaatagtaatttcactg

SEQ ID NO: 2018151 - DNA, 25 bp, Homo sapien
agaccatgacgtgtgccgtgtccca

SEQ ID NO: 2018152 - DNA, 25 bp, Homo sapien
cagagaagcagaccatgacgtgtgc

SEQ ID NO: 2018153 - DNA, 25 bp, Homo sapien
cgtgtgccgtgtcccagttctgttc

SEQ ID NO: 2018154 - DNA, 25 bp, Homo sapien
gaagcagaccatgacgtgtgccgtg

SEQ ID NO: 2018155 - DNA, 25 bp, Homo sapien
ggctgcgaggcaggttcactaagca

SEQ ID NO: 2018156 - DNA, 25 bp, Homo sapien
cgtggctgcaaggagtaaccctagg

SEQ ID NO: 2018157 - DNA, 25 bp, Homo sapien
tactgggtacatctcgagctgcaga

SEQ ID NO: 2018158 - DNA, 25 bp, Homo sapien
taaccctaggttcccgtgagctatg

SEQ ID NO: 2018159 - DNA, 25 bp, Homo sapien
cctgcactgcgtttggtactgggac

SEQ ID NO: 2018160 - DNA, 25 bp, Homo sapien
tcagccgagggaacccacttgtgca

SEQ ID NO: 2018161 - DNA, 25 bp, Homo sapien
tcaactgatgggtacactggagtaa

SEQ ID NO: 2018162 - DNA, 25 bp, Homo sapien
gagaaagtaaacctgccacagcttg

SEQ ID NO: 2018163 - DNA, 25 bp, Homo sapien
tccttctcaggcgtgcatgagcaca

SEQ ID NO: 2018164 - DNA, 25 bp, Homo sapien
tgttcttgccccaaaaaatgagaga

SEQ ID NO: 2018165 - DNA, 25 bp, Homo sapien
tacttgaaagatcccctccaaggtg

SEQ ID NO: 2018166 - DNA, 25 bp, Homo sapien
caaggtggttttcgacgtcctgcca

SEQ ID NO: 2018167 - DNA, 25 bp, Homo sapien
ccgactgaacgtgcttggtttgtca

SEQ ID NO: 2018168 - DNA, 25 bp, Homo sapien
tataaagtcgccgactgaacgtgct

SEQ ID NO: 2018169 - DNA, 25 bp, Homo sapien
ggtatccttataaagtcgccgactg

SEQ ID NO: 2018170 - DNA, 25 bp, Homo sapien
cagggtgaggtatccttataaagtc

SEQ ID NO: 2018171 - DNA, 25 bp, Homo sapien
tttctgggcacttgttaatgtttct

SEQ ID NO: 2018172 - DNA, 25 bp, Homo sapien
tctgggcacttgttaatgtttctgc

SEQ ID NO: 2018173 - DNA, 25 bp, Homo sapien
cctttctgggcacttgttaatgttt

SEQ ID NO: 2018174 - DNA, 25 bp, Homo sapien
tgggcacttgttaatgtttctgcct

SEQ ID NO: 2018175 - DNA, 25 bp, Homo sapien
ccttcagcgaccacctttccatcag

SEQ ID NO: 2018176 - DNA, 25 bp, Homo sapien
ccacatcagaagaaccctttcctcc

SEQ ID NO: 2018177 - DNA, 25 bp, Homo sapien
tcagcgaccacctttccatcagtga

SEQ ID NO: 2018178 - DNA, 25 bp, Homo sapien
aggtggctatccaggctcgcctcag

SEQ ID NO: 2018179 - DNA, 25 bp, Homo sapien
tggcagcagagggccagggtttggc

SEQ ID NO: 2018180 - DNA, 25 bp, Homo sapien
cagagggccagggtttggcctccag

SEQ ID NO: 2018181 - DNA, 25 bp, Homo sapien
gcagcagagggccagggtttggcct

SEQ ID NO: 2018182 - DNA, 25 bp, Homo sapien
agcagagggccagggtttggcctcc

SEQ ID NO: 2018183 - DNA, 25 bp, Homo sapien
gcttctcagggtgcgttcagacaga

SEQ ID NO: 2018184 - DNA, 25 bp, Homo sapien
ctcgggtatgagttgtgttgctgtc

SEQ ID NO: 2018185 - DNA, 25 bp, Homo sapien
agaccgagtggtgctgcggctctcc

SEQ ID NO: 2018186 - DNA, 25 bp, Homo sapien
aagcaactgatggtcgcttctcagg

SEQ ID NO: 2018187 - DNA, 25 bp, Homo sapien
cagggctggagaacatttgctcttt

SEQ ID NO: 2018188 - DNA, 25 bp, Homo sapien
agggctggagaacatttgctctttt

SEQ ID NO: 2018189 - DNA, 25 bp, Homo sapien
cactgtataacatttctagagcaga

SEQ ID NO: 2018190 - DNA, 25 bp, Homo sapien
catcaccagtgaccggcttataagg

SEQ ID NO: 2018191 - DNA, 25 bp, Homo sapien
caggtttacaggaacacatgtgtct

SEQ ID NO: 2018192 - DNA, 25 bp, Homo sapien
tatagtaaccattagcagcctcaga

SEQ ID NO: 2018193 - DNA, 25 bp, Homo sapien
tcatgctcatttccgactccaggtt

SEQ ID NO: 2018194 - DNA, 25 bp, Homo sapien
tgcctgctctgcattcggtgactcg

SEQ ID NO: 2018195 - DNA, 25 bp, Homo sapien
tatgcccatcagtgtcagctgtgaa

SEQ ID NO: 2018196 - DNA, 25 bp, Homo sapien
cctggctactggagagtggcacctt

SEQ ID NO: 2018197 - DNA, 25 bp, Homo sapien
ggtgactcgcatgcatccagctttg

SEQ ID NO: 2018198 - DNA, 25 bp, Homo sapien
taacaggctctgatcaccttctggg

SEQ ID NO: 2018199 - DNA, 25 bp, Homo sapien
gccggacacgtactcaagcctatac

SEQ ID NO: 2018200 - DNA, 25 bp, Homo sapien
ccgcttagggacgatgctaactaca

SEQ ID NO: 2018201 - DNA, 25 bp, Homo sapien
ttagggttcactacacatgcggccg

SEQ ID NO: 2018202 - DNA, 25 bp, Homo sapien
gctttgttaagcacgatgtatggca

SEQ ID NO: 2018203 - DNA, 25 bp, Homo sapien
tacggctcgtagaaaagtacaaatc

SEQ ID NO: 2018204 - DNA, 25 bp, Homo sapien
aatcgctttgccgaggacctgtgca

SEQ ID NO: 2018205 - DNA, 25 bp, Homo sapien
caagaatacatctaggtcgcagcgt

SEQ ID NO: 2018206 - DNA, 25 bp, Homo sapien
gtcatgtctgttgaaagcccaatca

SEQ ID NO: 2018207 - DNA, 25 bp, Homo sapien
gaacttggtataaaagggcattggc

SEQ ID NO: 2018208 - DNA, 25 bp, Homo sapien
cttggtataaaagggcattggcagc

SEQ ID NO: 2018209 - DNA, 25 bp, Homo sapien
gaaagcccaatcattaaagtactcc

SEQ ID NO: 2018210 - DNA, 25 bp, Homo sapien
tacaagtggccaggaactacccaaa

SEQ ID NO: 2018211 - DNA, 25 bp, Homo sapien
ttagagcccataagtaacaagtggc

SEQ ID NO: 2018212 - DNA, 25 bp, Homo sapien
tatttatgccatcatgttagagccc

SEQ ID NO: 2018213 - DNA, 25 bp, Homo sapien
ggtccaacaaagatgcagaggctca

SEQ ID NO: 2018214 - DNA, 25 bp, Homo sapien
tactttatagctgtctccaatggaa

SEQ ID NO: 2018215 - DNA, 25 bp, Homo sapien
taaagccctgtgctaaatattctcc

SEQ ID NO: 2018216 - DNA, 25 bp, Homo sapien
cctaccttgcttagggtatctgaca

SEQ ID NO: 2018217 - DNA, 25 bp, Homo sapien
tgccagttatgtatcaactcccagg

SEQ ID NO: 2018218 - DNA, 25 bp, Homo sapien
ataggtaaaatctcttccggcttct

SEQ ID NO: 2018219 - DNA, 25 bp, Homo sapien
gtaaaatctcttccggcttctttca

SEQ ID NO: 2018220 - DNA, 25 bp, Homo sapien
aaacaaagatgaagcgaagcaaggg

SEQ ID NO: 2018221 - DNA, 25 bp, Homo sapien
aacaaagatgaagcgaagcaagggc

SEQ ID NO: 2018222 - DNA, 25 bp, Homo sapien
acaaagatgaagcgaagcaagggca

SEQ ID NO: 2018223 - DNA, 25 bp, Homo sapien
aaaacaaagatgaagcgaagcaagg

SEQ ID NO: 2018224 - DNA, 25 bp, Homo sapien
tttttctaaggctctcccatatatc

SEQ ID NO: 2018225 - DNA, 25 bp, Homo sapien
taaggctctcccatatatcttgcta

SEQ ID NO: 2018226 - DNA, 25 bp, Homo sapien
tcccatatatcttgctaggactgga

SEQ ID NO: 2018227 - DNA, 25 bp, Homo sapien
tatcttgctaggactggatgaagaa

SEQ ID NO: 2018228 - DNA, 25 bp, Homo sapien
taaaaggaaagatgccagagatcgt

SEQ ID NO: 2018229 - DNA, 25 bp, Homo sapien
ggctctatactgagcacgctgtgga

SEQ ID NO: 2018230 - DNA, 25 bp, Homo sapien
gggaagatcagcaccgggctctata

SEQ ID NO: 2018231 - DNA, 25 bp, Homo sapien
aactggtagaacattcagagccggg

SEQ ID NO: 2018232 - DNA, 25 bp, Homo sapien
gagatactttatcctccctgccttt

SEQ ID NO: 2018233 - DNA, 25 bp, Homo sapien
agatactttatcctccctgcctttc

SEQ ID NO: 2018234 - DNA, 25 bp, Homo sapien
tgagatactttatcctccctgcctt

SEQ ID NO: 2018235 - DNA, 25 bp, Homo sapien
ctgagatactttatcctccctgcct

SEQ ID NO: 2018236 - DNA, 25 bp, Homo sapien
ctccccatagcctttaacagactca

SEQ ID NO: 2018237 - DNA, 25 bp, Homo sapien
gcctttaacagactcaccaaagaca

SEQ ID NO: 2018238 - DNA, 25 bp, Homo sapien
atgctgccggcgaccccgccttgtc

SEQ ID NO: 2018239 - DNA, 25 bp, Homo sapien
atagcctttaacagactcaccaaag

SEQ ID NO: 2018240 - DNA, 25 bp, Homo sapien
cttgcgcatacaccgttccttgctt

SEQ ID NO: 2018241 - DNA, 25 bp, Homo sapien
tttcacttgcgcatacaccgttcct

SEQ ID NO: 2018242 - DNA, 25 bp, Homo sapien
tttcacacacgtgtgtttcagccca

SEQ ID NO: 2018243 - DNA, 25 bp, Homo sapien
gtagaatttcacacacgtgtgtttc

SEQ ID NO: 2018244 - DNA, 25 bp, Homo sapien
ctgaccccacatcccatgattccca

SEQ ID NO: 2018245 - DNA, 25 bp, Homo sapien
tgaccccacatcccatgattcccac

SEQ ID NO: 2018246 - DNA, 25 bp, Homo sapien
tctgaccccacatcccatgattccc

SEQ ID NO: 2018247 - DNA, 25 bp, Homo sapien
cagaacttaaataacaccgcgctca

SEQ ID NO: 2018248 - DNA, 25 bp, Homo sapien
acttaaataacaccgcgctcagaac

SEQ ID NO: 2018249 - DNA, 25 bp, Homo sapien
gaacttaaataacaccgcgctcaga

SEQ ID NO: 2018250 - DNA, 25 bp, Homo sapien
ttccagaacttaaataacaccgcgc

SEQ ID NO: 2018251 - DNA, 25 bp, Homo sapien
ctgaaaaaaatgtagtgtttccagg

SEQ ID NO: 2018252 - DNA, 25 bp, Homo sapien
tctacaaatatatatcgaaaatcat

SEQ ID NO: 2018253 - DNA, 25 bp, Homo sapien
ttaatcatcttgggatcgattatct

SEQ ID NO: 2018254 - DNA, 25 bp, Homo sapien
atatatatcgaaaatcatattcacc

SEQ ID NO: 2018255 - DNA, 25 bp, Homo sapien
cttgggatcgattatcttcaatgat

SEQ ID NO: 2018256 - DNA, 25 bp, Homo sapien
tacatggtgtaacatttccaataac

SEQ ID NO: 2018257 - DNA, 25 bp, Homo sapien
cagaaatattgtcatgattgagtca

SEQ ID NO: 2018258 - DNA, 25 bp, Homo sapien
gagtagcgagtccacgccattcaac

SEQ ID NO: 2018259 - DNA, 25 bp, Homo sapien
tagattcactttataagccatacac

SEQ ID NO: 2018260 - DNA, 25 bp, Homo sapien
tgcagacattatgcagttctataat

SEQ ID NO: 2018261 - DNA, 25 bp, Homo sapien
acattatgcagttctataatataaa

SEQ ID NO: 2018262 - DNA, 25 bp, Homo sapien
cagacattatgcagttctataatat

SEQ ID NO: 2018263 - DNA, 25 bp, Homo sapien
gacattatgcagttctataatataa

SEQ ID NO: 2018264 - DNA, 25 bp, Homo sapien
attccaaagtatgcggagggcagct

SEQ ID NO: 2018265 - DNA, 25 bp, Homo sapien
cacatgcttatctcaagtcagattc

SEQ ID NO: 2018266 - DNA, 25 bp, Homo sapien
gtatttaccatctggttccctatgg

SEQ ID NO: 2018267 - DNA, 25 bp, Homo sapien
cctatggccctcaaccattttcaca

SEQ ID NO: 2018268 - DNA, 25 bp, Homo sapien
tgcttctaggccttcacctggctga

SEQ ID NO: 2018269 - DNA, 25 bp, Homo sapien
tcctaatctcgtccagttcagacag

SEQ ID NO: 2018270 - DNA, 25 bp, Homo sapien
tgactgatgtaccttgagctcaatg

SEQ ID NO: 2018271 - DNA, 25 bp, Homo sapien
cctgagcgccagacttgagaaacct

SEQ ID NO: 2018272 - DNA, 25 bp, Homo sapien
tgctggccagatgaccccaacacac

SEQ ID NO: 2018273 - DNA, 25 bp, Homo sapien
ttgctggccagatgaccccaacaca

SEQ ID NO: 2018274 - DNA, 25 bp, Homo sapien
aaagaggggattgcaagatgttgct

SEQ ID NO: 2018275 - DNA, 25 bp, Homo sapien
agggaaagaggggattgcaagatgt

SEQ ID NO: 2018276 - DNA, 25 bp, Homo sapien
tctttaagtcccaatgccacccttc

SEQ ID NO: 2018277 - DNA, 25 bp, Homo sapien
taagtcccaatgccacccttccttg

SEQ ID NO: 2018278 - DNA, 25 bp, Homo sapien
ctctttaagtcccaatgccaccctt

SEQ ID NO: 2018279 - DNA, 25 bp, Homo sapien
ctgcagctccacccctcatttcaag

SEQ ID NO: 2018280 - DNA, 25 bp, Homo sapien
agggccagcgacctctgtctggcct

SEQ ID NO: 2018281 - DNA, 25 bp, Homo sapien
ggccagcgacctctgtctggccttg

SEQ ID NO: 2018282 - DNA, 25 bp, Homo sapien
gccagcgacctctgtctggccttgg

SEQ ID NO: 2018283 - DNA, 25 bp, Homo sapien
aggagctgctcgccggcagtcctgc

SEQ ID NO: 2018284 - DNA, 25 bp, Homo sapien
ggagctgctcgccggcagtcctgcg

SEQ ID NO: 2018285 - DNA, 25 bp, Homo sapien
gagctgctcgccggcagtcctgcga

SEQ ID NO: 2018286 - DNA, 25 bp, Homo sapien
agctgctcgccggcagtcctgcgag

SEQ ID NO: 2018287 - DNA, 25 bp, Homo sapien
cgggcaatgatgtcaaagggagttc

SEQ ID NO: 2018288 - DNA, 25 bp, Homo sapien
aatgatgtcaaagggagttcatagc

SEQ ID NO: 2018289 - DNA, 25 bp, Homo sapien
tgtcaaagggagttcatagcagcct

SEQ ID NO: 2018290 - DNA, 25 bp, Homo sapien
atttctctcgggcaatgatgtcaaa

SEQ ID NO: 2018291 - DNA, 25 bp, Homo sapien
tgttagagtcggagcctgtgtccct

SEQ ID NO: 2018292 - DNA, 25 bp, Homo sapien
gaataatccttacgccaaagcggca

SEQ ID NO: 2018293 - DNA, 25 bp, Homo sapien
tcatttttaagagggcagagtcagg

SEQ ID NO: 2018294 - DNA, 25 bp, Homo sapien
gagtcagggttcacagccgattctg

SEQ ID NO: 2018295 - DNA, 25 bp, Homo sapien
gggctggtgaccctcgtgggccgtg

SEQ ID NO: 2018296 - DNA, 25 bp, Homo sapien
aagaccgtactctgtgggccgtgct

SEQ ID NO: 2018297 - DNA, 25 bp, Homo sapien
atgggaagaccgtactctgtgggcc

SEQ ID NO: 2018298 - DNA, 25 bp, Homo sapien
ccatgggaagaccgtactctgtggg

SEQ ID NO: 2018299 - DNA, 25 bp, Homo sapien
caaagaggagcccatccctgacacg

SEQ ID NO: 2018300 - DNA, 25 bp, Homo sapien
tgttcctggcccaccaaggaagcca

SEQ ID NO: 2018301 - DNA, 25 bp, Homo sapien
aaggaagccagctgcaccgcgtgga

SEQ ID NO: 2018302 - DNA, 25 bp, Homo sapien
acacgcaggctgtgaggccactgtg

SEQ ID NO: 2018303 - DNA, 25 bp, Homo sapien
ctttgcctccagacctattaccaga

SEQ ID NO: 2018304 - DNA, 25 bp, Homo sapien
ttgcctccagacctattaccagagt

SEQ ID NO: 2018305 - DNA, 25 bp, Homo sapien
cctattaccagagtcaagtgtcatc

SEQ ID NO: 2018306 - DNA, 25 bp, Homo sapien
tccagacctattaccagagtcaagt

SEQ ID NO: 2018307 - DNA, 25 bp, Homo sapien
ctgttgttgactcacattcagtact

SEQ ID NO: 2018308 - DNA, 25 bp, Homo sapien
tttctttctgcctgttgttgactca

SEQ ID NO: 2018309 - DNA, 25 bp, Homo sapien
tctgcctgttgttgactcacattca

SEQ ID NO: 2018310 - DNA, 25 bp, Homo sapien
cacagttttctttctgcctgttgtt

SEQ ID NO: 2018311 - DNA, 25 bp, Homo sapien
catttcaagtttatacccagccagt

SEQ ID NO: 2018312 - DNA, 25 bp, Homo sapien
cactcagagggttctcagggatggt

SEQ ID NO: 2018313 - DNA, 25 bp, Homo sapien
ggttgatgaacttcttatctgacat

SEQ ID NO: 2018314 - DNA, 25 bp, Homo sapien
tgtccagatcatcacattggggttg

SEQ ID NO: 2018315 - DNA, 25 bp, Homo sapien
gacattttggaaagcgacaggctgt

SEQ ID NO: 2018316 - DNA, 25 bp, Homo sapien
actggtacaaccctcagcagagctg

SEQ ID NO: 2018317 - DNA, 25 bp, Homo sapien
ctcataactctgagggttgcgggtg

SEQ ID NO: 2018318 - DNA, 25 bp, Homo sapien
gagctgacctcatgggacattttgg

SEQ ID NO: 2018319 - DNA, 25 bp, Homo sapien
ctgggactactggaacgggcctgca

SEQ ID NO: 2018320 - DNA, 25 bp, Homo sapien
actggaacgggcctgcatgcctggc

SEQ ID NO: 2018321 - DNA, 25 bp, Homo sapien
tgatgctgaatatagtgcagatgcc

SEQ ID NO: 2018322 - DNA, 25 bp, Homo sapien
tgctgaatatagtgcagatgcccca

SEQ ID NO: 2018323 - DNA, 25 bp, Homo sapien
gagcagagtttacatccacagttgg

SEQ ID NO: 2018324 - DNA, 25 bp, Homo sapien
atgccacacgtatgtcctctggtcg

SEQ ID NO: 2018325 - DNA, 25 bp, Homo sapien
gctcccatagctatccagcagagca

SEQ ID NO: 2018326 - DNA, 25 bp, Homo sapien
gagtttacatccacagttggctcca

SEQ ID NO: 2018327 - DNA, 25 bp, Homo sapien
gattaggacggaacgtgtcttctgg

SEQ ID NO: 2018328 - DNA, 25 bp, Homo sapien
agttatgctgagattaggacggaac

SEQ ID NO: 2018329 - DNA, 25 bp, Homo sapien
aacgtgtcttctgggggagcaacag

SEQ ID NO: 2018330 - DNA, 25 bp, Homo sapien
gaggtgcgcagtggacgagaagagc

SEQ ID NO: 2018331 - DNA, 25 bp, Homo sapien
gctttcattccgaatctcttatcca

SEQ ID NO: 2018332 - DNA, 25 bp, Homo sapien
tctcttatccatccagtcactcagg

SEQ ID NO: 2018333 - DNA, 25 bp, Homo sapien
ttacaacttcaagcatatgatagtg

SEQ ID NO: 2018334 - DNA, 25 bp, Homo sapien
agcatatgatagtgtgacgctctgc

SEQ ID NO: 2018335 - DNA, 25 bp, Homo sapien
gcgacctctaaaccccggctcctca

SEQ ID NO: 2018336 - DNA, 25 bp, Homo sapien
tctaaaccccggctcctcagtgtgt

SEQ ID NO: 2018337 - DNA, 25 bp, Homo sapien
agcagcttttgagggacggagaatc

SEQ ID NO: 2018338 - DNA, 25 bp, Homo sapien
ttgagggacggagaatcgtgggccc

SEQ ID NO: 2018339 - DNA, 25 bp, Homo sapien
ggcacagagtccagtaggccatgaa

SEQ ID NO: 2018340 - DNA, 25 bp, Homo sapien
ccatgaagaccaggagtagaatgtc

SEQ ID NO: 2018341 - DNA, 25 bp, Homo sapien
tgaagttggacatggaccacagcct

SEQ ID NO: 2018342 - DNA, 25 bp, Homo sapien
ggtggtcccggcatggtctcagttg

SEQ ID NO: 2018343 - DNA, 25 bp, Homo sapien
actggcatttggggtcgtgctgtca

SEQ ID NO: 2018344 - DNA, 25 bp, Homo sapien
gagcactggcatttggggtcgtgct

SEQ ID NO: 2018345 - DNA, 25 bp, Homo sapien
tggaaggtgagtgtcactccttggt

SEQ ID NO: 2018346 - DNA, 25 bp, Homo sapien
ctggaaggtgagtgtcactccttgg

SEQ ID NO: 2018347 - DNA, 25 bp, Homo sapien
ggctggcccagtatataaagctccc

SEQ ID NO: 2018348 - DNA, 25 bp, Homo sapien
ctctcctgtgatcactgttgtccac

SEQ ID NO: 2018349 - DNA, 25 bp, Homo sapien
tggcccagtatataaagctcccctt

SEQ ID NO: 2018350 - DNA, 25 bp, Homo sapien
tgatcactgttgtccactctgtcac

SEQ ID NO: 2018351 - DNA, 25 bp, Homo sapien
cctatacatggcagaggactgaaca

SEQ ID NO: 2018352 - DNA, 25 bp, Homo sapien
agagcctgctttggacacgggagaa

SEQ ID NO: 2018353 - DNA, 25 bp, Homo sapien
tggtggaccaactgggtgatccctg

SEQ ID NO: 2018354 - DNA, 25 bp, Homo sapien
gcaaagattttgagtccaccacagt

SEQ ID NO: 2018355 - DNA, 25 bp, Homo sapien
cagcagggcccgtcctgaccccttt

SEQ ID NO: 2018356 - DNA, 25 bp, Homo sapien
gctcccaccttgtggtacagctcag

SEQ ID NO: 2018357 - DNA, 25 bp, Homo sapien
tgttccccgcccctgcaacaccttc

SEQ ID NO: 2018358 - DNA, 25 bp, Homo sapien
tggcactaaactctttcacctgagg

SEQ ID NO: 2018359 - DNA, 25 bp, Homo sapien
aaggaagcctgttgtgatccccggg

SEQ ID NO: 2018360 - DNA, 25 bp, Homo sapien
tgagctccatggtattaagtgggcc

SEQ ID NO: 2018361 - DNA, 25 bp, Homo sapien
cagcgaggttcttatgtaggtatga

SEQ ID NO: 2018362 - DNA, 25 bp, Homo sapien
taagtgggccacgtgtcttctcagc

SEQ ID NO: 2018363 - DNA, 25 bp, Homo sapien
cgaggctcggactgtgtattcgtga

SEQ ID NO: 2018364 - DNA, 25 bp, Homo sapien
tgtattcgtgagtttcagatgcttc

SEQ ID NO: 2018365 - DNA, 25 bp, Homo sapien
tcctcttgttgcttgctgcatgtca

SEQ ID NO: 2018366 - DNA, 25 bp, Homo sapien
ccctgattggtaggaagcttctcga

SEQ ID NO: 2018367 - DNA, 25 bp, Homo sapien
cctgcgttcattcccctgggttcgg

SEQ ID NO: 2018368 - DNA, 25 bp, Homo sapien
cggcctgcgttcattcccctgggtt

SEQ ID NO: 2018369 - DNA, 25 bp, Homo sapien
aggcggcctgcgttcattcccctgg

SEQ ID NO: 2018370 - DNA, 25 bp, Homo sapien
agtcaggcggcctgcgttcattccc

SEQ ID NO: 2018371 - DNA, 25 bp, Homo sapien
ttagtttcatgccatgaccttctag

SEQ ID NO: 2018372 - DNA, 25 bp, Homo sapien
gggtcccataggcaagctgggtgac

SEQ ID NO: 2018373 - DNA, 25 bp, Homo sapien
catgccatgaccttctaggtgaaat

SEQ ID NO: 2018374 - DNA, 25 bp, Homo sapien
gatgtttgaatgagtttgtgggtcc

SEQ ID NO: 2018375 - DNA, 25 bp, Homo sapien
gaagtcactcttccggggatggaag

SEQ ID NO: 2018376 - DNA, 25 bp, Homo sapien
catgtccggtgccaggaagtcactc

SEQ ID NO: 2018377 - DNA, 25 bp, Homo sapien
ggcccatgtccggtgccaggaagtc

SEQ ID NO: 2018378 - DNA, 25 bp, Homo sapien
gtccggtgccaggaagtcactcttc

SEQ ID NO: 2018379 - DNA, 25 bp, Homo sapien
aattctgtctctagcaggcccatgc

SEQ ID NO: 2018380 - DNA, 25 bp, Homo sapien
ctgtctctagcaggcccatgccaaa

SEQ ID NO: 2018381 - DNA, 25 bp, Homo sapien
atctgaaccagcactgacgctgggg

SEQ ID NO: 2018382 - DNA, 25 bp, Homo sapien
ctagcaggcccatgccaaaatgatg

SEQ ID NO: 2018383 - DNA, 25 bp, Homo sapien
ttagagctgacggctctgtggatga

SEQ ID NO: 2018384 - DNA, 25 bp, Homo sapien
gagctgacggctctgtggatgatgg

SEQ ID NO: 2018385 - DNA, 25 bp, Homo sapien
gctgacggctctgtggatgatggca

SEQ ID NO: 2018386 - DNA, 25 bp, Homo sapien
tagagctgacggctctgtggatgat

SEQ ID NO: 2018387 - DNA, 25 bp, Homo sapien
gcagcgcatttgcttcccgaagtga

SEQ ID NO: 2018388 - DNA, 25 bp, Homo sapien
gcgaaaccgttttctagcgcgcacg

SEQ ID NO: 2018389 - DNA, 25 bp, Homo sapien
caaattaacgtctgggactcggact

SEQ ID NO: 2018390 - DNA, 25 bp, Homo sapien
gactcggactgctgccaataggaaa

SEQ ID NO: 2018391 - DNA, 25 bp, Homo sapien
tggtgagatgttcctggagctggtt

SEQ ID NO: 2018392 - DNA, 25 bp, Homo sapien
ggagctggttggtctgaggacccga

SEQ ID NO: 2018393 - DNA, 25 bp, Homo sapien
cgaggttgtaggtggatctttctca

SEQ ID NO: 2018394 - DNA, 25 bp, Homo sapien
gttggtctgaggacccgaggttgta

SEQ ID NO: 2018395 - DNA, 25 bp, Homo sapien
tgcgtaaggcgaaactggaaatgta

SEQ ID NO: 2018396 - DNA, 25 bp, Homo sapien
gctgctcggtcttatttgcaaattg

SEQ ID NO: 2018397 - DNA, 25 bp, Homo sapien
aactagtgtacatgttcctgtctca

SEQ ID NO: 2018398 - DNA, 25 bp, Homo sapien
tctcattaacaggtggacacatgca

SEQ ID NO: 2018399 - DNA, 25 bp, Homo sapien
gtagcttcgtgccatctggatgtat

SEQ ID NO: 2018400 - DNA, 25 bp, Homo sapien
ttttaattgcaggtgggctaagtcc

SEQ ID NO: 2018401 - DNA, 25 bp, Homo sapien
ttaattgcaggtgggctaagtccaa

SEQ ID NO: 2018402 - DNA, 25 bp, Homo sapien
gattcttcagtagcttcgtgccatc

SEQ ID NO: 2018403 - DNA, 25 bp, Homo sapien
ctggaagagtataaactgtgacaac

SEQ ID NO: 2018404 - DNA, 25 bp, Homo sapien
cttcaatgaagcagaccaattctct

SEQ ID NO: 2018405 - DNA, 25 bp, Homo sapien
caacacaccccatatgaaatgggta

SEQ ID NO: 2018406 - DNA, 25 bp, Homo sapien
gacccatatggtctcactggagaat

SEQ ID NO: 2018407 - DNA, 25 bp, Homo sapien
catcagggtgaatgggtatctgtcc

SEQ ID NO: 2018408 - DNA, 25 bp, Homo sapien
tagctcccacaagtaagttaagaac

SEQ ID NO: 2018409 - DNA, 25 bp, Homo sapien
tcagggtgaatgggtatctgtcccc

SEQ ID NO: 2018410 - DNA, 25 bp, Homo sapien
agctcccacaagtaagttaagaaca

SEQ ID NO: 2018411 - DNA, 25 bp, Homo sapien
cgccggcaccgggatcctgccctca

SEQ ID NO: 2018412 - DNA, 25 bp, Homo sapien
gccggcgccggcaccgggatcctgc

SEQ ID NO: 2018413 - DNA, 25 bp, Homo sapien
gccggcaccgggatcctgccctcat

SEQ ID NO: 2018414 - DNA, 25 bp, Homo sapien
ggcgccggcaccgggatcctgccct

SEQ ID NO: 2018415 - DNA, 25 bp, Homo sapien
tctgccaccttattactcagtatta

SEQ ID NO: 2018416 - DNA, 25 bp, Homo sapien
catcttcatttgtatagtcctaatc

SEQ ID NO: 2018417 - DNA, 25 bp, Homo sapien
ctcagtattattctgacagcacaga

SEQ ID NO: 2018418 - DNA, 25 bp, Homo sapien
tgactgagtgtctcagcaatcaggc

SEQ ID NO: 2018419 - DNA, 25 bp, Homo sapien
ggtgatgtaagaatatcttgatgca

SEQ ID NO: 2018420 - DNA, 25 bp, Homo sapien
aagaatatcttgatgcaaaaacagc

SEQ ID NO: 2018421 - DNA, 25 bp, Homo sapien
caggtgatgtaagaatatcttgatg

SEQ ID NO: 2018422 - DNA, 25 bp, Homo sapien
tgtaagaatatcttgatgcaaaaac

SEQ ID NO: 2018423 - DNA, 25 bp, Homo sapien
caacataggcattaagttttcttgc

SEQ ID NO: 2018424 - DNA, 25 bp, Homo sapien
ttcaacataggcattaagttttctt

SEQ ID NO: 2018425 - DNA, 25 bp, Homo sapien
cataggcattaagttttcttgcttt

SEQ ID NO: 2018426 - DNA, 25 bp, Homo sapien
aacataggcattaagttttcttgct

SEQ ID NO: 2018427 - DNA, 25 bp, Homo sapien
gctggagcaagtctagccatgaatg

SEQ ID NO: 2018428 - DNA, 25 bp, Homo sapien
atgaatatgacaggcagttctgaag

SEQ ID NO: 2018429 - DNA, 25 bp, Homo sapien
tacaggaattactctttgtggagcc

SEQ ID NO: 2018430 - DNA, 25 bp, Homo sapien
gaattactctttgtggagcctccat

SEQ ID NO: 2018431 - DNA, 25 bp, Homo sapien
tgctggcagtctgattgtgcaagct

SEQ ID NO: 2018432 - DNA, 25 bp, Homo sapien
gtgctggcagtctgattgtgcaagc

SEQ ID NO: 2018433 - DNA, 25 bp, Homo sapien
ctatacttagacaaacttgagtttc

SEQ ID NO: 2018434 - DNA, 25 bp, Homo sapien
tgtgcaagcttctatacttagacaa

SEQ ID NO: 2018435 - DNA, 25 bp, Homo sapien
gccaaagatataaagagacctcaag

SEQ ID NO: 2018436 - DNA, 25 bp, Homo sapien
gagaggcactgttccagttagccaa

SEQ ID NO: 2018437 - DNA, 25 bp, Homo sapien
taaggtcctaatgcctggatctaga

SEQ ID NO: 2018438 - DNA, 25 bp, Homo sapien
gaaacaatgttctaacttcgctgcc

SEQ ID NO: 2018439 - DNA, 25 bp, Homo sapien
aaacgtagcaccagttgcttaaaat

SEQ ID NO: 2018440 - DNA, 25 bp, Homo sapien
cttggcaaaacgtagcaccagttgc

SEQ ID NO: 2018441 - DNA, 25 bp, Homo sapien
cagcatgcttgttagcatgaaaatc

SEQ ID NO: 2018442 - DNA, 25 bp, Homo sapien
aaatggaatgtctctcaatgacagc

SEQ ID NO: 2018443 - DNA, 25 bp, Homo sapien
tatttataatttgtcccattttcat

SEQ ID NO: 2018444 - DNA, 25 bp, Homo sapien
tctccatatgagtgaaaaggacagg

SEQ ID NO: 2018445 - DNA, 25 bp, Homo sapien
ctctggaaatctccatatgagtgaa

SEQ ID NO: 2018446 - DNA, 25 bp, Homo sapien
tcccagtgtctctggaaatctccat

SEQ ID NO: 2018447 - DNA, 25 bp, Homo sapien
taaaggatatgtgaaggtcctttct

SEQ ID NO: 2018448 - DNA, 25 bp, Homo sapien
tatgtgaaggtcctttctccgagca

SEQ ID NO: 2018449 - DNA, 25 bp, Homo sapien
gaaatagatgttgcagtatatttta

SEQ ID NO: 2018450 - DNA, 25 bp, Homo sapien
cagttggtgtgtaaaggatatgtga

SEQ ID NO: 2018451 - DNA, 25 bp, Homo sapien
ggaaagaactgcatgggctgacttc

SEQ ID NO: 2018452 - DNA, 25 bp, Homo sapien
tttcaacacaacttccgaatctacc

SEQ ID NO: 2018453 - DNA, 25 bp, Homo sapien
tctacccttggaaagaactgcatgg

SEQ ID NO: 2018454 - DNA, 25 bp, Homo sapien
cacaacttccgaatctacccttgga

SEQ ID NO: 2018455 - DNA, 25 bp, Homo sapien
tgtgtgtagtagcatggtttacttg

SEQ ID NO: 2018456 - DNA, 25 bp, Homo sapien
tgtgtagtagcatggtttacttgtc

SEQ ID NO: 2018457 - DNA, 25 bp, Homo sapien
gtgtagtagcatggtttacttgtca

SEQ ID NO: 2018458 - DNA, 25 bp, Homo sapien
tgtagtagcatggtttacttgtcat

SEQ ID NO: 2018459 - DNA, 25 bp, Homo sapien
tagtggtcaaattgggtggcttgac

SEQ ID NO: 2018460 - DNA, 25 bp, Homo sapien
aattgggtggcttgactttgtgttc

SEQ ID NO: 2018461 - DNA, 25 bp, Homo sapien
caaattgggtggcttgactttgtgt

SEQ ID NO: 2018462 - DNA, 25 bp, Homo sapien
tttagtggtcaaattgggtggcttg

SEQ ID NO: 2018463 - DNA, 25 bp, Homo sapien
tctgaatgtacttgtggagccctga

SEQ ID NO: 2018464 - DNA, 25 bp, Homo sapien
tctgttgggcattaatacttctgaa

SEQ ID NO: 2018465 - DNA, 25 bp, Homo sapien
gaagtggcttgagtcagagatgccc

SEQ ID NO: 2018466 - DNA, 25 bp, Homo sapien
tttgggctgccaagtactgaggtat

SEQ ID NO: 2018467 - DNA, 25 bp, Homo sapien
tcttgcagaggtctggaattctcct

SEQ ID NO: 2018468 - DNA, 25 bp, Homo sapien
tgatttaaattgttagcagcctgca

SEQ ID NO: 2018469 - DNA, 25 bp, Homo sapien
ggtctggaattctcctgatttaaat

SEQ ID NO: 2018470 - DNA, 25 bp, Homo sapien
tagctggacctaaattcagtttgtc

SEQ ID NO: 2018471 - DNA, 25 bp, Homo sapien
cagtcgattttccacgagaagaggg

SEQ ID NO: 2018472 - DNA, 25 bp, Homo sapien
tgctgtagcagtcgtggatcttcgg

SEQ ID NO: 2018473 - DNA, 25 bp, Homo sapien
gccatagtgcacagtatcggaatga

SEQ ID NO: 2018474 - DNA, 25 bp, Homo sapien
cagttttagtgacccatggcttttc

SEQ ID NO: 2018475 - DNA, 25 bp, Homo sapien
aagttttgatttatccgagtcaagt

SEQ ID NO: 2018476 - DNA, 25 bp, Homo sapien
gttttgatttatccgagtcaagtat

SEQ ID NO: 2018477 - DNA, 25 bp, Homo sapien
agttttgatttatccgagtcaagta

SEQ ID NO: 2018478 - DNA, 25 bp, Homo sapien
taagttttgatttatccgagtcaag

SEQ ID NO: 2018479 - DNA, 25 bp, Homo sapien
catttccttctttcaggtccatgtt

SEQ ID NO: 2018480 - DNA, 25 bp, Homo sapien
tagacatttccttctttcaggtcca

SEQ ID NO: 2018481 - DNA, 25 bp, Homo sapien
gacatttccttctttcaggtccatg

SEQ ID NO: 2018482 - DNA, 25 bp, Homo sapien
ctggtagacatttccttctttcagg

SEQ ID NO: 2018483 - DNA, 25 bp, Homo sapien
aaattcagtgccatgaactgggcat

SEQ ID NO: 2018484 - DNA, 25 bp, Homo sapien
cagcactgtagcacttttggagtaa

SEQ ID NO: 2018485 - DNA, 25 bp, Homo sapien
aagtggatattgtagtagctgttca

SEQ ID NO: 2018486 - DNA, 25 bp, Homo sapien
agaatagaacagatggcagaacaaa

SEQ ID NO: 2018487 - DNA, 25 bp, Homo sapien
caggagtgtgagaggcatctggaag

SEQ ID NO: 2018488 - DNA, 25 bp, Homo sapien
agagtgttcatcctatattcagaat

SEQ ID NO: 2018489 - DNA, 25 bp, Homo sapien
aagagtgttcatcctatattcagaa

SEQ ID NO: 2018490 - DNA, 25 bp, Homo sapien
cctgcagagatatagtagagatccc

SEQ ID NO: 2018491 - DNA, 25 bp, Homo sapien
gtagagatccccaaaatgtaatata

SEQ ID NO: 2018492 - DNA, 25 bp, Homo sapien
gatatagtagagatccccaaaatgt

SEQ ID NO: 2018493 - DNA, 25 bp, Homo sapien
agtgaaatttagtgagcctgcagag

SEQ ID NO: 2018494 - DNA, 25 bp, Homo sapien
tattcattgtctgagaagctccact

SEQ ID NO: 2018495 - DNA, 25 bp, Homo sapien
gaagatgctaatgagtactggtgga

SEQ ID NO: 2018496 - DNA, 25 bp, Homo sapien
tgccaggaacccagaatgaatttgc

SEQ ID NO: 2018497 - DNA, 25 bp, Homo sapien
tgaatttgcttgagactagaccacc

SEQ ID NO: 2018498 - DNA, 25 bp, Homo sapien
ttcagcagtggatgtatggttttca

SEQ ID NO: 2018499 - DNA, 25 bp, Homo sapien
ttgccatgtaggttaacattgatct

SEQ ID NO: 2018500 - DNA, 25 bp, Homo sapien
aagatgttaataccacttcagcagt

SEQ ID NO: 2018501 - DNA, 25 bp, Homo sapien
tctaaattttagacactaatggagt

SEQ ID NO: 2018502 - DNA, 25 bp, Homo sapien
tcaaaacataaggaccatgacattc

SEQ ID NO: 2018503 - DNA, 25 bp, Homo sapien
ccaatatattagcagtttcagcata

SEQ ID NO: 2018504 - DNA, 25 bp, Homo sapien
tatgtaacgtacaacaaagtgaaca

SEQ ID NO: 2018505 - DNA, 25 bp, Homo sapien
tgagtatatgagaagcacttttgca

SEQ ID NO: 2018506 - DNA, 25 bp, Homo sapien
tctcgtagcggcctcggacactcgt

SEQ ID NO: 2018507 - DNA, 25 bp, Homo sapien
agccaagcttctcgtagcggcctcg

SEQ ID NO: 2018508 - DNA, 25 bp, Homo sapien
caagcttctcgtagcggcctcggac

SEQ ID NO: 2018509 - DNA, 25 bp, Homo sapien
tcgtagcggcctcggacactcgtct

SEQ ID NO: 2018510 - DNA, 25 bp, Homo sapien
ttcagacctaaacaagagtttagaa

SEQ ID NO: 2018511 - DNA, 25 bp, Homo sapien
tctgattcagacctaaacaagagtt

SEQ ID NO: 2018512 - DNA, 25 bp, Homo sapien
aaattctgattcagacctaaacaag

SEQ ID NO: 2018513 - DNA, 25 bp, Homo sapien
attctgattcagacctaaacaagag

SEQ ID NO: 2018514 - DNA, 25 bp, Homo sapien
tctgaatctgctgttgcatccacat

SEQ ID NO: 2018515 - DNA, 25 bp, Homo sapien
ctgctgttggattttccagtttctg

SEQ ID NO: 2018516 - DNA, 25 bp, Homo sapien
ccagtttctgaatctgctgttgcat

SEQ ID NO: 2018517 - DNA, 25 bp, Homo sapien
agtttctgaatctgctgttgcatcc

SEQ ID NO: 2018518 - DNA, 25 bp, Homo sapien
tcaggcctattctgcctgtgaccca

SEQ ID NO: 2018519 - DNA, 25 bp, Homo sapien
ggctggcaccgtcaaccaggagcac

SEQ ID NO: 2018520 - DNA, 25 bp, Homo sapien
ctttggggaccatcaaccgggctgg

SEQ ID NO: 2018521 - DNA, 25 bp, Homo sapien
caatggcattttcaggcctattctg

SEQ ID NO: 2018522 - DNA, 25 bp, Homo sapien
cagcaccaatcgctcacctagtttc

SEQ ID NO: 2018523 - DNA, 25 bp, Homo sapien
ccaatcgctcacctagtttctcttt

SEQ ID NO: 2018524 - DNA, 25 bp, Homo sapien
accaatcgctcacctagtttctctt

SEQ ID NO: 2018525 - DNA, 25 bp, Homo sapien
gaggattttggtggctggctgcggt

SEQ ID NO: 2018526 - DNA, 25 bp, Homo sapien
gggagggaggattttggtggctggc

SEQ ID NO: 2018527 - DNA, 25 bp, Homo sapien
gggaggattttggtggctggctgcg

SEQ ID NO: 2018528 - DNA, 25 bp, Homo sapien
gagggaggattttggtggctggctg

SEQ ID NO: 2018529 - DNA, 25 bp, Homo sapien
ctgcatgtgagtagcagacttgatg

SEQ ID NO: 2018530 - DNA, 25 bp, Homo sapien
tgagtagcagacttgatgctgggaa

SEQ ID NO: 2018531 - DNA, 25 bp, Homo sapien
tgggaaggtcactgggcaaatccat

SEQ ID NO: 2018532 - DNA, 25 bp, Homo sapien
gctgggaaggtcactgggcaaatcc

SEQ ID NO: 2018533 - DNA, 25 bp, Homo sapien
gcaagtcctaatttgtgaggttgac

SEQ ID NO: 2018534 - DNA, 25 bp, Homo sapien
tctcgggcaagtcctaatttgtgag

SEQ ID NO: 2018535 - DNA, 25 bp, Homo sapien
ggtctcgggcaagtcctaatttgtg

SEQ ID NO: 2018536 - DNA, 25 bp, Homo sapien
tcgggcaagtcctaatttgtgaggt

SEQ ID NO: 2018537 - DNA, 25 bp, Homo sapien
tatactctgcggctggtaaaacaag

SEQ ID NO: 2018538 - DNA, 25 bp, Homo sapien
tgcggctggtaaaacaagataagct

SEQ ID NO: 2018539 - DNA, 25 bp, Homo sapien
aagataagctcagaggttgtagaaa

SEQ ID NO: 2018540 - DNA, 25 bp, Homo sapien
ataagctcagaggttgtagaaaatg

SEQ ID NO: 2018541 - DNA, 25 bp, Homo sapien
ccactaagcatggggaaacgtttct

SEQ ID NO: 2018542 - DNA, 25 bp, Homo sapien
aagcatggggaaacgtttcttctgg

SEQ ID NO: 2018543 - DNA, 25 bp, Homo sapien
taagcatggggaaacgtttcttctg

SEQ ID NO: 2018544 - DNA, 25 bp, Homo sapien
ctaagcatggggaaacgtttcttct

SEQ ID NO: 2018545 - DNA, 25 bp, Homo sapien
ggatggcatgcaggcttaatcctgc

SEQ ID NO: 2018546 - DNA, 25 bp, Homo sapien
cagaggatggcatgcaggcttaatc

SEQ ID NO: 2018547 - DNA, 25 bp, Homo sapien
gcagaggctctgcagtgcggacgag

SEQ ID NO: 2018548 - DNA, 25 bp, Homo sapien
gaggctctgcagtgcggacgaggcc

SEQ ID NO: 2018549 - DNA, 25 bp, Homo sapien
atccagagcagtttgatccagagct

SEQ ID NO: 2018550 - DNA, 25 bp, Homo sapien
atccagagctatctggacagaatat

SEQ ID NO: 2018551 - DNA, 25 bp, Homo sapien
cagagcagtttgatccagagctatc

SEQ ID NO: 2018552 - DNA, 25 bp, Homo sapien
tccagagctatctggacagaatatt

SEQ ID NO: 2018553 - DNA, 25 bp, Homo sapien
cttttttttagcatgacagcttggg

SEQ ID NO: 2018554 - DNA, 25 bp, Homo sapien
atgacagcttgggaagaagccccag

SEQ ID NO: 2018555 - DNA, 25 bp, Homo sapien
ttttttagcatgacagcttgggaag

SEQ ID NO: 2018556 - DNA, 25 bp, Homo sapien
ttagcatgacagcttgggaagaagc

SEQ ID NO: 2018557 - DNA, 25 bp, Homo sapien
tgtaggcaggtgttgtgaccattga

SEQ ID NO: 2018558 - DNA, 25 bp, Homo sapien
caggtgttgtgaccattgagtagga

SEQ ID NO: 2018559 - DNA, 25 bp, Homo sapien
agagagaaacaggtgtgacatacac

SEQ ID NO: 2018560 - DNA, 25 bp, Homo sapien
tgtgacatacaccttatcaataatc

SEQ ID NO: 2018561 - DNA, 25 bp, Homo sapien
aagctgggaatctggcggcgactca

SEQ ID NO: 2018562 - DNA, 25 bp, Homo sapien
tcgtgggctgcttgctagatgccat

SEQ ID NO: 2018563 - DNA, 25 bp, Homo sapien
tactccccaggattgtagtggaaaa

SEQ ID NO: 2018564 - DNA, 25 bp, Homo sapien
ggcaataggagtgctcatactcccc

SEQ ID NO: 2018565 - DNA, 25 bp, Homo sapien
cacaatgcttggcaccagaatggtt

SEQ ID NO: 2018566 - DNA, 25 bp, Homo sapien
gatttctcatcgacaatacaggctg

SEQ ID NO: 2018567 - DNA, 25 bp, Homo sapien
tcttaccacggaatgacaattagag

SEQ ID NO: 2018568 - DNA, 25 bp, Homo sapien
tcatgtcaaaaagcatgtgaggtcc

SEQ ID NO: 2018569 - DNA, 25 bp, Homo sapien
cattttctatcgagtgaccacaggc

SEQ ID NO: 2018570 - DNA, 25 bp, Homo sapien
aaaacagtttcgctagagtcccaga

SEQ ID NO: 2018571 - DNA, 25 bp, Homo sapien
actgaggttgtgcagcgtaatcccc

SEQ ID NO: 2018572 - DNA, 25 bp, Homo sapien
gcatctaggccatcgctcagctgtg

SEQ ID NO: 2018573 - DNA, 25 bp, Homo sapien
tgaacagcttagagccacggagatg

SEQ ID NO: 2018574 - DNA, 25 bp, Homo sapien
aactcagctctgaacgtggcttaga

SEQ ID NO: 2018575 - DNA, 25 bp, Homo sapien
atctcagtgcgaaggcgcctcaggt

SEQ ID NO: 2018576 - DNA, 25 bp, Homo sapien
tcctgggaagatcagcgggcatctc

SEQ ID NO: 2018577 - DNA, 25 bp, Homo sapien
gctaggaccctatggagaagaatga

SEQ ID NO: 2018578 - DNA, 25 bp, Homo sapien
caaatgagtgtgacccacgaagaca

SEQ ID NO: 2018579 - DNA, 25 bp, Homo sapien
aaacatggtagagccgctaggaccc

SEQ ID NO: 2018580 - DNA, 25 bp, Homo sapien
tgtgaacaaccgctaagtccaggtg

SEQ ID NO: 2018581 - DNA, 25 bp, Homo sapien
gccctggtgtgacgcgtgtctcccg

SEQ ID NO: 2018582 - DNA, 25 bp, Homo sapien
ttggtgggaaactgtccgccctctg

SEQ ID NO: 2018583 - DNA, 25 bp, Homo sapien
tgtggccagacaccaaagacaacag

SEQ ID NO: 2018584 - DNA, 25 bp, Homo sapien
cgcccaagacaaatgactggaatca

SEQ ID NO: 2018585 - DNA, 25 bp, Homo sapien
ccctggggattcacttgaagtgagc

SEQ ID NO: 2018586 - DNA, 25 bp, Homo sapien
ggattcacttgaagtgagccctcac

SEQ ID NO: 2018587 - DNA, 25 bp, Homo sapien
tctgccctggggattcacttgaagt

SEQ ID NO: 2018588 - DNA, 25 bp, Homo sapien
tggggattcacttgaagtgagccct

SEQ ID NO: 2018589 - DNA, 25 bp, Homo sapien
taagctgctcctactgggaacgggc

SEQ ID NO: 2018590 - DNA, 25 bp, Homo sapien
tcactaacgcgaacctgagagagtt

SEQ ID NO: 2018591 - DNA, 25 bp, Homo sapien
gagagttttctaagcttcacagctg

SEQ ID NO: 2018592 - DNA, 25 bp, Homo sapien
caaagatggtgcctataccaaggta

SEQ ID NO: 2018593 - DNA, 25 bp, Homo sapien
tgctttcgtgatcacacctcctccc

SEQ ID NO: 2018594 - DNA, 25 bp, Homo sapien
catgaggtcaaggtgtcagagggct

SEQ ID NO: 2018595 - DNA, 25 bp, Homo sapien
tgcctcttccggtgcttggtggctg

SEQ ID NO: 2018596 - DNA, 25 bp, Homo sapien
cagagcccaaactcaggttcatgag

SEQ ID NO: 2018597 - DNA, 25 bp, Homo sapien
ctgatagagactctgcccctgatct

SEQ ID NO: 2018598 - DNA, 25 bp, Homo sapien
tgatagagactctgcccctgatctg

SEQ ID NO: 2018599 - DNA, 25 bp, Homo sapien
gcaggaggtcggtttgtcccactgc

SEQ ID NO: 2018600 - DNA, 25 bp, Homo sapien
gaggtcggtttgtcccactgcgata

SEQ ID NO: 2018601 - DNA, 25 bp, Homo sapien
ggtttgtcccactgcgataacaaag

SEQ ID NO: 2018602 - DNA, 25 bp, Homo sapien
tcccactgcgataacaaagcttcat

SEQ ID NO: 2018603 - DNA, 25 bp, Homo sapien
ctccctgtttggccaccttggccgc

SEQ ID NO: 2018604 - DNA, 25 bp, Homo sapien
cctgtttggccaccttggccgctca

SEQ ID NO: 2018605 - DNA, 25 bp, Homo sapien
ctgtttggccaccttggccgctcat

SEQ ID NO: 2018606 - DNA, 25 bp, Homo sapien
tccctgtttggccaccttggccgct

SEQ ID NO: 2018607 - DNA, 25 bp, Homo sapien
actgagtcaatgcaagagctcctgg

SEQ ID NO: 2018608 - DNA, 25 bp, Homo sapien
cagctgaggttagcagacgggcaaa

SEQ ID NO: 2018609 - DNA, 25 bp, Homo sapien
cctgcctgagaatggtgggctctgc

SEQ ID NO: 2018610 - DNA, 25 bp, Homo sapien
tggctcctgcttgacctcgagcagc

SEQ ID NO: 2018611 - DNA, 25 bp, Homo sapien
catgaagactcgctttgcaattgta

SEQ ID NO: 2018612 - DNA, 25 bp, Homo sapien
gggcctcctcatcatggacatgaag

SEQ ID NO: 2018613 - DNA, 25 bp, Homo sapien
aaatgacacagagttccatagaggg

SEQ ID NO: 2018614 - DNA, 25 bp, Homo sapien
cagagttccatagagggcctcctca

SEQ ID NO: 2018615 - DNA, 25 bp, Homo sapien
tgctttctctagtgtgtcctccgga

SEQ ID NO: 2018616 - DNA, 25 bp, Homo sapien
cctacctagcaaagaagtgtgacca

SEQ ID NO: 2018617 - DNA, 25 bp, Homo sapien
tgcacatgagtgcacgggtgtcagc

SEQ ID NO: 2018618 - DNA, 25 bp, Homo sapien
gagtatgagtatgcctgagtgtgaa

SEQ ID NO: 2018619 - DNA, 25 bp, Homo sapien
gaggtacagacctcccttcaggagg

SEQ ID NO: 2018620 - DNA, 25 bp, Homo sapien
tcaggagggctctcggtcagaagac

SEQ ID NO: 2018621 - DNA, 25 bp, Homo sapien
gacctgtcgccttgtgtaaaatgag

SEQ ID NO: 2018622 - DNA, 25 bp, Homo sapien
agagagcacttgtacctggttatcc

SEQ ID NO: 2018623 - DNA, 25 bp, Homo sapien
tggaagcttcgccaactcctccaag

SEQ ID NO: 2018624 - DNA, 25 bp, Homo sapien
tctggaagcttcgccaactcctcca

SEQ ID NO: 2018625 - DNA, 25 bp, Homo sapien
gttctggaagcttcgccaactcctc

SEQ ID NO: 2018626 - DNA, 25 bp, Homo sapien
tgttctggaagcttcgccaactcct

SEQ ID NO: 2018627 - DNA, 25 bp, Homo sapien
gaagtgaaggcatgtttccaaatcg

SEQ ID NO: 2018628 - DNA, 25 bp, Homo sapien
ccaaatcggatggtctctggagtgt

SEQ ID NO: 2018629 - DNA, 25 bp, Homo sapien
ggcgtcttttgttcatggtgctgaa

SEQ ID NO: 2018630 - DNA, 25 bp, Homo sapien
gatgttggcttctcctctcggaggc

SEQ ID NO: 2018631 - DNA, 25 bp, Homo sapien
catcaactgtcctagtggctgttta

SEQ ID NO: 2018632 - DNA, 25 bp, Homo sapien
aaacggcttgatttgggcagattcc

SEQ ID NO: 2018633 - DNA, 25 bp, Homo sapien
taatacctcgaagctataaacggct

SEQ ID NO: 2018634 - DNA, 25 bp, Homo sapien
gaaggcttgtgaaatgccactgact

SEQ ID NO: 2018635 - DNA, 25 bp, Homo sapien
gccggggacctctgcgaggacctgt

SEQ ID NO: 2018636 - DNA, 25 bp, Homo sapien
gccggcccgtggtcctcaagtccaa

SEQ ID NO: 2018637 - DNA, 25 bp, Homo sapien
aacgctgcctgcactacaacagagg

SEQ ID NO: 2018638 - DNA, 25 bp, Homo sapien
aggacatgcccgaggccgaactcct

SEQ ID NO: 2018639 - DNA, 25 bp, Homo sapien
caagcaaagcatgctgggcgcaaag

SEQ ID NO: 2018640 - DNA, 25 bp, Homo sapien
cgatgtggaggtgatcgcaagcaaa

SEQ ID NO: 2018641 - DNA, 25 bp, Homo sapien
agaggagcctgaccagctgccgctt

SEQ ID NO: 2018642 - DNA, 25 bp, Homo sapien
gctttcctccgaagggcgatgtgga

SEQ ID NO: 2018643 - DNA, 25 bp, Homo sapien
cccaacaagtaaaatgaacagccct

SEQ ID NO: 2018644 - DNA, 25 bp, Homo sapien
taaataccagaacaagtaggggaca

SEQ ID NO: 2018645 - DNA, 25 bp, Homo sapien
ctatatcttcttgctcacggtggcc

SEQ ID NO: 2018646 - DNA, 25 bp, Homo sapien
cagatttatagagacgtgaaactat

SEQ ID NO: 2018647 - DNA, 25 bp, Homo sapien
tgctccgtgaactccggaacctggc

SEQ ID NO: 2018648 - DNA, 25 bp, Homo sapien
taggaatttcgaagcctgtcccctc

SEQ ID NO: 2018649 - DNA, 25 bp, Homo sapien
ccggcaggtgtctctcatggctagt

SEQ ID NO: 2018650 - DNA, 25 bp, Homo sapien
atggtggcccatccaggctcatgca

SEQ ID NO: 2018651 - DNA, 25 bp, Homo sapien
caatctgtgccaagcttagcctcac

SEQ ID NO: 2018652 - DNA, 25 bp, Homo sapien
ccaatctgtgccaagcttagcctca

SEQ ID NO: 2018653 - DNA, 25 bp, Homo sapien
cattttccagactcggaaacaagcc

SEQ ID NO: 2018654 - DNA, 25 bp, Homo sapien
tttccagactcggaaacaagccaca

SEQ ID NO: 2018655 - DNA, 25 bp, Homo sapien
tcctcattttccagactcggaaaca

SEQ ID NO: 2018656 - DNA, 25 bp, Homo sapien
gactcggaaacaagccacacagcaa

SEQ ID NO: 2018657 - DNA, 25 bp, Homo sapien
caaaggttgatttggccaggccggg

SEQ ID NO: 2018658 - DNA, 25 bp, Homo sapien
ggagacacccaaaacggcatttcga

SEQ ID NO: 2018659 - DNA, 25 bp, Homo sapien
ggcatttcgaatagcgcagcccagc

SEQ ID NO: 2018660 - DNA, 25 bp, Homo sapien
cgggtaggaagcgtgtaagtacaat

SEQ ID NO: 2018661 - DNA, 25 bp, Homo sapien
acactggtaagccatgggagacgaa

SEQ ID NO: 2018662 - DNA, 25 bp, Homo sapien
tttaacactggtaagccatgggaga

SEQ ID NO: 2018663 - DNA, 25 bp, Homo sapien
actggtaagccatgggagacgaatt

SEQ ID NO: 2018664 - DNA, 25 bp, Homo sapien
taacactggtaagccatgggagacg

SEQ ID NO: 2018665 - DNA, 25 bp, Homo sapien
cagcgcccagggagttgtggtggat

SEQ ID NO: 2018666 - DNA, 25 bp, Homo sapien
aagggagactttctggcagcgccca

SEQ ID NO: 2018667 - DNA, 25 bp, Homo sapien
cagggagttgtggtggattccccac

SEQ ID NO: 2018668 - DNA, 25 bp, Homo sapien
gtagcgggggctgccagtgttccca

SEQ ID NO: 2018669 - DNA, 25 bp, Homo sapien
cgttctgtgattccaccctgagctg

SEQ ID NO: 2018670 - DNA, 25 bp, Homo sapien
atgggttcccgacacctgcgtggag

SEQ ID NO: 2018671 - DNA, 25 bp, Homo sapien
tgagcccgagctccggaagaaagtt

SEQ ID NO: 2018672 - DNA, 25 bp, Homo sapien
tttgcgggtctgatccgagtgtcca

SEQ ID NO: 2018673 - DNA, 25 bp, Homo sapien
gttcatctgatgtttggtcattcct

SEQ ID NO: 2018674 - DNA, 25 bp, Homo sapien
tggccttaccgctgttgattgagtg

SEQ ID NO: 2018675 - DNA, 25 bp, Homo sapien
catatttgtgatgtgcccgaagtgc

SEQ ID NO: 2018676 - DNA, 25 bp, Homo sapien
gggtctgttgcattcggggcatatt

SEQ ID NO: 2018677 - DNA, 25 bp, Homo sapien
tggacacaggtacaagcagccagag

SEQ ID NO: 2018678 - DNA, 25 bp, Homo sapien
gagtgtcatctctgaagagcctgta

SEQ ID NO: 2018679 - DNA, 25 bp, Homo sapien
ttgtaggagagacactcagcttttg

SEQ ID NO: 2018680 - DNA, 25 bp, Homo sapien
gacactcagcttttggagtgtcatc

SEQ ID NO: 2018681 - DNA, 25 bp, Homo sapien
cctgcagatgaatgtctatggctgc

SEQ ID NO: 2018682 - DNA, 25 bp, Homo sapien
aaagcctgcagatgaatgtctatgg

SEQ ID NO: 2018683 - DNA, 25 bp, Homo sapien
ttatgctgaaaaagcctgcagatga

SEQ ID NO: 2018684 - DNA, 25 bp, Homo sapien
gaaaaagcctgcagatgaatgtcta

SEQ ID NO: 2018685 - DNA, 25 bp, Homo sapien
agggcagctgagggttactggtagt

SEQ ID NO: 2018686 - DNA, 25 bp, Homo sapien
tagggcagctgagggttactggtag

SEQ ID NO: 2018687 - DNA, 25 bp, Homo sapien
ctagggcagctgagggttactggta

SEQ ID NO: 2018688 - DNA, 25 bp, Homo sapien
gggcagctgagggttactggtagtt

SEQ ID NO: 2018689 - DNA, 25 bp, Homo sapien
acacggatgcccacgctgggaaggt

SEQ ID NO: 2018690 - DNA, 25 bp, Homo sapien
tctcacacggatgcccacgctggga

SEQ ID NO: 2018691 - DNA, 25 bp, Homo sapien
gaatcccgggctctcacacggatgc

SEQ ID NO: 2018692 - DNA, 25 bp, Homo sapien
ggctctcacacggatgcccacgctg

SEQ ID NO: 2018693 - DNA, 25 bp, Homo sapien
cacgaaaggagacttcaggaaacac

SEQ ID NO: 2018694 - DNA, 25 bp, Homo sapien
cacacgaaaggagacttcaggaaac

SEQ ID NO: 2018695 - DNA, 25 bp, Homo sapien
cgaaaggagacttcaggaaacacac

SEQ ID NO: 2018696 - DNA, 25 bp, Homo sapien
tcacacgaaaggagacttcaggaaa

SEQ ID NO: 2018697 - DNA, 25 bp, Homo sapien
tgggacagcccagctcactggacac

SEQ ID NO: 2018698 - DNA, 25 bp, Homo sapien
tgtgggacagcccagctcactggac

SEQ ID NO: 2018699 - DNA, 25 bp, Homo sapien
ctgtgggacagcccagctcactgga

SEQ ID NO: 2018700 - DNA, 25 bp, Homo sapien
ggacagcccagctcactggacacat

SEQ ID NO: 2018701 - DNA, 25 bp, Homo sapien
tggcagaaccgcacagcacacagtg

SEQ ID NO: 2018702 - DNA, 25 bp, Homo sapien
ccctagagcagtgtgggcatggagg

SEQ ID NO: 2018703 - DNA, 25 bp, Homo sapien
ggaccccctagagcagtgtgggcat

SEQ ID NO: 2018704 - DNA, 25 bp, Homo sapien
gtcccaggacacgggctgcacagct

SEQ ID NO: 2018705 - DNA, 25 bp, Homo sapien
atgggatggtcagcccccctctgat

SEQ ID NO: 2018706 - DNA, 25 bp, Homo sapien
gaggcgtccacaccatgggatggtc

SEQ ID NO: 2018707 - DNA, 25 bp, Homo sapien
cagaggcgtccacaccatgggatgg

SEQ ID NO: 2018708 - DNA, 25 bp, Homo sapien
cagctgccgaggcgtccacaccacc

SEQ ID NO: 2018709 - DNA, 25 bp, Homo sapien
aacacgctgcgtgggacggccagcc

SEQ ID NO: 2018710 - DNA, 25 bp, Homo sapien
acggtgaactgggagaacacgctgc

SEQ ID NO: 2018711 - DNA, 25 bp, Homo sapien
tctcacggtgaactgggagaacacg

SEQ ID NO: 2018712 - DNA, 25 bp, Homo sapien
agcttctcacggtgaactgggagaa

SEQ ID NO: 2018713 - DNA, 25 bp, Homo sapien
caatggatctaattccggtccatct

SEQ ID NO: 2018714 - DNA, 25 bp, Homo sapien
ctaattccggtccatctaatttctc

SEQ ID NO: 2018715 - DNA, 25 bp, Homo sapien
gccactttcaccaatggatctaatt

SEQ ID NO: 2018716 - DNA, 25 bp, Homo sapien
gtgccttgccactttcaccaatgga

SEQ ID NO: 2018717 - DNA, 25 bp, Homo sapien
ccagcactgcactttccgttgcgtt

SEQ ID NO: 2018718 - DNA, 25 bp, Homo sapien
tccgttgcgtttcagtcccggcgga

SEQ ID NO: 2018719 - DNA, 25 bp, Homo sapien
ttgcgtttcagtcccggcggagtcg

SEQ ID NO: 2018720 - DNA, 25 bp, Homo sapien
gcactttccgttgcgtttcagtccc

SEQ ID NO: 2018721 - DNA, 25 bp, Homo sapien
ttgtgctgtgcttcccggttgctct

SEQ ID NO: 2018722 - DNA, 25 bp, Homo sapien
agaagtcgcctgcagtgcggcaatg

SEQ ID NO: 2018723 - DNA, 25 bp, Homo sapien
gcggcaatggagtccaaaactaggg

SEQ ID NO: 2018724 - DNA, 25 bp, Homo sapien
ggtccacaaggctttcgcctcgtcg

SEQ ID NO: 2018725 - DNA, 25 bp, Homo sapien
agccaggtgcggaaggtgacgtcac

SEQ ID NO: 2018726 - DNA, 25 bp, Homo sapien
gccccatttccgccctgagccaggt

SEQ ID NO: 2018727 - DNA, 25 bp, Homo sapien
gaggggtggtgtcactctctccccg

SEQ ID NO: 2018728 - DNA, 25 bp, Homo sapien
gtgtcactctctccccgccccattt

SEQ ID NO: 2018729 - DNA, 25 bp, Homo sapien
tccgtaccacgtgtcccggccacga

SEQ ID NO: 2018730 - DNA, 25 bp, Homo sapien
gaaggaaggcccactaggcaaggcc

SEQ ID NO: 2018731 - DNA, 25 bp, Homo sapien
aggcaaggccctgttaccagcagca

SEQ ID NO: 2018732 - DNA, 25 bp, Homo sapien
agcaagcgcggcgccggttccgtac

SEQ ID NO: 2018733 - DNA, 25 bp, Homo sapien
catctccaacccgggtcgttccact

SEQ ID NO: 2018734 - DNA, 25 bp, Homo sapien
gtcgttccactcgactccaccaggg

SEQ ID NO: 2018735 - DNA, 25 bp, Homo sapien
tgtccctgcgtaccggggacgcgct

SEQ ID NO: 2018736 - DNA, 25 bp, Homo sapien
aggctcaggccaagtgcgccgccca

SEQ ID NO: 2018737 - DNA, 25 bp, Homo sapien
aaagggatccgttggagaaaggctg

SEQ ID NO: 2018738 - DNA, 25 bp, Homo sapien
aaagtgccgaggttacacacatgag

SEQ ID NO: 2018739 - DNA, 25 bp, Homo sapien
ccaaagtgccgaggttacacacatg

SEQ ID NO: 2018740 - DNA, 25 bp, Homo sapien
aagtgccgaggttacacacatgagc

SEQ ID NO: 2018741 - DNA, 25 bp, Homo sapien
agtgccgaggttacacacatgagcc

SEQ ID NO: 2018742 - DNA, 25 bp, Homo sapien
ttatttagagacaggttgtcattct

SEQ ID NO: 2018743 - DNA, 25 bp, Homo sapien
caggcaggagtgcattgctgtgatt

SEQ ID NO: 2018744 - DNA, 25 bp, Homo sapien
ggcaggagtgcattgctgtgatttt

SEQ ID NO: 2018745 - DNA, 25 bp, Homo sapien
caggagtgcattgctgtgattttgg

SEQ ID NO: 2018746 - DNA, 25 bp, Homo sapien
ttgccaaaaatgtacgcagggaagc

SEQ ID NO: 2018747 - DNA, 25 bp, Homo sapien
ccaaaaatgtacgcagggaagctac

SEQ ID NO: 2018748 - DNA, 25 bp, Homo sapien
tgccaaaaatgtacgcagggaagct

SEQ ID NO: 2018749 - DNA, 25 bp, Homo sapien
gccaaaaatgtacgcagggaagcta

SEQ ID NO: 2018750 - DNA, 25 bp, Homo sapien
ctcccagccagctcggatctttctg

SEQ ID NO: 2018751 - DNA, 25 bp, Homo sapien
catgagcacgctggagaggcgttta

SEQ ID NO: 2018752 - DNA, 25 bp, Homo sapien
ctggagaggcgtttatcagtgttaa

SEQ ID NO: 2018753 - DNA, 25 bp, Homo sapien
cctcaagtaagatggagcccatgag

SEQ ID NO: 2018754 - DNA, 25 bp, Homo sapien
tgatcttagtccagaaacagccaaa

SEQ ID NO: 2018755 - DNA, 25 bp, Homo sapien
gcagaggatatagtcacttcaggga

SEQ ID NO: 2018756 - DNA, 25 bp, Homo sapien
agaatgtcacatcctgtgtccacca

SEQ ID NO: 2018757 - DNA, 25 bp, Homo sapien
tcagggatcccagcaagaatgtcac

SEQ ID NO: 2018758 - DNA, 25 bp, Homo sapien
caaaattccgtgtcagatggcaggt

SEQ ID NO: 2018759 - DNA, 25 bp, Homo sapien
cagaattgtaaattgttgccccacc

SEQ ID NO: 2018760 - DNA, 25 bp, Homo sapien
acccagccagagacgctccaggaag

SEQ ID NO: 2018761 - DNA, 25 bp, Homo sapien
ctgcggcttcagagacaaaaacttt

SEQ ID NO: 2018762 - DNA, 25 bp, Homo sapien
tggtcagtcctgtctctagtggaga

SEQ ID NO: 2018763 - DNA, 25 bp, Homo sapien
aaggaagagcaactggtcagtcctg

SEQ ID NO: 2018764 - DNA, 25 bp, Homo sapien
tcctgtctctagtggagactgaggg

SEQ ID NO: 2018765 - DNA, 25 bp, Homo sapien
ggaagagcaactggtcagtcctgtc

SEQ ID NO: 2018766 - DNA, 25 bp, Homo sapien
accccagaccgcagatctcgaaggt

SEQ ID NO: 2018767 - DNA, 25 bp, Homo sapien
ccccagaccgcagatctcgaaggtt

SEQ ID NO: 2018768 - DNA, 25 bp, Homo sapien
cagaccccagaccgcagatctcgaa

SEQ ID NO: 2018769 - DNA, 25 bp, Homo sapien
gaccccagaccgcagatctcgaagg

SEQ ID NO: 2018770 - DNA, 25 bp, Homo sapien
tcatctatgtacttaaacagggtag

SEQ ID NO: 2018771 - DNA, 25 bp, Homo sapien
gattttcatctatgtacttaaacag

SEQ ID NO: 2018772 - DNA, 25 bp, Homo sapien
tatgtacttaaacagggtagtgagg

SEQ ID NO: 2018773 - DNA, 25 bp, Homo sapien
tctatgtacttaaacagggtagtga

SEQ ID NO: 2018774 - DNA, 25 bp, Homo sapien
gaggctcccgtaacgttgccacatt

SEQ ID NO: 2018775 - DNA, 25 bp, Homo sapien
caacgagggattctgaaaaggtgtc

SEQ ID NO: 2018776 - DNA, 25 bp, Homo sapien
ggagaagaggctcccgtaacgttgc

SEQ ID NO: 2018777 - DNA, 25 bp, Homo sapien
ctgtttgtggacaagaagcaacgag

SEQ ID NO: 2018778 - DNA, 25 bp, Homo sapien
cccaactgcttaacatctgcagcag

SEQ ID NO: 2018779 - DNA, 25 bp, Homo sapien
tttgttttccgatatccaccagttc

SEQ ID NO: 2018780 - DNA, 25 bp, Homo sapien
ggatagccacccattttgcgagttt

SEQ ID NO: 2018781 - DNA, 25 bp, Homo sapien
tgatttcgcctctcttctccggcca

SEQ ID NO: 2018782 - DNA, 25 bp, Homo sapien
ctgcaatgcaaagaatgttgcctcc

SEQ ID NO: 2018783 - DNA, 25 bp, Homo sapien
tgcaatgcaaagaatgttgcctcct

SEQ ID NO: 2018784 - DNA, 25 bp, Homo sapien
aaaatgctgagtgccacaaaacctt

SEQ ID NO: 2018785 - DNA, 25 bp, Homo sapien
ctgagtaactgtcagcagttctcct

SEQ ID NO: 2018786 - DNA, 25 bp, Homo sapien
gtcctgagtaactgtcagcagttct

SEQ ID NO: 2018787 - DNA, 25 bp, Homo sapien
tgagtaactgtcagcagttctcctt

SEQ ID NO: 2018788 - DNA, 25 bp, Homo sapien
ttagtcctgagtaactgtcagcagt

SEQ ID NO: 2018789 - DNA, 25 bp, Homo sapien
gtgtagtggcgctcgcccagctact

SEQ ID NO: 2018790 - DNA, 25 bp, Homo sapien
tatctcttatgaaaaagtggctcac

SEQ ID NO: 2018791 - DNA, 25 bp, Homo sapien
gtaagtcctcactcaacttcatgga

SEQ ID NO: 2018792 - DNA, 25 bp, Homo sapien
gaacctatggatgacgtgagtactt

SEQ ID NO: 2018793 - DNA, 25 bp, Homo sapien
tactttagactatggcctactcagg

SEQ ID NO: 2018794 - DNA, 25 bp, Homo sapien
gctgtgcaaaactcctgtggccatg

SEQ ID NO: 2018795 - DNA, 25 bp, Homo sapien
aatggaggcaaatcaatcttaggtc

SEQ ID NO: 2018796 - DNA, 25 bp, Homo sapien
aaaagttagtgatagcaggtacgcc

SEQ ID NO: 2018797 - DNA, 25 bp, Homo sapien
agggtgaagggctcgctgtcccagc

SEQ ID NO: 2018798 - DNA, 25 bp, Homo sapien
tgcccgtaaatgcacacggtcttct

SEQ ID NO: 2018799 - DNA, 25 bp, Homo sapien
gcccagcctgccgagcagaatagga

SEQ ID NO: 2018800 - DNA, 25 bp, Homo sapien
ctgcacatccaggtgcccgtaaatg

SEQ ID NO: 2018801 - DNA, 25 bp, Homo sapien
ctggcctgttttctgatacgcttcc

SEQ ID NO: 2018802 - DNA, 25 bp, Homo sapien
agggcgtttatccagccggccaccg

SEQ ID NO: 2018803 - DNA, 25 bp, Homo sapien
cgcttccagggcgtttatccagccg

SEQ ID NO: 2018804 - DNA, 25 bp, Homo sapien
ccggccaccgggcccttatcatcag

SEQ ID NO: 2018805 - DNA, 25 bp, Homo sapien
aaacaaacctatactcttacatccg

SEQ ID NO: 2018806 - DNA, 25 bp, Homo sapien
tcagatggaacccaggactcaggca

SEQ ID NO: 2018807 - DNA, 25 bp, Homo sapien
agtcatctgtgctgataagggctgg

SEQ ID NO: 2018808 - DNA, 25 bp, Homo sapien
taagctgttgtgtgaacagagagcc

SEQ ID NO: 2018809 - DNA, 25 bp, Homo sapien
aaagtcacatttcatgcggtggcaa

SEQ ID NO: 2018810 - DNA, 25 bp, Homo sapien
tatgttctggcaagggaccacactc

SEQ ID NO: 2018811 - DNA, 25 bp, Homo sapien
taggaggacgtaaaccacacagaga

SEQ ID NO: 2018812 - DNA, 25 bp, Homo sapien
cggtggcaaaaatcacgctgagtcg

SEQ ID NO: 2018813 - DNA, 25 bp, Homo sapien
gctaagacccttttcagacctaaca

SEQ ID NO: 2018814 - DNA, 25 bp, Homo sapien
tgagtcctatttcacgaccacccag

SEQ ID NO: 2018815 - DNA, 25 bp, Homo sapien
tctatacagcatgatcacaactagg

SEQ ID NO: 2018816 - DNA, 25 bp, Homo sapien
taaatgaggactcaaggctactgag

SEQ ID NO: 2018817 - DNA, 25 bp, Homo sapien
aaaaatgaggttgtgcgtgaagctg

SEQ ID NO: 2018818 - DNA, 25 bp, Homo sapien
ccaccttgccgtgtgtctggatcat

SEQ ID NO: 2018819 - DNA, 25 bp, Homo sapien
gaagctggcgatttgccaaaggcca

SEQ ID NO: 2018820 - DNA, 25 bp, Homo sapien
gctttgcaggtgctctcccgactct

SEQ ID NO: 2018821 - DNA, 25 bp, Homo sapien
gaccttcgctgctcccgggcacaga

SEQ ID NO: 2018822 - DNA, 25 bp, Homo sapien
aggaggtgcgggtcctcctgtgtga

SEQ ID NO: 2018823 - DNA, 25 bp, Homo sapien
gccaccgacacgaggaggtgcgggt

SEQ ID NO: 2018824 - DNA, 25 bp, Homo sapien
agcggagccaccgacacgaggaggt

SEQ ID NO: 2018825 - DNA, 25 bp, Homo sapien
tgctccctctgcaataagggccacg

SEQ ID NO: 2018826 - DNA, 25 bp, Homo sapien
cacgacacgaggaacaccacgtgag

SEQ ID NO: 2018827 - DNA, 25 bp, Homo sapien
atgaccgaggggagcttccaggaaa

SEQ ID NO: 2018828 - DNA, 25 bp, Homo sapien
gaacaccacgtgagtcctgattata

SEQ ID NO: 2018829 - DNA, 25 bp, Homo sapien
agaatcggacgttgacaggaatctc

SEQ ID NO: 2018830 - DNA, 25 bp, Homo sapien
tcgaggcagaatcggacgttgacag

SEQ ID NO: 2018831 - DNA, 25 bp, Homo sapien
gccttcgaggcagaatcggacgttg

SEQ ID NO: 2018832 - DNA, 25 bp, Homo sapien
aggcagaatcggacgttgacaggaa

SEQ ID NO: 2018833 - DNA, 25 bp, Homo sapien
caaatgcccctgaggccgtaggtga

SEQ ID NO: 2018834 - DNA, 25 bp, Homo sapien
ccgtaggtgatgcagggcttcttct

SEQ ID NO: 2018835 - DNA, 25 bp, Homo sapien
tttccgggcaaaaatcagctcgtct

SEQ ID NO: 2018836 - DNA, 25 bp, Homo sapien
gtcagaaatgcagacatagtccaca

SEQ ID NO: 2018837 - DNA, 25 bp, Homo sapien
ggtggtttatggaagctgggaattg

SEQ ID NO: 2018838 - DNA, 25 bp, Homo sapien
taacttctgatcactggaagtgttg

SEQ ID NO: 2018839 - DNA, 25 bp, Homo sapien
gacttctgggtccttgtctactttg

SEQ ID NO: 2018840 - DNA, 25 bp, Homo sapien
ggaattggggcactaagtgagccct

SEQ ID NO: 2018841 - DNA, 25 bp, Homo sapien
ggagcctaagtgctaacatataaat

SEQ ID NO: 2018842 - DNA, 25 bp, Homo sapien
tctctttttcccgtgcgtcacttag

SEQ ID NO: 2018843 - DNA, 25 bp, Homo sapien
tttcccgtgcgtcacttagtcatgg

SEQ ID NO: 2018844 - DNA, 25 bp, Homo sapien
cttagtcatgggataaggagcctaa

SEQ ID NO: 2018845 - DNA, 25 bp, Homo sapien
cccgtacaccccagaatggaggtct

SEQ ID NO: 2018846 - DNA, 25 bp, Homo sapien
caccccagaatggaggtctttgttg

SEQ ID NO: 2018847 - DNA, 25 bp, Homo sapien
atcagtcatggcctcatgcaccgag

SEQ ID NO: 2018848 - DNA, 25 bp, Homo sapien
tcagtcatggcctcatgcaccgagc

SEQ ID NO: 2018849 - DNA, 25 bp, Homo sapien
tctttcctgcaccgaccccaggaag

SEQ ID NO: 2018850 - DNA, 25 bp, Homo sapien
gcaccaaggcgagctgctctttcct

SEQ ID NO: 2018851 - DNA, 25 bp, Homo sapien
gttacagcactcaggggaggccgca

SEQ ID NO: 2018852 - DNA, 25 bp, Homo sapien
ctcaggagagatgcggctcaggccc

SEQ ID NO: 2018853 - DNA, 25 bp, Homo sapien
tgtcaaagtcgatgtcgtcgtacag

SEQ ID NO: 2018854 - DNA, 25 bp, Homo sapien
tgtgctcctcttccgtgacggcggc

SEQ ID NO: 2018855 - DNA, 25 bp, Homo sapien
ggatcaggatgttccccctcttgtc

SEQ ID NO: 2018856 - DNA, 25 bp, Homo sapien
ggcaaactcctctatgtcaaagtcg

SEQ ID NO: 2018857 - DNA, 25 bp, Homo sapien
tgtggctgtgcaggaggatctgcgc

SEQ ID NO: 2018858 - DNA, 25 bp, Homo sapien
cttgtggctgtgcaggaggatctgc

SEQ ID NO: 2018859 - DNA, 25 bp, Homo sapien
tggctgtgcaggaggatctgcgccc

SEQ ID NO: 2018860 - DNA, 25 bp, Homo sapien
ctgtgcaggaggatctgcgccccca

SEQ ID NO: 2018861 - DNA, 25 bp, Homo sapien
cacctgtgtcacagcgtggcctggg

SEQ ID NO: 2018862 - DNA, 25 bp, Homo sapien
caggtggcagagtcgagccctgaac

SEQ ID NO: 2018863 - DNA, 25 bp, Homo sapien
tggcagagtcgagccctgaaccaga

SEQ ID NO: 2018864 - DNA, 25 bp, Homo sapien
gggacacctgtgtcacagcgtggcc

SEQ ID NO: 2018865 - DNA, 25 bp, Homo sapien
ctgggaatcacggtcttggccccag

SEQ ID NO: 2018866 - DNA, 25 bp, Homo sapien
agaaggcgccttcgatgccatggag

SEQ ID NO: 2018867 - DNA, 25 bp, Homo sapien
cgccatcggtgcatgaggatgtctt

SEQ ID NO: 2018868 - DNA, 25 bp, Homo sapien
gacagagacgggtaccgccatcggt

SEQ ID NO: 2018869 - DNA, 25 bp, Homo sapien
agtcatgttcggcacgagcctgatg

SEQ ID NO: 2018870 - DNA, 25 bp, Homo sapien
ttcaggagtcatgttcggcacgagc

SEQ ID NO: 2018871 - DNA, 25 bp, Homo sapien
tcggcacgagcctgatggagaactt

SEQ ID NO: 2018872 - DNA, 25 bp, Homo sapien
cgacttcaggagtcatgttcggcac

SEQ ID NO: 2018873 - DNA, 25 bp, Homo sapien
gtaacagcctatattacccaagtct

SEQ ID NO: 2018874 - DNA, 25 bp, Homo sapien
gtctctgcccggacacagtagctct

SEQ ID NO: 2018875 - DNA, 25 bp, Homo sapien
ggtgtctgtcgagtaacagcctata

SEQ ID NO: 2018876 - DNA, 25 bp, Homo sapien
catggcccgggtgtctgtcgagtaa

SEQ ID NO: 2018877 - DNA, 25 bp, Homo sapien
tctttgattagcttctgaaccgtga

SEQ ID NO: 2018878 - DNA, 25 bp, Homo sapien
tgatccagtgctagtgacctacggg

SEQ ID NO: 2018879 - DNA, 25 bp, Homo sapien
tatggacagaatgtttgcgtgcccc

SEQ ID NO: 2018880 - DNA, 25 bp, Homo sapien
tatcatgggtctacagcgagcttac

SEQ ID NO: 2018881 - DNA, 25 bp, Homo sapien
taagctatcgcgtctgccacgtaag

SEQ ID NO: 2018882 - DNA, 25 bp, Homo sapien
ttctcccagccaggtaatgagggtg

SEQ ID NO: 2018883 - DNA, 25 bp, Homo sapien
tacaccttgaactcattggggctgc

SEQ ID NO: 2018884 - DNA, 25 bp, Homo sapien
acttcttagttaggtagcttgtgac

SEQ ID NO: 2018885 - DNA, 25 bp, Homo sapien
gggctgcgtagttcagcaaacttct

SEQ ID NO: 2018886 - DNA, 25 bp, Homo sapien
tagcagagtcctgtcagacgtgcga

SEQ ID NO: 2018887 - DNA, 25 bp, Homo sapien
tactcagtagcactcagtcagatgc

SEQ ID NO: 2018888 - DNA, 25 bp, Homo sapien
cacgcccacgcgatatagcagagtc

SEQ ID NO: 2018889 - DNA, 25 bp, Homo sapien
agtcagatgctgtgcaaggccctgg

SEQ ID NO: 2018890 - DNA, 25 bp, Homo sapien
tcaaggtcacgggaatactgccgcc

SEQ ID NO: 2018891 - DNA, 25 bp, Homo sapien
tctgggagtgggctccgtcatccgc

SEQ ID NO: 2018892 - DNA, 25 bp, Homo sapien
tccctggtcaagtctggctcaacac

SEQ ID NO: 2018893 - DNA, 25 bp, Homo sapien
agcagcatgacgttcttgcccgtgg

SEQ ID NO: 2018894 - DNA, 25 bp, Homo sapien
gagacctcatacaggtacgcggcca

SEQ ID NO: 2018895 - DNA, 25 bp, Homo sapien
tacgcggccagcatcttggttccct

SEQ ID NO: 2018896 - DNA, 25 bp, Homo sapien
ccttcagctgggagacctcatacag

SEQ ID NO: 2018897 - DNA, 25 bp, Homo sapien
cttggttccctctatgtagttatac

SEQ ID NO: 2018898 - DNA, 25 bp, Homo sapien
gaggtgagggcaggattccttctca

SEQ ID NO: 2018899 - DNA, 25 bp, Homo sapien
cctgggcaagttggaaaagggtgag

SEQ ID NO: 2018900 - DNA, 25 bp, Homo sapien
caagttggaaaagggtgaggtgagg

SEQ ID NO: 2018901 - DNA, 25 bp, Homo sapien
cattggagatggcacacagagggct

SEQ ID NO: 2018902 - DNA, 25 bp, Homo sapien
gccatcctgaccactctgagaactt

SEQ ID NO: 2018903 - DNA, 25 bp, Homo sapien
ggccgacaaccagaactttccgcag

SEQ ID NO: 2018904 - DNA, 25 bp, Homo sapien
gggtatcttctgcaggtcaagccat

SEQ ID NO: 2018905 - DNA, 25 bp, Homo sapien
ggacagctggatacacttgtgtctg

SEQ ID NO: 2018906 - DNA, 25 bp, Homo sapien
aaccctcctacgtcagtgtcctgag

SEQ ID NO: 2018907 - DNA, 25 bp, Homo sapien
aagcaaccctcctacgtcagtgtcc

SEQ ID NO: 2018908 - DNA, 25 bp, Homo sapien
agcaaccctcctacgtcagtgtcct

SEQ ID NO: 2018909 - DNA, 25 bp, Homo sapien
ccctcctacgtcagtgtcctgagta

SEQ ID NO: 2018910 - DNA, 25 bp, Homo sapien
tgagggatcatactaaagagaagac

SEQ ID NO: 2018911 - DNA, 25 bp, Homo sapien
aatgtgcaatgcatcacctgagaca

SEQ ID NO: 2018912 - DNA, 25 bp, Homo sapien
tagcgagagatcagaggaggcccta

SEQ ID NO: 2018913 - DNA, 25 bp, Homo sapien
gtcttgagaaaaggacaggacccgc

SEQ ID NO: 2018914 - DNA, 25 bp, Homo sapien
tttcaacacgagtttgggaggagcc

SEQ ID NO: 2018915 - DNA, 25 bp, Homo sapien
acgatgagtgtgatgttcccagaac

SEQ ID NO: 2018916 - DNA, 25 bp, Homo sapien
gatgcaaaagccatagagggtcccc

SEQ ID NO: 2018917 - DNA, 25 bp, Homo sapien
gcagctcgcatgcatgagacaccag

SEQ ID NO: 2018918 - DNA, 25 bp, Homo sapien
tggaaattccacgagggactgagct

SEQ ID NO: 2018919 - DNA, 25 bp, Homo sapien
catttatctgatcatgggccaggct

SEQ ID NO: 2018920 - DNA, 25 bp, Homo sapien
ttagtcagacccattcagtccaggg

SEQ ID NO: 2018921 - DNA, 25 bp, Homo sapien
caaaaccagctagtggcatgccagc

SEQ ID NO: 2018922 - DNA, 25 bp, Homo sapien
atctggagaacaaagcggcttcgga

SEQ ID NO: 2018923 - DNA, 25 bp, Homo sapien
tctgaagcctctagcaactttccca

SEQ ID NO: 2018924 - DNA, 25 bp, Homo sapien
agtggagctattcacatctggagaa

SEQ ID NO: 2018925 - DNA, 25 bp, Homo sapien
cccggaaggaagacgaggctggtat

SEQ ID NO: 2018926 - DNA, 25 bp, Homo sapien
gtcagcagagcccatgaccgaggct

SEQ ID NO: 2018927 - DNA, 25 bp, Homo sapien
tgaccgaggctgcactcactgtgag

SEQ ID NO: 2018928 - DNA, 25 bp, Homo sapien
ctccttccccaggtgcgtcagcaga

SEQ ID NO: 2018929 - DNA, 25 bp, Homo sapien
ccagcgggtgatggctcccaactgc

SEQ ID NO: 2018930 - DNA, 25 bp, Homo sapien
tgccagggtcccgagccagcagagt

SEQ ID NO: 2018931 - DNA, 25 bp, Homo sapien
ctgctgagaagctaggacagctgcc

SEQ ID NO: 2018932 - DNA, 25 bp, Homo sapien
agtggcagtcaccagggcagcatct

SEQ ID NO: 2018933 - DNA, 25 bp, Homo sapien
tggtgagccgcagatgacaacctgc

SEQ ID NO: 2018934 - DNA, 25 bp, Homo sapien
ctcctgattagggctgggacgaagg

SEQ ID NO: 2018935 - DNA, 25 bp, Homo sapien
ggggaggacctcagggctcaggtcc

SEQ ID NO: 2018936 - DNA, 25 bp, Homo sapien
acctcagggctcaggtcccctgctc

SEQ ID NO: 2018937 - DNA, 25 bp, Homo sapien
tcctgattagggctgggacgaaggg

SEQ ID NO: 2018938 - DNA, 25 bp, Homo sapien
gagttccatctgtgcgtgccttgtc

SEQ ID NO: 2018939 - DNA, 25 bp, Homo sapien
acaatgcgccccattccttctgagg

SEQ ID NO: 2018940 - DNA, 25 bp, Homo sapien
aggtacctttgtcccaaccacagtg

SEQ ID NO: 2018941 - DNA, 25 bp, Homo sapien
caactttatgtcctgtggcgccgga

SEQ ID NO: 2018942 - DNA, 25 bp, Homo sapien
gttttattagcctagcttatctcac

SEQ ID NO: 2018943 - DNA, 25 bp, Homo sapien
tgggattgttttatagaggttgctc

SEQ ID NO: 2018944 - DNA, 25 bp, Homo sapien
gctctgatgaatttgttataacaca

SEQ ID NO: 2018945 - DNA, 25 bp, Homo sapien
gcttatctcaccatcacaggatttt

SEQ ID NO: 2018946 - DNA, 25 bp, Homo sapien
taggctggtgaagtctcagtgccat

SEQ ID NO: 2018947 - DNA, 25 bp, Homo sapien
ggaactaggctggtgaagtctcagt

SEQ ID NO: 2018948 - DNA, 25 bp, Homo sapien
ctttccgtaggtggaggtgagcagg

SEQ ID NO: 2018949 - DNA, 25 bp, Homo sapien
gagaacaaggggaactaggctggtg

SEQ ID NO: 2018950 - DNA, 25 bp, Homo sapien
acaaaaaccaagttaacaagctcat

SEQ ID NO: 2018951 - DNA, 25 bp, Homo sapien
caaaaaccaagttaacaagctcatc

SEQ ID NO: 2018952 - DNA, 25 bp, Homo sapien
aaaaaccaagttaacaagctcatct

SEQ ID NO: 2018953 - DNA, 25 bp, Homo sapien
cagttgctggacttcggaccttcca

SEQ ID NO: 2018954 - DNA, 25 bp, Homo sapien
gctgcctccagtcagtcggaataaa

SEQ ID NO: 2018955 - DNA, 25 bp, Homo sapien
taacacaaggcggtagaaccaaaca

SEQ ID NO: 2018956 - DNA, 25 bp, Homo sapien
gaaggtctgttacctcacacagctg

SEQ ID NO: 2018957 - DNA, 25 bp, Homo sapien
gcagcacagccagcagggacgcagc

SEQ ID NO: 2018958 - DNA, 25 bp, Homo sapien
cagcagcacagccagcagggacgca

SEQ ID NO: 2018959 - DNA, 25 bp, Homo sapien
gcagcagcacagccagcagggacgc

SEQ ID NO: 2018960 - DNA, 25 bp, Homo sapien
agcagcacagccagcagggacgcag

SEQ ID NO: 2018961 - DNA, 25 bp, Homo sapien
ttcatcctgatggaggtcaatgtac

SEQ ID NO: 2018962 - DNA, 25 bp, Homo sapien
atcctgatggaggtcaatgtactgg

SEQ ID NO: 2018963 - DNA, 25 bp, Homo sapien
gactttctctaacagcgccgggggc

SEQ ID NO: 2018964 - DNA, 25 bp, Homo sapien
caaattcatcctgatggaggtcaat

SEQ ID NO: 2018965 - DNA, 25 bp, Homo sapien
tggacagagtcgctctcgatggcca

SEQ ID NO: 2018966 - DNA, 25 bp, Homo sapien
gctggacagagtcgctctcgatggc

SEQ ID NO: 2018967 - DNA, 25 bp, Homo sapien
aggctggacagagtcgctctcgatg

SEQ ID NO: 2018968 - DNA, 25 bp, Homo sapien
gacagagtcgctctcgatggccacc

SEQ ID NO: 2018969 - DNA, 25 bp, Homo sapien
aggcgctgcagcgtgtccgcagcca

SEQ ID NO: 2018970 - DNA, 25 bp, Homo sapien
cagccacggccatcattctgaagag

SEQ ID NO: 2018971 - DNA, 25 bp, Homo sapien
agccacggccatcattctgaagagc

SEQ ID NO: 2018972 - DNA, 25 bp, Homo sapien
cagcgtgtccgcagccacggccatc

SEQ ID NO: 2018973 - DNA, 25 bp, Homo sapien
gctgaggacccatgtccaccgaggc

SEQ ID NO: 2018974 - DNA, 25 bp, Homo sapien
tgctgaggacccatgtccaccgagg

SEQ ID NO: 2018975 - DNA, 25 bp, Homo sapien
ctgctgaggacccatgtccaccgag

SEQ ID NO: 2018976 - DNA, 25 bp, Homo sapien
tcagtgggagggaatcgtacagcac

SEQ ID NO: 2018977 - DNA, 25 bp, Homo sapien
gaagcacacggtgcctttcgtggga

SEQ ID NO: 2018978 - DNA, 25 bp, Homo sapien
gtccaagtggccgtagaagcacacg

SEQ ID NO: 2018979 - DNA, 25 bp, Homo sapien
cgtctacctccgtcagcacataggg

SEQ ID NO: 2018980 - DNA, 25 bp, Homo sapien
tattggaagactctgaccatcgggc

SEQ ID NO: 2018981 - DNA, 25 bp, Homo sapien
ctttgttgtcggtcgctcctcgtcc

SEQ ID NO: 2018982 - DNA, 25 bp, Homo sapien
tctgaaggcgctcacagcattgatc

SEQ ID NO: 2018983 - DNA, 25 bp, Homo sapien
gatccaagccaagacagggcctttg

SEQ ID NO: 2018984 - DNA, 25 bp, Homo sapien
cagggctctgaaggcgctcacagca

SEQ ID NO: 2018985 - DNA, 25 bp, Homo sapien
tcctctctcccaaacacagctgcca

SEQ ID NO: 2018986 - DNA, 25 bp, Homo sapien
tctcccaaacacagctgccacctac

SEQ ID NO: 2018987 - DNA, 25 bp, Homo sapien
ctctctcccaaacacagctgccacc

SEQ ID NO: 2018988 - DNA, 25 bp, Homo sapien
ctcctctctcccaaacacagctgcc

SEQ ID NO: 2018989 - DNA, 25 bp, Homo sapien
cagaatgtcatggagattcctatct

SEQ ID NO: 2018990 - DNA, 25 bp, Homo sapien
agagatccaaggattcctgcagaat

SEQ ID NO: 2018991 - DNA, 25 bp, Homo sapien
tggagattcctatcttgatcatttg

SEQ ID NO: 2018992 - DNA, 25 bp, Homo sapien
ttggacttctaaagagagccactgt

SEQ ID NO: 2018993 - DNA, 25 bp, Homo sapien
aaaattgcacaagttgcctgatgtg

SEQ ID NO: 2018994 - DNA, 25 bp, Homo sapien
attgcacaagttgcctgatgtggtt

SEQ ID NO: 2018995 - DNA, 25 bp, Homo sapien
aaattgcacaagttgcctgatgtgg

SEQ ID NO: 2018996 - DNA, 25 bp, Homo sapien
tgcacaagttgcctgatgtggtttg

SEQ ID NO: 2018997 - DNA, 25 bp, Homo sapien
caatgatgaatttgatattcacagg

SEQ ID NO: 2018998 - DNA, 25 bp, Homo sapien
ccctcaatgatgaatttgatattca

SEQ ID NO: 2018999 - DNA, 25 bp, Homo sapien
tgatgaatttgatattcacaggaag

SEQ ID NO: 2019000 - DNA, 25 bp, Homo sapien
cccctcaatgatgaatttgatattc

SEQ ID NO: 2019001 - DNA, 25 bp, Homo sapien
caccagagaagaatcggtccttttc

SEQ ID NO: 2019002 - DNA, 25 bp, Homo sapien
ctggcttcctttggctgatccacag

SEQ ID NO: 2019003 - DNA, 25 bp, Homo sapien
aattacaatgtagtccacaccagag

SEQ ID NO: 2019004 - DNA, 25 bp, Homo sapien
ccccgggttccgtaagtgattgctg

SEQ ID NO: 2019005 - DNA, 25 bp, Homo sapien
gatcccagaatggattggtgctccc

SEQ ID NO: 2019006 - DNA, 25 bp, Homo sapien
gtgtcccaggtaaggcctctgccct

SEQ ID NO: 2019007 - DNA, 25 bp, Homo sapien
cttcctctccaagatcccagaatgg

SEQ ID NO: 2019008 - DNA, 25 bp, Homo sapien
tcccctgaggccgtgtgtcccaggt

SEQ ID NO: 2019009 - DNA, 25 bp, Homo sapien
gttatctctgaccatgcggtgctca

SEQ ID NO: 2019010 - DNA, 25 bp, Homo sapien
tgccttgtggagtagcttgagcctg

SEQ ID NO: 2019011 - DNA, 25 bp, Homo sapien
aactctggaatgcttacggtgcctt

SEQ ID NO: 2019012 - DNA, 25 bp, Homo sapien
tcacatattggctaggtataccaca

SEQ ID NO: 2019013 - DNA, 25 bp, Homo sapien
gaagagcaaccagatcagccattgg

SEQ ID NO: 2019014 - DNA, 25 bp, Homo sapien
ttcctgagtgaaaatcctggtctct

SEQ ID NO: 2019015 - DNA, 25 bp, Homo sapien
cagccattggttcatgaaggatgcc

SEQ ID NO: 2019016 - DNA, 25 bp, Homo sapien
caaaggttcctgagtgaaaatcctg

SEQ ID NO: 2019017 - DNA, 25 bp, Homo sapien
agcaatccatgggaaatcaaggaca

SEQ ID NO: 2019018 - DNA, 25 bp, Homo sapien
acaatcggggaactcgtcggcgtcg

SEQ ID NO: 2019019 - DNA, 25 bp, Homo sapien
ggacagcaccaggacaatcggggaa

SEQ ID NO: 2019020 - DNA, 25 bp, Homo sapien
tcgtcggcgtcgctgtgccactcgg

SEQ ID NO: 2019021 - DNA, 25 bp, Homo sapien
gcctggccatgttgtgaaatttgca

SEQ ID NO: 2019022 - DNA, 25 bp, Homo sapien
gagcaaacaggctccccgagaaaaa

SEQ ID NO: 2019023 - DNA, 25 bp, Homo sapien
taggtgaattgagcctgagcaaaca

SEQ ID NO: 2019024 - DNA, 25 bp, Homo sapien
gctatacatgccaagtggagcacag

SEQ ID NO: 2019025 - DNA, 25 bp, Homo sapien
cctggactactgaggccaagggagt

SEQ ID NO: 2019026 - DNA, 25 bp, Homo sapien
catctgggctgattgtaccatggcc

SEQ ID NO: 2019027 - DNA, 25 bp, Homo sapien
gaaagctgtgcaactaaaaatgatg

SEQ ID NO: 2019028 - DNA, 25 bp, Homo sapien
caagggagtaaatgctttctggcaa

SEQ ID NO: 2019029 - DNA, 25 bp, Homo sapien
gacttcattcatgagcccgagccga

SEQ ID NO: 2019030 - DNA, 25 bp, Homo sapien
cacggaatccgatgcctggctgaag

SEQ ID NO: 2019031 - DNA, 25 bp, Homo sapien
gccacgcagccgaaaaagatgccat

SEQ ID NO: 2019032 - DNA, 25 bp, Homo sapien
catgcagcaatcatgcttgtgggaa

SEQ ID NO: 2019033 - DNA, 25 bp, Homo sapien
ggtccctggaagtccgggcatctcc

SEQ ID NO: 2019034 - DNA, 25 bp, Homo sapien
gaagtccgggcatctccactacagc

SEQ ID NO: 2019035 - DNA, 25 bp, Homo sapien
ctggaagtccgggcatctccactac

SEQ ID NO: 2019036 - DNA, 25 bp, Homo sapien
gtccctggaagtccgggcatctcca

SEQ ID NO: 2019037 - DNA, 25 bp, Homo sapien
gaaacagaatcctgcatgcctagca

SEQ ID NO: 2019038 - DNA, 25 bp, Homo sapien
ctgaaacgccatcacagggaaaggg

SEQ ID NO: 2019039 - DNA, 25 bp, Homo sapien
taaaaatgcccttggtacaatggcc

SEQ ID NO: 2019040 - DNA, 25 bp, Homo sapien
aatagtatgcttaagagttcgcccc

SEQ ID NO: 2019041 - DNA, 25 bp, Homo sapien
gctgacagtcttctgcgtaaggaca

SEQ ID NO: 2019042 - DNA, 25 bp, Homo sapien
ggcagcttaatgagtccccactgat

SEQ ID NO: 2019043 - DNA, 25 bp, Homo sapien
tattctctcagtatacaaagcagcc

SEQ ID NO: 2019044 - DNA, 25 bp, Homo sapien
actagtaaaacgatccaggcctctg

SEQ ID NO: 2019045 - DNA, 25 bp, Homo sapien
tgactgtctgggtccccgtggccaa

SEQ ID NO: 2019046 - DNA, 25 bp, Homo sapien
cagggttgcagcaggcctcttgact

SEQ ID NO: 2019047 - DNA, 25 bp, Homo sapien
tcttgactgtctgggtccccgtggc

SEQ ID NO: 2019048 - DNA, 25 bp, Homo sapien
ggcctcttgactgtctgggtccccg

SEQ ID NO: 2019049 - DNA, 25 bp, Homo sapien
agtgtgccaatgttgtggtcctgga

SEQ ID NO: 2019050 - DNA, 25 bp, Homo sapien
tgccaatgttgtggtcctggagcca

SEQ ID NO: 2019051 - DNA, 25 bp, Homo sapien
aaggagtgtgccaatgttgtggtcc

SEQ ID NO: 2019052 - DNA, 25 bp, Homo sapien
ccaatgttgtggtcctggagccaga

SEQ ID NO: 2019053 - DNA, 25 bp, Homo sapien
tctaggtctagatggatggctttgt

SEQ ID NO: 2019054 - DNA, 25 bp, Homo sapien
gggaccaggatatgaccagacgagt

SEQ ID NO: 2019055 - DNA, 25 bp, Homo sapien
agaaatttctcaacccggctgctat

SEQ ID NO: 2019056 - DNA, 25 bp, Homo sapien
tgtaagaggaaccacttcatcatag

SEQ ID NO: 2019057 - DNA, 25 bp, Homo sapien
gaaagagatgggtacctccagaggt

SEQ ID NO: 2019058 - DNA, 25 bp, Homo sapien
cgcgccctcgatcccatgaatagaa

SEQ ID NO: 2019059 - DNA, 25 bp, Homo sapien
acattcatgtgagggactagacgga

SEQ ID NO: 2019060 - DNA, 25 bp, Homo sapien
ttagttccaggctcatcaaacgcgc

SEQ ID NO: 2019061 - DNA, 25 bp, Homo sapien
tttttgctgcgagatactgggtgtc

SEQ ID NO: 2019062 - DNA, 25 bp, Homo sapien
caatatttgcaatccacgggtgtag

SEQ ID NO: 2019063 - DNA, 25 bp, Homo sapien
ttcttttggagaacacatcttcaag

SEQ ID NO: 2019064 - DNA, 25 bp, Homo sapien
tcctagagtcatggaaacaaccatc

SEQ ID NO: 2019065 - DNA, 25 bp, Homo sapien
acccctgagtcccagtgcagattgg

SEQ ID NO: 2019066 - DNA, 25 bp, Homo sapien
cagtcagaagatcttaaggtcccac

SEQ ID NO: 2019067 - DNA, 25 bp, Homo sapien
gattggccagtcagaagatcttaag

SEQ ID NO: 2019068 - DNA, 25 bp, Homo sapien
cccagtgcagattggccagtcagaa

SEQ ID NO: 2019069 - DNA, 25 bp, Homo sapien
gatctgtagttttccgtgtctgtgt

SEQ ID NO: 2019070 - DNA, 25 bp, Homo sapien
atctgtagttttccgtgtctgtgtc

SEQ ID NO: 2019071 - DNA, 25 bp, Homo sapien
ctgtagttttccgtgtctgtgtccc

SEQ ID NO: 2019072 - DNA, 25 bp, Homo sapien
tgtagttttccgtgtctgtgtccct

SEQ ID NO: 2019073 - DNA, 25 bp, Homo sapien
tccatcccggatcatatctggttct

SEQ ID NO: 2019074 - DNA, 25 bp, Homo sapien
tcttgtggacgatctcctggaacat

SEQ ID NO: 2019075 - DNA, 25 bp, Homo sapien
aattggaatggtggatccatcccgg

SEQ ID NO: 2019076 - DNA, 25 bp, Homo sapien
tcaacagctcccagcggaattagca

SEQ ID NO: 2019077 - DNA, 25 bp, Homo sapien
tcctaatccaatgggtctggtgctc

SEQ ID NO: 2019078 - DNA, 25 bp, Homo sapien
ctcaaagtcctgtgttgaaccccta

SEQ ID NO: 2019079 - DNA, 25 bp, Homo sapien
gatcttgtagtatctgccagtagcg

SEQ ID NO: 2019080 - DNA, 25 bp, Homo sapien
tctcagtagtctgggatgcttagga

SEQ ID NO: 2019081 - DNA, 25 bp, Homo sapien
ttaatggagctgggccatctctaag

SEQ ID NO: 2019082 - DNA, 25 bp, Homo sapien
aatggagctgggccatctctaagaa

SEQ ID NO: 2019083 - DNA, 25 bp, Homo sapien
atttggttccctctatgtagttcca

SEQ ID NO: 2019084 - DNA, 25 bp, Homo sapien
tttggttccctctatgtagttccac

SEQ ID NO: 2019085 - DNA, 25 bp, Homo sapien
tactgatccagatatcccaagacat

SEQ ID NO: 2019086 - DNA, 25 bp, Homo sapien
tggatcagatcagactagaaggttc

SEQ ID NO: 2019087 - DNA, 25 bp, Homo sapien
atttacattccatccctgtctaggg

SEQ ID NO: 2019088 - DNA, 25 bp, Homo sapien
tactatactagacccaaattctctg

SEQ ID NO: 2019089 - DNA, 25 bp, Homo sapien
taaagcaaaggcgatcattggatgg

SEQ ID NO: 2019090 - DNA, 25 bp, Homo sapien
cttgaggacctagaaagcaaactgg

SEQ ID NO: 2019091 - DNA, 25 bp, Homo sapien
tatgtgtcacgagcacttgaggacc

SEQ ID NO: 2019092 - DNA, 25 bp, Homo sapien
tgctgcaagcagctatgacttgagg

SEQ ID NO: 2019093 - DNA, 25 bp, Homo sapien
aattctgctctggtgcaacctgtgc

SEQ ID NO: 2019094 - DNA, 25 bp, Homo sapien
caaggactcccaaatggcatatggg

SEQ ID NO: 2019095 - DNA, 25 bp, Homo sapien
caagaggttaatatagtaccatgcc

SEQ ID NO: 2019096 - DNA, 25 bp, Homo sapien
caaggtggcatcgatctcaggaaag

SEQ ID NO: 2019097 - DNA, 25 bp, Homo sapien
taggacaccgtgaaagccacatcag

SEQ ID NO: 2019098 - DNA, 25 bp, Homo sapien
tgtggcccctggtaagatacaagca

SEQ ID NO: 2019099 - DNA, 25 bp, Homo sapien
tctaaatggtcagatgctgggcttc

SEQ ID NO: 2019100 - DNA, 25 bp, Homo sapien
taaaagtcacttggccctatcatga

SEQ ID NO: 2019101 - DNA, 25 bp, Homo sapien
aagaggatcccaacttgtagctgca

SEQ ID NO: 2019102 - DNA, 25 bp, Homo sapien
tctagcaagagacttcaacttcaga

SEQ ID NO: 2019103 - DNA, 25 bp, Homo sapien
tggacacttctagcaagagacttca

SEQ ID NO: 2019104 - DNA, 25 bp, Homo sapien
acttcaacttcagaacaaagaggat

SEQ ID NO: 2019105 - DNA, 25 bp, Homo sapien
gatgtagtcccaacagagtggcttg

SEQ ID NO: 2019106 - DNA, 25 bp, Homo sapien
ttctgttctggacctttgcgctgga

SEQ ID NO: 2019107 - DNA, 25 bp, Homo sapien
ttctggacctttgcgctggatgtag

SEQ ID NO: 2019108 - DNA, 25 bp, Homo sapien
cgctggatgtagtcccaacagagtg

SEQ ID NO: 2019109 - DNA, 25 bp, Homo sapien
gcttgacatggacaacacagacttt

SEQ ID NO: 2019110 - DNA, 25 bp, Homo sapien
agagagtcctagtgatgaaaccacc

SEQ ID NO: 2019111 - DNA, 25 bp, Homo sapien
gacaacacagacttttagtgaagac

SEQ ID NO: 2019112 - DNA, 25 bp, Homo sapien
aataatgcttgacatggacaacaca

SEQ ID NO: 2019113 - DNA, 25 bp, Homo sapien
cgcttctggcgctccgatttcgaga

SEQ ID NO: 2019114 - DNA, 25 bp, Homo sapien
gaaaaaatctctcgaatggctccca

SEQ ID NO: 2019115 - DNA, 25 bp, Homo sapien
gaggtccttgtttaagaggccacag

SEQ ID NO: 2019116 - DNA, 25 bp, Homo sapien
gctgtgcaaggcgagaatgctactt

SEQ ID NO: 2019117 - DNA, 25 bp, Homo sapien
caaggcgactccgtagtggatgcag

SEQ ID NO: 2019118 - DNA, 25 bp, Homo sapien
tttttatccgagtggccggcaggcc

SEQ ID NO: 2019119 - DNA, 25 bp, Homo sapien
acttccggtggcttccaaggcgact

SEQ ID NO: 2019120 - DNA, 25 bp, Homo sapien
tttagtacaatccaggtcgagttcc

SEQ ID NO: 2019121 - DNA, 25 bp, Homo sapien
ctgtttggcgacggaatcgctcctg

SEQ ID NO: 2019122 - DNA, 25 bp, Homo sapien
gtttggcgacggaatcgctcctgct

SEQ ID NO: 2019123 - DNA, 25 bp, Homo sapien
ttggcgacggaatcgctcctgctcg

SEQ ID NO: 2019124 - DNA, 25 bp, Homo sapien
tggcgacggaatcgctcctgctcgc

SEQ ID NO: 2019125 - DNA, 25 bp, Homo sapien
aagagctccgctcgcgcaagggcgc

SEQ ID NO: 2019126 - DNA, 25 bp, Homo sapien
gctaggtccgcagccccgaggtgtc

SEQ ID NO: 2019127 - DNA, 25 bp, Homo sapien
gaaaccgaggccacgctaggtccgc

SEQ ID NO: 2019128 - DNA, 25 bp, Homo sapien
gcgcggacaggcgaacccggcaggg

SEQ ID NO: 2019129 - DNA, 25 bp, Homo sapien
ggcacgcgagaacggcccgatttcg

SEQ ID NO: 2019130 - DNA, 25 bp, Homo sapien
tgcaggggtgcgtcccgaaggaacg

SEQ ID NO: 2019131 - DNA, 25 bp, Homo sapien
cgagaacggcccgatttcggtgcag

SEQ ID NO: 2019132 - DNA, 25 bp, Homo sapien
ccgggcacgcgagaacggcccgatt

SEQ ID NO: 2019133 - DNA, 25 bp, Homo sapien
aaagcttgcagctgtgcagctaggg

SEQ ID NO: 2019134 - DNA, 25 bp, Homo sapien
catctgttttccacttgagagcaac

SEQ ID NO: 2019135 - DNA, 25 bp, Homo sapien
ctggaaaccagacgctaaagcttgc

SEQ ID NO: 2019136 - DNA, 25 bp, Homo sapien
gcagctaggggagcatctgttttcc

SEQ ID NO: 2019137 - DNA, 25 bp, Homo sapien
gggtgacacgagagtgggcgggcgg

SEQ ID NO: 2019138 - DNA, 25 bp, Homo sapien
ctgggggtgacacgagagtgggcgg

SEQ ID NO: 2019139 - DNA, 25 bp, Homo sapien
tgacacgagagtgggcgggcggtcc

SEQ ID NO: 2019140 - DNA, 25 bp, Homo sapien
gggggtgacacgagagtgggcgggc

SEQ ID NO: 2019141 - DNA, 25 bp, Homo sapien
aaggcgcgagtagcagcggcgcagc

SEQ ID NO: 2019142 - DNA, 25 bp, Homo sapien
cagcgtcgcttaacggaagaaggcg

SEQ ID NO: 2019143 - DNA, 25 bp, Homo sapien
gcgcgagtagcagcggcgcagccag

SEQ ID NO: 2019144 - DNA, 25 bp, Homo sapien
ggaagaaggcgcgagtagcagcggc

SEQ ID NO: 2019145 - DNA, 25 bp, Homo sapien
gctgccaccgcggtgctttcggcca

SEQ ID NO: 2019146 - DNA, 25 bp, Homo sapien
tgctttcggccaccgcacttgtgtg

SEQ ID NO: 2019147 - DNA, 25 bp, Homo sapien
cagtggcgcaaagcgagctgaagtc

SEQ ID NO: 2019148 - DNA, 25 bp, Homo sapien
tgaagtcgggaatggctaggaccct

SEQ ID NO: 2019149 - DNA, 25 bp, Homo sapien
catcaatcagccgtaacttccactg

SEQ ID NO: 2019150 - DNA, 25 bp, Homo sapien
aatcagccgtaacttccactgtgct

SEQ ID NO: 2019151 - DNA, 25 bp, Homo sapien
caccatcaatcagccgtaacttcca

SEQ ID NO: 2019152 - DNA, 25 bp, Homo sapien
actccccaccatcaatcagccgtaa

SEQ ID NO: 2019153 - DNA, 25 bp, Homo sapien
ctatggggcatgagatttcaaagat

SEQ ID NO: 2019154 - DNA, 25 bp, Homo sapien
tcaaagataaggctgtgtctacatc

SEQ ID NO: 2019155 - DNA, 25 bp, Homo sapien
gtgtagacaattgcaaggaccaccc

SEQ ID NO: 2019156 - DNA, 25 bp, Homo sapien
tgtgtctacatccatgatgtggctc

SEQ ID NO: 2019157 - DNA, 25 bp, Homo sapien
agtcaccgccggaatgtctcttacc

SEQ ID NO: 2019158 - DNA, 25 bp, Homo sapien
gactggagacctcactaagtagctg

SEQ ID NO: 2019159 - DNA, 25 bp, Homo sapien
ggcagaccccaaatatcaagagaat

SEQ ID NO: 2019160 - DNA, 25 bp, Homo sapien
gcttcccagtccttataagattagg

SEQ ID NO: 2019161 - DNA, 25 bp, Homo sapien
gcttctatctaaggcggctcactgg

SEQ ID NO: 2019162 - DNA, 25 bp, Homo sapien
agtgctgacgatgcttctatctaag

SEQ ID NO: 2019163 - DNA, 25 bp, Homo sapien
tgacgatgcttctatctaaggcggc

SEQ ID NO: 2019164 - DNA, 25 bp, Homo sapien
aaggcggctcactggcactcataac

SEQ ID NO: 2019165 - DNA, 25 bp, Homo sapien
tgaaaaacctcttttgcccatagaa

SEQ ID NO: 2019166 - DNA, 25 bp, Homo sapien
gagacatgtgcctccaactgtgcag

SEQ ID NO: 2019167 - DNA, 25 bp, Homo sapien
tcagggaaacttgctatcacatcag

SEQ ID NO: 2019168 - DNA, 25 bp, Homo sapien
ttcagagaaacaacatcaatagtgc

SEQ ID NO: 2019169 - DNA, 25 bp, Homo sapien
acgacggagatgtgttttgccaaga

SEQ ID NO: 2019170 - DNA, 25 bp, Homo sapien
gatctgtacaaatcctccacgagca

SEQ ID NO: 2019171 - DNA, 25 bp, Homo sapien
caacaggtatgttccttaggctgct

SEQ ID NO: 2019172 - DNA, 25 bp, Homo sapien
gaactgtatctacattcccaatggt

SEQ ID NO: 2019173 - DNA, 25 bp, Homo sapien
ggaaggcatcatttcaacaagaagc

SEQ ID NO: 2019174 - DNA, 25 bp, Homo sapien
tcaggattctgagctagaccaaggg

SEQ ID NO: 2019175 - DNA, 25 bp, Homo sapien
gaggttactaaggtgtctagctttc

SEQ ID NO: 2019176 - DNA, 25 bp, Homo sapien
tctgaaatctttaaacgtgcttccc

SEQ ID NO: 2019177 - DNA, 25 bp, Homo sapien
tgaaagtgctgcttcgtcgacgaaa

SEQ ID NO: 2019178 - DNA, 25 bp, Homo sapien
ggtcttggcctcgaggttacactgt

SEQ ID NO: 2019179 - DNA, 25 bp, Homo sapien
gacgaaagctattacccaacacgag

SEQ ID NO: 2019180 - DNA, 25 bp, Homo sapien
agaatatttcgctcaggtcttggcc

SEQ ID NO: 2019181 - DNA, 25 bp, Homo sapien
cacacaacgtctgagagccagaagc

SEQ ID NO: 2019182 - DNA, 25 bp, Homo sapien
ctgtacaagcacacaacgtctgaga

SEQ ID NO: 2019183 - DNA, 25 bp, Homo sapien
cactgctgcacgcttccaggtgttt

SEQ ID NO: 2019184 - DNA, 25 bp, Homo sapien
ggtttctgaggtagtcacacacact

SEQ ID NO: 2019185 - DNA, 25 bp, Homo sapien
ggccttcaatccttccatttccgga

SEQ ID NO: 2019186 - DNA, 25 bp, Homo sapien
taggaatgctcttgtaattgcacac

SEQ ID NO: 2019187 - DNA, 25 bp, Homo sapien
gaagctttatatgtctcgtgagaac

SEQ ID NO: 2019188 - DNA, 25 bp, Homo sapien
tgatagtcttgaccatgccgaagct

SEQ ID NO: 2019189 - DNA, 25 bp, Homo sapien
cacgtccgtgagatgttacctttag

SEQ ID NO: 2019190 - DNA, 25 bp, Homo sapien
ttgtaatactagaggccaaaaggcc

SEQ ID NO: 2019191 - DNA, 25 bp, Homo sapien
gtgacagttcctcagacgccagcat

SEQ ID NO: 2019192 - DNA, 25 bp, Homo sapien
tcttggtggcacaatgacgttccat

SEQ ID NO: 2019193 - DNA, 25 bp, Homo sapien
taacatctctctgggagtacacatc

SEQ ID NO: 2019194 - DNA, 25 bp, Homo sapien
tagcatgttcatctgacatggtcac

SEQ ID NO: 2019195 - DNA, 25 bp, Homo sapien
ttcaattgagtttccacgatctggc

SEQ ID NO: 2019196 - DNA, 25 bp, Homo sapien
ctaaaacggaggtgggtgactcagc

SEQ ID NO: 2019197 - DNA, 25 bp, Homo sapien
gagtcaccgcgtagtaatcgcatgc

SEQ ID NO: 2019198 - DNA, 25 bp, Homo sapien
catgcctggtcatctcgcgacgagt

SEQ ID NO: 2019199 - DNA, 25 bp, Homo sapien
gtttccgttttacatgcagctctag

SEQ ID NO: 2019200 - DNA, 25 bp, Homo sapien
gaagcagaggagtgagcactaaact

SEQ ID NO: 2019201 - DNA, 25 bp, Homo sapien
ttctacagagtcagcagcgcagagc

SEQ ID NO: 2019202 - DNA, 25 bp, Homo sapien
tcagtctcaacttctacagagtcag

SEQ ID NO: 2019203 - DNA, 25 bp, Homo sapien
aaaaggaatggtcttcattgaaatt

SEQ ID NO: 2019204 - DNA, 25 bp, Homo sapien
cagcagcgcagagcactttagacat

SEQ ID NO: 2019205 - DNA, 25 bp, Homo sapien
gacatagtaagtgacatcatctcct

SEQ ID NO: 2019206 - DNA, 25 bp, Homo sapien
tctcacaatttaaggcagagcttcc

SEQ ID NO: 2019207 - DNA, 25 bp, Homo sapien
ctttatccttgacaggagcctgttg

SEQ ID NO: 2019208 - DNA, 25 bp, Homo sapien
tcttgtcacaacgagcacagggctt

SEQ ID NO: 2019209 - DNA, 25 bp, Homo sapien
caggaaggccatcgagttgctgctt

SEQ ID NO: 2019210 - DNA, 25 bp, Homo sapien
tcatttctcatgtggccggcactag

SEQ ID NO: 2019211 - DNA, 25 bp, Homo sapien
tgtagactcaccaatggaactgccc

SEQ ID NO: 2019212 - DNA, 25 bp, Homo sapien
tcaagggcagctcactaattctcac

SEQ ID NO: 2019213 - DNA, 25 bp, Homo sapien
gatccccagcacatgttaactttgg

SEQ ID NO: 2019214 - DNA, 25 bp, Homo sapien
gacagaacttgtctaagcggagcac

SEQ ID NO: 2019215 - DNA, 25 bp, Homo sapien
aatggaacactaactgtgacagagc

SEQ ID NO: 2019216 - DNA, 25 bp, Homo sapien
taaatcaggtgctacctccaggaac

SEQ ID NO: 2019217 - DNA, 25 bp, Homo sapien
taacataaaatatgatttgattttg

SEQ ID NO: 2019218 - DNA, 25 bp, Homo sapien
gatttgattttgaataatacatcac

SEQ ID NO: 2019219 - DNA, 25 bp, Homo sapien
aatatgatttgattttgaataatac

SEQ ID NO: 2019220 - DNA, 25 bp, Homo sapien
attttgaataatacatcaccaatag

SEQ ID NO: 2019221 - DNA, 25 bp, Homo sapien
ttgcaaaatggcatatcttgcactt

SEQ ID NO: 2019222 - DNA, 25 bp, Homo sapien
tggcatctccaagctgagctgttgc

SEQ ID NO: 2019223 - DNA, 25 bp, Homo sapien
gcaaaatggcatatcttgcacttga

SEQ ID NO: 2019224 - DNA, 25 bp, Homo sapien
ggcatctccaagctgagctgttgca

SEQ ID NO: 2019225 - DNA, 25 bp, Homo sapien
tatgaggtaagcagttagcgagcag

SEQ ID NO: 2019226 - DNA, 25 bp, Homo sapien
tgcaacactgaagggtacctaattc

SEQ ID NO: 2019227 - DNA, 25 bp, Homo sapien
gaatgcttgttctacaaacgcacac

SEQ ID NO: 2019228 - DNA, 25 bp, Homo sapien
cagggtgggcactgttcaaattata

SEQ ID NO: 2019229 - DNA, 25 bp, Homo sapien
caggaactaataggtccactgagca

SEQ ID NO: 2019230 - DNA, 25 bp, Homo sapien
gcagcatgagctgcttatgttcagg

SEQ ID NO: 2019231 - DNA, 25 bp, Homo sapien
tttatagcaattaaagctaatgaag

SEQ ID NO: 2019232 - DNA, 25 bp, Homo sapien
tatgttcaggaactaataggtccac

SEQ ID NO: 2019233 - DNA, 25 bp, Homo sapien
tatttccagcctataaaaattacta

SEQ ID NO: 2019234 - DNA, 25 bp, Homo sapien
taaattaagctctcaagtgttcctt

SEQ ID NO: 2019235 - DNA, 25 bp, Homo sapien
tggataaattaagctctcaagtgtt

SEQ ID NO: 2019236 - DNA, 25 bp, Homo sapien
tgatttggataaattaagctctcaa

SEQ ID NO: 2019237 - DNA, 25 bp, Homo sapien
aatgtgctctttaaggatgacagta

SEQ ID NO: 2019238 - DNA, 25 bp, Homo sapien
tccaaacagggtatttttaatgtgc

SEQ ID NO: 2019239 - DNA, 25 bp, Homo sapien
caataaattccatcgctcttcataa

SEQ ID NO: 2019240 - DNA, 25 bp, Homo sapien
gggttttaatcataacttgcataaa

SEQ ID NO: 2019241 - DNA, 25 bp, Homo sapien
cttttcaattaaggagcaactgctg

SEQ ID NO: 2019242 - DNA, 25 bp, Homo sapien
ggcaggtgacaaagaaactatagaa

SEQ ID NO: 2019243 - DNA, 25 bp, Homo sapien
tccctaggcatatagcttagtagct

SEQ ID NO: 2019244 - DNA, 25 bp, Homo sapien
gagaaatgcagctaacttggaaatg

SEQ ID NO: 2019245 - DNA, 25 bp, Homo sapien
cgcgaatgtcccacaactgaggaga

SEQ ID NO: 2019246 - DNA, 25 bp, Homo sapien
cagctggatcagagtgcacgcgaat

SEQ ID NO: 2019247 - DNA, 25 bp, Homo sapien
taaacagctatatcaaaatggccgc

SEQ ID NO: 2019248 - DNA, 25 bp, Homo sapien
gatttaagcacagacaccgcatggc

SEQ ID NO: 2019249 - DNA, 25 bp, Homo sapien
caagctgatggtagccaatggcgag

SEQ ID NO: 2019250 - DNA, 25 bp, Homo sapien
gcaagctgatggtagccaatggcga

SEQ ID NO: 2019251 - DNA, 25 bp, Homo sapien
tgcaagctgatggtagccaatggcg

SEQ ID NO: 2019252 - DNA, 25 bp, Homo sapien
aagctgatggtagccaatggcgagt

SEQ ID NO: 2019253 - DNA, 25 bp, Homo sapien
cactggaaacagacgaggagcagag

SEQ ID NO: 2019254 - DNA, 25 bp, Homo sapien
cacagtttgagtgaccaccaacagt

SEQ ID NO: 2019255 - DNA, 25 bp, Homo sapien
gaaaagcactttagtttctgcagtc

SEQ ID NO: 2019256 - DNA, 25 bp, Homo sapien
tctgcagtcaaagatcggcaatggc

SEQ ID NO: 2019257 - DNA, 25 bp, Homo sapien
aagtcctggatctctaacaagtggt

SEQ ID NO: 2019258 - DNA, 25 bp, Homo sapien
tccatattaatgagacgaagcatca

SEQ ID NO: 2019259 - DNA, 25 bp, Homo sapien
cagcactggtttcagcggagtggca

SEQ ID NO: 2019260 - DNA, 25 bp, Homo sapien
gatgtcagcactcccaatttcaagc

SEQ ID NO: 2019261 - DNA, 25 bp, Homo sapien
aacgggatcatgttggacaagtcca

SEQ ID NO: 2019262 - DNA, 25 bp, Homo sapien
aacaaatgggcctaaagctcagaca

SEQ ID NO: 2019263 - DNA, 25 bp, Homo sapien
cagtactagaaagagaacgggatca

SEQ ID NO: 2019264 - DNA, 25 bp, Homo sapien
gaatcagacttcaccccgtacagaa

SEQ ID NO: 2019265 - DNA, 25 bp, Homo sapien
tacagaagaggaattatgtttgtcc

SEQ ID NO: 2019266 - DNA, 25 bp, Homo sapien
aattatgtttgtcctgtgtaactcc

SEQ ID NO: 2019267 - DNA, 25 bp, Homo sapien
aggaattatgtttgtcctgtgtaac

SEQ ID NO: 2019268 - DNA, 25 bp, Homo sapien
cctacagaagaggaattatgtttgt

SEQ ID NO: 2019269 - DNA, 25 bp, Homo sapien
taataacgggtccatctagaaagcc

SEQ ID NO: 2019270 - DNA, 25 bp, Homo sapien
caggactcacattcataataacggg

SEQ ID NO: 2019271 - DNA, 25 bp, Homo sapien
gccacaacactggtcaaaaacaaac

SEQ ID NO: 2019272 - DNA, 25 bp, Homo sapien
gagaaaaacatgtatgctgaatggt

SEQ ID NO: 2019273 - DNA, 25 bp, Homo sapien
gaagactcaatgaagccaaaagcta

SEQ ID NO: 2019274 - DNA, 25 bp, Homo sapien
acttcagtctatactggtcctcaga

SEQ ID NO: 2019275 - DNA, 25 bp, Homo sapien
gtgagctgacaaactcggcccataa

SEQ ID NO: 2019276 - DNA, 25 bp, Homo sapien
actacaaaagcagagcttacaggga

SEQ ID NO: 2019277 - DNA, 25 bp, Homo sapien
ctatgggaccctgatgtagcctgca

SEQ ID NO: 2019278 - DNA, 25 bp, Homo sapien
taaaagagatccctagttgttggct

SEQ ID NO: 2019279 - DNA, 25 bp, Homo sapien
tcctgtgccaagatgcttcgaagaa

SEQ ID NO: 2019280 - DNA, 25 bp, Homo sapien
cgtcctgattgagtgaagtgctcta

SEQ ID NO: 2019281 - DNA, 25 bp, Homo sapien
gtaggtggcccaccaacacctcaat

SEQ ID NO: 2019282 - DNA, 25 bp, Homo sapien
gttgattgaacacactggcaatcaa

SEQ ID NO: 2019283 - DNA, 25 bp, Homo sapien
gtacatctctccctcggtggaggta

SEQ ID NO: 2019284 - DNA, 25 bp, Homo sapien
gaacacactggcaatcaacactaga

SEQ ID NO: 2019285 - DNA, 25 bp, Homo sapien
taactgcattcactgccaagccttc

SEQ ID NO: 2019286 - DNA, 25 bp, Homo sapien
acagcacgctctccactggtaactg

SEQ ID NO: 2019287 - DNA, 25 bp, Homo sapien
ctccttgtgatgagcctccccagca

SEQ ID NO: 2019288 - DNA, 25 bp, Homo sapien
ttctcctttccacacagcacgctct

SEQ ID NO: 2019289 - DNA, 25 bp, Homo sapien
caattgtgcaatactgggctgtgag

SEQ ID NO: 2019290 - DNA, 25 bp, Homo sapien
tgtcccaacagtattcgtgagccga

SEQ ID NO: 2019291 - DNA, 25 bp, Homo sapien
ccaagtctcaatgagtggcgtgaca

SEQ ID NO: 2019292 - DNA, 25 bp, Homo sapien
ctcacggagcgtcgaacacgtacga

SEQ ID NO: 2019293 - DNA, 25 bp, Homo sapien
aatgattaacaccagctctgctcat

SEQ ID NO: 2019294 - DNA, 25 bp, Homo sapien
atgattaacaccagctctgctcatt

SEQ ID NO: 2019295 - DNA, 25 bp, Homo sapien
aaatgattaacaccagctctgctca

SEQ ID NO: 2019296 - DNA, 25 bp, Homo sapien
tacagaccagacattgtttcctaaa

SEQ ID NO: 2019297 - DNA, 25 bp, Homo sapien
actgagaagtcaacccctgacttgg

SEQ ID NO: 2019298 - DNA, 25 bp, Homo sapien
aattatatttgagatctctatggta

SEQ ID NO: 2019299 - DNA, 25 bp, Homo sapien
gacttggcatgtacagaccagacat

SEQ ID NO: 2019300 - DNA, 25 bp, Homo sapien
taatatgcgtatatcacagtggctc

SEQ ID NO: 2019301 - DNA, 25 bp, Homo sapien
cagtggctctaaatgtctgagtgaa

SEQ ID NO: 2019302 - DNA, 25 bp, Homo sapien
gctgtcagacagtgtaacgaggtga

SEQ ID NO: 2019303 - DNA, 25 bp, Homo sapien
gaggtgagaccccaatagagacaga

SEQ ID NO: 2019304 - DNA, 25 bp, Homo sapien
tacagagactagttaaaaagctccc

SEQ ID NO: 2019305 - DNA, 25 bp, Homo sapien
gatgacaacgccttacagagactag

SEQ ID NO: 2019306 - DNA, 25 bp, Homo sapien
cagatgtgatgacaacgccttacag

SEQ ID NO: 2019307 - DNA, 25 bp, Homo sapien
tagttaaaaagctcccattgttgca

SEQ ID NO: 2019308 - DNA, 25 bp, Homo sapien
cctagtagatgagtatttaagtgct

SEQ ID NO: 2019309 - DNA, 25 bp, Homo sapien
tccatgcttgcctagtagatgagta

SEQ ID NO: 2019310 - DNA, 25 bp, Homo sapien
ttttggggtgccaactccatgcttg

SEQ ID NO: 2019311 - DNA, 25 bp, Homo sapien
ctttcttttggggtgccaactccat

SEQ ID NO: 2019312 - DNA, 25 bp, Homo sapien
caaattgatctagcaggactatcgc

SEQ ID NO: 2019313 - DNA, 25 bp, Homo sapien
catgagggtgtatctcctatctcca

SEQ ID NO: 2019314 - DNA, 25 bp, Homo sapien
ggagccataagtatctgcctgcaat

SEQ ID NO: 2019315 - DNA, 25 bp, Homo sapien
gagtaccggtgacattgcttcctaa

SEQ ID NO: 2019316 - DNA, 25 bp, Homo sapien
tgcggacataaaatgggacttcccc

SEQ ID NO: 2019317 - DNA, 25 bp, Homo sapien
cacaattttggccatgagcttccca

SEQ ID NO: 2019318 - DNA, 25 bp, Homo sapien
aatatgcctaatcacagggatgcac

SEQ ID NO: 2019319 - DNA, 25 bp, Homo sapien
gcagtttcctacaacagagcaagca

SEQ ID NO: 2019320 - DNA, 25 bp, Homo sapien
gaaaagacgactggcacagcagcca

SEQ ID NO: 2019321 - DNA, 25 bp, Homo sapien
caatgaaatacgctcactggtgacc

SEQ ID NO: 2019322 - DNA, 25 bp, Homo sapien
actacatgcccttccgccaatgaaa

SEQ ID NO: 2019323 - DNA, 25 bp, Homo sapien
ggttcatcctgatatgcccatattc

SEQ ID NO: 2019324 - DNA, 25 bp, Homo sapien
cctgaaagcctggcggtagctctcc

SEQ ID NO: 2019325 - DNA, 25 bp, Homo sapien
ctgaaagcctggcggtagctctccc

SEQ ID NO: 2019326 - DNA, 25 bp, Homo sapien
gcctgaaagcctggcggtagctctc

SEQ ID NO: 2019327 - DNA, 25 bp, Homo sapien
gaaagcctggcggtagctctccctc

SEQ ID NO: 2019328 - DNA, 25 bp, Homo sapien
ccagaggcttcggagagaaagttct

SEQ ID NO: 2019329 - DNA, 25 bp, Homo sapien
ggcagttggcaactttctatcaaaa

SEQ ID NO: 2019330 - DNA, 25 bp, Homo sapien
ctcagacggcgggagcttgatgaag

SEQ ID NO: 2019331 - DNA, 25 bp, Homo sapien
tctcgactcaatgtcacacctggca

SEQ ID NO: 2019332 - DNA, 25 bp, Homo sapien
gctgacatcatgtatgcggcagaga

SEQ ID NO: 2019333 - DNA, 25 bp, Homo sapien
tactggctaacatcaacctaaggca

SEQ ID NO: 2019334 - DNA, 25 bp, Homo sapien
tggagttggccggaaaaatacacac

SEQ ID NO: 2019335 - DNA, 25 bp, Homo sapien
tacacacgtgaagacgctgacatca

SEQ ID NO: 2019336 - DNA, 25 bp, Homo sapien
aacgtgttgatatgacccagagtgc

SEQ ID NO: 2019337 - DNA, 25 bp, Homo sapien
ggagtttatcatctacccactggta

SEQ ID NO: 2019338 - DNA, 25 bp, Homo sapien
ttggttgccaaagcgaggcaggtca

SEQ ID NO: 2019339 - DNA, 25 bp, Homo sapien
cacaatacaattctgcagcaggcta

SEQ ID NO: 2019340 - DNA, 25 bp, Homo sapien
gcttctatataccatacagctatca

SEQ ID NO: 2019341 - DNA, 25 bp, Homo sapien
ctggcttctatataccatacagcta

SEQ ID NO: 2019342 - DNA, 25 bp, Homo sapien
cataaactagccctggcttctatat

SEQ ID NO: 2019343 - DNA, 25 bp, Homo sapien
atgcacaccaaccaagagacctcga

SEQ ID NO: 2019344 - DNA, 25 bp, Homo sapien
cactcgacgcgttcctgttgttctg

SEQ ID NO: 2019345 - DNA, 25 bp, Homo sapien
gactttgggcttcagaggcactcga

SEQ ID NO: 2019346 - DNA, 25 bp, Homo sapien
tgtattcctggcaacgtcccgatct

SEQ ID NO: 2019347 - DNA, 25 bp, Homo sapien
gaaaagtgctcacaaagactttggg

SEQ ID NO: 2019348 - DNA, 25 bp, Homo sapien
caaaataagtcctcagccaatcctc

SEQ ID NO: 2019349 - DNA, 25 bp, Homo sapien
tatgttccttactgaatatgccagg

SEQ ID NO: 2019350 - DNA, 25 bp, Homo sapien
tgtgctgattaacgaaagacttctc

SEQ ID NO: 2019351 - DNA, 25 bp, Homo sapien
tagactagcctacatttgtgtgatg

SEQ ID NO: 2019352 - DNA, 25 bp, Homo sapien
acgcagagcgaagtgttctgtggcc

SEQ ID NO: 2019353 - DNA, 25 bp, Homo sapien
tggcctcacggcatcatgaagacaa

SEQ ID NO: 2019354 - DNA, 25 bp, Homo sapien
gcaggtcttcccacgacactggctt

SEQ ID NO: 2019355 - DNA, 25 bp, Homo sapien
tgagcgaatggacctgacagtgcct

SEQ ID NO: 2019356 - DNA, 25 bp, Homo sapien
gaagggccgctagagtgcagataac

SEQ ID NO: 2019357 - DNA, 25 bp, Homo sapien
gatcaattatacacgcccaagacag

SEQ ID NO: 2019358 - DNA, 25 bp, Homo sapien
gaatacaatagctatgaagggccgc

SEQ ID NO: 2019359 - DNA, 25 bp, Homo sapien
gaagtagcatcataagccctgcaca

SEQ ID NO: 2019360 - DNA, 25 bp, Homo sapien
tatcaggattggaaacaggccacat

SEQ ID NO: 2019361 - DNA, 25 bp, Homo sapien
tattcctcagtcctccagagagggc

SEQ ID NO: 2019362 - DNA, 25 bp, Homo sapien
gcagctgctgaattaaaatacatct

SEQ ID NO: 2019363 - DNA, 25 bp, Homo sapien
cttattttagtcaaaagaaggacag

SEQ ID NO: 2019364 - DNA, 25 bp, Homo sapien
gccttctgcctacgactggtgctgt

SEQ ID NO: 2019365 - DNA, 25 bp, Homo sapien
tcccacaactttcacggcataggtg

SEQ ID NO: 2019366 - DNA, 25 bp, Homo sapien
tcagccagacgttgtagagtatcac

SEQ ID NO: 2019367 - DNA, 25 bp, Homo sapien
taggtgatgccccattttcgtgaca

SEQ ID NO: 2019368 - DNA, 25 bp, Homo sapien
ggagttgggacactaagtactaata

SEQ ID NO: 2019369 - DNA, 25 bp, Homo sapien
tacgttaaccctcatgctgccagtg

SEQ ID NO: 2019370 - DNA, 25 bp, Homo sapien
accctcatgctatcagtgttcccaa

SEQ ID NO: 2019371 - DNA, 25 bp, Homo sapien
tgttcccaaattcccgctctgcttg

SEQ ID NO: 2019372 - DNA, 25 bp, Homo sapien
cagaggcagccacgagagaattgac

SEQ ID NO: 2019373 - DNA, 25 bp, Homo sapien
cgagagaattgacaggatcagggca

SEQ ID NO: 2019374 - DNA, 25 bp, Homo sapien
cttgtcagaggcagccacgagagaa

SEQ ID NO: 2019375 - DNA, 25 bp, Homo sapien
gcagccacgagagaattgacaggat

SEQ ID NO: 2019376 - DNA, 25 bp, Homo sapien
cagttttgaagtgggaagaggtctt

SEQ ID NO: 2019377 - DNA, 25 bp, Homo sapien
taaggcctagggagaaaaacatgga

SEQ ID NO: 2019378 - DNA, 25 bp, Homo sapien
tgagaatcatgaaaacctagaccct

SEQ ID NO: 2019379 - DNA, 25 bp, Homo sapien
aggctatagtaggaggtgcttccac

SEQ ID NO: 2019380 - DNA, 25 bp, Homo sapien
tgcacactaggctgattaacatcag

SEQ ID NO: 2019381 - DNA, 25 bp, Homo sapien
ttaacatcagagtacttgctggagg

SEQ ID NO: 2019382 - DNA, 25 bp, Homo sapien
taaagtgcaattttggactatcagc

SEQ ID NO: 2019383 - DNA, 25 bp, Homo sapien
gctggaggtccaatcaggttttcca

SEQ ID NO: 2019384 - DNA, 25 bp, Homo sapien
cacaaaattgattctggtaataccc

SEQ ID NO: 2019385 - DNA, 25 bp, Homo sapien
tacccagaagtgtttcatagactca

SEQ ID NO: 2019386 - DNA, 25 bp, Homo sapien
tgtttgcaacttatcctataggtct

SEQ ID NO: 2019387 - DNA, 25 bp, Homo sapien
aataatatttctaccgaacaagtgg

SEQ ID NO: 2019388 - DNA, 25 bp, Homo sapien
ggccaagtaatgtactaaacagcat

SEQ ID NO: 2019389 - DNA, 25 bp, Homo sapien
catgtggccaagtaatgtactaaac

SEQ ID NO: 2019390 - DNA, 25 bp, Homo sapien
cgttctaacatgtggccaagtaatg

SEQ ID NO: 2019391 - DNA, 25 bp, Homo sapien
gacatcgttctaacatgtggccaag

SEQ ID NO: 2019392 - DNA, 25 bp, Homo sapien
tatcagagacgggagatgcacagtc

SEQ ID NO: 2019393 - DNA, 25 bp, Homo sapien
caatctgagagggtaaataacacaa

SEQ ID NO: 2019394 - DNA, 25 bp, Homo sapien
cagtcccggagctagaggcaaaggt

SEQ ID NO: 2019395 - DNA, 25 bp, Homo sapien
ctgacaggcctcaacagctgtgact

SEQ ID NO: 2019396 - DNA, 25 bp, Homo sapien
cagctctatcttgccgggtgaaccc

SEQ ID NO: 2019397 - DNA, 25 bp, Homo sapien
ggctggacagcagaaacacctgaat

SEQ ID NO: 2019398 - DNA, 25 bp, Homo sapien
gccctgggcgaaacctgagctaata

SEQ ID NO: 2019399 - DNA, 25 bp, Homo sapien
aagtctatcacgaggagccctgggc

SEQ ID NO: 2019400 - DNA, 25 bp, Homo sapien
tgcgaaccctgaggtgcggtgcaca

SEQ ID NO: 2019401 - DNA, 25 bp, Homo sapien
tattctctgctttgcggttgggccc

SEQ ID NO: 2019402 - DNA, 25 bp, Homo sapien
acaatataaatatggcccgcacacc

SEQ ID NO: 2019403 - DNA, 25 bp, Homo sapien
tcgaggcctggcacttcagccattt

SEQ ID NO: 2019404 - DNA, 25 bp, Homo sapien
tatcacataagtggcatgtaaattt

SEQ ID NO: 2019405 - DNA, 25 bp, Homo sapien
atcacataagtggcatgtaaatttc

SEQ ID NO: 2019406 - DNA, 25 bp, Homo sapien
ctatcacataagtggcatgtaaatt

SEQ ID NO: 2019407 - DNA, 25 bp, Homo sapien
tcccgtgtggagtttcatgtggttg

SEQ ID NO: 2019408 - DNA, 25 bp, Homo sapien
ctgtgaggaatgagtaatggcacgt

SEQ ID NO: 2019409 - DNA, 25 bp, Homo sapien
cacgtgggccaggtacatttaaacg

SEQ ID NO: 2019410 - DNA, 25 bp, Homo sapien
tgtagtggtctttcattgcggaggc

SEQ ID NO: 2019411 - DNA, 25 bp, Homo sapien
gttgcaacaacaaacagatgaggga

SEQ ID NO: 2019412 - DNA, 25 bp, Homo sapien
ctgttgcaacaacaaacagatgagg

SEQ ID NO: 2019413 - DNA, 25 bp, Homo sapien
tgttgcaacaacaaacagatgaggg

SEQ ID NO: 2019414 - DNA, 25 bp, Homo sapien
ccgcagaggtcacacagaaacgact

SEQ ID NO: 2019415 - DNA, 25 bp, Homo sapien
cggcaaagccgcagaggtcacacag

SEQ ID NO: 2019416 - DNA, 25 bp, Homo sapien
gtcccgccggcaaagccgcagaggt

SEQ ID NO: 2019417 - DNA, 25 bp, Homo sapien
cagaggtcacacagaaacgacttct

SEQ ID NO: 2019418 - DNA, 25 bp, Homo sapien
ttttccacccacgaggcctaaggca

SEQ ID NO: 2019419 - DNA, 25 bp, Homo sapien
taatacagttcttaatgaaggaatc

SEQ ID NO: 2019420 - DNA, 25 bp, Homo sapien
gtagacatgtcgctagctaaatggg

SEQ ID NO: 2019421 - DNA, 25 bp, Homo sapien
tcaaatcctatctaatcacagatgg

SEQ ID NO: 2019422 - DNA, 25 bp, Homo sapien
acgtttatgccgagtcaaatgggac

SEQ ID NO: 2019423 - DNA, 25 bp, Homo sapien
gagttgtggaggcaaagttacactc

SEQ ID NO: 2019424 - DNA, 25 bp, Homo sapien
agttacactcatcgcacttgaaagg

SEQ ID NO: 2019425 - DNA, 25 bp, Homo sapien
ttctccagtgtggacacgtttatgc

SEQ ID NO: 2019426 - DNA, 25 bp, Homo sapien
tagtttcgcaccacgagtgacaagg

SEQ ID NO: 2019427 - DNA, 25 bp, Homo sapien
aggactcgacttgaataactgctgt

SEQ ID NO: 2019428 - DNA, 25 bp, Homo sapien
tgtgataaggcaatctcctccggga

SEQ ID NO: 2019429 - DNA, 25 bp, Homo sapien
gaatatatagtactcccggaagaca

SEQ ID NO: 2019430 - DNA, 25 bp, Homo sapien
tgtttcccacattcctgtccactta

SEQ ID NO: 2019431 - DNA, 25 bp, Homo sapien
ttcctgtccacttaaatctccaatc

SEQ ID NO: 2019432 - DNA, 25 bp, Homo sapien
cctgtccacttaaatctccaatcat

SEQ ID NO: 2019433 - DNA, 25 bp, Homo sapien
tcctgtccacttaaatctccaatca

SEQ ID NO: 2019434 - DNA, 25 bp, Homo sapien
agcctttcagacccaatcataggca

SEQ ID NO: 2019435 - DNA, 25 bp, Homo sapien
cagcctttcagacccaatcataggc

SEQ ID NO: 2019436 - DNA, 25 bp, Homo sapien
aaccggctctcgtgtgcctctgaga

SEQ ID NO: 2019437 - DNA, 25 bp, Homo sapien
ccttgagaggataaactcccatgct

SEQ ID NO: 2019438 - DNA, 25 bp, Homo sapien
tctgtcacccgcaggaaacctgtgc

SEQ ID NO: 2019439 - DNA, 25 bp, Homo sapien
tgtccacatgcgctctctgcgcgag

SEQ ID NO: 2019440 - DNA, 25 bp, Homo sapien
aaacttgtaagttagcacagaagtg

SEQ ID NO: 2019441 - DNA, 25 bp, Homo sapien
agtgattctaaaacagcacagtgcc

SEQ ID NO: 2019442 - DNA, 25 bp, Homo sapien
agttcttaggacaaattgatgcaca

SEQ ID NO: 2019443 - DNA, 25 bp, Homo sapien
cagcaagaggaaattttagttggag

SEQ ID NO: 2019444 - DNA, 25 bp, Homo sapien
acaaaaagcctgtttatgttattga

SEQ ID NO: 2019445 - DNA, 25 bp, Homo sapien
cagagaaaagctaccgaatccgcag

SEQ ID NO: 2019446 - DNA, 25 bp, Homo sapien
tgaaagacgttcctcacgacgagca

SEQ ID NO: 2019447 - DNA, 25 bp, Homo sapien
gcaaagtcagcgtcaacacagagaa

SEQ ID NO: 2019448 - DNA, 25 bp, Homo sapien
gctttccgctgaggaagaacctctc

SEQ ID NO: 2019449 - DNA, 25 bp, Homo sapien
gacgttggtcccgtagtcacacttg

SEQ ID NO: 2019450 - DNA, 25 bp, Homo sapien
agcgaggtccgggttttcgatgtca

SEQ ID NO: 2019451 - DNA, 25 bp, Homo sapien
ttcgatgtcaggatgctgttccttc

SEQ ID NO: 2019452 - DNA, 25 bp, Homo sapien
cacttgggacagttgtacatcttga

SEQ ID NO: 2019453 - DNA, 25 bp, Homo sapien
gatttaacaactactctcatttcag

SEQ ID NO: 2019454 - DNA, 25 bp, Homo sapien
cacatgaaatcctgttagaaacaag

SEQ ID NO: 2019455 - DNA, 25 bp, Homo sapien
tcatttcaggtcaactatgctttaa

SEQ ID NO: 2019456 - DNA, 25 bp, Homo sapien
tcatagttgagtgggatcaaactgg

SEQ ID NO: 2019457 - DNA, 25 bp, Homo sapien
gcctgccatgaggtaagagaatgcc

SEQ ID NO: 2019458 - DNA, 25 bp, Homo sapien
gctggcgcggctcgaatcatacagg

SEQ ID NO: 2019459 - DNA, 25 bp, Homo sapien
gagctctgataagatcgcagtgctg

SEQ ID NO: 2019460 - DNA, 25 bp, Homo sapien
caaaatccagttcacgaaggctgca

SEQ ID NO: 2019461 - DNA, 25 bp, Homo sapien
cacgagtgggcaacatgatctttgt

SEQ ID NO: 2019462 - DNA, 25 bp, Homo sapien
cagtaacttgttctgcagtagtagc

SEQ ID NO: 2019463 - DNA, 25 bp, Homo sapien
tctgcagtagtagcaacacgagtgg

SEQ ID NO: 2019464 - DNA, 25 bp, Homo sapien
tagtaaacggcttcagctggaacag

SEQ ID NO: 2019465 - DNA, 25 bp, Homo sapien
tctgataacgagcacctgtgagact

SEQ ID NO: 2019466 - DNA, 25 bp, Homo sapien
tgtgagactgcagcgcacttcacag

SEQ ID NO: 2019467 - DNA, 25 bp, Homo sapien
gaagacctcctatagccaaggctga

SEQ ID NO: 2019468 - DNA, 25 bp, Homo sapien
caaaaaagtttctggtggacataag

SEQ ID NO: 2019469 - DNA, 25 bp, Homo sapien
tgatactcccatggcacataaagtg

SEQ ID NO: 2019470 - DNA, 25 bp, Homo sapien
caacttgtattaacgagcagcaggt

SEQ ID NO: 2019471 - DNA, 25 bp, Homo sapien
taagctcaggtgaatgtcagtggac

SEQ ID NO: 2019472 - DNA, 25 bp, Homo sapien
tgttttacaaatagacggagcagtc

SEQ ID NO: 2019473 - DNA, 25 bp, Homo sapien
cagccacatattgaagcgtttggat

SEQ ID NO: 2019474 - DNA, 25 bp, Homo sapien
caggcagctttggaagacgtgagct

SEQ ID NO: 2019475 - DNA, 25 bp, Homo sapien
caaggaagttgcagttaaatcattt

SEQ ID NO: 2019476 - DNA, 25 bp, Homo sapien
cgtttggatcggcagcaggcagctt

SEQ ID NO: 2019477 - DNA, 25 bp, Homo sapien
aacagtggaagcagcttttacgcaa

SEQ ID NO: 2019478 - DNA, 25 bp, Homo sapien
tacgcaagaacacgaccctttatta

SEQ ID NO: 2019479 - DNA, 25 bp, Homo sapien
gaccccacgtgacaactggcaaaca

SEQ ID NO: 2019480 - DNA, 25 bp, Homo sapien
tgtcaactcgtcttccgttttggaa

SEQ ID NO: 2019481 - DNA, 25 bp, Homo sapien
ggttgcccatcgagaataaaaaata

SEQ ID NO: 2019482 - DNA, 25 bp, Homo sapien
tgccatttctaacacacgcgatgtg

SEQ ID NO: 2019483 - DNA, 25 bp, Homo sapien
aacgacacgcctctaagcagcatga

SEQ ID NO: 2019484 - DNA, 25 bp, Homo sapien
gctcaatgcacttcggagtatgcca

SEQ ID NO: 2019485 - DNA, 25 bp, Homo sapien
tctgccttgcaagaactaaaatcag

SEQ ID NO: 2019486 - DNA, 25 bp, Homo sapien
tgtgcatctgcgactattaaacact

SEQ ID NO: 2019487 - DNA, 25 bp, Homo sapien
tgaataacgaaatcagagccctgcc

SEQ ID NO: 2019488 - DNA, 25 bp, Homo sapien
tgtctaatgtccattcggaacctca

SEQ ID NO: 2019489 - DNA, 25 bp, Homo sapien
cagctggattcaggtgacctgctag

SEQ ID NO: 2019490 - DNA, 25 bp, Homo sapien
agctggtcgggaacagctggattca

SEQ ID NO: 2019491 - DNA, 25 bp, Homo sapien
caggtgacctgctagctcattaaat

SEQ ID NO: 2019492 - DNA, 25 bp, Homo sapien
tttcataaagctggtcgggaacagc

SEQ ID NO: 2019493 - DNA, 25 bp, Homo sapien
gcatggccctttcctttcggtggca

SEQ ID NO: 2019494 - DNA, 25 bp, Homo sapien
agcaggcaacagcatggccctttcc

SEQ ID NO: 2019495 - DNA, 25 bp, Homo sapien
tctcccccgcaacagtgctcacctg

SEQ ID NO: 2019496 - DNA, 25 bp, Homo sapien
atggccctttcctttcggtggcacg

SEQ ID NO: 2019497 - DNA, 25 bp, Homo sapien
taatattggtcatcacatacaatct

SEQ ID NO: 2019498 - DNA, 25 bp, Homo sapien
gaaattatgagcagcagataacttt

SEQ ID NO: 2019499 - DNA, 25 bp, Homo sapien
gaaaaagtttcacattgtagtgccc

SEQ ID NO: 2019500 - DNA, 25 bp, Homo sapien
tattagtcttatattcagccatttt

SEQ ID NO: 2019501 - DNA, 25 bp, Homo sapien
gatggtatctacctcctatggctgg

SEQ ID NO: 2019502 - DNA, 25 bp, Homo sapien
gccacggcccactgtctcattattg

SEQ ID NO: 2019503 - DNA, 25 bp, Homo sapien
aatacagaaagcctccgggctcagt

SEQ ID NO: 2019504 - DNA, 25 bp, Homo sapien
ttaatagaactcaggcaagactcag

SEQ ID NO: 2019505 - DNA, 25 bp, Homo sapien
tgcattccatattgaaaattgatct

SEQ ID NO: 2019506 - DNA, 25 bp, Homo sapien
caagcaaaaacatatggttacaagc

SEQ ID NO: 2019507 - DNA, 25 bp, Homo sapien
tccatattgaaaattgatcttgagt

SEQ ID NO: 2019508 - DNA, 25 bp, Homo sapien
aaacatatggttacaagctctatgc

SEQ ID NO: 2019509 - DNA, 25 bp, Homo sapien
gcagatatctttattttcggcggcg

SEQ ID NO: 2019510 - DNA, 25 bp, Homo sapien
tatctttattttcggcggcggcagc

SEQ ID NO: 2019511 - DNA, 25 bp, Homo sapien
cggcggcagcagcttttggcgccat

SEQ ID NO: 2019512 - DNA, 25 bp, Homo sapien
tgctgcagatatctttattttcggc

SEQ ID NO: 2019513 - DNA, 25 bp, Homo sapien
ttagctctgtggaactctgaaatga

SEQ ID NO: 2019514 - DNA, 25 bp, Homo sapien
agctctgtggaactctgaaatgaac

SEQ ID NO: 2019515 - DNA, 25 bp, Homo sapien
tagctctgtggaactctgaaatgaa

SEQ ID NO: 2019516 - DNA, 25 bp, Homo sapien
tcttaatggcaagtgcatttaaact

SEQ ID NO: 2019517 - DNA, 25 bp, Homo sapien
aattagcactagagtacatcacaag

SEQ ID NO: 2019518 - DNA, 25 bp, Homo sapien
gcatttaaactgttatctaaagatg

SEQ ID NO: 2019519 - DNA, 25 bp, Homo sapien
gaaggtaagcctgcttaattcactg

SEQ ID NO: 2019520 - DNA, 25 bp, Homo sapien
gtgatcaaagctacttcatcccagt

SEQ ID NO: 2019521 - DNA, 25 bp, Homo sapien
ttctcatgactgtgacaaaaattcc

SEQ ID NO: 2019522 - DNA, 25 bp, Homo sapien
tccgaagaagcccaaattggcagca

SEQ ID NO: 2019523 - DNA, 25 bp, Homo sapien
cagcctggactttaggctccgaaga

SEQ ID NO: 2019524 - DNA, 25 bp, Homo sapien
tctaagctagaaccgccaaggagtc

SEQ ID NO: 2019525 - DNA, 25 bp, Homo sapien
acatcagtacgaacggtgcccaagg

SEQ ID NO: 2019526 - DNA, 25 bp, Homo sapien
cgcaagtttttgacacgggccatag

SEQ ID NO: 2019527 - DNA, 25 bp, Homo sapien
catgatcagaaacgttacctagggc

SEQ ID NO: 2019528 - DNA, 25 bp, Homo sapien
cattggttcgatgtctgcaagctcc

SEQ ID NO: 2019529 - DNA, 25 bp, Homo sapien
cagccatgctgatactctttagaga

SEQ ID NO: 2019530 - DNA, 25 bp, Homo sapien
gaggatgctgttcattccgcatgga

SEQ ID NO: 2019531 - DNA, 25 bp, Homo sapien
ggtggtcacgattcagctgggtact

SEQ ID NO: 2019532 - DNA, 25 bp, Homo sapien
gaccgacccccagactagcagcagc

SEQ ID NO: 2019533 - DNA, 25 bp, Homo sapien
ctgatgaccgacccccagactagca

SEQ ID NO: 2019534 - DNA, 25 bp, Homo sapien
tgatgaccgacccccagactagcag

SEQ ID NO: 2019535 - DNA, 25 bp, Homo sapien
atgaccgacccccagactagcagca

SEQ ID NO: 2019536 - DNA, 25 bp, Homo sapien
gatcttcaagggacatgggaggacc

SEQ ID NO: 2019537 - DNA, 25 bp, Homo sapien
gcctgacactggtggaggatcttca

SEQ ID NO: 2019538 - DNA, 25 bp, Homo sapien
gagtccacttggcacacaaccagtt

SEQ ID NO: 2019539 - DNA, 25 bp, Homo sapien
taagaaacgagctctatcaggcggc

SEQ ID NO: 2019540 - DNA, 25 bp, Homo sapien
cacaggcccagcgagtccatcacag

SEQ ID NO: 2019541 - DNA, 25 bp, Homo sapien
ctccgcacacgcacaggcccagcga

SEQ ID NO: 2019542 - DNA, 25 bp, Homo sapien
aggcccagcgagtccatcacagttc

SEQ ID NO: 2019543 - DNA, 25 bp, Homo sapien
cgcacacgcacaggcccagcgagtc

SEQ ID NO: 2019544 - DNA, 25 bp, Homo sapien
tcgggtagcaggcacttccggaaca

SEQ ID NO: 2019545 - DNA, 25 bp, Homo sapien
ttctcatggttacacccgaccaagg

SEQ ID NO: 2019546 - DNA, 25 bp, Homo sapien
gctggccccaacgtgtgcttcgggt

SEQ ID NO: 2019547 - DNA, 25 bp, Homo sapien
gagaacaactgggtagcattaaacg

SEQ ID NO: 2019548 - DNA, 25 bp, Homo sapien
aatgtcactggcgactcagggcaac

SEQ ID NO: 2019549 - DNA, 25 bp, Homo sapien
gtcaacgggatacccaggacaggca

SEQ ID NO: 2019550 - DNA, 25 bp, Homo sapien
tagaagataccataagccccgtggt

SEQ ID NO: 2019551 - DNA, 25 bp, Homo sapien
cactgtctgccctttgtcaacggga

SEQ ID NO: 2019552 - DNA, 25 bp, Homo sapien
aggagcgtgctgaatgtttttagca

SEQ ID NO: 2019553 - DNA, 25 bp, Homo sapien
ggaggagcgtgctgaatgtttttag

SEQ ID NO: 2019554 - DNA, 25 bp, Homo sapien
gagcgtgctgaatgtttttagcagg

SEQ ID NO: 2019555 - DNA, 25 bp, Homo sapien
gaggagcgtgctgaatgtttttagc

SEQ ID NO: 2019556 - DNA, 25 bp, Homo sapien
tcaagccatctctcgtggactggga

SEQ ID NO: 2019557 - DNA, 25 bp, Homo sapien
aggccatccccaaggtgcttcaagg

SEQ ID NO: 2019558 - DNA, 25 bp, Homo sapien
gccgaacgtcttggatacaacataa

SEQ ID NO: 2019559 - DNA, 25 bp, Homo sapien
ccggacagtgccttggattgaataa

SEQ ID NO: 2019560 - DNA, 25 bp, Homo sapien
atgtgagtcgccgtgtcctggcagc

SEQ ID NO: 2019561 - DNA, 25 bp, Homo sapien
tgcggccatgtgagtcgccgtgtcc

SEQ ID NO: 2019562 - DNA, 25 bp, Homo sapien
cggccatgtgagtcgccgtgtcctg

SEQ ID NO: 2019563 - DNA, 25 bp, Homo sapien
ctgtgcggccatgtgagtcgccgtg

SEQ ID NO: 2019564 - DNA, 25 bp, Homo sapien
gcagtagtatctcctaacccaacgg

SEQ ID NO: 2019565 - DNA, 25 bp, Homo sapien
taatactgggtgtgcatttccccac

SEQ ID NO: 2019566 - DNA, 25 bp, Homo sapien
taacaatgcgttccgtcacgggtgc

SEQ ID NO: 2019567 - DNA, 25 bp, Homo sapien
gaacatcgacgtttcaggtgctgaa

SEQ ID NO: 2019568 - DNA, 25 bp, Homo sapien
tggaagatgatgacctgctgcacct

SEQ ID NO: 2019569 - DNA, 25 bp, Homo sapien
ggtgacaccgtccttgaccaactgg

SEQ ID NO: 2019570 - DNA, 25 bp, Homo sapien
tagacggcactcgtacgacttggaa

SEQ ID NO: 2019571 - DNA, 25 bp, Homo sapien
tcaggatgtagtgcgtggtgccctc

SEQ ID NO: 2019572 - DNA, 25 bp, Homo sapien
tgattatgacagaaactcgcatccg

SEQ ID NO: 2019573 - DNA, 25 bp, Homo sapien
gaacaatatcttccagcgtgtgcgt

SEQ ID NO: 2019574 - DNA, 25 bp, Homo sapien
caaggaaacacagaccatgctggca

SEQ ID NO: 2019575 - DNA, 25 bp, Homo sapien
tatacatgaaatgagctagcaggct

SEQ ID NO: 2019576 - DNA, 25 bp, Homo sapien
gtctggaggccacgaaggagggaga

SEQ ID NO: 2019577 - DNA, 25 bp, Homo sapien
tgctgagaaacagtatcgggctgca

SEQ ID NO: 2019578 - DNA, 25 bp, Homo sapien
gatgtgcagcagtgctccgcgtctg

SEQ ID NO: 2019579 - DNA, 25 bp, Homo sapien
ggtgccccctcggttgccacagctg

SEQ ID NO: 2019580 - DNA, 25 bp, Homo sapien
gatctctgtatcaggtgacgtgagc

SEQ ID NO: 2019581 - DNA, 25 bp, Homo sapien
gagcttccagcgctgcactcataga

SEQ ID NO: 2019582 - DNA, 25 bp, Homo sapien
tagaacctgggcacattcacttggt

SEQ ID NO: 2019583 - DNA, 25 bp, Homo sapien
ccacgtggcgaaaaggatctctgta

SEQ ID NO: 2019584 - DNA, 25 bp, Homo sapien
actgccatccgagagaacttttttc

SEQ ID NO: 2019585 - DNA, 25 bp, Homo sapien
gattagaaggtgcttccgaaacgta

SEQ ID NO: 2019586 - DNA, 25 bp, Homo sapien
tcacccatccctgattagaaggtgc

SEQ ID NO: 2019587 - DNA, 25 bp, Homo sapien
gaaacgtataactgccatccgagag

SEQ ID NO: 2019588 - DNA, 25 bp, Homo sapien
tgcttcatcacaggacgcaccagga

SEQ ID NO: 2019589 - DNA, 25 bp, Homo sapien
tcctgcctatagtcaaagagctctc

SEQ ID NO: 2019590 - DNA, 25 bp, Homo sapien
cccgtgcagcatttcctgcctatag

SEQ ID NO: 2019591 - DNA, 25 bp, Homo sapien
gatgacccgtcacgagatgctgctg

SEQ ID NO: 2019592 - DNA, 25 bp, Homo sapien
tgttcagtcaggttacagtccacgc

SEQ ID NO: 2019593 - DNA, 25 bp, Homo sapien
tgccctcaatgtaactaagactcgc

SEQ ID NO: 2019594 - DNA, 25 bp, Homo sapien
gactcgctacgcacctgtcagaagg

SEQ ID NO: 2019595 - DNA, 25 bp, Homo sapien
tgctctgggagacgttctgccctca

SEQ ID NO: 2019596 - DNA, 25 bp, Homo sapien
cctcccacggccacccacgggctct

SEQ ID NO: 2019597 - DNA, 25 bp, Homo sapien
agtgtgggggcctcggccacatgcc

SEQ ID NO: 2019598 - DNA, 25 bp, Homo sapien
ctgcacggccctgccgtgagcgtct

SEQ ID NO: 2019599 - DNA, 25 bp, Homo sapien
cacatgcctctgcctgcacggccct

SEQ ID NO: 2019600 - DNA, 25 bp, Homo sapien
acccaccacacatctagttgtggca

SEQ ID NO: 2019601 - DNA, 25 bp, Homo sapien
cagatgagggcacataggcggcagg

SEQ ID NO: 2019602 - DNA, 25 bp, Homo sapien
tgtcatcccgggcaccgtagggctc

SEQ ID NO: 2019603 - DNA, 25 bp, Homo sapien
tagttgtggcaacccagacatggcc

SEQ ID NO: 2019604 - DNA, 25 bp, Homo sapien
cctctgttctatgtggtgtccgctg

SEQ ID NO: 2019605 - DNA, 25 bp, Homo sapien
cactgggcgagctgcttagcctttc

SEQ ID NO: 2019606 - DNA, 25 bp, Homo sapien
cattaaagcacttcgggcagggcct

SEQ ID NO: 2019607 - DNA, 25 bp, Homo sapien
tctggaaagctttgcacagggctgg

SEQ ID NO: 2019608 - DNA, 25 bp, Homo sapien
ctgcggctggcaaggctgatattcc

SEQ ID NO: 2019609 - DNA, 25 bp, Homo sapien
ggagacctccaaagatgctcaggcc

SEQ ID NO: 2019610 - DNA, 25 bp, Homo sapien
tcggcagtgtggacttgcaccctgt

SEQ ID NO: 2019611 - DNA, 25 bp, Homo sapien
tcaaaacggcagctgaagagtgacc

SEQ ID NO: 2019612 - DNA, 25 bp, Homo sapien
aaaaaatcagaagcgattccaggga

SEQ ID NO: 2019613 - DNA, 25 bp, Homo sapien
aaaatcagaagcgattccagggaca

SEQ ID NO: 2019614 - DNA, 25 bp, Homo sapien
aggcgcctctctgggtcccgttgac

SEQ ID NO: 2019615 - DNA, 25 bp, Homo sapien
tccagggacagatgacaggcgcctc

SEQ ID NO: 2019616 - DNA, 25 bp, Homo sapien
tccttccgtcctcccactagtagga

SEQ ID NO: 2019617 - DNA, 25 bp, Homo sapien
ccactagtaggaccaccatgtgcaa

SEQ ID NO: 2019618 - DNA, 25 bp, Homo sapien
tctgtcggggcatcagcattccttc

SEQ ID NO: 2019619 - DNA, 25 bp, Homo sapien
ctcccactagtaggaccaccatgtg

SEQ ID NO: 2019620 - DNA, 25 bp, Homo sapien
tactccatgcgggtagtggctgcca

SEQ ID NO: 2019621 - DNA, 25 bp, Homo sapien
gatgttctcttggttgggagaccca

SEQ ID NO: 2019622 - DNA, 25 bp, Homo sapien
gaaagtgtctggacagcctagcaca

SEQ ID NO: 2019623 - DNA, 25 bp, Homo sapien
tgtgtttgcacatatcctagaaggc

SEQ ID NO: 2019624 - DNA, 25 bp, Homo sapien
caggccttggacagcatgcactctg

SEQ ID NO: 2019625 - DNA, 25 bp, Homo sapien
aggccttggacagcatgcactctgc

SEQ ID NO: 2019626 - DNA, 25 bp, Homo sapien
cagctcggaggctctggtatggtcc

SEQ ID NO: 2019627 - DNA, 25 bp, Homo sapien
ttccagaacagcgagtacaaaggcc

SEQ ID NO: 2019628 - DNA, 25 bp, Homo sapien
cacactcacttgaggcagcgcgttt

SEQ ID NO: 2019629 - DNA, 25 bp, Homo sapien
ttgcccaaggcttcatggccacaca

SEQ ID NO: 2019630 - DNA, 25 bp, Homo sapien
tcaaccaaaggcaacaccaacgcag

SEQ ID NO: 2019631 - DNA, 25 bp, Homo sapien
caacgcaggacgatctgtgcacaga

SEQ ID NO: 2019632 - DNA, 25 bp, Homo sapien
agaagtcctcagtttgtggccccaa

SEQ ID NO: 2019633 - DNA, 25 bp, Homo sapien
aaagggacaccgtggccatgtgggc

SEQ ID NO: 2019634 - DNA, 25 bp, Homo sapien
atgtgcaaaagtctgctccagcaga

SEQ ID NO: 2019635 - DNA, 25 bp, Homo sapien
tggagagctctccataaaggtgacc

SEQ ID NO: 2019636 - DNA, 25 bp, Homo sapien
ccaaatggcaagctcgtatatcaga

SEQ ID NO: 2019637 - DNA, 25 bp, Homo sapien
cagaggtgagcagtaatgtgcaaaa

SEQ ID NO: 2019638 - DNA, 25 bp, Homo sapien
tcctcctgccgctgtggacctggtt

SEQ ID NO: 2019639 - DNA, 25 bp, Homo sapien
tgataaacaggctccaggcggcctc

SEQ ID NO: 2019640 - DNA, 25 bp, Homo sapien
cctggttgtgatcctgtgataaaca

SEQ ID NO: 2019641 - DNA, 25 bp, Homo sapien
tcggctcctgcgtgcacctggaaaa

SEQ ID NO: 2019642 - DNA, 25 bp, Homo sapien
tcagaacacacacgggtccatttgt

SEQ ID NO: 2019643 - DNA, 25 bp, Homo sapien
gatcttacagggtacccaggtctca

SEQ ID NO: 2019644 - DNA, 25 bp, Homo sapien
tagacattgccatagggaaagacag

SEQ ID NO: 2019645 - DNA, 25 bp, Homo sapien
taaccgatatccagctcatgcagga

SEQ ID NO: 2019646 - DNA, 25 bp, Homo sapien
tatgttacgcatatgtgagaccaca

SEQ ID NO: 2019647 - DNA, 25 bp, Homo sapien
cacgcaagttaccaagtgcgcggct

SEQ ID NO: 2019648 - DNA, 25 bp, Homo sapien
agtttcctggcaacacggccgtgag

SEQ ID NO: 2019649 - DNA, 25 bp, Homo sapien
gcggcgacggttcatgatctgcaca

SEQ ID NO: 2019650 - DNA, 25 bp, Homo sapien
ccatacgcgagaagcggcatcccgg

SEQ ID NO: 2019651 - DNA, 25 bp, Homo sapien
gagaagcggcatcccggccttcgcg

SEQ ID NO: 2019652 - DNA, 25 bp, Homo sapien
gcaagaaaccgagtgccaggcacat

SEQ ID NO: 2019653 - DNA, 25 bp, Homo sapien
tcaggactattcagggggagcaaga

SEQ ID NO: 2019654 - DNA, 25 bp, Homo sapien
gagagtcggtgaaaacctttggcag

SEQ ID NO: 2019655 - DNA, 25 bp, Homo sapien
gcagaaggtggcgatctgcaatgac

SEQ ID NO: 2019656 - DNA, 25 bp, Homo sapien
agcagcgttcctcgtcggaccagag

SEQ ID NO: 2019657 - DNA, 25 bp, Homo sapien
gctagagtcaggctcagcagcgttc

SEQ ID NO: 2019658 - DNA, 25 bp, Homo sapien
ggattccaggttcgcctgctcccaa

SEQ ID NO: 2019659 - DNA, 25 bp, Homo sapien
ccatggtctccccactggcagtaaa

SEQ ID NO: 2019660 - DNA, 25 bp, Homo sapien
ttcgcccagaatccgacagggaccg

SEQ ID NO: 2019661 - DNA, 25 bp, Homo sapien
tccccactggcagtaaaaagccttc

SEQ ID NO: 2019662 - DNA, 25 bp, Homo sapien
tatcaatgtaattgccactgggaaa

SEQ ID NO: 2019663 - DNA, 25 bp, Homo sapien
gtaattgctgtaatgtcctctttga

SEQ ID NO: 2019664 - DNA, 25 bp, Homo sapien
taggtggttcccaatcaacttatga

SEQ ID NO: 2019665 - DNA, 25 bp, Homo sapien
cataaatggcaatgaacaggaacat

SEQ ID NO: 2019666 - DNA, 25 bp, Homo sapien
gaacaccagccaccaaagcaggccc

SEQ ID NO: 2019667 - DNA, 25 bp, Homo sapien
cagccactcttggagtgggagttca

SEQ ID NO: 2019668 - DNA, 25 bp, Homo sapien
tccagccactcttggagtgggagtt

SEQ ID NO: 2019669 - DNA, 25 bp, Homo sapien
agccactcttggagtgggagttcag

SEQ ID NO: 2019670 - DNA, 25 bp, Homo sapien
ctcaggcaaatcacgggccttcact

SEQ ID NO: 2019671 - DNA, 25 bp, Homo sapien
aaatcacgggccttcactgcctgag

SEQ ID NO: 2019672 - DNA, 25 bp, Homo sapien
gaaaaccaggtgaaccgatctgtgc

SEQ ID NO: 2019673 - DNA, 25 bp, Homo sapien
aaaccaggtgaaccgatctgtgcaa

SEQ ID NO: 2019674 - DNA, 25 bp, Homo sapien
ttttcctaggcttatagcatcatgc

SEQ ID NO: 2019675 - DNA, 25 bp, Homo sapien
tgctgttaccatgaacaaactatgg

SEQ ID NO: 2019676 - DNA, 25 bp, Homo sapien
gaatgcttggcatgagaaccttact

SEQ ID NO: 2019677 - DNA, 25 bp, Homo sapien
tgcaaacaatccagctacactcagt

SEQ ID NO: 2019678 - DNA, 25 bp, Homo sapien
tcatctggatgaagttcctcaggag

SEQ ID NO: 2019679 - DNA, 25 bp, Homo sapien
ggacttctctgcatgtcgggcttaa

SEQ ID NO: 2019680 - DNA, 25 bp, Homo sapien
gaaggagcttgcctctttgagaaac

SEQ ID NO: 2019681 - DNA, 25 bp, Homo sapien
tcctcaggagtaggatagagcctct

SEQ ID NO: 2019682 - DNA, 25 bp, Homo sapien
tctgattgaaggtgaagcccaccag

SEQ ID NO: 2019683 - DNA, 25 bp, Homo sapien
accgttgcgctgaaaccccatgggc

SEQ ID NO: 2019684 - DNA, 25 bp, Homo sapien
caaagtcttaggtttcggtgtatct

SEQ ID NO: 2019685 - DNA, 25 bp, Homo sapien
ttaacctttagtgccctgaagactg

SEQ ID NO: 2019686 - DNA, 25 bp, Homo sapien
ccttagaggcgttcgaactagaagc

SEQ ID NO: 2019687 - DNA, 25 bp, Homo sapien
gctatgcgttacctctgattctgga

SEQ ID NO: 2019688 - DNA, 25 bp, Homo sapien
catgctacactgctcgaggtacggt

SEQ ID NO: 2019689 - DNA, 25 bp, Homo sapien
gaaaagtgtgcgctccattctcagt

SEQ ID NO: 2019690 - DNA, 25 bp, Homo sapien
taagctggtgactctagaagggtac

SEQ ID NO: 2019691 - DNA, 25 bp, Homo sapien
aggagggtctccaaatgcgcgaatc

SEQ ID NO: 2019692 - DNA, 25 bp, Homo sapien
gattactagaatcctgcgctcactg

SEQ ID NO: 2019693 - DNA, 25 bp, Homo sapien
taagtggatcctcccgtcggattac

SEQ ID NO: 2019694 - DNA, 25 bp, Homo sapien
cattcggatcgcagagctttcagac

SEQ ID NO: 2019695 - DNA, 25 bp, Homo sapien
tcacagatcaaacagtgtcaccccg

SEQ ID NO: 2019696 - DNA, 25 bp, Homo sapien
gatttttggccggtcttgatcttcc

SEQ ID NO: 2019697 - DNA, 25 bp, Homo sapien
ggatcgccgcttcttccaatgcgaa

SEQ ID NO: 2019698 - DNA, 25 bp, Homo sapien
tccccgcacttagtctaagaggaag

SEQ ID NO: 2019699 - DNA, 25 bp, Homo sapien
tgcgcgggtcgcagctttctcattg

SEQ ID NO: 2019700 - DNA, 25 bp, Homo sapien
cgaggccgatgcaggctgtcctttt

SEQ ID NO: 2019701 - DNA, 25 bp, Homo sapien
gccttcttccgcgagccgagagtcg

SEQ ID NO: 2019702 - DNA, 25 bp, Homo sapien
ctgccgagcgccggggggcctgctg

SEQ ID NO: 2019703 - DNA, 25 bp, Homo sapien
agctgccaggatggattaccatgca

SEQ ID NO: 2019704 - DNA, 25 bp, Homo sapien
agacagacaattaaatcaatattgg

SEQ ID NO: 2019705 - DNA, 25 bp, Homo sapien
gccttgacggcttgtttttatgtaa

SEQ ID NO: 2019706 - DNA, 25 bp, Homo sapien
gccaggatggattaccatgcaccat

SEQ ID NO: 2019707 - DNA, 25 bp, Homo sapien
aagaatggaaacactaagcctgcca

SEQ ID NO: 2019708 - DNA, 25 bp, Homo sapien
aagcctgccaacttttgattgacca

SEQ ID NO: 2019709 - DNA, 25 bp, Homo sapien
taagtatgccaaatgtcgtgtagag

SEQ ID NO: 2019710 - DNA, 25 bp, Homo sapien
ccattaaagccaatgatatatgtgc

SEQ ID NO: 2019711 - DNA, 25 bp, Homo sapien
agcagatgactcagtcatcaactct

SEQ ID NO: 2019712 - DNA, 25 bp, Homo sapien
cagtcatcaactcttcatagccatc

SEQ ID NO: 2019713 - DNA, 25 bp, Homo sapien
gatgactcagtcatcaactcttcat

SEQ ID NO: 2019714 - DNA, 25 bp, Homo sapien
gactcagtcatcaactcttcatagc

SEQ ID NO: 2019715 - DNA, 25 bp, Homo sapien
ttttacataaggaggattcatttgg

SEQ ID NO: 2019716 - DNA, 25 bp, Homo sapien
gaagggaccatttcctctgagcagt

SEQ ID NO: 2019717 - DNA, 25 bp, Homo sapien
taagaagccgcttcattacgaaggg

SEQ ID NO: 2019718 - DNA, 25 bp, Homo sapien
tattgctattctacatctgtcatcc

SEQ ID NO: 2019719 - DNA, 25 bp, Homo sapien
taatcgttacgcctgtcacaaatcc

SEQ ID NO: 2019720 - DNA, 25 bp, Homo sapien
cagctcactgaatttgtccgcatta

SEQ ID NO: 2019721 - DNA, 25 bp, Homo sapien
tcaagcgggatgcaaacttgacagc

SEQ ID NO: 2019722 - DNA, 25 bp, Homo sapien
gtcacaaatccatcaggtttacaga

SEQ ID NO: 2019723 - DNA, 25 bp, Homo sapien
gtaaacatcacaagcaccgcaacag

SEQ ID NO: 2019724 - DNA, 25 bp, Homo sapien
tatcggcctgtatagatactacaga

SEQ ID NO: 2019725 - DNA, 25 bp, Homo sapien
tagaagagctcatcacaaattaccc

SEQ ID NO: 2019726 - DNA, 25 bp, Homo sapien
tgaaacagttttcgttatcggcctg

SEQ ID NO: 2019727 - DNA, 25 bp, Homo sapien
tggagtgctcaagccccggaccatc

SEQ ID NO: 2019728 - DNA, 25 bp, Homo sapien
cggaccatccctcgaccccattcca

SEQ ID NO: 2019729 - DNA, 25 bp, Homo sapien
agctcctggagtgctcaagccccgg

SEQ ID NO: 2019730 - DNA, 25 bp, Homo sapien
atccctcgaccccattccaccagct

SEQ ID NO: 2019731 - DNA, 25 bp, Homo sapien
acgtcccacgtgcactgacatgtct

SEQ ID NO: 2019732 - DNA, 25 bp, Homo sapien
aagaacaccccttgtgcagcttcca

SEQ ID NO: 2019733 - DNA, 25 bp, Homo sapien
cagcttccacgtcccacgtgcactg

SEQ ID NO: 2019734 - DNA, 25 bp, Homo sapien
acacccaagaacaccccttgtgcag

SEQ ID NO: 2019735 - DNA, 25 bp, Homo sapien
aactctctcaggctttgtcggcggc

SEQ ID NO: 2019736 - DNA, 25 bp, Homo sapien
ggagggactgcaaaatgaactctct

SEQ ID NO: 2019737 - DNA, 25 bp, Homo sapien
gcctggcccctttgataaatgacac

SEQ ID NO: 2019738 - DNA, 25 bp, Homo sapien
cggcctggcccctttgataaatgac

SEQ ID NO: 2019739 - DNA, 25 bp, Homo sapien
tccgatatccacaatcaatctttgc

SEQ ID NO: 2019740 - DNA, 25 bp, Homo sapien
caataatgttgatggggattctgca

SEQ ID NO: 2019741 - DNA, 25 bp, Homo sapien
tgacaccataactccgatatccaca

SEQ ID NO: 2019742 - DNA, 25 bp, Homo sapien
gggaacgtgactgtcttccagacct

SEQ ID NO: 2019743 - DNA, 25 bp, Homo sapien
agccttgtacaacccaagtctaaat

SEQ ID NO: 2019744 - DNA, 25 bp, Homo sapien
tacagccttgtacaacccaagtcta

SEQ ID NO: 2019745 - DNA, 25 bp, Homo sapien
ttacagccttgtacaacccaagtct

SEQ ID NO: 2019746 - DNA, 25 bp, Homo sapien
cagccttgtacaacccaagtctaaa

SEQ ID NO: 2019747 - DNA, 25 bp, Homo sapien
cgtaaggtgcgctcctaggaacacg

SEQ ID NO: 2019748 - DNA, 25 bp, Homo sapien
taaggtgcgctcctaggaacacgct

SEQ ID NO: 2019749 - DNA, 25 bp, Homo sapien
gtgcgctcctaggaacacgctgctc

SEQ ID NO: 2019750 - DNA, 25 bp, Homo sapien
ctaggaacacgctgctccagcaggg

SEQ ID NO: 2019751 - DNA, 25 bp, Homo sapien
tgatttctgggcttcaatgactgaa

SEQ ID NO: 2019752 - DNA, 25 bp, Homo sapien
cctagaacactttgatctgtctgat

SEQ ID NO: 2019753 - DNA, 25 bp, Homo sapien
gtaatgatacaatgcctgtcaatga

SEQ ID NO: 2019754 - DNA, 25 bp, Homo sapien
aattaacaatgaacagctcccctgc

SEQ ID NO: 2019755 - DNA, 25 bp, Homo sapien
cagcctgaactttatgcacaatact

SEQ ID NO: 2019756 - DNA, 25 bp, Homo sapien
agacagcctgaactttatgcacaat

SEQ ID NO: 2019757 - DNA, 25 bp, Homo sapien
gacagcctgaactttatgcacaata

SEQ ID NO: 2019758 - DNA, 25 bp, Homo sapien
cctgaactttatgcacaatactggg

SEQ ID NO: 2019759 - DNA, 25 bp, Homo sapien
caagggtttggcttgaatcatggcc

SEQ ID NO: 2019760 - DNA, 25 bp, Homo sapien
caaacgccatatgagttgtagctac

SEQ ID NO: 2019761 - DNA, 25 bp, Homo sapien
gccaaaggtcctacagcattcaaat

SEQ ID NO: 2019762 - DNA, 25 bp, Homo sapien
tgcactctgaagtcacaccaggcac

SEQ ID NO: 2019763 - DNA, 25 bp, Homo sapien
gctgaactcttgtgagaagtgagaa

SEQ ID NO: 2019764 - DNA, 25 bp, Homo sapien
aaacatttctctaccacggtccaag

SEQ ID NO: 2019765 - DNA, 25 bp, Homo sapien
ccaagatttgaacaagtgggatcac

SEQ ID NO: 2019766 - DNA, 25 bp, Homo sapien
gcatatttaacgtaccaatttaagc

SEQ ID NO: 2019767 - DNA, 25 bp, Homo sapien
gtcagctctgctccacccgacagct

SEQ ID NO: 2019768 - DNA, 25 bp, Homo sapien
tgcccctcgacaaacaggctccagc

SEQ ID NO: 2019769 - DNA, 25 bp, Homo sapien
tcagctctgctccacccgacagctg

SEQ ID NO: 2019770 - DNA, 25 bp, Homo sapien
cacccgacagctgcccctcgacaaa

SEQ ID NO: 2019771 - DNA, 25 bp, Homo sapien
acagtgtgagcgtgtacagtgtgtc

SEQ ID NO: 2019772 - DNA, 25 bp, Homo sapien
gagcgtgtacagtgtgtcctgccat

SEQ ID NO: 2019773 - DNA, 25 bp, Homo sapien
cagaatgtgacagtgtgagcgtgta

SEQ ID NO: 2019774 - DNA, 25 bp, Homo sapien
gaatgtgacagtgtgagcgtgtaca

SEQ ID NO: 2019775 - DNA, 25 bp, Homo sapien
ttactccagaaaccaagctagtcat

SEQ ID NO: 2019776 - DNA, 25 bp, Homo sapien
taattgttgtgtagatggtgctccg

SEQ ID NO: 2019777 - DNA, 25 bp, Homo sapien
tgaaattcgggccatggaccggctg

SEQ ID NO: 2019778 - DNA, 25 bp, Homo sapien
gagccagcatccgtcttaattgttg

SEQ ID NO: 2019779 - DNA, 25 bp, Homo sapien
gatggtgctccgacagtcagatgtg

SEQ ID NO: 2019780 - DNA, 25 bp, Homo sapien
tccagctcctcaattccacagccac

SEQ ID NO: 2019781 - DNA, 25 bp, Homo sapien
ccactgcagggggttctccatccag

SEQ ID NO: 2019782 - DNA, 25 bp, Homo sapien
gctcctcaattccacagccactgca

SEQ ID NO: 2019783 - DNA, 25 bp, Homo sapien
cctcaattccacagccactgcaggg

SEQ ID NO: 2019784 - DNA, 25 bp, Homo sapien
cttctccacaaccccagggcctgtg

SEQ ID NO: 2019785 - DNA, 25 bp, Homo sapien
ccggttgcacccatgagcagcatgt

SEQ ID NO: 2019786 - DNA, 25 bp, Homo sapien
tccctcgtctccagaccctcggtga

SEQ ID NO: 2019787 - DNA, 25 bp, Homo sapien
gctcttgcccgttcttactgcagcc

SEQ ID NO: 2019788 - DNA, 25 bp, Homo sapien
cgctccccgttctgagctgccgcat

SEQ ID NO: 2019789 - DNA, 25 bp, Homo sapien
atttccttgcgcagatgtccacggc

SEQ ID NO: 2019790 - DNA, 25 bp, Homo sapien
tcatcttcccagcaagccatttcct

SEQ ID NO: 2019791 - DNA, 25 bp, Homo sapien
actccagggagtgcggacgtcgaag

SEQ ID NO: 2019792 - DNA, 25 bp, Homo sapien
agatccacagaacgagaaggccctc

SEQ ID NO: 2019793 - DNA, 25 bp, Homo sapien
gagacgactgaatcggtcatgtgga

SEQ ID NO: 2019794 - DNA, 25 bp, Homo sapien
ttttctgcacacgacaatctgcgca

SEQ ID NO: 2019795 - DNA, 25 bp, Homo sapien
tgtgttcacgcatttcatggaggta

SEQ ID NO: 2019796 - DNA, 25 bp, Homo sapien
tgagggttcactgctaggacccagg

SEQ ID NO: 2019797 - DNA, 25 bp, Homo sapien
ctggaaggcagagaaaccgagatga

SEQ ID NO: 2019798 - DNA, 25 bp, Homo sapien
ggatatggaagttgtcccatggatg

SEQ ID NO: 2019799 - DNA, 25 bp, Homo sapien
gcacagcggagcgacttcatgggct

SEQ ID NO: 2019800 - DNA, 25 bp, Homo sapien
tatggaagttgtcccatggatgagg

SEQ ID NO: 2019801 - DNA, 25 bp, Homo sapien
cagcggagcgacttcatgggctgaa

SEQ ID NO: 2019802 - DNA, 25 bp, Homo sapien
gatgtcctgtgctcgtcccaaagat

SEQ ID NO: 2019803 - DNA, 25 bp, Homo sapien
tcttaacgccatgaaactgtgcact

SEQ ID NO: 2019804 - DNA, 25 bp, Homo sapien
ccatctgggaagacgagaaagttct

SEQ ID NO: 2019805 - DNA, 25 bp, Homo sapien
caaaagccacggttgttcaccaagg

SEQ ID NO: 2019806 - DNA, 25 bp, Homo sapien
agcccgtcatcctccacgtgctctt

SEQ ID NO: 2019807 - DNA, 25 bp, Homo sapien
cactttcctgaatgtccaaagacag

SEQ ID NO: 2019808 - DNA, 25 bp, Homo sapien
ttctgctgccttcaattcttcctca

SEQ ID NO: 2019809 - DNA, 25 bp, Homo sapien
gctgccttcaattcttcctcaggaa

SEQ ID NO: 2019810 - DNA, 25 bp, Homo sapien
tagccggcgtcctggttagtcgcag

SEQ ID NO: 2019811 - DNA, 25 bp, Homo sapien
tttgaaatgggctagctggtcgctg

SEQ ID NO: 2019812 - DNA, 25 bp, Homo sapien
tgtcgggacactgcggatcctcctt

SEQ ID NO: 2019813 - DNA, 25 bp, Homo sapien
ggagttctggtagctctgcgcctct

SEQ ID NO: 2019814 - DNA, 25 bp, Homo sapien
ggagaacaagtttgcatacacagct

SEQ ID NO: 2019815 - DNA, 25 bp, Homo sapien
gactcggagaacaagtttgcataca

SEQ ID NO: 2019816 - DNA, 25 bp, Homo sapien
cagcaggactcggagaacaagtttg

SEQ ID NO: 2019817 - DNA, 25 bp, Homo sapien
caggactcggagaacaagtttgcat

SEQ ID NO: 2019818 - DNA, 25 bp, Homo sapien
gtgctggtggtggaacccgacttct

SEQ ID NO: 2019819 - DNA, 25 bp, Homo sapien
tctttaaatccagagctaagctgga

SEQ ID NO: 2019820 - DNA, 25 bp, Homo sapien
tgctggtggtggaacccgacttctt

SEQ ID NO: 2019821 - DNA, 25 bp, Homo sapien
ggcgtgctcgtggtggggccagtgg

SEQ ID NO: 2019822 - DNA, 25 bp, Homo sapien
ctggtgccagtcgtacccggagctg

SEQ ID NO: 2019823 - DNA, 25 bp, Homo sapien
tggtgccagtcgtacccggagctgc

SEQ ID NO: 2019824 - DNA, 25 bp, Homo sapien
ctgggcgtgctcgtggtggggccag

SEQ ID NO: 2019825 - DNA, 25 bp, Homo sapien
ggacgtctgctgcagcgtcttggcc

SEQ ID NO: 2019826 - DNA, 25 bp, Homo sapien
caggaagcagcccatacgaggacgt

SEQ ID NO: 2019827 - DNA, 25 bp, Homo sapien
gaagcagcccatacgaggacgtctg

SEQ ID NO: 2019828 - DNA, 25 bp, Homo sapien
catacgaggacgtctgctgcagcgt

SEQ ID NO: 2019829 - DNA, 25 bp, Homo sapien
cgtacgcggcactgcagtctttgca

SEQ ID NO: 2019830 - DNA, 25 bp, Homo sapien
gagtccttgtccctgttgtcgtcac

SEQ ID NO: 2019831 - DNA, 25 bp, Homo sapien
ggtagtggcctgtctcgttcatgtg

SEQ ID NO: 2019832 - DNA, 25 bp, Homo sapien
tctttgcaccggaacttgctggcgc

SEQ ID NO: 2019833 - DNA, 25 bp, Homo sapien
tgatcttgtacagcatcgccagcgg

SEQ ID NO: 2019834 - DNA, 25 bp, Homo sapien
caaaagtccggttgcagagcttaca

SEQ ID NO: 2019835 - DNA, 25 bp, Homo sapien
gatgatccccaggttgttacagccg

SEQ ID NO: 2019836 - DNA, 25 bp, Homo sapien
ttcttcagaagtcgtggaccccgcg

SEQ ID NO: 2019837 - DNA, 25 bp, Homo sapien
ggcctagtgcagctcgacgacgttt

SEQ ID NO: 2019838 - DNA, 25 bp, Homo sapien
cgacgtttagtgcaatgttccgcgg

SEQ ID NO: 2019839 - DNA, 25 bp, Homo sapien
taacatgcacagatcggacagagag

SEQ ID NO: 2019840 - DNA, 25 bp, Homo sapien
aatgtctctgagtagtgtgccccac

SEQ ID NO: 2019841 - DNA, 25 bp, Homo sapien
tcaagctgcaggaactaaattttat

SEQ ID NO: 2019842 - DNA, 25 bp, Homo sapien
ttttcatttaccaatgcagcacgct

SEQ ID NO: 2019843 - DNA, 25 bp, Homo sapien
tggtacgatatgtaacatacaggag

SEQ ID NO: 2019844 - DNA, 25 bp, Homo sapien
gaaaggtcagcttgtaccaaagctt

SEQ ID NO: 2019845 - DNA, 25 bp, Homo sapien
attaatagtgcattgcttgctttgt

SEQ ID NO: 2019846 - DNA, 25 bp, Homo sapien
agaaaacagtggatttaattgtgtg

SEQ ID NO: 2019847 - DNA, 25 bp, Homo sapien
acagtggatttaattgtgtgaacca

SEQ ID NO: 2019848 - DNA, 25 bp, Homo sapien
taatagtgcattgcttgctttgttt

SEQ ID NO: 2019849 - DNA, 25 bp, Homo sapien
atgagctcgaaggtggcgtttgcat

SEQ ID NO: 2019850 - DNA, 25 bp, Homo sapien
gggtgatgagctcgaaggtggcgtt

SEQ ID NO: 2019851 - DNA, 25 bp, Homo sapien
cttcgctcaggtgcactctttgtgc

SEQ ID NO: 2019852 - DNA, 25 bp, Homo sapien
actctttgtgccaggtgaatctggg

SEQ ID NO: 2019853 - DNA, 25 bp, Homo sapien
gctaatgatagcctaacgtacaggc

SEQ ID NO: 2019854 - DNA, 25 bp, Homo sapien
aatccaatggaaacaaattcagtcc

SEQ ID NO: 2019855 - DNA, 25 bp, Homo sapien
tacttttcctcaaaagacgctaatg

SEQ ID NO: 2019856 - DNA, 25 bp, Homo sapien
tcagtccaagggtcaattatgggct

SEQ ID NO: 2019857 - DNA, 25 bp, Homo sapien
ttaatgagcactgagggcacatact

SEQ ID NO: 2019858 - DNA, 25 bp, Homo sapien
ggcgcttataagcagctcttcaata

SEQ ID NO: 2019859 - DNA, 25 bp, Homo sapien
caggacatggcgattggcgcttata

SEQ ID NO: 2019860 - DNA, 25 bp, Homo sapien
cttggcggccacttctgagttatac

SEQ ID NO: 2019861 - DNA, 25 bp, Homo sapien
gctttcctgactaacgctgctgttg

SEQ ID NO: 2019862 - DNA, 25 bp, Homo sapien
tccaggattcaaaggagagtcggcc

SEQ ID NO: 2019863 - DNA, 25 bp, Homo sapien
ctgggtgagtgtcttgtcaaagtca

SEQ ID NO: 2019864 - DNA, 25 bp, Homo sapien
tctcccgccctgaaaggtgaattat

SEQ ID NO: 2019865 - DNA, 25 bp, Homo sapien
gctctcccagccacaaataggggct

SEQ ID NO: 2019866 - DNA, 25 bp, Homo sapien
gaagcacccaccagtacaaggagtg

SEQ ID NO: 2019867 - DNA, 25 bp, Homo sapien
aagcaattaagagtccaggttccca

SEQ ID NO: 2019868 - DNA, 25 bp, Homo sapien
tgcagcaacaggtccgaagcaccca

SEQ ID NO: 2019869 - DNA, 25 bp, Homo sapien
caaatttccagcacaatgtcgaata

SEQ ID NO: 2019870 - DNA, 25 bp, Homo sapien
ctgaaacaaaccctatttggtcagg

SEQ ID NO: 2019871 - DNA, 25 bp, Homo sapien
cacaatgtcgaataagagtaatgag

SEQ ID NO: 2019872 - DNA, 25 bp, Homo sapien
gatttgtgcagatgccctttgtcaa

SEQ ID NO: 2019873 - DNA, 25 bp, Homo sapien
cacatatgctctctgggtatgcagt

SEQ ID NO: 2019874 - DNA, 25 bp, Homo sapien
tgttccttcctcgagatgtggatgg

SEQ ID NO: 2019875 - DNA, 25 bp, Homo sapien
cacaagagtgatatttgtcaggtgc

SEQ ID NO: 2019876 - DNA, 25 bp, Homo sapien
caggtgctaggtagagaataatgac

SEQ ID NO: 2019877 - DNA, 25 bp, Homo sapien
cgttgaacagagaagtgcccttggg

SEQ ID NO: 2019878 - DNA, 25 bp, Homo sapien
gcgtggcccaacgttgaacagagaa

SEQ ID NO: 2019879 - DNA, 25 bp, Homo sapien
tcatctaagggcagataaccagggt

SEQ ID NO: 2019880 - DNA, 25 bp, Homo sapien
tgagcttgtgcaaaccacgggagaa

SEQ ID NO: 2019881 - DNA, 25 bp, Homo sapien
cattggcatgactgcaggagcctgg

SEQ ID NO: 2019882 - DNA, 25 bp, Homo sapien
tactccttgaagaggctgaaacagg

SEQ ID NO: 2019883 - DNA, 25 bp, Homo sapien
ggtgagaggccatgttagcagctac

SEQ ID NO: 2019884 - DNA, 25 bp, Homo sapien
cccgtggtcatgaagggcgccagct

SEQ ID NO: 2019885 - DNA, 25 bp, Homo sapien
ccagggcagaatccatcgcctggag

SEQ ID NO: 2019886 - DNA, 25 bp, Homo sapien
cagaatccatcgcctggagatgtgg

SEQ ID NO: 2019887 - DNA, 25 bp, Homo sapien
agaatccatcgcctggagatgtggc

SEQ ID NO: 2019888 - DNA, 25 bp, Homo sapien
tcccagggcagaatccatcgcctgg

SEQ ID NO: 2019889 - DNA, 25 bp, Homo sapien
tcacaactggatggagcaacacgtc

SEQ ID NO: 2019890 - DNA, 25 bp, Homo sapien
ggaacgtgtagacccacagcccact

SEQ ID NO: 2019891 - DNA, 25 bp, Homo sapien
catccatgaagactccggtgccttc

SEQ ID NO: 2019892 - DNA, 25 bp, Homo sapien
gaagactccggtgccttcagagcaa

SEQ ID NO: 2019893 - DNA, 25 bp, Homo sapien
tggcaaccgagaagacattggccgt

SEQ ID NO: 2019894 - DNA, 25 bp, Homo sapien
taagccaatcgttgatgctcatgtg

SEQ ID NO: 2019895 - DNA, 25 bp, Homo sapien
aatgcggaatgggatcaggtcgtcc

SEQ ID NO: 2019896 - DNA, 25 bp, Homo sapien
tcagctaggccagtaccgggagatt

SEQ ID NO: 2019897 - DNA, 25 bp, Homo sapien
tactggaccatcatctattttccca

SEQ ID NO: 2019898 - DNA, 25 bp, Homo sapien
ctttagagccctgggtgtgatgcct

SEQ ID NO: 2019899 - DNA, 25 bp, Homo sapien
ggaaggatatcgcattactggacca

SEQ ID NO: 2019900 - DNA, 25 bp, Homo sapien
tggtgaaagccttgttcgctcctta

SEQ ID NO: 2019901 - DNA, 25 bp, Homo sapien
tgggcacccgcatgtactgaaatct

SEQ ID NO: 2019902 - DNA, 25 bp, Homo sapien
tctgctgggcactaatgtcttgttt

SEQ ID NO: 2019903 - DNA, 25 bp, Homo sapien
tccactctgagcttgcgtatactcc

SEQ ID NO: 2019904 - DNA, 25 bp, Homo sapien
tgcaatgactgctgttcaactaggc

SEQ ID NO: 2019905 - DNA, 25 bp, Homo sapien
gcagctcagggggagatacgctcat

SEQ ID NO: 2019906 - DNA, 25 bp, Homo sapien
cgatgcaagtcagtctgcagctcag

SEQ ID NO: 2019907 - DNA, 25 bp, Homo sapien
ctgcgagctggcgatgcaagtcagt

SEQ ID NO: 2019908 - DNA, 25 bp, Homo sapien
gagctggcgatgcaagtcagtctgc

SEQ ID NO: 2019909 - DNA, 25 bp, Homo sapien
tctatttaagttgaccttgacactc

SEQ ID NO: 2019910 - DNA, 25 bp, Homo sapien
tgacactcttggattgggcacccaa

SEQ ID NO: 2019911 - DNA, 25 bp, Homo sapien
cccaagaattgggtagggatgcttg

SEQ ID NO: 2019912 - DNA, 25 bp, Homo sapien
cttggattgggcacccaagaattgg

SEQ ID NO: 2019913 - DNA, 25 bp, Homo sapien
gagaggcattaggaggatgatctga

SEQ ID NO: 2019914 - DNA, 25 bp, Homo sapien
tggagaggcattaggaggatgatct

SEQ ID NO: 2019915 - DNA, 25 bp, Homo sapien
gaggcattaggaggatgatctgaag

SEQ ID NO: 2019916 - DNA, 25 bp, Homo sapien
tgcttgaggacctccgggcttcctg

SEQ ID NO: 2019917 - DNA, 25 bp, Homo sapien
tccactgactcggaaagttgcctcc

SEQ ID NO: 2019918 - DNA, 25 bp, Homo sapien
ggtgatcccaaatcattaagctgtg

SEQ ID NO: 2019919 - DNA, 25 bp, Homo sapien
tattaactagcaaccaggtgatccc

SEQ ID NO: 2019920 - DNA, 25 bp, Homo sapien
tctatggaatatgcagcagcaactg

SEQ ID NO: 2019921 - DNA, 25 bp, Homo sapien
aacttgaccgaaaatattcagatca

SEQ ID NO: 2019922 - DNA, 25 bp, Homo sapien
tcagatcatcaaggccactgatccc

SEQ ID NO: 2019923 - DNA, 25 bp, Homo sapien
aatattcagatcatcaaggccactg

SEQ ID NO: 2019924 - DNA, 25 bp, Homo sapien
gaccgaaaatattcagatcatcaag

SEQ ID NO: 2019925 - DNA, 25 bp, Homo sapien
ggtaggaacattgcgggccttgtct

SEQ ID NO: 2019926 - DNA, 25 bp, Homo sapien
caaacagctctacaattggaatcag

SEQ ID NO: 2019927 - DNA, 25 bp, Homo sapien
tgtacacaagccgtgattcaagagc

SEQ ID NO: 2019928 - DNA, 25 bp, Homo sapien
gaggatgggcaattccgtgagccac

SEQ ID NO: 2019929 - DNA, 25 bp, Homo sapien
caaacccggtggtaaccggatgcag

SEQ ID NO: 2019930 - DNA, 25 bp, Homo sapien
ggaacaggaatcatcccaggctgcc

SEQ ID NO: 2019931 - DNA, 25 bp, Homo sapien
gtcctcacactcacgacactaaatg

SEQ ID NO: 2019932 - DNA, 25 bp, Homo sapien
gaaggcatcgctgtggatcctccac

SEQ ID NO: 2019933 - DNA, 25 bp, Homo sapien
atggcacatggtcacaaggcagcgc

SEQ ID NO: 2019934 - DNA, 25 bp, Homo sapien
cagggacgtttgtcagcctgaacgc

SEQ ID NO: 2019935 - DNA, 25 bp, Homo sapien
cttgggtatggcagcatggcacatg

SEQ ID NO: 2019936 - DNA, 25 bp, Homo sapien
cgcagaaggctcgatgtggcagtcc

SEQ ID NO: 2019937 - DNA, 25 bp, Homo sapien
gctgcaggcatgctcggcgctcagc

SEQ ID NO: 2019938 - DNA, 25 bp, Homo sapien
ctggagagtcattgttggatgggat

SEQ ID NO: 2019939 - DNA, 25 bp, Homo sapien
cagcaggaacggctgcagtagtcag

SEQ ID NO: 2019940 - DNA, 25 bp, Homo sapien
ctcggcgctcagcaggaacggctgc

SEQ ID NO: 2019941 - DNA, 25 bp, Homo sapien
tttactttcagacaagagcctttct

SEQ ID NO: 2019942 - DNA, 25 bp, Homo sapien
ctttactttcagacaagagcctttc

SEQ ID NO: 2019943 - DNA, 25 bp, Homo sapien
cctttactttcagacaagagccttt

SEQ ID NO: 2019944 - DNA, 25 bp, Homo sapien
tcctttactttcagacaagagcctt

SEQ ID NO: 2019945 - DNA, 25 bp, Homo sapien
tccactctgaccatggacaccaaaa

SEQ ID NO: 2019946 - DNA, 25 bp, Homo sapien
gatggaatggaattctacccagggt

SEQ ID NO: 2019947 - DNA, 25 bp, Homo sapien
ggtccactctgaccatggacaccaa

SEQ ID NO: 2019948 - DNA, 25 bp, Homo sapien
gaatggaattctacccagggtttgc

SEQ ID NO: 2019949 - DNA, 25 bp, Homo sapien
ctttgtgcagctgggatatcctcgc

SEQ ID NO: 2019950 - DNA, 25 bp, Homo sapien
cctggtggctctgcattgaggagtt

SEQ ID NO: 2019951 - DNA, 25 bp, Homo sapien
atgctgctttgtgcagctgggatat

SEQ ID NO: 2019952 - DNA, 25 bp, Homo sapien
tgcagctgggatatcctcgctgccc

SEQ ID NO: 2019953 - DNA, 25 bp, Homo sapien
gaagatcatagtctgagctcatggg

SEQ ID NO: 2019954 - DNA, 25 bp, Homo sapien
cctgaggtcctcgaatatgatgtcc

SEQ ID NO: 2019955 - DNA, 25 bp, Homo sapien
cattaggcttgggtgcactttgtga

SEQ ID NO: 2019956 - DNA, 25 bp, Homo sapien
caccaagaggaagatatccccagtt

SEQ ID NO: 2019957 - DNA, 25 bp, Homo sapien
gattcacagtaactcgcctcaaaga

SEQ ID NO: 2019958 - DNA, 25 bp, Homo sapien
tgggcttcgcggttgagattcacag

SEQ ID NO: 2019959 - DNA, 25 bp, Homo sapien
gctgctctcaccgagggaggctgct

SEQ ID NO: 2019960 - DNA, 25 bp, Homo sapien
cggatctcttgacacaggcgccttc

SEQ ID NO: 2019961 - DNA, 25 bp, Homo sapien
ctgagcacagaacaaacaatatctc

SEQ ID NO: 2019962 - DNA, 25 bp, Homo sapien
aatatctccacctaatgattgcaag

SEQ ID NO: 2019963 - DNA, 25 bp, Homo sapien
acctaatgattgcaagcccaacttc

SEQ ID NO: 2019964 - DNA, 25 bp, Homo sapien
gagcacagaacaaacaatatctcca

SEQ ID NO: 2019965 - DNA, 25 bp, Homo sapien
gctgcgtgattcattggatttaata

SEQ ID NO: 2019966 - DNA, 25 bp, Homo sapien
tgttgaatgagaacacggtgcctgg

SEQ ID NO: 2019967 - DNA, 25 bp, Homo sapien
ggccaagccatcattcagtgctgct

SEQ ID NO: 2019968 - DNA, 25 bp, Homo sapien
cctgccctcctgaaagctgcgtgat

SEQ ID NO: 2019969 - DNA, 25 bp, Homo sapien
caaattgagcaacttaaggtgctaa

SEQ ID NO: 2019970 - DNA, 25 bp, Homo sapien
attgagcaacttaaggtgctaaagc

SEQ ID NO: 2019971 - DNA, 25 bp, Homo sapien
agcaacttaaggtgctaaagctctg

SEQ ID NO: 2019972 - DNA, 25 bp, Homo sapien
tgagcaacttaaggtgctaaagctc

SEQ ID NO: 2019973 - DNA, 25 bp, Homo sapien
cactaagactgttgcccgattctca

SEQ ID NO: 2019974 - DNA, 25 bp, Homo sapien
catccaatgtcagaatagcactctt

SEQ ID NO: 2019975 - DNA, 25 bp, Homo sapien
actaagactgttgcccgattctcag

SEQ ID NO: 2019976 - DNA, 25 bp, Homo sapien
agcagcatccaatgtcagaatagca

SEQ ID NO: 2019977 - DNA, 25 bp, Homo sapien
tttcagataccagtgggcacaagct

SEQ ID NO: 2019978 - DNA, 25 bp, Homo sapien
agccaagtttcagataccagtgggc

SEQ ID NO: 2019979 - DNA, 25 bp, Homo sapien
cctgttctggagatgttcacagtcc

SEQ ID NO: 2019980 - DNA, 25 bp, Homo sapien
caagtttcagataccagtgggcaca

SEQ ID NO: 2019981 - DNA, 25 bp, Homo sapien
tagctgcttgtagcatgaagcttga

SEQ ID NO: 2019982 - DNA, 25 bp, Homo sapien
gaagcttgaaaagccagacactgta

SEQ ID NO: 2019983 - DNA, 25 bp, Homo sapien
tgtttgacaaagagttagctgcttg

SEQ ID NO: 2019984 - DNA, 25 bp, Homo sapien
gaggaatcatagcaggatacaaggg

SEQ ID NO: 2019985 - DNA, 25 bp, Homo sapien
catgagggtccagattagcgcagaa

SEQ ID NO: 2019986 - DNA, 25 bp, Homo sapien
ggatactcaacttagcgggtgggct

SEQ ID NO: 2019987 - DNA, 25 bp, Homo sapien
gacatagtgcatggcttctcaacgg

SEQ ID NO: 2019988 - DNA, 25 bp, Homo sapien
taaaactcccctcatggaagccagg

SEQ ID NO: 2019989 - DNA, 25 bp, Homo sapien
ttgtcagcctgaaagcttgccttcc

SEQ ID NO: 2019990 - DNA, 25 bp, Homo sapien
tatattacaggcttgctctaggctg

SEQ ID NO: 2019991 - DNA, 25 bp, Homo sapien
ggattgaatcctgctactctgatgc

SEQ ID NO: 2019992 - DNA, 25 bp, Homo sapien
tgtgggcacgtcactactaatacga

SEQ ID NO: 2019993 - DNA, 25 bp, Homo sapien
ggccctgcgttcttaatgataacca

SEQ ID NO: 2019994 - DNA, 25 bp, Homo sapien
caggccctgcgttcttaatgataac

SEQ ID NO: 2019995 - DNA, 25 bp, Homo sapien
tctcaggccctgcgttcttaatgat

SEQ ID NO: 2019996 - DNA, 25 bp, Homo sapien
tcaggccctgcgttcttaatgataa

SEQ ID NO: 2019997 - DNA, 25 bp, Homo sapien
tcacaggcacattccgccgtaatta

SEQ ID NO: 2019998 - DNA, 25 bp, Homo sapien
gatgtggcagctgttggacaactca

SEQ ID NO: 2019999 - DNA, 25 bp, Homo sapien
ccgccgtaattagagccaagaagca

SEQ ID NO: 2020000 - DNA, 25 bp, Homo sapien
cagctgttggacaactcacaggcac

SEQ ID NO: 2020001 - DNA, 25 bp, Homo sapien
tcccacggagcaggcatcattcttc

SEQ ID NO: 2020002 - DNA, 25 bp, Homo sapien
aatttgcccctcaaagtgagatgcc

SEQ ID NO: 2020003 - DNA, 25 bp, Homo sapien
gatgccatgtgcttatggtcttctg

SEQ ID NO: 2020004 - DNA, 25 bp, Homo sapien
tcatggcttgactattcccacggag

SEQ ID NO: 2020005 - DNA, 25 bp, Homo sapien
taataagcaagtggacacctttaga

SEQ ID NO: 2020006 - DNA, 25 bp, Homo sapien
gacacctttagactcatattcagcc

SEQ ID NO: 2020007 - DNA, 25 bp, Homo sapien
gcaagtggacacctttagactcata

SEQ ID NO: 2020008 - DNA, 25 bp, Homo sapien
ttcctcattaataagcaagtggaca

SEQ ID NO: 2020009 - DNA, 25 bp, Homo sapien
gcttcacacaagtatatgcatggtg

SEQ ID NO: 2020010 - DNA, 25 bp, Homo sapien
tatgtcaacataatcatcccaagca

SEQ ID NO: 2020011 - DNA, 25 bp, Homo sapien
tatggctgacagaaacgagctaaaa

SEQ ID NO: 2020012 - DNA, 25 bp, Homo sapien
caattcaaaacaggtcaatgatggg

SEQ ID NO: 2020013 - DNA, 25 bp, Homo sapien
caggcaacctctgagggccaactct

SEQ ID NO: 2020014 - DNA, 25 bp, Homo sapien
aggcaacctctgagggccaactctt

SEQ ID NO: 2020015 - DNA, 25 bp, Homo sapien
gagtcaagtgtctgcatgctcctca

SEQ ID NO: 2020016 - DNA, 25 bp, Homo sapien
cagagtcaagtgtctgcatgctcct

SEQ ID NO: 2020017 - DNA, 25 bp, Homo sapien
aagtgtctgcatgctcctcatggtg

SEQ ID NO: 2020018 - DNA, 25 bp, Homo sapien
tctgcatgctcctcatggtgtccac

SEQ ID NO: 2020019 - DNA, 25 bp, Homo sapien
ggacatttgcccagcttctgttggg

SEQ ID NO: 2020020 - DNA, 25 bp, Homo sapien
ctagcagcggcggacatttgcccag

SEQ ID NO: 2020021 - DNA, 25 bp, Homo sapien
ggtcctggtgcacgtgctgttgttc

SEQ ID NO: 2020022 - DNA, 25 bp, Homo sapien
tgttgttcccagcagtggttccgag

SEQ ID NO: 2020023 - DNA, 25 bp, Homo sapien
cccgcatgacagtgtgctgagcgtg

SEQ ID NO: 2020024 - DNA, 25 bp, Homo sapien
agcccgcatgacagtgtgctgagcg

SEQ ID NO: 2020025 - DNA, 25 bp, Homo sapien
tcagcccgcatgacagtgtgctgag

SEQ ID NO: 2020026 - DNA, 25 bp, Homo sapien
gtgtcagcccgcatgacagtgtgct

SEQ ID NO: 2020027 - DNA, 25 bp, Homo sapien
cactgggcccaccatcatctgtgtt

SEQ ID NO: 2020028 - DNA, 25 bp, Homo sapien
gaagcacgacccctgctggtctggg

SEQ ID NO: 2020029 - DNA, 25 bp, Homo sapien
cagtttttcgggcagttgggcctca

SEQ ID NO: 2020030 - DNA, 25 bp, Homo sapien
tctctgttgggtgtcacctatttct

SEQ ID NO: 2020031 - DNA, 25 bp, Homo sapien
cttctggtagaacttagcattcagc

SEQ ID NO: 2020032 - DNA, 25 bp, Homo sapien
gactttcaaactgtgacccaggttc

SEQ ID NO: 2020033 - DNA, 25 bp, Homo sapien
ctgctcttgatgagcatcttcttaa

SEQ ID NO: 2020034 - DNA, 25 bp, Homo sapien
agagcccaccccaagatttctgcaa

SEQ ID NO: 2020035 - DNA, 25 bp, Homo sapien
agtactgaatgtcaccagattgtca

SEQ ID NO: 2020036 - DNA, 25 bp, Homo sapien
ctgatgtgtcgcatagtactgaatg

SEQ ID NO: 2020037 - DNA, 25 bp, Homo sapien
tagtactgaatgtcaccagattgtc

SEQ ID NO: 2020038 - DNA, 25 bp, Homo sapien
atgagtagtatctgaatcatgctgg

SEQ ID NO: 2020039 - DNA, 25 bp, Homo sapien
ttgatgagaaagtgatggacccttt

SEQ ID NO: 2020040 - DNA, 25 bp, Homo sapien
ccctttgtaatgagtagtatctgaa

SEQ ID NO: 2020041 - DNA, 25 bp, Homo sapien
ttcaaaaatgaatagcttcccatca

SEQ ID NO: 2020042 - DNA, 25 bp, Homo sapien
ccaccaaggtgtccatcccaaaata

SEQ ID NO: 2020043 - DNA, 25 bp, Homo sapien
tctcaactgcccgtgccaccaaggt

SEQ ID NO: 2020044 - DNA, 25 bp, Homo sapien
ctcctcctctctcaactgcccgtgc

SEQ ID NO: 2020045 - DNA, 25 bp, Homo sapien
tccatcccaaaataggccagtgcca

SEQ ID NO: 2020046 - DNA, 25 bp, Homo sapien
tggcagcagatagggtcgccagcca

SEQ ID NO: 2020047 - DNA, 25 bp, Homo sapien
tgtgatccaaggcagagctccacac

SEQ ID NO: 2020048 - DNA, 25 bp, Homo sapien
cacggcataatctactggaaggttc

SEQ ID NO: 2020049 - DNA, 25 bp, Homo sapien
gcctacaggcgtcattagccactca

SEQ ID NO: 2020050 - DNA, 25 bp, Homo sapien
gaatctggaccacaagtagacctcc

SEQ ID NO: 2020051 - DNA, 25 bp, Homo sapien
tagacctccagccagttgcgagtac

SEQ ID NO: 2020052 - DNA, 25 bp, Homo sapien
gcagatcaagaggttctgaatctgg

SEQ ID NO: 2020053 - DNA, 25 bp, Homo sapien
tagtctttgcgggtcatatgtcagc

SEQ ID NO: 2020054 - DNA, 25 bp, Homo sapien
acccaggacaacgaagcatcccggt

SEQ ID NO: 2020055 - DNA, 25 bp, Homo sapien
gggcacccaggacaacgaagcatcc

SEQ ID NO: 2020056 - DNA, 25 bp, Homo sapien
gaggagtgacttgtcgggggcaccc

SEQ ID NO: 2020057 - DNA, 25 bp, Homo sapien
gacaacgaagcatcccggttctctc

SEQ ID NO: 2020058 - DNA, 25 bp, Homo sapien
aaatgcatattcagcagccagttta

SEQ ID NO: 2020059 - DNA, 25 bp, Homo sapien
aaaatgcatattcagcagccagttt

SEQ ID NO: 2020060 - DNA, 25 bp, Homo sapien
cttccagaagtgaagttaccatcag

SEQ ID NO: 2020061 - DNA, 25 bp, Homo sapien
atcctgggacatatccgtgcacata

SEQ ID NO: 2020062 - DNA, 25 bp, Homo sapien
tccagaagtgaagttaccatcagct

SEQ ID NO: 2020063 - DNA, 25 bp, Homo sapien
ccagaagtgaagttaccatcagctg

SEQ ID NO: 2020064 - DNA, 25 bp, Homo sapien
ctacgtaatgacaccatcaaacagg

SEQ ID NO: 2020065 - DNA, 25 bp, Homo sapien
agagctatcacacttgcagaacgga

SEQ ID NO: 2020066 - DNA, 25 bp, Homo sapien
gatgagatgcggaatgagcgcggca

SEQ ID NO: 2020067 - DNA, 25 bp, Homo sapien
tggaatcgaatgtgtagcgtctacg

SEQ ID NO: 2020068 - DNA, 25 bp, Homo sapien
tcaaaagcaaggctacctggacctg

SEQ ID NO: 2020069 - DNA, 25 bp, Homo sapien
ctcaaaagcaaggctacctggacct

SEQ ID NO: 2020070 - DNA, 25 bp, Homo sapien
tttccagggccactgctctgacctc

SEQ ID NO: 2020071 - DNA, 25 bp, Homo sapien
ctaaggatgtgcacagatttccagg

SEQ ID NO: 2020072 - DNA, 25 bp, Homo sapien
taaggatgtgcacagatttccaggg

SEQ ID NO: 2020073 - DNA, 25 bp, Homo sapien
acctccggcacagaggctgtctcca

SEQ ID NO: 2020074 - DNA, 25 bp, Homo sapien
tcatgatctaacttggttcatggag

SEQ ID NO: 2020075 - DNA, 25 bp, Homo sapien
atgatctaacttggttcatggagcc

SEQ ID NO: 2020076 - DNA, 25 bp, Homo sapien
gatctaacttggttcatggagccat

SEQ ID NO: 2020077 - DNA, 25 bp, Homo sapien
atctaacttggttcatggagccatc

SEQ ID NO: 2020078 - DNA, 25 bp, Homo sapien
cgtgcacaatgttcatggacatccc

SEQ ID NO: 2020079 - DNA, 25 bp, Homo sapien
ggtttttcttgctcccgtgcacaat

SEQ ID NO: 2020080 - DNA, 25 bp, Homo sapien
ggctgaccatgaggatcgcattgag

SEQ ID NO: 2020081 - DNA, 25 bp, Homo sapien
tggaacttcgcatctgctcagaacg

SEQ ID NO: 2020082 - DNA, 25 bp, Homo sapien
aactgcataggcaaatatgatgtgc

SEQ ID NO: 2020083 - DNA, 25 bp, Homo sapien
caacaactgcataggcaaatatgat

SEQ ID NO: 2020084 - DNA, 25 bp, Homo sapien
gacaacaactgcataggcaaatatg

SEQ ID NO: 2020085 - DNA, 25 bp, Homo sapien
ctgacaacaactgcataggcaaata

SEQ ID NO: 2020086 - DNA, 25 bp, Homo sapien
tagttccctgtgagtgagaacgcat

SEQ ID NO: 2020087 - DNA, 25 bp, Homo sapien
ctcgttctcatagttccctgtgagt

SEQ ID NO: 2020088 - DNA, 25 bp, Homo sapien
cgttctcatagttccctgtgagtga

SEQ ID NO: 2020089 - DNA, 25 bp, Homo sapien
catagttccctgtgagtgagaacgc

SEQ ID NO: 2020090 - DNA, 25 bp, Homo sapien
aaaagttcaactattcttatctcac

SEQ ID NO: 2020091 - DNA, 25 bp, Homo sapien
caactattcttatctcactttgaca

SEQ ID NO: 2020092 - DNA, 25 bp, Homo sapien
gttcaactattcttatctcactttg

SEQ ID NO: 2020093 - DNA, 25 bp, Homo sapien
tctggtgtattatctatagttatat

SEQ ID NO: 2020094 - DNA, 25 bp, Homo sapien
tcctgccaggtgacgatttggttca

SEQ ID NO: 2020095 - DNA, 25 bp, Homo sapien
ctcctgccaggtgacgatttggttc

SEQ ID NO: 2020096 - DNA, 25 bp, Homo sapien
cctgccaggtgacgatttggttcat

SEQ ID NO: 2020097 - DNA, 25 bp, Homo sapien
ccatgcactagccatttcggatctg

SEQ ID NO: 2020098 - DNA, 25 bp, Homo sapien
gcactagccatttcggatctgagag

SEQ ID NO: 2020099 - DNA, 25 bp, Homo sapien
tttggatctgagagagtccgccatg

SEQ ID NO: 2020100 - DNA, 25 bp, Homo sapien
ttggatctgagagagtccgccatgc

SEQ ID NO: 2020101 - DNA, 25 bp, Homo sapien
tgtaacaaggtgcatcccggtggat

SEQ ID NO: 2020102 - DNA, 25 bp, Homo sapien
tcccggtggatggaatacccgtgat

SEQ ID NO: 2020103 - DNA, 25 bp, Homo sapien
ggaatacccgtgatggaattcttta

SEQ ID NO: 2020104 - DNA, 25 bp, Homo sapien
tgactgtgacgggattggacccagt

SEQ ID NO: 2020105 - DNA, 25 bp, Homo sapien
tcggttattaatgggagtgacagcc

SEQ ID NO: 2020106 - DNA, 25 bp, Homo sapien
gcttagttgaataaccgggagactc

SEQ ID NO: 2020107 - DNA, 25 bp, Homo sapien
gacagcctgacagcctagtcggtta

SEQ ID NO: 2020108 - DNA, 25 bp, Homo sapien
tacaacaacaaagagtgacagcctg

SEQ ID NO: 2020109 - DNA, 25 bp, Homo sapien
ctttaaaggcacaggtgaaaattct

SEQ ID NO: 2020110 - DNA, 25 bp, Homo sapien
catgaactgttggagaattccctgc

SEQ ID NO: 2020111 - DNA, 25 bp, Homo sapien
ccctgctgaatggagcagagaaact

SEQ ID NO: 2020112 - DNA, 25 bp, Homo sapien
gagaaactgggctagaactggagaa

SEQ ID NO: 2020113 - DNA, 25 bp, Homo sapien
ggacatggggcagatgcagcacaca

SEQ ID NO: 2020114 - DNA, 25 bp, Homo sapien
cagccagctcagttcagtcaacggg

SEQ ID NO: 2020115 - DNA, 25 bp, Homo sapien
gagtgatagatgttgacaaagcaaa

SEQ ID NO: 2020116 - DNA, 25 bp, Homo sapien
cgaatatgatgttggatgtctttcc

SEQ ID NO: 2020117 - DNA, 25 bp, Homo sapien
gcattcctcagtaatcatcgtcctc

SEQ ID NO: 2020118 - DNA, 25 bp, Homo sapien
tttcaccgcattcctcagtaatcat

SEQ ID NO: 2020119 - DNA, 25 bp, Homo sapien
tcaccgcattcctcagtaatcatcg

SEQ ID NO: 2020120 - DNA, 25 bp, Homo sapien
accgcattcctcagtaatcatcgtc

SEQ ID NO: 2020121 - DNA, 25 bp, Homo sapien
cccacatcggtattgtatttattac

SEQ ID NO: 2020122 - DNA, 25 bp, Homo sapien
ggctgcctcagtgctttaccacgtg

SEQ ID NO: 2020123 - DNA, 25 bp, Homo sapien
tttcaagaaatgacccacatcggta

SEQ ID NO: 2020124 - DNA, 25 bp, Homo sapien
tattacctcgtagtgtggctattga

SEQ ID NO: 2020125 - DNA, 25 bp, Homo sapien
ctcggttgttttttgaagataggtg

SEQ ID NO: 2020126 - DNA, 25 bp, Homo sapien
tgccataaactcctcccgattgtag

SEQ ID NO: 2020127 - DNA, 25 bp, Homo sapien
gccatgcaggccgagtttatgccaa

SEQ ID NO: 2020128 - DNA, 25 bp, Homo sapien
acagacaaaggtggcgcacaagggc

SEQ ID NO: 2020129 - DNA, 25 bp, Homo sapien
ctaagccggagcagacagacaaagg

SEQ ID NO: 2020130 - DNA, 25 bp, Homo sapien
ctatgacttcttcgtaaggtcaagg

SEQ ID NO: 2020131 - DNA, 25 bp, Homo sapien
tcttcgtaaggtcaaggtacttgcc

SEQ ID NO: 2020132 - DNA, 25 bp, Homo sapien
cgtaaggtcaaggtacttgcccaca

SEQ ID NO: 2020133 - DNA, 25 bp, Homo sapien
tgacttcttcgtaaggtcaaggtac

SEQ ID NO: 2020134 - DNA, 25 bp, Homo sapien
cttgggttccagctcactcctgtgc

SEQ ID NO: 2020135 - DNA, 25 bp, Homo sapien
aggggatgccaactctaacaagtgg

SEQ ID NO: 2020136 - DNA, 25 bp, Homo sapien
gatgccaactctaacaagtggaggg

SEQ ID NO: 2020137 - DNA, 25 bp, Homo sapien
ttgggttccagctcactcctgtgct

SEQ ID NO: 2020138 - DNA, 25 bp, Homo sapien
ttcatgttatcatcagttccactct

SEQ ID NO: 2020139 - DNA, 25 bp, Homo sapien
ttcctttcatgttatcatcagttcc

SEQ ID NO: 2020140 - DNA, 25 bp, Homo sapien
tcatgttatcatcagttccactctt

SEQ ID NO: 2020141 - DNA, 25 bp, Homo sapien
cctttcatgttatcatcagttccac

SEQ ID NO: 2020142 - DNA, 25 bp, Homo sapien
cattggaggtgcagatttgcactta

SEQ ID NO: 2020143 - DNA, 25 bp, Homo sapien
aacaagtctacttcctagttgatgc

SEQ ID NO: 2020144 - DNA, 25 bp, Homo sapien
gatgttcgagacaccctcagtgaag

SEQ ID NO: 2020145 - DNA, 25 bp, Homo sapien
tcagtgaagactggaaggtgtcacc

SEQ ID NO: 2020146 - DNA, 25 bp, Homo sapien
gtaacacgggtctgcaaaggttgag

SEQ ID NO: 2020147 - DNA, 25 bp, Homo sapien
aaagggcacaggctgaccatgctcc

SEQ ID NO: 2020148 - DNA, 25 bp, Homo sapien
caagaactggtaagaaacagaactg

SEQ ID NO: 2020149 - DNA, 25 bp, Homo sapien
ctgtggttgaaaagctcaagaactg

SEQ ID NO: 2020150 - DNA, 25 bp, Homo sapien
ggcggcggccagttctcgtgccgtg

SEQ ID NO: 2020151 - DNA, 25 bp, Homo sapien
cggcggcggccagttctcgtgccgt

SEQ ID NO: 2020152 - DNA, 25 bp, Homo sapien
caagctgagtggtaattcagacccc

SEQ ID NO: 2020153 - DNA, 25 bp, Homo sapien
gatcaagctgagtggtaattcagac

SEQ ID NO: 2020154 - DNA, 25 bp, Homo sapien
ttcagaccccggataattctcttcc

SEQ ID NO: 2020155 - DNA, 25 bp, Homo sapien
gagtggtaattcagaccccggataa

SEQ ID NO: 2020156 - DNA, 25 bp, Homo sapien
aaagcacaggtcatgaccgagcggc

SEQ ID NO: 2020157 - DNA, 25 bp, Homo sapien
catccgatggtaataagtaaaagac

SEQ ID NO: 2020158 - DNA, 25 bp, Homo sapien
caggtgtgggattctctccagcaaa

SEQ ID NO: 2020159 - DNA, 25 bp, Homo sapien
cgagaacctagcctcgatgaggaaa

SEQ ID NO: 2020160 - DNA, 25 bp, Homo sapien
tggaatcttgcttccgtcaaccagg

SEQ ID NO: 2020161 - DNA, 25 bp, Homo sapien
caaaaggaaggtcatcgactgaact

SEQ ID NO: 2020162 - DNA, 25 bp, Homo sapien
gactgaactttcgtgagccccagag

SEQ ID NO: 2020163 - DNA, 25 bp, Homo sapien
agagtcccgccctcatcggcagagt

SEQ ID NO: 2020164 - DNA, 25 bp, Homo sapien
taacgtgcgcgccacgtcgggagcc

SEQ ID NO: 2020165 - DNA, 25 bp, Homo sapien
tcctgccgaaatggagtgggacccc

SEQ ID NO: 2020166 - DNA, 25 bp, Homo sapien
gcgagggttcgcagtgacttagccc

SEQ ID NO: 2020167 - DNA, 25 bp, Homo sapien
aacgcgtcgccatggtaacgtgcgc

SEQ ID NO: 2020168 - DNA, 25 bp, Homo sapien
aagaggtcgccatccccttctgagg

SEQ ID NO: 2020169 - DNA, 25 bp, Homo sapien
aggcgctcccgctgcaagaggtcgc

SEQ ID NO: 2020170 - DNA, 25 bp, Homo sapien
ccttctgaggcctcgcggtaggggg

SEQ ID NO: 2020171 - DNA, 25 bp, Homo sapien
cgcgctgctccgtagagcccggcat

SEQ ID NO: 2020172 - DNA, 25 bp, Homo sapien
ttgagagcccctggtccacaggttg

SEQ ID NO: 2020173 - DNA, 25 bp, Homo sapien
acctctaatgatgagcccaaaggca

SEQ ID NO: 2020174 - DNA, 25 bp, Homo sapien
ggtaacctgcccaacactatgaagg

SEQ ID NO: 2020175 - DNA, 25 bp, Homo sapien
ttgctccgtgggtaatgaggtgaaa

SEQ ID NO: 2020176 - DNA, 25 bp, Homo sapien
ccagcatgtcgcaggtaaccagaag

SEQ ID NO: 2020177 - DNA, 25 bp, Homo sapien
tcgacaagatatctggcatttaaag

SEQ ID NO: 2020178 - DNA, 25 bp, Homo sapien
taaccagaagctatttcagcaaatg

SEQ ID NO: 2020179 - DNA, 25 bp, Homo sapien
gtccagttggtgagaccagcatgtc

SEQ ID NO: 2020180 - DNA, 25 bp, Homo sapien
tagaggagccggcctccttgcagag

SEQ ID NO: 2020181 - DNA, 25 bp, Homo sapien
gctttgttccagtagaggctggcgt

SEQ ID NO: 2020182 - DNA, 25 bp, Homo sapien
tgtgggcaaagtgtccagagcctct

SEQ ID NO: 2020183 - DNA, 25 bp, Homo sapien
tctcccctcaatggttggtcgctgg

SEQ ID NO: 2020184 - DNA, 25 bp, Homo sapien
cacttgaagtaagcaatatgaaatg

SEQ ID NO: 2020185 - DNA, 25 bp, Homo sapien
tccccaataggtcttacttcagatt

SEQ ID NO: 2020186 - DNA, 25 bp, Homo sapien
attgatgtgaagatctttgaggaca

SEQ ID NO: 2020187 - DNA, 25 bp, Homo sapien
atctttcatccccaataggtcttac

SEQ ID NO: 2020188 - DNA, 25 bp, Homo sapien
ctccctcttgctggactataaactt

SEQ ID NO: 2020189 - DNA, 25 bp, Homo sapien
cattccgtgacttatgttttgctga

SEQ ID NO: 2020190 - DNA, 25 bp, Homo sapien
ctctgggaagatgctagtggctttc

SEQ ID NO: 2020191 - DNA, 25 bp, Homo sapien
attccgtgacttatgttttgctgac

SEQ ID NO: 2020192 - DNA, 25 bp, Homo sapien
gatgctagtggctttcttgtggtcc

SEQ ID NO: 2020193 - DNA, 25 bp, Homo sapien
ggcttctagttctggtgggcattgc

SEQ ID NO: 2020194 - DNA, 25 bp, Homo sapien
ttccggcgagtcacagtggagctgc

SEQ ID NO: 2020195 - DNA, 25 bp, Homo sapien
ccctgcttcacgatgggcttctagt

SEQ ID NO: 2020196 - DNA, 25 bp, Homo sapien
cccttcaaggcttttgaagctgcct

SEQ ID NO: 2020197 - DNA, 25 bp, Homo sapien
ctgaattggcatattagtattatac

SEQ ID NO: 2020198 - DNA, 25 bp, Homo sapien
aggaaaagccccagattccactatt

SEQ ID NO: 2020199 - DNA, 25 bp, Homo sapien
gaaaagccccagattccactattcc

SEQ ID NO: 2020200 - DNA, 25 bp, Homo sapien
atattttccttgatatatatcatag

SEQ ID NO: 2020201 - DNA, 25 bp, Homo sapien
gattccactattccctgcactcttg

SEQ ID NO: 2020202 - DNA, 25 bp, Homo sapien
ttggttctagtgggaaacacatttc

SEQ ID NO: 2020203 - DNA, 25 bp, Homo sapien
ggttctagtgggaaacacatttcca

SEQ ID NO: 2020204 - DNA, 25 bp, Homo sapien
tctagtgggaaacacatttccagct

SEQ ID NO: 2020205 - DNA, 25 bp, Homo sapien
ttctagtgggaaacacatttccagc

SEQ ID NO: 2020206 - DNA, 25 bp, Homo sapien
gggataaacgatgaagataattcgt

SEQ ID NO: 2020207 - DNA, 25 bp, Homo sapien
tgttccgctctggacctcgcaagaa

SEQ ID NO: 2020208 - DNA, 25 bp, Homo sapien
gataattcgtatttctgttccgctc

SEQ ID NO: 2020209 - DNA, 25 bp, Homo sapien
gaaccagtgaccaagatactctacc

SEQ ID NO: 2020210 - DNA, 25 bp, Homo sapien
agggatatctactccattccagccc

SEQ ID NO: 2020211 - DNA, 25 bp, Homo sapien
gaggagttgatgtaagaaccatgac

SEQ ID NO: 2020212 - DNA, 25 bp, Homo sapien
tacttcatccacaatcgctgaaaga

SEQ ID NO: 2020213 - DNA, 25 bp, Homo sapien
gtaagaaccatgacctcagaagaat

SEQ ID NO: 2020214 - DNA, 25 bp, Homo sapien
ttttgacatctcttgagggccactg

SEQ ID NO: 2020215 - DNA, 25 bp, Homo sapien
caggagtttgtcattttggtacaca

SEQ ID NO: 2020216 - DNA, 25 bp, Homo sapien
tgacatctcttgagggccactggca

SEQ ID NO: 2020217 - DNA, 25 bp, Homo sapien
caggtgcggaggacaggagtttgtc

SEQ ID NO: 2020218 - DNA, 25 bp, Homo sapien
acacatcggcggcattaatgcaaat

SEQ ID NO: 2020219 - DNA, 25 bp, Homo sapien
tggtgctggacacatcggcggcatt

SEQ ID NO: 2020220 - DNA, 25 bp, Homo sapien
ttcctgttacgagcatggtgctgga

SEQ ID NO: 2020221 - DNA, 25 bp, Homo sapien
cgagcatggtgctggacacatcggc

SEQ ID NO: 2020222 - DNA, 25 bp, Homo sapien
ggtctgtgttctcggctgtttcctc

SEQ ID NO: 2020223 - DNA, 25 bp, Homo sapien
catgtaacccatgactcctgtatcg

SEQ ID NO: 2020224 - DNA, 25 bp, Homo sapien
cggcttctgctttaccagcgcaaac

SEQ ID NO: 2020225 - DNA, 25 bp, Homo sapien
tcctgtatcgacctcttttcctgga

SEQ ID NO: 2020226 - DNA, 25 bp, Homo sapien
gatttggtgaatattgatgagtgtt

SEQ ID NO: 2020227 - DNA, 25 bp, Homo sapien
tttcaagtcctgtagttgttgattc

SEQ ID NO: 2020228 - DNA, 25 bp, Homo sapien
cattatggattccacttgaagggca

SEQ ID NO: 2020229 - DNA, 25 bp, Homo sapien
tttcatagtttctgtcaatttcagc

SEQ ID NO: 2020230 - DNA, 25 bp, Homo sapien
cttactgactagcaattagaaacca

SEQ ID NO: 2020231 - DNA, 25 bp, Homo sapien
tgcaggtcgatctaagaagttaaac

SEQ ID NO: 2020232 - DNA, 25 bp, Homo sapien
gaaaccatattctagctcagtcatg

SEQ ID NO: 2020233 - DNA, 25 bp, Homo sapien
tctgaatgccttccagatgaagttc

SEQ ID NO: 2020234 - DNA, 25 bp, Homo sapien
cacgggaagatgagggcaagtcccc

SEQ ID NO: 2020235 - DNA, 25 bp, Homo sapien
acatgagctctttgtctacatcatc

SEQ ID NO: 2020236 - DNA, 25 bp, Homo sapien
ggaagatgagggcaagtccccacag

SEQ ID NO: 2020237 - DNA, 25 bp, Homo sapien
agtccccacaggacatgagctcttt

SEQ ID NO: 2020238 - DNA, 25 bp, Homo sapien
tatgttagactcgttcttatcaaag

SEQ ID NO: 2020239 - DNA, 25 bp, Homo sapien
tgatatgttagactcgttcttatca

SEQ ID NO: 2020240 - DNA, 25 bp, Homo sapien
aacttgatatgttagactcgttctt

SEQ ID NO: 2020241 - DNA, 25 bp, Homo sapien
tttaggttgatgagaattttcttta

SEQ ID NO: 2020242 - DNA, 25 bp, Homo sapien
ggtaattgctcatctcagaacagtg

SEQ ID NO: 2020243 - DNA, 25 bp, Homo sapien
ttctaaacatttgcagacagccgtg

SEQ ID NO: 2020244 - DNA, 25 bp, Homo sapien
gacagccgtgttcgtgcacaggtaa

SEQ ID NO: 2020245 - DNA, 25 bp, Homo sapien
tgtttaacactgtgtctaactaggg

SEQ ID NO: 2020246 - DNA, 25 bp, Homo sapien
taacaacctcggaaagcactgacga

SEQ ID NO: 2020247 - DNA, 25 bp, Homo sapien
ttcagacccctcattggaagccgga

SEQ ID NO: 2020248 - DNA, 25 bp, Homo sapien
tgcatcccacggcacaatggaagtg

SEQ ID NO: 2020249 - DNA, 25 bp, Homo sapien
tagtgtatcaggtgtaactccgagc

SEQ ID NO: 2020250 - DNA, 25 bp, Homo sapien
tagtaacgcagatcattgccagctt

SEQ ID NO: 2020251 - DNA, 25 bp, Homo sapien
ttagtaacgcagatcattgccagct

SEQ ID NO: 2020252 - DNA, 25 bp, Homo sapien
tgatggaaacatgcaccggctgttc

SEQ ID NO: 2020253 - DNA, 25 bp, Homo sapien
cagtcccggtataatatccagtaga

SEQ ID NO: 2020254 - DNA, 25 bp, Homo sapien
gctattgggaatgaatcaggcgctg

SEQ ID NO: 2020255 - DNA, 25 bp, Homo sapien
ggcgctggagcgctgacaaaatgct

SEQ ID NO: 2020256 - DNA, 25 bp, Homo sapien
cattgtccatgttcaaaaccttgac

SEQ ID NO: 2020257 - DNA, 25 bp, Homo sapien
gagtcactgaaattaagccatgcaa

SEQ ID NO: 2020258 - DNA, 25 bp, Homo sapien
tgtattggctgcgtccgtcttcacc

SEQ ID NO: 2020259 - DNA, 25 bp, Homo sapien
tatcaatgtctctagcatcaaatcc

SEQ ID NO: 2020260 - DNA, 25 bp, Homo sapien
taatacgtatttgtccctgcgctgt

SEQ ID NO: 2020261 - DNA, 25 bp, Homo sapien
ttctggagtctgcagacagcttaat

SEQ ID NO: 2020262 - DNA, 25 bp, Homo sapien
agcttaatagccaggtcctctgtca

SEQ ID NO: 2020263 - DNA, 25 bp, Homo sapien
gctgtcaaacatttcactgattctg

SEQ ID NO: 2020264 - DNA, 25 bp, Homo sapien
gaggctcgtcctgcatcctcgactg

SEQ ID NO: 2020265 - DNA, 25 bp, Homo sapien
cacgtgtggccgctgaatgcattgg

SEQ ID NO: 2020266 - DNA, 25 bp, Homo sapien
tggtactaggctggcaaccagggca

SEQ ID NO: 2020267 - DNA, 25 bp, Homo sapien
tccagctgcctgacgactggaggat

SEQ ID NO: 2020268 - DNA, 25 bp, Homo sapien
tgcagaccaaatagttgctgctgcc

SEQ ID NO: 2020269 - DNA, 25 bp, Homo sapien
gctgctgccacccacgatgaatatg

SEQ ID NO: 2020270 - DNA, 25 bp, Homo sapien
tgctgtgaagaccagttaagtcctg

SEQ ID NO: 2020271 - DNA, 25 bp, Homo sapien
gagctgttcaccgttgctccacgga

SEQ ID NO: 2020272 - DNA, 25 bp, Homo sapien
caccctgggatgaacgaacatgtgg

SEQ ID NO: 2020273 - DNA, 25 bp, Homo sapien
gaacatgtggaaataaacgagtgcc

SEQ ID NO: 2020274 - DNA, 25 bp, Homo sapien
ttccgaacgggctgtgctctcctat

SEQ ID NO: 2020275 - DNA, 25 bp, Homo sapien
gctctcctatatgagtctctccaag

SEQ ID NO: 2020276 - DNA, 25 bp, Homo sapien
ccatcagtgccttaaaatatccatc

SEQ ID NO: 2020277 - DNA, 25 bp, Homo sapien
tccatcagacaagcacatcttatat

SEQ ID NO: 2020278 - DNA, 25 bp, Homo sapien
actccaatccctgcgtgactcagta

SEQ ID NO: 2020279 - DNA, 25 bp, Homo sapien
tgactcagtaatctctgggtgacag

SEQ ID NO: 2020280 - DNA, 25 bp, Homo sapien
tgaggcgatccaagtgagtgtcccc

SEQ ID NO: 2020281 - DNA, 25 bp, Homo sapien
tctctggtgagcttggatctggcct

SEQ ID NO: 2020282 - DNA, 25 bp, Homo sapien
gtaagccactccgtcgtcacaggtg

SEQ ID NO: 2020283 - DNA, 25 bp, Homo sapien
tacaagggatgcaaccgtaagccac

SEQ ID NO: 2020284 - DNA, 25 bp, Homo sapien
gaatctatccttctagctgtgtagg

SEQ ID NO: 2020285 - DNA, 25 bp, Homo sapien
tacaatgtagccacgtgaagtttct

SEQ ID NO: 2020286 - DNA, 25 bp, Homo sapien
cccctccagtgttgtatcagttgaa

SEQ ID NO: 2020287 - DNA, 25 bp, Homo sapien
gctcaggtactttagacgtcaatca

SEQ ID NO: 2020288 - DNA, 25 bp, Homo sapien
ttctgggcttctagagatgagactg

SEQ ID NO: 2020289 - DNA, 25 bp, Homo sapien
ttattctgggcttctagagatgaga

SEQ ID NO: 2020290 - DNA, 25 bp, Homo sapien
agactgaaggatgggtctgattctt

SEQ ID NO: 2020291 - DNA, 25 bp, Homo sapien
ctgggcttctagagatgagactgaa

SEQ ID NO: 2020292 - DNA, 25 bp, Homo sapien
ttggactgctaggtaaaatgtgttg

SEQ ID NO: 2020293 - DNA, 25 bp, Homo sapien
tgctggtgagtattggcacatttta

SEQ ID NO: 2020294 - DNA, 25 bp, Homo sapien
tattagtgcatactttagagtgctg

SEQ ID NO: 2020295 - DNA, 25 bp, Homo sapien
gataaacaatgttggactgctaggt

SEQ ID NO: 2020296 - DNA, 25 bp, Homo sapien
taactgtcttcgaacttttgggcac

SEQ ID NO: 2020297 - DNA, 25 bp, Homo sapien
tcacggtccgtgttgccatacatgg

SEQ ID NO: 2020298 - DNA, 25 bp, Homo sapien
tggacagtccaaaggcaatgcctct

SEQ ID NO: 2020299 - DNA, 25 bp, Homo sapien
tgatgctgcagatctccgggcttca

SEQ ID NO: 2020300 - DNA, 25 bp, Homo sapien
gatcacagctgctccttacggtctg

SEQ ID NO: 2020301 - DNA, 25 bp, Homo sapien
ggcagtcaggtcacggcatcacttt

SEQ ID NO: 2020302 - DNA, 25 bp, Homo sapien
taagaagtcctctaaccacggcagt

SEQ ID NO: 2020303 - DNA, 25 bp, Homo sapien
tacggtctgttctttgtgcttgagc

SEQ ID NO: 2020304 - DNA, 25 bp, Homo sapien
gtgacaggtaagaccgcacccaagg

SEQ ID NO: 2020305 - DNA, 25 bp, Homo sapien
taccattacagaggactcagctgca

SEQ ID NO: 2020306 - DNA, 25 bp, Homo sapien
cgaatattaaaggatctatgaatgc

SEQ ID NO: 2020307 - DNA, 25 bp, Homo sapien
taggtgaggcgttttgccattcctc

SEQ ID NO: 2020308 - DNA, 25 bp, Homo sapien
acttctgtagatctcagtttttctg

SEQ ID NO: 2020309 - DNA, 25 bp, Homo sapien
tgccacatatcagcagtgtgatcat

SEQ ID NO: 2020310 - DNA, 25 bp, Homo sapien
ggtttgccacatatcagcagtgtga

SEQ ID NO: 2020311 - DNA, 25 bp, Homo sapien
tttccataaacttctgtagatctca

SEQ ID NO: 2020312 - DNA, 25 bp, Homo sapien
gttggcctggaccatcgctgccagt

SEQ ID NO: 2020313 - DNA, 25 bp, Homo sapien
agatggagatgtgatgccccacgcg

SEQ ID NO: 2020314 - DNA, 25 bp, Homo sapien
taaataacagtaacgtctctgagcc

SEQ ID NO: 2020315 - DNA, 25 bp, Homo sapien
tctctgagccctaccagcagggaag

SEQ ID NO: 2020316 - DNA, 25 bp, Homo sapien
gagcaatttattgccacagtggctc

SEQ ID NO: 2020317 - DNA, 25 bp, Homo sapien
aacagcgttaaaacacgttgaggtg

SEQ ID NO: 2020318 - DNA, 25 bp, Homo sapien
tggctccgtttctgttaccactcaa

SEQ ID NO: 2020319 - DNA, 25 bp, Homo sapien
caaatattgaaggtcgtttgtcgaa

SEQ ID NO: 2020320 - DNA, 25 bp, Homo sapien
ttccatagcctacaatggttgggag

SEQ ID NO: 2020321 - DNA, 25 bp, Homo sapien
gggtagcgtattccatagcctacaa

SEQ ID NO: 2020322 - DNA, 25 bp, Homo sapien
agagaaacgctgataggtggccctg

SEQ ID NO: 2020323 - DNA, 25 bp, Homo sapien
gagagaaacgctgataggtggccct

SEQ ID NO: 2020324 - DNA, 25 bp, Homo sapien
ggttgcccgtgggctggcccttctc

SEQ ID NO: 2020325 - DNA, 25 bp, Homo sapien
tcattccctggtgccgggttgcccg

SEQ ID NO: 2020326 - DNA, 25 bp, Homo sapien
gagttgtgggccttgtgcgtcattc

SEQ ID NO: 2020327 - DNA, 25 bp, Homo sapien
tgatttattcctacgtgtcttcggg

SEQ ID NO: 2020328 - DNA, 25 bp, Homo sapien
ggcaaaggaacttgtggaaagtaca

SEQ ID NO: 2020329 - DNA, 25 bp, Homo sapien
acggggggccttcacgtgccactgt

SEQ ID NO: 2020330 - DNA, 25 bp, Homo sapien
cagcttgcagaataacctgctgccc

SEQ ID NO: 2020331 - DNA, 25 bp, Homo sapien
atcttgaatttagttcccaggaggc

SEQ ID NO: 2020332 - DNA, 25 bp, Homo sapien
gctgaagacgttctttggagtgtcc

SEQ ID NO: 2020333 - DNA, 25 bp, Homo sapien
gagttgtgagaccagccagaaagtg

SEQ ID NO: 2020334 - DNA, 25 bp, Homo sapien
gagtgtcctgtggaactttctctct

SEQ ID NO: 2020335 - DNA, 25 bp, Homo sapien
aaagtggtgagatgctttagaccgc

SEQ ID NO: 2020336 - DNA, 25 bp, Homo sapien
tatcagtgaagctggatactgagtt

SEQ ID NO: 2020337 - DNA, 25 bp, Homo sapien
ttcccataagacttatcagtgaagc

SEQ ID NO: 2020338 - DNA, 25 bp, Homo sapien
agtgaagctggatactgagtttgct

SEQ ID NO: 2020339 - DNA, 25 bp, Homo sapien
ctctttcccataagacttatcagtg

SEQ ID NO: 2020340 - DNA, 25 bp, Homo sapien
tgctgattcctactgagggtggaca

SEQ ID NO: 2020341 - DNA, 25 bp, Homo sapien
gctgattcctactgagggtggacat

SEQ ID NO: 2020342 - DNA, 25 bp, Homo sapien
ctactacaggttgtttgctgattcc

SEQ ID NO: 2020343 - DNA, 25 bp, Homo sapien
tgtgagcaggtcagcatattgggcc

SEQ ID NO: 2020344 - DNA, 25 bp, Homo sapien
gactgggtcacctcagataagctgg

SEQ ID NO: 2020345 - DNA, 25 bp, Homo sapien
gagagtggcagtggcgcggttgctg

SEQ ID NO: 2020346 - DNA, 25 bp, Homo sapien
cccaaagaggcgtgtgtgcggtgtt

SEQ ID NO: 2020347 - DNA, 25 bp, Homo sapien
caagccgtatgggttgatgtttctg

SEQ ID NO: 2020348 - DNA, 25 bp, Homo sapien
tatttccataagcagtagaaacctc

SEQ ID NO: 2020349 - DNA, 25 bp, Homo sapien
gggagaagaagccattgacaacaag

SEQ ID NO: 2020350 - DNA, 25 bp, Homo sapien
tcttcccgactttgccttaacatct

SEQ ID NO: 2020351 - DNA, 25 bp, Homo sapien
tgggtcctgaccatctaccagcacc

SEQ ID NO: 2020352 - DNA, 25 bp, Homo sapien
atggacttggctacctcctcagctc

SEQ ID NO: 2020353 - DNA, 25 bp, Homo sapien
ctgaccatctaccagcaccatggac

SEQ ID NO: 2020354 - DNA, 25 bp, Homo sapien
ccatggacttggctacctcctcagc

SEQ ID NO: 2020355 - DNA, 25 bp, Homo sapien
catggccttgcttgttcagactgat

SEQ ID NO: 2020356 - DNA, 25 bp, Homo sapien
tcagactgatccttgatgcataggc

SEQ ID NO: 2020357 - DNA, 25 bp, Homo sapien
ctcagaggagaaacctcaagatagg

SEQ ID NO: 2020358 - DNA, 25 bp, Homo sapien
tatctttcctgacggcatggccttg

SEQ ID NO: 2020359 - DNA, 25 bp, Homo sapien
ccttgggtggttactgtaatgatga

SEQ ID NO: 2020360 - DNA, 25 bp, Homo sapien
ccagaagaatgctttttgtgggcag

SEQ ID NO: 2020361 - DNA, 25 bp, Homo sapien
tcagacaatagtcaccaccagaagt

SEQ ID NO: 2020362 - DNA, 25 bp, Homo sapien
caccagaagtgaaattcggttttct

SEQ ID NO: 2020363 - DNA, 25 bp, Homo sapien
ggtaggcaaattgaagatccatccc

SEQ ID NO: 2020364 - DNA, 25 bp, Homo sapien
cattgttgccatcatgtgtgtcacc

SEQ ID NO: 2020365 - DNA, 25 bp, Homo sapien
ttttcatagaggtcatcgtgccaca

SEQ ID NO: 2020366 - DNA, 25 bp, Homo sapien
tcgtgccacaaagcgttcattgttg

SEQ ID NO: 2020367 - DNA, 25 bp, Homo sapien
tctggtggtagttccatgacaatct

SEQ ID NO: 2020368 - DNA, 25 bp, Homo sapien
ggaacagtgtggtggattagccaca

SEQ ID NO: 2020369 - DNA, 25 bp, Homo sapien
gccacaaagggatataacagggatg

SEQ ID NO: 2020370 - DNA, 25 bp, Homo sapien
gatgcctctgtaaacctgacttcaa

SEQ ID NO: 2020371 - DNA, 25 bp, Homo sapien
tgaaatcaaatagagtcagagccat

SEQ ID NO: 2020372 - DNA, 25 bp, Homo sapien
agagtcagagccattttcagattaa

SEQ ID NO: 2020373 - DNA, 25 bp, Homo sapien
gattaatggtccttggtctagaggt

SEQ ID NO: 2020374 - DNA, 25 bp, Homo sapien
aaccattttggtcaatcattctgag

SEQ ID NO: 2020375 - DNA, 25 bp, Homo sapien
gcgttcctctgactgctaggcttaa

SEQ ID NO: 2020376 - DNA, 25 bp, Homo sapien
tcctggcgtctctgaaatcattcag

SEQ ID NO: 2020377 - DNA, 25 bp, Homo sapien
ggcttaagcgtcttcaactcagagt

SEQ ID NO: 2020378 - DNA, 25 bp, Homo sapien
ggctctaacccatggtctccctgga

SEQ ID NO: 2020379 - DNA, 25 bp, Homo sapien
ttcataaggcagaaggcgcataagc

SEQ ID NO: 2020380 - DNA, 25 bp, Homo sapien
caggaacagcaatttcataaggcag

SEQ ID NO: 2020381 - DNA, 25 bp, Homo sapien
caagatgagcatggccgtaaataac

SEQ ID NO: 2020382 - DNA, 25 bp, Homo sapien
cgcataagccaacgggaagcttggc

SEQ ID NO: 2020383 - DNA, 25 bp, Homo sapien
agcatcccgcgtggagcacggcgtc

SEQ ID NO: 2020384 - DNA, 25 bp, Homo sapien
catgccacccattccgagtctgtga

SEQ ID NO: 2020385 - DNA, 25 bp, Homo sapien
tcctcccagcatcccgcgtggagca

SEQ ID NO: 2020386 - DNA, 25 bp, Homo sapien
gaagctgcatgccacccattccgag

SEQ ID NO: 2020387 - DNA, 25 bp, Homo sapien
ccagagcagtgagttggtccttggc

SEQ ID NO: 2020388 - DNA, 25 bp, Homo sapien
tccttggcatgtgcctggtagctgc

SEQ ID NO: 2020389 - DNA, 25 bp, Homo sapien
ttggcaccctggccttcaggtcgct

SEQ ID NO: 2020390 - DNA, 25 bp, Homo sapien
ctgggaatctgcctttcgtgctttt

SEQ ID NO: 2020391 - DNA, 25 bp, Homo sapien
cctgctctagatacttgaacacgat

SEQ ID NO: 2020392 - DNA, 25 bp, Homo sapien
ctgtgatgcaggtgcgacccttgcc

SEQ ID NO: 2020393 - DNA, 25 bp, Homo sapien
gatgctctggtctgtaagtgctggc

SEQ ID NO: 2020394 - DNA, 25 bp, Homo sapien
tatacacacatttcgaataaggcga

SEQ ID NO: 2020395 - DNA, 25 bp, Homo sapien
aaaaatcggtgccacaatgtcccaa

SEQ ID NO: 2020396 - DNA, 25 bp, Homo sapien
taaaaaatcggtgccacaatgtccc

SEQ ID NO: 2020397 - DNA, 25 bp, Homo sapien
ctgggtgtccttcaaaagctggagg

SEQ ID NO: 2020398 - DNA, 25 bp, Homo sapien
cattaagcaacctgtctgggtgtcc

SEQ ID NO: 2020399 - DNA, 25 bp, Homo sapien
tttatgtattctaggtatgaccccg

SEQ ID NO: 2020400 - DNA, 25 bp, Homo sapien
acatattctcccagtctatagcttg

SEQ ID NO: 2020401 - DNA, 25 bp, Homo sapien
gaccccgtagttcaatgtatttgca

SEQ ID NO: 2020402 - DNA, 25 bp, Homo sapien
tgcgcttaagttgctacccatgtat

SEQ ID NO: 2020403 - DNA, 25 bp, Homo sapien
catttgctgctgtcggctgtggtgc

SEQ ID NO: 2020404 - DNA, 25 bp, Homo sapien
gggactgacttatgtgaccttgaga

SEQ ID NO: 2020405 - DNA, 25 bp, Homo sapien
gaccttgagacgttacttctctgga

SEQ ID NO: 2020406 - DNA, 25 bp, Homo sapien
atccgactggttttaggaagccttg

SEQ ID NO: 2020407 - DNA, 25 bp, Homo sapien
tataatggaacaatgatccgactgg

SEQ ID NO: 2020408 - DNA, 25 bp, Homo sapien
ctgttgttaggggtcgactgctgct

SEQ ID NO: 2020409 - DNA, 25 bp, Homo sapien
cctgttgttaggggtcgactgctgc

SEQ ID NO: 2020410 - DNA, 25 bp, Homo sapien
ttgttaggggtcgactgctgctgtt

SEQ ID NO: 2020411 - DNA, 25 bp, Homo sapien
ttaggggtcgactgctgctgttctt

SEQ ID NO: 2020412 - DNA, 25 bp, Homo sapien
taatcttcagaagaccgtgatgacc

SEQ ID NO: 2020413 - DNA, 25 bp, Homo sapien
tctccatcgggtacctgtgaggaag

SEQ ID NO: 2020414 - DNA, 25 bp, Homo sapien
agagagaaggctggatgtcagctgt

SEQ ID NO: 2020415 - DNA, 25 bp, Homo sapien
gaccacgtggctttcagcgcctgaa

SEQ ID NO: 2020416 - DNA, 25 bp, Homo sapien
gcagatcccgacagctacagagctt

SEQ ID NO: 2020417 - DNA, 25 bp, Homo sapien
ccacgaaggctttacacgatgtaca

SEQ ID NO: 2020418 - DNA, 25 bp, Homo sapien
tagcaatgcatttggtgcacgcgca

SEQ ID NO: 2020419 - DNA, 25 bp, Homo sapien
cacgcgcatggcagctagattgaca

SEQ ID NO: 2020420 - DNA, 25 bp, Homo sapien
gctttcttctcgcagtagccatcgg

SEQ ID NO: 2020421 - DNA, 25 bp, Homo sapien
acacacactcttcgacattctgcat

SEQ ID NO: 2020422 - DNA, 25 bp, Homo sapien
agccatcggagacctccagggtaga

SEQ ID NO: 2020423 - DNA, 25 bp, Homo sapien
gcagtggctgccaatctgtatcact

SEQ ID NO: 2020424 - DNA, 25 bp, Homo sapien
gttgcatgacgcgtcccagtgtcca

SEQ ID NO: 2020425 - DNA, 25 bp, Homo sapien
ccagtgtcgggctgcgcagtcagct

SEQ ID NO: 2020426 - DNA, 25 bp, Homo sapien
ataggtgggcccatgtttgtcctcg

SEQ ID NO: 2020427 - DNA, 25 bp, Homo sapien
cagtcagctgcaccgaggattccat

SEQ ID NO: 2020428 - DNA, 25 bp, Homo sapien
agggtcccatcctcgccttgcttgg

SEQ ID NO: 2020429 - DNA, 25 bp, Homo sapien
cttgcttggcggacaggcagccctg

SEQ ID NO: 2020430 - DNA, 25 bp, Homo sapien
acccagcccgaggaactggcagaga

SEQ ID NO: 2020431 - DNA, 25 bp, Homo sapien
gggggcgtttccctccatcagcaac

SEQ ID NO: 2020432 - DNA, 25 bp, Homo sapien
tctaaaccttgggacaggactttgc

SEQ ID NO: 2020433 - DNA, 25 bp, Homo sapien
ggactttgctccctagaacggagag

SEQ ID NO: 2020434 - DNA, 25 bp, Homo sapien
tgggcgctctgggaaactcccttgg

SEQ ID NO: 2020435 - DNA, 25 bp, Homo sapien
tgaaaagcattctgcaagacgcgtg

SEQ ID NO: 2020436 - DNA, 25 bp, Homo sapien
gccactgctgggtcattacaacgta

SEQ ID NO: 2020437 - DNA, 25 bp, Homo sapien
gagagtactccggtgaccttggaac

SEQ ID NO: 2020438 - DNA, 25 bp, Homo sapien
aacgtacgacttccaagagccagag

SEQ ID NO: 2020439 - DNA, 25 bp, Homo sapien
cactgcgctcaacacagacagcacg

SEQ ID NO: 2020440 - DNA, 25 bp, Homo sapien
tcagtgcccgacacgcgtcgcagga

SEQ ID NO: 2020441 - DNA, 25 bp, Homo sapien
aatgtttttgtacgagttctgcagc

SEQ ID NO: 2020442 - DNA, 25 bp, Homo sapien
tcattgaaggcgacgacacagggtg

SEQ ID NO: 2020443 - DNA, 25 bp, Homo sapien
tcacaacatcctctgagttccttgg

SEQ ID NO: 2020444 - DNA, 25 bp, Homo sapien
ccactcgctgctggtggcatggtgt

SEQ ID NO: 2020445 - DNA, 25 bp, Homo sapien
catagctcacttggaaactgagttc

SEQ ID NO: 2020446 - DNA, 25 bp, Homo sapien
cgtggatatccactgttaggtctca

SEQ ID NO: 2020447 - DNA, 25 bp, Homo sapien
tttccttatttctgtcctccgtgga

SEQ ID NO: 2020448 - DNA, 25 bp, Homo sapien
gatgggctaacaggacttctcaggt

SEQ ID NO: 2020449 - DNA, 25 bp, Homo sapien
tcaggtctggatccaggtacaccag

SEQ ID NO: 2020450 - DNA, 25 bp, Homo sapien
ttgggttctttctttgcgtgtgccc

SEQ ID NO: 2020451 - DNA, 25 bp, Homo sapien
tacaccagattgacagctgtactgt

SEQ ID NO: 2020452 - DNA, 25 bp, Homo sapien
caggtactcatttagccttggggct

SEQ ID NO: 2020453 - DNA, 25 bp, Homo sapien
tcctgggtttgccccgtgcagtgcc

SEQ ID NO: 2020454 - DNA, 25 bp, Homo sapien
gtactttcgcctcccgcagaatgtg

SEQ ID NO: 2020455 - DNA, 25 bp, Homo sapien
ggcctgtcctcccttggcgtgcagg

SEQ ID NO: 2020456 - DNA, 25 bp, Homo sapien
cacgatcgtctttgcagcccgaggt

SEQ ID NO: 2020457 - DNA, 25 bp, Homo sapien
tgcgtttcggtgaccacttaggaag

SEQ ID NO: 2020458 - DNA, 25 bp, Homo sapien
gaggctctggtcacggcacagactt

SEQ ID NO: 2020459 - DNA, 25 bp, Homo sapien
tggtgacggttttctgggtgcctct

SEQ ID NO: 2020460 - DNA, 25 bp, Homo sapien
gctttgctaattctgctttgaggca

SEQ ID NO: 2020461 - DNA, 25 bp, Homo sapien
agtgaccaagggccacccgcccaag

SEQ ID NO: 2020462 - DNA, 25 bp, Homo sapien
tatattagaatttgtaactagattg

SEQ ID NO: 2020463 - DNA, 25 bp, Homo sapien
ttgtaactagattgatgtatttaac

SEQ ID NO: 2020464 - DNA, 25 bp, Homo sapien
gcacatgtgggtttcatcgtctcac

SEQ ID NO: 2020465 - DNA, 25 bp, Homo sapien
gaaagggcaagcttcatctccatgg

SEQ ID NO: 2020466 - DNA, 25 bp, Homo sapien
tacagggtcagtagggatgctttct

SEQ ID NO: 2020467 - DNA, 25 bp, Homo sapien
gctttcgtggctggagactgtctac

SEQ ID NO: 2020468 - DNA, 25 bp, Homo sapien
cttcaggaagtagcaattgggagtt

SEQ ID NO: 2020469 - DNA, 25 bp, Homo sapien
gcttcaaagccaggtgaattttgcc

SEQ ID NO: 2020470 - DNA, 25 bp, Homo sapien
aaaggagcgcccagtatgacaggcc

SEQ ID NO: 2020471 - DNA, 25 bp, Homo sapien
cagttacttcgtcagagaaaggagc

SEQ ID NO: 2020472 - DNA, 25 bp, Homo sapien
ttttgcgttcaaataacacacagct

SEQ ID NO: 2020473 - DNA, 25 bp, Homo sapien
cttctctgggaaattggccactgta

SEQ ID NO: 2020474 - DNA, 25 bp, Homo sapien
cagtgttgcgtctaatgtaacttag

SEQ ID NO: 2020475 - DNA, 25 bp, Homo sapien
ggttgtctacactgcagcttctcgg

SEQ ID NO: 2020476 - DNA, 25 bp, Homo sapien
tatgtacgaaaatgatctgtcctgt

SEQ ID NO: 2020477 - DNA, 25 bp, Homo sapien
ttaggaatgtccatgcagatacagt

SEQ ID NO: 2020478 - DNA, 25 bp, Homo sapien
tcttggctgaaagtgaatggtgact

SEQ ID NO: 2020479 - DNA, 25 bp, Homo sapien
gaatgtcagggactagtgacccagt

SEQ ID NO: 2020480 - DNA, 25 bp, Homo sapien
ccggtgcttgtccttggtgctttta

SEQ ID NO: 2020481 - DNA, 25 bp, Homo sapien
tgggtgattcttccagcccggcggt

SEQ ID NO: 2020482 - DNA, 25 bp, Homo sapien
tttgcctcgatcgtagacaagctag

SEQ ID NO: 2020483 - DNA, 25 bp, Homo sapien
cagctgtgagggcatccgctcttgt

SEQ ID NO: 2020484 - DNA, 25 bp, Homo sapien
atcctctacctggtctcttggccct

SEQ ID NO: 2020485 - DNA, 25 bp, Homo sapien
cttgggccttcccatcttgggcctt

SEQ ID NO: 2020486 - DNA, 25 bp, Homo sapien
ctgtgtccatcctttacctggtctc

SEQ ID NO: 2020487 - DNA, 25 bp, Homo sapien
gtgtccatcctttacctggtctctg

SEQ ID NO: 2020488 - DNA, 25 bp, Homo sapien
gaggtcagcctgtttagatacttgg

SEQ ID NO: 2020489 - DNA, 25 bp, Homo sapien
tgggcccctagctttggtgaacttc

SEQ ID NO: 2020490 - DNA, 25 bp, Homo sapien
tctttaaggcttcagacatttccct

SEQ ID NO: 2020491 - DNA, 25 bp, Homo sapien
gaagtgccgagcatctccagatggg

SEQ ID NO: 2020492 - DNA, 25 bp, Homo sapien
cctgtgggtggcgtagttgctgttt

SEQ ID NO: 2020493 - DNA, 25 bp, Homo sapien
tgccctgtgggtggcgtagttgctg

SEQ ID NO: 2020494 - DNA, 25 bp, Homo sapien
tgagctgccctgtgggtggcgtagt

SEQ ID NO: 2020495 - DNA, 25 bp, Homo sapien
tcacacctggaaagtgccgtccccc

SEQ ID NO: 2020496 - DNA, 25 bp, Homo sapien
cctgatcgggagctcactagaggct

SEQ ID NO: 2020497 - DNA, 25 bp, Homo sapien
ggccctgatcctgtaatgaagaaac

SEQ ID NO: 2020498 - DNA, 25 bp, Homo sapien
tgtggcttactgatgatgaatgcgg

SEQ ID NO: 2020499 - DNA, 25 bp, Homo sapien
ctggagggcccttgtcaaccaacag

SEQ ID NO: 2020500 - DNA, 25 bp, Homo sapien
cctgggccccgtgtgaaacatgctt

SEQ ID NO: 2020501 - DNA, 25 bp, Homo sapien
gccagcttgggacgcagtgaagtca

SEQ ID NO: 2020502 - DNA, 25 bp, Homo sapien
catagtcaccgtctgtggcacgcgt

SEQ ID NO: 2020503 - DNA, 25 bp, Homo sapien
caagacacatctaggaaggtcctgc

SEQ ID NO: 2020504 - DNA, 25 bp, Homo sapien
gagatcagtccagtgagaatttggg

SEQ ID NO: 2020505 - DNA, 25 bp, Homo sapien
ccacatggatgacggagccttcaga

SEQ ID NO: 2020506 - DNA, 25 bp, Homo sapien
gactccagcgatgggttctggtctc

SEQ ID NO: 2020507 - DNA, 25 bp, Homo sapien
ggaaggatgtggttgccgaaattat

SEQ ID NO: 2020508 - DNA, 25 bp, Homo sapien
gaattgatctcatctgcgtctgcag

SEQ ID NO: 2020509 - DNA, 25 bp, Homo sapien
ttgcttgctgttcggtgccttcact

SEQ ID NO: 2020510 - DNA, 25 bp, Homo sapien
cgggcctgtgctggtgtacctgcaa

SEQ ID NO: 2020511 - DNA, 25 bp, Homo sapien
gtgtacctgcaagttgcctcccttg

SEQ ID NO: 2020512 - DNA, 25 bp, Homo sapien
gataatgaccgacgtccacatgggc

SEQ ID NO: 2020513 - DNA, 25 bp, Homo sapien
tgcttggccgtcgacccaaggcctg

SEQ ID NO: 2020514 - DNA, 25 bp, Homo sapien
tcctctccaaaggataatgaccgac

SEQ ID NO: 2020515 - DNA, 25 bp, Homo sapien
tctgtgcccctcgtttcctcggaga

SEQ ID NO: 2020516 - DNA, 25 bp, Homo sapien
gcttcctggtttgactggcgtcgct

SEQ ID NO: 2020517 - DNA, 25 bp, Homo sapien
gaccgtggtgttgtttgcctcgccg

SEQ ID NO: 2020518 - DNA, 25 bp, Homo sapien
ccttcagggcgaggctgagacaaca

SEQ ID NO: 2020519 - DNA, 25 bp, Homo sapien
ctggtggcggaaatgaggctcttct

SEQ ID NO: 2020520 - DNA, 25 bp, Homo sapien
agctttgcgcacttccggacggtga

SEQ ID NO: 2020521 - DNA, 25 bp, Homo sapien
acttccggacggtgaagctcgcggt

SEQ ID NO: 2020522 - DNA, 25 bp, Homo sapien
tgcgcacttccggacggtgaagctc

SEQ ID NO: 2020523 - DNA, 25 bp, Homo sapien
tcacttgcagctttgcgcacttccg

SEQ ID NO: 2020524 - DNA, 25 bp, Homo sapien
tcctgatgatcttttaaggcaagct

SEQ ID NO: 2020525 - DNA, 25 bp, Homo sapien
taagtcttttgcagataaatgcctg

SEQ ID NO: 2020526 - DNA, 25 bp, Homo sapien
tagcttgggcgcaggtgccatctag

SEQ ID NO: 2020527 - DNA, 25 bp, Homo sapien
tggtagcttccatgcattgcgcggg

SEQ ID NO: 2020528 - DNA, 25 bp, Homo sapien
tggcctcggagaagcccgtgggcgg

SEQ ID NO: 2020529 - DNA, 25 bp, Homo sapien
tgcagggcgtttcggagatggcctc

SEQ ID NO: 2020530 - DNA, 25 bp, Homo sapien
gagagggacggacttaggcttggcc

SEQ ID NO: 2020531 - DNA, 25 bp, Homo sapien
ccaggagtgccgtcggtctgtccag

SEQ ID NO: 2020532 - DNA, 25 bp, Homo sapien
tgcgactcttcagatcacttcccgt

SEQ ID NO: 2020533 - DNA, 25 bp, Homo sapien
tcacgactgtccgtgagtgcccgag

SEQ ID NO: 2020534 - DNA, 25 bp, Homo sapien
taaggagcggagtttagtcgttcag

SEQ ID NO: 2020535 - DNA, 25 bp, Homo sapien
tgttcttggagaagcaacgtcttcc

SEQ ID NO: 2020536 - DNA, 25 bp, Homo sapien
gctcgttgtccgcaggatgcttagt

SEQ ID NO: 2020537 - DNA, 25 bp, Homo sapien
gagtggtggtcggtgctcgttgtcc

SEQ ID NO: 2020538 - DNA, 25 bp, Homo sapien
tgtccgcaggatgcttagtccttgg

SEQ ID NO: 2020539 - DNA, 25 bp, Homo sapien
tcggtgctcgttgtccgcaggatgc

SEQ ID NO: 2020540 - DNA, 25 bp, Homo sapien
caggctgagtgtgacggtgtggctc

SEQ ID NO: 2020541 - DNA, 25 bp, Homo sapien
ggacaacacacgcattcatcacgcg

SEQ ID NO: 2020542 - DNA, 25 bp, Homo sapien
gcaggcctgatgaccgtggatgtct

SEQ ID NO: 2020543 - DNA, 25 bp, Homo sapien
tcatcacgcgtgtgtcagcggagtc

SEQ ID NO: 2020544 - DNA, 25 bp, Homo sapien
tgctgaggacgcttgagcacgcctc

SEQ ID NO: 2020545 - DNA, 25 bp, Homo sapien
ctgcgtgcgctgtcgtctgatgaca

SEQ ID NO: 2020546 - DNA, 25 bp, Homo sapien
agggccaggcatgactgagttgttc

SEQ ID NO: 2020547 - DNA, 25 bp, Homo sapien
agaagccgccatgcaaggtgggtcc

SEQ ID NO: 2020548 - DNA, 25 bp, Homo sapien
ctgagaaggataagactctgcactc

SEQ ID NO: 2020549 - DNA, 25 bp, Homo sapien
caaatctaagatagccccaggcagg

SEQ ID NO: 2020550 - DNA, 25 bp, Homo sapien
cactctcaaagaggcggtgctcgtg

SEQ ID NO: 2020551 - DNA, 25 bp, Homo sapien
tgtgccccgggttagcaaatctaag

SEQ ID NO: 2020552 - DNA, 25 bp, Homo sapien
tgacagaatcaacccatctcaggag

SEQ ID NO: 2020553 - DNA, 25 bp, Homo sapien
tgtgtagggaactgcggaaccactg

SEQ ID NO: 2020554 - DNA, 25 bp, Homo sapien
tcgggacctgttcgaggcaaggcct

SEQ ID NO: 2020555 - DNA, 25 bp, Homo sapien
tgacccgagaatcaggaagctctat

SEQ ID NO: 2020556 - DNA, 25 bp, Homo sapien
tatttttgttgaagccgcgacttgc

SEQ ID NO: 2020557 - DNA, 25 bp, Homo sapien
gaatgacaggattgtgacactcaag

SEQ ID NO: 2020558 - DNA, 25 bp, Homo sapien
gtattgcgaaaggtacacgacaccc

SEQ ID NO: 2020559 - DNA, 25 bp, Homo sapien
tcttgtctccagtgcaggatgttca

SEQ ID NO: 2020560 - DNA, 25 bp, Homo sapien
tgtttcaggccgtccctttgggtgc

SEQ ID NO: 2020561 - DNA, 25 bp, Homo sapien
gaccttcgctggtcttggtcccgga

SEQ ID NO: 2020562 - DNA, 25 bp, Homo sapien
gctgtgaatcattagtgccgcttcc

SEQ ID NO: 2020563 - DNA, 25 bp, Homo sapien
tggtcccggacttaggaatgcagcc

SEQ ID NO: 2020564 - DNA, 25 bp, Homo sapien
ttcagcattaccttggcaggtgcag

SEQ ID NO: 2020565 - DNA, 25 bp, Homo sapien
gaataaaccgtatggcattttcagc

SEQ ID NO: 2020566 - DNA, 25 bp, Homo sapien
cttggtttcagcattaccttggcag

SEQ ID NO: 2020567 - DNA, 25 bp, Homo sapien
taatagcacttcgtttctgcctccg

SEQ ID NO: 2020568 - DNA, 25 bp, Homo sapien
cgcagaatccaacggagaggcaggt

SEQ ID NO: 2020569 - DNA, 25 bp, Homo sapien
gcagaatccaacggagaggcaggtt

SEQ ID NO: 2020570 - DNA, 25 bp, Homo sapien
tccgcagaatccaacggagaggcag

SEQ ID NO: 2020571 - DNA, 25 bp, Homo sapien
ctccgcagaatccaacggagaggca

SEQ ID NO: 2020572 - DNA, 25 bp, Homo sapien
ctttgacatggtgtaaagcatgggc

SEQ ID NO: 2020573 - DNA, 25 bp, Homo sapien
catttcagcgtaggctctgcccaag

SEQ ID NO: 2020574 - DNA, 25 bp, Homo sapien
acatcacagcattctcacagacttg

SEQ ID NO: 2020575 - DNA, 25 bp, Homo sapien
ggggagcatcactagctttgtctaa

SEQ ID NO: 2020576 - DNA, 25 bp, Homo sapien
ttgttccttaaagctcgaagccctg

SEQ ID NO: 2020577 - DNA, 25 bp, Homo sapien
gataccagttaggacgtgggacttg

SEQ ID NO: 2020578 - DNA, 25 bp, Homo sapien
gagacaaagtctggcctcacggact

SEQ ID NO: 2020579 - DNA, 25 bp, Homo sapien
tggcctcacggactggaccaggata

SEQ ID NO: 2020580 - DNA, 25 bp, Homo sapien
tagcttccggaaagttagggcagtc

SEQ ID NO: 2020581 - DNA, 25 bp, Homo sapien
gcagtcacgtgtttgcaggtgcagc

SEQ ID NO: 2020582 - DNA, 25 bp, Homo sapien
tacatggtcatcatccgtcaggccc

SEQ ID NO: 2020583 - DNA, 25 bp, Homo sapien
gtctgcttcttactgccgcagtgca

SEQ ID NO: 2020584 - DNA, 25 bp, Homo sapien
cggctctaggtccagtctcagagga

SEQ ID NO: 2020585 - DNA, 25 bp, Homo sapien
gggagcgtggattgctgcatctgga

SEQ ID NO: 2020586 - DNA, 25 bp, Homo sapien
ggcatcttagcacaaaacacctcag

SEQ ID NO: 2020587 - DNA, 25 bp, Homo sapien
gcatctggaggccacggctctaggt

SEQ ID NO: 2020588 - DNA, 25 bp, Homo sapien
gtagccactgctcggcgcatcattt

SEQ ID NO: 2020589 - DNA, 25 bp, Homo sapien
ggtgatagcctacactccacttaga

SEQ ID NO: 2020590 - DNA, 25 bp, Homo sapien
gacagagtctctgcggtttctatgg

SEQ ID NO: 2020591 - DNA, 25 bp, Homo sapien
tgcagaacagcctggtagccgtgcg

SEQ ID NO: 2020592 - DNA, 25 bp, Homo sapien
caggtgacacggaagagtgagctgt

SEQ ID NO: 2020593 - DNA, 25 bp, Homo sapien
catgagtttcattggcgctggggcc

SEQ ID NO: 2020594 - DNA, 25 bp, Homo sapien
acagggctcaggtgacacggaagag

SEQ ID NO: 2020595 - DNA, 25 bp, Homo sapien
ccatgagtttcattggcgctggggc

SEQ ID NO: 2020596 - DNA, 25 bp, Homo sapien
gggtggaatgcaaacctgggcctca

SEQ ID NO: 2020597 - DNA, 25 bp, Homo sapien
tgttgtcgccctcctgtatccgtga

SEQ ID NO: 2020598 - DNA, 25 bp, Homo sapien
tatccgtgatgtgctgcgactaagc

SEQ ID NO: 2020599 - DNA, 25 bp, Homo sapien
tatgcatttcagctctggcacctgc

SEQ ID NO: 2020600 - DNA, 25 bp, Homo sapien
caggatcgctcctggtaaagaggga

SEQ ID NO: 2020601 - DNA, 25 bp, Homo sapien
ttgcaccccgttcccgtgagatagg

SEQ ID NO: 2020602 - DNA, 25 bp, Homo sapien
tatcaatagtgagcagaaatgcctg

SEQ ID NO: 2020603 - DNA, 25 bp, Homo sapien
gatagggcatctcatggaccaggca

SEQ ID NO: 2020604 - DNA, 25 bp, Homo sapien
ggttcctgaaggcgcacatgaagaa

SEQ ID NO: 2020605 - DNA, 25 bp, Homo sapien
cctgaaggcgcacatgaagaagcac

SEQ ID NO: 2020606 - DNA, 25 bp, Homo sapien
ggctccttcgaccacggctgccaca

SEQ ID NO: 2020607 - DNA, 25 bp, Homo sapien
aaggcgcacatgaagaagcaccggg

SEQ ID NO: 2020608 - DNA, 25 bp, Homo sapien
gcctctttggttggatacaagcatt

SEQ ID NO: 2020609 - DNA, 25 bp, Homo sapien
gcgctgtacataccccctggctttg

SEQ ID NO: 2020610 - DNA, 25 bp, Homo sapien
gacagagactgcttccgctatgttt

SEQ ID NO: 2020611 - DNA, 25 bp, Homo sapien
gactgcttccgctatgtttgcgctg

SEQ ID NO: 2020612 - DNA, 25 bp, Homo sapien
gctatgtttgcgctgtacatacccc

SEQ ID NO: 2020613 - DNA, 25 bp, Homo sapien
tctgtgctctggaacgatggctttg

SEQ ID NO: 2020614 - DNA, 25 bp, Homo sapien
ggctttggcttgacttgggcacatg

SEQ ID NO: 2020615 - DNA, 25 bp, Homo sapien
ttgggaggtgcagccgacaggatgt

SEQ ID NO: 2020616 - DNA, 25 bp, Homo sapien
agactggtggagaccggccccatct

SEQ ID NO: 2020617 - DNA, 25 bp, Homo sapien
taccttggttcggtgggcaagctgc

SEQ ID NO: 2020618 - DNA, 25 bp, Homo sapien
cacagacttgcattggcgcatctca

SEQ ID NO: 2020619 - DNA, 25 bp, Homo sapien
tagataatcgaggtggaagcacact

SEQ ID NO: 2020620 - DNA, 25 bp, Homo sapien
tgactgtttgaggatgccgagccca

SEQ ID NO: 2020621 - DNA, 25 bp, Homo sapien
cctcccgcgttgtgatgggataccc

SEQ ID NO: 2020622 - DNA, 25 bp, Homo sapien
tgtagcgtgaggcttccggttctac

SEQ ID NO: 2020623 - DNA, 25 bp, Homo sapien
gctgggccactctgactcgggctgt

SEQ ID NO: 2020624 - DNA, 25 bp, Homo sapien
gccctgaatcctcccgcgttgtgat

SEQ ID NO: 2020625 - DNA, 25 bp, Homo sapien
tgttggcgacaagcctcaagctggt

SEQ ID NO: 2020626 - DNA, 25 bp, Homo sapien
ggtttctcgcctgctagctggtccg

SEQ ID NO: 2020627 - DNA, 25 bp, Homo sapien
tcggtactgctgaatcttggatgga

SEQ ID NO: 2020628 - DNA, 25 bp, Homo sapien
ttgaccatctgatgagacctgggcc

SEQ ID NO: 2020629 - DNA, 25 bp, Homo sapien
cctctggcgtggaagtgtgtcccgt

SEQ ID NO: 2020630 - DNA, 25 bp, Homo sapien
agtgtgtcccgtgggcatggtcacc

SEQ ID NO: 2020631 - DNA, 25 bp, Homo sapien
tggaaacacgcttctgtggcagaaa

SEQ ID NO: 2020632 - DNA, 25 bp, Homo sapien
cgctcatcggcggaggctggaaaca

SEQ ID NO: 2020633 - DNA, 25 bp, Homo sapien
ccctgacggcgatgtttctaaacta

SEQ ID NO: 2020634 - DNA, 25 bp, Homo sapien
agtgcctgtgttggactgtaggtcc

SEQ ID NO: 2020635 - DNA, 25 bp, Homo sapien
caggcaggtctttaatgaggtggac

SEQ ID NO: 2020636 - DNA, 25 bp, Homo sapien
ggtggaccgctaatctctctgctga

SEQ ID NO: 2020637 - DNA, 25 bp, Homo sapien
gactggctccctagtaccctagtgt

SEQ ID NO: 2020638 - DNA, 25 bp, Homo sapien
ggcacgtctgcgttgcggtcacaga

SEQ ID NO: 2020639 - DNA, 25 bp, Homo sapien
tgtgccacaccctgaaacatctggg

SEQ ID NO: 2020640 - DNA, 25 bp, Homo sapien
tgggacaccgatttcagtgggcacg

SEQ ID NO: 2020641 - DNA, 25 bp, Homo sapien
ttctggcccgttacgaacgcctgtg

SEQ ID NO: 2020642 - DNA, 25 bp, Homo sapien
cagagggcccctgtattggtatttc

SEQ ID NO: 2020643 - DNA, 25 bp, Homo sapien
tctgcacactcttgcaacagagggc

SEQ ID NO: 2020644 - DNA, 25 bp, Homo sapien
gcttcagcattgtgggtctgcagga

SEQ ID NO: 2020645 - DNA, 25 bp, Homo sapien
tgacggacagatgccgagagggagc

SEQ ID NO: 2020646 - DNA, 25 bp, Homo sapien
cagatgccgagagggagcttcccac

SEQ ID NO: 2020647 - DNA, 25 bp, Homo sapien
gacagatgccgagagggagcttccc

SEQ ID NO: 2020648 - DNA, 25 bp, Homo sapien
cggacagatgccgagagggagcttc

SEQ ID NO: 2020649 - DNA, 25 bp, Homo sapien
atgaaatgcgggtgggccagctgac

SEQ ID NO: 2020650 - DNA, 25 bp, Homo sapien
gacagatgccgatgacggacagatg

SEQ ID NO: 2020651 - DNA, 25 bp, Homo sapien
actcatgggttctcagtgtggtgcg

SEQ ID NO: 2020652 - DNA, 25 bp, Homo sapien
agatgacccgtgacagacagatgcc

SEQ ID NO: 2020653 - DNA, 25 bp, Homo sapien
cactggaccagttgttgctgtctga

SEQ ID NO: 2020654 - DNA, 25 bp, Homo sapien
taaccaggtgtttagggcagtgtag

SEQ ID NO: 2020655 - DNA, 25 bp, Homo sapien
ttagagcttgctccacagagaagaa

SEQ ID NO: 2020656 - DNA, 25 bp, Homo sapien
cagctttgcttggatgcttagagct

SEQ ID NO: 2020657 - DNA, 25 bp, Homo sapien
tctccatacgctgtgctgaatgcac

SEQ ID NO: 2020658 - DNA, 25 bp, Homo sapien
gatttaataactgagccaaggccac

SEQ ID NO: 2020659 - DNA, 25 bp, Homo sapien
aatggtgcagagctcaaatccaggc

SEQ ID NO: 2020660 - DNA, 25 bp, Homo sapien
caggcgtcctgattcccagcttagc

SEQ ID NO: 2020661 - DNA, 25 bp, Homo sapien
ttccccttgggctggtcgctaactg

SEQ ID NO: 2020662 - DNA, 25 bp, Homo sapien
tccccgtgtatgagaggcaccgagg

SEQ ID NO: 2020663 - DNA, 25 bp, Homo sapien
cctgactggccgaaagtgtagtggc

SEQ ID NO: 2020664 - DNA, 25 bp, Homo sapien
gaattgtagtgtcaggctgtgcatc

SEQ ID NO: 2020665 - DNA, 25 bp, Homo sapien
ggtgggggcggtggccgcttgttgc

SEQ ID NO: 2020666 - DNA, 25 bp, Homo sapien
gggggcggtggccgcttgttgctgg

SEQ ID NO: 2020667 - DNA, 25 bp, Homo sapien
ggggcggtggccgcttgttgctggg

SEQ ID NO: 2020668 - DNA, 25 bp, Homo sapien
gtgggggcggtggccgcttgttgct

SEQ ID NO: 2020669 - DNA, 25 bp, Homo sapien
cctatttcggtgtgtctgagcagca

SEQ ID NO: 2020670 - DNA, 25 bp, Homo sapien
tactgtggcaccgactttctcagga

SEQ ID NO: 2020671 - DNA, 25 bp, Homo sapien
tggagaggttaaggacccacgtgcc

SEQ ID NO: 2020672 - DNA, 25 bp, Homo sapien
tctaactcggttacaaggtagcgtc

SEQ ID NO: 2020673 - DNA, 25 bp, Homo sapien
ggaaacagctttgcgaagtctccct

SEQ ID NO: 2020674 - DNA, 25 bp, Homo sapien
gagtcagttcggctacatgggcacg

SEQ ID NO: 2020675 - DNA, 25 bp, Homo sapien
tgagtgacggctctgctggccaatc

SEQ ID NO: 2020676 - DNA, 25 bp, Homo sapien
tcgcccgggcaaagcgaactgagaa

SEQ ID NO: 2020677 - DNA, 25 bp, Homo sapien
tttaaatggatatcgtctgacgcct

SEQ ID NO: 2020678 - DNA, 25 bp, Homo sapien
tcttaaggaaacacgattgctggcg

SEQ ID NO: 2020679 - DNA, 25 bp, Homo sapien
cccttttcggtgtagagagcaactc

SEQ ID NO: 2020680 - DNA, 25 bp, Homo sapien
agagcaactctttcccctgcgtcgg

SEQ ID NO: 2020681 - DNA, 25 bp, Homo sapien
tatttaatccagatgcacaaaaagc

SEQ ID NO: 2020682 - DNA, 25 bp, Homo sapien
ttgaaaaggcgactggtgtaacctg

SEQ ID NO: 2020683 - DNA, 25 bp, Homo sapien
aattgtgacgtcaggtctttttgga

SEQ ID NO: 2020684 - DNA, 25 bp, Homo sapien
atttttcagggagtgaattgtgacg

SEQ ID NO: 2020685 - DNA, 25 bp, Homo sapien
ccgctggaaccgtgattcagtgcta

SEQ ID NO: 2020686 - DNA, 25 bp, Homo sapien
cagcagccttagaccttgacgaggg

SEQ ID NO: 2020687 - DNA, 25 bp, Homo sapien
tctgtacgtatggatgcgcgtgtgc

SEQ ID NO: 2020688 - DNA, 25 bp, Homo sapien
cccgagcacgtctgtacgtatggat

SEQ ID NO: 2020689 - DNA, 25 bp, Homo sapien
gcgcagtgcccaggtacccgccggc

SEQ ID NO: 2020690 - DNA, 25 bp, Homo sapien
cgcagtgcccaggtacccgccggcg

SEQ ID NO: 2020691 - DNA, 25 bp, Homo sapien
tttcagtccagatggggcgcagtgc

SEQ ID NO: 2020692 - DNA, 25 bp, Homo sapien
gtgtccccatttcagtccagatggg

SEQ ID NO: 2020693 - DNA, 25 bp, Homo sapien
gatcgccagctttcgggcacatgcg

SEQ ID NO: 2020694 - DNA, 25 bp, Homo sapien
cagcgctgattgctacgcggagcca

SEQ ID NO: 2020695 - DNA, 25 bp, Homo sapien
tgaggtaaccgccaggattgcagcg

SEQ ID NO: 2020696 - DNA, 25 bp, Homo sapien
gaaggagaacaatacggccaggagc

SEQ ID NO: 2020697 - DNA, 25 bp, Homo sapien
cacacactccccaccgcccccagaa

SEQ ID NO: 2020698 - DNA, 25 bp, Homo sapien
tccccaccgcccccagaaacatcac

SEQ ID NO: 2020699 - DNA, 25 bp, Homo sapien
cgaccccgacacacactccccaccg

SEQ ID NO: 2020700 - DNA, 25 bp, Homo sapien
gaccccgacacacactccccaccgc

SEQ ID NO: 2020701 - DNA, 25 bp, Homo sapien
agctgatgagtaccctaagtgcccc

SEQ ID NO: 2020702 - DNA, 25 bp, Homo sapien
cagtgcaggtcgttagtcacacgga

SEQ ID NO: 2020703 - DNA, 25 bp, Homo sapien
tggtgggcacgtcaatacttttcgg

SEQ ID NO: 2020704 - DNA, 25 bp, Homo sapien
cacacggagcttacatttgaggact

SEQ ID NO: 2020705 - DNA, 25 bp, Homo sapien
tctaccagttagacgggaggtgtca

SEQ ID NO: 2020706 - DNA, 25 bp, Homo sapien
gctgtggccattgccagggagaccc

SEQ ID NO: 2020707 - DNA, 25 bp, Homo sapien
cgtgtgtgtgcagggtcctcacccg

SEQ ID NO: 2020708 - DNA, 25 bp, Homo sapien
tcacgcagacaatggaggggaccgc

SEQ ID NO: 2020709 - DNA, 25 bp, Homo sapien
tgctcttgaccaagcccgctaggag

SEQ ID NO: 2020710 - DNA, 25 bp, Homo sapien
ctgctcttgaccaagcccgctagga

SEQ ID NO: 2020711 - DNA, 25 bp, Homo sapien
tcctgctcttgaccaagcccgctag

SEQ ID NO: 2020712 - DNA, 25 bp, Homo sapien
cctgctcttgaccaagcccgctagg

SEQ ID NO: 2020713 - DNA, 25 bp, Homo sapien
cattatgcagaagaccaggatacat

SEQ ID NO: 2020714 - DNA, 25 bp, Homo sapien
gtgatcagtccatgtccaacagatg

SEQ ID NO: 2020715 - DNA, 25 bp, Homo sapien
aacagatggacagtgcacattatgc

SEQ ID NO: 2020716 - DNA, 25 bp, Homo sapien
cagcaggaacatgaccgtgatcagt

SEQ ID NO: 2020717 - DNA, 25 bp, Homo sapien
tccactgtgcagaggatagctgtcc

SEQ ID NO: 2020718 - DNA, 25 bp, Homo sapien
gatagctgtccccaaaagccagcac

SEQ ID NO: 2020719 - DNA, 25 bp, Homo sapien
ggtcagcttaacagagcctggtgtc

SEQ ID NO: 2020720 - DNA, 25 bp, Homo sapien
caaggtaaccaacctcaaggcacat

SEQ ID NO: 2020721 - DNA, 25 bp, Homo sapien
cataatgagacgtgacaagcagtgc

SEQ ID NO: 2020722 - DNA, 25 bp, Homo sapien
ccttctgcggaaaacaggcctatgc

SEQ ID NO: 2020723 - DNA, 25 bp, Homo sapien
tgtgagggccacaccgatttccata

SEQ ID NO: 2020724 - DNA, 25 bp, Homo sapien
catgggaagtggctacacgatttca

SEQ ID NO: 2020725 - DNA, 25 bp, Homo sapien
gggagttagaagcaccctgcgtgtc

SEQ ID NO: 2020726 - DNA, 25 bp, Homo sapien
ttcatggagcgagggtatttacccg

SEQ ID NO: 2020727 - DNA, 25 bp, Homo sapien
cattttggaaaggatcagtaccggg

SEQ ID NO: 2020728 - DNA, 25 bp, Homo sapien
gaccaaaggcgtgtttcagagcagt

SEQ ID NO: 2020729 - DNA, 25 bp, Homo sapien
tcctggggtcactcgaccatattct

SEQ ID NO: 2020730 - DNA, 25 bp, Homo sapien
gagaaactccgtcagtgctccctat

SEQ ID NO: 2020731 - DNA, 25 bp, Homo sapien
cagcggatctgctatccagagcagg

SEQ ID NO: 2020732 - DNA, 25 bp, Homo sapien
tttttttaatgtaagctggtgcaaa

SEQ ID NO: 2020733 - DNA, 25 bp, Homo sapien
acagaacccaagagaaggcgtccgt

SEQ ID NO: 2020734 - DNA, 25 bp, Homo sapien
gaaaggccatcagggtcgtcttcag

SEQ ID NO: 2020735 - DNA, 25 bp, Homo sapien
gaccatcacggtagtgcaagaaggg

SEQ ID NO: 2020736 - DNA, 25 bp, Homo sapien
gccacaccattactagagaacagga

SEQ ID NO: 2020737 - DNA, 25 bp, Homo sapien
agaggagctgatccccacagtcagg

SEQ ID NO: 2020738 - DNA, 25 bp, Homo sapien
tcagaccgatgaaaccggtgcagcg

SEQ ID NO: 2020739 - DNA, 25 bp, Homo sapien
cagatacggtatttgctggccgggc

SEQ ID NO: 2020740 - DNA, 25 bp, Homo sapien
catcgccaatggaaaggtgacctca

SEQ ID NO: 2020741 - DNA, 25 bp, Homo sapien
acaaaaatgccctctggccaacaga

SEQ ID NO: 2020742 - DNA, 25 bp, Homo sapien
ggttaaggaactggatattgaagac

SEQ ID NO: 2020743 - DNA, 25 bp, Homo sapien
gaggaaacactaatgctgtctggag

SEQ ID NO: 2020744 - DNA, 25 bp, Homo sapien
tattgaagacggcaatcgtcccttt

SEQ ID NO: 2020745 - DNA, 25 bp, Homo sapien
tccagttatccctgggagaggaaag

SEQ ID NO: 2020746 - DNA, 25 bp, Homo sapien
cctccagttatccctgggagaggaa

SEQ ID NO: 2020747 - DNA, 25 bp, Homo sapien
ctccagttatccctgggagaggaaa

SEQ ID NO: 2020748 - DNA, 25 bp, Homo sapien
cctctagagctgactcgcaggcaga

SEQ ID NO: 2020749 - DNA, 25 bp, Homo sapien
tctagagctgactcgcaggcagatg

SEQ ID NO: 2020750 - DNA, 25 bp, Homo sapien
tcttcagctgaagaaatctagccat

SEQ ID NO: 2020751 - DNA, 25 bp, Homo sapien
ctagagctgactcgcaggcagatgt

SEQ ID NO: 2020752 - DNA, 25 bp, Homo sapien
tgttgtcgctgggatgcctttgcca

SEQ ID NO: 2020753 - DNA, 25 bp, Homo sapien
cataaactgttgtcgctgggatgcc

SEQ ID NO: 2020754 - DNA, 25 bp, Homo sapien
acatgtgactcataaactgttgtcg

SEQ ID NO: 2020755 - DNA, 25 bp, Homo sapien
aggtcatattcccagacatgtgact

SEQ ID NO: 2020756 - DNA, 25 bp, Homo sapien
ttcctggcttttagaaggacatgga

SEQ ID NO: 2020757 - DNA, 25 bp, Homo sapien
cttcctggcttttagaaggacatgg

SEQ ID NO: 2020758 - DNA, 25 bp, Homo sapien
taccttcctggcttttagaaggaca

SEQ ID NO: 2020759 - DNA, 25 bp, Homo sapien
ccttcctggcttttagaaggacatg

SEQ ID NO: 2020760 - DNA, 25 bp, Homo sapien
taggaccacggcctgaagccgctct

SEQ ID NO: 2020761 - DNA, 25 bp, Homo sapien
gcagccagcgttggtgctcgagtca

SEQ ID NO: 2020762 - DNA, 25 bp, Homo sapien
agcgcgtcgctcactaggaccacgg

SEQ ID NO: 2020763 - DNA, 25 bp, Homo sapien
tggtgctcgagtcagaccagcgcgt

SEQ ID NO: 2020764 - DNA, 25 bp, Homo sapien
ccttgcctggaacagaggcctcgga

SEQ ID NO: 2020765 - DNA, 25 bp, Homo sapien
cagctatgctaggagtcttgcgtgc

SEQ ID NO: 2020766 - DNA, 25 bp, Homo sapien
cctcggacgtggcagagcaatagaa

SEQ ID NO: 2020767 - DNA, 25 bp, Homo sapien
tctctggttattctccgggcgctgc

SEQ ID NO: 2020768 - DNA, 25 bp, Homo sapien
ggctgctcaagggagccacttaaat

SEQ ID NO: 2020769 - DNA, 25 bp, Homo sapien
ggaggctgcatgctcctcagcggcc

SEQ ID NO: 2020770 - DNA, 25 bp, Homo sapien
cgtaggcaaccagtccgtgttctct

SEQ ID NO: 2020771 - DNA, 25 bp, Homo sapien
ttaaattgccccatcccgttggcca

SEQ ID NO: 2020772 - DNA, 25 bp, Homo sapien
gcctcttttgccacattagctcggg

SEQ ID NO: 2020773 - DNA, 25 bp, Homo sapien
cattgaatgggttgagcaggcgagc

SEQ ID NO: 2020774 - DNA, 25 bp, Homo sapien
tgatcatcagccgtgaaggagagtg

SEQ ID NO: 2020775 - DNA, 25 bp, Homo sapien
cctcggagcaggttgagggcctctt

SEQ ID NO: 2020776 - DNA, 25 bp, Homo sapien
catttattgaaagccggaggctggt

SEQ ID NO: 2020777 - DNA, 25 bp, Homo sapien
gacgacattttcacaggctaactgg

SEQ ID NO: 2020778 - DNA, 25 bp, Homo sapien
ggcactggagagacccgcccagagt

SEQ ID NO: 2020779 - DNA, 25 bp, Homo sapien
ctctcacccctagggacgacatttt

SEQ ID NO: 2020780 - DNA, 25 bp, Homo sapien
gcagccgatggttaaagggaatcag

SEQ ID NO: 2020781 - DNA, 25 bp, Homo sapien
gatgaaattggcagccgatggttaa

SEQ ID NO: 2020782 - DNA, 25 bp, Homo sapien
atcagcattgccttggtacacagcc

SEQ ID NO: 2020783 - DNA, 25 bp, Homo sapien
aatcagcattgccttggtacacagc

SEQ ID NO: 2020784 - DNA, 25 bp, Homo sapien
aaatcacacactattgtggctgcag

SEQ ID NO: 2020785 - DNA, 25 bp, Homo sapien
tattgtggctgcagcgttgtagtga

SEQ ID NO: 2020786 - DNA, 25 bp, Homo sapien
tggctgcagcgttgtagtgagtctt

SEQ ID NO: 2020787 - DNA, 25 bp, Homo sapien
acacactattgtggctgcagcgttg

SEQ ID NO: 2020788 - DNA, 25 bp, Homo sapien
ttcccagagaaacccactccgtcag

SEQ ID NO: 2020789 - DNA, 25 bp, Homo sapien
tacagatctatccaagggcagagtc

SEQ ID NO: 2020790 - DNA, 25 bp, Homo sapien
cttactgttaccatagatacagatc

SEQ ID NO: 2020791 - DNA, 25 bp, Homo sapien
ttgaagctggaaataacatgccttg

SEQ ID NO: 2020792 - DNA, 25 bp, Homo sapien
ctggccctctgggcggaagaccact

SEQ ID NO: 2020793 - DNA, 25 bp, Homo sapien
tcgtgctggcgttgggcgccaggtc

SEQ ID NO: 2020794 - DNA, 25 bp, Homo sapien
ggaaccagcatgactgggatgcaag

SEQ ID NO: 2020795 - DNA, 25 bp, Homo sapien
ccttcaaggcttcggtcgtgctggc

SEQ ID NO: 2020796 - DNA, 25 bp, Homo sapien
tgggtgagtgtatactccggtccga

SEQ ID NO: 2020797 - DNA, 25 bp, Homo sapien
tactccggtccgaatataccaatcg

SEQ ID NO: 2020798 - DNA, 25 bp, Homo sapien
ggtccgaatataccaatcgcaaaag

SEQ ID NO: 2020799 - DNA, 25 bp, Homo sapien
tataccaatcgcaaaagtcctctct

SEQ ID NO: 2020800 - DNA, 25 bp, Homo sapien
cccttctcggcatggcggcttttgg

SEQ ID NO: 2020801 - DNA, 25 bp, Homo sapien
tttgtgtcgggcacgcactgcggtt

SEQ ID NO: 2020802 - DNA, 25 bp, Homo sapien
cagagggatgcgagtgtacagccct

SEQ ID NO: 2020803 - DNA, 25 bp, Homo sapien
gcggttctcgttctctagcatcaga

SEQ ID NO: 2020804 - DNA, 25 bp, Homo sapien
gggacgatgactgccttcaaattgc

SEQ ID NO: 2020805 - DNA, 25 bp, Homo sapien
gctgggtgagggacgatgactgcct

SEQ ID NO: 2020806 - DNA, 25 bp, Homo sapien
ggtgagggacgatgactgccttcaa

SEQ ID NO: 2020807 - DNA, 25 bp, Homo sapien
gatgactgccttcaaattgcttaca

SEQ ID NO: 2020808 - DNA, 25 bp, Homo sapien
tgccacttgtggacctgaggcacgc

SEQ ID NO: 2020809 - DNA, 25 bp, Homo sapien
ttaaatcgctaaacctgtgaggctc

SEQ ID NO: 2020810 - DNA, 25 bp, Homo sapien
tcaattccgggcttccagagactgg

SEQ ID NO: 2020811 - DNA, 25 bp, Homo sapien
cagagactggcctgatgtaccacca

SEQ ID NO: 2020812 - DNA, 25 bp, Homo sapien
tcagctggacaagcacctcattctg

SEQ ID NO: 2020813 - DNA, 25 bp, Homo sapien
ctcagctggacaagcacctcattct

SEQ ID NO: 2020814 - DNA, 25 bp, Homo sapien
gctggacaagcacctcattctgcac

SEQ ID NO: 2020815 - DNA, 25 bp, Homo sapien
agctggacaagcacctcattctgca

SEQ ID NO: 2020816 - DNA, 25 bp, Homo sapien
tgtattttctctagcgcaggccacg

SEQ ID NO: 2020817 - DNA, 25 bp, Homo sapien
caggccacgctcaagttcagggtat

SEQ ID NO: 2020818 - DNA, 25 bp, Homo sapien
tattaagaaactgccgagctgtcac

SEQ ID NO: 2020819 - DNA, 25 bp, Homo sapien
gctgccgcgggtacatgcatttcca

SEQ ID NO: 2020820 - DNA, 25 bp, Homo sapien
ttatgatgactggtgtactctgtta

SEQ ID NO: 2020821 - DNA, 25 bp, Homo sapien
ttttcttcttatgatgactggtgta

SEQ ID NO: 2020822 - DNA, 25 bp, Homo sapien
tcttatgatgactggtgtactctgt

SEQ ID NO: 2020823 - DNA, 25 bp, Homo sapien
tcttcttatgatgactggtgtactc

SEQ ID NO: 2020824 - DNA, 25 bp, Homo sapien
tggccagtgcagatacagacccttt

SEQ ID NO: 2020825 - DNA, 25 bp, Homo sapien
agcatgtgtggaggatgaccgccca

SEQ ID NO: 2020826 - DNA, 25 bp, Homo sapien
tttagacctaaaatgagactggccc

SEQ ID NO: 2020827 - DNA, 25 bp, Homo sapien
cctaatttggtgaggacgcccagct

SEQ ID NO: 2020828 - DNA, 25 bp, Homo sapien
gaagacgcagcagagctttgattgc

SEQ ID NO: 2020829 - DNA, 25 bp, Homo sapien
ctgaagacgcagcagagctttgatt

SEQ ID NO: 2020830 - DNA, 25 bp, Homo sapien
cagagctttgattgcatgagtgcag

SEQ ID NO: 2020831 - DNA, 25 bp, Homo sapien
cgcagcagagctttgattgcatgag

SEQ ID NO: 2020832 - DNA, 25 bp, Homo sapien
ggctccgcacgtcttcctcatgggt

SEQ ID NO: 2020833 - DNA, 25 bp, Homo sapien
gcagccagatctgacctgggctcct

SEQ ID NO: 2020834 - DNA, 25 bp, Homo sapien
tgatggcagccagatctgacctggg

SEQ ID NO: 2020835 - DNA, 25 bp, Homo sapien
tcctcatgggtgatggcagccagat

SEQ ID NO: 2020836 - DNA, 25 bp, Homo sapien
tccctgtggccgtattcagaaataa

SEQ ID NO: 2020837 - DNA, 25 bp, Homo sapien
gagatgctgagaagtctttgggagg

SEQ ID NO: 2020838 - DNA, 25 bp, Homo sapien
agtaaacccggagcacttcctcaga

SEQ ID NO: 2020839 - DNA, 25 bp, Homo sapien
gaggaaacttcaggtgaattgctgg

SEQ ID NO: 2020840 - DNA, 25 bp, Homo sapien
aaacttcaggtgaattgctggccat

SEQ ID NO: 2020841 - DNA, 25 bp, Homo sapien
gggcctgtttttggactgatcatcc

SEQ ID NO: 2020842 - DNA, 25 bp, Homo sapien
tgtaaatttaatcacaaaccgagaa

SEQ ID NO: 2020843 - DNA, 25 bp, Homo sapien
agaacgggatgaccagggcctgttt

SEQ ID NO: 2020844 - DNA, 25 bp, Homo sapien
cacaaaccgagaacgggatgaccag

SEQ ID NO: 2020845 - DNA, 25 bp, Homo sapien
tctagttgccaattgttatgattat

SEQ ID NO: 2020846 - DNA, 25 bp, Homo sapien
gagacccaagggcttctagttgcca

SEQ ID NO: 2020847 - DNA, 25 bp, Homo sapien
cagcggtccctctcgtcgccatctt

SEQ ID NO: 2020848 - DNA, 25 bp, Homo sapien
gtgaggacgatgaccagcggtccct

SEQ ID NO: 2020849 - DNA, 25 bp, Homo sapien
tccacaggtacggggtcccagcgac

SEQ ID NO: 2020850 - DNA, 25 bp, Homo sapien
gctcaggtccacaggtacggggtcc

SEQ ID NO: 2020851 - DNA, 25 bp, Homo sapien
caggtccacaggtacggggtcccag

SEQ ID NO: 2020852 - DNA, 25 bp, Homo sapien
caggtacggggtcccagcgaccttg

SEQ ID NO: 2020853 - DNA, 25 bp, Homo sapien
gccagttgtacaggggccaggaggc

SEQ ID NO: 2020854 - DNA, 25 bp, Homo sapien
gtgatcaggattgggcaaatgatgc

SEQ ID NO: 2020855 - DNA, 25 bp, Homo sapien
tggggaagatatggccccaggtgga

SEQ ID NO: 2020856 - DNA, 25 bp, Homo sapien
ggtggagcgggacagtgatcaggat

SEQ ID NO: 2020857 - DNA, 25 bp, Homo sapien
gagcttccggggctgtaactggctt

SEQ ID NO: 2020858 - DNA, 25 bp, Homo sapien
tcctttgctagttggggttccatgc

SEQ ID NO: 2020859 - DNA, 25 bp, Homo sapien
tcctgggactgagcttccggggctg

SEQ ID NO: 2020860 - DNA, 25 bp, Homo sapien
tagctcttagcagagtcctgggact

SEQ ID NO: 2020861 - DNA, 25 bp, Homo sapien
gaggagcaggcaacaccgtggaagc

SEQ ID NO: 2020862 - DNA, 25 bp, Homo sapien
gagcaggcaacaccgtggaagccag

SEQ ID NO: 2020863 - DNA, 25 bp, Homo sapien
cactgcgggaaggaacgttccctgt

SEQ ID NO: 2020864 - DNA, 25 bp, Homo sapien
ccactgcgggaaggaacgttccctg

SEQ ID NO: 2020865 - DNA, 25 bp, Homo sapien
ctctgcgcatcagccacagtctgag

SEQ ID NO: 2020866 - DNA, 25 bp, Homo sapien
gaatcgactcgtggcctcttcagtt

SEQ ID NO: 2020867 - DNA, 25 bp, Homo sapien
ccgcttcttagagccagggtggcaa

SEQ ID NO: 2020868 - DNA, 25 bp, Homo sapien
gtggctctttctcgaccccgcttct

SEQ ID NO: 2020869 - DNA, 25 bp, Homo sapien
cacagacgcgcagcatgggggatct

SEQ ID NO: 2020870 - DNA, 25 bp, Homo sapien
ggctgccgtggaacccacagacgcg

SEQ ID NO: 2020871 - DNA, 25 bp, Homo sapien
ctgacaagtgcaccaagaatgccct

SEQ ID NO: 2020872 - DNA, 25 bp, Homo sapien
aagtgcaccaagaatgccctgtgcc

SEQ ID NO: 2020873 - DNA, 25 bp, Homo sapien
tctcagcgtggtgctttgtggatac

SEQ ID NO: 2020874 - DNA, 25 bp, Homo sapien
ctcagcgtggtgctttgtggataca

SEQ ID NO: 2020875 - DNA, 25 bp, Homo sapien
caacagcgggatggctgagaggcct

SEQ ID NO: 2020876 - DNA, 25 bp, Homo sapien
ggacaacagcgggatggctgagagg

SEQ ID NO: 2020877 - DNA, 25 bp, Homo sapien
aaaaggacaacagcgggatggctga

SEQ ID NO: 2020878 - DNA, 25 bp, Homo sapien
gcaaaaggacaacagcgggatggct

SEQ ID NO: 2020879 - DNA, 25 bp, Homo sapien
tccagtcctttttcacgcccatcag

SEQ ID NO: 2020880 - DNA, 25 bp, Homo sapien
cctttttcacgcccatcagctcctt

SEQ ID NO: 2020881 - DNA, 25 bp, Homo sapien
cagtcctttttcacgcccatcagct

SEQ ID NO: 2020882 - DNA, 25 bp, Homo sapien
agtcctttttcacgcccatcagctc

SEQ ID NO: 2020883 - DNA, 25 bp, Homo sapien
cattattcagcgtgtcagtggcgag

SEQ ID NO: 2020884 - DNA, 25 bp, Homo sapien
agtctttcaaagatgagcccttggg

SEQ ID NO: 2020885 - DNA, 25 bp, Homo sapien
tgtcagtggcgagggctaatctcca

SEQ ID NO: 2020886 - DNA, 25 bp, Homo sapien
gcaggaaggcattattcagcgtgtc

SEQ ID NO: 2020887 - DNA, 25 bp, Homo sapien
tgagcagctttatccagcgtttgtg

SEQ ID NO: 2020888 - DNA, 25 bp, Homo sapien
gatattccaggtagcggcagcaggt

SEQ ID NO: 2020889 - DNA, 25 bp, Homo sapien
caggtggtgctttatgtgaatgagc

SEQ ID NO: 2020890 - DNA, 25 bp, Homo sapien
caagcttcgagttatccagtgtgga

SEQ ID NO: 2020891 - DNA, 25 bp, Homo sapien
ccatccctttgttttattttctgct

SEQ ID NO: 2020892 - DNA, 25 bp, Homo sapien
tccatccctttgttttattttctgc

SEQ ID NO: 2020893 - DNA, 25 bp, Homo sapien
catccctttgttttattttctgctt

SEQ ID NO: 2020894 - DNA, 25 bp, Homo sapien
aggaaatggaattcagagcacccat

SEQ ID NO: 2020895 - DNA, 25 bp, Homo sapien
aaggaaatggaattcagagcaccca

SEQ ID NO: 2020896 - DNA, 25 bp, Homo sapien
taaggaaatggaattcagagcaccc

SEQ ID NO: 2020897 - DNA, 25 bp, Homo sapien
ctaaggaaatggaattcagagcacc

SEQ ID NO: 2020898 - DNA, 25 bp, Homo sapien
ggtgtccacgacatactgaaggagc

SEQ ID NO: 2020899 - DNA, 25 bp, Homo sapien
agcggagtgtccttgcggtgcctga

SEQ ID NO: 2020900 - DNA, 25 bp, Homo sapien
atgagcggagtgtccttgcggtgcc

SEQ ID NO: 2020901 - DNA, 25 bp, Homo sapien
gtgctcaactgaaggtgtccacgac

SEQ ID NO: 2020902 - DNA, 25 bp, Homo sapien
gacattcgggacaaacagtgtcaca

SEQ ID NO: 2020903 - DNA, 25 bp, Homo sapien
tcgggacaaacagtgtcacaggctg

SEQ ID NO: 2020904 - DNA, 25 bp, Homo sapien
gctctgaatagaaattcactcatgg

SEQ ID NO: 2020905 - DNA, 25 bp, Homo sapien
gttgacattcgggacaaacagtgtc

SEQ ID NO: 2020906 - DNA, 25 bp, Homo sapien
cagaaatgagagacgagatattccg

SEQ ID NO: 2020907 - DNA, 25 bp, Homo sapien
tgttcatgtattccaacacctcgta

SEQ ID NO: 2020908 - DNA, 25 bp, Homo sapien
cgagatattccgtttgcgttgttca

SEQ ID NO: 2020909 - DNA, 25 bp, Homo sapien
cacctcgtacaacgggctgatcaca

SEQ ID NO: 2020910 - DNA, 25 bp, Homo sapien
tttcccctggagttaaacctgcaga

SEQ ID NO: 2020911 - DNA, 25 bp, Homo sapien
tagggctggcaagacgtactacttc

SEQ ID NO: 2020912 - DNA, 25 bp, Homo sapien
aaagtacgcttttgagctgggcacg

SEQ ID NO: 2020913 - DNA, 25 bp, Homo sapien
gaatgagtagatacgctaagcccag

SEQ ID NO: 2020914 - DNA, 25 bp, Homo sapien
tggttccagtcattcagggccagca

SEQ ID NO: 2020915 - DNA, 25 bp, Homo sapien
gatcaaacagcaaccgctctgcaag

SEQ ID NO: 2020916 - DNA, 25 bp, Homo sapien
tccaaaatcaccagtgtgtgatttc

SEQ ID NO: 2020917 - DNA, 25 bp, Homo sapien
cattgggtcccaagtttgtcagctt

SEQ ID NO: 2020918 - DNA, 25 bp, Homo sapien
gccgttgtcctgcagattcccttct

SEQ ID NO: 2020919 - DNA, 25 bp, Homo sapien
tctcctgaggagtaagtgtggtctt

SEQ ID NO: 2020920 - DNA, 25 bp, Homo sapien
tacttagtgaaatgggtgactggcc

SEQ ID NO: 2020921 - DNA, 25 bp, Homo sapien
tgtcttcggctctcacaaagtgatg

SEQ ID NO: 2020922 - DNA, 25 bp, Homo sapien
tcagataatagagtacaccacggct

SEQ ID NO: 2020923 - DNA, 25 bp, Homo sapien
gatcccactcaaccaaaaaagaata

SEQ ID NO: 2020924 - DNA, 25 bp, Homo sapien
aagaatagcattgatagcaccttca

SEQ ID NO: 2020925 - DNA, 25 bp, Homo sapien
gcatgccaccatatcaggctactct

SEQ ID NO: 2020926 - DNA, 25 bp, Homo sapien
tcctaagtagccgttgcatgccacc

SEQ ID NO: 2020927 - DNA, 25 bp, Homo sapien
tctgcacttccgtggacccccatag

SEQ ID NO: 2020928 - DNA, 25 bp, Homo sapien
gctctgcacttccgtggacccccat

SEQ ID NO: 2020929 - DNA, 25 bp, Homo sapien
gcacttccgtggacccccataggac

SEQ ID NO: 2020930 - DNA, 25 bp, Homo sapien
tgcacttccgtggacccccatagga

SEQ ID NO: 2020931 - DNA, 25 bp, Homo sapien
gaggcccaggctttgaggacgagcg

SEQ ID NO: 2020932 - DNA, 25 bp, Homo sapien
tgctggcatttcgtgttgcggagct

SEQ ID NO: 2020933 - DNA, 25 bp, Homo sapien
ttgcggagctgtggttgtttcgttt

SEQ ID NO: 2020934 - DNA, 25 bp, Homo sapien
aggacgagcggctcggctctgcctt

SEQ ID NO: 2020935 - DNA, 25 bp, Homo sapien
gtgttaccagctcttccccacttag

SEQ ID NO: 2020936 - DNA, 25 bp, Homo sapien
tgtcttcgtgctcagcttgcaagag

SEQ ID NO: 2020937 - DNA, 25 bp, Homo sapien
gggtacacggcctggcgatgccctt

SEQ ID NO: 2020938 - DNA, 25 bp, Homo sapien
gcccttcctcaagcctgatttttat

SEQ ID NO: 2020939 - DNA, 25 bp, Homo sapien
agcaccacgtcagaggcagccgcgg

SEQ ID NO: 2020940 - DNA, 25 bp, Homo sapien
ctttggaaaccttgccatgctgctg

SEQ ID NO: 2020941 - DNA, 25 bp, Homo sapien
gctgagtggctacagatgtattgga

SEQ ID NO: 2020942 - DNA, 25 bp, Homo sapien
tgtattggagtcttttaccgcagcg

SEQ ID NO: 2020943 - DNA, 25 bp, Homo sapien
taccgcagcgttatcaactgtcaaa

SEQ ID NO: 2020944 - DNA, 25 bp, Homo sapien
gctgcatttcgggactgacaaattt

SEQ ID NO: 2020945 - DNA, 25 bp, Homo sapien
cctgctgcatttcgggactgacaaa

SEQ ID NO: 2020946 - DNA, 25 bp, Homo sapien
gacctgctgcatttcgggactgaca

SEQ ID NO: 2020947 - DNA, 25 bp, Homo sapien
ggacctgctgcatttcgggactgac

SEQ ID NO: 2020948 - DNA, 25 bp, Homo sapien
gaacgcattcagcaatgaagtgagt

SEQ ID NO: 2020949 - DNA, 25 bp, Homo sapien
tgttcgtaggttgggctgaacgcat

SEQ ID NO: 2020950 - DNA, 25 bp, Homo sapien
aaatcttcaatgaaaacctcgaggt

SEQ ID NO: 2020951 - DNA, 25 bp, Homo sapien
cagcaatgaagtgagtacgaataag

SEQ ID NO: 2020952 - DNA, 25 bp, Homo sapien
tgcccttgcgcgcttgctcacgggc

SEQ ID NO: 2020953 - DNA, 25 bp, Homo sapien
tgattgccggcgctgcccttgcgcg

SEQ ID NO: 2020954 - DNA, 25 bp, Homo sapien
tcctgggttggctctcgccttcgcc

SEQ ID NO: 2020955 - DNA, 25 bp, Homo sapien
agcgcaggtctaggctgattgccgg

SEQ ID NO: 2020956 - DNA, 25 bp, Homo sapien
cacaaagtacgggtgaacaagcact

SEQ ID NO: 2020957 - DNA, 25 bp, Homo sapien
aggcacagcctacagatttggtttt

SEQ ID NO: 2020958 - DNA, 25 bp, Homo sapien
cacagcctacagatttggttttcaa

SEQ ID NO: 2020959 - DNA, 25 bp, Homo sapien
ggttttcaatatcacttgacatgca

SEQ ID NO: 2020960 - DNA, 25 bp, Homo sapien
catgccagaccatcgttggtggacc

SEQ ID NO: 2020961 - DNA, 25 bp, Homo sapien
taatagacattctcctagcgggatg

SEQ ID NO: 2020962 - DNA, 25 bp, Homo sapien
cacgagtgtgtaagccagggttttg

SEQ ID NO: 2020963 - DNA, 25 bp, Homo sapien
ctttacagcactcgggaaatgcctg

SEQ ID NO: 2020964 - DNA, 25 bp, Homo sapien
aaaacttgcttgttggtctggctta

SEQ ID NO: 2020965 - DNA, 25 bp, Homo sapien
cactccttaaaatcactaaaaagca

SEQ ID NO: 2020966 - DNA, 25 bp, Homo sapien
tgccagtttctgagtctttcaaaag

SEQ ID NO: 2020967 - DNA, 25 bp, Homo sapien
ttgttggtctggcttagctctgcca

SEQ ID NO: 2020968 - DNA, 25 bp, Homo sapien
tgtgtgggccctcaaccggtgagat

SEQ ID NO: 2020969 - DNA, 25 bp, Homo sapien
ggcaaattggcgcttctcaaccctt

SEQ ID NO: 2020970 - DNA, 25 bp, Homo sapien
gaggctgagatgtctcccgtctgca

SEQ ID NO: 2020971 - DNA, 25 bp, Homo sapien
tctgaggccaaagggctaagaacca

SEQ ID NO: 2020972 - DNA, 25 bp, Homo sapien
cggagtcgccgcgcgccttgctctc

SEQ ID NO: 2020973 - DNA, 25 bp, Homo sapien
ccgcgcgccttgctctccctgggct

SEQ ID NO: 2020974 - DNA, 25 bp, Homo sapien
gccgcgcgccttgctctccctgggc

SEQ ID NO: 2020975 - DNA, 25 bp, Homo sapien
gtcgccgcgcgccttgctctccctg

SEQ ID NO: 2020976 - DNA, 25 bp, Homo sapien
gggcacctgtgttgtttggtcacaa

SEQ ID NO: 2020977 - DNA, 25 bp, Homo sapien
tgttgtttggtcacaagctctttaa

SEQ ID NO: 2020978 - DNA, 25 bp, Homo sapien
cacctgtgttgtttggtcacaagct

SEQ ID NO: 2020979 - DNA, 25 bp, Homo sapien
cctgtgttgtttggtcacaagctct

SEQ ID NO: 2020980 - DNA, 25 bp, Homo sapien
tgcaatcacgacaagaattcctggt

SEQ ID NO: 2020981 - DNA, 25 bp, Homo sapien
gtgcacgtgtgttaactctaccaag

SEQ ID NO: 2020982 - DNA, 25 bp, Homo sapien
ggtcaccaacgtttccgtaatgtgc

SEQ ID NO: 2020983 - DNA, 25 bp, Homo sapien
tgcgaaagctcgctgaaacgcctgt

SEQ ID NO: 2020984 - DNA, 25 bp, Homo sapien
ggtgcagccaacatctctccagcag

SEQ ID NO: 2020985 - DNA, 25 bp, Homo sapien
tgttatccaactacaaatctgcata

SEQ ID NO: 2020986 - DNA, 25 bp, Homo sapien
gttatccaactacaaatctgcatac

SEQ ID NO: 2020987 - DNA, 25 bp, Homo sapien
ctgttatccaactacaaatctgcat

SEQ ID NO: 2020988 - DNA, 25 bp, Homo sapien
cacgcttttaatcagggtgtagcca

SEQ ID NO: 2020989 - DNA, 25 bp, Homo sapien
ccactttgctacaggaggactggtg

SEQ ID NO: 2020990 - DNA, 25 bp, Homo sapien
tgaagacgctaaatcacttggagcc

SEQ ID NO: 2020991 - DNA, 25 bp, Homo sapien
gagaagagtcagacaaggcccgatc

SEQ ID NO: 2020992 - DNA, 25 bp, Homo sapien
caggaccccttgatacattcttaaa

SEQ ID NO: 2020993 - DNA, 25 bp, Homo sapien
aaccacttcacttacgagaaatgtg

SEQ ID NO: 2020994 - DNA, 25 bp, Homo sapien
aaaatcaggtatccgctctgagctt

SEQ ID NO: 2020995 - DNA, 25 bp, Homo sapien
cagtaagtgatagagcaatgtccct

SEQ ID NO: 2020996 - DNA, 25 bp, Homo sapien
caacaaagaggtttcaaataaatat

SEQ ID NO: 2020997 - DNA, 25 bp, Homo sapien
ctaggcagatgttttttgtgattaa

SEQ ID NO: 2020998 - DNA, 25 bp, Homo sapien
gcagatgttttttgtgattaaaata

SEQ ID NO: 2020999 - DNA, 25 bp, Homo sapien
agatgttttttgtgattaaaatagt

SEQ ID NO: 2021000 - DNA, 25 bp, Homo sapien
taacatgtcgtatcagaagccagga

SEQ ID NO: 2021001 - DNA, 25 bp, Homo sapien
cctgtgactgcgaggggcacgaaca

SEQ ID NO: 2021002 - DNA, 25 bp, Homo sapien
taaagctaacatgtcgtatcagaag

SEQ ID NO: 2021003 - DNA, 25 bp, Homo sapien
acaggtaaagctaacatgtcgtatc

SEQ ID NO: 2021004 - DNA, 25 bp, Homo sapien
cacatatgcacacgtctccacacac

SEQ ID NO: 2021005 - DNA, 25 bp, Homo sapien
tgcacatatgcacacgtctccacac

SEQ ID NO: 2021006 - DNA, 25 bp, Homo sapien
ctgcacatatgcacacgtctccaca

SEQ ID NO: 2021007 - DNA, 25 bp, Homo sapien
gcacatatgcacacgtctccacaca

SEQ ID NO: 2021008 - DNA, 25 bp, Homo sapien
aaaagatagtagacagatttcacat

SEQ ID NO: 2021009 - DNA, 25 bp, Homo sapien
ggaaaagatagtagacagatttcac

SEQ ID NO: 2021010 - DNA, 25 bp, Homo sapien
gaagtttggaacttgataggcataa

SEQ ID NO: 2021011 - DNA, 25 bp, Homo sapien
cataattagtgttctccgcattcaa

SEQ ID NO: 2021012 - DNA, 25 bp, Homo sapien
tgtcatttcgctcgtgatccctcat

SEQ ID NO: 2021013 - DNA, 25 bp, Homo sapien
ttgtcatttcgctcgtgatccctca

SEQ ID NO: 2021014 - DNA, 25 bp, Homo sapien
gaatttcttgttacacacagggcag

SEQ ID NO: 2021015 - DNA, 25 bp, Homo sapien
gctttgagactagccactctggaga

SEQ ID NO: 2021016 - DNA, 25 bp, Homo sapien
tatgaagtgtcaggttgaattcaac

SEQ ID NO: 2021017 - DNA, 25 bp, Homo sapien
acagggcaggtaggatcttccccgc

SEQ ID NO: 2021018 - DNA, 25 bp, Homo sapien
gcttcacgccagacttcagcaaagc

SEQ ID NO: 2021019 - DNA, 25 bp, Homo sapien
acgccagacttcagcaaagcctctt

SEQ ID NO: 2021020 - DNA, 25 bp, Homo sapien
cagcttcacgccagacttcagcaaa

SEQ ID NO: 2021021 - DNA, 25 bp, Homo sapien
gccagacttcagcaaagcctcttcc

SEQ ID NO: 2021022 - DNA, 25 bp, Homo sapien
tccccacactcagaacagatgagat

SEQ ID NO: 2021023 - DNA, 25 bp, Homo sapien
tcagctccgaggaggtctcgaactc

SEQ ID NO: 2021024 - DNA, 25 bp, Homo sapien
cttgcaggcatgctgccgggttcca

SEQ ID NO: 2021025 - DNA, 25 bp, Homo sapien
tcctggcggtgctcctccatgtgca

SEQ ID NO: 2021026 - DNA, 25 bp, Homo sapien
cgaggcttcgtctgtctggtttgct

SEQ ID NO: 2021027 - DNA, 25 bp, Homo sapien
gactaacccactcacttggtcacta

SEQ ID NO: 2021028 - DNA, 25 bp, Homo sapien
cactatctgaaactgtggtaccgac

SEQ ID NO: 2021029 - DNA, 25 bp, Homo sapien
tcttctcactaaagggcagttctgt

SEQ ID NO: 2021030 - DNA, 25 bp, Homo sapien
aatacacagtaagatgtctcccttg

SEQ ID NO: 2021031 - DNA, 25 bp, Homo sapien
aaaatacacagtaagatgtctccct

SEQ ID NO: 2021032 - DNA, 25 bp, Homo sapien
caaaatacacagtaagatgtctccc

SEQ ID NO: 2021033 - DNA, 25 bp, Homo sapien
atacacagtaagatgtctcccttgt

SEQ ID NO: 2021034 - DNA, 25 bp, Homo sapien
tatcctaatgtgtcgcgttaactgg

SEQ ID NO: 2021035 - DNA, 25 bp, Homo sapien
tgaaacgtctttccacagtgcggac

SEQ ID NO: 2021036 - DNA, 25 bp, Homo sapien
cagtgcggacacgaatacgtgaatc

SEQ ID NO: 2021037 - DNA, 25 bp, Homo sapien
taactggcttggcttttgaaacgtc

SEQ ID NO: 2021038 - DNA, 25 bp, Homo sapien
tcatccagaagtcagtgttttcata

SEQ ID NO: 2021039 - DNA, 25 bp, Homo sapien
catccagaagtcagtgttttcatac

SEQ ID NO: 2021040 - DNA, 25 bp, Homo sapien
gtgggagaaaaatgatcaaaatata

SEQ ID NO: 2021041 - DNA, 25 bp, Homo sapien
ctagagtgggagaaaaatgatcaaa

SEQ ID NO: 2021042 - DNA, 25 bp, Homo sapien
gagaaaaatgatcaaaatataattc

SEQ ID NO: 2021043 - DNA, 25 bp, Homo sapien
aaaaatgatcaaaatataattccat

SEQ ID NO: 2021044 - DNA, 25 bp, Homo sapien
gctgcacgtgcgactgaagattccc

SEQ ID NO: 2021045 - DNA, 25 bp, Homo sapien
aagattccctttctgagagaaggcg

SEQ ID NO: 2021046 - DNA, 25 bp, Homo sapien
ctctgagtggactcgctgcacgtgc

SEQ ID NO: 2021047 - DNA, 25 bp, Homo sapien
tcacctgtgtgcttgatcatgtggg

SEQ ID NO: 2021048 - DNA, 25 bp, Homo sapien
gtcccctgtgaaataccgcttatgc

SEQ ID NO: 2021049 - DNA, 25 bp, Homo sapien
ccctgtgaaataccgcttatgcccc

SEQ ID NO: 2021050 - DNA, 25 bp, Homo sapien
ctgtgaaataccgcttatgccccca

SEQ ID NO: 2021051 - DNA, 25 bp, Homo sapien
gtgaaataccgcttatgcccccaac

SEQ ID NO: 2021052 - DNA, 25 bp, Homo sapien
gggtctgctcggcacaaaatcaatc

SEQ ID NO: 2021053 - DNA, 25 bp, Homo sapien
gacagactataactaacaaaggtat

SEQ ID NO: 2021054 - DNA, 25 bp, Homo sapien
tttaaaacagggtctgctcggcaca

SEQ ID NO: 2021055 - DNA, 25 bp, Homo sapien
tatttagaatgacagactataacta

SEQ ID NO: 2021056 - DNA, 25 bp, Homo sapien
aaatacacaactacattctgtacag

SEQ ID NO: 2021057 - DNA, 25 bp, Homo sapien
cccatatgcatcttgctgatatgcg

SEQ ID NO: 2021058 - DNA, 25 bp, Homo sapien
tctgtacagttataggtaggaccat

SEQ ID NO: 2021059 - DNA, 25 bp, Homo sapien
gatatgcgtgtttaagctgcctaaa

SEQ ID NO: 2021060 - DNA, 25 bp, Homo sapien
agaggtaacgtctgaaaaagtgtgg

SEQ ID NO: 2021061 - DNA, 25 bp, Homo sapien
agctgctggatgacgtcgctcaccg

SEQ ID NO: 2021062 - DNA, 25 bp, Homo sapien
gatgcccactgtgatgctcagctgc

SEQ ID NO: 2021063 - DNA, 25 bp, Homo sapien
taaaatgtcctggttgatgcccact

SEQ ID NO: 2021064 - DNA, 25 bp, Homo sapien
tcacaccgcagggaagcgtgcttca

SEQ ID NO: 2021065 - DNA, 25 bp, Homo sapien
cagcacgagcacgtaagcctcacac

SEQ ID NO: 2021066 - DNA, 25 bp, Homo sapien
gtaagcctcacaccgcagggaagcg

SEQ ID NO: 2021067 - DNA, 25 bp, Homo sapien
gagcacgtaagcctcacaccgcagg

SEQ ID NO: 2021068 - DNA, 25 bp, Homo sapien
ctggaattgaagacagcccactgtt

SEQ ID NO: 2021069 - DNA, 25 bp, Homo sapien
gaagacagcccactgttttctaagg

SEQ ID NO: 2021070 - DNA, 25 bp, Homo sapien
tggaattgaagacagcccactgttt

SEQ ID NO: 2021071 - DNA, 25 bp, Homo sapien
acagcccactgttttctaaggcttg

SEQ ID NO: 2021072 - DNA, 25 bp, Homo sapien
cagaggtcttggcatggcaggagtc

SEQ ID NO: 2021073 - DNA, 25 bp, Homo sapien
caggtagaaacggtgacttcttctt

SEQ ID NO: 2021074 - DNA, 25 bp, Homo sapien
cgtctgctcatttgaaacgctggaa

SEQ ID NO: 2021075 - DNA, 25 bp, Homo sapien
aacatctgggttttgagcgtgtggt

SEQ ID NO: 2021076 - DNA, 25 bp, Homo sapien
cagaaagcatgatgtgcagaaacac

SEQ ID NO: 2021077 - DNA, 25 bp, Homo sapien
aagcatgatgtgcagaaacacaggg

SEQ ID NO: 2021078 - DNA, 25 bp, Homo sapien
ctgcagaaagcatgatgtgcagaaa

SEQ ID NO: 2021079 - DNA, 25 bp, Homo sapien
catgatgtgcagaaacacagggatg

SEQ ID NO: 2021080 - DNA, 25 bp, Homo sapien
tgaagatgcttgaatgacggagcac

SEQ ID NO: 2021081 - DNA, 25 bp, Homo sapien
ctgaagatgcttgaatgacggccaa

SEQ ID NO: 2021082 - DNA, 25 bp, Homo sapien
gtagaaggaaggcatccttgctgca

SEQ ID NO: 2021083 - DNA, 25 bp, Homo sapien
tgacggccaagatttgacggagacc

SEQ ID NO: 2021084 - DNA, 25 bp, Homo sapien
ggcctggacaccccgcctagggtca

SEQ ID NO: 2021085 - DNA, 25 bp, Homo sapien
tgaagggagaggacacgtcccgctt

SEQ ID NO: 2021086 - DNA, 25 bp, Homo sapien
tgtgaagggagaggacacgtcccgc

SEQ ID NO: 2021087 - DNA, 25 bp, Homo sapien
tggacaccccgcctagggtcaggtc

SEQ ID NO: 2021088 - DNA, 25 bp, Homo sapien
gccttgatgccggtgtgcgtcttga

SEQ ID NO: 2021089 - DNA, 25 bp, Homo sapien
tcagcgtgctcttcacggcgaaggc

SEQ ID NO: 2021090 - DNA, 25 bp, Homo sapien
tgggcttgcggaactccttggcgca

SEQ ID NO: 2021091 - DNA, 25 bp, Homo sapien
tactggcacttgaacgccttgatgc

SEQ ID NO: 2021092 - DNA, 25 bp, Homo sapien
ctgtgtttggtatatgtgcgcagta

SEQ ID NO: 2021093 - DNA, 25 bp, Homo sapien
tgtttggtatatgtgcgcagtaatg

SEQ ID NO: 2021094 - DNA, 25 bp, Homo sapien
ggtatatgtgcgcagtaatgtgtgt

SEQ ID NO: 2021095 - DNA, 25 bp, Homo sapien
tatgtgcgcagtaatgtgtgtggcc

SEQ ID NO: 2021096 - DNA, 25 bp, Homo sapien
gcatatccttagctccatggagatc

SEQ ID NO: 2021097 - DNA, 25 bp, Homo sapien
tccaaatctgatccggacagaagtc

SEQ ID NO: 2021098 - DNA, 25 bp, Homo sapien
tcagacagtggtgtagagtgcacaa

SEQ ID NO: 2021099 - DNA, 25 bp, Homo sapien
atgcctcagtacaaacaggtccccg

SEQ ID NO: 2021100 - DNA, 25 bp, Homo sapien
acagtgaggacaagcaaaaggtcta

SEQ ID NO: 2021101 - DNA, 25 bp, Homo sapien
tgaggttcgaaattttttgtcacag

SEQ ID NO: 2021102 - DNA, 25 bp, Homo sapien
ctgaggttcgaaattttttgtcaca

SEQ ID NO: 2021103 - DNA, 25 bp, Homo sapien
caacacggacctttgcaggtttacg

SEQ ID NO: 2021104 - DNA, 25 bp, Homo sapien
tttaaagtgggaagcaatgtgagtc

SEQ ID NO: 2021105 - DNA, 25 bp, Homo sapien
taagtcagttatgaggattggttcc

SEQ ID NO: 2021106 - DNA, 25 bp, Homo sapien
tggaatattcgtcttgccaacacgg

SEQ ID NO: 2021107 - DNA, 25 bp, Homo sapien
tcaatgaggacttacacgctactgt

SEQ ID NO: 2021108 - DNA, 25 bp, Homo sapien
ttgatggttccactgaggtagcaat

SEQ ID NO: 2021109 - DNA, 25 bp, Homo sapien
tctaatccgagaaaacaatttgagc

SEQ ID NO: 2021110 - DNA, 25 bp, Homo sapien
caatttgagcagtagtttggataca

SEQ ID NO: 2021111 - DNA, 25 bp, Homo sapien
aaaacacttgtatggtctatctgct

SEQ ID NO: 2021112 - DNA, 25 bp, Homo sapien
actggttttttggaatgggctggat

SEQ ID NO: 2021113 - DNA, 25 bp, Homo sapien
tatgcacgatgacagtaaaaacact

SEQ ID NO: 2021114 - DNA, 25 bp, Homo sapien
ctgatgtgttgtttaaggtggcaag

SEQ ID NO: 2021115 - DNA, 25 bp, Homo sapien
tccacactgagaacatttaaaaggt

SEQ ID NO: 2021116 - DNA, 25 bp, Homo sapien
ctgcagaaacaaagcctcttccaca

SEQ ID NO: 2021117 - DNA, 25 bp, Homo sapien
cttccacactgagaacatttaaaag

SEQ ID NO: 2021118 - DNA, 25 bp, Homo sapien
agaaacaaagcctcttccacactga

SEQ ID NO: 2021119 - DNA, 25 bp, Homo sapien
taagctgccaccagtagtgaaagcc

SEQ ID NO: 2021120 - DNA, 25 bp, Homo sapien
gatacccatgtgtcgccgtaagctg

SEQ ID NO: 2021121 - DNA, 25 bp, Homo sapien
gacgaaggtcgttgtggatacccat

SEQ ID NO: 2021122 - DNA, 25 bp, Homo sapien
tttggcaatagggacacatataggg

SEQ ID NO: 2021123 - DNA, 25 bp, Homo sapien
caatactactacgaaaggacactgg

SEQ ID NO: 2021124 - DNA, 25 bp, Homo sapien
tacagcattggtcactgggtccgga

SEQ ID NO: 2021125 - DNA, 25 bp, Homo sapien
tagcacggtaagctcttgggccaac

SEQ ID NO: 2021126 - DNA, 25 bp, Homo sapien
ggctggcttcctgactgaaaaagat

SEQ ID NO: 2021127 - DNA, 25 bp, Homo sapien
attagccaggtgcaggggtgcacgc

SEQ ID NO: 2021128 - DNA, 25 bp, Homo sapien
acacacacaaaaaagagccgcctgg

SEQ ID NO: 2021129 - DNA, 25 bp, Homo sapien
ccaggtgcaggggtgcacgcctgta

SEQ ID NO: 2021130 - DNA, 25 bp, Homo sapien
acaaacaaaaacacccacacacaca

SEQ ID NO: 2021131 - DNA, 25 bp, Homo sapien
gcatttgagtggaggcctgcatgct

SEQ ID NO: 2021132 - DNA, 25 bp, Homo sapien
ctgtcatctatcgaggctgcctgct

SEQ ID NO: 2021133 - DNA, 25 bp, Homo sapien
gctctgctggtctacagtgctgtca

SEQ ID NO: 2021134 - DNA, 25 bp, Homo sapien
tctcgatctccacctgcatttgagt

SEQ ID NO: 2021135 - DNA, 25 bp, Homo sapien
ccctgctggttcgaaggactgttgc

SEQ ID NO: 2021136 - DNA, 25 bp, Homo sapien
aaactggtctacgtgccctcgcaga

SEQ ID NO: 2021137 - DNA, 25 bp, Homo sapien
gctcttcaaactggtctacgtgccc

SEQ ID NO: 2021138 - DNA, 25 bp, Homo sapien
agccctgctggttcgaaggactgtt

SEQ ID NO: 2021139 - DNA, 25 bp, Homo sapien
aaatttcattgaaaacccaccactg

SEQ ID NO: 2021140 - DNA, 25 bp, Homo sapien
aatttcattgaaaacccaccactga

SEQ ID NO: 2021141 - DNA, 25 bp, Homo sapien
atttcattgaaaacccaccactgac

SEQ ID NO: 2021142 - DNA, 25 bp, Homo sapien
ggaagcttgtggagagggcctgaga

SEQ ID NO: 2021143 - DNA, 25 bp, Homo sapien
gggcctgagactcaagtgtgctgga

SEQ ID NO: 2021144 - DNA, 25 bp, Homo sapien
gatggtacgtatcagtcactgtaaa

SEQ ID NO: 2021145 - DNA, 25 bp, Homo sapien
ctgtagctgttggacaggtggaaac

SEQ ID NO: 2021146 - DNA, 25 bp, Homo sapien
tgtaagagcgcctgctctggtcctc

SEQ ID NO: 2021147 - DNA, 25 bp, Homo sapien
ctgtaagagcgcctgctctggtcct

SEQ ID NO: 2021148 - DNA, 25 bp, Homo sapien
tgtgtgtgtcttctcgtgggacttg

SEQ ID NO: 2021149 - DNA, 25 bp, Homo sapien
ttttccccggtgtgcgaccgcacat

SEQ ID NO: 2021150 - DNA, 25 bp, Homo sapien
acaaagccgcgtccacagagcttgc

SEQ ID NO: 2021151 - DNA, 25 bp, Homo sapien
tgggacttgaggaccccagaggaaa

SEQ ID NO: 2021152 - DNA, 25 bp, Homo sapien
acggctggaaccaatcctatttcac

SEQ ID NO: 2021153 - DNA, 25 bp, Homo sapien
aacggctggaaccaatcctatttca

SEQ ID NO: 2021154 - DNA, 25 bp, Homo sapien
ggctggaaccaatcctatttcacta

SEQ ID NO: 2021155 - DNA, 25 bp, Homo sapien
cggctggaaccaatcctatttcact

SEQ ID NO: 2021156 - DNA, 25 bp, Homo sapien
tacaatgcactgtagttcggaaacc

SEQ ID NO: 2021157 - DNA, 25 bp, Homo sapien
ttataaggcttcatgctcatatgtg

SEQ ID NO: 2021158 - DNA, 25 bp, Homo sapien
gaaggaagcattgcacacactgcag

SEQ ID NO: 2021159 - DNA, 25 bp, Homo sapien
tcacaaaacggacacttataaggct

SEQ ID NO: 2021160 - DNA, 25 bp, Homo sapien
tcctgcggccggatcttggctaact

SEQ ID NO: 2021161 - DNA, 25 bp, Homo sapien
tgatgcggtccttttctgccgcgga

SEQ ID NO: 2021162 - DNA, 25 bp, Homo sapien
caccaggtcgctaggtttcttgaag

SEQ ID NO: 2021163 - DNA, 25 bp, Homo sapien
tcctccgtgaaagtgatgacctcag

SEQ ID NO: 2021164 - DNA, 25 bp, Homo sapien
gtgagtcttcacatgacaatcgaga

SEQ ID NO: 2021165 - DNA, 25 bp, Homo sapien
catgacaatcgagagtggatttcac

SEQ ID NO: 2021166 - DNA, 25 bp, Homo sapien
cacatgacaatcgagagtggatttc

SEQ ID NO: 2021167 - DNA, 25 bp, Homo sapien
tcttcacatgacaatcgagagtgga

SEQ ID NO: 2021168 - DNA, 25 bp, Homo sapien
ctctaccaatgacgcaggcatgttt

SEQ ID NO: 2021169 - DNA, 25 bp, Homo sapien
agacctctaccaatgacgcaggcat

SEQ ID NO: 2021170 - DNA, 25 bp, Homo sapien
gacctctaccaatgacgcaggcatg

SEQ ID NO: 2021171 - DNA, 25 bp, Homo sapien
taccaatgacgcaggcatgttttcc

SEQ ID NO: 2021172 - DNA, 25 bp, Homo sapien
ggccacgaaggctcggagcaccatg

SEQ ID NO: 2021173 - DNA, 25 bp, Homo sapien
tatcaaaggccacgaaggctcggag

SEQ ID NO: 2021174 - DNA, 25 bp, Homo sapien
tgggtatatcaaaggccacgaaggc

SEQ ID NO: 2021175 - DNA, 25 bp, Homo sapien
tatatcaaaggccacgaaggctcgg

SEQ ID NO: 2021176 - DNA, 25 bp, Homo sapien
tctacccgaggtacggaaacgcagc

SEQ ID NO: 2021177 - DNA, 25 bp, Homo sapien
aggcgcatgtggaccttcagacttc

SEQ ID NO: 2021178 - DNA, 25 bp, Homo sapien
gataaacacgtttgggtcagtagag

SEQ ID NO: 2021179 - DNA, 25 bp, Homo sapien
gcagtccttccgatgagcttcgagt

SEQ ID NO: 2021180 - DNA, 25 bp, Homo sapien
aggcagggagaatagcttggcccac

SEQ ID NO: 2021181 - DNA, 25 bp, Homo sapien
agagacacggtcaggtcacccccag

SEQ ID NO: 2021182 - DNA, 25 bp, Homo sapien
tggatgccttctagggtagccaggc

SEQ ID NO: 2021183 - DNA, 25 bp, Homo sapien
tagcagccaactgtaactggatgcc

SEQ ID NO: 2021184 - DNA, 25 bp, Homo sapien
gcagcatcgattccagaaatctgta

SEQ ID NO: 2021185 - DNA, 25 bp, Homo sapien
gaaatctgtacatttggtccaacca

SEQ ID NO: 2021186 - DNA, 25 bp, Homo sapien
agatgggctggatgacaacactggc

SEQ ID NO: 2021187 - DNA, 25 bp, Homo sapien
gagctgctgagccaataggttgccc

SEQ ID NO: 2021188 - DNA, 25 bp, Homo sapien
taggttgccctgctgtagcgtctgc

SEQ ID NO: 2021189 - DNA, 25 bp, Homo sapien
tatggtcaggttcgcagaggtcact

SEQ ID NO: 2021190 - DNA, 25 bp, Homo sapien
tggcagtgggcccagcggcctgtgc

SEQ ID NO: 2021191 - DNA, 25 bp, Homo sapien
tagaccttgcgaagtcatcacttga

SEQ ID NO: 2021192 - DNA, 25 bp, Homo sapien
gcgaagtcatcacttgagtgaggtc

SEQ ID NO: 2021193 - DNA, 25 bp, Homo sapien
gggacactagaccttgcgaagtcat

SEQ ID NO: 2021194 - DNA, 25 bp, Homo sapien
cttggctaactcgtgtgctgtgtgc

SEQ ID NO: 2021195 - DNA, 25 bp, Homo sapien
taactcctcattgactgtgggcaga

SEQ ID NO: 2021196 - DNA, 25 bp, Homo sapien
cattgcttattgttagggtggcacc

SEQ ID NO: 2021197 - DNA, 25 bp, Homo sapien
ccatgtgacaaagcatgacgctgac

SEQ ID NO: 2021198 - DNA, 25 bp, Homo sapien
gagacagtacttacattctatggga

SEQ ID NO: 2021199 - DNA, 25 bp, Homo sapien
caagactacgatctgcttctgagac

SEQ ID NO: 2021200 - DNA, 25 bp, Homo sapien
ttctcaagcctctatcaagactacg

SEQ ID NO: 2021201 - DNA, 25 bp, Homo sapien
aaagttgtgctaaatttctcaagcc

SEQ ID NO: 2021202 - DNA, 25 bp, Homo sapien
aggctgggaggctcgagcgctgaag

SEQ ID NO: 2021203 - DNA, 25 bp, Homo sapien
cagtagaaccattagcaggctggga

SEQ ID NO: 2021204 - DNA, 25 bp, Homo sapien
cctgctccagcatccgcacagagtg

SEQ ID NO: 2021205 - DNA, 25 bp, Homo sapien
gggctccacagatagctaggtcaga

SEQ ID NO: 2021206 - DNA, 25 bp, Homo sapien
tctccaaatacaatgcctccacaga

SEQ ID NO: 2021207 - DNA, 25 bp, Homo sapien
aatacaatgcctccacagatccaca

SEQ ID NO: 2021208 - DNA, 25 bp, Homo sapien
tccaaatacaatgcctccacagatc

SEQ ID NO: 2021209 - DNA, 25 bp, Homo sapien
caaatacaatgcctccacagatcca

SEQ ID NO: 2021210 - DNA, 25 bp, Homo sapien
cagcgtcagcgtgacactagcgtca

SEQ ID NO: 2021211 - DNA, 25 bp, Homo sapien
tgaaggaaggcttccgcttgtagtg

SEQ ID NO: 2021212 - DNA, 25 bp, Homo sapien
cccgacgaggacatgaccaggttct

SEQ ID NO: 2021213 - DNA, 25 bp, Homo sapien
ccaggttctgagtcgagatggccga

SEQ ID NO: 2021214 - DNA, 25 bp, Homo sapien
ctgagaggtgatgttgagtgtgaca

SEQ ID NO: 2021215 - DNA, 25 bp, Homo sapien
gtgtccaggcctccagatagcatac

SEQ ID NO: 2021216 - DNA, 25 bp, Homo sapien
agaggtgatgttgagtgtgacagtg

SEQ ID NO: 2021217 - DNA, 25 bp, Homo sapien
tgacagtgtccaggcctccagatag

SEQ ID NO: 2021218 - DNA, 25 bp, Homo sapien
aggaccttcgcatccctctctgagg

SEQ ID NO: 2021219 - DNA, 25 bp, Homo sapien
ttttgaaaggaccttcgcatccctc

SEQ ID NO: 2021220 - DNA, 25 bp, Homo sapien
tgaaaggaccttcgcatccctctct

SEQ ID NO: 2021221 - DNA, 25 bp, Homo sapien
cactttttgaaaggaccttcgcatc

SEQ ID NO: 2021222 - DNA, 25 bp, Homo sapien
cccaaatgcagtgctagggtagccc

SEQ ID NO: 2021223 - DNA, 25 bp, Homo sapien
ccaaatgcagtgctagggtagccca

SEQ ID NO: 2021224 - DNA, 25 bp, Homo sapien
cccaaatgcagtgctagggtcgccc

SEQ ID NO: 2021225 - DNA, 25 bp, Homo sapien
aatgcagtgctagggcagcccacca

SEQ ID NO: 2021226 - DNA, 25 bp, Homo sapien
gcccaccgtgttcccaaatgcagtg

SEQ ID NO: 2021227 - DNA, 25 bp, Homo sapien
cagtgctagggtcgcccaccgtgtt

SEQ ID NO: 2021228 - DNA, 25 bp, Homo sapien
ccaaacgcaatgctagggtagccca

SEQ ID NO: 2021229 - DNA, 25 bp, Homo sapien
cgtgttcccaaacgcaatgctaggg

SEQ ID NO: 2021230 - DNA, 25 bp, Homo sapien
ccaaatgcagtgctagggtcgccca

SEQ ID NO: 2021231 - DNA, 25 bp, Homo sapien
ccaaatgcagtgctagggtagccca

SEQ ID NO: 2021232 - DNA, 25 bp, Homo sapien
agcagggaagcgctaatggcagggt

SEQ ID NO: 2021233 - DNA, 25 bp, Homo sapien
tgctcccatgtccgcaggccagagt

SEQ ID NO: 2021234 - DNA, 25 bp, Homo sapien
cagggaagcgctaatggcagggtgt

SEQ ID NO: 2021235 - DNA, 25 bp, Homo sapien
cccatgtccgcaggccagagtggaa

SEQ ID NO: 2021236 - DNA, 25 bp, Homo sapien
catgcacagagtgcagtgttcaggg

SEQ ID NO: 2021237 - DNA, 25 bp, Homo sapien
cattaaattcaaggagcacatgtca

SEQ ID NO: 2021238 - DNA, 25 bp, Homo sapien
tcagggtggtataatgctgaacaac

SEQ ID NO: 2021239 - DNA, 25 bp, Homo sapien
gatctcttccccgtgctattagtcc

SEQ ID NO: 2021240 - DNA, 25 bp, Homo sapien
caatttctgggtcactccacagtca

SEQ ID NO: 2021241 - DNA, 25 bp, Homo sapien
tgggccagatgactctcagtgttaa

SEQ ID NO: 2021242 - DNA, 25 bp, Homo sapien
gaagatcaaggctaagaaaggcaca

SEQ ID NO: 2021243 - DNA, 25 bp, Homo sapien
aaagctttaaacagcatgggccaga

SEQ ID NO: 2021244 - DNA, 25 bp, Homo sapien
taaaaatcagtgtccaataaaagct

SEQ ID NO: 2021245 - DNA, 25 bp, Homo sapien
tatggaagtgatacacaaatcagct

SEQ ID NO: 2021246 - DNA, 25 bp, Homo sapien
gctatacttatggaagtgatacaca

SEQ ID NO: 2021247 - DNA, 25 bp, Homo sapien
tatactcaacgattagctatactta

SEQ ID NO: 2021248 - DNA, 25 bp, Homo sapien
tcagggttaagagggtcttgaagtc

SEQ ID NO: 2021249 - DNA, 25 bp, Homo sapien
actgggtaagtgtatgtggaatctc

SEQ ID NO: 2021250 - DNA, 25 bp, Homo sapien
gcttatcaatgataacaactgtttg

SEQ ID NO: 2021251 - DNA, 25 bp, Homo sapien
gatgcacataagaaccaattggctc

SEQ ID NO: 2021252 - DNA, 25 bp, Homo sapien
cactgcacctgaagttcctacctat

SEQ ID NO: 2021253 - DNA, 25 bp, Homo sapien
tacctatactaacaaagcttcatgt

SEQ ID NO: 2021254 - DNA, 25 bp, Homo sapien
catagagaagttgattgaatattgc

SEQ ID NO: 2021255 - DNA, 25 bp, Homo sapien
ttccctacctccctacatagagaag

SEQ ID NO: 2021256 - DNA, 25 bp, Homo sapien
agagagagggatccgtgaggagcgc

SEQ ID NO: 2021257 - DNA, 25 bp, Homo sapien
agagggatccgtgaggagcgctggg

SEQ ID NO: 2021258 - DNA, 25 bp, Homo sapien
ctggcccgagagagagggatccgtg

SEQ ID NO: 2021259 - DNA, 25 bp, Homo sapien
ccgagagagagggatccgtgaggag

SEQ ID NO: 2021260 - DNA, 25 bp, Homo sapien
atgacttgcggcgagcctgctccac

SEQ ID NO: 2021261 - DNA, 25 bp, Homo sapien
tttcttcacaagcagcagacgctga

SEQ ID NO: 2021262 - DNA, 25 bp, Homo sapien
tgtggcgtgtggctcactagtatga

SEQ ID NO: 2021263 - DNA, 25 bp, Homo sapien
cactagtatgacttgcggcgagcct

SEQ ID NO: 2021264 - DNA, 25 bp, Homo sapien
cgccgatgagaaggcgcggtcacac

SEQ ID NO: 2021265 - DNA, 25 bp, Homo sapien
cttgaggtgcgtggcgcgcttgaag

SEQ ID NO: 2021266 - DNA, 25 bp, Homo sapien
gtggcgcgcttgaaggccttcctgc

SEQ ID NO: 2021267 - DNA, 25 bp, Homo sapien
ccaggttcccagagacgccagctac

SEQ ID NO: 2021268 - DNA, 25 bp, Homo sapien
gtatgtatgcggctgtggcgctcca

SEQ ID NO: 2021269 - DNA, 25 bp, Homo sapien
tgtggcgctccagctggcttggttt

SEQ ID NO: 2021270 - DNA, 25 bp, Homo sapien
gcttctgggagctcaaagaggggcc

SEQ ID NO: 2021271 - DNA, 25 bp, Homo sapien
ggtttggcaaatgccttctcacaag

SEQ ID NO: 2021272 - DNA, 25 bp, Homo sapien
tgatgtctacttcaaagagtaagga

SEQ ID NO: 2021273 - DNA, 25 bp, Homo sapien
atgtctacttcaaagagtaaggaaa

SEQ ID NO: 2021274 - DNA, 25 bp, Homo sapien
catgatgtctacttcaaagagtaag

SEQ ID NO: 2021275 - DNA, 25 bp, Homo sapien
ccatgatgtctacttcaaagagtaa

SEQ ID NO: 2021276 - DNA, 25 bp, Homo sapien
accctgaggtatgaacaagagggac

SEQ ID NO: 2021277 - DNA, 25 bp, Homo sapien
ggtatgaacaagagggactgaatgt

SEQ ID NO: 2021278 - DNA, 25 bp, Homo sapien
ggcatatgtcaatgtctctaagaaa

SEQ ID NO: 2021279 - DNA, 25 bp, Homo sapien
tatagtggatgcctgggctctaccc

SEQ ID NO: 2021280 - DNA, 25 bp, Homo sapien
tcttctgcgtgaagcccatgacgca

SEQ ID NO: 2021281 - DNA, 25 bp, Homo sapien
gcccgcttcatgtgcagcttcatgt

SEQ ID NO: 2021282 - DNA, 25 bp, Homo sapien
tctcacaaagcgtgcaatggaacgg

SEQ ID NO: 2021283 - DNA, 25 bp, Homo sapien
ccatgacgcagtaggcacacttgta

SEQ ID NO: 2021284 - DNA, 25 bp, Homo sapien
aagacgtgggtgagggcctgccact

SEQ ID NO: 2021285 - DNA, 25 bp, Homo sapien
tcctgctccgggtgacctgcagact

SEQ ID NO: 2021286 - DNA, 25 bp, Homo sapien
gtgagggcctgccactcgccggcgg

SEQ ID NO: 2021287 - DNA, 25 bp, Homo sapien
caggtggagggtccggctcagctcc

SEQ ID NO: 2021288 - DNA, 25 bp, Homo sapien
acacactagccacggaggagactga

SEQ ID NO: 2021289 - DNA, 25 bp, Homo sapien
gaaactgcctacagtagtacctgag

SEQ ID NO: 2021290 - DNA, 25 bp, Homo sapien
caaaagagaacaatgcggtgacact

SEQ ID NO: 2021291 - DNA, 25 bp, Homo sapien
taattgcttcgtgaactagacacac

SEQ ID NO: 2021292 - DNA, 25 bp, Homo sapien
tgtaaccctggacctgaacacagat

SEQ ID NO: 2021293 - DNA, 25 bp, Homo sapien
ggtcaggtttactcgagtccccatg

SEQ ID NO: 2021294 - DNA, 25 bp, Homo sapien
gcccgtgtggacagctgaatcctta

SEQ ID NO: 2021295 - DNA, 25 bp, Homo sapien
gatgcggtaagtgtgtcgccagccc

SEQ ID NO: 2021296 - DNA, 25 bp, Homo sapien
ggctacagccaggtttacacactga

SEQ ID NO: 2021297 - DNA, 25 bp, Homo sapien
tgtggcaccattgacgatactaaag

SEQ ID NO: 2021298 - DNA, 25 bp, Homo sapien
taggaatggcgtgcacgcactctgc

SEQ ID NO: 2021299 - DNA, 25 bp, Homo sapien
ttacggattcgtggccttaagctac

SEQ ID NO: 2021300 - DNA, 25 bp, Homo sapien
tacaattcaccaaactagctttcta

SEQ ID NO: 2021301 - DNA, 25 bp, Homo sapien
ttaggaagtaaatcgaaataataca

SEQ ID NO: 2021302 - DNA, 25 bp, Homo sapien
ttgctaataaattgagaaaagacac

SEQ ID NO: 2021303 - DNA, 25 bp, Homo sapien
tagattcacctgttaaggccttaaa

SEQ ID NO: 2021304 - DNA, 25 bp, Homo sapien
aaagatcaacctgtaccccacaaag

SEQ ID NO: 2021305 - DNA, 25 bp, Homo sapien
cagttctttatcctcaaaaccctgg

SEQ ID NO: 2021306 - DNA, 25 bp, Homo sapien
tatacatgaggcctagaaatctctt

SEQ ID NO: 2021307 - DNA, 25 bp, Homo sapien
tccaaagcagatatgctatgatgag

SEQ ID NO: 2021308 - DNA, 25 bp, Homo sapien
ggtgaatcaagaacaaatccctatg

SEQ ID NO: 2021309 - DNA, 25 bp, Homo sapien
agaactgccccgatgcctgtgtagg

SEQ ID NO: 2021310 - DNA, 25 bp, Homo sapien
cagcacggtggcttttggcatcact

SEQ ID NO: 2021311 - DNA, 25 bp, Homo sapien
aaaaatctcttctgactgcctgttg

SEQ ID NO: 2021312 - DNA, 25 bp, Homo sapien
agttgagatgatccatcgtagtggg

SEQ ID NO: 2021313 - DNA, 25 bp, Homo sapien
cacccactctatttcaaaatctatc

SEQ ID NO: 2021314 - DNA, 25 bp, Homo sapien
ccatcgtagtgggatccaaagcgct

SEQ ID NO: 2021315 - DNA, 25 bp, Homo sapien
agtgggatccaaagcgcttccctca

SEQ ID NO: 2021316 - DNA, 25 bp, Homo sapien
gagtgaaaagttctctcatagcaat

SEQ ID NO: 2021317 - DNA, 25 bp, Homo sapien
tagctcaggagatgccgtgatgaat

SEQ ID NO: 2021318 - DNA, 25 bp, Homo sapien
cctgggccatgaactataaattgaa

SEQ ID NO: 2021319 - DNA, 25 bp, Homo sapien
gaaactgcaaaacagtgagtgaaaa

SEQ ID NO: 2021320 - DNA, 25 bp, Homo sapien
ggggctgctggagccccagcctcat

SEQ ID NO: 2021321 - DNA, 25 bp, Homo sapien
gaggaggggctgctggagccccagc

SEQ ID NO: 2021322 - DNA, 25 bp, Homo sapien
ggaggggctgctggagccccagcct

SEQ ID NO: 2021323 - DNA, 25 bp, Homo sapien
caggctgagagccaagaggaggggc

SEQ ID NO: 2021324 - DNA, 25 bp, Homo sapien
tgttctgctgtgtggctagtgtaca

SEQ ID NO: 2021325 - DNA, 25 bp, Homo sapien
tgtgttctgctgtgtggctagtgta

SEQ ID NO: 2021326 - DNA, 25 bp, Homo sapien
tctgctgtgtggctagtgtacacac

SEQ ID NO: 2021327 - DNA, 25 bp, Homo sapien
gttctgctgtgtggctagtgtacac

SEQ ID NO: 2021328 - DNA, 25 bp, Homo sapien
taatggtatttgcatgggtgtcttc

SEQ ID NO: 2021329 - DNA, 25 bp, Homo sapien
gactcggtgcctctgggtctccagg

SEQ ID NO: 2021330 - DNA, 25 bp, Homo sapien
tccgggctgtagcacacaggcccac

SEQ ID NO: 2021331 - DNA, 25 bp, Homo sapien
ccaggtgtgcagagcaaatgtgact

SEQ ID NO: 2021332 - DNA, 25 bp, Homo sapien
gctgaggtcggctctgcgatccata

SEQ ID NO: 2021333 - DNA, 25 bp, Homo sapien
tggctgaacggaaagtgtacactgt

SEQ ID NO: 2021334 - DNA, 25 bp, Homo sapien
actctgcgtcgctgagctgaggtcg

SEQ ID NO: 2021335 - DNA, 25 bp, Homo sapien
cacgtgctgtgacgatggctgaacg

SEQ ID NO: 2021336 - DNA, 25 bp, Homo sapien
gaatgtttcgtgtgggcttaatacc

SEQ ID NO: 2021337 - DNA, 25 bp, Homo sapien
gagtagtcagcgtgatgccaaaacg

SEQ ID NO: 2021338 - DNA, 25 bp, Homo sapien
gcctcgatgatgagagagttacaaa

SEQ ID NO: 2021339 - DNA, 25 bp, Homo sapien
gccaaaacgcgtcttcttaatccaa

SEQ ID NO: 2021340 - DNA, 25 bp, Homo sapien
ggcgtgcacctgctcccgaattact

SEQ ID NO: 2021341 - DNA, 25 bp, Homo sapien
tagcgagtaggcacaggcgtgcacc

SEQ ID NO: 2021342 - DNA, 25 bp, Homo sapien
gaattactcaccgagacacacgggc

SEQ ID NO: 2021343 - DNA, 25 bp, Homo sapien
tcctcccagaagacgcgtggtagcg

SEQ ID NO: 2021344 - DNA, 25 bp, Homo sapien
ctcagagcagaagggtaggagtcct

SEQ ID NO: 2021345 - DNA, 25 bp, Homo sapien
gagtccaggaagacttgcgcactca

SEQ ID NO: 2021346 - DNA, 25 bp, Homo sapien
gccagtcgcccatagacactggctg

SEQ ID NO: 2021347 - DNA, 25 bp, Homo sapien
aggagtcctctagacagcctcgcag

SEQ ID NO: 2021348 - DNA, 25 bp, Homo sapien
tctatgaacaacctcgtttccaaac

SEQ ID NO: 2021349 - DNA, 25 bp, Homo sapien
ctctatgaacaacctcgtttccaaa

SEQ ID NO: 2021350 - DNA, 25 bp, Homo sapien
ctggacgtcaccgttgccctgcatg

SEQ ID NO: 2021351 - DNA, 25 bp, Homo sapien
ctctggacgtcaccgttgccctgca

SEQ ID NO: 2021352 - DNA, 25 bp, Homo sapien
gttgccctgcatggtggccccagag

SEQ ID NO: 2021353 - DNA, 25 bp, Homo sapien
tctggacgtcaccgttgccctgcat

SEQ ID NO: 2021354 - DNA, 25 bp, Homo sapien
ggtcttcctggagatttggtgatgg

SEQ ID NO: 2021355 - DNA, 25 bp, Homo sapien
gggtcttcctggagatttggtgatg

SEQ ID NO: 2021356 - DNA, 25 bp, Homo sapien
gtcttcctggagatttggtgatgga

SEQ ID NO: 2021357 - DNA, 25 bp, Homo sapien
agggtcttcctggagatttggtgat

SEQ ID NO: 2021358 - DNA, 25 bp, Homo sapien
tcctaacaggattagacagtcaagg

SEQ ID NO: 2021359 - DNA, 25 bp, Homo sapien
cagagaggactgttgacatccaagc

SEQ ID NO: 2021360 - DNA, 25 bp, Homo sapien
caattagctgaattcgcgtgtggca

SEQ ID NO: 2021361 - DNA, 25 bp, Homo sapien
gctgggcagctgttagagtccaacg

SEQ ID NO: 2021362 - DNA, 25 bp, Homo sapien
ccttgcgcttttgctggtcactgcc

SEQ ID NO: 2021363 - DNA, 25 bp, Homo sapien
gctggtcactgccatggaggcacac

SEQ ID NO: 2021364 - DNA, 25 bp, Homo sapien
tgcgcttttgctggtcactgccatg

SEQ ID NO: 2021365 - DNA, 25 bp, Homo sapien
tggtcactgccatggaggcacacag

SEQ ID NO: 2021366 - DNA, 25 bp, Homo sapien
cagacgtccctccacgttcacccct

SEQ ID NO: 2021367 - DNA, 25 bp, Homo sapien
cttggactttcttttcgccgtggct

SEQ ID NO: 2021368 - DNA, 25 bp, Homo sapien
cacagacgtccctccacgttcaccc

SEQ ID NO: 2021369 - DNA, 25 bp, Homo sapien
ggactttcttttcgccgtggctgcg

SEQ ID NO: 2021370 - DNA, 25 bp, Homo sapien
tcccctaatgcctgcggagttgtgc

SEQ ID NO: 2021371 - DNA, 25 bp, Homo sapien
ctaccggcaatttccggccaacagt

SEQ ID NO: 2021372 - DNA, 25 bp, Homo sapien
ttgtgcacgtagtagggtcaggcca

SEQ ID NO: 2021373 - DNA, 25 bp, Homo sapien
ggccacggcagcctaccggcaattt

SEQ ID NO: 2021374 - DNA, 25 bp, Homo sapien
gatcacccatggctagacgctgaaa

SEQ ID NO: 2021375 - DNA, 25 bp, Homo sapien
tagacgctgaaaacccacctggttc

SEQ ID NO: 2021376 - DNA, 25 bp, Homo sapien
ggttccggaatcctgtcctcagctt

SEQ ID NO: 2021377 - DNA, 25 bp, Homo sapien
ctggttccggaatcctgtcctcagc

SEQ ID NO: 2021378 - DNA, 25 bp, Homo sapien
cagggatggacacgtggctttgctc

SEQ ID NO: 2021379 - DNA, 25 bp, Homo sapien
agatggcacataggagggacgtccc

SEQ ID NO: 2021380 - DNA, 25 bp, Homo sapien
gctttgctctttgctggcgcgtgta

SEQ ID NO: 2021381 - DNA, 25 bp, Homo sapien
aaaagaagttgctcctgttgtcgct

SEQ ID NO: 2021382 - DNA, 25 bp, Homo sapien
gtaggttaccttgccagaggctgca

SEQ ID NO: 2021383 - DNA, 25 bp, Homo sapien
agctccaatgccagagatgttcaag

SEQ ID NO: 2021384 - DNA, 25 bp, Homo sapien
cagcaaaaggtgaggtgagtgccaa

SEQ ID NO: 2021385 - DNA, 25 bp, Homo sapien
tgttcaagttaagccaggatcaaac

SEQ ID NO: 2021386 - DNA, 25 bp, Homo sapien
ggatgataggaacacctactccagg

SEQ ID NO: 2021387 - DNA, 25 bp, Homo sapien
gaggatgataggaacacctactcca

SEQ ID NO: 2021388 - DNA, 25 bp, Homo sapien
atgataggaacacctactccaggag

SEQ ID NO: 2021389 - DNA, 25 bp, Homo sapien
gatgataggaacacctactccagga

SEQ ID NO: 2021390 - DNA, 25 bp, Homo sapien
tctaatcctggctccttcgggctgg

SEQ ID NO: 2021391 - DNA, 25 bp, Homo sapien
gagagaagcgtgactgttgcatcca

SEQ ID NO: 2021392 - DNA, 25 bp, Homo sapien
tgcaagacacgtaatagagagaagc

SEQ ID NO: 2021393 - DNA, 25 bp, Homo sapien
tgagatcatgtgactccaagttgca

SEQ ID NO: 2021394 - DNA, 25 bp, Homo sapien
ctgccgtgagcctcgattctgggag

SEQ ID NO: 2021395 - DNA, 25 bp, Homo sapien
cagcggctctcattaagcaaaaggg

SEQ ID NO: 2021396 - DNA, 25 bp, Homo sapien
gggatccacatgagcacagacatgg

SEQ ID NO: 2021397 - DNA, 25 bp, Homo sapien
ccttggtgagtgcagaacctctgcc

SEQ ID NO: 2021398 - DNA, 25 bp, Homo sapien
agtggctcaagcagcgtgcccagca

SEQ ID NO: 2021399 - DNA, 25 bp, Homo sapien
ccagcaccgcgggtggaggttgagc

SEQ ID NO: 2021400 - DNA, 25 bp, Homo sapien
agctccgtggtcttctcttgcaggg

SEQ ID NO: 2021401 - DNA, 25 bp, Homo sapien
ccagtggctcaagcagcgtgcccag

SEQ ID NO: 2021402 - DNA, 25 bp, Homo sapien
cttataaaagatacgaggctcgaca

SEQ ID NO: 2021403 - DNA, 25 bp, Homo sapien
ccgagctatggccaagggagactga

SEQ ID NO: 2021404 - DNA, 25 bp, Homo sapien
gacattttactaaggccgaggactc

SEQ ID NO: 2021405 - DNA, 25 bp, Homo sapien
tcttgaacaccccacagcgtgaagg

SEQ ID NO: 2021406 - DNA, 25 bp, Homo sapien
ggagtggactttggggccgtcgtgc

SEQ ID NO: 2021407 - DNA, 25 bp, Homo sapien
gactttggggccgtcgtgccggatc

SEQ ID NO: 2021408 - DNA, 25 bp, Homo sapien
ctaggagtggactttggggccgtcg

SEQ ID NO: 2021409 - DNA, 25 bp, Homo sapien
ttggggccgtcgtgccggatcctcc

SEQ ID NO: 2021410 - DNA, 25 bp, Homo sapien
tcccaaaacgtgttgccaggcagct

SEQ ID NO: 2021411 - DNA, 25 bp, Homo sapien
gcagctcccaagtagaacaggtcgg

SEQ ID NO: 2021412 - DNA, 25 bp, Homo sapien
gggacatccccttggaagctctgaa

SEQ ID NO: 2021413 - DNA, 25 bp, Homo sapien
gctcacggtgaagcaaagtccgccg

SEQ ID NO: 2021414 - DNA, 25 bp, Homo sapien
agagctggggtacccctcttcagag

SEQ ID NO: 2021415 - DNA, 25 bp, Homo sapien
ggacaggacgcctgcggatgccaaa

SEQ ID NO: 2021416 - DNA, 25 bp, Homo sapien
aggagcacgggggacaggacgcctg

SEQ ID NO: 2021417 - DNA, 25 bp, Homo sapien
gacgcctgcggatgccaaaacttgg

SEQ ID NO: 2021418 - DNA, 25 bp, Homo sapien
tccattggataagagatttggccac

SEQ ID NO: 2021419 - DNA, 25 bp, Homo sapien
cgtgagcttgcatggtaactgatcc

SEQ ID NO: 2021420 - DNA, 25 bp, Homo sapien
tcagttattgatcggaggctaccct

SEQ ID NO: 2021421 - DNA, 25 bp, Homo sapien
gatacagtagacagcacggaaggca

SEQ ID NO: 2021422 - DNA, 25 bp, Homo sapien
tgtttgtcattcagtgccgtgggat

SEQ ID NO: 2021423 - DNA, 25 bp, Homo sapien
gccgtgggatataatcagtcctgta

SEQ ID NO: 2021424 - DNA, 25 bp, Homo sapien
tatgacttctatgcctctaattgcg

SEQ ID NO: 2021425 - DNA, 25 bp, Homo sapien
cgactgtatggagaagaactgtttg

SEQ ID NO: 2021426 - DNA, 25 bp, Homo sapien
cagttccccggaatgtcagggtcac

SEQ ID NO: 2021427 - DNA, 25 bp, Homo sapien
gatgtgccacttggatagttcccaa

SEQ ID NO: 2021428 - DNA, 25 bp, Homo sapien
tcacaagacacctaagctggacatg

SEQ ID NO: 2021429 - DNA, 25 bp, Homo sapien
cacttgagtgtcacgaggcagagcc

SEQ ID NO: 2021430 - DNA, 25 bp, Homo sapien
caagtaccatggaccatgccaggca

SEQ ID NO: 2021431 - DNA, 25 bp, Homo sapien
atcgggcgcttctttggcggtgaca

SEQ ID NO: 2021432 - DNA, 25 bp, Homo sapien
tgtgatggcgtcacagaagagaccc

SEQ ID NO: 2021433 - DNA, 25 bp, Homo sapien
ctcccagaggcacggatccaagtac

SEQ ID NO: 2021434 - DNA, 25 bp, Homo sapien
cctgggaagggtctctaacgagcct

SEQ ID NO: 2021435 - DNA, 25 bp, Homo sapien
ggagctctcctagcaagtcagggaa

SEQ ID NO: 2021436 - DNA, 25 bp, Homo sapien
gaaggctggaatcttggtggcacca

SEQ ID NO: 2021437 - DNA, 25 bp, Homo sapien
gaccatatcctaagtcccgggagct

SEQ ID NO: 2021438 - DNA, 25 bp, Homo sapien
tgaaagccatgggttgatcaccagc

SEQ ID NO: 2021439 - DNA, 25 bp, Homo sapien
ccagcttagaatgagtatgagtacg

SEQ ID NO: 2021440 - DNA, 25 bp, Homo sapien
tatgagtacggaatgcgtaagaagc

SEQ ID NO: 2021441 - DNA, 25 bp, Homo sapien
tacggaatgcgtaagaagcagccac

SEQ ID NO: 2021442 - DNA, 25 bp, Homo sapien
tatcattccctactgcgactctgca

SEQ ID NO: 2021443 - DNA, 25 bp, Homo sapien
cttttgagcatctgatttgctgtct

SEQ ID NO: 2021444 - DNA, 25 bp, Homo sapien
ctatcttagtagtcgctggctgtta

SEQ ID NO: 2021445 - DNA, 25 bp, Homo sapien
ggatttttaatatcgattgccttat

SEQ ID NO: 2021446 - DNA, 25 bp, Homo sapien
ctgctgcagcgggtcaattcggaga

SEQ ID NO: 2021447 - DNA, 25 bp, Homo sapien
ccggcagcaggtcagttggtttaac

SEQ ID NO: 2021448 - DNA, 25 bp, Homo sapien
taacacccagttgtgcattaacggg

SEQ ID NO: 2021449 - DNA, 25 bp, Homo sapien
caagtgtctttactggcagccgggc

SEQ ID NO: 2021450 - DNA, 25 bp, Homo sapien
caaggtcctctttcgggtaaagatg

SEQ ID NO: 2021451 - DNA, 25 bp, Homo sapien
ccagtggagattaaaagggcgtcaa

SEQ ID NO: 2021452 - DNA, 25 bp, Homo sapien
aataggagcaggtaccacgactgcc

SEQ ID NO: 2021453 - DNA, 25 bp, Homo sapien
ttaaaagggcgtcaaacgagagatg

SEQ ID NO: 2021454 - DNA, 25 bp, Homo sapien
aagcctcttgaaggcggtgcatctc

SEQ ID NO: 2021455 - DNA, 25 bp, Homo sapien
tattgcatttgcatacttggtgtgt

SEQ ID NO: 2021456 - DNA, 25 bp, Homo sapien
catctcttatctgtgctggccccta

SEQ ID NO: 2021457 - DNA, 25 bp, Homo sapien
cactgaagtggacataccaaatggc

SEQ ID NO: 2021458 - DNA, 25 bp, Homo sapien
agagcagcttcagaatattaaaaac

SEQ ID NO: 2021459 - DNA, 25 bp, Homo sapien
ctgaagagcagcttcagaatattaa

SEQ ID NO: 2021460 - DNA, 25 bp, Homo sapien
gggaagggctgaagagcagcttcag

SEQ ID NO: 2021461 - DNA, 25 bp, Homo sapien
ttcagaatattaaaaacttccttca

SEQ ID NO: 2021462 - DNA, 25 bp, Homo sapien
ttctgagccacatggcgtcccctag

SEQ ID NO: 2021463 - DNA, 25 bp, Homo sapien
ggaggaaggattcttcgtccttcat

SEQ ID NO: 2021464 - DNA, 25 bp, Homo sapien
gggaggaaggattcttcgtccttca

SEQ ID NO: 2021465 - DNA, 25 bp, Homo sapien
gtcccctagaccacctggtccagct

SEQ ID NO: 2021466 - DNA, 25 bp, Homo sapien
cgccaggtgagtgcgaaggtcgcgt

SEQ ID NO: 2021467 - DNA, 25 bp, Homo sapien
tgagtgcgaaggtcgcgtgttcctc

SEQ ID NO: 2021468 - DNA, 25 bp, Homo sapien
gccagggagacctggccgcgccagg

SEQ ID NO: 2021469 - DNA, 25 bp, Homo sapien
tgcgaaggtcgcgtgttcctccccg

SEQ ID NO: 2021470 - DNA, 25 bp, Homo sapien
tctgcggacgaattctcgagtctgg

SEQ ID NO: 2021471 - DNA, 25 bp, Homo sapien
cctgcgtctgtaacttgtggcttgg

SEQ ID NO: 2021472 - DNA, 25 bp, Homo sapien
gtgcggcccggctgaattctgtgca

SEQ ID NO: 2021473 - DNA, 25 bp, Homo sapien
tgtccgtttgcatctggagagcgcg

SEQ ID NO: 2021474 - DNA, 25 bp, Homo sapien
gcaatgtaaacccacagggcctcca

SEQ ID NO: 2021475 - DNA, 25 bp, Homo sapien
cgtatgagcctctctccaaccggat

SEQ ID NO: 2021476 - DNA, 25 bp, Homo sapien
ggcagcctctccacaacctttatta

SEQ ID NO: 2021477 - DNA, 25 bp, Homo sapien
aaccggatccctgatgctcccggag

SEQ ID NO: 2021478 - DNA, 25 bp, Homo sapien
cagggaagtgggcatttggcttcat

SEQ ID NO: 2021479 - DNA, 25 bp, Homo sapien
gaatgcaatgattaaagatataagg

SEQ ID NO: 2021480 - DNA, 25 bp, Homo sapien
tcatctgataaacggtgacctttgt

SEQ ID NO: 2021481 - DNA, 25 bp, Homo sapien
gatataaggcgtaattagcaaacaa

SEQ ID NO: 2021482 - DNA, 25 bp, Homo sapien
taagcgatttagatggaagtggcca

SEQ ID NO: 2021483 - DNA, 25 bp, Homo sapien
tgtgctggctgtggcgacccttatt

SEQ ID NO: 2021484 - DNA, 25 bp, Homo sapien
aagtggccacagttgcgagtggctc

SEQ ID NO: 2021485 - DNA, 25 bp, Homo sapien
cattgccctactagacaggtattag

SEQ ID NO: 2021486 - DNA, 25 bp, Homo sapien
taggaccctcaaaggatcatcttca

SEQ ID NO: 2021487 - DNA, 25 bp, Homo sapien
ttctcccaggcactgagtcgcagag

SEQ ID NO: 2021488 - DNA, 25 bp, Homo sapien
gttgggcccttcctgtgcaaggttc

SEQ ID NO: 2021489 - DNA, 25 bp, Homo sapien
tgagtcatggctttgcgcagccctc

SEQ ID NO: 2021490 - DNA, 25 bp, Homo sapien
aagtaggtagcgatgtttctgcagc

SEQ ID NO: 2021491 - DNA, 25 bp, Homo sapien
gaacatgtgtgatagtaagtaggta

SEQ ID NO: 2021492 - DNA, 25 bp, Homo sapien
cagtttaggagtggatgcatctaga

SEQ ID NO: 2021493 - DNA, 25 bp, Homo sapien
gatgtgggaagccatctagaggtct

SEQ ID NO: 2021494 - DNA, 25 bp, Homo sapien
ttgacaggcaattgtaggatgtaac

SEQ ID NO: 2021495 - DNA, 25 bp, Homo sapien
ggcaattgtaggatgtaacttctgg

SEQ ID NO: 2021496 - DNA, 25 bp, Homo sapien
tttgttgacaggcaattgtaggatg

SEQ ID NO: 2021497 - DNA, 25 bp, Homo sapien
caggcaattgtaggatgtaacttct

SEQ ID NO: 2021498 - DNA, 25 bp, Homo sapien
gctgtctcgtgaatgtccttcctct

SEQ ID NO: 2021499 - DNA, 25 bp, Homo sapien
cactttgtgtggtcttaaagcagca

SEQ ID NO: 2021500 - DNA, 25 bp, Homo sapien
ctttgtgtggtcttaaagcagcagc

SEQ ID NO: 2021501 - DNA, 25 bp, Homo sapien
gggcatggctgtctcgtgaatgtcc

SEQ ID NO: 2021502 - DNA, 25 bp, Homo sapien
gtgaaatgccgtgtatctatgtcca

SEQ ID NO: 2021503 - DNA, 25 bp, Homo sapien
gtgtgaaatgccgtgtatctatgtc

SEQ ID NO: 2021504 - DNA, 25 bp, Homo sapien
tatctatgtccaaaattccctctcc

SEQ ID NO: 2021505 - DNA, 25 bp, Homo sapien
gtatctatgtccaaaattccctctc

SEQ ID NO: 2021506 - DNA, 25 bp, Homo sapien
aaacctgaacaggcctgtcctgtgc

SEQ ID NO: 2021507 - DNA, 25 bp, Homo sapien
cgactgtgctaaaacctgaacaggc

SEQ ID NO: 2021508 - DNA, 25 bp, Homo sapien
aacctgaacaggcctgtcctgtgcc

SEQ ID NO: 2021509 - DNA, 25 bp, Homo sapien
ggccgactgtgctaaaacctgaaca

SEQ ID NO: 2021510 - DNA, 25 bp, Homo sapien
ttggcctccagtgggaaaaatccag

SEQ ID NO: 2021511 - DNA, 25 bp, Homo sapien
ggaaaaatccaggtcagcagctcac

SEQ ID NO: 2021512 - DNA, 25 bp, Homo sapien
catttcctcttggatttggcctcca

SEQ ID NO: 2021513 - DNA, 25 bp, Homo sapien
tcctgcatttcctcttggatttggc

SEQ ID NO: 2021514 - DNA, 25 bp, Homo sapien
cccaccctgttagggtccctgtctg

SEQ ID NO: 2021515 - DNA, 25 bp, Homo sapien
ccaccctgttagggtccctgtctgc

SEQ ID NO: 2021516 - DNA, 25 bp, Homo sapien
gagacaaggcgggattcatgcttcg

SEQ ID NO: 2021517 - DNA, 25 bp, Homo sapien
ttcatgcttcgtgggctgagcacgg

SEQ ID NO: 2021518 - DNA, 25 bp, Homo sapien
gctgagcacggctgtgctcttccta

SEQ ID NO: 2021519 - DNA, 25 bp, Homo sapien
cttcctaaattgcaggtcctgctct

SEQ ID NO: 2021520 - DNA, 25 bp, Homo sapien
gactaacaatgcgttttgtaaaata

SEQ ID NO: 2021521 - DNA, 25 bp, Homo sapien
gacagctccaaaggtcggtaacgtg

SEQ ID NO: 2021522 - DNA, 25 bp, Homo sapien
ttctcgggtgaacttttcttgccac

SEQ ID NO: 2021523 - DNA, 25 bp, Homo sapien
ttctgctgctggtgcgatagacctc

SEQ ID NO: 2021524 - DNA, 25 bp, Homo sapien
aggtaggaaggtgtgcccatgctgc

SEQ ID NO: 2021525 - DNA, 25 bp, Homo sapien
catctggtgacacgggatgctccca

SEQ ID NO: 2021526 - DNA, 25 bp, Homo sapien
tcttttggggcatctggtgacacgg

SEQ ID NO: 2021527 - DNA, 25 bp, Homo sapien
gactgctggtgttgcggcccgtctt

SEQ ID NO: 2021528 - DNA, 25 bp, Homo sapien
gccccagctgccccgcgtccaaccc

SEQ ID NO: 2021529 - DNA, 25 bp, Homo sapien
ccaggccagtgcggccccagctgcc

SEQ ID NO: 2021530 - DNA, 25 bp, Homo sapien
cccaggccagtgcggccccagctgc

SEQ ID NO: 2021531 - DNA, 25 bp, Homo sapien
acccaggccagtgcggccccagctg

SEQ ID NO: 2021532 - DNA, 25 bp, Homo sapien
cattggaacccgtgaaggaagctct

SEQ ID NO: 2021533 - DNA, 25 bp, Homo sapien
ttagagactcatggcaaggaatggc

SEQ ID NO: 2021534 - DNA, 25 bp, Homo sapien
aagagtgctcatgccacaggcccta

SEQ ID NO: 2021535 - DNA, 25 bp, Homo sapien
taagacacttctgttggcccattgg

SEQ ID NO: 2021536 - DNA, 25 bp, Homo sapien
agtttggtcagtggtggtcctagct

SEQ ID NO: 2021537 - DNA, 25 bp, Homo sapien
gctgattaaaggtagccacgaaacg

SEQ ID NO: 2021538 - DNA, 25 bp, Homo sapien
ggctcctccatgatttaaaacgtcg

SEQ ID NO: 2021539 - DNA, 25 bp, Homo sapien
ggtcctagctgtgtgcgctgattaa

SEQ ID NO: 2021540 - DNA, 25 bp, Homo sapien
ccaagtcgccgcccccgatccccat

SEQ ID NO: 2021541 - DNA, 25 bp, Homo sapien
tctttttaacaagacagcgacgaag

SEQ ID NO: 2021542 - DNA, 25 bp, Homo sapien
aagaccacgatgtctctgggctgca

SEQ ID NO: 2021543 - DNA, 25 bp, Homo sapien
gagtcacggctaaacagcaggcttt

SEQ ID NO: 2021544 - DNA, 25 bp, Homo sapien
tttgctgtcttttccgcgcacgctt

SEQ ID NO: 2021545 - DNA, 25 bp, Homo sapien
tcgatgttgtatgaccctggagcag

SEQ ID NO: 2021546 - DNA, 25 bp, Homo sapien
cagaacatacttgggaaggcaggga

SEQ ID NO: 2021547 - DNA, 25 bp, Homo sapien
gaaccttgtctgattggcactcgat

SEQ ID NO: 2021548 - DNA, 25 bp, Homo sapien
tatttgcgggtacaacaggcccaga

SEQ ID NO: 2021549 - DNA, 25 bp, Homo sapien
ggaggtctgcccgtggcgtacgtgt

SEQ ID NO: 2021550 - DNA, 25 bp, Homo sapien
gcgtacgtgtgctgtctgcccagca

SEQ ID NO: 2021551 - DNA, 25 bp, Homo sapien
tgtttcctggaagctacatccacgt

SEQ ID NO: 2021552 - DNA, 25 bp, Homo sapien
ttcctggaagctacatccacgtgca

SEQ ID NO: 2021553 - DNA, 25 bp, Homo sapien
attaactgtgagtgcgtggggtggg

SEQ ID NO: 2021554 - DNA, 25 bp, Homo sapien
gattaactgtgagtgcgtggggtgg

SEQ ID NO: 2021555 - DNA, 25 bp, Homo sapien
ggattaactgtgagtgcgtggggtg

SEQ ID NO: 2021556 - DNA, 25 bp, Homo sapien
ttaactgtgagtgcgtggggtggga

SEQ ID NO: 2021557 - DNA, 25 bp, Homo sapien
agcaggtgggacaatgagtgaggca

SEQ ID NO: 2021558 - DNA, 25 bp, Homo sapien
ggtgggacaatgagtgaggcaagag

SEQ ID NO: 2021559 - DNA, 25 bp, Homo sapien
caggtgggacaatgagtgaggcaag

SEQ ID NO: 2021560 - DNA, 25 bp, Homo sapien
ctagagcaggtgggacaatgagtga

SEQ ID NO: 2021561 - DNA, 25 bp, Homo sapien
ccagaggagcccgtctcatcagaaa

SEQ ID NO: 2021562 - DNA, 25 bp, Homo sapien
ttctgtgcacaacacgccaaccaga

SEQ ID NO: 2021563 - DNA, 25 bp, Homo sapien
tgcacaacacgccaaccagaggagc

SEQ ID NO: 2021564 - DNA, 25 bp, Homo sapien
agaggagcccgtctcatcagaaagg

SEQ ID NO: 2021565 - DNA, 25 bp, Homo sapien
gccacttgttgacgggcgccttcca

SEQ ID NO: 2021566 - DNA, 25 bp, Homo sapien
tcaaaatgccgcgttgtggccactt

SEQ ID NO: 2021567 - DNA, 25 bp, Homo sapien
aaacagctttactgtgcagcaggtc

SEQ ID NO: 2021568 - DNA, 25 bp, Homo sapien
caccagacggggaaacagctttact

SEQ ID NO: 2021569 - DNA, 25 bp, Homo sapien
cactgcatgagtaaaacgcggtggg

SEQ ID NO: 2021570 - DNA, 25 bp, Homo sapien
gaggggccttcctgcgtccacactg

SEQ ID NO: 2021571 - DNA, 25 bp, Homo sapien
aggatcctcccccaagatgagaaga

SEQ ID NO: 2021572 - DNA, 25 bp, Homo sapien
cttcctgcgtccacactgcatgagt

SEQ ID NO: 2021573 - DNA, 25 bp, Homo sapien
gtctcctctgctaggtccccttgag

SEQ ID NO: 2021574 - DNA, 25 bp, Homo sapien
ggcaggttaacttattccacaagta

SEQ ID NO: 2021575 - DNA, 25 bp, Homo sapien
agaacctcgctgcaccagtggatgt

SEQ ID NO: 2021576 - DNA, 25 bp, Homo sapien
cagtggatgtcacctgagaagtggt

SEQ ID NO: 2021577 - DNA, 25 bp, Homo sapien
gcacctctaacacctgtccactcag

SEQ ID NO: 2021578 - DNA, 25 bp, Homo sapien
ctcaggggcaccatgcgggggacac

SEQ ID NO: 2021579 - DNA, 25 bp, Homo sapien
agcgcctctcaatcagcacctctaa

SEQ ID NO: 2021580 - DNA, 25 bp, Homo sapien
ctcacagcaccagcgcctctcaatc

SEQ ID NO: 2021581 - DNA, 25 bp, Homo sapien
gcagaaacagagcccccagcagcat

SEQ ID NO: 2021582 - DNA, 25 bp, Homo sapien
agaggcagaaacagagcccccagca

SEQ ID NO: 2021583 - DNA, 25 bp, Homo sapien
gaaaggggtgggcagagtggtgaga

SEQ ID NO: 2021584 - DNA, 25 bp, Homo sapien
ggtgggcagagtggtgagaggcaga

SEQ ID NO: 2021585 - DNA, 25 bp, Homo sapien
accagccagacctgcggcacaggct

SEQ ID NO: 2021586 - DNA, 25 bp, Homo sapien
gagtccactactggcaattccattt

SEQ ID NO: 2021587 - DNA, 25 bp, Homo sapien
gactgccgtaacagagtccactact

SEQ ID NO: 2021588 - DNA, 25 bp, Homo sapien
cgtaacagagtccactactggcaat

SEQ ID NO: 2021589 - DNA, 25 bp, Homo sapien
tcatcggtacggctcctccactgca

SEQ ID NO: 2021590 - DNA, 25 bp, Homo sapien
cactgcagaacccttgagaggggct

SEQ ID NO: 2021591 - DNA, 25 bp, Homo sapien
tcggtacggctcctccactgcagaa

SEQ ID NO: 2021592 - DNA, 25 bp, Homo sapien
actgcagaacccttgagaggggctt

SEQ ID NO: 2021593 - DNA, 25 bp, Homo sapien
tggagactttgtccaagctgtcttc

SEQ ID NO: 2021594 - DNA, 25 bp, Homo sapien
aaataggcccatactgtgcttcctg

SEQ ID NO: 2021595 - DNA, 25 bp, Homo sapien
gtcccctaaataggcccatactgtg

SEQ ID NO: 2021596 - DNA, 25 bp, Homo sapien
agctgtcttctgtctaagtgttcca

SEQ ID NO: 2021597 - DNA, 25 bp, Homo sapien
ttctgaagaagacaccaatgcaggt

SEQ ID NO: 2021598 - DNA, 25 bp, Homo sapien
taaatcactcgccaccttctgaaga

SEQ ID NO: 2021599 - DNA, 25 bp, Homo sapien
aatgcaggtaagtcccgcgttgaaa

SEQ ID NO: 2021600 - DNA, 25 bp, Homo sapien
agagccacgtggaggccctctctga

SEQ ID NO: 2021601 - DNA, 25 bp, Homo sapien
cagtgacttccagctgtaacctgca

SEQ ID NO: 2021602 - DNA, 25 bp, Homo sapien
cttccgtgaagggtccttgatccca

SEQ ID NO: 2021603 - DNA, 25 bp, Homo sapien
gaagggtccttgatcccagaaataa

SEQ ID NO: 2021604 - DNA, 25 bp, Homo sapien
tgtaacctgcagaccaccaggtccc

SEQ ID NO: 2021605 - DNA, 25 bp, Homo sapien
agtaggttgttgaggaggcgtggca

SEQ ID NO: 2021606 - DNA, 25 bp, Homo sapien
gtaggttgttgaggaggcgtggcat

SEQ ID NO: 2021607 - DNA, 25 bp, Homo sapien
cagtaggttgttgaggaggcgtggc

SEQ ID NO: 2021608 - DNA, 25 bp, Homo sapien
gagcacgtggccagcagtgaaggct

SEQ ID NO: 2021609 - DNA, 25 bp, Homo sapien
agagcacgtggccagcagtgaaggc

SEQ ID NO: 2021610 - DNA, 25 bp, Homo sapien
gtcttccacgtctgcttgccacgtg

SEQ ID NO: 2021611 - DNA, 25 bp, Homo sapien
ggcttggctgcaagtcggttccaca

SEQ ID NO: 2021612 - DNA, 25 bp, Homo sapien
tgcttgccacgtgggcttggctgca

SEQ ID NO: 2021613 - DNA, 25 bp, Homo sapien
tccacatccacattctagagtccag

SEQ ID NO: 2021614 - DNA, 25 bp, Homo sapien
ttgctgcagcaatactggagatggc

SEQ ID NO: 2021615 - DNA, 25 bp, Homo sapien
ttttcaccactatggacattgtccc

SEQ ID NO: 2021616 - DNA, 25 bp, Homo sapien
tggagatggcaaaacattgagactc

SEQ ID NO: 2021617 - DNA, 25 bp, Homo sapien
ttgagactcagaggctgtcagcaag

SEQ ID NO: 2021618 - DNA, 25 bp, Homo sapien
cctgcttgcccatgggccctgtgtg

SEQ ID NO: 2021619 - DNA, 25 bp, Homo sapien
tccctgcttgcccatgggccctgtg

SEQ ID NO: 2021620 - DNA, 25 bp, Homo sapien
cctccctgcttgcccatgggccctg

SEQ ID NO: 2021621 - DNA, 25 bp, Homo sapien
ctgcttgcccatgggccctgtgtgt

SEQ ID NO: 2021622 - DNA, 25 bp, Homo sapien
cgggcaagcatctcgcagtccttta

SEQ ID NO: 2021623 - DNA, 25 bp, Homo sapien
ctttaacccgggagtctctccagag

SEQ ID NO: 2021624 - DNA, 25 bp, Homo sapien
taacttcgcatgtcgcgggcaagca

SEQ ID NO: 2021625 - DNA, 25 bp, Homo sapien
agcacattggggtcggctccaggca

SEQ ID NO: 2021626 - DNA, 25 bp, Homo sapien
gatgggtaatccaaagaccaaagag

SEQ ID NO: 2021627 - DNA, 25 bp, Homo sapien
tgtttttctaccttgctagctctgt

SEQ ID NO: 2021628 - DNA, 25 bp, Homo sapien
cttgaggagttaaggaagtaggatc

SEQ ID NO: 2021629 - DNA, 25 bp, Homo sapien
tgaggggatgggtaatccaaagacc

SEQ ID NO: 2021630 - DNA, 25 bp, Homo sapien
tctggtgactgtccattatgcgcgg

SEQ ID NO: 2021631 - DNA, 25 bp, Homo sapien
ccgtttcggtatagcagggccagtc

SEQ ID NO: 2021632 - DNA, 25 bp, Homo sapien
gccgtaaatgtggatttgccagaaa

SEQ ID NO: 2021633 - DNA, 25 bp, Homo sapien
tcactttcaaaaacaccgatgcgtt

SEQ ID NO: 2021634 - DNA, 25 bp, Homo sapien
cgcgagcagagactggacggattct

SEQ ID NO: 2021635 - DNA, 25 bp, Homo sapien
aatccgcgccccttagaagtcacgg

SEQ ID NO: 2021636 - DNA, 25 bp, Homo sapien
ttagaagtcacggtgcgcgagcaga

SEQ ID NO: 2021637 - DNA, 25 bp, Homo sapien
aaacagctcggctgaaatccgcgcc

SEQ ID NO: 2021638 - DNA, 25 bp, Homo sapien
gcttttccagggattccgagtcgtc

SEQ ID NO: 2021639 - DNA, 25 bp, Homo sapien
gagtcgtccacagggcgagagctct

SEQ ID NO: 2021640 - DNA, 25 bp, Homo sapien
agggattccgagtcgtccacagggc

SEQ ID NO: 2021641 - DNA, 25 bp, Homo sapien
cctggtggtggatagagtcgggtgc

SEQ ID NO: 2021642 - DNA, 25 bp, Homo sapien
gctccagatcttcgccggcggtttt

SEQ ID NO: 2021643 - DNA, 25 bp, Homo sapien
cgctccagatcttcgccggcggttt

SEQ ID NO: 2021644 - DNA, 25 bp, Homo sapien
acctgttgctcggagccgctccttc

SEQ ID NO: 2021645 - DNA, 25 bp, Homo sapien
ctgcacctgttgctcggagccgctc

SEQ ID NO: 2021646 - DNA, 25 bp, Homo sapien
ctgggaagagggatccgccggctgc

SEQ ID NO: 2021647 - DNA, 25 bp, Homo sapien
gggaagagggatccgccggctgcag

SEQ ID NO: 2021648 - DNA, 25 bp, Homo sapien
tgcagccgcgcaggtggaaagaccc

SEQ ID NO: 2021649 - DNA, 25 bp, Homo sapien
gcgcaggtggaaagacccttctctc

SEQ ID NO: 2021650 - DNA, 25 bp, Homo sapien
ctgagagagggtgggttcgggagcc

SEQ ID NO: 2021651 - DNA, 25 bp, Homo sapien
gagcccggagctggaccttctcggg

SEQ ID NO: 2021652 - DNA, 25 bp, Homo sapien
aagggacggtgatctcgagagcact

SEQ ID NO: 2021653 - DNA, 25 bp, Homo sapien
ccttctcgggaagggacggtgatct

SEQ ID NO: 2021654 - DNA, 25 bp, Homo sapien
tcccggcgcaaagcacggagagtgc

SEQ ID NO: 2021655 - DNA, 25 bp, Homo sapien
agtgcgagtttaggagtctgagctt

SEQ ID NO: 2021656 - DNA, 25 bp, Homo sapien
tgcctggtggcaccgtctttgcgcc

SEQ ID NO: 2021657 - DNA, 25 bp, Homo sapien
gagggagggcgggatagtaggcgcc

SEQ ID NO: 2021658 - DNA, 25 bp, Homo sapien
gtgacgaagttctccacgccgatgc

SEQ ID NO: 2021659 - DNA, 25 bp, Homo sapien
ggtagccgaagacgaaggtgcacac

SEQ ID NO: 2021660 - DNA, 25 bp, Homo sapien
acggtgatcactaggctgttgccca

SEQ ID NO: 2021661 - DNA, 25 bp, Homo sapien
ggtgcacaccacgtaggccttcttg

SEQ ID NO: 2021662 - DNA, 25 bp, Homo sapien
cctcgcgcgtctcggccccgcgacc

SEQ ID NO: 2021663 - DNA, 25 bp, Homo sapien
cgcgtctcggccccgcgaccggcgt

SEQ ID NO: 2021664 - DNA, 25 bp, Homo sapien
tctcggccccgcgaccggcgtgcac

SEQ ID NO: 2021665 - DNA, 25 bp, Homo sapien
ctccctcgcgcgtctcggccccgcg

SEQ ID NO: 2021666 - DNA, 25 bp, Homo sapien
gaaggatgcggcagcgcccgcctac

SEQ ID NO: 2021667 - DNA, 25 bp, Homo sapien
cctcgcaaaaggtccgcgctctggt

SEQ ID NO: 2021668 - DNA, 25 bp, Homo sapien
ttgctgtaccgggaaggatgcggca

SEQ ID NO: 2021669 - DNA, 25 bp, Homo sapien
aacctccccgcgcagctgatctggt

SEQ ID NO: 2021670 - DNA, 25 bp, Homo sapien
ccatgtattcgatgagtttcccaga

SEQ ID NO: 2021671 - DNA, 25 bp, Homo sapien
tgaagaacagctccatagcagcaga

SEQ ID NO: 2021672 - DNA, 25 bp, Homo sapien
gaaactgtctggtgcaaaagactgc

SEQ ID NO: 2021673 - DNA, 25 bp, Homo sapien
agactgctcccttacaaacttgtga

SEQ ID NO: 2021674 - DNA, 25 bp, Homo sapien
ccaaggagattctggacagtaattc

SEQ ID NO: 2021675 - DNA, 25 bp, Homo sapien
gagtttatcctcatggtagaccaag

SEQ ID NO: 2021676 - DNA, 25 bp, Homo sapien
caggtcctgctggctacatcctggg

SEQ ID NO: 2021677 - DNA, 25 bp, Homo sapien
taacttagtcgagtgggcccattga

SEQ ID NO: 2021678 - DNA, 25 bp, Homo sapien
cgaaatgcttcccacttcctgaaat

SEQ ID NO: 2021679 - DNA, 25 bp, Homo sapien
aatgcttcccacttcctgaaatgac

SEQ ID NO: 2021680 - DNA, 25 bp, Homo sapien
cccacttcctgaaatgactcagcaa

SEQ ID NO: 2021681 - DNA, 25 bp, Homo sapien
ttcccacttcctgaaatgactcagc

SEQ ID NO: 2021682 - DNA, 25 bp, Homo sapien
ttttgcccagaaacagccatgccat

SEQ ID NO: 2021683 - DNA, 25 bp, Homo sapien
ggttttgcccagaaacagccatgcc

SEQ ID NO: 2021684 - DNA, 25 bp, Homo sapien
gttttgcccagaaacagccatgcca

SEQ ID NO: 2021685 - DNA, 25 bp, Homo sapien
ggggttttgcccagaaacagccatg

SEQ ID NO: 2021686 - DNA, 25 bp, Homo sapien
actttttatgcaagtgattaaggac

SEQ ID NO: 2021687 - DNA, 25 bp, Homo sapien
tcaactttttatgcaagtgattaag

SEQ ID NO: 2021688 - DNA, 25 bp, Homo sapien
gttcttcaactttttatgcaagtga

SEQ ID NO: 2021689 - DNA, 25 bp, Homo sapien
tcttcaactttttatgcaagtgatt

SEQ ID NO: 2021690 - DNA, 25 bp, Homo sapien
cctggtgaggcgcacaatcagcaga

SEQ ID NO: 2021691 - DNA, 25 bp, Homo sapien
ggcgcacaatcagcagaatccgcat

SEQ ID NO: 2021692 - DNA, 25 bp, Homo sapien
caatcagcagaatccgcatttcctc

SEQ ID NO: 2021693 - DNA, 25 bp, Homo sapien
tgaggcgcacaatcagcagaatccg

SEQ ID NO: 2021694 - DNA, 25 bp, Homo sapien
aatgttggcttccatgcggagccag

SEQ ID NO: 2021695 - DNA, 25 bp, Homo sapien
agccagttcctcttagaatcccctg

SEQ ID NO: 2021696 - DNA, 25 bp, Homo sapien
tgttggcttccatgcggagccagtt

SEQ ID NO: 2021697 - DNA, 25 bp, Homo sapien
tagaatcccctggatcggcttggtc

SEQ ID NO: 2021698 - DNA, 25 bp, Homo sapien
ggtgagtccaattcagtcgtagcaa

SEQ ID NO: 2021699 - DNA, 25 bp, Homo sapien
caatgacaatgtggcaaatacaccc

SEQ ID NO: 2021700 - DNA, 25 bp, Homo sapien
cagtcgtagcaatgacaatgtggca

SEQ ID NO: 2021701 - DNA, 25 bp, Homo sapien
ctggtcctgctatctttgaggtgag

SEQ ID NO: 2021702 - DNA, 25 bp, Homo sapien
caccagtctgttttctaaacagaaa

SEQ ID NO: 2021703 - DNA, 25 bp, Homo sapien
tggccaccagtctgttttctaaaca

SEQ ID NO: 2021704 - DNA, 25 bp, Homo sapien
ctgtggccaccagtctgttttctaa

SEQ ID NO: 2021705 - DNA, 25 bp, Homo sapien
gccaccagtctgttttctaaacaga

SEQ ID NO: 2021706 - DNA, 25 bp, Homo sapien
gatggatgatgtggtgcggcagcca

SEQ ID NO: 2021707 - DNA, 25 bp, Homo sapien
agccaggagattccaaacaccacaa

SEQ ID NO: 2021708 - DNA, 25 bp, Homo sapien
caaccaccaccagaactgtctgtgc

SEQ ID NO: 2021709 - DNA, 25 bp, Homo sapien
gaagccggcgtcagcgggaaaactc

SEQ ID NO: 2021710 - DNA, 25 bp, Homo sapien
cggaggaattgctgtacgccaggca

SEQ ID NO: 2021711 - DNA, 25 bp, Homo sapien
cacttgtttataggccttcctgaaa

SEQ ID NO: 2021712 - DNA, 25 bp, Homo sapien
tatcactcaggtgtgaatctttgcg

SEQ ID NO: 2021713 - DNA, 25 bp, Homo sapien
tgcgaatgtgacacttgaacacttg

SEQ ID NO: 2021714 - DNA, 25 bp, Homo sapien
tacaacactgaattgactcctgagg

SEQ ID NO: 2021715 - DNA, 25 bp, Homo sapien
caagttgcagcatcgcttactagct

SEQ ID NO: 2021716 - DNA, 25 bp, Homo sapien
tctgtgcgctagctacaattggaag

SEQ ID NO: 2021717 - DNA, 25 bp, Homo sapien
gaccatattgatgggccagttcaca

SEQ ID NO: 2021718 - DNA, 25 bp, Homo sapien
tgggagcctgcttctgccatcagct

SEQ ID NO: 2021719 - DNA, 25 bp, Homo sapien
ctggctgagcagaagaagaggagct

SEQ ID NO: 2021720 - DNA, 25 bp, Homo sapien
agcctgcttctgccatcagcttcat

SEQ ID NO: 2021721 - DNA, 25 bp, Homo sapien
tggctgagcagaagaagaggagctg

SEQ ID NO: 2021722 - DNA, 25 bp, Homo sapien
cagagatttttggtcctaaaagtga

SEQ ID NO: 2021723 - DNA, 25 bp, Homo sapien
acagagatttttggtcctaaaagtg

SEQ ID NO: 2021724 - DNA, 25 bp, Homo sapien
gatacagagatttttggtcctaaaa

SEQ ID NO: 2021725 - DNA, 25 bp, Homo sapien
atacagagatttttggtcctaaaag

SEQ ID NO: 2021726 - DNA, 25 bp, Homo sapien
tcctgccatataagtcacaagtctc

SEQ ID NO: 2021727 - DNA, 25 bp, Homo sapien
aacgtctatgttggcctcctgtggc

SEQ ID NO: 2021728 - DNA, 25 bp, Homo sapien
gagtggaattctgctgcggcttccc

SEQ ID NO: 2021729 - DNA, 25 bp, Homo sapien
ttgcagctgcccatatccaataagc

SEQ ID NO: 2021730 - DNA, 25 bp, Homo sapien
gaagtctgacttcccactattccac

SEQ ID NO: 2021731 - DNA, 25 bp, Homo sapien
cctgcttgaagtccatgaagtctga

SEQ ID NO: 2021732 - DNA, 25 bp, Homo sapien
tgcccttggttaacaaaatagcatc

SEQ ID NO: 2021733 - DNA, 25 bp, Homo sapien
gctatgaaaggctatcagacaatcc

SEQ ID NO: 2021734 - DNA, 25 bp, Homo sapien
ggtagagcttcattccgcgggtgat

SEQ ID NO: 2021735 - DNA, 25 bp, Homo sapien
tcaacctgccttaacaagtatttac

SEQ ID NO: 2021736 - DNA, 25 bp, Homo sapien
ttcattccgcgggtgatggaaagcc

SEQ ID NO: 2021737 - DNA, 25 bp, Homo sapien
tggaaagcccgggacgaagatcttc

SEQ ID NO: 2021738 - DNA, 25 bp, Homo sapien
gtctgcctgcgatttttctcatcca

SEQ ID NO: 2021739 - DNA, 25 bp, Homo sapien
catccacctccatacacttgacacc

SEQ ID NO: 2021740 - DNA, 25 bp, Homo sapien
tcctgtctgcctgcgatttttctca

SEQ ID NO: 2021741 - DNA, 25 bp, Homo sapien
cacttgacacctgtacgttcttttt

SEQ ID NO: 2021742 - DNA, 25 bp, Homo sapien
gatgtgcttgggcaccatcgccatc

SEQ ID NO: 2021743 - DNA, 25 bp, Homo sapien
tgtgcttgggcaccatcgccatcgc

SEQ ID NO: 2021744 - DNA, 25 bp, Homo sapien
gatcagtcgtgcgtccacccagcag

SEQ ID NO: 2021745 - DNA, 25 bp, Homo sapien
gcccactgatgggatcagtcgtgcg

SEQ ID NO: 2021746 - DNA, 25 bp, Homo sapien
gatatcgtgaaagtcctctcggcag

SEQ ID NO: 2021747 - DNA, 25 bp, Homo sapien
gtcctctcggcagttggcagtgttg

SEQ ID NO: 2021748 - DNA, 25 bp, Homo sapien
attgtctgtgatatcgtgaaagtcc

SEQ ID NO: 2021749 - DNA, 25 bp, Homo sapien
tgaaagtcctctcggcagttggcag

SEQ ID NO: 2021750 - DNA, 25 bp, Homo sapien
gtcagaaacatgacttggtttacct

SEQ ID NO: 2021751 - DNA, 25 bp, Homo sapien
tcagaaacatgacttggtttacctg

SEQ ID NO: 2021752 - DNA, 25 bp, Homo sapien
tgaggttggtggcatccgaggtgta

SEQ ID NO: 2021753 - DNA, 25 bp, Homo sapien
tcctgaggtttcgtgggttgtctag

SEQ ID NO: 2021754 - DNA, 25 bp, Homo sapien
ttggatgtcctgaggtttcgtgggt

SEQ ID NO: 2021755 - DNA, 25 bp, Homo sapien
cgtgggttgtctaggatgaggttgg

SEQ ID NO: 2021756 - DNA, 25 bp, Homo sapien
ctgtaagtcaaaggcagactttctg

SEQ ID NO: 2021757 - DNA, 25 bp, Homo sapien
aaagacttgatgttcggcattcagc

SEQ ID NO: 2021758 - DNA, 25 bp, Homo sapien
cagtgtcgcgcatcacaaagaaagg

SEQ ID NO: 2021759 - DNA, 25 bp, Homo sapien
ggcattcagccttctgaccacagaa

SEQ ID NO: 2021760 - DNA, 25 bp, Homo sapien
tggcttcttcaaagcttcatctctg

SEQ ID NO: 2021761 - DNA, 25 bp, Homo sapien
ggcagagcacaatcagacactccag

SEQ ID NO: 2021762 - DNA, 25 bp, Homo sapien
actccagccgagctctcagccttga

SEQ ID NO: 2021763 - DNA, 25 bp, Homo sapien
agagcacaatcagacactccagccg

SEQ ID NO: 2021764 - DNA, 25 bp, Homo sapien
cccgtgggcagagcacaatcagaca

SEQ ID NO: 2021765 - DNA, 25 bp, Homo sapien
ctcttgctcgtaccaggcaggtggc

SEQ ID NO: 2021766 - DNA, 25 bp, Homo sapien
gaaggaaggtggtcctcttgctcgt

SEQ ID NO: 2021767 - DNA, 25 bp, Homo sapien
gaaggtggtcctcttgctcgtacca

SEQ ID NO: 2021768 - DNA, 25 bp, Homo sapien
tggtcctcttgctcgtaccaggcag

SEQ ID NO: 2021769 - DNA, 25 bp, Homo sapien
gtcctcttgatcacaccaggcaggt

SEQ ID NO: 2021770 - DNA, 25 bp, Homo sapien
tgtgagtgcagaaggtggtcctctt

SEQ ID NO: 2021771 - DNA, 25 bp, Homo sapien
tgagtgcagaaggtggtcctcttga

SEQ ID NO: 2021772 - DNA, 25 bp, Homo sapien
accaggcaggtgaccgtggacccca

SEQ ID NO: 2021773 - DNA, 25 bp, Homo sapien
ttcaccagatggcctttcccaagca

SEQ ID NO: 2021774 - DNA, 25 bp, Homo sapien
ctttcaccagatggcctttcccaag

SEQ ID NO: 2021775 - DNA, 25 bp, Homo sapien
gctttcaccagatggcctttcccaa

SEQ ID NO: 2021776 - DNA, 25 bp, Homo sapien
caccagatggcctttcccaagcaag

SEQ ID NO: 2021777 - DNA, 25 bp, Homo sapien
gatgtgttccatccgctgcgtgtcc

SEQ ID NO: 2021778 - DNA, 25 bp, Homo sapien
ttccagtaaaggcatcagagatcaa

SEQ ID NO: 2021779 - DNA, 25 bp, Homo sapien
gcatcagagatcaagacgatgtgtt

SEQ ID NO: 2021780 - DNA, 25 bp, Homo sapien
gatcaagacgatgtgttccatccgc

SEQ ID NO: 2021781 - DNA, 25 bp, Homo sapien
tgccaaggacgcccctgaaggtggc

SEQ ID NO: 2021782 - DNA, 25 bp, Homo sapien
acagacgcatgtctacaacccctgt

SEQ ID NO: 2021783 - DNA, 25 bp, Homo sapien
gcatgtctacaacccctgtttgaac

SEQ ID NO: 2021784 - DNA, 25 bp, Homo sapien
cctgtttgaacagccctggacacct

SEQ ID NO: 2021785 - DNA, 25 bp, Homo sapien
cacagaaacttgattgagtcttttc

SEQ ID NO: 2021786 - DNA, 25 bp, Homo sapien
cagaaacttgattgagtcttttcct

SEQ ID NO: 2021787 - DNA, 25 bp, Homo sapien
gaaacttgattgagtcttttcctcc

SEQ ID NO: 2021788 - DNA, 25 bp, Homo sapien
gacacagaaacttgattgagtcttt

SEQ ID NO: 2021789 - DNA, 25 bp, Homo sapien
cccgagagtgaacccggtggctgtt

SEQ ID NO: 2021790 - DNA, 25 bp, Homo sapien
tgggtatcggtgtgattagatgacc

SEQ ID NO: 2021791 - DNA, 25 bp, Homo sapien
gcagcatcaagcctgccaccaggag

SEQ ID NO: 2021792 - DNA, 25 bp, Homo sapien
acaggacatgcagcatcaagcctgc

SEQ ID NO: 2021793 - DNA, 25 bp, Homo sapien
cctacttagaggcaggcgcttttgc

SEQ ID NO: 2021794 - DNA, 25 bp, Homo sapien
gcgcttttgccccttgcagaaagct

SEQ ID NO: 2021795 - DNA, 25 bp, Homo sapien
ttccattggttataagtatacaaag

SEQ ID NO: 2021796 - DNA, 25 bp, Homo sapien
gaatacttcattagggactttgtcc

SEQ ID NO: 2021797 - DNA, 25 bp, Homo sapien
aagagaatgaccgtcactccagcgg

SEQ ID NO: 2021798 - DNA, 25 bp, Homo sapien
ggtagcgatgccctgattgccatca

SEQ ID NO: 2021799 - DNA, 25 bp, Homo sapien
tccttagggtctgcgttggtgctct

SEQ ID NO: 2021800 - DNA, 25 bp, Homo sapien
taaaagcttttctgcaggtagcgat

SEQ ID NO: 2021801 - DNA, 25 bp, Homo sapien
ggaaactcaactttatgagacaaat

SEQ ID NO: 2021802 - DNA, 25 bp, Homo sapien
tttcttcatagtgtttttaccatta

SEQ ID NO: 2021803 - DNA, 25 bp, Homo sapien
cacttagatctttaagcatggaaca

SEQ ID NO: 2021804 - DNA, 25 bp, Homo sapien
aaataagacttaccacatgttctca

SEQ ID NO: 2021805 - DNA, 25 bp, Homo sapien
tctgttgccaggtttgatcatgagg

SEQ ID NO: 2021806 - DNA, 25 bp, Homo sapien
taaaaggcaagcactgttgtttgtt

SEQ ID NO: 2021807 - DNA, 25 bp, Homo sapien
gaggtaagatgctatatcactgatt

SEQ ID NO: 2021808 - DNA, 25 bp, Homo sapien
ccttgtgtgttttagggctaggctc

SEQ ID NO: 2021809 - DNA, 25 bp, Homo sapien
aaattaaaactgacactgaatacat

SEQ ID NO: 2021810 - DNA, 25 bp, Homo sapien
tgattttcatggactaagcttgatt

SEQ ID NO: 2021811 - DNA, 25 bp, Homo sapien
aaataaattctatttgaacatggtt

SEQ ID NO: 2021812 - DNA, 25 bp, Homo sapien
gatttcatgtcaaatcatatcttcc

SEQ ID NO: 2021813 - DNA, 25 bp, Homo sapien
tgccaaacccttccaaatctgtgct

SEQ ID NO: 2021814 - DNA, 25 bp, Homo sapien
gctggttccccatggccgccatttg

SEQ ID NO: 2021815 - DNA, 25 bp, Homo sapien
atatgctcaggtgttttaattgccc

SEQ ID NO: 2021816 - DNA, 25 bp, Homo sapien
catttgctgactttgagttcacctg

SEQ ID NO: 2021817 - DNA, 25 bp, Homo sapien
aagccatgctgtgtctccgtaacgt

SEQ ID NO: 2021818 - DNA, 25 bp, Homo sapien
ggttctaatcgagtttctatgtctg

SEQ ID NO: 2021819 - DNA, 25 bp, Homo sapien
tgtgtctccgtaacgttgccaccag

SEQ ID NO: 2021820 - DNA, 25 bp, Homo sapien
cagcactggagcactcgggttctaa

SEQ ID NO: 2021821 - DNA, 25 bp, Homo sapien
acttgatcttttcctgaactcaggg

SEQ ID NO: 2021822 - DNA, 25 bp, Homo sapien
gaagtatcatacctccctcccaaat

SEQ ID NO: 2021823 - DNA, 25 bp, Homo sapien
gataaatgcagcagtagtctagtgg

SEQ ID NO: 2021824 - DNA, 25 bp, Homo sapien
tagtggaagtaaaattcaagcctgc

SEQ ID NO: 2021825 - DNA, 25 bp, Homo sapien
taattggagctcagtaggtacccgt

SEQ ID NO: 2021826 - DNA, 25 bp, Homo sapien
cagtgtccatgtggttaaagcacag

SEQ ID NO: 2021827 - DNA, 25 bp, Homo sapien
catacctcttcatggaacaaattgg

SEQ ID NO: 2021828 - DNA, 25 bp, Homo sapien
gatgaagtacggacaaattagccct

SEQ ID NO: 2021829 - DNA, 25 bp, Homo sapien
acatatctattgtaggctgcatgac

SEQ ID NO: 2021830 - DNA, 25 bp, Homo sapien
aatagataccatgtgatcagacggc

SEQ ID NO: 2021831 - DNA, 25 bp, Homo sapien
ccaatcccaaacattggtaacaatg

SEQ ID NO: 2021832 - DNA, 25 bp, Homo sapien
acagttgtgctgtgataagttaaac

SEQ ID NO: 2021833 - DNA, 25 bp, Homo sapien
catctagtttgtgggacccaggcgc

SEQ ID NO: 2021834 - DNA, 25 bp, Homo sapien
tgtgggctcgcaaggcaaactacca

SEQ ID NO: 2021835 - DNA, 25 bp, Homo sapien
ggttgaatccggacgtccctatggc

SEQ ID NO: 2021836 - DNA, 25 bp, Homo sapien
cctgggagaaaacacgactggatgt

SEQ ID NO: 2021837 - DNA, 25 bp, Homo sapien
aaccagggctttgacgggagcacaa

SEQ ID NO: 2021838 - DNA, 25 bp, Homo sapien
aggcttcagtgtgtacttggcgagt

SEQ ID NO: 2021839 - DNA, 25 bp, Homo sapien
ccagggctttgacgggagcacaatg

SEQ ID NO: 2021840 - DNA, 25 bp, Homo sapien
gaaaccagggctttgacgggagcac

SEQ ID NO: 2021841 - DNA, 25 bp, Homo sapien
cacgctgcggggcaatcccaacttt

SEQ ID NO: 2021842 - DNA, 25 bp, Homo sapien
gtctgctccgcgcatccgggctgct

SEQ ID NO: 2021843 - DNA, 25 bp, Homo sapien
aactttcccggcgattttcagagag

SEQ ID NO: 2021844 - DNA, 25 bp, Homo sapien
cactcggcttcagcgaaggtgctct

SEQ ID NO: 2021845 - DNA, 25 bp, Homo sapien
taaaggtaagtcgaccacaggccag

SEQ ID NO: 2021846 - DNA, 25 bp, Homo sapien
tggtccacacgacaggaatagccct

SEQ ID NO: 2021847 - DNA, 25 bp, Homo sapien
gaatagccctcctgaaggtggacgt

SEQ ID NO: 2021848 - DNA, 25 bp, Homo sapien
gaccacaggattctgaccgcaggag

SEQ ID NO: 2021849 - DNA, 25 bp, Homo sapien
agcagtccattctgaggatctcaag

SEQ ID NO: 2021850 - DNA, 25 bp, Homo sapien
ggatctcaagttgttttaatgcaca

SEQ ID NO: 2021851 - DNA, 25 bp, Homo sapien
tttggggagcagtccattctgagga

SEQ ID NO: 2021852 - DNA, 25 bp, Homo sapien
caaaggagaaaggacgagttggaga

SEQ ID NO: 2021853 - DNA, 25 bp, Homo sapien
cgttgatctggggacacgtagctca

SEQ ID NO: 2021854 - DNA, 25 bp, Homo sapien
cttgcccacagtggcttgatatgct

SEQ ID NO: 2021855 - DNA, 25 bp, Homo sapien
gatcttgcccacagtggcttgatat

SEQ ID NO: 2021856 - DNA, 25 bp, Homo sapien
tgattgagccgtgtttccttaggag

SEQ ID NO: 2021857 - DNA, 25 bp, Homo sapien
aagacaaggtgcgacagagccttta

SEQ ID NO: 2021858 - DNA, 25 bp, Homo sapien
cagagcctttagagcgccggcaggc

SEQ ID NO: 2021859 - DNA, 25 bp, Homo sapien
agagcctttagagcgccggcaggcc

SEQ ID NO: 2021860 - DNA, 25 bp, Homo sapien
agagcctttagagcgccggcaggtc

SEQ ID NO: 2021861 - DNA, 25 bp, Homo sapien
agaatgaactactgactcttgcatc

SEQ ID NO: 2021862 - DNA, 25 bp, Homo sapien
tttatgtggtgatcaagaacagaca

SEQ ID NO: 2021863 - DNA, 25 bp, Homo sapien
aggagaatggaaaactaaattgtgt

SEQ ID NO: 2021864 - DNA, 25 bp, Homo sapien
gacgaatgccaggacttactctaaa

SEQ ID NO: 2021865 - DNA, 25 bp, Homo sapien
aagtgttgaatattttcggtgtagt

SEQ ID NO: 2021866 - DNA, 25 bp, Homo sapien
tcggtgtagtgtgtggattcagtca

SEQ ID NO: 2021867 - DNA, 25 bp, Homo sapien
tatatgagctttatagtgtcctctg

SEQ ID NO: 2021868 - DNA, 25 bp, Homo sapien
cagtgcaagaccctctatatgagct

SEQ ID NO: 2021869 - DNA, 25 bp, Homo sapien
ggttgtgtagaagcagataagttca

SEQ ID NO: 2021870 - DNA, 25 bp, Homo sapien
tgtgtagaagcagataagttcatcc

SEQ ID NO: 2021871 - DNA, 25 bp, Homo sapien
ctggttgtgtagaagcagataagtt

SEQ ID NO: 2021872 - DNA, 25 bp, Homo sapien
ttgtgtagaagcagataagttcatc

SEQ ID NO: 2021873 - DNA, 25 bp, Homo sapien
tcagcaatggcagcagggatcattt

SEQ ID NO: 2021874 - DNA, 25 bp, Homo sapien
ctttttcagcaatggcagcagggat

SEQ ID NO: 2021875 - DNA, 25 bp, Homo sapien
gcagcagggatcattttgtctgatg

SEQ ID NO: 2021876 - DNA, 25 bp, Homo sapien
atggcagcagggatcattttgtctg

SEQ ID NO: 2021877 - DNA, 25 bp, Homo sapien
cagatttgacgcataatgctttcaa

SEQ ID NO: 2021878 - DNA, 25 bp, Homo sapien
ccttcaccccgacccattcagggat

SEQ ID NO: 2021879 - DNA, 25 bp, Homo sapien
ctgcagtccctcaagccgatggctt

SEQ ID NO: 2021880 - DNA, 25 bp, Homo sapien
tcagggatctttcctcctaatgccg

SEQ ID NO: 2021881 - DNA, 25 bp, Homo sapien
gggagtgaaaaatccttttatcatc

SEQ ID NO: 2021882 - DNA, 25 bp, Homo sapien
ggagtgaaaaatccttttatcatct

SEQ ID NO: 2021883 - DNA, 25 bp, Homo sapien
gagtgaaaaatccttttatcatctt

SEQ ID NO: 2021884 - DNA, 25 bp, Homo sapien
cagggagtgaaaaatccttttatca

SEQ ID NO: 2021885 - DNA, 25 bp, Homo sapien
tgacagagccgcaggtgagaataaa

SEQ ID NO: 2021886 - DNA, 25 bp, Homo sapien
tcttcgtcctccacattgagaaggc

SEQ ID NO: 2021887 - DNA, 25 bp, Homo sapien
acgtgatcgagccttgagttcccgc

SEQ ID NO: 2021888 - DNA, 25 bp, Homo sapien
tgagaaggctcttggacgtgatcga

SEQ ID NO: 2021889 - DNA, 25 bp, Homo sapien
aggagtctgctgagatctgaaggat

SEQ ID NO: 2021890 - DNA, 25 bp, Homo sapien
ctggaggagtctgctgagatctgaa

SEQ ID NO: 2021891 - DNA, 25 bp, Homo sapien
gaggagtctgctgagatctgaagga

SEQ ID NO: 2021892 - DNA, 25 bp, Homo sapien
gagtctgctgagatctgaaggatga

SEQ ID NO: 2021893 - DNA, 25 bp, Homo sapien
ggccgctgtatttagatttgtgcat

SEQ ID NO: 2021894 - DNA, 25 bp, Homo sapien
ccaggtacacctggccgctgtattt

SEQ ID NO: 2021895 - DNA, 25 bp, Homo sapien
cgagttgtttgtgcactgattgcca

SEQ ID NO: 2021896 - DNA, 25 bp, Homo sapien
tgcactgattgccaggtacacctgg

SEQ ID NO: 2021897 - DNA, 25 bp, Homo sapien
taaccactgaagaggctttggaaac

SEQ ID NO: 2021898 - DNA, 25 bp, Homo sapien
cctcctgcacacaattcagccctgt

SEQ ID NO: 2021899 - DNA, 25 bp, Homo sapien
ctgtaaccactgaagaggctttgga

SEQ ID NO: 2021900 - DNA, 25 bp, Homo sapien
tcctcctgcacacaattcagccctg

SEQ ID NO: 2021901 - DNA, 25 bp, Homo sapien
tcttcctgctctattgctggctgct

SEQ ID NO: 2021902 - DNA, 25 bp, Homo sapien
ccatggtgcacttgtgtgtagggat

SEQ ID NO: 2021903 - DNA, 25 bp, Homo sapien
gaggcctctttaagcccatggtgca

SEQ ID NO: 2021904 - DNA, 25 bp, Homo sapien
gtagggatgagcgtctcacggccca

SEQ ID NO: 2021905 - DNA, 25 bp, Homo sapien
aatttggagtcgtcaacattgtaga

SEQ ID NO: 2021906 - DNA, 25 bp, Homo sapien
tgctgtgagtccagtttcgtgcttc

SEQ ID NO: 2021907 - DNA, 25 bp, Homo sapien
gaaaatttggagtcgtcaacattgt

SEQ ID NO: 2021908 - DNA, 25 bp, Homo sapien
tcatgaaaatttggagtcgtcaaca

SEQ ID NO: 2021909 - DNA, 25 bp, Homo sapien
aagatatagtccagtgctgctgttg

SEQ ID NO: 2021910 - DNA, 25 bp, Homo sapien
atgaagatatagtccagtgctgctg

SEQ ID NO: 2021911 - DNA, 25 bp, Homo sapien
atagtccagtgctgctgttgaagtg

SEQ ID NO: 2021912 - DNA, 25 bp, Homo sapien
gatatagtccagtgctgctgttgaa

SEQ ID NO: 2021913 - DNA, 25 bp, Homo sapien
tgacagaacccaggtggccgctctt

SEQ ID NO: 2021914 - DNA, 25 bp, Homo sapien
cgtgacagaacccaggtggccgctc

SEQ ID NO: 2021915 - DNA, 25 bp, Homo sapien
ggccgctcttgacccattccttctg

SEQ ID NO: 2021916 - DNA, 25 bp, Homo sapien
acagaacccaggtggccgctcttga

SEQ ID NO: 2021917 - DNA, 25 bp, Homo sapien
aacattcagagatcgactggaccgc

SEQ ID NO: 2021918 - DNA, 25 bp, Homo sapien
ctggaccgccgccggcaggaactta

SEQ ID NO: 2021919 - DNA, 25 bp, Homo sapien
attcagagatcgactggaccgccgc

SEQ ID NO: 2021920 - DNA, 25 bp, Homo sapien
tcaacattcagagatcgactggacc

SEQ ID NO: 2021921 - DNA, 25 bp, Homo sapien
ggtggtcgggcttcacaagtcccat

SEQ ID NO: 2021922 - DNA, 25 bp, Homo sapien
gggtggtcgggcttcacaagtccca

SEQ ID NO: 2021923 - DNA, 25 bp, Homo sapien
ccttcaacctcttgcattgtgggta

SEQ ID NO: 2021924 - DNA, 25 bp, Homo sapien
ttcatggaaatccagagcaactctt

SEQ ID NO: 2021925 - DNA, 25 bp, Homo sapien
ctcttcttcagggaaagttgggcac

SEQ ID NO: 2021926 - DNA, 25 bp, Homo sapien
ctcttgcattgtgggtaataatacc

SEQ ID NO: 2021927 - DNA, 25 bp, Homo sapien
aagaatgtttggatgtctgattcat

SEQ ID NO: 2021928 - DNA, 25 bp, Homo sapien
gaagaatgtttggatgtctgattca

SEQ ID NO: 2021929 - DNA, 25 bp, Homo sapien
ctgaagaatgtttggatgtctgatt

SEQ ID NO: 2021930 - DNA, 25 bp, Homo sapien
tgaagaatgtttggatgtctgattc

SEQ ID NO: 2021931 - DNA, 25 bp, Homo sapien
tcatgcgacacgaaaatacagcaaa

SEQ ID NO: 2021932 - DNA, 25 bp, Homo sapien
ctcgtttcttttgcattccgtgtgc

SEQ ID NO: 2021933 - DNA, 25 bp, Homo sapien
caaaactcgtttcttttgcattccg

SEQ ID NO: 2021934 - DNA, 25 bp, Homo sapien
taaggaatagaaatgaatgcttcat

SEQ ID NO: 2021935 - DNA, 25 bp, Homo sapien
tttaattgaacagaaaatgctgcta

SEQ ID NO: 2021936 - DNA, 25 bp, Homo sapien
ttaattgaacagaaaatgctgctag

SEQ ID NO: 2021937 - DNA, 25 bp, Homo sapien
ctttaattgaacagaaaatgctgct

SEQ ID NO: 2021938 - DNA, 25 bp, Homo sapien
ctgctgcgggccttgatggagcaat

SEQ ID NO: 2021939 - DNA, 25 bp, Homo sapien
gagcaatttgtaagctccttctcca

SEQ ID NO: 2021940 - DNA, 25 bp, Homo sapien
cgggccttgatggagcaatttgtaa

SEQ ID NO: 2021941 - DNA, 25 bp, Homo sapien
ccttgatggagcaatttgtaagctc

SEQ ID NO: 2021942 - DNA, 25 bp, Homo sapien
ggatcaatagctggccggccgcaga

SEQ ID NO: 2021943 - DNA, 25 bp, Homo sapien
tgcctgtggaattcccattaactgc

SEQ ID NO: 2021944 - DNA, 25 bp, Homo sapien
gaattcccattaactgcatcactga

SEQ ID NO: 2021945 - DNA, 25 bp, Homo sapien
agagctggatcaatagctggccggc

SEQ ID NO: 2021946 - DNA, 25 bp, Homo sapien
gcctgctgaaacagccggctatttt

SEQ ID NO: 2021947 - DNA, 25 bp, Homo sapien
aattgagcagatttattgccatctc

SEQ ID NO: 2021948 - DNA, 25 bp, Homo sapien
tagcagtgaaaaacggattggtaat

SEQ ID NO: 2021949 - DNA, 25 bp, Homo sapien
gctggtaatccattgttaaacatca

SEQ ID NO: 2021950 - DNA, 25 bp, Homo sapien
gcttgtactttatgctgacttagaa

SEQ ID NO: 2021951 - DNA, 25 bp, Homo sapien
ttagaaatggtcctgccacatcctc

SEQ ID NO: 2021952 - DNA, 25 bp, Homo sapien
gctgacttagaaatggtcctgccac

SEQ ID NO: 2021953 - DNA, 25 bp, Homo sapien
tgtgtcctgcttgtactttatgctg

SEQ ID NO: 2021954 - DNA, 25 bp, Homo sapien
caacttgggaagaattagacaaaat

SEQ ID NO: 2021955 - DNA, 25 bp, Homo sapien
tacactcatcaacaacttgggaaga

SEQ ID NO: 2021956 - DNA, 25 bp, Homo sapien
agaattagacaaaatgaggctcttt

SEQ ID NO: 2021957 - DNA, 25 bp, Homo sapien
ccactacactcatcaacaacttggg

SEQ ID NO: 2021958 - DNA, 25 bp, Homo sapien
attggcatatcaagagcaggtgcat

SEQ ID NO: 2021959 - DNA, 25 bp, Homo sapien
agcaggactgcgcaataactgtggt

SEQ ID NO: 2021960 - DNA, 25 bp, Homo sapien
gactgcgcaataactgtggtttcct

SEQ ID NO: 2021961 - DNA, 25 bp, Homo sapien
ttctcctgtgtctttaggacgggcc

SEQ ID NO: 2021962 - DNA, 25 bp, Homo sapien
gccagactgttgcatttgaagaact

SEQ ID NO: 2021963 - DNA, 25 bp, Homo sapien
tgggtggtaaataaaaatgaccaga

SEQ ID NO: 2021964 - DNA, 25 bp, Homo sapien
tgaccagaaacaagtcaacacagac

SEQ ID NO: 2021965 - DNA, 25 bp, Homo sapien
aaatgaccagaaacaagtcaacaca

SEQ ID NO: 2021966 - DNA, 25 bp, Homo sapien
ccagaaacaagtcaacacagacttt

SEQ ID NO: 2021967 - DNA, 25 bp, Homo sapien
gcaccgcacctgagcgcataaggag

SEQ ID NO: 2021968 - DNA, 25 bp, Homo sapien
ggagctccagtgttcaaatataggt

SEQ ID NO: 2021969 - DNA, 25 bp, Homo sapien
tataggttcatacatgtgcatttgt

SEQ ID NO: 2021970 - DNA, 25 bp, Homo sapien
gcgcataaggagctccagtgttcaa

SEQ ID NO: 2021971 - DNA, 25 bp, Homo sapien
gataggaataatcttaccaactgag

SEQ ID NO: 2021972 - DNA, 25 bp, Homo sapien
cagcagttttgaattcatcgtcgca

SEQ ID NO: 2021973 - DNA, 25 bp, Homo sapien
gagtaaagccccttgactgctctta

SEQ ID NO: 2021974 - DNA, 25 bp, Homo sapien
cctatacactccactttgtcagcag

SEQ ID NO: 2021975 - DNA, 25 bp, Homo sapien
taacatgttgggagcctatcaagcc

SEQ ID NO: 2021976 - DNA, 25 bp, Homo sapien
aaaatccgagcaggatagcaagtgg

SEQ ID NO: 2021977 - DNA, 25 bp, Homo sapien
taagagtcgagatcctgattcagag

SEQ ID NO: 2021978 - DNA, 25 bp, Homo sapien
tgctagccagtaatgaagtggcccg

SEQ ID NO: 2021979 - DNA, 25 bp, Homo sapien
aagacagacaatggcggcaaagcca

SEQ ID NO: 2021980 - DNA, 25 bp, Homo sapien
acagacaatggcggcaaagccagcc

SEQ ID NO: 2021981 - DNA, 25 bp, Homo sapien
atgaaagacagacaatggcggcaaa

SEQ ID NO: 2021982 - DNA, 25 bp, Homo sapien
gaaagacagacaatggcggcaaagc

SEQ ID NO: 2021983 - DNA, 25 bp, Homo sapien
ctccagcgatcagccatcccccatc

SEQ ID NO: 2021984 - DNA, 25 bp, Homo sapien
gtactccagcgatcagccatccccc

SEQ ID NO: 2021985 - DNA, 25 bp, Homo sapien
tgtactccagcgatcagccatcccc

SEQ ID NO: 2021986 - DNA, 25 bp, Homo sapien
actccagcgatcagccatcccccat

SEQ ID NO: 2021987 - DNA, 25 bp, Homo sapien
ttggtttcttaatctcaggtccaaa

SEQ ID NO: 2021988 - DNA, 25 bp, Homo sapien
ttggtggctgatctcacctgagcct

SEQ ID NO: 2021989 - DNA, 25 bp, Homo sapien
tggtggctgatctcacctgagcctc

SEQ ID NO: 2021990 - DNA, 25 bp, Homo sapien
agcctccttggtggctgatctcacc

SEQ ID NO: 2021991 - DNA, 25 bp, Homo sapien
cttggtggctgatctcacctgagcc

SEQ ID NO: 2021992 - DNA, 25 bp, Homo sapien
agagaggacacttagggcactgggc

SEQ ID NO: 2021993 - DNA, 25 bp, Homo sapien
tcttcctgtggaacgggtgtcggcc

SEQ ID NO: 2021994 - DNA, 25 bp, Homo sapien
tgggtggcgtctcaggaggagctgg

SEQ ID NO: 2021995 - DNA, 25 bp, Homo sapien
ggtgtcggccttcgaaagcaggtgg

SEQ ID NO: 2021996 - DNA, 25 bp, Homo sapien
agaaagatgtggaaacggaagctcc

SEQ ID NO: 2021997 - DNA, 25 bp, Homo sapien
gggttttgccgatggaagctgagtc

SEQ ID NO: 2021998 - DNA, 25 bp, Homo sapien
gatgtggaaacggaagctccctgtc

SEQ ID NO: 2021999 - DNA, 25 bp, Homo sapien
caaacttgggtgggttttgccgatg

SEQ ID NO: 2022000 - DNA, 25 bp, Homo sapien
caatggcccgggtcacatataagtc

SEQ ID NO: 2022001 - DNA, 25 bp, Homo sapien
gcagaacctcgggacaggtgagcac

SEQ ID NO: 2022002 - DNA, 25 bp, Homo sapien
caccaactgtgatctgcatgcggcc

SEQ ID NO: 2022003 - DNA, 25 bp, Homo sapien
gactttgccgtgaatgtgcctctca

SEQ ID NO: 2022004 - DNA, 25 bp, Homo sapien
accatcgtcccctgttccttccagg

SEQ ID NO: 2022005 - DNA, 25 bp, Homo sapien
agctcctcctcggttcttggggcca

SEQ ID NO: 2022006 - DNA, 25 bp, Homo sapien
ttccttccaggcagtgggccccgag

SEQ ID NO: 2022007 - DNA, 25 bp, Homo sapien
cccggagaagcccactcctgaacac

SEQ ID NO: 2022008 - DNA, 25 bp, Homo sapien
atcagggcatcagcttgctccgcag

SEQ ID NO: 2022009 - DNA, 25 bp, Homo sapien
tacgcgaatggagctcagaacgtct

SEQ ID NO: 2022010 - DNA, 25 bp, Homo sapien
tctgaggtattgtcttcaagggcaa

SEQ ID NO: 2022011 - DNA, 25 bp, Homo sapien
gcagggcaacatcgcatctgaggta

SEQ ID NO: 2022012 - DNA, 25 bp, Homo sapien
tctcagctcgcaaggccctgttgtg

SEQ ID NO: 2022013 - DNA, 25 bp, Homo sapien
aatctgacagaagaagacctggacc

SEQ ID NO: 2022014 - DNA, 25 bp, Homo sapien
gttgtgggaactgaagtcgatggag

SEQ ID NO: 2022015 - DNA, 25 bp, Homo sapien
aactgaagtcgatggagttggaatc

SEQ ID NO: 2022016 - DNA, 25 bp, Homo sapien
gaaaccaagatgtgcccattcgaac

SEQ ID NO: 2022017 - DNA, 25 bp, Homo sapien
tctcccgcggatccaggttctggtg

SEQ ID NO: 2022018 - DNA, 25 bp, Homo sapien
tcttgcaaactggtgtacatccggg

SEQ ID NO: 2022019 - DNA, 25 bp, Homo sapien
cattcgaacatcaagactgggctcc

SEQ ID NO: 2022020 - DNA, 25 bp, Homo sapien
ctgtgggccgcgcagccccttcctc

SEQ ID NO: 2022021 - DNA, 25 bp, Homo sapien
taaggcccgcggctttgctcagagt

SEQ ID NO: 2022022 - DNA, 25 bp, Homo sapien
cggaagtggcgtccccgctcagtgt

SEQ ID NO: 2022023 - DNA, 25 bp, Homo sapien
tctcttagcaggtgtcggcactggg

SEQ ID NO: 2022024 - DNA, 25 bp, Homo sapien
gggtttagcccgcaatgcaccgtct

SEQ ID NO: 2022025 - DNA, 25 bp, Homo sapien
ccctgttggtcagatgttctatcgg

SEQ ID NO: 2022026 - DNA, 25 bp, Homo sapien
gtccctgttggtcagatgttctatc

SEQ ID NO: 2022027 - DNA, 25 bp, Homo sapien
tggtcagatgttctatcggtcacat

SEQ ID NO: 2022028 - DNA, 25 bp, Homo sapien
atgacactggtgtccctgttggtca

SEQ ID NO: 2022029 - DNA, 25 bp, Homo sapien
caggtgaaagccgtcgtaggattca

SEQ ID NO: 2022030 - DNA, 25 bp, Homo sapien
atgttttcagtgtgaggcctagctt

SEQ ID NO: 2022031 - DNA, 25 bp, Homo sapien
gcacacaggtgaaagccgtcgtagg

SEQ ID NO: 2022032 - DNA, 25 bp, Homo sapien
tctctgacaggaggctataagcaca

SEQ ID NO: 2022033 - DNA, 25 bp, Homo sapien
cagggtgagagcgacttcagtgttt

SEQ ID NO: 2022034 - DNA, 25 bp, Homo sapien
ttcagggtgagagcgacttcagtgt

SEQ ID NO: 2022035 - DNA, 25 bp, Homo sapien
ggtgagagcgacttcagtgtttcta

SEQ ID NO: 2022036 - DNA, 25 bp, Homo sapien
ccttcagggtgagagcgacttcagt

SEQ ID NO: 2022037 - DNA, 25 bp, Homo sapien
cacggtcttcagatgtgaccaacag

SEQ ID NO: 2022038 - DNA, 25 bp, Homo sapien
tgattcatcacggtcttcagatgtg

SEQ ID NO: 2022039 - DNA, 25 bp, Homo sapien
ggtcttcagatgtgaccaacagcat

SEQ ID NO: 2022040 - DNA, 25 bp, Homo sapien
tcatcacggtcttcagatgtgacca

SEQ ID NO: 2022041 - DNA, 25 bp, Homo sapien
tgtttttcagagtggggatgtaaga

SEQ ID NO: 2022042 - DNA, 25 bp, Homo sapien
gtctcaaattggtgacagatgaatt

SEQ ID NO: 2022043 - DNA, 25 bp, Homo sapien
gtaagaatttacaggaagtctcaaa

SEQ ID NO: 2022044 - DNA, 25 bp, Homo sapien
tcagagtggggatgtaagaatttac

SEQ ID NO: 2022045 - DNA, 25 bp, Homo sapien
caccttcctcattttgcccatttct

SEQ ID NO: 2022046 - DNA, 25 bp, Homo sapien
ggagctgcctttgctagtaagcctg

SEQ ID NO: 2022047 - DNA, 25 bp, Homo sapien
cctcgacatctatgccagggctgct

SEQ ID NO: 2022048 - DNA, 25 bp, Homo sapien
ttcatccacgctcggtagctgaagg

SEQ ID NO: 2022049 - DNA, 25 bp, Homo sapien
ctaaggtactgtgtgagagctagaa

SEQ ID NO: 2022050 - DNA, 25 bp, Homo sapien
tctggtcagcgtcatcggtgcagct

SEQ ID NO: 2022051 - DNA, 25 bp, Homo sapien
ggtcagcgtcatcggtgcagctgat

SEQ ID NO: 2022052 - DNA, 25 bp, Homo sapien
tcagcgtcatcggtgcagctgatgc

SEQ ID NO: 2022053 - DNA, 25 bp, Homo sapien
ctggtcagcgtcatcggtgcagctg

SEQ ID NO: 2022054 - DNA, 25 bp, Homo sapien
tgaaaaacttgtacgtaaagctgga

SEQ ID NO: 2022055 - DNA, 25 bp, Homo sapien
cggttctggagcctggtagtggcct

SEQ ID NO: 2022056 - DNA, 25 bp, Homo sapien
agtgaaaaacttgtacgtaaagctg

SEQ ID NO: 2022057 - DNA, 25 bp, Homo sapien
aagtcgttctggaaaagcggttctg

SEQ ID NO: 2022058 - DNA, 25 bp, Homo sapien
agagcctttgcgttgccgtggccgc

SEQ ID NO: 2022059 - DNA, 25 bp, Homo sapien
tctctgcaagcagtcggtgttctaa

SEQ ID NO: 2022060 - DNA, 25 bp, Homo sapien
cggtgttctaagctgtcacaagaga

SEQ ID NO: 2022061 - DNA, 25 bp, Homo sapien
gccgccagctgtgaacgccgatcat

SEQ ID NO: 2022062 - DNA, 25 bp, Homo sapien
tcttgttattactgaatttcctaac

SEQ ID NO: 2022063 - DNA, 25 bp, Homo sapien
tcaaaggatgctgtttttcttgtta

SEQ ID NO: 2022064 - DNA, 25 bp, Homo sapien
aggatgctgtttttcttgttattac

SEQ ID NO: 2022065 - DNA, 25 bp, Homo sapien
gctgtttttcttgttattactgaat

SEQ ID NO: 2022066 - DNA, 25 bp, Homo sapien
tcagaatcaccataggtgccgataa

SEQ ID NO: 2022067 - DNA, 25 bp, Homo sapien
ttggtaatgacttttagaagttcca

SEQ ID NO: 2022068 - DNA, 25 bp, Homo sapien
catttggtaatgacttttagaagtt

SEQ ID NO: 2022069 - DNA, 25 bp, Homo sapien
cataggtgccgataaaattttaagg

SEQ ID NO: 2022070 - DNA, 25 bp, Homo sapien
ggcttcacattcatattttaagatt

SEQ ID NO: 2022071 - DNA, 25 bp, Homo sapien
tattttaagattccatcaggaacct

SEQ ID NO: 2022072 - DNA, 25 bp, Homo sapien
gcttcacattcatattttaagattc

SEQ ID NO: 2022073 - DNA, 25 bp, Homo sapien
tcatattttaagattccatcaggaa

SEQ ID NO: 2022074 - DNA, 25 bp, Homo sapien
tgctgtagatcccgttcattcccat

SEQ ID NO: 2022075 - DNA, 25 bp, Homo sapien
ttgctgtagatcccgttcattccca

SEQ ID NO: 2022076 - DNA, 25 bp, Homo sapien
ccttgctgtagatcccgttcattcc

SEQ ID NO: 2022077 - DNA, 25 bp, Homo sapien
cttgctgtagatcccgttcattccc

SEQ ID NO: 2022078 - DNA, 25 bp, Homo sapien
ctggcttctgatcccgagccctcct

SEQ ID NO: 2022079 - DNA, 25 bp, Homo sapien
tggcttctgatcccgagccctcctt

SEQ ID NO: 2022080 - DNA, 25 bp, Homo sapien
acctggcttctgatcccgagccctc

SEQ ID NO: 2022081 - DNA, 25 bp, Homo sapien
ccacctggcttctgatcccgagccc

SEQ ID NO: 2022082 - DNA, 25 bp, Homo sapien
ccatcgtgacaacaatcacatccac

SEQ ID NO: 2022083 - DNA, 25 bp, Homo sapien
gaggtcgaacatcacggtctgccct

SEQ ID NO: 2022084 - DNA, 25 bp, Homo sapien
tttggaatgaggtcgaacatcacgg

SEQ ID NO: 2022085 - DNA, 25 bp, Homo sapien
tcactaggctctttggaatgaggtc

SEQ ID NO: 2022086 - DNA, 25 bp, Homo sapien
gagctgttcagcatgaggcgactca

SEQ ID NO: 2022087 - DNA, 25 bp, Homo sapien
tgaggattcaggagcgcgactttcg

SEQ ID NO: 2022088 - DNA, 25 bp, Homo sapien
gagggtatccttccttgctgcagcg

SEQ ID NO: 2022089 - DNA, 25 bp, Homo sapien
gaccctaataggtggtgccaacaca

SEQ ID NO: 2022090 - DNA, 25 bp, Homo sapien
gtgagcaactgaagacaagtggaga

SEQ ID NO: 2022091 - DNA, 25 bp, Homo sapien
tcctgggtctgtgcacgctgtctct

SEQ ID NO: 2022092 - DNA, 25 bp, Homo sapien
cctgggtctgtgcacgctgtctctg

SEQ ID NO: 2022093 - DNA, 25 bp, Homo sapien
ctcagtgagcaactgaagacaagtg

SEQ ID NO: 2022094 - DNA, 25 bp, Homo sapien
tggcctccacagtgacgagcaaacc

SEQ ID NO: 2022095 - DNA, 25 bp, Homo sapien
ttcaaagcgcccacagttgagaggg

SEQ ID NO: 2022096 - DNA, 25 bp, Homo sapien
aagcatgagccccactttcaaagcg

SEQ ID NO: 2022097 - DNA, 25 bp, Homo sapien
accccagaagcatagtgtacacgtg

SEQ ID NO: 2022098 - DNA, 25 bp, Homo sapien
taaacatgctcgtgccggagaggag

SEQ ID NO: 2022099 - DNA, 25 bp, Homo sapien
caactggcagggacagttacaatcc

SEQ ID NO: 2022100 - DNA, 25 bp, Homo sapien
caaaggctgcagatggatgccaccg

SEQ ID NO: 2022101 - DNA, 25 bp, Homo sapien
ttcaggagaccacgataaacatgct

SEQ ID NO: 2022102 - DNA, 25 bp, Homo sapien
tgttgaaattgctccccggcaatgc

SEQ ID NO: 2022103 - DNA, 25 bp, Homo sapien
cgaattaaatcagccctttgttgaa

SEQ ID NO: 2022104 - DNA, 25 bp, Homo sapien
gaagttatagtctgcagccctcggc

SEQ ID NO: 2022105 - DNA, 25 bp, Homo sapien
tccccggcaatgcacatcatatcat

SEQ ID NO: 2022106 - DNA, 25 bp, Homo sapien
ttgtcacccccagacattcggcagt

SEQ ID NO: 2022107 - DNA, 25 bp, Homo sapien
ttcggcagtccgtttccgaactctc

SEQ ID NO: 2022108 - DNA, 25 bp, Homo sapien
ccagacattcggcagtccgtttccg

SEQ ID NO: 2022109 - DNA, 25 bp, Homo sapien
gacattcggcagtccgtttccgaac

SEQ ID NO: 2022110 - DNA, 25 bp, Homo sapien
ttctcctgaagacgcatcctcccat

SEQ ID NO: 2022111 - DNA, 25 bp, Homo sapien
tgaagacgcatcctcccatctgtgt

SEQ ID NO: 2022112 - DNA, 25 bp, Homo sapien
gttcccgtatgcaaaggagaggata

SEQ ID NO: 2022113 - DNA, 25 bp, Homo sapien
ggagaggatattttcaggccatttc

SEQ ID NO: 2022114 - DNA, 25 bp, Homo sapien
gattgtccccctctccagaactgtt

SEQ ID NO: 2022115 - DNA, 25 bp, Homo sapien
ccctagctccagaactgttcccctt

SEQ ID NO: 2022116 - DNA, 25 bp, Homo sapien
ctccaagattgtccccctctccaga

SEQ ID NO: 2022117 - DNA, 25 bp, Homo sapien
tcctctccaagattgtccccctctc

SEQ ID NO: 2022118 - DNA, 25 bp, Homo sapien
agcaccacgggtattgcgggtggca

SEQ ID NO: 2022119 - DNA, 25 bp, Homo sapien
cggtgggcagggtgcaatgtgctgt

SEQ ID NO: 2022120 - DNA, 25 bp, Homo sapien
caccagcaccacgggtattgcgggt

SEQ ID NO: 2022121 - DNA, 25 bp, Homo sapien
gcaatgtgctgttgacagcctttgt

SEQ ID NO: 2022122 - DNA, 25 bp, Homo sapien
catgcgaataatggccaggcagaca

SEQ ID NO: 2022123 - DNA, 25 bp, Homo sapien
gcagaaatcgtatgtggcccagaat

SEQ ID NO: 2022124 - DNA, 25 bp, Homo sapien
ttgtgcatacggaggtgaccaccac

SEQ ID NO: 2022125 - DNA, 25 bp, Homo sapien
tactgaacacgccttcagctgtgca

SEQ ID NO: 2022126 - DNA, 25 bp, Homo sapien
tccattgcacacagaacacacgagg

SEQ ID NO: 2022127 - DNA, 25 bp, Homo sapien
ttgtcctgtgtttttccattgcaca

SEQ ID NO: 2022128 - DNA, 25 bp, Homo sapien
cacagaacacacgagggtcactctc

SEQ ID NO: 2022129 - DNA, 25 bp, Homo sapien
ttgcacacagaacacacgagggtca

SEQ ID NO: 2022130 - DNA, 25 bp, Homo sapien
cgtgtactgcctgaagccgagccat

SEQ ID NO: 2022131 - DNA, 25 bp, Homo sapien
acgccactgccgtgtactgcctgaa

SEQ ID NO: 2022132 - DNA, 25 bp, Homo sapien
aggaccaagtccagagtcagagaga

SEQ ID NO: 2022133 - DNA, 25 bp, Homo sapien
cagggcacgccactgccgtgtactg

SEQ ID NO: 2022134 - DNA, 25 bp, Homo sapien
cacctgacatttcaacccgcaaagg

SEQ ID NO: 2022135 - DNA, 25 bp, Homo sapien
aagggctggccgcttggcatttcaa

SEQ ID NO: 2022136 - DNA, 25 bp, Homo sapien
agggacccactgtctcaagcgagga

SEQ ID NO: 2022137 - DNA, 25 bp, Homo sapien
ccagtgtctcaagtgaggaagctcc

SEQ ID NO: 2022138 - DNA, 25 bp, Homo sapien
tcctgccacagcgaaaatctatcgg

SEQ ID NO: 2022139 - DNA, 25 bp, Homo sapien
tcggcaactgcttaaaatttagggc

SEQ ID NO: 2022140 - DNA, 25 bp, Homo sapien
gagtttcctactgaaggcgccttct

SEQ ID NO: 2022141 - DNA, 25 bp, Homo sapien
cagttttaaccctggtgtgctgcat

SEQ ID NO: 2022142 - DNA, 25 bp, Homo sapien
gatacgttgacacagcatgcacaca

SEQ ID NO: 2022143 - DNA, 25 bp, Homo sapien
aagggttgtcttagcgcctggtact

SEQ ID NO: 2022144 - DNA, 25 bp, Homo sapien
cacacatacgattctggaataatct

SEQ ID NO: 2022145 - DNA, 25 bp, Homo sapien
tagtgataccgaaagggttgtctta

SEQ ID NO: 2022146 - DNA, 25 bp, Homo sapien
gccgggctgttcaggacccacacag

SEQ ID NO: 2022147 - DNA, 25 bp, Homo sapien
aggacccacacagctcggagggtga

SEQ ID NO: 2022148 - DNA, 25 bp, Homo sapien
ggccgggctgttcaggacccacaca

SEQ ID NO: 2022149 - DNA, 25 bp, Homo sapien
acacagctcggagggtgatgctcat

SEQ ID NO: 2022150 - DNA, 25 bp, Homo sapien
tgaaggattgttccgcactctcccc

SEQ ID NO: 2022151 - DNA, 25 bp, Homo sapien
tgcaagtggagctacctgctagcct

SEQ ID NO: 2022152 - DNA, 25 bp, Homo sapien
tgaaaactccgacatccagaggacc

SEQ ID NO: 2022153 - DNA, 25 bp, Homo sapien
aaacccacgatgcagggtcttgctg

SEQ ID NO: 2022154 - DNA, 25 bp, Homo sapien
atctcctctgtgtcatttcaatttc

SEQ ID NO: 2022155 - DNA, 25 bp, Homo sapien
tcctctgtgtcatttcaatttcagt

SEQ ID NO: 2022156 - DNA, 25 bp, Homo sapien
atttcagtatatgtgctggcaaaga

SEQ ID NO: 2022157 - DNA, 25 bp, Homo sapien
tcagtatatgtgctggcaaagagag

SEQ ID NO: 2022158 - DNA, 25 bp, Homo sapien
aattcccagccggtccagtggaagt

SEQ ID NO: 2022159 - DNA, 25 bp, Homo sapien
gcaagacggaaattcccagccggtc

SEQ ID NO: 2022160 - DNA, 25 bp, Homo sapien
tgggcaagacggaaattcccagccg

SEQ ID NO: 2022161 - DNA, 25 bp, Homo sapien
gagttgggcaagacggaaattccca

SEQ ID NO: 2022162 - DNA, 25 bp, Homo sapien
tgtttccaacttggcgtctgtagga

SEQ ID NO: 2022163 - DNA, 25 bp, Homo sapien
aagttttgggagcatgtttccaact

SEQ ID NO: 2022164 - DNA, 25 bp, Homo sapien
caacttggcgtctgtaggatcattg

SEQ ID NO: 2022165 - DNA, 25 bp, Homo sapien
gttttgggagcatgtttccaacttg

SEQ ID NO: 2022166 - DNA, 25 bp, Homo sapien
tagagaaggacgtgggtggaatacc

SEQ ID NO: 2022167 - DNA, 25 bp, Homo sapien
gacgtgggtggaataccaagtccat

SEQ ID NO: 2022168 - DNA, 25 bp, Homo sapien
tcaccgcagcatttagagaaggacg

SEQ ID NO: 2022169 - DNA, 25 bp, Homo sapien
actgtgtcaccgcagcatttagaga

SEQ ID NO: 2022170 - DNA, 25 bp, Homo sapien
cacaaaagggctgaggcgccttcgg

SEQ ID NO: 2022171 - DNA, 25 bp, Homo sapien
gactggatggagtcagacttgcaga

SEQ ID NO: 2022172 - DNA, 25 bp, Homo sapien
gaaggcagcagaagttactggtaga

SEQ ID NO: 2022173 - DNA, 25 bp, Homo sapien
tccttccgtgttgttcatatcagca

SEQ ID NO: 2022174 - DNA, 25 bp, Homo sapien
cagcacaagccacgtgcgatcccag

SEQ ID NO: 2022175 - DNA, 25 bp, Homo sapien
tccagcacaagccacgtgcgatccc

SEQ ID NO: 2022176 - DNA, 25 bp, Homo sapien
attccagcacaagccacgtgcgatc

SEQ ID NO: 2022177 - DNA, 25 bp, Homo sapien
caattccagcacaagccacgtgcga

SEQ ID NO: 2022178 - DNA, 25 bp, Homo sapien
gcggagtcctgtccatttcgccggg

SEQ ID NO: 2022179 - DNA, 25 bp, Homo sapien
cggccacacaggtgcggagtcctgt

SEQ ID NO: 2022180 - DNA, 25 bp, Homo sapien
ttcgccggggtctgatccctggcca

SEQ ID NO: 2022181 - DNA, 25 bp, Homo sapien
tttcagctgtggttccgacctcagg

SEQ ID NO: 2022182 - DNA, 25 bp, Homo sapien
gagttgcttttcatcacacggtggg

SEQ ID NO: 2022183 - DNA, 25 bp, Homo sapien
cctagatgggacttcacacggatgc

SEQ ID NO: 2022184 - DNA, 25 bp, Homo sapien
cagggcagcttggtacacatttgca

SEQ ID NO: 2022185 - DNA, 25 bp, Homo sapien
taaaataccgctctgaacagggcag

SEQ ID NO: 2022186 - DNA, 25 bp, Homo sapien
caatgcccaaggatgtgcacatcat

SEQ ID NO: 2022187 - DNA, 25 bp, Homo sapien
cacgctgaactcagttacttccaat

SEQ ID NO: 2022188 - DNA, 25 bp, Homo sapien
tcatcaagctctgtggcacgctgaa

SEQ ID NO: 2022189 - DNA, 25 bp, Homo sapien
ctgtgtacgtggcaaaggcacaaaa

SEQ ID NO: 2022190 - DNA, 25 bp, Homo sapien
catcaggaattggttgatcagaccc

SEQ ID NO: 2022191 - DNA, 25 bp, Homo sapien
ggcttgcagcttccaaggcggaact

SEQ ID NO: 2022192 - DNA, 25 bp, Homo sapien
ggaactcaacggtgatatgtgatac

SEQ ID NO: 2022193 - DNA, 25 bp, Homo sapien
tggttgatcagaccccctctttgtc

SEQ ID NO: 2022194 - DNA, 25 bp, Homo sapien
cactgtctcctacgactgtgagctt

SEQ ID NO: 2022195 - DNA, 25 bp, Homo sapien
acactgtctcctacgactgtgagct

SEQ ID NO: 2022196 - DNA, 25 bp, Homo sapien
ctgtctcctacgactgtgagcttct

SEQ ID NO: 2022197 - DNA, 25 bp, Homo sapien
actgtctcctacgactgtgagcttc

SEQ ID NO: 2022198 - DNA, 25 bp, Homo sapien
gttgaacccagtcctgctcgaattc

SEQ ID NO: 2022199 - DNA, 25 bp, Homo sapien
tatgggaaacgcgaagttgaaccca

SEQ ID NO: 2022200 - DNA, 25 bp, Homo sapien
cgaattcctccacgctaatgacaca

SEQ ID NO: 2022201 - DNA, 25 bp, Homo sapien
catcctcagtaatatgggaaacgcg

SEQ ID NO: 2022202 - DNA, 25 bp, Homo sapien
atgtttcatcgcaagaaaaatcctc

SEQ ID NO: 2022203 - DNA, 25 bp, Homo sapien
tgtttcatcgcaagaaaaatcctca

SEQ ID NO: 2022204 - DNA, 25 bp, Homo sapien
tatgtttcatcgcaagaaaaatcct

SEQ ID NO: 2022205 - DNA, 25 bp, Homo sapien
agaggtgcgtgattggtagttaaca

SEQ ID NO: 2022206 - DNA, 25 bp, Homo sapien
ttaggtaaatgtacgtcaggacgat

SEQ ID NO: 2022207 - DNA, 25 bp, Homo sapien
taatatgcgactgatcttcgtgtcc

SEQ ID NO: 2022208 - DNA, 25 bp, Homo sapien
tagttaacaggtgtggcgcctgagc

SEQ ID NO: 2022209 - DNA, 25 bp, Homo sapien
agttaaaagtcaggcccacggcttg

SEQ ID NO: 2022210 - DNA, 25 bp, Homo sapien
ccagtgctgcccagagtgtggactg

SEQ ID NO: 2022211 - DNA, 25 bp, Homo sapien
tgtggactgtggctctcggccatcg

SEQ ID NO: 2022212 - DNA, 25 bp, Homo sapien
tcggccatcgtcacggcaggtgatg

SEQ ID NO: 2022213 - DNA, 25 bp, Homo sapien
atctggaagctgtttgcgatatgga

SEQ ID NO: 2022214 - DNA, 25 bp, Homo sapien
gcgatatggattaggagtcaagctg

SEQ ID NO: 2022215 - DNA, 25 bp, Homo sapien
tcctggagaggcatctgtgaagggc

SEQ ID NO: 2022216 - DNA, 25 bp, Homo sapien
gaatgattagtaaaatccaccccat

SEQ ID NO: 2022217 - DNA, 25 bp, Homo sapien
tcccttcccgattcacagacggctg

SEQ ID NO: 2022218 - DNA, 25 bp, Homo sapien
tcccgattcacagacggctggcttc

SEQ ID NO: 2022219 - DNA, 25 bp, Homo sapien
ccgattcacagacggctggcttctc

SEQ ID NO: 2022220 - DNA, 25 bp, Homo sapien
cttcccgattcacagacggctggct

SEQ ID NO: 2022221 - DNA, 25 bp, Homo sapien
cattggactcaaaagcagaggagcc

SEQ ID NO: 2022222 - DNA, 25 bp, Homo sapien
aaggagcttccggtttcagcggcaa

SEQ ID NO: 2022223 - DNA, 25 bp, Homo sapien
taaacacagggagtaccaggtcttg

SEQ ID NO: 2022224 - DNA, 25 bp, Homo sapien
taggaggtatcccaactcggagagc

SEQ ID NO: 2022225 - DNA, 25 bp, Homo sapien
agtgactccgagcaggagtgtgcat

SEQ ID NO: 2022226 - DNA, 25 bp, Homo sapien
gcttcatcccggctgatgtcattag

SEQ ID NO: 2022227 - DNA, 25 bp, Homo sapien
cggtaatgacgatgatgttagtggc

SEQ ID NO: 2022228 - DNA, 25 bp, Homo sapien
cagcggtaatgacgatgatgttagt

SEQ ID NO: 2022229 - DNA, 25 bp, Homo sapien
gcaatgccagcgtagttcacagtgt

SEQ ID NO: 2022230 - DNA, 25 bp, Homo sapien
tgtgcggcatcaactgatcctccag

SEQ ID NO: 2022231 - DNA, 25 bp, Homo sapien
cacagaaagccttcgaggttcctga

SEQ ID NO: 2022232 - DNA, 25 bp, Homo sapien
tttgttgctgttcccgaccatctgc

SEQ ID NO: 2022233 - DNA, 25 bp, Homo sapien
tggagatacatcctctctgtaccac

SEQ ID NO: 2022234 - DNA, 25 bp, Homo sapien
atggagatacatcctctctgtacca

SEQ ID NO: 2022235 - DNA, 25 bp, Homo sapien
cttccatttcccatggcgagggtgg

SEQ ID NO: 2022236 - DNA, 25 bp, Homo sapien
atctcccccggtgacggtccacagg

SEQ ID NO: 2022237 - DNA, 25 bp, Homo sapien
ttaagcatttccacgtctggaatct

SEQ ID NO: 2022238 - DNA, 25 bp, Homo sapien
gcatttccacgtctggaatcttggg

SEQ ID NO: 2022239 - DNA, 25 bp, Homo sapien
aagcatttccacgtctggaatcttg

SEQ ID NO: 2022240 - DNA, 25 bp, Homo sapien
gcactgtgtgactgtaccaatatcc

SEQ ID NO: 2022241 - DNA, 25 bp, Homo sapien
tgtgcgaggttgttccaggaaccgc

SEQ ID NO: 2022242 - DNA, 25 bp, Homo sapien
tgccagaagcaattccaccgtgctg

SEQ ID NO: 2022243 - DNA, 25 bp, Homo sapien
caggcactcaggtacatcagtgtca

SEQ ID NO: 2022244 - DNA, 25 bp, Homo sapien
tcatggcggggcacagccggagtca

SEQ ID NO: 2022245 - DNA, 25 bp, Homo sapien
atgcaagcttgctgccagcggcact

SEQ ID NO: 2022246 - DNA, 25 bp, Homo sapien
aaaacatgcaagcttgctgccagcg

SEQ ID NO: 2022247 - DNA, 25 bp, Homo sapien
ggcagctgagatgcccaaaacatgc

SEQ ID NO: 2022248 - DNA, 25 bp, Homo sapien
tttgtgagacatgtcctcgagatga

SEQ ID NO: 2022249 - DNA, 25 bp, Homo sapien
cacccccgccatgaaaggaagattt

SEQ ID NO: 2022250 - DNA, 25 bp, Homo sapien
tgagacatgtcctcgagatgacccc

SEQ ID NO: 2022251 - DNA, 25 bp, Homo sapien
tgtgagacatgtcctcgagatgacc

SEQ ID NO: 2022252 - DNA, 25 bp, Homo sapien
ttggttcttgcgggtagagtgtaca

SEQ ID NO: 2022253 - DNA, 25 bp, Homo sapien
tggttcttgcgggtagagtgtacat

SEQ ID NO: 2022254 - DNA, 25 bp, Homo sapien
gtttggttcttgcgggtagagtgta

SEQ ID NO: 2022255 - DNA, 25 bp, Homo sapien
tttggttcttgcgggtagagtgtac

SEQ ID NO: 2022256 - DNA, 25 bp, Homo sapien
aaatgcatctttcgatgcaatgaag

SEQ ID NO: 2022257 - DNA, 25 bp, Homo sapien
agtactaaatgcatctttcgatgca

SEQ ID NO: 2022258 - DNA, 25 bp, Homo sapien
aaccacggttgtagtactaaatgca

SEQ ID NO: 2022259 - DNA, 25 bp, Homo sapien
catctttcgatgcaatgaagtcatt

SEQ ID NO: 2022260 - DNA, 25 bp, Homo sapien
ccattgctggcatgccgtgcagtca

SEQ ID NO: 2022261 - DNA, 25 bp, Homo sapien
cagtgaggcccgaaggagacagcct

SEQ ID NO: 2022262 - DNA, 25 bp, Homo sapien
ccagtgaggcccgaaggagacagcc

SEQ ID NO: 2022263 - DNA, 25 bp, Homo sapien
aagctcctgtccattgctggcatgc

SEQ ID NO: 2022264 - DNA, 25 bp, Homo sapien
cagggactcgagttcctcgcagggc

SEQ ID NO: 2022265 - DNA, 25 bp, Homo sapien
gcagggcggacacagcttccatctg

SEQ ID NO: 2022266 - DNA, 25 bp, Homo sapien
ctcgcagggcggacacagcttccat

SEQ ID NO: 2022267 - DNA, 25 bp, Homo sapien
ctcagggactcgagttcctcgcagg

SEQ ID NO: 2022268 - DNA, 25 bp, Homo sapien
tagatactcaacaccatccgatgag

SEQ ID NO: 2022269 - DNA, 25 bp, Homo sapien
tgaggccaggacatgcgtgcattgt

SEQ ID NO: 2022270 - DNA, 25 bp, Homo sapien
ggaccccgtgtctattctagtgctg

SEQ ID NO: 2022271 - DNA, 25 bp, Homo sapien
ttggtgtggaagcaggaacaaacgc

SEQ ID NO: 2022272 - DNA, 25 bp, Homo sapien
tacagcccggaagcgagaggtgctt

SEQ ID NO: 2022273 - DNA, 25 bp, Homo sapien
gcttctgcagccacggtcactaaag

SEQ ID NO: 2022274 - DNA, 25 bp, Homo sapien
gcacctggttctgggacaagcttgt

SEQ ID NO: 2022275 - DNA, 25 bp, Homo sapien
ctggaaaaaattcacgtacagcatc

SEQ ID NO: 2022276 - DNA, 25 bp, Homo sapien
gctgcctaagaacatcagcagggtg

SEQ ID NO: 2022277 - DNA, 25 bp, Homo sapien
cagcagggtgcaatccggaacaaaa

SEQ ID NO: 2022278 - DNA, 25 bp, Homo sapien
gaatatgtcatgtgtgtaataccaa

SEQ ID NO: 2022279 - DNA, 25 bp, Homo sapien
tgcaaaatttggcaccgtcgtcact

SEQ ID NO: 2022280 - DNA, 25 bp, Homo sapien
cacttttcgcaatggtcactgaggg

SEQ ID NO: 2022281 - DNA, 25 bp, Homo sapien
ttttcgcaatggtcactgagggaga

SEQ ID NO: 2022282 - DNA, 25 bp, Homo sapien
gcccgtcacttttcgcaatggtcac

SEQ ID NO: 2022283 - DNA, 25 bp, Homo sapien
tgaccgcccgtcacttttcgcaatg

SEQ ID NO: 2022284 - DNA, 25 bp, Homo sapien
gaggaagtgagcgagcgataccatc

SEQ ID NO: 2022285 - DNA, 25 bp, Homo sapien
ggaagtgagcgagcgataccatctc

SEQ ID NO: 2022286 - DNA, 25 bp, Homo sapien
aggaggaagtgagcgagcgatacca

SEQ ID NO: 2022287 - DNA, 25 bp, Homo sapien
gaggaggaagtgagcgagcgatacc

SEQ ID NO: 2022288 - DNA, 25 bp, Homo sapien
actctgaaagttctgcgcagtgttc

SEQ ID NO: 2022289 - DNA, 25 bp, Homo sapien
tgtttcccactgatgacgaaagacc

SEQ ID NO: 2022290 - DNA, 25 bp, Homo sapien
cagtgctgaaatctcggaagccgca

SEQ ID NO: 2022291 - DNA, 25 bp, Homo sapien
tgtgagaccctcttgatctgagcaa

SEQ ID NO: 2022292 - DNA, 25 bp, Homo sapien
tgccgccctgtgatcagcgtgcgtg

SEQ ID NO: 2022293 - DNA, 25 bp, Homo sapien
aatagctagcagaagtgaggcaggc

SEQ ID NO: 2022294 - DNA, 25 bp, Homo sapien
tatgttgctgaacgctccagagggc

SEQ ID NO: 2022295 - DNA, 25 bp, Homo sapien
gatggcagagttcaaatggatcatt

SEQ ID NO: 2022296 - DNA, 25 bp, Homo sapien
cagaatgggctggacccgaccattc

SEQ ID NO: 2022297 - DNA, 25 bp, Homo sapien
gttttgcccggattcacctgctgtg

SEQ ID NO: 2022298 - DNA, 25 bp, Homo sapien
gaccattccaaggagatgttgcaaa

SEQ ID NO: 2022299 - DNA, 25 bp, Homo sapien
cgtcctctggcgtcctttgcttgct

SEQ ID NO: 2022300 - DNA, 25 bp, Homo sapien
gagggtggcctgcaacagctgccat

SEQ ID NO: 2022301 - DNA, 25 bp, Homo sapien
ggccccttgtgatggccggtgcctc

SEQ ID NO: 2022302 - DNA, 25 bp, Homo sapien
gatttgcctcgctttgccgtgtagg

SEQ ID NO: 2022303 - DNA, 25 bp, Homo sapien
agacagtcacaatgccgatttgcct

SEQ ID NO: 2022304 - DNA, 25 bp, Homo sapien
gaaagtggaaactctcaggtgcatc

SEQ ID NO: 2022305 - DNA, 25 bp, Homo sapien
tctggtacatcttcgtgctttggaa

SEQ ID NO: 2022306 - DNA, 25 bp, Homo sapien
tctgttggtgaggatcgaccatctc

SEQ ID NO: 2022307 - DNA, 25 bp, Homo sapien
gaactgaggtatcccacttcgctgg

SEQ ID NO: 2022308 - DNA, 25 bp, Homo sapien
cactggagattagcgcgcagcagat

SEQ ID NO: 2022309 - DNA, 25 bp, Homo sapien
tgaatattggcctgcacactggaga

SEQ ID NO: 2022310 - DNA, 25 bp, Homo sapien
gatgtcgatggcttgtcaccgctga

SEQ ID NO: 2022311 - DNA, 25 bp, Homo sapien
tggacagcctcgtgtaatgccgtga

SEQ ID NO: 2022312 - DNA, 25 bp, Homo sapien
ggcctgcccggcacgcggtctggag

SEQ ID NO: 2022313 - DNA, 25 bp, Homo sapien
gattcacagacgggcccgggcgctt

SEQ ID NO: 2022314 - DNA, 25 bp, Homo sapien
cggtctggagcgtgggatttccaca

SEQ ID NO: 2022315 - DNA, 25 bp, Homo sapien
gtcagcctcgcagcgccaatcgcgc

SEQ ID NO: 2022316 - DNA, 25 bp, Homo sapien
agctcgggcctctgtgtgctaagcc

SEQ ID NO: 2022317 - DNA, 25 bp, Homo sapien
ccagctcgggcctctgtgtgctaag

SEQ ID NO: 2022318 - DNA, 25 bp, Homo sapien
tttccagcgtctcctgagatcagct

SEQ ID NO: 2022319 - DNA, 25 bp, Homo sapien
ccccatgctgctggcgatgcgaacg

SEQ ID NO: 2022320 - DNA, 25 bp, Homo sapien
cacacgtgctcatgggaatctgagg

SEQ ID NO: 2022321 - DNA, 25 bp, Homo sapien
ctctggcggcgacctcaggtgcaca

SEQ ID NO: 2022322 - DNA, 25 bp, Homo sapien
gaggaccttcccctctgaagtgtgc

SEQ ID NO: 2022323 - DNA, 25 bp, Homo sapien
aatctgagggactgcggccatcctt

SEQ ID NO: 2022324 - DNA, 25 bp, Homo sapien
gcctaagatatttgcctgaatcctc

SEQ ID NO: 2022325 - DNA, 25 bp, Homo sapien
gggaacattactcccactggacaca

SEQ ID NO: 2022326 - DNA, 25 bp, Homo sapien
caaatgccgttagggctcggaggac

SEQ ID NO: 2022327 - DNA, 25 bp, Homo sapien
ctcggaggacggccatgattctgcc

SEQ ID NO: 2022328 - DNA, 25 bp, Homo sapien
cttttgaccttgtagaggcagcaga

SEQ ID NO: 2022329 - DNA, 25 bp, Homo sapien
cccgattattagtgaaggagccaat

SEQ ID NO: 2022330 - DNA, 25 bp, Homo sapien
tttgaccttgtagaggcagcagatg

SEQ ID NO: 2022331 - DNA, 25 bp, Homo sapien
tgggtctggtaataaatcccgatta

SEQ ID NO: 2022332 - DNA, 25 bp, Homo sapien
tctcaggtgcttgcgatgtgccacg

SEQ ID NO: 2022333 - DNA, 25 bp, Homo sapien
tgtgtagagctagaaacggtcctgg

SEQ ID NO: 2022334 - DNA, 25 bp, Homo sapien
cccgtgttgctgacgccgtgtacaa

SEQ ID NO: 2022335 - DNA, 25 bp, Homo sapien
ggagctgtatcaagccccgtgttgc

SEQ ID NO: 2022336 - DNA, 25 bp, Homo sapien
taacacagccgatcaaagagaagac

SEQ ID NO: 2022337 - DNA, 25 bp, Homo sapien
gccatgaagacctggtgtccaccta

SEQ ID NO: 2022338 - DNA, 25 bp, Homo sapien
gagaagacggaaacgtgcagacctg

SEQ ID NO: 2022339 - DNA, 25 bp, Homo sapien
ttccgaaatgctgcgagccactgct

SEQ ID NO: 2022340 - DNA, 25 bp, Homo sapien
cgtccaagccggagccttaaggcat

SEQ ID NO: 2022341 - DNA, 25 bp, Homo sapien
ctgtgtgcgaaatgggaccctcggc

SEQ ID NO: 2022342 - DNA, 25 bp, Homo sapien
gagtgcactcagcacgcgaacaaca

SEQ ID NO: 2022343 - DNA, 25 bp, Homo sapien
gtcttcatcccggagggtgtgcgcc

SEQ ID NO: 2022344 - DNA, 25 bp, Homo sapien
cacctgtgaggtgccgagctgccga

SEQ ID NO: 2022345 - DNA, 25 bp, Homo sapien
tctgtgcggccagccagatggccag

SEQ ID NO: 2022346 - DNA, 25 bp, Homo sapien
ctgcactggacaatggttccccagt

SEQ ID NO: 2022347 - DNA, 25 bp, Homo sapien
gttccccagtactgaccgctgcagt

SEQ ID NO: 2022348 - DNA, 25 bp, Homo sapien
gaaactgagggagacaccgagcgtc

SEQ ID NO: 2022349 - DNA, 25 bp, Homo sapien
cagagcccagacatggatttgatgg

SEQ ID NO: 2022350 - DNA, 25 bp, Homo sapien
cattcaaaagctgtgatgatagtca

SEQ ID NO: 2022351 - DNA, 25 bp, Homo sapien
gatttgatggcgatgggcttgttct

SEQ ID NO: 2022352 - DNA, 25 bp, Homo sapien
acattgccctcgtccaccaaggccg

SEQ ID NO: 2022353 - DNA, 25 bp, Homo sapien
tgtcattccctgcaactgcaaaaac

SEQ ID NO: 2022354 - DNA, 25 bp, Homo sapien
tcagcttcctcgtggacctggatgt

SEQ ID NO: 2022355 - DNA, 25 bp, Homo sapien
accagaagctgagcgggccacattg

SEQ ID NO: 2022356 - DNA, 25 bp, Homo sapien
tctgaaagtgtggaccgaagcctgt

SEQ ID NO: 2022357 - DNA, 25 bp, Homo sapien
gatcttcctcagacaggcgcgtgga

SEQ ID NO: 2022358 - DNA, 25 bp, Homo sapien
actgctgcagggtaagcgatggacc

SEQ ID NO: 2022359 - DNA, 25 bp, Homo sapien
cccacaagtgcggaggaagaacctg

SEQ ID NO: 2022360 - DNA, 25 bp, Homo sapien
tcactttggcattcgggaacattct

SEQ ID NO: 2022361 - DNA, 25 bp, Homo sapien
tgtacaggtagattgcacagactgc

SEQ ID NO: 2022362 - DNA, 25 bp, Homo sapien
ttggcctctgtccacgatgggagcg

SEQ ID NO: 2022363 - DNA, 25 bp, Homo sapien
gaaaaatgttcgtaggcactcctgt

SEQ ID NO: 2022364 - DNA, 25 bp, Homo sapien
acctcagccatccataattatactt

SEQ ID NO: 2022365 - DNA, 25 bp, Homo sapien
gggccttgcggcgtccctgcagacc

SEQ ID NO: 2022366 - DNA, 25 bp, Homo sapien
ctgcagacccgcctccgtctgtggg

SEQ ID NO: 2022367 - DNA, 25 bp, Homo sapien
gacccgcctccgtctgtgggcacct

SEQ ID NO: 2022368 - DNA, 25 bp, Homo sapien
tatcaatccatttgatgatccagcc

SEQ ID NO: 2022369 - DNA, 25 bp, Homo sapien
gagtatgataacagttaactttgtc

SEQ ID NO: 2022370 - DNA, 25 bp, Homo sapien
tgacaagcccctgtattgagtatga

SEQ ID NO: 2022371 - DNA, 25 bp, Homo sapien
ctgctgctggagtataatatcaatc

SEQ ID NO: 2022372 - DNA, 25 bp, Homo sapien
gagaagccgtgtgcatacacttgcc

SEQ ID NO: 2022373 - DNA, 25 bp, Homo sapien
ccagacgtacttggaaagagaagcc

SEQ ID NO: 2022374 - DNA, 25 bp, Homo sapien
cagacgtacttggaaagagaagccg

SEQ ID NO: 2022375 - DNA, 25 bp, Homo sapien
cacttgccattgtggtttgatagca

SEQ ID NO: 2022376 - DNA, 25 bp, Homo sapien
gggaacttttctgtgtcagcgtcag

SEQ ID NO: 2022377 - DNA, 25 bp, Homo sapien
gaacgtttgcttgagtctatgtggc

SEQ ID NO: 2022378 - DNA, 25 bp, Homo sapien
cacggaggtcttctctggcgaatct

SEQ ID NO: 2022379 - DNA, 25 bp, Homo sapien
tctatgtggctcctgagaggcgacc

SEQ ID NO: 2022380 - DNA, 25 bp, Homo sapien
gagggaccaggcaggatctccgtgg

SEQ ID NO: 2022381 - DNA, 25 bp, Homo sapien
gcaggatctccgtggaagaaagtga

SEQ ID NO: 2022382 - DNA, 25 bp, Homo sapien
catggatgcttcgaggctgtcctga

SEQ ID NO: 2022383 - DNA, 25 bp, Homo sapien
gggaggagccatggatgcttcgagg

SEQ ID NO: 2022384 - DNA, 25 bp, Homo sapien
cagctggggactccgctatcagggt

SEQ ID NO: 2022385 - DNA, 25 bp, Homo sapien
gtaaaacgcctcaccacacaatgtg

SEQ ID NO: 2022386 - DNA, 25 bp, Homo sapien
tctacaccagtaagccctagagaca

SEQ ID NO: 2022387 - DNA, 25 bp, Homo sapien
catggacttgccacttagtgtgtaa

SEQ ID NO: 2022388 - DNA, 25 bp, Homo sapien
tggaagtctcgggaagtctcgggaa

SEQ ID NO: 2022389 - DNA, 25 bp, Homo sapien
aatttcctcctcaggccgtatatca

SEQ ID NO: 2022390 - DNA, 25 bp, Homo sapien
cctcaggccgtatatcaagcgcaca

SEQ ID NO: 2022391 - DNA, 25 bp, Homo sapien
tcagttctgatgttgtaaaaacgga

SEQ ID NO: 2022392 - DNA, 25 bp, Homo sapien
gctgtcatcaggcacctcgaaggag

SEQ ID NO: 2022393 - DNA, 25 bp, Homo sapien
tgcaccttgcagataatgccttttc

SEQ ID NO: 2022394 - DNA, 25 bp, Homo sapien
cataggtcatagaggataaagcccc

SEQ ID NO: 2022395 - DNA, 25 bp, Homo sapien
gggagcttcttaattgcattgcaca

SEQ ID NO: 2022396 - DNA, 25 bp, Homo sapien
gtagggacctgcctctctgcgtcat

SEQ ID NO: 2022397 - DNA, 25 bp, Homo sapien
tcagcggcccacggcccggtgggta

SEQ ID NO: 2022398 - DNA, 25 bp, Homo sapien
ggacctgcctctctgcgtcatgggt

SEQ ID NO: 2022399 - DNA, 25 bp, Homo sapien
ccggtgggtagggacctgcctctct

SEQ ID NO: 2022400 - DNA, 25 bp, Homo sapien
ctgtgtgcatagtgtggccctggga

SEQ ID NO: 2022401 - DNA, 25 bp, Homo sapien
ggccctgggagtgttgtcatactca

SEQ ID NO: 2022402 - DNA, 25 bp, Homo sapien
cctctcgacattgaccatggccatg

SEQ ID NO: 2022403 - DNA, 25 bp, Homo sapien
gggcctgctaccctctcgacattga

SEQ ID NO: 2022404 - DNA, 25 bp, Homo sapien
ttgaccacggccatgtgtacagtgt

SEQ ID NO: 2022405 - DNA, 25 bp, Homo sapien
gctgcactcccgatattgaccacgg

SEQ ID NO: 2022406 - DNA, 25 bp, Homo sapien
tgtggcacccgggaacactgtcatc

SEQ ID NO: 2022407 - DNA, 25 bp, Homo sapien
tcgggactcgctgcactcccgatat

SEQ ID NO: 2022408 - DNA, 25 bp, Homo sapien
gaatgttgtcgtactcaggacctgc

SEQ ID NO: 2022409 - DNA, 25 bp, Homo sapien
tgaccgtggccatgtgcatagtgtg

SEQ ID NO: 2022410 - DNA, 25 bp, Homo sapien
ccgtcattgaccacagccgtgtgca

SEQ ID NO: 2022411 - DNA, 25 bp, Homo sapien
tagtcaccagcattgaccgtggcca

SEQ ID NO: 2022412 - DNA, 25 bp, Homo sapien
atgggcagaaccacggattaagact

SEQ ID NO: 2022413 - DNA, 25 bp, Homo sapien
gatgggcagaaccacggattaagac

SEQ ID NO: 2022414 - DNA, 25 bp, Homo sapien
cttgccgatgttaattctgcgatta

SEQ ID NO: 2022415 - DNA, 25 bp, Homo sapien
ccaaaataagggcacgtggtgagaa

SEQ ID NO: 2022416 - DNA, 25 bp, Homo sapien
tgagaaatcctaagtccgttgaatg

SEQ ID NO: 2022417 - DNA, 25 bp, Homo sapien
ctttgcctgtggtcttgaaatgaac

SEQ ID NO: 2022418 - DNA, 25 bp, Homo sapien
cgcacgagtccctgagcttggtgta

SEQ ID NO: 2022419 - DNA, 25 bp, Homo sapien
cagggaccctcgtgctgggctttga

SEQ ID NO: 2022420 - DNA, 25 bp, Homo sapien
tgttctcacaggtgctcctccgtgt

SEQ ID NO: 2022421 - DNA, 25 bp, Homo sapien
tacaaacaaggatacacccaggcag

SEQ ID NO: 2022422 - DNA, 25 bp, Homo sapien
agagtcaaatcttggaaaggtcacg

SEQ ID NO: 2022423 - DNA, 25 bp, Homo sapien
ggtcttccaaaataagagtcaaatc

SEQ ID NO: 2022424 - DNA, 25 bp, Homo sapien
gaaaggtcacgtgagtaactggaag

SEQ ID NO: 2022425 - DNA, 25 bp, Homo sapien
tgtaatgttcgtgatggtcttccaa

SEQ ID NO: 2022426 - DNA, 25 bp, Homo sapien
tctgggtattctgggcattccaggc

SEQ ID NO: 2022427 - DNA, 25 bp, Homo sapien
cattccaggcattctgggcgttccg

SEQ ID NO: 2022428 - DNA, 25 bp, Homo sapien
tccaggcattctgggcgttccgggc

SEQ ID NO: 2022429 - DNA, 25 bp, Homo sapien
tgttccgggaatttcgggcattctg

SEQ ID NO: 2022430 - DNA, 25 bp, Homo sapien
tgcacatgtgggtgatggcgacaca

SEQ ID NO: 2022431 - DNA, 25 bp, Homo sapien
gtgaggatgatgttgacatgagggt

SEQ ID NO: 2022432 - DNA, 25 bp, Homo sapien
tgctactggtgacacgtgtgaggat

SEQ ID NO: 2022433 - DNA, 25 bp, Homo sapien
tggcgacacatgtgatgctactggt

SEQ ID NO: 2022434 - DNA, 25 bp, Homo sapien
tgactgtggaatgacgcatgaccgt

SEQ ID NO: 2022435 - DNA, 25 bp, Homo sapien
cacatccccggctcgctgagtcatg

SEQ ID NO: 2022436 - DNA, 25 bp, Homo sapien
tgatggtgggatgactccgtgactg

SEQ ID NO: 2022437 - DNA, 25 bp, Homo sapien
tgacgcatgaccgtagggcgactca

SEQ ID NO: 2022438 - DNA, 25 bp, Homo sapien
gcgtgcccacgttgacacctttact

SEQ ID NO: 2022439 - DNA, 25 bp, Homo sapien
tgacacctttactattgagagcccg

SEQ ID NO: 2022440 - DNA, 25 bp, Homo sapien
tctctctggtcaaaacgcgtgccca

SEQ ID NO: 2022441 - DNA, 25 bp, Homo sapien
agcccgtggtgtgcacgccacagtc

SEQ ID NO: 2022442 - DNA, 25 bp, Homo sapien
cattgcgtgcttctcgtggccaagc

SEQ ID NO: 2022443 - DNA, 25 bp, Homo sapien
ggcggggagaccctctgcgtcacca

SEQ ID NO: 2022444 - DNA, 25 bp, Homo sapien
gaccctctgcgtcaccatttctttt

SEQ ID NO: 2022445 - DNA, 25 bp, Homo sapien
tggaggaagcgggtaaagaacagct

SEQ ID NO: 2022446 - DNA, 25 bp, Homo sapien
ggtaaagattatccctgcgtgatga

SEQ ID NO: 2022447 - DNA, 25 bp, Homo sapien
tgcgtgatgacaggaaagcagcgca

SEQ ID NO: 2022448 - DNA, 25 bp, Homo sapien
gtcagagcggctgctgataatccct

SEQ ID NO: 2022449 - DNA, 25 bp, Homo sapien
tctgtggccaacaccgtgctctgtg

SEQ ID NO: 2022450 - DNA, 25 bp, Homo sapien
ccggacgccgtgctggagtgaactt

SEQ ID NO: 2022451 - DNA, 25 bp, Homo sapien
tctcttctgcccgagcacacgttat

SEQ ID NO: 2022452 - DNA, 25 bp, Homo sapien
tcagctgccggacgccgtgctggag

SEQ ID NO: 2022453 - DNA, 25 bp, Homo sapien
tttcaatctcttctgcccgagcaca

SEQ ID NO: 2022454 - DNA, 25 bp, Homo sapien
cgactcttccaccgtataatggagg

SEQ ID NO: 2022455 - DNA, 25 bp, Homo sapien
agcttgtcatgcgactcttccaccg

SEQ ID NO: 2022456 - DNA, 25 bp, Homo sapien
ctgatcctctagcttgtcatgcgac

SEQ ID NO: 2022457 - DNA, 25 bp, Homo sapien
tcctctagcttgtcatgcgactctt

SEQ ID NO: 2022458 - DNA, 25 bp, Homo sapien
gcttggaattccagtctaggagttc

SEQ ID NO: 2022459 - DNA, 25 bp, Homo sapien
acaggatttccttctggggcaagag

SEQ ID NO: 2022460 - DNA, 25 bp, Homo sapien
gaaaagcgcatccttctctccagtg

SEQ ID NO: 2022461 - DNA, 25 bp, Homo sapien
tgaacatttactctcgaggaaaagc

SEQ ID NO: 2022462 - DNA, 25 bp, Homo sapien
taacttcattaataaattcggccat

SEQ ID NO: 2022463 - DNA, 25 bp, Homo sapien
aggatggttatcacgattaacttca

SEQ ID NO: 2022464 - DNA, 25 bp, Homo sapien
gattaacttcattaataaattcggc

SEQ ID NO: 2022465 - DNA, 25 bp, Homo sapien
caggagaaggatggttatcacgatt

SEQ ID NO: 2022466 - DNA, 25 bp, Homo sapien
ttcatccagtagttttccttgtcct

SEQ ID NO: 2022467 - DNA, 25 bp, Homo sapien
ccgtgttcatccagtagttttcctt

SEQ ID NO: 2022468 - DNA, 25 bp, Homo sapien
ttcccaagacaaccgtgttcatcca

SEQ ID NO: 2022469 - DNA, 25 bp, Homo sapien
tgttcatccagtagttttccttgtc

SEQ ID NO: 2022470 - DNA, 25 bp, Homo sapien
ctttcctcgtatgtgacgatttctg

SEQ ID NO: 2022471 - DNA, 25 bp, Homo sapien
aagctttcctcgtatgtgacgattt

SEQ ID NO: 2022472 - DNA, 25 bp, Homo sapien
ccttgacctttctgtatccccgaag

SEQ ID NO: 2022473 - DNA, 25 bp, Homo sapien
atttctgcctggtagtggaagtcct

SEQ ID NO: 2022474 - DNA, 25 bp, Homo sapien
tgaggtgtcccggagcttgtctgta

SEQ ID NO: 2022475 - DNA, 25 bp, Homo sapien
tagagcttggatttttccgggctga

SEQ ID NO: 2022476 - DNA, 25 bp, Homo sapien
tggtcagattggtgacgatggtcac

SEQ ID NO: 2022477 - DNA, 25 bp, Homo sapien
agcttggatttttccgggctgaggt

SEQ ID NO: 2022478 - DNA, 25 bp, Homo sapien
gctcacggtgtcacagtacatgtcg

SEQ ID NO: 2022479 - DNA, 25 bp, Homo sapien
tttgggcatggaaatctgtatctgg

SEQ ID NO: 2022480 - DNA, 25 bp, Homo sapien
cattgcatgcaggtaggaacgtatc

SEQ ID NO: 2022481 - DNA, 25 bp, Homo sapien
gatagacgccaaaatgctcacggtg

SEQ ID NO: 2022482 - DNA, 25 bp, Homo sapien
tctcaaatgatgcaaagcagaggaa

SEQ ID NO: 2022483 - DNA, 25 bp, Homo sapien
ccaggtcttagctgcttcttaagga

SEQ ID NO: 2022484 - DNA, 25 bp, Homo sapien
caccgtgctagagttccaggtctta

SEQ ID NO: 2022485 - DNA, 25 bp, Homo sapien
gctttccaccgtgctagagttccag

SEQ ID NO: 2022486 - DNA, 25 bp, Homo sapien
gacttttctgataacttcgaaacac

SEQ ID NO: 2022487 - DNA, 25 bp, Homo sapien
tctaggatgcgaagacttttctgat

SEQ ID NO: 2022488 - DNA, 25 bp, Homo sapien
gtgctcgcgcaaatctgtgaacttt

SEQ ID NO: 2022489 - DNA, 25 bp, Homo sapien
tgaacttttgacttgtctaggatgc

SEQ ID NO: 2022490 - DNA, 25 bp, Homo sapien
ggtggggagccagtgtccccataac

SEQ ID NO: 2022491 - DNA, 25 bp, Homo sapien
tgcttggtggggagccagtgtcccc

SEQ ID NO: 2022492 - DNA, 25 bp, Homo sapien
ggggagccagtgtccccataaccat

SEQ ID NO: 2022493 - DNA, 25 bp, Homo sapien
ttggtggggagccagtgtccccata

SEQ ID NO: 2022494 - DNA, 25 bp, Homo sapien
actcttctgtccctcggcgactgac

SEQ ID NO: 2022495 - DNA, 25 bp, Homo sapien
gattgtcccgactcactcttctgtc

SEQ ID NO: 2022496 - DNA, 25 bp, Homo sapien
aattccttttgattgtcccgactca

SEQ ID NO: 2022497 - DNA, 25 bp, Homo sapien
tcggcgactgacactgccaccagac

SEQ ID NO: 2022498 - DNA, 25 bp, Homo sapien
ccagtgagggagtatatcccaccca

SEQ ID NO: 2022499 - DNA, 25 bp, Homo sapien
acacccagtgagggagtgtatccca

SEQ ID NO: 2022500 - DNA, 25 bp, Homo sapien
ctacacccagtgagggagtgtatcc

SEQ ID NO: 2022501 - DNA, 25 bp, Homo sapien
cacccagtgagggagtgtatcccac

SEQ ID NO: 2022502 - DNA, 25 bp, Homo sapien
tacacccagtgagggagtgtatccc

SEQ ID NO: 2022503 - DNA, 25 bp, Homo sapien
ccagtgagggagtatatcccaccca

SEQ ID NO: 2022504 - DNA, 25 bp, Homo sapien
ggctgcgggtcgacattcccactta

SEQ ID NO: 2022505 - DNA, 25 bp, Homo sapien
cattcccacttatggtgctgcagta

SEQ ID NO: 2022506 - DNA, 25 bp, Homo sapien
cagcaggtcaggctgcgggtcgaca

SEQ ID NO: 2022507 - DNA, 25 bp, Homo sapien
acaatgcagctgcagactgtgtggg

SEQ ID NO: 2022508 - DNA, 25 bp, Homo sapien
aatagagggagttccatagaggacc

SEQ ID NO: 2022509 - DNA, 25 bp, Homo sapien
aaggacttccgtagagagacttcca

SEQ ID NO: 2022510 - DNA, 25 bp, Homo sapien
gattccatagaggtacttccacaga

SEQ ID NO: 2022511 - DNA, 25 bp, Homo sapien
cactttgggacttccacaggcgact

SEQ ID NO: 2022512 - DNA, 25 bp, Homo sapien
ttccaaacacatgttccacactcgg

SEQ ID NO: 2022513 - DNA, 25 bp, Homo sapien
gatctcaaactctccgacgaagctg

SEQ ID NO: 2022514 - DNA, 25 bp, Homo sapien
tgaagccattgtggcctcctcggat

SEQ ID NO: 2022515 - DNA, 25 bp, Homo sapien
gcttccatccgtggtttggcagaga

SEQ ID NO: 2022516 - DNA, 25 bp, Homo sapien
gctgtgtttacgtttgaccaggtga

SEQ ID NO: 2022517 - DNA, 25 bp, Homo sapien
tcggtaagccgctgctcagtgagtt

SEQ ID NO: 2022518 - DNA, 25 bp, Homo sapien
tcagtgagtttagcatggccagctc

SEQ ID NO: 2022519 - DNA, 25 bp, Homo sapien
cggaacgtatccctcgctgtgttta

SEQ ID NO: 2022520 - DNA, 25 bp, Homo sapien
catgtgaggctcagaacgatgttct

SEQ ID NO: 2022521 - DNA, 25 bp, Homo sapien
tggccttggttttctaagatgagct

SEQ ID NO: 2022522 - DNA, 25 bp, Homo sapien
gtttcaatgccttgtgatttgccga

SEQ ID NO: 2022523 - DNA, 25 bp, Homo sapien
cactctccacaagtgccacgtgtgg

SEQ ID NO: 2022524 - DNA, 25 bp, Homo sapien
tgggtgctttctggacggactggtg

SEQ ID NO: 2022525 - DNA, 25 bp, Homo sapien
ccctggcagtgtgaacgctcgccga

SEQ ID NO: 2022526 - DNA, 25 bp, Homo sapien
tggcagtgtgaacgctcgccgactc

SEQ ID NO: 2022527 - DNA, 25 bp, Homo sapien
tcgccgactcccctggcggtgtggg

SEQ ID NO: 2022528 - DNA, 25 bp, Homo sapien
aacactgttggataccacttgaggg

SEQ ID NO: 2022529 - DNA, 25 bp, Homo sapien
ggtacgacacaggaccacgtggctt

SEQ ID NO: 2022530 - DNA, 25 bp, Homo sapien
ggtgtgatatcaaactgggtcgcca

SEQ ID NO: 2022531 - DNA, 25 bp, Homo sapien
cagaaagtccatgtgacgggtgtcc

SEQ ID NO: 2022532 - DNA, 25 bp, Homo sapien
cgcattgtttctggcgttcccaggg

SEQ ID NO: 2022533 - DNA, 25 bp, Homo sapien
ttccgctggagacgggacgtgtcac

SEQ ID NO: 2022534 - DNA, 25 bp, Homo sapien
agtgccttcggtgtgttccgctgga

SEQ ID NO: 2022535 - DNA, 25 bp, Homo sapien
gaacaggccgtgtattcagagggaa

SEQ ID NO: 2022536 - DNA, 25 bp, Homo sapien
gacacagttgagacagaaacacagg

SEQ ID NO: 2022537 - DNA, 25 bp, Homo sapien
tgagagggcctcgtaaaccaaggag

SEQ ID NO: 2022538 - DNA, 25 bp, Homo sapien
cacttggaccccatgaatgacggtg

SEQ ID NO: 2022539 - DNA, 25 bp, Homo sapien
tgacggtgccacgttgagaggttcc

SEQ ID NO: 2022540 - DNA, 25 bp, Homo sapien
gggcccagccttgatctccacggac

SEQ ID NO: 2022541 - DNA, 25 bp, Homo sapien
tacgaggtggcaatgatggccccag

SEQ ID NO: 2022542 - DNA, 25 bp, Homo sapien
gtatagatgtctctgccaggccggg

SEQ ID NO: 2022543 - DNA, 25 bp, Homo sapien
cgggtctccatgtgcgcagaggtct

SEQ ID NO: 2022544 - DNA, 25 bp, Homo sapien
tggctcgcctttcccactggtatag

SEQ ID NO: 2022545 - DNA, 25 bp, Homo sapien
ccctctgattgtgcggctaggctga

SEQ ID NO: 2022546 - DNA, 25 bp, Homo sapien
cataggagacactaggaacgacgca

SEQ ID NO: 2022547 - DNA, 25 bp, Homo sapien
cttgtgagtccagcgtgagaagcac

SEQ ID NO: 2022548 - DNA, 25 bp, Homo sapien
caggtacgacgctgggatctgcata

SEQ ID NO: 2022549 - DNA, 25 bp, Homo sapien
tgtctttcgtgggtggtttcagaat

SEQ ID NO: 2022550 - DNA, 25 bp, Homo sapien
cgtgggtggtttcagaatccttgtt

SEQ ID NO: 2022551 - DNA, 25 bp, Homo sapien
agtccgacaaggtgtctttcgtggg

SEQ ID NO: 2022552 - DNA, 25 bp, Homo sapien
ctgacgcagtccgacaaggtgtctt

SEQ ID NO: 2022553 - DNA, 25 bp, Homo sapien
gcccgtggtcactgtgcctgccagt

SEQ ID NO: 2022554 - DNA, 25 bp, Homo sapien
agtcgggtttgatgcccgtggtcac

SEQ ID NO: 2022555 - DNA, 25 bp, Homo sapien
cctgccagtatttgtgagatgaggg

SEQ ID NO: 2022556 - DNA, 25 bp, Homo sapien
gcccgtgggcactcatgaaacaaac

SEQ ID NO: 2022557 - DNA, 25 bp, Homo sapien
gagtcttggcgctgaatcttctgaa

SEQ ID NO: 2022558 - DNA, 25 bp, Homo sapien
gacaccgccacatgctgagtcttgg

SEQ ID NO: 2022559 - DNA, 25 bp, Homo sapien
cattcggtgagttgagaacagcgga

SEQ ID NO: 2022560 - DNA, 25 bp, Homo sapien
ggatccatagactgagagccgcact

SEQ ID NO: 2022561 - DNA, 25 bp, Homo sapien
ctgagtgctgcggtgggagtgagtc

SEQ ID NO: 2022562 - DNA, 25 bp, Homo sapien
ctgcagcggccccggattgtgagca

SEQ ID NO: 2022563 - DNA, 25 bp, Homo sapien
gatcacggtgttgactgtttctggg

SEQ ID NO: 2022564 - DNA, 25 bp, Homo sapien
ttgtgagcaggatcacggtgttgac

SEQ ID NO: 2022565 - DNA, 25 bp, Homo sapien
tggattcataccagatcaggccccg

SEQ ID NO: 2022566 - DNA, 25 bp, Homo sapien
ttcataggtgaaagttggcccgctg

SEQ ID NO: 2022567 - DNA, 25 bp, Homo sapien
aaacagccgcttacagggctgtggg

SEQ ID NO: 2022568 - DNA, 25 bp, Homo sapien
cagtgtgtctagagggtcttcatag

SEQ ID NO: 2022569 - DNA, 25 bp, Homo sapien
accaggtaatgagcgctgagcacca

SEQ ID NO: 2022570 - DNA, 25 bp, Homo sapien
ggacaccaggtaatgagcgctgagc

SEQ ID NO: 2022571 - DNA, 25 bp, Homo sapien
gcgctgagcaccaggtaatgacgac

SEQ ID NO: 2022572 - DNA, 25 bp, Homo sapien
gagcgctgagcaccaggtaatgacg

SEQ ID NO: 2022573 - DNA, 25 bp, Homo sapien
ccaggtaatgacctctaggctccaa

SEQ ID NO: 2022574 - DNA, 25 bp, Homo sapien
cttctggacaccaagtgatgatggc

SEQ ID NO: 2022575 - DNA, 25 bp, Homo sapien
tgggtgccaggtaatgactgctgga

SEQ ID NO: 2022576 - DNA, 25 bp, Homo sapien
tctggacaccaagtgatgatggctg

SEQ ID NO: 2022577 - DNA, 25 bp, Homo sapien
gacttctggacaccaagtgatgatg

SEQ ID NO: 2022578 - DNA, 25 bp, Homo sapien
aagaatattcccaggcaaaagtctc

SEQ ID NO: 2022579 - DNA, 25 bp, Homo sapien
tgaagcctgagggccactgatgacc

SEQ ID NO: 2022580 - DNA, 25 bp, Homo sapien
gggcaccaggagatgacagccaggc

SEQ ID NO: 2022581 - DNA, 25 bp, Homo sapien
gaatattcccaggcaaaagtctcca

SEQ ID NO: 2022582 - DNA, 25 bp, Homo sapien
tgtggttaagggtggcccacagcct

SEQ ID NO: 2022583 - DNA, 25 bp, Homo sapien
caggcaagagttcagcttaggatca

SEQ ID NO: 2022584 - DNA, 25 bp, Homo sapien
taagcagctcagcagatgcggtgga

SEQ ID NO: 2022585 - DNA, 25 bp, Homo sapien
tggatggcataactataacctgtgg

SEQ ID NO: 2022586 - DNA, 25 bp, Homo sapien
ctgagatggcctctgccatggtgcc

SEQ ID NO: 2022587 - DNA, 25 bp, Homo sapien
atggtgcccacgctcctcgcctcgg

SEQ ID NO: 2022588 - DNA, 25 bp, Homo sapien
ccttcccgttgctggcttcagggtc

SEQ ID NO: 2022589 - DNA, 25 bp, Homo sapien
gagatggcctctgccatggtgccca

SEQ ID NO: 2022590 - DNA, 25 bp, Homo sapien
aacggcttcggcagaccctctggct

SEQ ID NO: 2022591 - DNA, 25 bp, Homo sapien
ctggcgaatcttggcagagcagccc

SEQ ID NO: 2022592 - DNA, 25 bp, Homo sapien
cctctggctcctggcgaatcttggc

SEQ ID NO: 2022593 - DNA, 25 bp, Homo sapien
tccaggtaacggcttcggcagaccc

SEQ ID NO: 2022594 - DNA, 25 bp, Homo sapien
ggtgctgggcgcattgttctgctcc

SEQ ID NO: 2022595 - DNA, 25 bp, Homo sapien
acagcaaagcccctcggctccggtg

SEQ ID NO: 2022596 - DNA, 25 bp, Homo sapien
gcagagctgttacaatattttgctt

SEQ ID NO: 2022597 - DNA, 25 bp, Homo sapien
ctgcagagctgttacaatattttgc

SEQ ID NO: 2022598 - DNA, 25 bp, Homo sapien
ggattgtcccgatgtccctgctgag

SEQ ID NO: 2022599 - DNA, 25 bp, Homo sapien
tgaggtaaagactctccagccacca

SEQ ID NO: 2022600 - DNA, 25 bp, Homo sapien
caccagggcagatcgaggaggaatc

SEQ ID NO: 2022601 - DNA, 25 bp, Homo sapien
caaatatcggttggtgtccctgtga

SEQ ID NO: 2022602 - DNA, 25 bp, Homo sapien
ttggagctgcccgaggtgttacaga

SEQ ID NO: 2022603 - DNA, 25 bp, Homo sapien
tacagagacggatgcagtgtgtccc

SEQ ID NO: 2022604 - DNA, 25 bp, Homo sapien
caccaggttgaggacaatggccagg

SEQ ID NO: 2022605 - DNA, 25 bp, Homo sapien
ccgaggtgttacagagacggatgca

SEQ ID NO: 2022606 - DNA, 25 bp, Homo sapien
ggaggaggtcctcggttgtgcaccg

SEQ ID NO: 2022607 - DNA, 25 bp, Homo sapien
cgggaaggccgaggtgcctcttagg

SEQ ID NO: 2022608 - DNA, 25 bp, Homo sapien
tgaccgtctctgtcctgggttagcc

SEQ ID NO: 2022609 - DNA, 25 bp, Homo sapien
tgacggtgtcgtcttttctcctgca

SEQ ID NO: 2022610 - DNA, 25 bp, Homo sapien
cagaattggatgaaatggttgcgcc

SEQ ID NO: 2022611 - DNA, 25 bp, Homo sapien
aattggatgaaatggttgcgcctgc

SEQ ID NO: 2022612 - DNA, 25 bp, Homo sapien
ttacagaattggatgaaatggttgc

SEQ ID NO: 2022613 - DNA, 25 bp, Homo sapien
tggatgaaatggttgcgcctgcatc

SEQ ID NO: 2022614 - DNA, 25 bp, Homo sapien
ccgcttccctttatgggctcataag

SEQ ID NO: 2022615 - DNA, 25 bp, Homo sapien
ccttcgtgtccgcttccctttatgg

SEQ ID NO: 2022616 - DNA, 25 bp, Homo sapien
ttcgtgtccgcttccctttatgggc

SEQ ID NO: 2022617 - DNA, 25 bp, Homo sapien
gtgtccgcttccctttatgggctca

SEQ ID NO: 2022618 - DNA, 25 bp, Homo sapien
tgaaaatgcacgtaatcgaagcggg

SEQ ID NO: 2022619 - DNA, 25 bp, Homo sapien
cgtaaaagaacccagaggcctcgtg

SEQ ID NO: 2022620 - DNA, 25 bp, Homo sapien
taaactatgacacaggcctccatgg

SEQ ID NO: 2022621 - DNA, 25 bp, Homo sapien
tcgaagcgggcaccattagttaagt

SEQ ID NO: 2022622 - DNA, 25 bp, Homo sapien
tctgtggcaccttcctgtccaaaca

SEQ ID NO: 2022623 - DNA, 25 bp, Homo sapien
cctgtccaaacacgttcacagccat

SEQ ID NO: 2022624 - DNA, 25 bp, Homo sapien
gctcctcgttctgttgataatttga

SEQ ID NO: 2022625 - DNA, 25 bp, Homo sapien
accccgggaagagctcctcgttctg

SEQ ID NO: 2022626 - DNA, 25 bp, Homo sapien
tctttcgcctgcagccgttcctggt

SEQ ID NO: 2022627 - DNA, 25 bp, Homo sapien
ctttcgcctgcagccgttcctggtc

SEQ ID NO: 2022628 - DNA, 25 bp, Homo sapien
tgaggccgagggaccgccgaggaca

SEQ ID NO: 2022629 - DNA, 25 bp, Homo sapien
gtcccgctcttgagtgcagtgggct

SEQ ID NO: 2022630 - DNA, 25 bp, Homo sapien
cttttgactgttgtgtgaggccgag

SEQ ID NO: 2022631 - DNA, 25 bp, Homo sapien
aggagcctgggtcccgctcttgagt

SEQ ID NO: 2022632 - DNA, 25 bp, Homo sapien
gcatctgcactgattgcctccggaa

SEQ ID NO: 2022633 - DNA, 25 bp, Homo sapien
gataatgtaatctcagcccagcctg

SEQ ID NO: 2022634 - DNA, 25 bp, Homo sapien
gcgagatccaagtagcagccagtgg

SEQ ID NO: 2022635 - DNA, 25 bp, Homo sapien
gctccgtgaggagggaattaccaca

SEQ ID NO: 2022636 - DNA, 25 bp, Homo sapien
ttctcagtttggtgctcagctaggg

SEQ ID NO: 2022637 - DNA, 25 bp, Homo sapien
gttctcagtttggtgctcagctagg

SEQ ID NO: 2022638 - DNA, 25 bp, Homo sapien
ctcagctagggtcgggtcagagccc

SEQ ID NO: 2022639 - DNA, 25 bp, Homo sapien
cagctagggtcgggtcagagccctg

SEQ ID NO: 2022640 - DNA, 25 bp, Homo sapien
aaaagtttccggcatcttcgtggag

SEQ ID NO: 2022641 - DNA, 25 bp, Homo sapien
tagatggccccttgcaaagttgagc

SEQ ID NO: 2022642 - DNA, 25 bp, Homo sapien
tttcagacgccggaagacgaagacc

SEQ ID NO: 2022643 - DNA, 25 bp, Homo sapien
aaagtgctggccgatatacccatga

SEQ ID NO: 2022644 - DNA, 25 bp, Homo sapien
catcacacccacgatggtcattgtc

SEQ ID NO: 2022645 - DNA, 25 bp, Homo sapien
gtcatcatcgtgacgggctccacag

SEQ ID NO: 2022646 - DNA, 25 bp, Homo sapien
ccatcacacccacgatggtcattgt

SEQ ID NO: 2022647 - DNA, 25 bp, Homo sapien
atcgtcatcatcgtgacgggctcca

SEQ ID NO: 2022648 - DNA, 25 bp, Homo sapien
cgatgctggggcttcacagtctcca

SEQ ID NO: 2022649 - DNA, 25 bp, Homo sapien
gctggggcttcacagtctccagggt

SEQ ID NO: 2022650 - DNA, 25 bp, Homo sapien
tggggcttcacagtctccagggtcc

SEQ ID NO: 2022651 - DNA, 25 bp, Homo sapien
gggcttcacagtctccagggtcccc

SEQ ID NO: 2022652 - DNA, 25 bp, Homo sapien
cctatgatggtcatcgttatcttca

SEQ ID NO: 2022653 - DNA, 25 bp, Homo sapien
atcatcatcatgacgagctccacag

SEQ ID NO: 2022654 - DNA, 25 bp, Homo sapien
catcatcatcatgacgagctccaca

SEQ ID NO: 2022655 - DNA, 25 bp, Homo sapien
ctcattaaccaggattgctcttcca

SEQ ID NO: 2022656 - DNA, 25 bp, Homo sapien
cattaaccaggattgctcttccatc

SEQ ID NO: 2022657 - DNA, 25 bp, Homo sapien
taaccaggattgctcttccatctaa

SEQ ID NO: 2022658 - DNA, 25 bp, Homo sapien
cctcattaaccaggattgctcttcc

SEQ ID NO: 2022659 - DNA, 25 bp, Homo sapien
ggttctggaacagctgccgcccaga

SEQ ID NO: 2022660 - DNA, 25 bp, Homo sapien
ttctggaacagctgccgcccagaca

SEQ ID NO: 2022661 - DNA, 25 bp, Homo sapien
tgtgtgtctgccgaacatcattacc

SEQ ID NO: 2022662 - DNA, 25 bp, Homo sapien
tgtctgccgaacatcattacccaga

SEQ ID NO: 2022663 - DNA, 25 bp, Homo sapien
tggaccagggcagggtgaatgctga

SEQ ID NO: 2022664 - DNA, 25 bp, Homo sapien
ccccttgtcgtgtgggtgagagtga

SEQ ID NO: 2022665 - DNA, 25 bp, Homo sapien
gctgagccttgtgtgcgtgcccccc

SEQ ID NO: 2022666 - DNA, 25 bp, Homo sapien
accagggcagggtgaatgctgagcc

SEQ ID NO: 2022667 - DNA, 25 bp, Homo sapien
ttcaaccacgaagacgaggacagga

SEQ ID NO: 2022668 - DNA, 25 bp, Homo sapien
aacatgagcatcgagccaggagcaa

SEQ ID NO: 2022669 - DNA, 25 bp, Homo sapien
tccccagggtggaaaggaggcatct

SEQ ID NO: 2022670 - DNA, 25 bp, Homo sapien
tccttggagcaaacggcgtccaggg

SEQ ID NO: 2022671 - DNA, 25 bp, Homo sapien
cgtcgatccaaggtgagtgtgtagc

SEQ ID NO: 2022672 - DNA, 25 bp, Homo sapien
agcatcgcctgttccgctacacatg

SEQ ID NO: 2022673 - DNA, 25 bp, Homo sapien
ccccggaggcttcaaagacgtcgat

SEQ ID NO: 2022674 - DNA, 25 bp, Homo sapien
gaacgctcgcttttcagagaagtca

SEQ ID NO: 2022675 - DNA, 25 bp, Homo sapien
ggggtggcacttgttcacttctgtg

SEQ ID NO: 2022676 - DNA, 25 bp, Homo sapien
caggggtggcacttgttcacttctg

SEQ ID NO: 2022677 - DNA, 25 bp, Homo sapien
gcaggggtggcacttgttcacttct

SEQ ID NO: 2022678 - DNA, 25 bp, Homo sapien
ggcaggggtggcacttgttcacttc

SEQ ID NO: 2022679 - DNA, 25 bp, Homo sapien
taaagtcaatcctgctgtttcccgt

SEQ ID NO: 2022680 - DNA, 25 bp, Homo sapien
aatcctgctgtttcccgttccgtgt

SEQ ID NO: 2022681 - DNA, 25 bp, Homo sapien
gcttcttcatgagttactaaagtca

SEQ ID NO: 2022682 - DNA, 25 bp, Homo sapien
cccgttccgtgtagcgctgtctcat

SEQ ID NO: 2022683 - DNA, 25 bp, Homo sapien
cggctccggagaaggcggcgctggt

SEQ ID NO: 2022684 - DNA, 25 bp, Homo sapien
ccggagaaggcggcgctggtgcagc

SEQ ID NO: 2022685 - DNA, 25 bp, Homo sapien
cgacggctccggagaaggcggcgct

SEQ ID NO: 2022686 - DNA, 25 bp, Homo sapien
tccggagaaggcggcgctggtgcag

SEQ ID NO: 2022687 - DNA, 25 bp, Homo sapien
cagcctgggtgccaccgacggctcc

SEQ ID NO: 2022688 - DNA, 25 bp, Homo sapien
gcagcctgggtgccaccgacggctc

SEQ ID NO: 2022689 - DNA, 25 bp, Homo sapien
ggcagcctgggtgccaccgacggct

SEQ ID NO: 2022690 - DNA, 25 bp, Homo sapien
agcaccctgcgttcggggcaggtca

SEQ ID NO: 2022691 - DNA, 25 bp, Homo sapien
tcggggcaggtcattcttcatggtg

SEQ ID NO: 2022692 - DNA, 25 bp, Homo sapien
tagggcagccattgccgtgctgacc

SEQ ID NO: 2022693 - DNA, 25 bp, Homo sapien
agccattgccgtgctgacctccaga

SEQ ID NO: 2022694 - DNA, 25 bp, Homo sapien
cagccccttcgtccagaggaagaca

SEQ ID NO: 2022695 - DNA, 25 bp, Homo sapien
agagtacttttccttagacagcggg

SEQ ID NO: 2022696 - DNA, 25 bp, Homo sapien
ccagtatcacaagggtgtggtatgc

SEQ ID NO: 2022697 - DNA, 25 bp, Homo sapien
tggctttgccacagcgatgatcaaa

SEQ ID NO: 2022698 - DNA, 25 bp, Homo sapien
ccggtgctgagaccgtgatgcgcct

SEQ ID NO: 2022699 - DNA, 25 bp, Homo sapien
gcctgcggcttcagcgtcctcagcg

SEQ ID NO: 2022700 - DNA, 25 bp, Homo sapien
tgttaagtgggccattgtagagaat

SEQ ID NO: 2022701 - DNA, 25 bp, Homo sapien
tctgcactgtggaacgtggcccggt

SEQ ID NO: 2022702 - DNA, 25 bp, Homo sapien
acaaagagggccgagtgtgggggcg

SEQ ID NO: 2022703 - DNA, 25 bp, Homo sapien
gatgggcgtcttctctgtgaccgat

SEQ ID NO: 2022704 - DNA, 25 bp, Homo sapien
caaggtccttgaccgctgagcaggg

SEQ ID NO: 2022705 - DNA, 25 bp, Homo sapien
gtggctcccgctcgcgttccgggat

SEQ ID NO: 2022706 - DNA, 25 bp, Homo sapien
ctttataactagctccaaacacaaa

SEQ ID NO: 2022707 - DNA, 25 bp, Homo sapien
ttatgatgaatagccagagtggtta

SEQ ID NO: 2022708 - DNA, 25 bp, Homo sapien
ttatcacgaaagttaccccttgata

SEQ ID NO: 2022709 - DNA, 25 bp, Homo sapien
ccagagtggttaaagtcctttatca

SEQ ID NO: 2022710 - DNA, 25 bp, Homo sapien
tatggcatacacagaaacatcagct

SEQ ID NO: 2022711 - DNA, 25 bp, Homo sapien
gaagtacttctctcctgatggctga

SEQ ID NO: 2022712 - DNA, 25 bp, Homo sapien
aaacatcagctcacagtcgtcttcg

SEQ ID NO: 2022713 - DNA, 25 bp, Homo sapien
ttcgcactgagggatgcaaacgatg

SEQ ID NO: 2022714 - DNA, 25 bp, Homo sapien
ggtaagaagaggtaattgataacac

SEQ ID NO: 2022715 - DNA, 25 bp, Homo sapien
acaggaaatctgtgcttggtgtgcc

SEQ ID NO: 2022716 - DNA, 25 bp, Homo sapien
attgataacaccacctgccactctg

SEQ ID NO: 2022717 - DNA, 25 bp, Homo sapien
ggcaatcaggatgataaatgtttcc

SEQ ID NO: 2022718 - DNA, 25 bp, Homo sapien
ggtgtgaaccgtcagcacagatggc

SEQ ID NO: 2022719 - DNA, 25 bp, Homo sapien
caagtggtcctgtctggtgtgaacc

SEQ ID NO: 2022720 - DNA, 25 bp, Homo sapien
tttgggttccaggaaaagcgcagga

SEQ ID NO: 2022721 - DNA, 25 bp, Homo sapien
tgtgtaagtttgacgaagtcagagc

SEQ ID NO: 2022722 - DNA, 25 bp, Homo sapien
ccgcgcctcctgttccgggcgcgcg

SEQ ID NO: 2022723 - DNA, 25 bp, Homo sapien
gctctcagcgccgctcagcgcggcg

SEQ ID NO: 2022724 - DNA, 25 bp, Homo sapien
cggcgcctttgtctcgcccgggccg

SEQ ID NO: 2022725 - DNA, 25 bp, Homo sapien
ggtcggccggccgccttcgctgctc

SEQ ID NO: 2022726 - DNA, 25 bp, Homo sapien
gggagccccgtcaggcggcagcagc

SEQ ID NO: 2022727 - DNA, 25 bp, Homo sapien
ggagccccgtcaggcggcagcagct

SEQ ID NO: 2022728 - DNA, 25 bp, Homo sapien
gctcgggagccccgtcaggcggcag

SEQ ID NO: 2022729 - DNA, 25 bp, Homo sapien
gacgaatcacgacaaagtgccgcgg

SEQ ID NO: 2022730 - DNA, 25 bp, Homo sapien
aaagaccagtaacgccgacgaatca

SEQ ID NO: 2022731 - DNA, 25 bp, Homo sapien
tacaacagaattaccaaacagtgcg

SEQ ID NO: 2022732 - DNA, 25 bp, Homo sapien
tgaaggtcactctcgaaaagaccag

SEQ ID NO: 2022733 - DNA, 25 bp, Homo sapien
gacacggttgcctttatgggtacat

SEQ ID NO: 2022734 - DNA, 25 bp, Homo sapien
tcaaatttgttaagtcacgaccacc

SEQ ID NO: 2022735 - DNA, 25 bp, Homo sapien
cctaatgaaaaatacgcagacctga

SEQ ID NO: 2022736 - DNA, 25 bp, Homo sapien
gagggcactcttgccatgctcaacg

SEQ ID NO: 2022737 - DNA, 25 bp, Homo sapien
cctcttgtgccgagtaacaactatg

SEQ ID NO: 2022738 - DNA, 25 bp, Homo sapien
tcttgtgccgagtaacaactatgtt

SEQ ID NO: 2022739 - DNA, 25 bp, Homo sapien
aattcacacctgatcaaataaatag

SEQ ID NO: 2022740 - DNA, 25 bp, Homo sapien
taatgaagaactctaattcacacct

SEQ ID NO: 2022741 - DNA, 25 bp, Homo sapien
cgggcgcgtcctcgtgcacgatcag

SEQ ID NO: 2022742 - DNA, 25 bp, Homo sapien
caggaagtccgcccacttgaagaac

SEQ ID NO: 2022743 - DNA, 25 bp, Homo sapien
agcatttctcgcacacgctggtctc

SEQ ID NO: 2022744 - DNA, 25 bp, Homo sapien
cagcacgggcgggagcttggtgcag

SEQ ID NO: 2022745 - DNA, 25 bp, Homo sapien
gccgtaggcgggcgttgggggtgca

SEQ ID NO: 2022746 - DNA, 25 bp, Homo sapien
gggttccgcgtccatgggctcggcc

SEQ ID NO: 2022747 - DNA, 25 bp, Homo sapien
cgggttccgcgtccatgggctcggc

SEQ ID NO: 2022748 - DNA, 25 bp, Homo sapien
tgggcgcgccgtaggcgggcgttgg

SEQ ID NO: 2022749 - DNA, 25 bp, Homo sapien
gcgcgcgcgccctgcgagaactgcg

SEQ ID NO: 2022750 - DNA, 25 bp, Homo sapien
cgcgcgcgcgccctgcgagaactgc

SEQ ID NO: 2022751 - DNA, 25 bp, Homo sapien
gccaccttggtgctcagcagcgcct

SEQ ID NO: 2022752 - DNA, 25 bp, Homo sapien
ccaccttggtgctcagcagcgcctc

SEQ ID NO: 2022753 - DNA, 25 bp, Homo sapien
gttccaggatcaggggcacggctgc

SEQ ID NO: 2022754 - DNA, 25 bp, Homo sapien
gatctgctcgatgagctgcagctgg

SEQ ID NO: 2022755 - DNA, 25 bp, Homo sapien
caggatcaggggcacggctgcagct

SEQ ID NO: 2022756 - DNA, 25 bp, Homo sapien
ggatctgctcgatgagctgcagctg

SEQ ID NO: 2022757 - DNA, 25 bp, Homo sapien
gccccggccgacagcgggagcgcgg

SEQ ID NO: 2022758 - DNA, 25 bp, Homo sapien
gtgctggcgccagactcgggccggg

SEQ ID NO: 2022759 - DNA, 25 bp, Homo sapien
tgctggcgccagactcgggccggga

SEQ ID NO: 2022760 - DNA, 25 bp, Homo sapien
gctggcgccagactcgggccgggac

SEQ ID NO: 2022761 - DNA, 25 bp, Homo sapien
gctgcgctctgcggcgctggcgccg

SEQ ID NO: 2022762 - DNA, 25 bp, Homo sapien
aggtagaagcggacttggcaggccg

SEQ ID NO: 2022763 - DNA, 25 bp, Homo sapien
ctgaggtagaagcggacttggcagg

SEQ ID NO: 2022764 - DNA, 25 bp, Homo sapien
gaggtagaagcggacttggcaggcc

SEQ ID NO: 2022765 - DNA, 25 bp, Homo sapien
gtagaagcggacttggcaggccggg

SEQ ID NO: 2022766 - DNA, 25 bp, Homo sapien
tgtgcttgaagaacgggtcctcggc

SEQ ID NO: 2022767 - DNA, 25 bp, Homo sapien
tgggctcgaacaccgacacattggg

SEQ ID NO: 2022768 - DNA, 25 bp, Homo sapien
ggtagtgcatcttcagcgcgctctg

SEQ ID NO: 2022769 - DNA, 25 bp, Homo sapien
tgctgcagcttcgaggtttccgacg

SEQ ID NO: 2022770 - DNA, 25 bp, Homo sapien
ggctgtccggcctctcggtcttgag

SEQ ID NO: 2022771 - DNA, 25 bp, Homo sapien
tctcggtcttgagcgggatttcctg

SEQ ID NO: 2022772 - DNA, 25 bp, Homo sapien
tccggcctctcggtcttgagcggga

SEQ ID NO: 2022773 - DNA, 25 bp, Homo sapien
ggcctctcggtcttgagcgggattt

SEQ ID NO: 2022774 - DNA, 25 bp, Homo sapien
tccaacgcgctcttgcaagcaaaag

SEQ ID NO: 2022775 - DNA, 25 bp, Homo sapien
tgcggtagtggatttccaacgcgct

SEQ ID NO: 2022776 - DNA, 25 bp, Homo sapien
tttaaattacccatagtggagcacc

SEQ ID NO: 2022777 - DNA, 25 bp, Homo sapien
gacgaatggccgctccttagtatgg

SEQ ID NO: 2022778 - DNA, 25 bp, Homo sapien
tgtgcgtgcgctcatggatctgcag

SEQ ID NO: 2022779 - DNA, 25 bp, Homo sapien
aggtcttcccgcacgactggcagtt

SEQ ID NO: 2022780 - DNA, 25 bp, Homo sapien
ccattttgatcatggtgggtgcggc

SEQ ID NO: 2022781 - DNA, 25 bp, Homo sapien
gcagatggtgcagccgaacggcttc

SEQ ID NO: 2022782 - DNA, 25 bp, Homo sapien
cacatggccacgcagagaatgttct

SEQ ID NO: 2022783 - DNA, 25 bp, Homo sapien
tacggacaacaaaacacaggtggac

SEQ ID NO: 2022784 - DNA, 25 bp, Homo sapien
agaatgttctggagctcgaagggtc

SEQ ID NO: 2022785 - DNA, 25 bp, Homo sapien
aatgagtgcggtctttcagttgaca

SEQ ID NO: 2022786 - DNA, 25 bp, Homo sapien
ctgcgcgagacacggagacagccca

SEQ ID NO: 2022787 - DNA, 25 bp, Homo sapien
gacacggagacagcccacgagtaag

SEQ ID NO: 2022788 - DNA, 25 bp, Homo sapien
acggagacagcccacgagtaagtgc

SEQ ID NO: 2022789 - DNA, 25 bp, Homo sapien
gcgagacacggagacagcccacgag

SEQ ID NO: 2022790 - DNA, 25 bp, Homo sapien
ccaagctgacgatgggtgggctact

SEQ ID NO: 2022791 - DNA, 25 bp, Homo sapien
gagatctcgttgttcttcatggcga

SEQ ID NO: 2022792 - DNA, 25 bp, Homo sapien
tatcctcgataaaccgcgtgaatgg

SEQ ID NO: 2022793 - DNA, 25 bp, Homo sapien
gatggctgcagcatactggttccaa

SEQ ID NO: 2022794 - DNA, 25 bp, Homo sapien
tattactgacaggtacttgcacacg

SEQ ID NO: 2022795 - DNA, 25 bp, Homo sapien
caacttcaaaacgtgggcctgggca

SEQ ID NO: 2022796 - DNA, 25 bp, Homo sapien
gaagttacatctcatcaccgtggaa

SEQ ID NO: 2022797 - DNA, 25 bp, Homo sapien
tcagtcagcagatgtgtcaagccac

SEQ ID NO: 2022798 - DNA, 25 bp, Homo sapien
caagctgtgttgacgttcctggtgg

SEQ ID NO: 2022799 - DNA, 25 bp, Homo sapien
gatgcactgagacactgcttaaatc

SEQ ID NO: 2022800 - DNA, 25 bp, Homo sapien
tcctggtggaaataccacggataca

SEQ ID NO: 2022801 - DNA, 25 bp, Homo sapien
aatttcaagaccaatcaagatgcac

SEQ ID NO: 2022802 - DNA, 25 bp, Homo sapien
acgggaaggcaattccgagtggtca

SEQ ID NO: 2022803 - DNA, 25 bp, Homo sapien
gaattaagctgtgtggagctgccac

SEQ ID NO: 2022804 - DNA, 25 bp, Homo sapien
taaattaaggacgttctccatctgg

SEQ ID NO: 2022805 - DNA, 25 bp, Homo sapien
cacttcatgctgacaacgggaaggc

SEQ ID NO: 2022806 - DNA, 25 bp, Homo sapien
caagcctcgcttggtacagaaatgc

SEQ ID NO: 2022807 - DNA, 25 bp, Homo sapien
gttttaacacagctaaaaagcagca

SEQ ID NO: 2022808 - DNA, 25 bp, Homo sapien
gaatactgagaattaatgcccaata

SEQ ID NO: 2022809 - DNA, 25 bp, Homo sapien
cgtggattgtaccagccaggacgat

SEQ ID NO: 2022810 - DNA, 25 bp, Homo sapien
aaatcaaatatgtttctaacacctc

SEQ ID NO: 2022811 - DNA, 25 bp, Homo sapien
taacagaatatgcagtaagcatcag

SEQ ID NO: 2022812 - DNA, 25 bp, Homo sapien
tttaacatcaataagttcaatggct

SEQ ID NO: 2022813 - DNA, 25 bp, Homo sapien
tgtgcgtgtacttgtgtgcaggact

SEQ ID NO: 2022814 - DNA, 25 bp, Homo sapien
caagctccgcgaaaggccagtattc

SEQ ID NO: 2022815 - DNA, 25 bp, Homo sapien
gcatctttcactgcagggcgtggcc

SEQ ID NO: 2022816 - DNA, 25 bp, Homo sapien
tattcgctaggaatggtctgtccaa

SEQ ID NO: 2022817 - DNA, 25 bp, Homo sapien
gaaaacaggccaaagatgcagacgg

SEQ ID NO: 2022818 - DNA, 25 bp, Homo sapien
tacagtcccgaattaacatctgagg

SEQ ID NO: 2022819 - DNA, 25 bp, Homo sapien
tcagcatgtgtctataatggccaat

SEQ ID NO: 2022820 - DNA, 25 bp, Homo sapien
gaatatgctttaacagtacccagct

SEQ ID NO: 2022821 - DNA, 25 bp, Homo sapien
acccagctcttgaattaccagtagg

SEQ ID NO: 2022822 - DNA, 25 bp, Homo sapien
agcctggcgttcgtgttgccagagg

SEQ ID NO: 2022823 - DNA, 25 bp, Homo sapien
ttcaggaagcctggcgttcgtgttg

SEQ ID NO: 2022824 - DNA, 25 bp, Homo sapien
aggaagcctggcgttcgtgttgcca

SEQ ID NO: 2022825 - DNA, 25 bp, Homo sapien
cctggcgttcgtgttgccagaggac

SEQ ID NO: 2022826 - DNA, 25 bp, Homo sapien
tacagttggcgaggagccatcgtgc

SEQ ID NO: 2022827 - DNA, 25 bp, Homo sapien
tcatcgggtgctgactgtggccgaa

SEQ ID NO: 2022828 - DNA, 25 bp, Homo sapien
ggcctcacatggacgcccacatttt

SEQ ID NO: 2022829 - DNA, 25 bp, Homo sapien
ttattccaagatccgagtgtgaccg

SEQ ID NO: 2022830 - DNA, 25 bp, Homo sapien
tctggactgcggatctggtctcctc

SEQ ID NO: 2022831 - DNA, 25 bp, Homo sapien
tccgcttacacatggccgatggttc

SEQ ID NO: 2022832 - DNA, 25 bp, Homo sapien
ttgaccgggttgctggagcagtatc

SEQ ID NO: 2022833 - DNA, 25 bp, Homo sapien
tggtctcctcgttgctccgcttaca

SEQ ID NO: 2022834 - DNA, 25 bp, Homo sapien
caaggtgagtatcccgcagtgggcc

SEQ ID NO: 2022835 - DNA, 25 bp, Homo sapien
taattcaactaacacgcaggcctgc

SEQ ID NO: 2022836 - DNA, 25 bp, Homo sapien
gaccctggcccacagcggttggcaa

SEQ ID NO: 2022837 - DNA, 25 bp, Homo sapien
agcatctctcgggtgttaacacgac

SEQ ID NO: 2022838 - DNA, 25 bp, Homo sapien
catttaggcctacaattcacctggg

SEQ ID NO: 2022839 - DNA, 25 bp, Homo sapien
caaggttaattggtcataaatcaag

SEQ ID NO: 2022840 - DNA, 25 bp, Homo sapien
tgaccagcaccgtggatcaaaacca

SEQ ID NO: 2022841 - DNA, 25 bp, Homo sapien
gttttgaagaatcttcactgagccc

SEQ ID NO: 2022842 - DNA, 25 bp, Homo sapien
tctgaaatcctgactcaagtcccct

SEQ ID NO: 2022843 - DNA, 25 bp, Homo sapien
tcctgactcaagtccccctggatgt

SEQ ID NO: 2022844 - DNA, 25 bp, Homo sapien
gcctggctgctctgggatttgtcac

SEQ ID NO: 2022845 - DNA, 25 bp, Homo sapien
ccaggcctggctgctctgggatttg

SEQ ID NO: 2022846 - DNA, 25 bp, Homo sapien
aggcctggctgctctgggatttgtc

SEQ ID NO: 2022847 - DNA, 25 bp, Homo sapien
cttccagccaagccaggcctggctg

SEQ ID NO: 2022848 - DNA, 25 bp, Homo sapien
tgtggcccttcgatattgtctacag

SEQ ID NO: 2022849 - DNA, 25 bp, Homo sapien
tgtccacctttgtggcccttcgata

SEQ ID NO: 2022850 - DNA, 25 bp, Homo sapien
ccttcgatattgtctacagattggg

SEQ ID NO: 2022851 - DNA, 25 bp, Homo sapien
acctttgtggcccttcgatattgtc

SEQ ID NO: 2022852 - DNA, 25 bp, Homo sapien
cctcagcgccaaccccggctgaggc

SEQ ID NO: 2022853 - DNA, 25 bp, Homo sapien
tcccctcagcgccaaccccggctga

SEQ ID NO: 2022854 - DNA, 25 bp, Homo sapien
tcccactttcccctcaattcgccac

SEQ ID NO: 2022855 - DNA, 25 bp, Homo sapien
cactttcccctcaattcgccacctt

SEQ ID NO: 2022856 - DNA, 25 bp, Homo sapien
ggtaaagcgggatctggtccgccat

SEQ ID NO: 2022857 - DNA, 25 bp, Homo sapien
tgctgtgccggtcggctcccggcct

SEQ ID NO: 2022858 - DNA, 25 bp, Homo sapien
gccgctgcgctacgcaccgggtaaa

SEQ ID NO: 2022859 - DNA, 25 bp, Homo sapien
agtaggccgcgcgtttgcggttggc

SEQ ID NO: 2022860 - DNA, 25 bp, Homo sapien
gccgtaggaagacactctccccatt

SEQ ID NO: 2022861 - DNA, 25 bp, Homo sapien
attgaacagcaaagagtgcgtgaag

SEQ ID NO: 2022862 - DNA, 25 bp, Homo sapien
tgtagggtacatgcacaagggtgcc

SEQ ID NO: 2022863 - DNA, 25 bp, Homo sapien
caagcctggcagtcattgtagggta

SEQ ID NO: 2022864 - DNA, 25 bp, Homo sapien
gaacaagtaactgcgttcccagtga

SEQ ID NO: 2022865 - DNA, 25 bp, Homo sapien
tctgggcagggccaatagtcacact

SEQ ID NO: 2022866 - DNA, 25 bp, Homo sapien
tgagctactatgtgtggcacacgtc

SEQ ID NO: 2022867 - DNA, 25 bp, Homo sapien
cagcctacggatgccttttaaagga

SEQ ID NO: 2022868 - DNA, 25 bp, Homo sapien
tgggactctccctccaatagcagca

SEQ ID NO: 2022869 - DNA, 25 bp, Homo sapien
gcagcaagctgcataaactaatgag

SEQ ID NO: 2022870 - DNA, 25 bp, Homo sapien
gagacaaatggtgctacggttgaaa

SEQ ID NO: 2022871 - DNA, 25 bp, Homo sapien
ccactttgcctgcatgttaataaag

SEQ ID NO: 2022872 - DNA, 25 bp, Homo sapien
caatttgtgacgatgcattgaaagc

SEQ ID NO: 2022873 - DNA, 25 bp, Homo sapien
tcttaacattcaatatggccaacgg

SEQ ID NO: 2022874 - DNA, 25 bp, Homo sapien
tgttcaagatttctctacaaagata

SEQ ID NO: 2022875 - DNA, 25 bp, Homo sapien
gataaacaggcactcttaatcgctg

SEQ ID NO: 2022876 - DNA, 25 bp, Homo sapien
gagcaggacaccagaagcagctgaa

SEQ ID NO: 2022877 - DNA, 25 bp, Homo sapien
ttagatcacccaagatgctaggccc

SEQ ID NO: 2022878 - DNA, 25 bp, Homo sapien
tgctaggccccaagtagtgacatct

SEQ ID NO: 2022879 - DNA, 25 bp, Homo sapien
aaaagactggccaactagcacagag

SEQ ID NO: 2022880 - DNA, 25 bp, Homo sapien
tacaagcatcctagggtagacagaa

SEQ ID NO: 2022881 - DNA, 25 bp, Homo sapien
aacggaggccaaagcacagtggaac

SEQ ID NO: 2022882 - DNA, 25 bp, Homo sapien
caaactactagaagcaaagatgaag

SEQ ID NO: 2022883 - DNA, 25 bp, Homo sapien
gaacatcgattcaaatgcctgtaga

SEQ ID NO: 2022884 - DNA, 25 bp, Homo sapien
ctccatgagataaagttgaacagtc

SEQ ID NO: 2022885 - DNA, 25 bp, Homo sapien
caaccaacaaatgctaattgcagta

SEQ ID NO: 2022886 - DNA, 25 bp, Homo sapien
aatatggccaatagtcaagagaaag

SEQ ID NO: 2022887 - DNA, 25 bp, Homo sapien
gccattatatccacgctccatgaga

SEQ ID NO: 2022888 - DNA, 25 bp, Homo sapien
caggacaggctctgggaattactca

SEQ ID NO: 2022889 - DNA, 25 bp, Homo sapien
tgtagtcaccttctatgagagcaag

SEQ ID NO: 2022890 - DNA, 25 bp, Homo sapien
caaccctggaaattggagacatggg

SEQ ID NO: 2022891 - DNA, 25 bp, Homo sapien
tccaaacaggatgtggacgtccctg

SEQ ID NO: 2022892 - DNA, 25 bp, Homo sapien
catccaaatgcgcagactcatcctc

SEQ ID NO: 2022893 - DNA, 25 bp, Homo sapien
tcatccaaatgcgcagactcatcct

SEQ ID NO: 2022894 - DNA, 25 bp, Homo sapien
tccaaatgcgcagactcatcctcca

SEQ ID NO: 2022895 - DNA, 25 bp, Homo sapien
ttcatccaaatgcgcagactcatcc

SEQ ID NO: 2022896 - DNA, 25 bp, Homo sapien
agaggaacttccagccatcacagac

SEQ ID NO: 2022897 - DNA, 25 bp, Homo sapien
ggtaatcactttcctcattctcaaa

SEQ ID NO: 2022898 - DNA, 25 bp, Homo sapien
ctttgcattatcctggctcgtggta

SEQ ID NO: 2022899 - DNA, 25 bp, Homo sapien
ctcgtggtaaggtgtggtaatcact

SEQ ID NO: 2022900 - DNA, 25 bp, Homo sapien
aggaaattaggtagcaatggataac

SEQ ID NO: 2022901 - DNA, 25 bp, Homo sapien
tataaggaaattaggtagcaatgga

SEQ ID NO: 2022902 - DNA, 25 bp, Homo sapien
taaggaaattaggtagcaatggata

SEQ ID NO: 2022903 - DNA, 25 bp, Homo sapien
atataaggaaattaggtagcaatgg

SEQ ID NO: 2022904 - DNA, 25 bp, Homo sapien
cttctcgtaagataataatttggct

SEQ ID NO: 2022905 - DNA, 25 bp, Homo sapien
tggctttgattaatgtactgataat

SEQ ID NO: 2022906 - DNA, 25 bp, Homo sapien
gataatctccatgatatcatttaag

SEQ ID NO: 2022907 - DNA, 25 bp, Homo sapien
atcatttaaggaatatctccttgag

SEQ ID NO: 2022908 - DNA, 25 bp, Homo sapien
ttatagaattcctgggatgtttttc

SEQ ID NO: 2022909 - DNA, 25 bp, Homo sapien
ttcttcacacttttcaggacatcca

SEQ ID NO: 2022910 - DNA, 25 bp, Homo sapien
aatatttatcagccaaccacagcaa

SEQ ID NO: 2022911 - DNA, 25 bp, Homo sapien
ggacatccaagccatactgtgcgag

SEQ ID NO: 2022912 - DNA, 25 bp, Homo sapien
cacggacatccaggtagctttacaa

SEQ ID NO: 2022913 - DNA, 25 bp, Homo sapien
taagaagttgtaattgcagaccagt

SEQ ID NO: 2022914 - DNA, 25 bp, Homo sapien
tgtaacttcacgagatagactgcct

SEQ ID NO: 2022915 - DNA, 25 bp, Homo sapien
tgaacaagccaaacgtgaacaggtg

SEQ ID NO: 2022916 - DNA, 25 bp, Homo sapien
ttttcaatgctggtacaaactgtga

SEQ ID NO: 2022917 - DNA, 25 bp, Homo sapien
tgtagagatagcctattttcaatgc

SEQ ID NO: 2022918 - DNA, 25 bp, Homo sapien
caggatattactagaaaatagagat

SEQ ID NO: 2022919 - DNA, 25 bp, Homo sapien
cagaggagcccagtaggtgtagaga

SEQ ID NO: 2022920 - DNA, 25 bp, Homo sapien
gataagcatcattgcatcactggcc

SEQ ID NO: 2022921 - DNA, 25 bp, Homo sapien
taactttggcagctctacaggcagg

SEQ ID NO: 2022922 - DNA, 25 bp, Homo sapien
agaaatcatacgtactgcacttgga

SEQ ID NO: 2022923 - DNA, 25 bp, Homo sapien
cacttggatacttcagaatgctcac

SEQ ID NO: 2022924 - DNA, 25 bp, Homo sapien
taggattgatttggcgatgcagact

SEQ ID NO: 2022925 - DNA, 25 bp, Homo sapien
gatttggcgatgcagactctttttt

SEQ ID NO: 2022926 - DNA, 25 bp, Homo sapien
gattgatttggcgatgcagactctt

SEQ ID NO: 2022927 - DNA, 25 bp, Homo sapien
ttgatttggcgatgcagactctttt

SEQ ID NO: 2022928 - DNA, 25 bp, Homo sapien
gagcatgctaaaacagtccaagacc

SEQ ID NO: 2022929 - DNA, 25 bp, Homo sapien
ctggaagagttgacgccaggccctc

SEQ ID NO: 2022930 - DNA, 25 bp, Homo sapien
cctgatggatggctacgtggcatta

SEQ ID NO: 2022931 - DNA, 25 bp, Homo sapien
ggccttccttgaccatcccatatag

SEQ ID NO: 2022932 - DNA, 25 bp, Homo sapien
tgtcacgctgaaaacgccgaaattc

SEQ ID NO: 2022933 - DNA, 25 bp, Homo sapien
aattcatcaattgcttcccgtgtca

SEQ ID NO: 2022934 - DNA, 25 bp, Homo sapien
gctatatagttgtgaattcacttcc

SEQ ID NO: 2022935 - DNA, 25 bp, Homo sapien
tgcttcccgtgtcatagtaacagcc

SEQ ID NO: 2022936 - DNA, 25 bp, Homo sapien
gagcgccctggcacatttaagacag

SEQ ID NO: 2022937 - DNA, 25 bp, Homo sapien
tcttctgggagtgggccacattttg

SEQ ID NO: 2022938 - DNA, 25 bp, Homo sapien
tcttttaagcaacatccccatggtt

SEQ ID NO: 2022939 - DNA, 25 bp, Homo sapien
tggataaatacaactgacctaggct

SEQ ID NO: 2022940 - DNA, 25 bp, Homo sapien
cctttaaagggtgtatggcatgctg

SEQ ID NO: 2022941 - DNA, 25 bp, Homo sapien
gatggcattactactctaggctgta

SEQ ID NO: 2022942 - DNA, 25 bp, Homo sapien
catgctggaatgtagcaggtgctat

SEQ ID NO: 2022943 - DNA, 25 bp, Homo sapien
caggcacctgtgctacattagtgac

SEQ ID NO: 2022944 - DNA, 25 bp, Homo sapien
acctgttcttataccaatgcttctt

SEQ ID NO: 2022945 - DNA, 25 bp, Homo sapien
tgcctggccataaccacctgttctt

SEQ ID NO: 2022946 - DNA, 25 bp, Homo sapien
gtgcctggccataaccacctgttct

SEQ ID NO: 2022947 - DNA, 25 bp, Homo sapien
gttcttataccaatgcttcttaaac

SEQ ID NO: 2022948 - DNA, 25 bp, Homo sapien
agctatccaattcacccttctttcc

SEQ ID NO: 2022949 - DNA, 25 bp, Homo sapien
tgatgaggtctccaacttgtatgtc

SEQ ID NO: 2022950 - DNA, 25 bp, Homo sapien
cttttccactatgatgaggtctcca

SEQ ID NO: 2022951 - DNA, 25 bp, Homo sapien
aacttgtatgtctgaactcttaact

SEQ ID NO: 2022952 - DNA, 25 bp, Homo sapien
tgtgtaatataactacagctggccc

SEQ ID NO: 2022953 - DNA, 25 bp, Homo sapien
tgtatccacgggttccatagatggg

SEQ ID NO: 2022954 - DNA, 25 bp, Homo sapien
cacacagtcatggaagtaggcagat

SEQ ID NO: 2022955 - DNA, 25 bp, Homo sapien
cagatgagagcacttaggaacgaac

SEQ ID NO: 2022956 - DNA, 25 bp, Homo sapien
gaggaggcattcagtcttacaccat

SEQ ID NO: 2022957 - DNA, 25 bp, Homo sapien
tcacatggttttcacaaggcacaca

SEQ ID NO: 2022958 - DNA, 25 bp, Homo sapien
tatactgctgataccaactgggctg

SEQ ID NO: 2022959 - DNA, 25 bp, Homo sapien
gatgcccagcgccatttgagaaggc

SEQ ID NO: 2022960 - DNA, 25 bp, Homo sapien
taagaaacaccatgtccgatggaat

SEQ ID NO: 2022961 - DNA, 25 bp, Homo sapien
tcctaagaaacaccatgtccgatgg

SEQ ID NO: 2022962 - DNA, 25 bp, Homo sapien
acaccatgtccgatggaattctttg

SEQ ID NO: 2022963 - DNA, 25 bp, Homo sapien
gaaacaccatgtccgatggaattct

SEQ ID NO: 2022964 - DNA, 25 bp, Homo sapien
acacagaaggactacacgcccatga

SEQ ID NO: 2022965 - DNA, 25 bp, Homo sapien
aacacacagaaggactacacgccca

SEQ ID NO: 2022966 - DNA, 25 bp, Homo sapien
gcccagtccaatacatcctttaaaa

SEQ ID NO: 2022967 - DNA, 25 bp, Homo sapien
accacgcccagtccaatacatcctt

SEQ ID NO: 2022968 - DNA, 25 bp, Homo sapien
tcccatcaggctctggtgtataatc

SEQ ID NO: 2022969 - DNA, 25 bp, Homo sapien
ggtgtataatcagatgatataaagc

SEQ ID NO: 2022970 - DNA, 25 bp, Homo sapien
catcaggctctggtgtataatcaga

SEQ ID NO: 2022971 - DNA, 25 bp, Homo sapien
gtataatcagatgatataaagccat

SEQ ID NO: 2022972 - DNA, 25 bp, Homo sapien
gagggacccgtcatagaaaaatgcc

SEQ ID NO: 2022973 - DNA, 25 bp, Homo sapien
ccagaaactctgtgtgaagactcac

SEQ ID NO: 2022974 - DNA, 25 bp, Homo sapien
cacttggaagatacggaaagtccca

SEQ ID NO: 2022975 - DNA, 25 bp, Homo sapien
caaaaacactccgtgggaacgctga

SEQ ID NO: 2022976 - DNA, 25 bp, Homo sapien
atggctgcagtaatcaagattgttt

SEQ ID NO: 2022977 - DNA, 25 bp, Homo sapien
ctgcagtaatcaagattgtttgata

SEQ ID NO: 2022978 - DNA, 25 bp, Homo sapien
cagatggctgcagtaatcaagattg

SEQ ID NO: 2022979 - DNA, 25 bp, Homo sapien
ggctgcagtaatcaagattgtttga

SEQ ID NO: 2022980 - DNA, 25 bp, Homo sapien
ccagagccggcagctgttgcgtgca

SEQ ID NO: 2022981 - DNA, 25 bp, Homo sapien
gttgatcagttcgaataaaacacga

SEQ ID NO: 2022982 - DNA, 25 bp, Homo sapien
cccagagccggcagctgttgcgtgc

SEQ ID NO: 2022983 - DNA, 25 bp, Homo sapien
tcagtttcaccatctagttgatcag

SEQ ID NO: 2022984 - DNA, 25 bp, Homo sapien
atgtgccttcgaaactgtgaatgtc

SEQ ID NO: 2022985 - DNA, 25 bp, Homo sapien
taaatgtgccttcgaaactgtgaat

SEQ ID NO: 2022986 - DNA, 25 bp, Homo sapien
cctggtaaatgtgccttcgaaactg

SEQ ID NO: 2022987 - DNA, 25 bp, Homo sapien
actgtgaatgtccatttgtggtttc

SEQ ID NO: 2022988 - DNA, 25 bp, Homo sapien
gacttccttgtacttccacacattg

SEQ ID NO: 2022989 - DNA, 25 bp, Homo sapien
acacattgtctagcgaacatttccg

SEQ ID NO: 2022990 - DNA, 25 bp, Homo sapien
tgcagactgagccatacgctcccgt

SEQ ID NO: 2022991 - DNA, 25 bp, Homo sapien
ttcagccaacctgcacttgctctcc

SEQ ID NO: 2022992 - DNA, 25 bp, Homo sapien
tgtgaaagagcctgcatactatgca

SEQ ID NO: 2022993 - DNA, 25 bp, Homo sapien
tcttgttaagtaccaagactgcaac

SEQ ID NO: 2022994 - DNA, 25 bp, Homo sapien
gacagctactattgagctcgtcagc

SEQ ID NO: 2022995 - DNA, 25 bp, Homo sapien
gatgttaaagtttcctatgacggac

SEQ ID NO: 2022996 - DNA, 25 bp, Homo sapien
gagatgaagcattcctaccacatgg

SEQ ID NO: 2022997 - DNA, 25 bp, Homo sapien
agcccacttggtcagagagcatatt

SEQ ID NO: 2022998 - DNA, 25 bp, Homo sapien
gtagccccatcaaagtataacagag

SEQ ID NO: 2022999 - DNA, 25 bp, Homo sapien
catttcagtagacagtggatggcac

SEQ ID NO: 2023000 - DNA, 25 bp, Homo sapien
ctatgctgagactttcatgaatggg

SEQ ID NO: 2023001 - DNA, 25 bp, Homo sapien
tgctgagactttcatgaatgggcgg

SEQ ID NO: 2023002 - DNA, 25 bp, Homo sapien
ggtgcttgcccacaatgtattttct

SEQ ID NO: 2023003 - DNA, 25 bp, Homo sapien
tggtgcttgcccacaatgtattttc

SEQ ID NO: 2023004 - DNA, 25 bp, Homo sapien
tgttacgatgcctcattagtgtcca

SEQ ID NO: 2023005 - DNA, 25 bp, Homo sapien
ttagtgtccaactagtcgggcccac

SEQ ID NO: 2023006 - DNA, 25 bp, Homo sapien
ttaaagccgtcttcatgcccactag

SEQ ID NO: 2023007 - DNA, 25 bp, Homo sapien
taattaagcttctcgagtggatggt

SEQ ID NO: 2023008 - DNA, 25 bp, Homo sapien
gattggatgtgttcattacacttcg

SEQ ID NO: 2023009 - DNA, 25 bp, Homo sapien
tctcttttccggtataaatgacaac

SEQ ID NO: 2023010 - DNA, 25 bp, Homo sapien
attacacttcgagtctcttttccgg

SEQ ID NO: 2023011 - DNA, 25 bp, Homo sapien
ggatgtgttcattacacttcgagtc

SEQ ID NO: 2023012 - DNA, 25 bp, Homo sapien
acgcttggcctatcttttcaaagaa

SEQ ID NO: 2023013 - DNA, 25 bp, Homo sapien
caccacgcttggcctatcttttcaa

SEQ ID NO: 2023014 - DNA, 25 bp, Homo sapien
ccacgcttggcctatcttttcaaag

SEQ ID NO: 2023015 - DNA, 25 bp, Homo sapien
acttctggccccaagtgacccacct

SEQ ID NO: 2023016 - DNA, 25 bp, Homo sapien
gatgactcgggggtagtcggtggtg

SEQ ID NO: 2023017 - DNA, 25 bp, Homo sapien
aggagctgaggatgctccttcatgt

SEQ ID NO: 2023018 - DNA, 25 bp, Homo sapien
gagctgaggatgctccttcatgtcc

SEQ ID NO: 2023019 - DNA, 25 bp, Homo sapien
ggctgggatgactcgggggtagtcg

SEQ ID NO: 2023020 - DNA, 25 bp, Homo sapien
aaaaagcctttataatgcaattaat

SEQ ID NO: 2023021 - DNA, 25 bp, Homo sapien
acttaactctgggaggataggtgga

SEQ ID NO: 2023022 - DNA, 25 bp, Homo sapien
aatacctaacatacatcaacttaac

SEQ ID NO: 2023023 - DNA, 25 bp, Homo sapien
ggatgttagctgaggagaactagaa

SEQ ID NO: 2023024 - DNA, 25 bp, Homo sapien
tattctgaggagaattgtattgaat

SEQ ID NO: 2023025 - DNA, 25 bp, Homo sapien
ttaccaatccggatgtgctttattt

SEQ ID NO: 2023026 - DNA, 25 bp, Homo sapien
ttcctctttaccaatccggatgtgc

SEQ ID NO: 2023027 - DNA, 25 bp, Homo sapien
attattgaaaactaatattacggtg

SEQ ID NO: 2023028 - DNA, 25 bp, Homo sapien
tcactgctcatggaactcggaatgg

SEQ ID NO: 2023029 - DNA, 25 bp, Homo sapien
gaagaagtctcgtggagcaaaggca

SEQ ID NO: 2023030 - DNA, 25 bp, Homo sapien
gcagcgatctaccttcaacatgaca

SEQ ID NO: 2023031 - DNA, 25 bp, Homo sapien
ggtcaacggtgagaggaatttcaca

SEQ ID NO: 2023032 - DNA, 25 bp, Homo sapien
gcacatctgttctctgcctgagacg

SEQ ID NO: 2023033 - DNA, 25 bp, Homo sapien
ctgggcacatctgttctctgcctga

SEQ ID NO: 2023034 - DNA, 25 bp, Homo sapien
cttggatctgggcacatctgttctc

SEQ ID NO: 2023035 - DNA, 25 bp, Homo sapien
catctgttctctgcctgagacgcca

SEQ ID NO: 2023036 - DNA, 25 bp, Homo sapien
tgcggtgctcacgtctgtctcagag

SEQ ID NO: 2023037 - DNA, 25 bp, Homo sapien
gagtcgtactcacacctcccatagg

SEQ ID NO: 2023038 - DNA, 25 bp, Homo sapien
taggagtcactacactgccgatcac

SEQ ID NO: 2023039 - DNA, 25 bp, Homo sapien
cagagtcatctgtctcagagtcgta

SEQ ID NO: 2023040 - DNA, 25 bp, Homo sapien
gatgatgtcaccctgggtgaacagg

SEQ ID NO: 2023041 - DNA, 25 bp, Homo sapien
tgaacaggatgtcggcatccaaaca

SEQ ID NO: 2023042 - DNA, 25 bp, Homo sapien
ctgatgatgtcaccctgggtgaaca

SEQ ID NO: 2023043 - DNA, 25 bp, Homo sapien
ctgggtgaacaggatgtcggcatcc

SEQ ID NO: 2023044 - DNA, 25 bp, Homo sapien
cgtcagccgattgagttcaaggtcc

SEQ ID NO: 2023045 - DNA, 25 bp, Homo sapien
catggacccacaaatccttgtaagg

SEQ ID NO: 2023046 - DNA, 25 bp, Homo sapien
caaaaatagcgctttcgtcagccga

SEQ ID NO: 2023047 - DNA, 25 bp, Homo sapien
aaaagattgcggtaccatggaccca

SEQ ID NO: 2023048 - DNA, 25 bp, Homo sapien
tgtactgagcagacaaacgcagcct

SEQ ID NO: 2023049 - DNA, 25 bp, Homo sapien
aactgtgacaatctgcgctcgggtc

SEQ ID NO: 2023050 - DNA, 25 bp, Homo sapien
caagcgtgctccgttctaggtccta

SEQ ID NO: 2023051 - DNA, 25 bp, Homo sapien
taagagccgagtgacaagacaagcc

SEQ ID NO: 2023052 - DNA, 25 bp, Homo sapien
gtgccagggatgttctcatctttca

SEQ ID NO: 2023053 - DNA, 25 bp, Homo sapien
gttttgtctgtcaataaatacacca

SEQ ID NO: 2023054 - DNA, 25 bp, Homo sapien
tcctctgggatagtgctggtccgaa

SEQ ID NO: 2023055 - DNA, 25 bp, Homo sapien
accaggcgcccaagttcctctggga

SEQ ID NO: 2023056 - DNA, 25 bp, Homo sapien
caaaggtgaacacagaccacgaaca

SEQ ID NO: 2023057 - DNA, 25 bp, Homo sapien
ggtgaacacagaccacgaacagtac

SEQ ID NO: 2023058 - DNA, 25 bp, Homo sapien
ttaaatgtcattttgtccattcaaa

SEQ ID NO: 2023059 - DNA, 25 bp, Homo sapien
cattttgtccattcaaaggtgaaca

SEQ ID NO: 2023060 - DNA, 25 bp, Homo sapien
ctatttccgaagacaaacacctcct

SEQ ID NO: 2023061 - DNA, 25 bp, Homo sapien
gctatttccgaagacaaacacctcc

SEQ ID NO: 2023062 - DNA, 25 bp, Homo sapien
agtgctatttccgaagacaaacacc

SEQ ID NO: 2023063 - DNA, 25 bp, Homo sapien
tgctatttccgaagacaaacacctc

SEQ ID NO: 2023064 - DNA, 25 bp, Homo sapien
aacagcaaacacattaatgcaggag

SEQ ID NO: 2023065 - DNA, 25 bp, Homo sapien
gctctggatctcatccatcgtgtcg

SEQ ID NO: 2023066 - DNA, 25 bp, Homo sapien
tgtcggcgccataggacacggtgcc

SEQ ID NO: 2023067 - DNA, 25 bp, Homo sapien
agtaggagtccctgacatggctctg

SEQ ID NO: 2023068 - DNA, 25 bp, Homo sapien
catccatcgtgtcggcgccatagga

SEQ ID NO: 2023069 - DNA, 25 bp, Homo sapien
acagatgggaacacacgaggctcag

SEQ ID NO: 2023070 - DNA, 25 bp, Homo sapien
ctcagctggactcatggcgcgggat

SEQ ID NO: 2023071 - DNA, 25 bp, Homo sapien
gaagtagcaggatgttaagaccacc

SEQ ID NO: 2023072 - DNA, 25 bp, Homo sapien
ttcgaacagacgactgaagtagcag

SEQ ID NO: 2023073 - DNA, 25 bp, Homo sapien
tgtaaatttgtgacgcacactgcag

SEQ ID NO: 2023074 - DNA, 25 bp, Homo sapien
tgtacaattttgaacctgataggcc

SEQ ID NO: 2023075 - DNA, 25 bp, Homo sapien
ccccagggtgagctatgtacaattt

SEQ ID NO: 2023076 - DNA, 25 bp, Homo sapien
gctgttaggatgacttgggtccatg

SEQ ID NO: 2023077 - DNA, 25 bp, Homo sapien
cagtattgtttccaccagcttgaga

SEQ ID NO: 2023078 - DNA, 25 bp, Homo sapien
gaagtcttggtcagcctctgcgaac

SEQ ID NO: 2023079 - DNA, 25 bp, Homo sapien
ggctttcacggcttcatggattcga

SEQ ID NO: 2023080 - DNA, 25 bp, Homo sapien
aagcctggtaggtgcgattctcatc

SEQ ID NO: 2023081 - DNA, 25 bp, Homo sapien
gactctggagtccaaatggaacgga

SEQ ID NO: 2023082 - DNA, 25 bp, Homo sapien
caggctacgtcagaggctacatgct

SEQ ID NO: 2023083 - DNA, 25 bp, Homo sapien
tacggaatcagtaaacctcgctggt

SEQ ID NO: 2023084 - DNA, 25 bp, Homo sapien
atggaacggacaagctcccacggtt

SEQ ID NO: 2023085 - DNA, 25 bp, Homo sapien
attcacccgtttatcaaacttcagc

SEQ ID NO: 2023086 - DNA, 25 bp, Homo sapien
caaacttcagcattcgcctcaagtc

SEQ ID NO: 2023087 - DNA, 25 bp, Homo sapien
gtttatcaaacttcagcattcgcct

SEQ ID NO: 2023088 - DNA, 25 bp, Homo sapien
cacccgtttatcaaacttcagcatt

SEQ ID NO: 2023089 - DNA, 25 bp, Homo sapien
gggctgtcccatcacggtggcatcc

SEQ ID NO: 2023090 - DNA, 25 bp, Homo sapien
ggtggcatccctgatacttatctgg

SEQ ID NO: 2023091 - DNA, 25 bp, Homo sapien
tcaatgaaacacagaagctccggtg

SEQ ID NO: 2023092 - DNA, 25 bp, Homo sapien
aggaacgtgtactggctgcgatgca

SEQ ID NO: 2023093 - DNA, 25 bp, Homo sapien
acaactgacctataaaactggtcaa

SEQ ID NO: 2023094 - DNA, 25 bp, Homo sapien
cactcttacatatggatagtttcat

SEQ ID NO: 2023095 - DNA, 25 bp, Homo sapien
cataagcatttgagctgtatttcat

SEQ ID NO: 2023096 - DNA, 25 bp, Homo sapien
tgtccttagacatcattgccaaact

SEQ ID NO: 2023097 - DNA, 25 bp, Homo sapien
aaacacggagagcatgctaaccagg

SEQ ID NO: 2023098 - DNA, 25 bp, Homo sapien
acacggagagcatgctaaccaggga

SEQ ID NO: 2023099 - DNA, 25 bp, Homo sapien
acggagagcatgctaaccagggagg

SEQ ID NO: 2023100 - DNA, 25 bp, Homo sapien
aacacggagagcatgctaaccaggg

SEQ ID NO: 2023101 - DNA, 25 bp, Homo sapien
aaccacggagagcacactatccatg

SEQ ID NO: 2023102 - DNA, 25 bp, Homo sapien
gcgagcacgctaaccatggagagag

SEQ ID NO: 2023103 - DNA, 25 bp, Homo sapien
ccacggagagcacactatccatgga

SEQ ID NO: 2023104 - DNA, 25 bp, Homo sapien
cacggagagcacactatccatggag

SEQ ID NO: 2023105 - DNA, 25 bp, Homo sapien
gagagcacgctaaccagagagagca

SEQ ID NO: 2023106 - DNA, 25 bp, Homo sapien
gagagcacgctaaccacagagagca

SEQ ID NO: 2023107 - DNA, 25 bp, Homo sapien
cggagagcacgctaaccacagagag

SEQ ID NO: 2023108 - DNA, 25 bp, Homo sapien
agagcacactaaccacggagagcac

SEQ ID NO: 2023109 - DNA, 25 bp, Homo sapien
tccctgctgaccagcgtgaggccca

SEQ ID NO: 2023110 - DNA, 25 bp, Homo sapien
agcgtgaggcccacactctctgtcc

SEQ ID NO: 2023111 - DNA, 25 bp, Homo sapien
aggacctggccactgggggtcttca

SEQ ID NO: 2023112 - DNA, 25 bp, Homo sapien
ttcagctgcatggaggtgaggtccc

SEQ ID NO: 2023113 - DNA, 25 bp, Homo sapien
ttgctctcggaggtgaagggaaaca

SEQ ID NO: 2023114 - DNA, 25 bp, Homo sapien
catccgcttgctctcggaggtgaag

SEQ ID NO: 2023115 - DNA, 25 bp, Homo sapien
tgacgatgacgcccatccgcttgct

SEQ ID NO: 2023116 - DNA, 25 bp, Homo sapien
gcccatccgcttgctctcggaggtg

SEQ ID NO: 2023117 - DNA, 25 bp, Homo sapien
cgataggagacatggccacgtcagc

SEQ ID NO: 2023118 - DNA, 25 bp, Homo sapien
cacgtcagcgcccttcatgtagaat

SEQ ID NO: 2023119 - DNA, 25 bp, Homo sapien
ccagtcattatactgcacgatagga

SEQ ID NO: 2023120 - DNA, 25 bp, Homo sapien
tagaatgtgatttctgccgtggatt

SEQ ID NO: 2023121 - DNA, 25 bp, Homo sapien
gacaacctatgtggttcccatcagc

SEQ ID NO: 2023122 - DNA, 25 bp, Homo sapien
tttataaatagataggactcctacc

SEQ ID NO: 2023123 - DNA, 25 bp, Homo sapien
aaacactgtgaaccaggctgagagt

SEQ ID NO: 2023124 - DNA, 25 bp, Homo sapien
accctttctcctttatgaaattgag

SEQ ID NO: 2023125 - DNA, 25 bp, Homo sapien
gtatagattgacacgcactcacaca

SEQ ID NO: 2023126 - DNA, 25 bp, Homo sapien
tgtatagattgacacgcactcacac

SEQ ID NO: 2023127 - DNA, 25 bp, Homo sapien
ttgtatagattgacacgcactcaca

SEQ ID NO: 2023128 - DNA, 25 bp, Homo sapien
aaaagagatacattaaaatataact

SEQ ID NO: 2023129 - DNA, 25 bp, Homo sapien
taaaatataactttgattacatata

SEQ ID NO: 2023130 - DNA, 25 bp, Homo sapien
aatataactttgattacatataaag

SEQ ID NO: 2023131 - DNA, 25 bp, Homo sapien
acaaaagagatacattaaaatataa

SEQ ID NO: 2023132 - DNA, 25 bp, Homo sapien
ccaccccgaaggagatattgattca

SEQ ID NO: 2023133 - DNA, 25 bp, Homo sapien
ggcattttactaggtcttcagggag

SEQ ID NO: 2023134 - DNA, 25 bp, Homo sapien
caacaaagacattggtgaagggaca

SEQ ID NO: 2023135 - DNA, 25 bp, Homo sapien
tgccactaccgttgcgaacactggg

SEQ ID NO: 2023136 - DNA, 25 bp, Homo sapien
tgtttaggaattggaatagtgacct

SEQ ID NO: 2023137 - DNA, 25 bp, Homo sapien
ctgtttaggaattggaatagtgacc

SEQ ID NO: 2023138 - DNA, 25 bp, Homo sapien
tatttgacgttggactggaggctgc

SEQ ID NO: 2023139 - DNA, 25 bp, Homo sapien
ttgattgtatttgacgttggactgg

SEQ ID NO: 2023140 - DNA, 25 bp, Homo sapien
gggtctagcacccttctttatgcat

SEQ ID NO: 2023141 - DNA, 25 bp, Homo sapien
gagaggcgtgggtctagcacccttc

SEQ ID NO: 2023142 - DNA, 25 bp, Homo sapien
cacacgaggttgacgctgccatatt

SEQ ID NO: 2023143 - DNA, 25 bp, Homo sapien
catattgcttacatgaacgagggtc

SEQ ID NO: 2023144 - DNA, 25 bp, Homo sapien
tttaaaaggcttgaacgagcctgct

SEQ ID NO: 2023145 - DNA, 25 bp, Homo sapien
aagtagaccctgatgtccacacgag

SEQ ID NO: 2023146 - DNA, 25 bp, Homo sapien
cagtccttcgcgagccatgtttccg

SEQ ID NO: 2023147 - DNA, 25 bp, Homo sapien
tgctcctctgtcaacgccttctttg

SEQ ID NO: 2023148 - DNA, 25 bp, Homo sapien
cacgagggtccgcagtccttcgcga

SEQ ID NO: 2023149 - DNA, 25 bp, Homo sapien
gggtccgcagtccttcgcgagccat

SEQ ID NO: 2023150 - DNA, 25 bp, Homo sapien
cacacgtgtacgtgctgtgtgtgga

SEQ ID NO: 2023151 - DNA, 25 bp, Homo sapien
tgcacacgtgtacgtgctgtgtgtg

SEQ ID NO: 2023152 - DNA, 25 bp, Homo sapien
tgtgcacacgtgtacgtgctgtgtg

SEQ ID NO: 2023153 - DNA, 25 bp, Homo sapien
acgtgtacgtgctgtgtgtggactc

SEQ ID NO: 2023154 - DNA, 25 bp, Homo sapien
ctcagcttggcttgagtgtatcggc

SEQ ID NO: 2023155 - DNA, 25 bp, Homo sapien
gctcagcttggcttgagtgtatcgg

SEQ ID NO: 2023156 - DNA, 25 bp, Homo sapien
tcagcttggcttgagtgtatcggct

SEQ ID NO: 2023157 - DNA, 25 bp, Homo sapien
cttgatcccggcgttgcgcagcatc

SEQ ID NO: 2023158 - DNA, 25 bp, Homo sapien
ctctccaggctctcgactaccgcgg

SEQ ID NO: 2023159 - DNA, 25 bp, Homo sapien
gactaccgcggccaccttgagggac

SEQ ID NO: 2023160 - DNA, 25 bp, Homo sapien
ttgatcccggcgttgcgcagcatct

SEQ ID NO: 2023161 - DNA, 25 bp, Homo sapien
gacacgagatgtgaacttttggcaa

SEQ ID NO: 2023162 - DNA, 25 bp, Homo sapien
gagtttatcgcctgttagcatccat

SEQ ID NO: 2023163 - DNA, 25 bp, Homo sapien
tgcaggtagctgtctcgagtttatc

SEQ ID NO: 2023164 - DNA, 25 bp, Homo sapien
tatcttgtgttctagacacgagatg

SEQ ID NO: 2023165 - DNA, 25 bp, Homo sapien
tttgcagagtcacagtggaatgttc

SEQ ID NO: 2023166 - DNA, 25 bp, Homo sapien
gttgtctaagttacaggcacagaga

SEQ ID NO: 2023167 - DNA, 25 bp, Homo sapien
gagaaacagggcattatttgcagag

SEQ ID NO: 2023168 - DNA, 25 bp, Homo sapien
taaaatgttgtctaagttacaggca

SEQ ID NO: 2023169 - DNA, 25 bp, Homo sapien
catgcttccttcgaaatgcattcag

SEQ ID NO: 2023170 - DNA, 25 bp, Homo sapien
ttccttcgaaatgcattcagctcca

SEQ ID NO: 2023171 - DNA, 25 bp, Homo sapien
tatgactagtgcacaatcatgcttc

SEQ ID NO: 2023172 - DNA, 25 bp, Homo sapien
cagagagtccccagatatgactagt

SEQ ID NO: 2023173 - DNA, 25 bp, Homo sapien
cagtgtcacaatgcgggccttctgg

SEQ ID NO: 2023174 - DNA, 25 bp, Homo sapien
catgctcgtagtactttagacaaac

SEQ ID NO: 2023175 - DNA, 25 bp, Homo sapien
cagctccacaaattcatgctcgtag

SEQ ID NO: 2023176 - DNA, 25 bp, Homo sapien
gtgagcagcggcagcaaaccacggc

SEQ ID NO: 2023177 - DNA, 25 bp, Homo sapien
tggcgcaggtgcgtctccctgtgtg

SEQ ID NO: 2023178 - DNA, 25 bp, Homo sapien
cgatggcgcaggtgcgtctccctgt

SEQ ID NO: 2023179 - DNA, 25 bp, Homo sapien
ggcgcaggtgcgtctccctgtgtgc

SEQ ID NO: 2023180 - DNA, 25 bp, Homo sapien
gatggcgcaggtgcgtctccctgtg

SEQ ID NO: 2023181 - DNA, 25 bp, Homo sapien
atcccaatcccacagtctgctgcct

SEQ ID NO: 2023182 - DNA, 25 bp, Homo sapien
tgtgttgataaaagggcgaacctac

SEQ ID NO: 2023183 - DNA, 25 bp, Homo sapien
taggtgctgagtgtacagtggccca

SEQ ID NO: 2023184 - DNA, 25 bp, Homo sapien
gacgtgcactgaccaagtaggtgct

SEQ ID NO: 2023185 - DNA, 25 bp, Homo sapien
cgagcgtacgctaagcacatgctga

SEQ ID NO: 2023186 - DNA, 25 bp, Homo sapien
tcgccgagggatctgctaacatctg

SEQ ID NO: 2023187 - DNA, 25 bp, Homo sapien
ccttgtgatctgagtgtgggcccgc

SEQ ID NO: 2023188 - DNA, 25 bp, Homo sapien
ccttttcaaacatggcggacgctgg

SEQ ID NO: 2023189 - DNA, 25 bp, Homo sapien
tgaccacacgtgttgaccaagtgcg

SEQ ID NO: 2023190 - DNA, 25 bp, Homo sapien
tgtgcatgacgaactggccgagtgc

SEQ ID NO: 2023191 - DNA, 25 bp, Homo sapien
tcttgtagctgttccgcccgtgcac

SEQ ID NO: 2023192 - DNA, 25 bp, Homo sapien
tgagcagcctgcctatgtgccggaa

SEQ ID NO: 2023193 - DNA, 25 bp, Homo sapien
gagtgccgccgacctcttgtagctg

SEQ ID NO: 2023194 - DNA, 25 bp, Homo sapien
acagacgaagacaactgtcagttcc

SEQ ID NO: 2023195 - DNA, 25 bp, Homo sapien
ccatgggtgccagcacagaaggctt

SEQ ID NO: 2023196 - DNA, 25 bp, Homo sapien
gggcctcgctaactcctaagcacag

SEQ ID NO: 2023197 - DNA, 25 bp, Homo sapien
tgtcagttccacgagcacctgtggc

SEQ ID NO: 2023198 - DNA, 25 bp, Homo sapien
tacaaagggacggatgcgaagtaga

SEQ ID NO: 2023199 - DNA, 25 bp, Homo sapien
tgaggaagccctgatacaaagggac

SEQ ID NO: 2023200 - DNA, 25 bp, Homo sapien
ccctgatacaaagggacggatgcga

SEQ ID NO: 2023201 - DNA, 25 bp, Homo sapien
gatgcgaagtagaagactgaggaaa

SEQ ID NO: 2023202 - DNA, 25 bp, Homo sapien
gtcctcccctggatgagctggcagg

SEQ ID NO: 2023203 - DNA, 25 bp, Homo sapien
ccctggatgagctggcaggttctga

SEQ ID NO: 2023204 - DNA, 25 bp, Homo sapien
gctggcaggttctgagtgtaactta

SEQ ID NO: 2023205 - DNA, 25 bp, Homo sapien
ctggcaggttctgagtgtaacttac

SEQ ID NO: 2023206 - DNA, 25 bp, Homo sapien
cacgcaggagaataggacgctaact

SEQ ID NO: 2023207 - DNA, 25 bp, Homo sapien
tccttgtagagcacgcaggagaata

SEQ ID NO: 2023208 - DNA, 25 bp, Homo sapien
tacgaggacccgatataccttgtgc

SEQ ID NO: 2023209 - DNA, 25 bp, Homo sapien
gctaactggtaatacaactgcgcag

SEQ ID NO: 2023210 - DNA, 25 bp, Homo sapien
cagggccgatgacggcgctttcctt

SEQ ID NO: 2023211 - DNA, 25 bp, Homo sapien
gctgtcctgtgctacctcatactgg

SEQ ID NO: 2023212 - DNA, 25 bp, Homo sapien
agtctgcaatgcttacgatcatggg

SEQ ID NO: 2023213 - DNA, 25 bp, Homo sapien
ctgagggagcctcagcggccaggag

SEQ ID NO: 2023214 - DNA, 25 bp, Homo sapien
tatccatctgagtcactagcaaggg

SEQ ID NO: 2023215 - DNA, 25 bp, Homo sapien
ttaggaagtctgtgccaatctgggc

SEQ ID NO: 2023216 - DNA, 25 bp, Homo sapien
tgactttaacgagagcactcacagg

SEQ ID NO: 2023217 - DNA, 25 bp, Homo sapien
taaatctgtttatcacggctggaag

SEQ ID NO: 2023218 - DNA, 25 bp, Homo sapien
tgcaggccagcgtctcacactatgg

SEQ ID NO: 2023219 - DNA, 25 bp, Homo sapien
tggatggccgttggtgttttcccag

SEQ ID NO: 2023220 - DNA, 25 bp, Homo sapien
ttgccgagcgtgtcctctgctttct

SEQ ID NO: 2023221 - DNA, 25 bp, Homo sapien
cagcgtctcacactatggacacaat

SEQ ID NO: 2023222 - DNA, 25 bp, Homo sapien
gagattccacggtcactaaatgcag

SEQ ID NO: 2023223 - DNA, 25 bp, Homo sapien
ttgacaagtgtcatggaaccgccgt

SEQ ID NO: 2023224 - DNA, 25 bp, Homo sapien
acataaatggctgttccccgcaggc

SEQ ID NO: 2023225 - DNA, 25 bp, Homo sapien
tttagccttgaaacatgcggatacc

SEQ ID NO: 2023226 - DNA, 25 bp, Homo sapien
gaacatggtgtatatggtggcatac

SEQ ID NO: 2023227 - DNA, 25 bp, Homo sapien
gtagagcatcgccatctctggcttc

SEQ ID NO: 2023228 - DNA, 25 bp, Homo sapien
tacagctccgggtagagcatcgcca

SEQ ID NO: 2023229 - DNA, 25 bp, Homo sapien
tggtccagcactaaggagaacactg

SEQ ID NO: 2023230 - DNA, 25 bp, Homo sapien
tcatcagacaacaacgcagagtgct

SEQ ID NO: 2023231 - DNA, 25 bp, Homo sapien
cgatgcttcccagtagtcacgatga

SEQ ID NO: 2023232 - DNA, 25 bp, Homo sapien
gatgccaccatgataataacgcttg

SEQ ID NO: 2023233 - DNA, 25 bp, Homo sapien
gactcagaactgactggaccggcac

SEQ ID NO: 2023234 - DNA, 25 bp, Homo sapien
acctaggaacaggactactgggtca

SEQ ID NO: 2023235 - DNA, 25 bp, Homo sapien
caccctagcagtgaaggggagtctc

SEQ ID NO: 2023236 - DNA, 25 bp, Homo sapien
tgtcttccgaagaggctgtatcatt

SEQ ID NO: 2023237 - DNA, 25 bp, Homo sapien
tggctgaagggcacaaggttgtttc

SEQ ID NO: 2023238 - DNA, 25 bp, Homo sapien
atgtccttccatcacgcgggagctg

SEQ ID NO: 2023239 - DNA, 25 bp, Homo sapien
tgtcctccatccacgcatggactgt

SEQ ID NO: 2023240 - DNA, 25 bp, Homo sapien
tgggctgtccccgtccacagagatg

SEQ ID NO: 2023241 - DNA, 25 bp, Homo sapien
agatgtccttccatccacgcacaag

SEQ ID NO: 2023242 - DNA, 25 bp, Homo sapien
tgttgaggagacacgtgtcccctgc

SEQ ID NO: 2023243 - DNA, 25 bp, Homo sapien
ggttcctgattctagccactcggtg

SEQ ID NO: 2023244 - DNA, 25 bp, Homo sapien
tggaagacctcgtgacagtggctgc

SEQ ID NO: 2023245 - DNA, 25 bp, Homo sapien
cactcggtgtatggcctaggactgt

SEQ ID NO: 2023246 - DNA, 25 bp, Homo sapien
ctgagggtagagacgtgccaacgac

SEQ ID NO: 2023247 - DNA, 25 bp, Homo sapien
cactttgaaggataagactgcagct

SEQ ID NO: 2023248 - DNA, 25 bp, Homo sapien
gtgacgttcccgacagctcttctgc

SEQ ID NO: 2023249 - DNA, 25 bp, Homo sapien
agtatgctggtggtagggtcctaca

SEQ ID NO: 2023250 - DNA, 25 bp, Homo sapien
tggagtggagtcctgcctagcacac

SEQ ID NO: 2023251 - DNA, 25 bp, Homo sapien
tttgatggtacagacacgttactca

SEQ ID NO: 2023252 - DNA, 25 bp, Homo sapien
tgtggctcacgtgcatgaaataaaa

SEQ ID NO: 2023253 - DNA, 25 bp, Homo sapien
gatgtccccgtatgtgtggaatgcc

SEQ ID NO: 2023254 - DNA, 25 bp, Homo sapien
ccagccaagcaccactgatttttaa

SEQ ID NO: 2023255 - DNA, 25 bp, Homo sapien
cagccaagcaccactgatttttaaa

SEQ ID NO: 2023256 - DNA, 25 bp, Homo sapien
cccagccaagcaccactgattttta

SEQ ID NO: 2023257 - DNA, 25 bp, Homo sapien
acccagccaagcaccactgattttt

SEQ ID NO: 2023258 - DNA, 25 bp, Homo sapien
taagccaggagtgatgtatacaagc

SEQ ID NO: 2023259 - DNA, 25 bp, Homo sapien
taaaccctcgctggagaacatgtca

SEQ ID NO: 2023260 - DNA, 25 bp, Homo sapien
atggaatgggtccttgcgccaggcc

SEQ ID NO: 2023261 - DNA, 25 bp, Homo sapien
gttcttcagtaaggatggcacatct

SEQ ID NO: 2023262 - DNA, 25 bp, Homo sapien
cgaatcctgaagaagctgcctgggt

SEQ ID NO: 2023263 - DNA, 25 bp, Homo sapien
catttcgggcgccttttcctgacac

SEQ ID NO: 2023264 - DNA, 25 bp, Homo sapien
tccactggtgcctgaggttagacgt

SEQ ID NO: 2023265 - DNA, 25 bp, Homo sapien
tctgtttgacctgccgtcttgttgg

SEQ ID NO: 2023266 - DNA, 25 bp, Homo sapien
tagtgcgcagaaccacctgcttgac

SEQ ID NO: 2023267 - DNA, 25 bp, Homo sapien
gagctatgggtcacttctgaaagac

SEQ ID NO: 2023268 - DNA, 25 bp, Homo sapien
gaaacagtggaagagcgtcgttagt

SEQ ID NO: 2023269 - DNA, 25 bp, Homo sapien
cttgactcacgccttccaggagtga

SEQ ID NO: 2023270 - DNA, 25 bp, Homo sapien
aaatacttattaaaacccagatgag

SEQ ID NO: 2023271 - DNA, 25 bp, Homo sapien
tacttattaaaacccagatgaggaa

SEQ ID NO: 2023272 - DNA, 25 bp, Homo sapien
gatgaggaaggttttgaaggacaag

SEQ ID NO: 2023273 - DNA, 25 bp, Homo sapien
ccagatgaggaaggttttgaaggac

SEQ ID NO: 2023274 - DNA, 25 bp, Homo sapien
ggagctttttccatgcacacgagca

SEQ ID NO: 2023275 - DNA, 25 bp, Homo sapien
tttttccatgcacacgagcagggtg

SEQ ID NO: 2023276 - DNA, 25 bp, Homo sapien
ccatgcacacgagcagggtgtaagc

SEQ ID NO: 2023277 - DNA, 25 bp, Homo sapien
aaacagcaggagctttttccatgca

SEQ ID NO: 2023278 - DNA, 25 bp, Homo sapien
aaggagatggccaccacgtggacga

SEQ ID NO: 2023279 - DNA, 25 bp, Homo sapien
tcagcagctcggtcaggatcagtgc

SEQ ID NO: 2023280 - DNA, 25 bp, Homo sapien
gaactcagactcgaagagcaccagg

SEQ ID NO: 2023281 - DNA, 25 bp, Homo sapien
tagcagcctaagctgaggaactcgg

SEQ ID NO: 2023282 - DNA, 25 bp, Homo sapien
aatcatgaatagagaacgattcaaa

SEQ ID NO: 2023283 - DNA, 25 bp, Homo sapien
tcaaaatcatgaatagagaacgatt

SEQ ID NO: 2023284 - DNA, 25 bp, Homo sapien
tcatgaatagagaacgattcaaaaa

SEQ ID NO: 2023285 - DNA, 25 bp, Homo sapien
gaatagagaacgattcaaaaaacaa

SEQ ID NO: 2023286 - DNA, 25 bp, Homo sapien
gaaagctccaaaagacactctgcct

SEQ ID NO: 2023287 - DNA, 25 bp, Homo sapien
ctaagaaagctccaaaagacactct

SEQ ID NO: 2023288 - DNA, 25 bp, Homo sapien
taagaaagctccaaaagacactctg

SEQ ID NO: 2023289 - DNA, 25 bp, Homo sapien
gctccaaaagacactctgcctatac

SEQ ID NO: 2023290 - DNA, 25 bp, Homo sapien
gaaatccctttagactgttgccgga

SEQ ID NO: 2023291 - DNA, 25 bp, Homo sapien
tgcaacacaaatactcagaccggtc

SEQ ID NO: 2023292 - DNA, 25 bp, Homo sapien
taatgactagctacttgaattccgc

SEQ ID NO: 2023293 - DNA, 25 bp, Homo sapien
gaagcgctggatctctgtatgaagg

SEQ ID NO: 2023294 - DNA, 25 bp, Homo sapien
cattatagattgcaggccgggcgca

SEQ ID NO: 2023295 - DNA, 25 bp, Homo sapien
gcataccgggcataattcattcttc

SEQ ID NO: 2023296 - DNA, 25 bp, Homo sapien
gaattgtttgacctgcataccgggc

SEQ ID NO: 2023297 - DNA, 25 bp, Homo sapien
cggtctaagcttgccacggaaacat

SEQ ID NO: 2023298 - DNA, 25 bp, Homo sapien
tccacaggaaggtcacggtggtgat

SEQ ID NO: 2023299 - DNA, 25 bp, Homo sapien
cacaggaaggtcacggtggtgataa

SEQ ID NO: 2023300 - DNA, 25 bp, Homo sapien
agctgaccacggtgatcgccgacac

SEQ ID NO: 2023301 - DNA, 25 bp, Homo sapien
cggtgatcgccgacactttccacag

SEQ ID NO: 2023302 - DNA, 25 bp, Homo sapien
ccagcttgcagtagctgggaggaga

SEQ ID NO: 2023303 - DNA, 25 bp, Homo sapien
ggccagcttgcagtagctgggagga

SEQ ID NO: 2023304 - DNA, 25 bp, Homo sapien
gccagcttgcagtagctgggaggag

SEQ ID NO: 2023305 - DNA, 25 bp, Homo sapien
ggtagcaatggcaaaccctgcgttc

SEQ ID NO: 2023306 - DNA, 25 bp, Homo sapien
ggtgacgtccctgcactgagaagga

SEQ ID NO: 2023307 - DNA, 25 bp, Homo sapien
tcactggcaagggcacaaggtgctg

SEQ ID NO: 2023308 - DNA, 25 bp, Homo sapien
gggagaagccatcctggcatctgtg

SEQ ID NO: 2023309 - DNA, 25 bp, Homo sapien
ggagaggctgtctcagcatctatgc

SEQ ID NO: 2023310 - DNA, 25 bp, Homo sapien
gagaggctgtctcagcatctatgcc

SEQ ID NO: 2023311 - DNA, 25 bp, Homo sapien
cgggctcattttcagtagaaactca

SEQ ID NO: 2023312 - DNA, 25 bp, Homo sapien
cagagtaagatgaaccctttacagt

SEQ ID NO: 2023313 - DNA, 25 bp, Homo sapien
aggaagaggccatcgcagcatctgt

SEQ ID NO: 2023314 - DNA, 25 bp, Homo sapien
gtaatagtgaaataattcgggctca

SEQ ID NO: 2023315 - DNA, 25 bp, Homo sapien
aggaatgactttgtgttataacatc

SEQ ID NO: 2023316 - DNA, 25 bp, Homo sapien
actttcagtctaattctcagaatgc

SEQ ID NO: 2023317 - DNA, 25 bp, Homo sapien
ggaatgactttgtgttataacatca

SEQ ID NO: 2023318 - DNA, 25 bp, Homo sapien
aactttcagtctaattctcagaatg

SEQ ID NO: 2023319 - DNA, 25 bp, Homo sapien
agtataaagcgagggtatcttcagc

SEQ ID NO: 2023320 - DNA, 25 bp, Homo sapien
tggggcaggccgtctgtctgagtgg

SEQ ID NO: 2023321 - DNA, 25 bp, Homo sapien
ggggcaggccgtctgtctgagtggg

SEQ ID NO: 2023322 - DNA, 25 bp, Homo sapien
aagtataaagcgagggtatcttcag

SEQ ID NO: 2023323 - DNA, 25 bp, Homo sapien
gaattccattcaacaggcgctgatg

SEQ ID NO: 2023324 - DNA, 25 bp, Homo sapien
gaaaggcagcttgattgctctctgt

SEQ ID NO: 2023325 - DNA, 25 bp, Homo sapien
gacagatgacggcagaggaattcca

SEQ ID NO: 2023326 - DNA, 25 bp, Homo sapien
tccggaaactcaggatgctccagcg

SEQ ID NO: 2023327 - DNA, 25 bp, Homo sapien
ggttaacgcacactgtctgcatggg

SEQ ID NO: 2023328 - DNA, 25 bp, Homo sapien
ctgcagggtccacacgagcatctgt

SEQ ID NO: 2023329 - DNA, 25 bp, Homo sapien
cctggtgcatcctggcgggtcagca

SEQ ID NO: 2023330 - DNA, 25 bp, Homo sapien
tggacaagccgaggctcaggtcaag

SEQ ID NO: 2023331 - DNA, 25 bp, Homo sapien
tcacctgcttgagggaacggaacct

SEQ ID NO: 2023332 - DNA, 25 bp, Homo sapien
cacagcctgggttcactgagcttcc

SEQ ID NO: 2023333 - DNA, 25 bp, Homo sapien
gactctccttctgatgcgtgtgcag

SEQ ID NO: 2023334 - DNA, 25 bp, Homo sapien
gaacctgccctagacaaagcgtggg

SEQ ID NO: 2023335 - DNA, 25 bp, Homo sapien
catggctgaacagggtcctcgcttc

SEQ ID NO: 2023336 - DNA, 25 bp, Homo sapien
gccaatgaggacagcttcacggaga

SEQ ID NO: 2023337 - DNA, 25 bp, Homo sapien
tcacttgcacctgaaggaggcctaa

SEQ ID NO: 2023338 - DNA, 25 bp, Homo sapien
tcaggaatgtgtgcaaagcccaggg

SEQ ID NO: 2023339 - DNA, 25 bp, Homo sapien
tgttaaattccacggctgccattgg

SEQ ID NO: 2023340 - DNA, 25 bp, Homo sapien
gagaggagtcttacctgtgcccaga

SEQ ID NO: 2023341 - DNA, 25 bp, Homo sapien
tagagttatgcctctggcttgctcc

SEQ ID NO: 2023342 - DNA, 25 bp, Homo sapien
tgatatttgttttgacccctggagg

SEQ ID NO: 2023343 - DNA, 25 bp, Homo sapien
atctggtcattccccaggcagtttc

SEQ ID NO: 2023344 - DNA, 25 bp, Homo sapien
taaatgtgggggtcatactcttgtg

SEQ ID NO: 2023345 - DNA, 25 bp, Homo sapien
tttcccattaaatccaatatctggt

SEQ ID NO: 2023346 - DNA, 25 bp, Homo sapien
tgtgggggtcatactcttgtgtttc

SEQ ID NO: 2023347 - DNA, 25 bp, Homo sapien
tacgtaattaccttaagaggcactc

SEQ ID NO: 2023348 - DNA, 25 bp, Homo sapien
ctctcagtttgtcggaaaaagtctt

SEQ ID NO: 2023349 - DNA, 25 bp, Homo sapien
tctgctgcgcataggatttgggatt

SEQ ID NO: 2023350 - DNA, 25 bp, Homo sapien
ggtcagctggcaacaaactctcagt

SEQ ID NO: 2023351 - DNA, 25 bp, Homo sapien
tccgaaggccctagtgtggtggtta

SEQ ID NO: 2023352 - DNA, 25 bp, Homo sapien
cgcgcccagtggataagtgctcatt

SEQ ID NO: 2023353 - DNA, 25 bp, Homo sapien
gaaagtatgtctcctctagacggca

SEQ ID NO: 2023354 - DNA, 25 bp, Homo sapien
tcctggaggatgttacttgtgcgct

SEQ ID NO: 2023355 - DNA, 25 bp, Homo sapien
gctgctgggatctggcgcggcgact

SEQ ID NO: 2023356 - DNA, 25 bp, Homo sapien
ccggcgagttcggagcctctgagtc

SEQ ID NO: 2023357 - DNA, 25 bp, Homo sapien
gcgggcggaggcacaggagaagcgg

SEQ ID NO: 2023358 - DNA, 25 bp, Homo sapien
cgccccggaggaaagtcatcgaggg

SEQ ID NO: 2023359 - DNA, 25 bp, Homo sapien
aaacttggaagggactggaaagctg

SEQ ID NO: 2023360 - DNA, 25 bp, Homo sapien
agccgcagggccaagtggaaacttg

SEQ ID NO: 2023361 - DNA, 25 bp, Homo sapien
ttcctccgctgacttcatggtgccg

SEQ ID NO: 2023362 - DNA, 25 bp, Homo sapien
ctctcccgaagaccgcagccgcagg

SEQ ID NO: 2023363 - DNA, 25 bp, Homo sapien
acgagcggcaccaggtacctaaggc

SEQ ID NO: 2023364 - DNA, 25 bp, Homo sapien
ggaaagcggctgcaacggtgacccc

SEQ ID NO: 2023365 - DNA, 25 bp, Homo sapien
ccaacgctaggaaccccgatttcag

SEQ ID NO: 2023366 - DNA, 25 bp, Homo sapien
gatttcagcccgacggtgccgggaa

SEQ ID NO: 2023367 - DNA, 25 bp, Homo sapien
cgggagccggggtcgcggccgccag

SEQ ID NO: 2023368 - DNA, 25 bp, Homo sapien
gcgggagccggggtcgcggccgcca

SEQ ID NO: 2023369 - DNA, 25 bp, Homo sapien
cgaagtcgaactcctggtcctccag

SEQ ID NO: 2023370 - DNA, 25 bp, Homo sapien
gctggttaaactcgaagaggaactc

SEQ ID NO: 2023371 - DNA, 25 bp, Homo sapien
gaggaactcgaagtcgaactcctgg

SEQ ID NO: 2023372 - DNA, 25 bp, Homo sapien
gcggcgccctcgtcgcgctggttaa

SEQ ID NO: 2023373 - DNA, 25 bp, Homo sapien
gccggcagggtggagtgcgccgtgg

SEQ ID NO: 2023374 - DNA, 25 bp, Homo sapien
gatgcccggtgtggaggtctgaagg

SEQ ID NO: 2023375 - DNA, 25 bp, Homo sapien
tgacgttggaggatgcatagccata

SEQ ID NO: 2023376 - DNA, 25 bp, Homo sapien
ccggcgggatgatgcccggtgtgga

SEQ ID NO: 2023377 - DNA, 25 bp, Homo sapien
tatctcgatgcgaggactctccagg

SEQ ID NO: 2023378 - DNA, 25 bp, Homo sapien
tacaggcccaagcacgaggttatct

SEQ ID NO: 2023379 - DNA, 25 bp, Homo sapien
aactggttattgttgtggtacaggc

SEQ ID NO: 2023380 - DNA, 25 bp, Homo sapien
ctccacatcgtggaaaaactggtta

SEQ ID NO: 2023381 - DNA, 25 bp, Homo sapien
gccacgatggccgagctggtgtact

SEQ ID NO: 2023382 - DNA, 25 bp, Homo sapien
tcttgcgggacttgacagggacgcc

SEQ ID NO: 2023383 - DNA, 25 bp, Homo sapien
cagggagactgccatggcgacgtct

SEQ ID NO: 2023384 - DNA, 25 bp, Homo sapien
gtgttgcccaaccacgagtcgtcgg

SEQ ID NO: 2023385 - DNA, 25 bp, Homo sapien
cgctctgcggggtctcgccccctga

SEQ ID NO: 2023386 - DNA, 25 bp, Homo sapien
gccctccgctctgcggggtctcgcc

SEQ ID NO: 2023387 - DNA, 25 bp, Homo sapien
cacctgccctccgctctgcggggtc

SEQ ID NO: 2023388 - DNA, 25 bp, Homo sapien
ctgccctccgctctgcggggtctcg

SEQ ID NO: 2023389 - DNA, 25 bp, Homo sapien
aggccacttgctatgatcaccgtca

SEQ ID NO: 2023390 - DNA, 25 bp, Homo sapien
tgggaggccacttgctatgatcacc

SEQ ID NO: 2023391 - DNA, 25 bp, Homo sapien
cacttgctatgatcaccgtcattac

SEQ ID NO: 2023392 - DNA, 25 bp, Homo sapien
cttgctatgatcaccgtcattaccc

SEQ ID NO: 2023393 - DNA, 25 bp, Homo sapien
tgcacgtcctgacatggagatggag

SEQ ID NO: 2023394 - DNA, 25 bp, Homo sapien
gatggagaagcctgtgtcaatgcag

SEQ ID NO: 2023395 - DNA, 25 bp, Homo sapien
tactcatcgtgacctgtggccacgg

SEQ ID NO: 2023396 - DNA, 25 bp, Homo sapien
cttgggtggacacttcatcggcgag

SEQ ID NO: 2023397 - DNA, 25 bp, Homo sapien
atacgggcctgagtgggacggcagc

SEQ ID NO: 2023398 - DNA, 25 bp, Homo sapien
gggcctgagtgggacggcagctgcc

SEQ ID NO: 2023399 - DNA, 25 bp, Homo sapien
ctcatacgggcctgagtgggacggc

SEQ ID NO: 2023400 - DNA, 25 bp, Homo sapien
acgggcctgagtgggacggcagctg

SEQ ID NO: 2023401 - DNA, 25 bp, Homo sapien
ctgcacgatggggtgtcctccggcc

SEQ ID NO: 2023402 - DNA, 25 bp, Homo sapien
gctgccctccgtctcgtagtgggct

SEQ ID NO: 2023403 - DNA, 25 bp, Homo sapien
tgtcctccggccgacgccttcacgg

SEQ ID NO: 2023404 - DNA, 25 bp, Homo sapien
cctccgtctcgtagtgggctcggtg

SEQ ID NO: 2023405 - DNA, 25 bp, Homo sapien
gtgcgagtctggccgcagtgcctac

SEQ ID NO: 2023406 - DNA, 25 bp, Homo sapien
tagctgacgaggtaacaggtggaac

SEQ ID NO: 2023407 - DNA, 25 bp, Homo sapien
caggtggaacgaagaaaatgccaac

SEQ ID NO: 2023408 - DNA, 25 bp, Homo sapien
ttggggtgtgctcggaaaacatcct

SEQ ID NO: 2023409 - DNA, 25 bp, Homo sapien
tgctgccgcgtagcctggagccctg

SEQ ID NO: 2023410 - DNA, 25 bp, Homo sapien
ctgccgccggctgctgcgttggcaa

SEQ ID NO: 2023411 - DNA, 25 bp, Homo sapien
ggcaaacagccatttgtccctgcgg

SEQ ID NO: 2023412 - DNA, 25 bp, Homo sapien
aaacagccatttgtccctgcggcca

SEQ ID NO: 2023413 - DNA, 25 bp, Homo sapien
ctgctgcgttggcaaacagccattt

SEQ ID NO: 2023414 - DNA, 25 bp, Homo sapien
tgctggtgtttttagcgccgtggca

SEQ ID NO: 2023415 - DNA, 25 bp, Homo sapien
cagggccccgctcttccaggctaaa

SEQ ID NO: 2023416 - DNA, 25 bp, Homo sapien
ttttagcgccgtggcagccgtaatg

SEQ ID NO: 2023417 - DNA, 25 bp, Homo sapien
cacggccctgttgctttgatgctgg

SEQ ID NO: 2023418 - DNA, 25 bp, Homo sapien
ctgctgggtgtggcccaggggcacc

SEQ ID NO: 2023419 - DNA, 25 bp, Homo sapien
gtgtggcccaggggcaccacggtgt

SEQ ID NO: 2023420 - DNA, 25 bp, Homo sapien
ctgggtgtggcccaggggcaccacg

SEQ ID NO: 2023421 - DNA, 25 bp, Homo sapien
ggtgtggcccaggggcaccacggtg

SEQ ID NO: 2023422 - DNA, 25 bp, Homo sapien
caccgacagggccacggagccaggg

SEQ ID NO: 2023423 - DNA, 25 bp, Homo sapien
acggagccagggcactgacgtggag

SEQ ID NO: 2023424 - DNA, 25 bp, Homo sapien
tggagggtgcaggggccccaacgca

SEQ ID NO: 2023425 - DNA, 25 bp, Homo sapien
cagagcaccgacagggccacggagc

SEQ ID NO: 2023426 - DNA, 25 bp, Homo sapien
ggaaggacacagcctgacgccgcac

SEQ ID NO: 2023427 - DNA, 25 bp, Homo sapien
agcctgacgccgcacacctcttgtc

SEQ ID NO: 2023428 - DNA, 25 bp, Homo sapien
gccgcacacctcttgtcctggttcc

SEQ ID NO: 2023429 - DNA, 25 bp, Homo sapien
gaaggacacagcctgacgccgcaca

SEQ ID NO: 2023430 - DNA, 25 bp, Homo sapien
cctggccccttcagatgcgggaaag

SEQ ID NO: 2023431 - DNA, 25 bp, Homo sapien
gccccttcagatgcgggaaagggcc

SEQ ID NO: 2023432 - DNA, 25 bp, Homo sapien
ggctttaaggggcagcttcatctgc

SEQ ID NO: 2023433 - DNA, 25 bp, Homo sapien
gcagcttcatctgccggacgccctg

SEQ ID NO: 2023434 - DNA, 25 bp, Homo sapien
tgtgcagaagcctccgtgagtgtgg

SEQ ID NO: 2023435 - DNA, 25 bp, Homo sapien
tccaggtgaagccaccaagagacag

SEQ ID NO: 2023436 - DNA, 25 bp, Homo sapien
caggttgtacgtgagcagtgcttcc

SEQ ID NO: 2023437 - DNA, 25 bp, Homo sapien
acaggctgccggtgtgatttctgtg

SEQ ID NO: 2023438 - DNA, 25 bp, Homo sapien
caaatttattcaacgtggaactcag

SEQ ID NO: 2023439 - DNA, 25 bp, Homo sapien
gaggccaaatttattcaacgtggaa

SEQ ID NO: 2023440 - DNA, 25 bp, Homo sapien
tggtgggtagtggatgattgaggcc

SEQ ID NO: 2023441 - DNA, 25 bp, Homo sapien
tgattgaggccaaatttattcaacg

SEQ ID NO: 2023442 - DNA, 25 bp, Homo sapien
agacggcaactgcagcacgatgacc

SEQ ID NO: 2023443 - DNA, 25 bp, Homo sapien
tttaaaatctttgaccacagacggc

SEQ ID NO: 2023444 - DNA, 25 bp, Homo sapien
acgatgaccacgtgcagagtccagg

SEQ ID NO: 2023445 - DNA, 25 bp, Homo sapien
gccacaggaaaatgcgacgcctgcc

SEQ ID NO: 2023446 - DNA, 25 bp, Homo sapien
gcatggaggtgtctatagtccgcac

SEQ ID NO: 2023447 - DNA, 25 bp, Homo sapien
ggtgcttccgccaggacactagtgg

SEQ ID NO: 2023448 - DNA, 25 bp, Homo sapien
gctgagcagctagtgtccagaggca

SEQ ID NO: 2023449 - DNA, 25 bp, Homo sapien
agacaaatggagcagccccggtgct

SEQ ID NO: 2023450 - DNA, 25 bp, Homo sapien
ggacgccacactgcgtttgcacaca

SEQ ID NO: 2023451 - DNA, 25 bp, Homo sapien
cctgtgttccattaacctggaaccg

SEQ ID NO: 2023452 - DNA, 25 bp, Homo sapien
gggacgccacactgcgtttgcacac

SEQ ID NO: 2023453 - DNA, 25 bp, Homo sapien
attaacctggaaccgggcagcgcgc

SEQ ID NO: 2023454 - DNA, 25 bp, Homo sapien
gaaaatgccttgttatcccaatgga

SEQ ID NO: 2023455 - DNA, 25 bp, Homo sapien
cagagaaaacctgcggcgggttcga

SEQ ID NO: 2023456 - DNA, 25 bp, Homo sapien
ggagtcaccggaacgcagagaaaac

SEQ ID NO: 2023457 - DNA, 25 bp, Homo sapien
gagaacagaaaacacctgctcagca

SEQ ID NO: 2023458 - DNA, 25 bp, Homo sapien
gctcattctccaagtagccatgcag

SEQ ID NO: 2023459 - DNA, 25 bp, Homo sapien
cagcggctcattctccaagtagcca

SEQ ID NO: 2023460 - DNA, 25 bp, Homo sapien
gcggctcattctccaagtagccatg

SEQ ID NO: 2023461 - DNA, 25 bp, Homo sapien
ggctcattctccaagtagccatgca

SEQ ID NO: 2023462 - DNA, 25 bp, Homo sapien
tcgcatgctgttctccggcaggagt

SEQ ID NO: 2023463 - DNA, 25 bp, Homo sapien
gctggtggtggacacggtcttccct

SEQ ID NO: 2023464 - DNA, 25 bp, Homo sapien
cttccctgtgatgcggtgcacctgg

SEQ ID NO: 2023465 - DNA, 25 bp, Homo sapien
gcggtcgtccgccgtcccaatgaaa

SEQ ID NO: 2023466 - DNA, 25 bp, Homo sapien
ttgcgggacgtgaacgcggaacacc

SEQ ID NO: 2023467 - DNA, 25 bp, Homo sapien
atgtccgtctctcctttccgaagtt

SEQ ID NO: 2023468 - DNA, 25 bp, Homo sapien
gtgttcttcctcccgatgtccgtct

SEQ ID NO: 2023469 - DNA, 25 bp, Homo sapien
gaagttcaatgtcggagtttctgag

SEQ ID NO: 2023470 - DNA, 25 bp, Homo sapien
gaaaatgaccttggagtcctgcagg

SEQ ID NO: 2023471 - DNA, 25 bp, Homo sapien
gaccggatagctgtccgtgctctgc

SEQ ID NO: 2023472 - DNA, 25 bp, Homo sapien
tttctccacgaaaatgaccttggag

SEQ ID NO: 2023473 - DNA, 25 bp, Homo sapien
aagttgtggccagacaggaccatct

SEQ ID NO: 2023474 - DNA, 25 bp, Homo sapien
cggtgaccgtgcacaggtgggtcct

SEQ ID NO: 2023475 - DNA, 25 bp, Homo sapien
cacagccggatgcagacacgggcca

SEQ ID NO: 2023476 - DNA, 25 bp, Homo sapien
tgctccaccgactgggaaccggttc

SEQ ID NO: 2023477 - DNA, 25 bp, Homo sapien
cataagccccgtcccggtgaccgtg

SEQ ID NO: 2023478 - DNA, 25 bp, Homo sapien
cggcggccccagaaataaacatcca

SEQ ID NO: 2023479 - DNA, 25 bp, Homo sapien
tatcagcagcgatgtgagtgcagtg

SEQ ID NO: 2023480 - DNA, 25 bp, Homo sapien
cccgtgggctccctgagtatcagca

SEQ ID NO: 2023481 - DNA, 25 bp, Homo sapien
ccctgagtatcagcagcgatgtgag

SEQ ID NO: 2023482 - DNA, 25 bp, Homo sapien
taaaaaacggcaccagaacagacgc

SEQ ID NO: 2023483 - DNA, 25 bp, Homo sapien
gacaccaaaacaggcttcgctgatg

SEQ ID NO: 2023484 - DNA, 25 bp, Homo sapien
ggcaaacggagtgggagtcttcacc

SEQ ID NO: 2023485 - DNA, 25 bp, Homo sapien
gccacagaaacgaccactgacgaga

SEQ ID NO: 2023486 - DNA, 25 bp, Homo sapien
caaaacaacggccaggtgcctgtca

SEQ ID NO: 2023487 - DNA, 25 bp, Homo sapien
cacggtggttccgtgacagcccaaa

SEQ ID NO: 2023488 - DNA, 25 bp, Homo sapien
tgtgtcccggcataggaccagcagc

SEQ ID NO: 2023489 - DNA, 25 bp, Homo sapien
actcgccgcggtgaatgtgtgtgtc

SEQ ID NO: 2023490 - DNA, 25 bp, Homo sapien
ggacacgcggctcagggcttgttct

SEQ ID NO: 2023491 - DNA, 25 bp, Homo sapien
tcccagggctttgtcgagggcagca

SEQ ID NO: 2023492 - DNA, 25 bp, Homo sapien
gagctcgacaccaaagttgccctgg

SEQ ID NO: 2023493 - DNA, 25 bp, Homo sapien
gcaggaaacgtctgtgactctgtgt

SEQ ID NO: 2023494 - DNA, 25 bp, Homo sapien
ttccatctcccagacatggtggcca

SEQ ID NO: 2023495 - DNA, 25 bp, Homo sapien
agttttcgcttccatctcccagaca

SEQ ID NO: 2023496 - DNA, 25 bp, Homo sapien
gcacaggtcccggtcagttttcgct

SEQ ID NO: 2023497 - DNA, 25 bp, Homo sapien
tcccggtcagttttcgcttccatct

SEQ ID NO: 2023498 - DNA, 25 bp, Homo sapien
cttatgggcacaggaaatggccgtg

SEQ ID NO: 2023499 - DNA, 25 bp, Homo sapien
agaggccggtatggacacgggaacg

SEQ ID NO: 2023500 - DNA, 25 bp, Homo sapien
agaggccggtatggacacgggaaca

SEQ ID NO: 2023501 - DNA, 25 bp, Homo sapien
tatggacacgggaacgggctgtggg

SEQ ID NO: 2023502 - DNA, 25 bp, Homo sapien
gcaatgaccccatggacgaaggctg

SEQ ID NO: 2023503 - DNA, 25 bp, Homo sapien
gatgtcagtgtacccagcacagacg

SEQ ID NO: 2023504 - DNA, 25 bp, Homo sapien
agagccagatgtcagtgtacccagc

SEQ ID NO: 2023505 - DNA, 25 bp, Homo sapien
gaacgaatcagacacccagtaggtg

SEQ ID NO: 2023506 - DNA, 25 bp, Homo sapien
ggctggcgaagcctgtggagacccc

SEQ ID NO: 2023507 - DNA, 25 bp, Homo sapien
tgctctccctgcctagggggacagg

SEQ ID NO: 2023508 - DNA, 25 bp, Homo sapien
gcaacccgcgtgcatgtgcggggct

SEQ ID NO: 2023509 - DNA, 25 bp, Homo sapien
tccggcatcctgcatcccgcaaccc

SEQ ID NO: 2023510 - DNA, 25 bp, Homo sapien
cagagaatgtggatgtcagcttggc

SEQ ID NO: 2023511 - DNA, 25 bp, Homo sapien
cgaaatatgccagtgtcaaaagtaa

SEQ ID NO: 2023512 - DNA, 25 bp, Homo sapien
ttgttttcagtgcagaaaggctcac

SEQ ID NO: 2023513 - DNA, 25 bp, Homo sapien
cagctgttaagcttccctcgaaata

SEQ ID NO: 2023514 - DNA, 25 bp, Homo sapien
gatggagtcagcagctacaccaggt

SEQ ID NO: 2023515 - DNA, 25 bp, Homo sapien
taactgcagttcattgggaagaagc

SEQ ID NO: 2023516 - DNA, 25 bp, Homo sapien
caccaggtgggtctttagagcagaa

SEQ ID NO: 2023517 - DNA, 25 bp, Homo sapien
taaagagacgcttcctccaaggctg

SEQ ID NO: 2023518 - DNA, 25 bp, Homo sapien
ggtgaaacgctggtactggcttcgc

SEQ ID NO: 2023519 - DNA, 25 bp, Homo sapien
gggctggttatcctctgattccgaa

SEQ ID NO: 2023520 - DNA, 25 bp, Homo sapien
gcttcgctttctcttcccgttgcag

SEQ ID NO: 2023521 - DNA, 25 bp, Homo sapien
cccgttgcagacgtagaaactgacg

SEQ ID NO: 2023522 - DNA, 25 bp, Homo sapien
ccacgcgctcatgttcacggcttac

SEQ ID NO: 2023523 - DNA, 25 bp, Homo sapien
aaaaagcaccccacgcgctcatgtt

SEQ ID NO: 2023524 - DNA, 25 bp, Homo sapien
ccccacgcgctcatgttcacggctt

SEQ ID NO: 2023525 - DNA, 25 bp, Homo sapien
ttagaaaaagcaccccacgcgctca

SEQ ID NO: 2023526 - DNA, 25 bp, Homo sapien
cccaacagggatcaaggaaaatgca

SEQ ID NO: 2023527 - DNA, 25 bp, Homo sapien
gatggctcggtctcactaacgggac

SEQ ID NO: 2023528 - DNA, 25 bp, Homo sapien
gttaaatgtgcaacacgccacgctg

SEQ ID NO: 2023529 - DNA, 25 bp, Homo sapien
tccttttcagggcatcgatggctcg

SEQ ID NO: 2023530 - DNA, 25 bp, Homo sapien
aagtgtctcggggacgtccgcccag

SEQ ID NO: 2023531 - DNA, 25 bp, Homo sapien
aaggagccattcccacggcgggtga

SEQ ID NO: 2023532 - DNA, 25 bp, Homo sapien
gatgcccgtggtcccaggagatgaa

SEQ ID NO: 2023533 - DNA, 25 bp, Homo sapien
gtccgcccagcacaaagctcattca

SEQ ID NO: 2023534 - DNA, 25 bp, Homo sapien
cagtgtgtaatttccctctcagatg

SEQ ID NO: 2023535 - DNA, 25 bp, Homo sapien
ccagagcttgcctgataaaaacaag

SEQ ID NO: 2023536 - DNA, 25 bp, Homo sapien
gcttttgcaattagcgcccagtgtg

SEQ ID NO: 2023537 - DNA, 25 bp, Homo sapien
aattcaggatgaccgctaactgtcc

SEQ ID NO: 2023538 - DNA, 25 bp, Homo sapien
tgtgggcggcacagaccacgtaaac

SEQ ID NO: 2023539 - DNA, 25 bp, Homo sapien
attgtactttgttccaagaatgggc

SEQ ID NO: 2023540 - DNA, 25 bp, Homo sapien
caaccatgcttgaagtttaattagg

SEQ ID NO: 2023541 - DNA, 25 bp, Homo sapien
gcaatccttctctataaggcctagg

SEQ ID NO: 2023542 - DNA, 25 bp, Homo sapien
ggatggtcacccagggactatggtg

SEQ ID NO: 2023543 - DNA, 25 bp, Homo sapien
acctgggatggtcacccagggacta

SEQ ID NO: 2023544 - DNA, 25 bp, Homo sapien
ggttgcggtcgcagcccccaggacc

SEQ ID NO: 2023545 - DNA, 25 bp, Homo sapien
ctgggatggtcacccagggactatg

SEQ ID NO: 2023546 - DNA, 25 bp, Homo sapien
gtccatggcagtcccgttgtccatg

SEQ ID NO: 2023547 - DNA, 25 bp, Homo sapien
cggtgtccatggcagtcccgttgtc

SEQ ID NO: 2023548 - DNA, 25 bp, Homo sapien
tggcagtcccgttgtccatgatggc

SEQ ID NO: 2023549 - DNA, 25 bp, Homo sapien
catggcagtcccgttgtccatgatg

SEQ ID NO: 2023550 - DNA, 25 bp, Homo sapien
atatgggccgttcccagctgtagga

SEQ ID NO: 2023551 - DNA, 25 bp, Homo sapien
gctgtaggatctcaccagcctgagt

SEQ ID NO: 2023552 - DNA, 25 bp, Homo sapien
tccgcaggaagtcaaccagagcttt

SEQ ID NO: 2023553 - DNA, 25 bp, Homo sapien
gaggtttaaagcgtccgccctgcac

SEQ ID NO: 2023554 - DNA, 25 bp, Homo sapien
tggagcaggctcataatcatcagtg

SEQ ID NO: 2023555 - DNA, 25 bp, Homo sapien
cagtgggttctgtttttataattgg

SEQ ID NO: 2023556 - DNA, 25 bp, Homo sapien
ctcataatcatcagtgggttctgtt

SEQ ID NO: 2023557 - DNA, 25 bp, Homo sapien
cggtccacaggttggagcaggctca

SEQ ID NO: 2023558 - DNA, 25 bp, Homo sapien
gggtcgggtggcatcgcgagctgct

SEQ ID NO: 2023559 - DNA, 25 bp, Homo sapien
gtggcatcgcgagctgctggctgta

SEQ ID NO: 2023560 - DNA, 25 bp, Homo sapien
ggagaggacttaacccctggctcac

SEQ ID NO: 2023561 - DNA, 25 bp, Homo sapien
gggagaggacttaacccctggctca

SEQ ID NO: 2023562 - DNA, 25 bp, Homo sapien
tgtaggcagcgggagaaaggtcgtg

SEQ ID NO: 2023563 - DNA, 25 bp, Homo sapien
gctggcaacgcccttggtgtaggca

SEQ ID NO: 2023564 - DNA, 25 bp, Homo sapien
gggagtccgaggtgacagtggcccg

SEQ ID NO: 2023565 - DNA, 25 bp, Homo sapien
agtggcccgggctggcaacgccctt

SEQ ID NO: 2023566 - DNA, 25 bp, Homo sapien
agctactgcttggaggcgcactcac

SEQ ID NO: 2023567 - DNA, 25 bp, Homo sapien
ggcagctactgcttggaggcgcact

SEQ ID NO: 2023568 - DNA, 25 bp, Homo sapien
gcagagcgagtgttcgagaccaggg

SEQ ID NO: 2023569 - DNA, 25 bp, Homo sapien
caggcaggtcggctcttgggtggca

SEQ ID NO: 2023570 - DNA, 25 bp, Homo sapien
ggccaaattaggactaccgtcctca

SEQ ID NO: 2023571 - DNA, 25 bp, Homo sapien
actggtccaactcttcaggctctcg

SEQ ID NO: 2023572 - DNA, 25 bp, Homo sapien
cgtcatccaggtacaactggtccaa

SEQ ID NO: 2023573 - DNA, 25 bp, Homo sapien
caggctctcgcttgaccgttacagg

SEQ ID NO: 2023574 - DNA, 25 bp, Homo sapien
tcgtttatgtcacggcgtttgtgag

SEQ ID NO: 2023575 - DNA, 25 bp, Homo sapien
acggcgtttgtgagcctggggtgtg

SEQ ID NO: 2023576 - DNA, 25 bp, Homo sapien
ctcgtttatgtcacggcgtttgtga

SEQ ID NO: 2023577 - DNA, 25 bp, Homo sapien
gcgtttgtgagcctggggtgtgggt

SEQ ID NO: 2023578 - DNA, 25 bp, Homo sapien
tgaagtgactcaattcatggaccca

SEQ ID NO: 2023579 - DNA, 25 bp, Homo sapien
atcactgggcgtgaggagccccggg

SEQ ID NO: 2023580 - DNA, 25 bp, Homo sapien
gactcaattcatggacccacagctc

SEQ ID NO: 2023581 - DNA, 25 bp, Homo sapien
gggcaggccgtcgtcagcatcactg

SEQ ID NO: 2023582 - DNA, 25 bp, Homo sapien
cttcagcggcacagacccgcgggca

SEQ ID NO: 2023583 - DNA, 25 bp, Homo sapien
cggcacagacccgcgggcaccgcag

SEQ ID NO: 2023584 - DNA, 25 bp, Homo sapien
ttcagcggcacagacccgcgggcac

SEQ ID NO: 2023585 - DNA, 25 bp, Homo sapien
cagcggcacagacccgcgggcaccg

SEQ ID NO: 2023586 - DNA, 25 bp, Homo sapien
actgaaagggccgaccgtggcagag

SEQ ID NO: 2023587 - DNA, 25 bp, Homo sapien
cccgcgccgagggacggccgctgtc

SEQ ID NO: 2023588 - DNA, 25 bp, Homo sapien
cccaagtgcttctgagggactgaaa

SEQ ID NO: 2023589 - DNA, 25 bp, Homo sapien
gggaggcgcccgtggcagaccagcc

SEQ ID NO: 2023590 - DNA, 25 bp, Homo sapien
tctcgtcctccggagcagctccggc

SEQ ID NO: 2023591 - DNA, 25 bp, Homo sapien
tgggcgccgggccaggttagtaaga

SEQ ID NO: 2023592 - DNA, 25 bp, Homo sapien
agtaagactttccacgaagggagct

SEQ ID NO: 2023593 - DNA, 25 bp, Homo sapien
gcgaggggcccgttcacagcccaga

SEQ ID NO: 2023594 - DNA, 25 bp, Homo sapien
cccgatgaatgatttgcacggctga

SEQ ID NO: 2023595 - DNA, 25 bp, Homo sapien
tgcacggctgagtccgctgctccat

SEQ ID NO: 2023596 - DNA, 25 bp, Homo sapien
cggtagccgccgtctgcgacggtaa

SEQ ID NO: 2023597 - DNA, 25 bp, Homo sapien
gtaacgacgttggatggcggcacac

SEQ ID NO: 2023598 - DNA, 25 bp, Homo sapien
cgacagcaggctccgtctccgggtg

SEQ ID NO: 2023599 - DNA, 25 bp, Homo sapien
acgccgcggtcccacggcaccaggc

SEQ ID NO: 2023600 - DNA, 25 bp, Homo sapien
tctccgggtggcgtgcggtgcgatt

SEQ ID NO: 2023601 - DNA, 25 bp, Homo sapien
gcggtgcgatttttacgccttgaaa

SEQ ID NO: 2023602 - DNA, 25 bp, Homo sapien
gggctggacgggctcttggcgttgg

SEQ ID NO: 2023603 - DNA, 25 bp, Homo sapien
ctcgggcacgtcacagggtgggctc

SEQ ID NO: 2023604 - DNA, 25 bp, Homo sapien
ttggcgttggggagctgcctcttca

SEQ ID NO: 2023605 - DNA, 25 bp, Homo sapien
tcgggcacgtcacagggtgggctcc

SEQ ID NO: 2023606 - DNA, 25 bp, Homo sapien
tgagtcgacgtctgagcctcagcca

SEQ ID NO: 2023607 - DNA, 25 bp, Homo sapien
cgcacaggtttggacgcggcctctg

SEQ ID NO: 2023608 - DNA, 25 bp, Homo sapien
cacacgctgcctggcgcacaggttt

SEQ ID NO: 2023609 - DNA, 25 bp, Homo sapien
ctgaaacgcgtgagtcgacgtctga

SEQ ID NO: 2023610 - DNA, 25 bp, Homo sapien
tggcagcgagttttctcgagaggaa

SEQ ID NO: 2023611 - DNA, 25 bp, Homo sapien
gaccaggtggcagcgagttttctcg

SEQ ID NO: 2023612 - DNA, 25 bp, Homo sapien
gagaccaggtggcagcgagttttct

SEQ ID NO: 2023613 - DNA, 25 bp, Homo sapien
caggtggcagcgagttttctcgaga

SEQ ID NO: 2023614 - DNA, 25 bp, Homo sapien
gcccgctctcgcctttctcactgtc

SEQ ID NO: 2023615 - DNA, 25 bp, Homo sapien
gcggtaccaggtcgatggggggcat

SEQ ID NO: 2023616 - DNA, 25 bp, Homo sapien
cctttctcactgtccctcgcggtcg

SEQ ID NO: 2023617 - DNA, 25 bp, Homo sapien
cgtgtgcccgctctcgcctttctca

SEQ ID NO: 2023618 - DNA, 25 bp, Homo sapien
cagggaaggacggaggcactgtggc

SEQ ID NO: 2023619 - DNA, 25 bp, Homo sapien
tcacaggagcgggcacctctccttt

SEQ ID NO: 2023620 - DNA, 25 bp, Homo sapien
gcctcacagcctgcacgccacggcg

SEQ ID NO: 2023621 - DNA, 25 bp, Homo sapien
cagcctgcacgccacggcgggagac

SEQ ID NO: 2023622 - DNA, 25 bp, Homo sapien
tgctggctcacagatctaagcgtgt

SEQ ID NO: 2023623 - DNA, 25 bp, Homo sapien
cattctaaggctgaacacgcacagg

SEQ ID NO: 2023624 - DNA, 25 bp, Homo sapien
aatactcaacggtagagctgggacc

SEQ ID NO: 2023625 - DNA, 25 bp, Homo sapien
caaggatgtgcgacctcaggagtga

SEQ ID NO: 2023626 - DNA, 25 bp, Homo sapien
ggtctgtgctgtcaccggctttcca

SEQ ID NO: 2023627 - DNA, 25 bp, Homo sapien
ccagatttggtggttgatttgacag

SEQ ID NO: 2023628 - DNA, 25 bp, Homo sapien
ggctttccacggctgtgcgcctcgg

SEQ ID NO: 2023629 - DNA, 25 bp, Homo sapien
caagtgaagacgctgccatcctgtt

SEQ ID NO: 2023630 - DNA, 25 bp, Homo sapien
gcagctcccatgatcacgactgcag

SEQ ID NO: 2023631 - DNA, 25 bp, Homo sapien
tgctccaatgtcgatcgcagccttg

SEQ ID NO: 2023632 - DNA, 25 bp, Homo sapien
cagccaacggtgattgtgcctcgga

SEQ ID NO: 2023633 - DNA, 25 bp, Homo sapien
tctggccaggctcttgtttgctcca

SEQ ID NO: 2023634 - DNA, 25 bp, Homo sapien
ttaaatccttgagccacgaagccag

SEQ ID NO: 2023635 - DNA, 25 bp, Homo sapien
tatgtgcccgggaatctccaaggtt

SEQ ID NO: 2023636 - DNA, 25 bp, Homo sapien
tagggatcaccctctggttagcaga

SEQ ID NO: 2023637 - DNA, 25 bp, Homo sapien
tatgtgactcatgactttcctggac

SEQ ID NO: 2023638 - DNA, 25 bp, Homo sapien
catatctaaaataacagcagctggg

SEQ ID NO: 2023639 - DNA, 25 bp, Homo sapien
gtttcggaacaaagagagcccagcc

SEQ ID NO: 2023640 - DNA, 25 bp, Homo sapien
tatcaggctttgattatgggtccgg

SEQ ID NO: 2023641 - DNA, 25 bp, Homo sapien
tctgagtgcagcctcgggaactgag

SEQ ID NO: 2023642 - DNA, 25 bp, Homo sapien
aacgatgccccggagcaggatgccc

SEQ ID NO: 2023643 - DNA, 25 bp, Homo sapien
cccggtggaggatgtcccggcggag

SEQ ID NO: 2023644 - DNA, 25 bp, Homo sapien
cgcagcgacaagaccggcgaacgat

SEQ ID NO: 2023645 - DNA, 25 bp, Homo sapien
agcctggctgggaacacgacacttc

SEQ ID NO: 2023646 - DNA, 25 bp, Homo sapien
ctaaatcgaatcagcggggctggcc

SEQ ID NO: 2023647 - DNA, 25 bp, Homo sapien
taaatcgaatcagcggggctggccc

SEQ ID NO: 2023648 - DNA, 25 bp, Homo sapien
aaatcgaatcagcggggctggccca

SEQ ID NO: 2023649 - DNA, 25 bp, Homo sapien
agtccaaacactcgccagtgtcctg

SEQ ID NO: 2023650 - DNA, 25 bp, Homo sapien
tgtggcgcagtttcaacaaagtcca

SEQ ID NO: 2023651 - DNA, 25 bp, Homo sapien
ggcagtgcctgtggcgcagtttcaa

SEQ ID NO: 2023652 - DNA, 25 bp, Homo sapien
aacaaagtccaaacactcgccagtg

SEQ ID NO: 2023653 - DNA, 25 bp, Homo sapien
ttgagaaagccgtgtgctgacccgg

SEQ ID NO: 2023654 - DNA, 25 bp, Homo sapien
ccgagcgttcgaaagtgataccgtt

SEQ ID NO: 2023655 - DNA, 25 bp, Homo sapien
agagtacttctctagggctgcccac

SEQ ID NO: 2023656 - DNA, 25 bp, Homo sapien
cctttttattgagagccgagcgttc

SEQ ID NO: 2023657 - DNA, 25 bp, Homo sapien
gtggagatcagcacggccttcacag

SEQ ID NO: 2023658 - DNA, 25 bp, Homo sapien
tctgccccacgcacgtccacgctca

SEQ ID NO: 2023659 - DNA, 25 bp, Homo sapien
tcaccgtggagatcagcacggcctt

SEQ ID NO: 2023660 - DNA, 25 bp, Homo sapien
tccacgctcaccgtggagatcagca

SEQ ID NO: 2023661 - DNA, 25 bp, Homo sapien
gctgccatgaatgtcgaccgggaaa

SEQ ID NO: 2023662 - DNA, 25 bp, Homo sapien
catgttctactgtgggcgtgtgccc

SEQ ID NO: 2023663 - DNA, 25 bp, Homo sapien
tgcctgtcattggacgcagcggctg

SEQ ID NO: 2023664 - DNA, 25 bp, Homo sapien
caggcacttcctggtggaccttcag

SEQ ID NO: 2023665 - DNA, 25 bp, Homo sapien
ctgcagggtgctcagtgcccggaac

SEQ ID NO: 2023666 - DNA, 25 bp, Homo sapien
cagggtgctcagtgcccggaacttg

SEQ ID NO: 2023667 - DNA, 25 bp, Homo sapien
gtgctcagtgcccggaacttggcgt

SEQ ID NO: 2023668 - DNA, 25 bp, Homo sapien
gctcagtgcccggaacttggcgtat

SEQ ID NO: 2023669 - DNA, 25 bp, Homo sapien
ctggggccacgcaagctctcactag

SEQ ID NO: 2023670 - DNA, 25 bp, Homo sapien
tttcacaggtggacaacgggcccat

SEQ ID NO: 2023671 - DNA, 25 bp, Homo sapien
agagagcgggatggacaaccctgac

SEQ ID NO: 2023672 - DNA, 25 bp, Homo sapien
tgtgttccacaaggtctcagacgct

SEQ ID NO: 2023673 - DNA, 25 bp, Homo sapien
agccgtacgtggagccgtgctcgcc

SEQ ID NO: 2023674 - DNA, 25 bp, Homo sapien
agagtgaccgccctcgtccgtagca

SEQ ID NO: 2023675 - DNA, 25 bp, Homo sapien
gtagcacggtaccagcacgtctctg

SEQ ID NO: 2023676 - DNA, 25 bp, Homo sapien
tggtccatgagtgtcgtgagccagt

SEQ ID NO: 2023677 - DNA, 25 bp, Homo sapien
tctgacggccaaagtgcaggtgcca

SEQ ID NO: 2023678 - DNA, 25 bp, Homo sapien
tgggtgctcgtgctggagaggtcat

SEQ ID NO: 2023679 - DNA, 25 bp, Homo sapien
tggagaggtcatttcgtattatttc

SEQ ID NO: 2023680 - DNA, 25 bp, Homo sapien
ggtgctcgtgctggagaggtcattt

SEQ ID NO: 2023681 - DNA, 25 bp, Homo sapien
gtgggtgctcgtgctggagaggtca

SEQ ID NO: 2023682 - DNA, 25 bp, Homo sapien
ggtcaaactgcgtgtgggccgttcc

SEQ ID NO: 2023683 - DNA, 25 bp, Homo sapien
catgcgactatgaacaagcctacgg

SEQ ID NO: 2023684 - DNA, 25 bp, Homo sapien
tttcaaccgcgcagacaagggaagc

SEQ ID NO: 2023685 - DNA, 25 bp, Homo sapien
taaggcagcaggagtgtacgtgaca

SEQ ID NO: 2023686 - DNA, 25 bp, Homo sapien
tacaggccgttccttctgcgggagc

SEQ ID NO: 2023687 - DNA, 25 bp, Homo sapien
taaggcacgagttcaggtcaaccgt

SEQ ID NO: 2023688 - DNA, 25 bp, Homo sapien
gacgcaggttccaaaacggatgccg

SEQ ID NO: 2023689 - DNA, 25 bp, Homo sapien
tagggtcctcctcgaactgcgtgag

SEQ ID NO: 2023690 - DNA, 25 bp, Homo sapien
aaaggacatcgactaccaaggacat

SEQ ID NO: 2023691 - DNA, 25 bp, Homo sapien
taaaggacatcgactaccaaggaca

SEQ ID NO: 2023692 - DNA, 25 bp, Homo sapien
aggacatcgactaccaaggacataa

SEQ ID NO: 2023693 - DNA, 25 bp, Homo sapien
aaggacatcgactaccaaggacata

SEQ ID NO: 2023694 - DNA, 25 bp, Homo sapien
gggtttcctgttaatcatgcactca

SEQ ID NO: 2023695 - DNA, 25 bp, Homo sapien
tcgtcgcacttctggattctccgga

SEQ ID NO: 2023696 - DNA, 25 bp, Homo sapien
taaacacccgtctgaatcaagcttg

SEQ ID NO: 2023697 - DNA, 25 bp, Homo sapien
gataactttcgtcaccttctcaggg

SEQ ID NO: 2023698 - DNA, 25 bp, Homo sapien
ctcagcagggcggtcccattaggag

SEQ ID NO: 2023699 - DNA, 25 bp, Homo sapien
catggacaagccctcagtctcaacc

SEQ ID NO: 2023700 - DNA, 25 bp, Homo sapien
ggcatgcccatcacgtgtgccctgg

SEQ ID NO: 2023701 - DNA, 25 bp, Homo sapien
gagccacgttcggtccccttggctg

SEQ ID NO: 2023702 - DNA, 25 bp, Homo sapien
cagggagagtgagattgggacagac

SEQ ID NO: 2023703 - DNA, 25 bp, Homo sapien
cagggagagtgagatcgggacagac

SEQ ID NO: 2023704 - DNA, 25 bp, Homo sapien
ggagagtgagatcgggacagacaga

SEQ ID NO: 2023705 - DNA, 25 bp, Homo sapien
agagtgagatcgggacagacagaca

SEQ ID NO: 2023706 - DNA, 25 bp, Homo sapien
agcacttcctgttctactccctggg

SEQ ID NO: 2023707 - DNA, 25 bp, Homo sapien
ctgggcgccaggtgaccacgccttg

SEQ ID NO: 2023708 - DNA, 25 bp, Homo sapien
gccttggcccggcagagcagacaca

SEQ ID NO: 2023709 - DNA, 25 bp, Homo sapien
tctctagcgacgctctcctgtgtca

SEQ ID NO: 2023710 - DNA, 25 bp, Homo sapien
actgtgcccggtctgattttatatt

SEQ ID NO: 2023711 - DNA, 25 bp, Homo sapien
ctgtgcccggtctgattttatatta

SEQ ID NO: 2023712 - DNA, 25 bp, Homo sapien
ctaacttgtaaatggaggagctgcc

SEQ ID NO: 2023713 - DNA, 25 bp, Homo sapien
ggcggtccccaaggtcatgtctgat

SEQ ID NO: 2023714 - DNA, 25 bp, Homo sapien
cagtaactcgggctctctcgtgaag

SEQ ID NO: 2023715 - DNA, 25 bp, Homo sapien
cagacgtgcgactctcctgggaaat

SEQ ID NO: 2023716 - DNA, 25 bp, Homo sapien
tattttgttgaacccaatctataaa

SEQ ID NO: 2023717 - DNA, 25 bp, Homo sapien
ggccaataagtgtcattagttttaa

SEQ ID NO: 2023718 - DNA, 25 bp, Homo sapien
aatattttgttgaacccaatctata

SEQ ID NO: 2023719 - DNA, 25 bp, Homo sapien
ccggccaataagtgtcattagtttt

SEQ ID NO: 2023720 - DNA, 25 bp, Homo sapien
acttccttgactgctcagggttcag

SEQ ID NO: 2023721 - DNA, 25 bp, Homo sapien
ttgagttctgaagggcgccgtccag

SEQ ID NO: 2023722 - DNA, 25 bp, Homo sapien
gccatagctactcacttccaaaact

SEQ ID NO: 2023723 - DNA, 25 bp, Homo sapien
ctgtctcatggatgggcttgagttc

SEQ ID NO: 2023724 - DNA, 25 bp, Homo sapien
ccccagcacacccagtgccagcagg

SEQ ID NO: 2023725 - DNA, 25 bp, Homo sapien
ccagcacacccagtgccagcaggag

SEQ ID NO: 2023726 - DNA, 25 bp, Homo sapien
gcagcagcagaagagcaagcagcat

SEQ ID NO: 2023727 - DNA, 25 bp, Homo sapien
gagcagcagcagaagagcaagcagc

SEQ ID NO: 2023728 - DNA, 25 bp, Homo sapien
cacttgctgtccaagcttctgcagg

SEQ ID NO: 2023729 - DNA, 25 bp, Homo sapien
accccgagactcgtgtccaggtgat

SEQ ID NO: 2023730 - DNA, 25 bp, Homo sapien
gctgatgatcgtcctgactgatcga

SEQ ID NO: 2023731 - DNA, 25 bp, Homo sapien
gactgatcgattggaccacccggta

SEQ ID NO: 2023732 - DNA, 25 bp, Homo sapien
aggacgtggacgtgctgtactgcac

SEQ ID NO: 2023733 - DNA, 25 bp, Homo sapien
cccagtgctgtctctgtagaaggac

SEQ ID NO: 2023734 - DNA, 25 bp, Homo sapien
cctgtggtgtttccgcttgctttaa

SEQ ID NO: 2023735 - DNA, 25 bp, Homo sapien
taaaccaggacctatggagaagcgc

SEQ ID NO: 2023736 - DNA, 25 bp, Homo sapien
acaacctggtgttcgggactggcca

SEQ ID NO: 2023737 - DNA, 25 bp, Homo sapien
gtagccccgtgccaggactctggcc

SEQ ID NO: 2023738 - DNA, 25 bp, Homo sapien
ggagcccccgtcacagcagtgaaag

SEQ ID NO: 2023739 - DNA, 25 bp, Homo sapien
agaacctccatagggggccgctggc

SEQ ID NO: 2023740 - DNA, 25 bp, Homo sapien
tccaagtgctagacggagagctgct

SEQ ID NO: 2023741 - DNA, 25 bp, Homo sapien
gaaactgagcaggactgtgccacag

SEQ ID NO: 2023742 - DNA, 25 bp, Homo sapien
acactgatagtgaggctggcgctgc

SEQ ID NO: 2023743 - DNA, 25 bp, Homo sapien
tgggagatgccactaagccgttgcc

SEQ ID NO: 2023744 - DNA, 25 bp, Homo sapien
agtcccgccgagcagagcggaaagt

SEQ ID NO: 2023745 - DNA, 25 bp, Homo sapien
tgagccggtaccagtgctcgtggca

SEQ ID NO: 2023746 - DNA, 25 bp, Homo sapien
gcggctttgcggcttagcatgtcgc

SEQ ID NO: 2023747 - DNA, 25 bp, Homo sapien
gctttgcggcttagcatgtcgcttt

SEQ ID NO: 2023748 - DNA, 25 bp, Homo sapien
ctcagacgcaaggagagttgtgctc

SEQ ID NO: 2023749 - DNA, 25 bp, Homo sapien
tgctaaatgaatagagccagctgct

SEQ ID NO: 2023750 - DNA, 25 bp, Homo sapien
actttgccagaaccacgttggtgcc

SEQ ID NO: 2023751 - DNA, 25 bp, Homo sapien
gatagtataactcttggaccggaga

SEQ ID NO: 2023752 - DNA, 25 bp, Homo sapien
gcagggccccagagttgacataaaa

SEQ ID NO: 2023753 - DNA, 25 bp, Homo sapien
gcctgggtcgccatgaactaatttc

SEQ ID NO: 2023754 - DNA, 25 bp, Homo sapien
ttcccagcgcgatgtgtgcctgggt

SEQ ID NO: 2023755 - DNA, 25 bp, Homo sapien
cacagggctgccggaaaacagaact

SEQ ID NO: 2023756 - DNA, 25 bp, Homo sapien
aaggccgagtccaaaagccacaggg

SEQ ID NO: 2023757 - DNA, 25 bp, Homo sapien
tgtgggcaaaccacggtgacggcca

SEQ ID NO: 2023758 - DNA, 25 bp, Homo sapien
gtccacatcaggacttgaatgttcc

SEQ ID NO: 2023759 - DNA, 25 bp, Homo sapien
gtggcagaggcatctctggatttcc

SEQ ID NO: 2023760 - DNA, 25 bp, Homo sapien
ccagagcccgttgccgtggtggcag

SEQ ID NO: 2023761 - DNA, 25 bp, Homo sapien
gaagttctatattcctagttcactg

SEQ ID NO: 2023762 - DNA, 25 bp, Homo sapien
caagaatgttgacgtgatggattac

SEQ ID NO: 2023763 - DNA, 25 bp, Homo sapien
catggatgggtgctggttttttgtc

SEQ ID NO: 2023764 - DNA, 25 bp, Homo sapien
gcatctcttgatgcgataatgcaat

SEQ ID NO: 2023765 - DNA, 25 bp, Homo sapien
cctgggacacaagcacgtcttcact

SEQ ID NO: 2023766 - DNA, 25 bp, Homo sapien
tcccgatgatgacaggccatggagg

SEQ ID NO: 2023767 - DNA, 25 bp, Homo sapien
cacgtcttcacttgcggcagagtcc

SEQ ID NO: 2023768 - DNA, 25 bp, Homo sapien
ggccatggaggcgatgctgggttca

SEQ ID NO: 2023769 - DNA, 25 bp, Homo sapien
gatgcagctctcgttctcagagaca

SEQ ID NO: 2023770 - DNA, 25 bp, Homo sapien
gcagcaggaacaatggacttcacct

SEQ ID NO: 2023771 - DNA, 25 bp, Homo sapien
acaatggacttcacctgtccacgcg

SEQ ID NO: 2023772 - DNA, 25 bp, Homo sapien
ccagtcctgagacctgtgaaaccca

SEQ ID NO: 2023773 - DNA, 25 bp, Homo sapien
gctccgggccacgggcaaatgcaga

SEQ ID NO: 2023774 - DNA, 25 bp, Homo sapien
gcacacagaggagcgcagacccagt

SEQ ID NO: 2023775 - DNA, 25 bp, Homo sapien
agccaaggcacgagctcgggagccg

SEQ ID NO: 2023776 - DNA, 25 bp, Homo sapien
ctggcggggaacgtagacctggcgg

SEQ ID NO: 2023777 - DNA, 25 bp, Homo sapien
tcttggcgtttcacacgcggggact

SEQ ID NO: 2023778 - DNA, 25 bp, Homo sapien
cgggttgtcggggacagcactccac

SEQ ID NO: 2023779 - DNA, 25 bp, Homo sapien
gggacagcactccacggcctcttgt

SEQ ID NO: 2023780 - DNA, 25 bp, Homo sapien
actccacggcctcttgtggcatgtc

SEQ ID NO: 2023781 - DNA, 25 bp, Homo sapien
cctgtgccctggtccgtgggccaag

SEQ ID NO: 2023782 - DNA, 25 bp, Homo sapien
cggctgcgttttaagccctggagga

SEQ ID NO: 2023783 - DNA, 25 bp, Homo sapien
aagacttggagcttcctttctaagg

SEQ ID NO: 2023784 - DNA, 25 bp, Homo sapien
tgcactcggtgctgaaagcttccag

SEQ ID NO: 2023785 - DNA, 25 bp, Homo sapien
acccggcgtgaactctgtgcagctc

SEQ ID NO: 2023786 - DNA, 25 bp, Homo sapien
catgcagtggatggtggattgaccc

SEQ ID NO: 2023787 - DNA, 25 bp, Homo sapien
atggtggattgacccggcgtgaact

SEQ ID NO: 2023788 - DNA, 25 bp, Homo sapien
ctccatgcagtggatggtggattga

SEQ ID NO: 2023789 - DNA, 25 bp, Homo sapien
cctctgctctcagatgccggggtcc

SEQ ID NO: 2023790 - DNA, 25 bp, Homo sapien
tgctgtactggtgcggctggggtgt

SEQ ID NO: 2023791 - DNA, 25 bp, Homo sapien
gtgtggcctgggccgttcctctatt

SEQ ID NO: 2023792 - DNA, 25 bp, Homo sapien
gctgtactggtgcggctggggtgtg

SEQ ID NO: 2023793 - DNA, 25 bp, Homo sapien
ggtgtggcctgggccgttcctctat

SEQ ID NO: 2023794 - DNA, 25 bp, Homo sapien
tgctgtcgtcctgttagcgtgtaaa

SEQ ID NO: 2023795 - DNA, 25 bp, Homo sapien
ttagcgtgtaaacagtgtgctcaca

SEQ ID NO: 2023796 - DNA, 25 bp, Homo sapien
tagcatgtaaacagtgtgctcgcac

SEQ ID NO: 2023797 - DNA, 25 bp, Homo sapien
taaacagtgtgctcgcactgactga

SEQ ID NO: 2023798 - DNA, 25 bp, Homo sapien
tagcatgtaaacagtgtgctcacac

SEQ ID NO: 2023799 - DNA, 25 bp, Homo sapien
atcctgttagcatgtaaacagtgtg

SEQ ID NO: 2023800 - DNA, 25 bp, Homo sapien
gttagcatgtaaacagtgtgctcac

SEQ ID NO: 2023801 - DNA, 25 bp, Homo sapien
cctgttagcatgtaaacagtgtgct

SEQ ID NO: 2023802 - DNA, 25 bp, Homo sapien
tagcgtgtaaacagtgtgctcacac

SEQ ID NO: 2023803 - DNA, 25 bp, Homo sapien
gttagcgtgtaaacagtgtgctcac

SEQ ID NO: 2023804 - DNA, 25 bp, Homo sapien
ttagcgtgtaaacagtgtgctcaca

SEQ ID NO: 2023805 - DNA, 25 bp, Homo sapien
tagcatgtaaacagtgtgctcgcac

SEQ ID NO: 2023806 - DNA, 25 bp, Homo sapien
cctgacccgtcagcggcaggagggc

SEQ ID NO: 2023807 - DNA, 25 bp, Homo sapien
gagccggcctgacccgtcagcggca

SEQ ID NO: 2023808 - DNA, 25 bp, Homo sapien
ggcctgacccgtcagcggcaggagg

SEQ ID NO: 2023809 - DNA, 25 bp, Homo sapien
ccggcctgacccgtcagcggcagga

SEQ ID NO: 2023810 - DNA, 25 bp, Homo sapien
ggagccatccctgtagacgttggtt

SEQ ID NO: 2023811 - DNA, 25 bp, Homo sapien
tggtggacgcagcccgtaccagctc

SEQ ID NO: 2023812 - DNA, 25 bp, Homo sapien
tcgacaccgggtggccgtgtagaaa

SEQ ID NO: 2023813 - DNA, 25 bp, Homo sapien
tgtgagaattccagatcctgatcga

SEQ ID NO: 2023814 - DNA, 25 bp, Homo sapien
tgatggttccgttgtggggatcgtg

SEQ ID NO: 2023815 - DNA, 25 bp, Homo sapien
ttccgttgtggggatcgtgggtctg

SEQ ID NO: 2023816 - DNA, 25 bp, Homo sapien
ttctgtgatggttccgttgtgggga

SEQ ID NO: 2023817 - DNA, 25 bp, Homo sapien
tgtggggatcgtgggtctgtctgtg

SEQ ID NO: 2023818 - DNA, 25 bp, Homo sapien
tggtcgatggccaggatccgcccca

SEQ ID NO: 2023819 - DNA, 25 bp, Homo sapien
agtgccgaccgagtttcagtgtgaa

SEQ ID NO: 2023820 - DNA, 25 bp, Homo sapien
tgaaggagccgctgtagaatggagt

SEQ ID NO: 2023821 - DNA, 25 bp, Homo sapien
agcgccagtgccgaccgagtttcag

SEQ ID NO: 2023822 - DNA, 25 bp, Homo sapien
acattcagctggccaccaacgggct

SEQ ID NO: 2023823 - DNA, 25 bp, Homo sapien
ttaaacattcagctggccaccaacg

SEQ ID NO: 2023824 - DNA, 25 bp, Homo sapien
aaacattcagctggccaccaacggg

SEQ ID NO: 2023825 - DNA, 25 bp, Homo sapien
attcagctggccaccaacgggcttc

SEQ ID NO: 2023826 - DNA, 25 bp, Homo sapien
aaactgtcggcctgaaaacgagcgg

SEQ ID NO: 2023827 - DNA, 25 bp, Homo sapien
tgagcacaaattcaaggcgccctga

SEQ ID NO: 2023828 - DNA, 25 bp, Homo sapien
tatagctgtttgtggcgctgttgcc

SEQ ID NO: 2023829 - DNA, 25 bp, Homo sapien
ggcctgataattaaaagaactcgcg

SEQ ID NO: 2023830 - DNA, 25 bp, Homo sapien
gctgtagttcctctcggtaccggct

SEQ ID NO: 2023831 - DNA, 25 bp, Homo sapien
tagttcctctcggtaccggcttcca

SEQ ID NO: 2023832 - DNA, 25 bp, Homo sapien
ggcgacgctgtagttcctctcggta

SEQ ID NO: 2023833 - DNA, 25 bp, Homo sapien
aacccaggcggcgacgctgtagttc

SEQ ID NO: 2023834 - DNA, 25 bp, Homo sapien
gcaggaacgcgacccgcggccggca

SEQ ID NO: 2023835 - DNA, 25 bp, Homo sapien
caggaacgcgacccgcggccggcac

SEQ ID NO: 2023836 - DNA, 25 bp, Homo sapien
cgcgacccgcggccggcacctccat

SEQ ID NO: 2023837 - DNA, 25 bp, Homo sapien
gaacgcgacccgcggccggcacctc

SEQ ID NO: 2023838 - DNA, 25 bp, Homo sapien
agcaccgagccgatgcgcacggccg

SEQ ID NO: 2023839 - DNA, 25 bp, Homo sapien
ctcggccacagccgccgtcggggcg

SEQ ID NO: 2023840 - DNA, 25 bp, Homo sapien
gccagcaccgagccgatgcgcacgg

SEQ ID NO: 2023841 - DNA, 25 bp, Homo sapien
cgagccgatgcgcacggccgcgccc

SEQ ID NO: 2023842 - DNA, 25 bp, Homo sapien
ctgcgcggaggcggcggcctcgaac

SEQ ID NO: 2023843 - DNA, 25 bp, Homo sapien
ggctgcgcgcacagctcccgcacca

SEQ ID NO: 2023844 - DNA, 25 bp, Homo sapien
ctcagcctgcgttccggccgcgcgg

SEQ ID NO: 2023845 - DNA, 25 bp, Homo sapien
ctggcccggctgcgcgcacagctcc

SEQ ID NO: 2023846 - DNA, 25 bp, Homo sapien
ccccggaggctacacgggactgaga

SEQ ID NO: 2023847 - DNA, 25 bp, Homo sapien
cttgcctggtgacaacaacgcaggc

SEQ ID NO: 2023848 - DNA, 25 bp, Homo sapien
gtgacaacaacgcaggcaacgaggg

SEQ ID NO: 2023849 - DNA, 25 bp, Homo sapien
acaacgcaggcaacgagggcacgga

SEQ ID NO: 2023850 - DNA, 25 bp, Homo sapien
gcaacgagggcacggacccaccttg

SEQ ID NO: 2023851 - DNA, 25 bp, Homo sapien
cacgctaaaggcacaggtacagtct

SEQ ID NO: 2023852 - DNA, 25 bp, Homo sapien
gtctgtcagacgtcatcaaccctcg

SEQ ID NO: 2023853 - DNA, 25 bp, Homo sapien
gcaggctcccagatcattttaggta

SEQ ID NO: 2023854 - DNA, 25 bp, Homo sapien
gttagttctcaccagtcactgcagg

SEQ ID NO: 2023855 - DNA, 25 bp, Homo sapien
tgaactgacgaagccaactgctgcg

SEQ ID NO: 2023856 - DNA, 25 bp, Homo sapien
tgacgaagccaactgctgcggtgca

SEQ ID NO: 2023857 - DNA, 25 bp, Homo sapien
gtgaactgacgaagccaactgctgc

SEQ ID NO: 2023858 - DNA, 25 bp, Homo sapien
actgacgaagccaactgctgcggtg

SEQ ID NO: 2023859 - DNA, 25 bp, Homo sapien
tgaccaaacacaggccttcgtagaa

SEQ ID NO: 2023860 - DNA, 25 bp, Homo sapien
aggcttccagcaacgtgaccaaaca

SEQ ID NO: 2023861 - DNA, 25 bp, Homo sapien
cgtcggagtcacgtaattttctgta

SEQ ID NO: 2023862 - DNA, 25 bp, Homo sapien
aaaatcactcgcatactggccacgt

SEQ ID NO: 2023863 - DNA, 25 bp, Homo sapien
acaaccgggtggctgcatccttcca

SEQ ID NO: 2023864 - DNA, 25 bp, Homo sapien
caaccgggtggctgcatccttccaa

SEQ ID NO: 2023865 - DNA, 25 bp, Homo sapien
gacaaccgggtggctgcatccttcc

SEQ ID NO: 2023866 - DNA, 25 bp, Homo sapien
gggtgaggtcttggccacattcagc

SEQ ID NO: 2023867 - DNA, 25 bp, Homo sapien
tgaggtcttggccacattcagcaca

SEQ ID NO: 2023868 - DNA, 25 bp, Homo sapien
gaggtcttggccacattcagcacac

SEQ ID NO: 2023869 - DNA, 25 bp, Homo sapien
ggtgaggtcttggccacattcagca

SEQ ID NO: 2023870 - DNA, 25 bp, Homo sapien
aactccggcacgctgtgcaccatgg

SEQ ID NO: 2023871 - DNA, 25 bp, Homo sapien
gctgcttcccgttcttactctgcaa

SEQ ID NO: 2023872 - DNA, 25 bp, Homo sapien
acgctgtgcaccatggacacggtcg

SEQ ID NO: 2023873 - DNA, 25 bp, Homo sapien
catggacacggtcgccgtggacagc

SEQ ID NO: 2023874 - DNA, 25 bp, Homo sapien
tgtgtgaatcaacgtctggtccaag

SEQ ID NO: 2023875 - DNA, 25 bp, Homo sapien
ttccggtttcggtgcagtcgctgct

SEQ ID NO: 2023876 - DNA, 25 bp, Homo sapien
tgagcaccagcttccggtttcggtg

SEQ ID NO: 2023877 - DNA, 25 bp, Homo sapien
ctgacagtgctgctcggttgtgtga

SEQ ID NO: 2023878 - DNA, 25 bp, Homo sapien
ctcgtacagcttggcgatcttctcc

SEQ ID NO: 2023879 - DNA, 25 bp, Homo sapien
tgtgtgcgtacagccggctgccgaa

SEQ ID NO: 2023880 - DNA, 25 bp, Homo sapien
tgccgaaggtgaagacgtgcagctc

SEQ ID NO: 2023881 - DNA, 25 bp, Homo sapien
gcgcgtgtgcagcatgggctcaccc

SEQ ID NO: 2023882 - DNA, 25 bp, Homo sapien
gaggccatgaagtcgctagatctaa

SEQ ID NO: 2023883 - DNA, 25 bp, Homo sapien
tgtcctagtcatactgaaagcacgc

SEQ ID NO: 2023884 - DNA, 25 bp, Homo sapien
gaaagcacgcatgctatcaacacgg

SEQ ID NO: 2023885 - DNA, 25 bp, Homo sapien
tgcagtactgccaggagctttccgt

SEQ ID NO: 2023886 - DNA, 25 bp, Homo sapien
gataatattcggtgagaaaaaagct

SEQ ID NO: 2023887 - DNA, 25 bp, Homo sapien
cccttgataatattcggtgagaaaa

SEQ ID NO: 2023888 - DNA, 25 bp, Homo sapien
tagaaaatgggtcaatacattcatc

SEQ ID NO: 2023889 - DNA, 25 bp, Homo sapien
gggtcaatacattcatcccttgata

SEQ ID NO: 2023890 - DNA, 25 bp, Homo sapien
tcttctcgatcatcaataatgcaaa

SEQ ID NO: 2023891 - DNA, 25 bp, Homo sapien
cgtctgagattctcgggacccaggg

SEQ ID NO: 2023892 - DNA, 25 bp, Homo sapien
gcaaaccattgagtctccacaagga

SEQ ID NO: 2023893 - DNA, 25 bp, Homo sapien
gcgcattcatatcacccgtgccctg

SEQ ID NO: 2023894 - DNA, 25 bp, Homo sapien
accgtgactgtaagccccggatgac

SEQ ID NO: 2023895 - DNA, 25 bp, Homo sapien
gtaagcccctgcagacctggcacca

SEQ ID NO: 2023896 - DNA, 25 bp, Homo sapien
gccaccgtgactgtaagccccggat

SEQ ID NO: 2023897 - DNA, 25 bp, Homo sapien
ccgtaagcccctgcagacctggcac

SEQ ID NO: 2023898 - DNA, 25 bp, Homo sapien
tgagacctcagtgcctcgagaatga

SEQ ID NO: 2023899 - DNA, 25 bp, Homo sapien
gctctgagacctcagtgcctcgaga

SEQ ID NO: 2023900 - DNA, 25 bp, Homo sapien
acctcagtgcctcgagaatgattta

SEQ ID NO: 2023901 - DNA, 25 bp, Homo sapien
gggcggagatggctctgagacctca

SEQ ID NO: 2023902 - DNA, 25 bp, Homo sapien
agatgtccctctcgtctggcttccc

SEQ ID NO: 2023903 - DNA, 25 bp, Homo sapien
caggggcctgcgttaccccctcagg

SEQ ID NO: 2023904 - DNA, 25 bp, Homo sapien
tgccgttcagctcccgtgcaggctt

SEQ ID NO: 2023905 - DNA, 25 bp, Homo sapien
ggcctcgctgccgttcagctcccgt

SEQ ID NO: 2023906 - DNA, 25 bp, Homo sapien
cctcgctttcgccatcagaggcgga

SEQ ID NO: 2023907 - DNA, 25 bp, Homo sapien
gaggaggacttcgtgccctcggact

SEQ ID NO: 2023908 - DNA, 25 bp, Homo sapien
ggataagtcaaagtccaggtcagtg

SEQ ID NO: 2023909 - DNA, 25 bp, Homo sapien
gctgctctcgctgtcgctggataag

SEQ ID NO: 2023910 - DNA, 25 bp, Homo sapien
caggctccttgtccggggcatgcgc

SEQ ID NO: 2023911 - DNA, 25 bp, Homo sapien
tcaggctccttgtccggggcatgcg

SEQ ID NO: 2023912 - DNA, 25 bp, Homo sapien
tccttgtccggggcatgcgcgccag

SEQ ID NO: 2023913 - DNA, 25 bp, Homo sapien
ttgtccggggcatgcgcgccaggct

SEQ ID NO: 2023914 - DNA, 25 bp, Homo sapien
ccaggtagatgaggtggtcatcctc

SEQ ID NO: 2023915 - DNA, 25 bp, Homo sapien
gacagctcgctgttctgtgactcgg

SEQ ID NO: 2023916 - DNA, 25 bp, Homo sapien
ttcctgtcggcacagccgttgccca

SEQ ID NO: 2023917 - DNA, 25 bp, Homo sapien
tccagggactcacccgcagtgaccc

SEQ ID NO: 2023918 - DNA, 25 bp, Homo sapien
gaaaattatggccacgtctgccagc

SEQ ID NO: 2023919 - DNA, 25 bp, Homo sapien
tcagtgtgtacacggaccaggatct

SEQ ID NO: 2023920 - DNA, 25 bp, Homo sapien
cagcgccgtggcgtggtaatgctcc

SEQ ID NO: 2023921 - DNA, 25 bp, Homo sapien
caccagccgagtgaggatcttcgct

SEQ ID NO: 2023922 - DNA, 25 bp, Homo sapien
ttggtgtgatcgtccctgagcggga

SEQ ID NO: 2023923 - DNA, 25 bp, Homo sapien
gtccctgagcgggaagagctgctcc

SEQ ID NO: 2023924 - DNA, 25 bp, Homo sapien
ttgaccacgtgcaggtgtccgcact

SEQ ID NO: 2023925 - DNA, 25 bp, Homo sapien
agccagtcagggttgaccacgtgca

SEQ ID NO: 2023926 - DNA, 25 bp, Homo sapien
cgtcctgatgagcttccccgtgttg

SEQ ID NO: 2023927 - DNA, 25 bp, Homo sapien
ctcctggcggatgggtagggagctg

SEQ ID NO: 2023928 - DNA, 25 bp, Homo sapien
tggagtcgtagatccgaacctcggg

SEQ ID NO: 2023929 - DNA, 25 bp, Homo sapien
aagaaccggcatcgggtggaacaag

SEQ ID NO: 2023930 - DNA, 25 bp, Homo sapien
caaagagtgtacagcggcattgtct

SEQ ID NO: 2023931 - DNA, 25 bp, Homo sapien
gtcgctttcttctagaagggccagg

SEQ ID NO: 2023932 - DNA, 25 bp, Homo sapien
tctcagacatactgggctgtcgctt

SEQ ID NO: 2023933 - DNA, 25 bp, Homo sapien
tcttcaccaaacatctgcggctggg

SEQ ID NO: 2023934 - DNA, 25 bp, Homo sapien
gcaccggggcgtggggttggctcac

SEQ ID NO: 2023935 - DNA, 25 bp, Homo sapien
ctctgcggccccagcacgagcgctg

SEQ ID NO: 2023936 - DNA, 25 bp, Homo sapien
ggcaccggggcgtggggttggctca

SEQ ID NO: 2023937 - DNA, 25 bp, Homo sapien
ccagcacgagcgctggcgcgggcac

SEQ ID NO: 2023938 - DNA, 25 bp, Homo sapien
tctcacatgattttgggagcgctcc

SEQ ID NO: 2023939 - DNA, 25 bp, Homo sapien
gcatgctttagagtcgcttccagaa

SEQ ID NO: 2023940 - DNA, 25 bp, Homo sapien
gaggactgagtgctattcacacaca

SEQ ID NO: 2023941 - DNA, 25 bp, Homo sapien
tctcaggtgattttgggagcactcc

SEQ ID NO: 2023942 - DNA, 25 bp, Homo sapien
gactagcggagggaagagcacttta

SEQ ID NO: 2023943 - DNA, 25 bp, Homo sapien
gcgtctgtgtgcgacggcacagccc

SEQ ID NO: 2023944 - DNA, 25 bp, Homo sapien
tgtccagcatggatcacgtcggagt

SEQ ID NO: 2023945 - DNA, 25 bp, Homo sapien
gctcacagctctccgacgttgaggg

SEQ ID NO: 2023946 - DNA, 25 bp, Homo sapien
caaacccagtcggttcgcaggcaaa

SEQ ID NO: 2023947 - DNA, 25 bp, Homo sapien
gaaacatgcagagagggcgactcct

SEQ ID NO: 2023948 - DNA, 25 bp, Homo sapien
gattcacagcaagactcctgagtgg

SEQ ID NO: 2023949 - DNA, 25 bp, Homo sapien
tctgggcacgcctccaatttgggaa

SEQ ID NO: 2023950 - DNA, 25 bp, Homo sapien
gctgtcgtcgctgccttctccaagg

SEQ ID NO: 2023951 - DNA, 25 bp, Homo sapien
tcttctcgctgtcgctgtcgtcgct

SEQ ID NO: 2023952 - DNA, 25 bp, Homo sapien
tctcgctggacgcaggtgccccgag

SEQ ID NO: 2023953 - DNA, 25 bp, Homo sapien
ctgcgggtccctggcttccggggct

SEQ ID NO: 2023954 - DNA, 25 bp, Homo sapien
cgtcccggccgtgggtatgagagtc

SEQ ID NO: 2023955 - DNA, 25 bp, Homo sapien
cacccgtcccggccgtgggtatgag

SEQ ID NO: 2023956 - DNA, 25 bp, Homo sapien
cccgtcccggccgtgggtatgagag

SEQ ID NO: 2023957 - DNA, 25 bp, Homo sapien
ccgtcccggccgtgggtatgagagt

SEQ ID NO: 2023958 - DNA, 25 bp, Homo sapien
tacatctccacatggtatgggccca

SEQ ID NO: 2023959 - DNA, 25 bp, Homo sapien
tcggcgcggctactggcaaatgtta

SEQ ID NO: 2023960 - DNA, 25 bp, Homo sapien
gagcacggtgagaccaaccttcttg

SEQ ID NO: 2023961 - DNA, 25 bp, Homo sapien
tgtacgataccacatccatgcatgc

SEQ ID NO: 2023962 - DNA, 25 bp, Homo sapien
agagctcaacccactggcaggtgga

SEQ ID NO: 2023963 - DNA, 25 bp, Homo sapien
gatgccttgctcaagggagccctgg

SEQ ID NO: 2023964 - DNA, 25 bp, Homo sapien
tctcgtaaacgtgaaggtgctgccg

SEQ ID NO: 2023965 - DNA, 25 bp, Homo sapien
acaggagacccttgcgaacagaggc

SEQ ID NO: 2023966 - DNA, 25 bp, Homo sapien
acgagtctggcctccggttgctaca

SEQ ID NO: 2023967 - DNA, 25 bp, Homo sapien
cacgctgacggctgttccgggaaaa

SEQ ID NO: 2023968 - DNA, 25 bp, Homo sapien
ggttgctacagcaacaagcttttgg

SEQ ID NO: 2023969 - DNA, 25 bp, Homo sapien
ttttcctccgcatacacgctgacgg

SEQ ID NO: 2023970 - DNA, 25 bp, Homo sapien
tcaccatatgtgagtaccctaagaa

SEQ ID NO: 2023971 - DNA, 25 bp, Homo sapien
tacaatcccgaaaagtcactgagag

SEQ ID NO: 2023972 - DNA, 25 bp, Homo sapien
ggtggaagcctggttaaatgtgcac

SEQ ID NO: 2023973 - DNA, 25 bp, Homo sapien
tcagctacaaccttagaggtggaag

SEQ ID NO: 2023974 - DNA, 25 bp, Homo sapien
ccagagccctgaaattccaaccacc

SEQ ID NO: 2023975 - DNA, 25 bp, Homo sapien
agccgacttgatcggggcacaccca

SEQ ID NO: 2023976 - DNA, 25 bp, Homo sapien
ctgtgacgtgagccgacttgatcgg

SEQ ID NO: 2023977 - DNA, 25 bp, Homo sapien
agagccctgaaattccaaccacctg

SEQ ID NO: 2023978 - DNA, 25 bp, Homo sapien
aggttttccttaggagccgctgcag

SEQ ID NO: 2023979 - DNA, 25 bp, Homo sapien
ccttggccatctcgtcggcctcgga

SEQ ID NO: 2023980 - DNA, 25 bp, Homo sapien
tgctgccctcatcctcgttgctgga

SEQ ID NO: 2023981 - DNA, 25 bp, Homo sapien
ctgctgccctcatcctcgttgctgg

SEQ ID NO: 2023982 - DNA, 25 bp, Homo sapien
cagcgccttggccatctcgtcggcc

SEQ ID NO: 2023983 - DNA, 25 bp, Homo sapien
gaaactttacatcaggtgtctccaa

SEQ ID NO: 2023984 - DNA, 25 bp, Homo sapien
tggaggtcggtcaggcttcagtccc

SEQ ID NO: 2023985 - DNA, 25 bp, Homo sapien
taaactcctagtccatgtctcgtgg

SEQ ID NO: 2023986 - DNA, 25 bp, Homo sapien
acagtcacggcgttccccggaaatg

SEQ ID NO: 2023987 - DNA, 25 bp, Homo sapien
tcactcggcgctgcaaataacctag

SEQ ID NO: 2023988 - DNA, 25 bp, Homo sapien
cctagttagtacaggaaacagtcac

SEQ ID NO: 2023989 - DNA, 25 bp, Homo sapien
tgctgggtaacggtgcctttcctct

SEQ ID NO: 2023990 - DNA, 25 bp, Homo sapien
tcgccgcatcttgacgacagcagca

SEQ ID NO: 2023991 - DNA, 25 bp, Homo sapien
cgaaatcggacctgaggtgggccca

SEQ ID NO: 2023992 - DNA, 25 bp, Homo sapien
attcttgctcgtggcgaaatcggac

SEQ ID NO: 2023993 - DNA, 25 bp, Homo sapien
aggaactccctgaccggcgtctggt

SEQ ID NO: 2023994 - DNA, 25 bp, Homo sapien
tgaccggcgtctggtcatcctgcag

SEQ ID NO: 2023995 - DNA, 25 bp, Homo sapien
gactcggccaagagcagaacaaggg

SEQ ID NO: 2023996 - DNA, 25 bp, Homo sapien
cacacgcagaatcgccttcagggag

SEQ ID NO: 2023997 - DNA, 25 bp, Homo sapien
cacactgtgtttaaggaggccttgc

SEQ ID NO: 2023998 - DNA, 25 bp, Homo sapien
gagacaggcgggagaaaagtcccat

SEQ ID NO: 2023999 - DNA, 25 bp, Homo sapien
gggccagccttccagagggtgccat

SEQ ID NO: 2024000 - DNA, 25 bp, Homo sapien
ggagttgctccagtcagggctgcaa

SEQ ID NO: 2024001 - DNA, 25 bp, Homo sapien
atcaccgcgggcagggtcagaagac

SEQ ID NO: 2024002 - DNA, 25 bp, Homo sapien
gtcagaagacctgccgggcagcaga

SEQ ID NO: 2024003 - DNA, 25 bp, Homo sapien
tccctaacattcagtggtttcttcg

SEQ ID NO: 2024004 - DNA, 25 bp, Homo sapien
tttcataaacgttaatcacagtccc

SEQ ID NO: 2024005 - DNA, 25 bp, Homo sapien
ggtttcttcgcatagcacagaacat

SEQ ID NO: 2024006 - DNA, 25 bp, Homo sapien
tcctggctcttttgtgtagaacaca

SEQ ID NO: 2024007 - DNA, 25 bp, Homo sapien
aaagccgtttttggctgaccaggtg

SEQ ID NO: 2024008 - DNA, 25 bp, Homo sapien
tgttggaaaagccgtttttggctga

SEQ ID NO: 2024009 - DNA, 25 bp, Homo sapien
tgtggggagtgtgaaccagcatcac

SEQ ID NO: 2024010 - DNA, 25 bp, Homo sapien
ggggagtgtgaaccagcatcactga

SEQ ID NO: 2024011 - DNA, 25 bp, Homo sapien
gacatcatatctgatggctacacag

SEQ ID NO: 2024012 - DNA, 25 bp, Homo sapien
gctacacagtctccatcaactgcga

SEQ ID NO: 2024013 - DNA, 25 bp, Homo sapien
aaaactggtgtcttgtgttgacatc

SEQ ID NO: 2024014 - DNA, 25 bp, Homo sapien
aaactggtgtcttgtgttgacatca

SEQ ID NO: 2024015 - DNA, 25 bp, Homo sapien
gccttcgatgatcaaaatgcatctt

SEQ ID NO: 2024016 - DNA, 25 bp, Homo sapien
ccttcgatgatcaaaatgcatcttc

SEQ ID NO: 2024017 - DNA, 25 bp, Homo sapien
aacagcagcgttggcgccaggtgtc

SEQ ID NO: 2024018 - DNA, 25 bp, Homo sapien
cgttggcgccaggtgtcaaggcaac

SEQ ID NO: 2024019 - DNA, 25 bp, Homo sapien
aaacagcagcgttggcgccaggtgt

SEQ ID NO: 2024020 - DNA, 25 bp, Homo sapien
gccaggtgtcaaggcaacgcatgca

SEQ ID NO: 2024021 - DNA, 25 bp, Homo sapien
tattcccagcgtgcacactggtgag

SEQ ID NO: 2024022 - DNA, 25 bp, Homo sapien
cctagagacgaaggttccaggctgc

SEQ ID NO: 2024023 - DNA, 25 bp, Homo sapien
taggttccctcttgacctagagacg

SEQ ID NO: 2024024 - DNA, 25 bp, Homo sapien
tccaggctgcacatccacgtttatt

SEQ ID NO: 2024025 - DNA, 25 bp, Homo sapien
tgttcagtcttgcaccgagaggaga

SEQ ID NO: 2024026 - DNA, 25 bp, Homo sapien
ccttgttcagtcttgcaccgagagg

SEQ ID NO: 2024027 - DNA, 25 bp, Homo sapien
gaagggcctcgtccttgttcagtct

SEQ ID NO: 2024028 - DNA, 25 bp, Homo sapien
catgtccttggcgtgaagggcctcg

SEQ ID NO: 2024029 - DNA, 25 bp, Homo sapien
tgaggaagtgaatttccaaaaaatg

SEQ ID NO: 2024030 - DNA, 25 bp, Homo sapien
ccatctcacgttcagacacctgctt

SEQ ID NO: 2024031 - DNA, 25 bp, Homo sapien
cccacagccagtccgagcatttgag

SEQ ID NO: 2024032 - DNA, 25 bp, Homo sapien
ggtatccttaactgtccgctgccca

SEQ ID NO: 2024033 - DNA, 25 bp, Homo sapien
tgcttacgtgttctaacaccaagac

SEQ ID NO: 2024034 - DNA, 25 bp, Homo sapien
cacaattccaagtgcggtacgttct

SEQ ID NO: 2024035 - DNA, 25 bp, Homo sapien
cctgtcggagactgtgacatctgga

SEQ ID NO: 2024036 - DNA, 25 bp, Homo sapien
gccactggaaggatcggaaaccaca

SEQ ID NO: 2024037 - DNA, 25 bp, Homo sapien
agtaacgtccaggtccataaagtgg

SEQ ID NO: 2024038 - DNA, 25 bp, Homo sapien
tgctggtgcagcttcgcctcttcac

SEQ ID NO: 2024039 - DNA, 25 bp, Homo sapien
tcagtcaccgtttgctgctgttcct

SEQ ID NO: 2024040 - DNA, 25 bp, Homo sapien
tctttgactcacagtaacgtccagg

SEQ ID NO: 2024041 - DNA, 25 bp, Homo sapien
gagtcttccgatggccacactgcct

SEQ ID NO: 2024042 - DNA, 25 bp, Homo sapien
ggctcgtgggcggtgtgcgttgggt

SEQ ID NO: 2024043 - DNA, 25 bp, Homo sapien
tgcactccatgatggagtcttccga

SEQ ID NO: 2024044 - DNA, 25 bp, Homo sapien
tgcgttgggtgatgaccaggcagat

SEQ ID NO: 2024045 - DNA, 25 bp, Homo sapien
cgatggcctcatccgtctgcttgtc

SEQ ID NO: 2024046 - DNA, 25 bp, Homo sapien
tctgaagcccgagtcattcgctgta

SEQ ID NO: 2024047 - DNA, 25 bp, Homo sapien
tgaatgggtatgaagggcccatccg

SEQ ID NO: 2024048 - DNA, 25 bp, Homo sapien
gcatcgtttattcagagggaccacg

SEQ ID NO: 2024049 - DNA, 25 bp, Homo sapien
gctcaggtgccgtgttctcaaggat

SEQ ID NO: 2024050 - DNA, 25 bp, Homo sapien
gtcaggtctggccaagtcccgtgct

SEQ ID NO: 2024051 - DNA, 25 bp, Homo sapien
ttcccgggcagtcgtggtcaggtct

SEQ ID NO: 2024052 - DNA, 25 bp, Homo sapien
aacgaccctgatgaaccgggctgag

SEQ ID NO: 2024053 - DNA, 25 bp, Homo sapien
aaactgggaaccgtggagatgtctg

SEQ ID NO: 2024054 - DNA, 25 bp, Homo sapien
aaaactgcacctcaccggatgctga

SEQ ID NO: 2024055 - DNA, 25 bp, Homo sapien
cactcagcaggaacgaaggagaaca

SEQ ID NO: 2024056 - DNA, 25 bp, Homo sapien
tccgaaacccgggatgtgtgcgaca

SEQ ID NO: 2024057 - DNA, 25 bp, Homo sapien
tcctaaggaaataaacgagagccga

SEQ ID NO: 2024058 - DNA, 25 bp, Homo sapien
cgagagccgagaaagtatcggtcca

SEQ ID NO: 2024059 - DNA, 25 bp, Homo sapien
caagtatcttctaactgccccggct

SEQ ID NO: 2024060 - DNA, 25 bp, Homo sapien
ggctatccggttctgaaattctctc

SEQ ID NO: 2024061 - DNA, 25 bp, Homo sapien
gccgtccggatgtgagccgcatgtt

SEQ ID NO: 2024062 - DNA, 25 bp, Homo sapien
cccgagtgttccgaagaaatggatt

SEQ ID NO: 2024063 - DNA, 25 bp, Homo sapien
ccaccgtggagaaggaatgggtcct

SEQ ID NO: 2024064 - DNA, 25 bp, Homo sapien
actggccatattgtttctaagcggg

SEQ ID NO: 2024065 - DNA, 25 bp, Homo sapien
gccgcctcgcgtgggtgctaacagc

SEQ ID NO: 2024066 - DNA, 25 bp, Homo sapien
gtgggtgctaacagcgcccttgcac

SEQ ID NO: 2024067 - DNA, 25 bp, Homo sapien
gcccttgcaccgcatcctcggaagg

SEQ ID NO: 2024068 - DNA, 25 bp, Homo sapien
tcattcttgcaggacagctccggca

SEQ ID NO: 2024069 - DNA, 25 bp, Homo sapien
tttgttcacatgttgtgttaagcac

SEQ ID NO: 2024070 - DNA, 25 bp, Homo sapien
tatttgttcacatgttgtgttaagc

SEQ ID NO: 2024071 - DNA, 25 bp, Homo sapien
atttgttcacatgttgtgttaagca

SEQ ID NO: 2024072 - DNA, 25 bp, Homo sapien
tctgcagtgcgggaggagctcccac

SEQ ID NO: 2024073 - DNA, 25 bp, Homo sapien
acggacgtcagtccccgggcttctg

SEQ ID NO: 2024074 - DNA, 25 bp, Homo sapien
cggacacgttcattctcctgaacat

SEQ ID NO: 2024075 - DNA, 25 bp, Homo sapien
tgtttcttgttcatgggagacaggg

SEQ ID NO: 2024076 - DNA, 25 bp, Homo sapien
ggctcccgcaggaccagcgcgaata

SEQ ID NO: 2024077 - DNA, 25 bp, Homo sapien
ggcgatccgcggccgagacctccat

SEQ ID NO: 2024078 - DNA, 25 bp, Homo sapien
cccgcaggaccagcgcgaatagacg

SEQ ID NO: 2024079 - DNA, 25 bp, Homo sapien
ccagcgcgaatagacggggcgatcc

SEQ ID NO: 2024080 - DNA, 25 bp, Homo sapien
tttgagcgcacgcggaagccagagg

SEQ ID NO: 2024081 - DNA, 25 bp, Homo sapien
ttgagcgcacgcggaagccagaggt

SEQ ID NO: 2024082 - DNA, 25 bp, Homo sapien
gagcgcacgcggaagccagaggtct

SEQ ID NO: 2024083 - DNA, 25 bp, Homo sapien
tgagcgcacgcggaagccagaggtc

SEQ ID NO: 2024084 - DNA, 25 bp, Homo sapien
catgcagtgatcagtgggtgctgac

SEQ ID NO: 2024085 - DNA, 25 bp, Homo sapien
cctttgggaaacaggtcacataggc

SEQ ID NO: 2024086 - DNA, 25 bp, Homo sapien
gccctattcttgtagcctttgggaa

SEQ ID NO: 2024087 - DNA, 25 bp, Homo sapien
gaagaacacgctctcaaatgcccta

SEQ ID NO: 2024088 - DNA, 25 bp, Homo sapien
ttggcttctttttgatgccacattc

SEQ ID NO: 2024089 - DNA, 25 bp, Homo sapien
ttcagaggccgacaaccacggttca

SEQ ID NO: 2024090 - DNA, 25 bp, Homo sapien
acattccctttggtgtgaaatgatt

SEQ ID NO: 2024091 - DNA, 25 bp, Homo sapien
cacatcaaagagcatcagcccagac

SEQ ID NO: 2024092 - DNA, 25 bp, Homo sapien
ccacacatggtggatgaggccgtca

SEQ ID NO: 2024093 - DNA, 25 bp, Homo sapien
tgtgacaaacagtagacaggaagcc

SEQ ID NO: 2024094 - DNA, 25 bp, Homo sapien
cccgaaggcgagaaatgtgacaaac

SEQ ID NO: 2024095 - DNA, 25 bp, Homo sapien
ctaatttaacttcctctggccctgc

SEQ ID NO: 2024096 - DNA, 25 bp, Homo sapien
gctgcagcatccgaaaagtacgtct

SEQ ID NO: 2024097 - DNA, 25 bp, Homo sapien
cgaggtttagaaccgaaagctgcat

SEQ ID NO: 2024098 - DNA, 25 bp, Homo sapien
aaagctgcataagcggcaggtgcgc

SEQ ID NO: 2024099 - DNA, 25 bp, Homo sapien
tcttgagtgggcgtgaagattgcct

SEQ ID NO: 2024100 - DNA, 25 bp, Homo sapien
cccatcgttgattggtgaagcctac

SEQ ID NO: 2024101 - DNA, 25 bp, Homo sapien
taataaatagtgtgagaactccaac

SEQ ID NO: 2024102 - DNA, 25 bp, Homo sapien
tagtagtcatataaaccaacatctg

SEQ ID NO: 2024103 - DNA, 25 bp, Homo sapien
ctctcatcaaaagtcagctgaccac

SEQ ID NO: 2024104 - DNA, 25 bp, Homo sapien
gtctttgtttaatgtggtcgccagg

SEQ ID NO: 2024105 - DNA, 25 bp, Homo sapien
ttttccagtaaaatcaccaggtctg

SEQ ID NO: 2024106 - DNA, 25 bp, Homo sapien
gccaggtatggctgacctcattaaa

SEQ ID NO: 2024107 - DNA, 25 bp, Homo sapien
gaactgttccgaccgtatctcacat

SEQ ID NO: 2024108 - DNA, 25 bp, Homo sapien
tgggttatacctttgttgtcaagtc

SEQ ID NO: 2024109 - DNA, 25 bp, Homo sapien
caactgcacctacaacatttcttga

SEQ ID NO: 2024110 - DNA, 25 bp, Homo sapien
atttgtgtagcaggtggaaggttta

SEQ ID NO: 2024111 - DNA, 25 bp, Homo sapien
ttcttgaaaaggcttcagatgtgga

SEQ ID NO: 2024112 - DNA, 25 bp, Homo sapien
aacagtgtggcctcatgaggattaa

SEQ ID NO: 2024113 - DNA, 25 bp, Homo sapien
aggacaccccgaaatgccacagagt

SEQ ID NO: 2024114 - DNA, 25 bp, Homo sapien
cctcagccgattctgaacagtgtgg

SEQ ID NO: 2024115 - DNA, 25 bp, Homo sapien
ggccaccaaataccctgtcagcaag

SEQ ID NO: 2024116 - DNA, 25 bp, Homo sapien
ccacgttgatgatgacgtgccgggc

SEQ ID NO: 2024117 - DNA, 25 bp, Homo sapien
agcgcggcccatgccaggcgcacgc

SEQ ID NO: 2024118 - DNA, 25 bp, Homo sapien
ccaggcgcgcgagggggcatcgcgc

SEQ ID NO: 2024119 - DNA, 25 bp, Homo sapien
ggcatcgcgccagcgcggcccatgc

SEQ ID NO: 2024120 - DNA, 25 bp, Homo sapien
tagtcgtcacacacgcgcagcaggt

SEQ ID NO: 2024121 - DNA, 25 bp, Homo sapien
gtcgtagtcgtcacacacgcgcagc

SEQ ID NO: 2024122 - DNA, 25 bp, Homo sapien
gtcacacacgcgcagcaggtcgtcg

SEQ ID NO: 2024123 - DNA, 25 bp, Homo sapien
acacgcgcagcaggtcgtcgtggcc

SEQ ID NO: 2024124 - DNA, 25 bp, Homo sapien
gtcgcagcttccctgcgcgcaaaag

SEQ ID NO: 2024125 - DNA, 25 bp, Homo sapien
ccgcagcagtcgcagcttccctgcg

SEQ ID NO: 2024126 - DNA, 25 bp, Homo sapien
gatggcgcggaaggcgcacgggctg

SEQ ID NO: 2024127 - DNA, 25 bp, Homo sapien
caaaagcgccacgatggcgcggaag

SEQ ID NO: 2024128 - DNA, 25 bp, Homo sapien
agtgcgggttgtccaccacgtcgcg

SEQ ID NO: 2024129 - DNA, 25 bp, Homo sapien
atgtccggcatggtgctcaggcaga

SEQ ID NO: 2024130 - DNA, 25 bp, Homo sapien
acacggacacgcaggcgaagagctt

SEQ ID NO: 2024131 - DNA, 25 bp, Homo sapien
ccgtgacggccacgaaggacacgga

SEQ ID NO: 2024132 - DNA, 25 bp, Homo sapien
accggatgctgcgtcggaaaccgaa

SEQ ID NO: 2024133 - DNA, 25 bp, Homo sapien
gatgctgcgtcggaaaccgaatgta

SEQ ID NO: 2024134 - DNA, 25 bp, Homo sapien
tcggaaaccgaatgtaacttggagc

SEQ ID NO: 2024135 - DNA, 25 bp, Homo sapien
ctgcgtcggaaaccgaatgtaactt

SEQ ID NO: 2024136 - DNA, 25 bp, Homo sapien
aatattttagctccacgttgtccaa

SEQ ID NO: 2024137 - DNA, 25 bp, Homo sapien
gaatgaccaaatgtcacacaattct

SEQ ID NO: 2024138 - DNA, 25 bp, Homo sapien
gaaacaatgcggttgggtctccttg

SEQ ID NO: 2024139 - DNA, 25 bp, Homo sapien
acacaattctctaggccccggatac

SEQ ID NO: 2024140 - DNA, 25 bp, Homo sapien
cgattattccgcagccattagggcc

SEQ ID NO: 2024141 - DNA, 25 bp, Homo sapien
gctgaagctcgtgatcccgtctgta

SEQ ID NO: 2024142 - DNA, 25 bp, Homo sapien
tgtatgttcacagggcgccttcgac

SEQ ID NO: 2024143 - DNA, 25 bp, Homo sapien
tgtcagagacgacagaagacaccgc

SEQ ID NO: 2024144 - DNA, 25 bp, Homo sapien
aatttgctgccaatgtcgcagtggc

SEQ ID NO: 2024145 - DNA, 25 bp, Homo sapien
cctggtgacacatctgctgcgggtc

SEQ ID NO: 2024146 - DNA, 25 bp, Homo sapien
gttttccccatcaaatctgtgcagg

SEQ ID NO: 2024147 - DNA, 25 bp, Homo sapien
cgcacgtgcaggagcgttgccatca

SEQ ID NO: 2024148 - DNA, 25 bp, Homo sapien
ggcatctcccacaggtctcgctcca

SEQ ID NO: 2024149 - DNA, 25 bp, Homo sapien
ctccacaacacagccgtcaccttcc

SEQ ID NO: 2024150 - DNA, 25 bp, Homo sapien
acaacacagccgtcaccttccacag

SEQ ID NO: 2024151 - DNA, 25 bp, Homo sapien
gcggcccatggtgggctgccggcat

SEQ ID NO: 2024152 - DNA, 25 bp, Homo sapien
gaacactcgctctgtacgtgacaca

SEQ ID NO: 2024153 - DNA, 25 bp, Homo sapien
gatgcaccgggattgatctggcacc

SEQ ID NO: 2024154 - DNA, 25 bp, Homo sapien
gctaggccgtgctgaataaagccgg

SEQ ID NO: 2024155 - DNA, 25 bp, Homo sapien
tttgctgcttttcaccgcgcaccgt

SEQ ID NO: 2024156 - DNA, 25 bp, Homo sapien
cagtgggccgggctgcatggagccc

SEQ ID NO: 2024157 - DNA, 25 bp, Homo sapien
gagccctcgtggacgtgccggtggg

SEQ ID NO: 2024158 - DNA, 25 bp, Homo sapien
tggagccctcgtggacgtgccggtg

SEQ ID NO: 2024159 - DNA, 25 bp, Homo sapien
tgccggtggggacgccggtgcaagt

SEQ ID NO: 2024160 - DNA, 25 bp, Homo sapien
cctagatggggcgaattctcttggg

SEQ ID NO: 2024161 - DNA, 25 bp, Homo sapien
tgtgtcattaggtgggacctagatg

SEQ ID NO: 2024162 - DNA, 25 bp, Homo sapien
ttgaaggactgagaacgggagtgtg

SEQ ID NO: 2024163 - DNA, 25 bp, Homo sapien
cggaggacgggaatccagcagtggt

SEQ ID NO: 2024164 - DNA, 25 bp, Homo sapien
gggtctgtggtctcaggttcaaggg

SEQ ID NO: 2024165 - DNA, 25 bp, Homo sapien
ctgccctctactgtcagggtggggt

SEQ ID NO: 2024166 - DNA, 25 bp, Homo sapien
ccctctactgtcagggtggggtctg

SEQ ID NO: 2024167 - DNA, 25 bp, Homo sapien
tggggtctgtggtctcaggttcaag

SEQ ID NO: 2024168 - DNA, 25 bp, Homo sapien
tcaatgatgttgagtggcgcgcgca

SEQ ID NO: 2024169 - DNA, 25 bp, Homo sapien
ggaaggcgcacttgctctcggcctg

SEQ ID NO: 2024170 - DNA, 25 bp, Homo sapien
agcagcgacacgtagaacggcagga

SEQ ID NO: 2024171 - DNA, 25 bp, Homo sapien
agatgacggcccaccaatagctggc

SEQ ID NO: 2024172 - DNA, 25 bp, Homo sapien
gctgaatgtaccctgtgtggcgact

SEQ ID NO: 2024173 - DNA, 25 bp, Homo sapien
caagaggtcacaccatgtcagcagc

SEQ ID NO: 2024174 - DNA, 25 bp, Homo sapien
caagatgtctgtagcggtaattgcc

SEQ ID NO: 2024175 - DNA, 25 bp, Homo sapien
catgggaagatgttccacgctgcct

SEQ ID NO: 2024176 - DNA, 25 bp, Homo sapien
aaggtacacattgggcggcctgcag

SEQ ID NO: 2024177 - DNA, 25 bp, Homo sapien
gaccatcagacaacgtggaggccct

SEQ ID NO: 2024178 - DNA, 25 bp, Homo sapien
accctgtaaggcctgtgagcggagc

SEQ ID NO: 2024179 - DNA, 25 bp, Homo sapien
tgaacgccttgtggatccgctgtgt

SEQ ID NO: 2024180 - DNA, 25 bp, Homo sapien
tgatctggccccgagggttttggat

SEQ ID NO: 2024181 - DNA, 25 bp, Homo sapien
atcagcctctgtggggtgtctcagg

SEQ ID NO: 2024182 - DNA, 25 bp, Homo sapien
tgggcattggggtctccatcagcct

SEQ ID NO: 2024183 - DNA, 25 bp, Homo sapien
gggctgggacgctgtttgtgctcag

SEQ ID NO: 2024184 - DNA, 25 bp, Homo sapien
gagggtcaggcgagctctgtttccc

SEQ ID NO: 2024185 - DNA, 25 bp, Homo sapien
tcccagtgggtgtaatgataaagcc

SEQ ID NO: 2024186 - DNA, 25 bp, Homo sapien
aaagccggatttatgttctcagagg

SEQ ID NO: 2024187 - DNA, 25 bp, Homo sapien
gggaattccgaagcctgggctgact

SEQ ID NO: 2024188 - DNA, 25 bp, Homo sapien
aagtgtgagctgatgctgcatgcca

SEQ ID NO: 2024189 - DNA, 25 bp, Homo sapien
gaggatattctgtagaccccacagg

SEQ ID NO: 2024190 - DNA, 25 bp, Homo sapien
tgacaagaaagcacagatccccagt

SEQ ID NO: 2024191 - DNA, 25 bp, Homo sapien
tgcatgccaagtaaagccacgggct

SEQ ID NO: 2024192 - DNA, 25 bp, Homo sapien
caggctgcgggcacaatttgcccca

SEQ ID NO: 2024193 - DNA, 25 bp, Homo sapien
ggtgacgtccgagcatgccagattt

SEQ ID NO: 2024194 - DNA, 25 bp, Homo sapien
agatttcgtccactgagccgggctc

SEQ ID NO: 2024195 - DNA, 25 bp, Homo sapien
gccccgtgcacagatgcagctctag

SEQ ID NO: 2024196 - DNA, 25 bp, Homo sapien
tgctaaagccagtttatccaggagt

SEQ ID NO: 2024197 - DNA, 25 bp, Homo sapien
tgactgccaagcacgtcacatgaca

SEQ ID NO: 2024198 - DNA, 25 bp, Homo sapien
cacatgacaccagttgaagttgcgg

SEQ ID NO: 2024199 - DNA, 25 bp, Homo sapien
tctgatgggcccatgaaaggctgcc

SEQ ID NO: 2024200 - DNA, 25 bp, Homo sapien
gtgtgggtaggtgccagacacttta

SEQ ID NO: 2024201 - DNA, 25 bp, Homo sapien
aaacagatctcaggcgggcgcggtg

SEQ ID NO: 2024202 - DNA, 25 bp, Homo sapien
agtgagggtgtgggtaggtgccaga

SEQ ID NO: 2024203 - DNA, 25 bp, Homo sapien
tgagggtgtgggtaggtgccagaca

SEQ ID NO: 2024204 - DNA, 25 bp, Homo sapien
taagacgctgctgattttagggtgc

SEQ ID NO: 2024205 - DNA, 25 bp, Homo sapien
tcagaaatggagaaacgctgccaat

SEQ ID NO: 2024206 - DNA, 25 bp, Homo sapien
gatagctgaaaacgtcccagtccaa

SEQ ID NO: 2024207 - DNA, 25 bp, Homo sapien
ccctcggatccagtgtgggtggcct

SEQ ID NO: 2024208 - DNA, 25 bp, Homo sapien
cgcggtgtgggtggaaagtggctgc

SEQ ID NO: 2024209 - DNA, 25 bp, Homo sapien
ctgccgggcggcttctggcttctcg

SEQ ID NO: 2024210 - DNA, 25 bp, Homo sapien
gagaaagacgcggtgtgggtggaaa

SEQ ID NO: 2024211 - DNA, 25 bp, Homo sapien
cagtgtggacggctgagaaagacgc

SEQ ID NO: 2024212 - DNA, 25 bp, Homo sapien
tctcattacaaccagtcatcaggaa

SEQ ID NO: 2024213 - DNA, 25 bp, Homo sapien
tggactccgcccagtcattctttgg

SEQ ID NO: 2024214 - DNA, 25 bp, Homo sapien
taaatgtgattctcggtttttctca

SEQ ID NO: 2024215 - DNA, 25 bp, Homo sapien
tcagcaactcccactttagggtaag

SEQ ID NO: 2024216 - DNA, 25 bp, Homo sapien
tggcgacagctaagctccgcgattc

SEQ ID NO: 2024217 - DNA, 25 bp, Homo sapien
atgggccgccgggaggcctcgggcg

SEQ ID NO: 2024218 - DNA, 25 bp, Homo sapien
agctccgcgattcccgtatgggccg

SEQ ID NO: 2024219 - DNA, 25 bp, Homo sapien
cgcgaggtggcgacagctaagctcc

SEQ ID NO: 2024220 - DNA, 25 bp, Homo sapien
gcgcgcccgccgggggcttcagggc

SEQ ID NO: 2024221 - DNA, 25 bp, Homo sapien
cgcgtcccgcagcgcgcgcccgccg

SEQ ID NO: 2024222 - DNA, 25 bp, Homo sapien
gggcttcagggccccgcacgtccat

SEQ ID NO: 2024223 - DNA, 25 bp, Homo sapien
ggggcttcagggccccgcacgtcca

SEQ ID NO: 2024224 - DNA, 25 bp, Homo sapien
tcatagccagtcctcttgtgggcct

SEQ ID NO: 2024225 - DNA, 25 bp, Homo sapien
aacgcccaacacattccttcagatt

SEQ ID NO: 2024226 - DNA, 25 bp, Homo sapien
tgggcctggaactctttggcaagta

SEQ ID NO: 2024227 - DNA, 25 bp, Homo sapien
tagggtttgcacaacgcccaacaca

SEQ ID NO: 2024228 - DNA, 25 bp, Homo sapien
tttaatgttgccgtcagagcttgaa

SEQ ID NO: 2024229 - DNA, 25 bp, Homo sapien
taatgttgccgtcagagcttgaaaa

SEQ ID NO: 2024230 - DNA, 25 bp, Homo sapien
gttgccgtcagagcttgaaaatgtt

SEQ ID NO: 2024231 - DNA, 25 bp, Homo sapien
tgaggtttaatgttgccgtcagagc

SEQ ID NO: 2024232 - DNA, 25 bp, Homo sapien
taccagtccgaaagaatcacagcat

SEQ ID NO: 2024233 - DNA, 25 bp, Homo sapien
agatactccatgataatctaccagt

SEQ ID NO: 2024234 - DNA, 25 bp, Homo sapien
taatctaccagtccgaaagaatcac

SEQ ID NO: 2024235 - DNA, 25 bp, Homo sapien
ccatgataatctaccagtccgaaag

SEQ ID NO: 2024236 - DNA, 25 bp, Homo sapien
gtacagcttttgctataggtgaggg

SEQ ID NO: 2024237 - DNA, 25 bp, Homo sapien
cagaagtaaatactgggaaatccta

SEQ ID NO: 2024238 - DNA, 25 bp, Homo sapien
tgcacccggccggaggtacagcttt

SEQ ID NO: 2024239 - DNA, 25 bp, Homo sapien
cggccggaggtacagcttttgctat

SEQ ID NO: 2024240 - DNA, 25 bp, Homo sapien
tgtcctgtgggaacccatttacaaa

SEQ ID NO: 2024241 - DNA, 25 bp, Homo sapien
agcttagaaaacgtggctccccttg

SEQ ID NO: 2024242 - DNA, 25 bp, Homo sapien
tgagggaatcaacgacaggcctagt

SEQ ID NO: 2024243 - DNA, 25 bp, Homo sapien
caggcctagtgtccatgcaaatcag

SEQ ID NO: 2024244 - DNA, 25 bp, Homo sapien
ctcagagactccgcctcccatggca

SEQ ID NO: 2024245 - DNA, 25 bp, Homo sapien
actccgcctcccatggcacatgcaa

SEQ ID NO: 2024246 - DNA, 25 bp, Homo sapien
cagagactccgcctcccatggcaca

SEQ ID NO: 2024247 - DNA, 25 bp, Homo sapien
gagactccgcctcccatggcacatg

SEQ ID NO: 2024248 - DNA, 25 bp, Homo sapien
acagtgttaaggcgctctgcgtaga

SEQ ID NO: 2024249 - DNA, 25 bp, Homo sapien
gtacagtgttaaggcgctctgcgta

SEQ ID NO: 2024250 - DNA, 25 bp, Homo sapien
cagtgttaaggcgctctgcgtagag

SEQ ID NO: 2024251 - DNA, 25 bp, Homo sapien
tacagtgttaaggcgctctgcgtag

SEQ ID NO: 2024252 - DNA, 25 bp, Homo sapien
cattcttctgtaagtcctcaatgcg

SEQ ID NO: 2024253 - DNA, 25 bp, Homo sapien
ttcaatgccagcttgcaccattaag

SEQ ID NO: 2024254 - DNA, 25 bp, Homo sapien
gcaccattaagtccttgacattctt

SEQ ID NO: 2024255 - DNA, 25 bp, Homo sapien
gtaagtcctcaatgcgatttcccat

SEQ ID NO: 2024256 - DNA, 25 bp, Homo sapien
acggttgacatagtttgctaataac

SEQ ID NO: 2024257 - DNA, 25 bp, Homo sapien
tacgaaaacggttgacatagtttgc

SEQ ID NO: 2024258 - DNA, 25 bp, Homo sapien
gttgacatagtttgctaataacctt

SEQ ID NO: 2024259 - DNA, 25 bp, Homo sapien
tcaaaacatacgaaaacggttgaca

SEQ ID NO: 2024260 - DNA, 25 bp, Homo sapien
tctgacctggaggttcagaggatcc

SEQ ID NO: 2024261 - DNA, 25 bp, Homo sapien
ttctgacctggaggttcagaggatc

SEQ ID NO: 2024262 - DNA, 25 bp, Homo sapien
cagctttctgacctggaggttcaga

SEQ ID NO: 2024263 - DNA, 25 bp, Homo sapien
ctttctgacctggaggttcagagga

SEQ ID NO: 2024264 - DNA, 25 bp, Homo sapien
gcagaatcagagcactgccatctct

SEQ ID NO: 2024265 - DNA, 25 bp, Homo sapien
tccaccagcagaatcagagcactgc

SEQ ID NO: 2024266 - DNA, 25 bp, Homo sapien
tcagtccaccagcagaatcagagca

SEQ ID NO: 2024267 - DNA, 25 bp, Homo sapien
cagcagaatcagagcactgccatct

SEQ ID NO: 2024268 - DNA, 25 bp, Homo sapien
atttgaaacctaggcctgcatggct

SEQ ID NO: 2024269 - DNA, 25 bp, Homo sapien
cagccagcaacagaggataagaatt

SEQ ID NO: 2024270 - DNA, 25 bp, Homo sapien
gattttaataacgttctcactggtg

SEQ ID NO: 2024271 - DNA, 25 bp, Homo sapien
gacataaacgttcaggccgtaactc

SEQ ID NO: 2024272 - DNA, 25 bp, Homo sapien
caaggtgctggtccgtgtgatttct

SEQ ID NO: 2024273 - DNA, 25 bp, Homo sapien
catattgtattagtctgcccaggac

SEQ ID NO: 2024274 - DNA, 25 bp, Homo sapien
tcaggaccgatgtaaccttaatgac

SEQ ID NO: 2024275 - DNA, 25 bp, Homo sapien
taatgacttctgtagaggccccatc

SEQ ID NO: 2024276 - DNA, 25 bp, Homo sapien
tgtcccgtctcagcacactcgagct

SEQ ID NO: 2024277 - DNA, 25 bp, Homo sapien
gttgggatcttcgtgtcccgtctca

SEQ ID NO: 2024278 - DNA, 25 bp, Homo sapien
ggatcttcgtgtcccgtctcagcac

SEQ ID NO: 2024279 - DNA, 25 bp, Homo sapien
agtgtggatggttggttgggatctt

SEQ ID NO: 2024280 - DNA, 25 bp, Homo sapien
taaacaagcacgtggtgagaggagc

SEQ ID NO: 2024281 - DNA, 25 bp, Homo sapien
tcagtctgcgcggataaatgtcgtg

SEQ ID NO: 2024282 - DNA, 25 bp, Homo sapien
gacatcatcgagacggtgtaccgcg

SEQ ID NO: 2024283 - DNA, 25 bp, Homo sapien
caacaagattaactgggccatggag

SEQ ID NO: 2024284 - DNA, 25 bp, Homo sapien
gcattccgggcctttctggacgtcc

SEQ ID NO: 2024285 - DNA, 25 bp, Homo sapien
cacacatgaactgtcttagtaacac

SEQ ID NO: 2024286 - DNA, 25 bp, Homo sapien
aaaggaagaaaacgagccgcagtgc

SEQ ID NO: 2024287 - DNA, 25 bp, Homo sapien
gaactgtcttagtaacacacagaaa

SEQ ID NO: 2024288 - DNA, 25 bp, Homo sapien
gagtcttatgccttagcttggaaca

SEQ ID NO: 2024289 - DNA, 25 bp, Homo sapien
ggcaatagcctgaccttagtaaggg

SEQ ID NO: 2024290 - DNA, 25 bp, Homo sapien
tcagactgtagttctcaccatgcca

SEQ ID NO: 2024291 - DNA, 25 bp, Homo sapien
gagtgactaccaaaatgacggtaag

SEQ ID NO: 2024292 - DNA, 25 bp, Homo sapien
gacaagctatcgatttacattacca

SEQ ID NO: 2024293 - DNA, 25 bp, Homo sapien
caggaacaccttagggcagaaatct

SEQ ID NO: 2024294 - DNA, 25 bp, Homo sapien
tgcattattacataaggtaacatag

SEQ ID NO: 2024295 - DNA, 25 bp, Homo sapien
ttaccatggcgaaattttaacagga

SEQ ID NO: 2024296 - DNA, 25 bp, Homo sapien
tcctttgtatagacagtgggctccc

SEQ ID NO: 2024297 - DNA, 25 bp, Homo sapien
aaggtcccgggacaagctgagtcac

SEQ ID NO: 2024298 - DNA, 25 bp, Homo sapien
ccagaacgggactcatagtggccac

SEQ ID NO: 2024299 - DNA, 25 bp, Homo sapien
cgtgttctcgaagacagcctgcaga

SEQ ID NO: 2024300 - DNA, 25 bp, Homo sapien
caggtcgtcgacgaatgctttagca

SEQ ID NO: 2024301 - DNA, 25 bp, Homo sapien
aggtcgtcgacgaatgctttagcac

SEQ ID NO: 2024302 - DNA, 25 bp, Homo sapien
ggtcgtcgacgaatgctttagcacc

SEQ ID NO: 2024303 - DNA, 25 bp, Homo sapien
agggagacaacgggcgcaggcgcgg

SEQ ID NO: 2024304 - DNA, 25 bp, Homo sapien
ggaggaagactcacgcctggcaggc

SEQ ID NO: 2024305 - DNA, 25 bp, Homo sapien
cgcaggcgcggagcgacaactgacg

SEQ ID NO: 2024306 - DNA, 25 bp, Homo sapien
agcgacaactgacgcgagggtggcg

SEQ ID NO: 2024307 - DNA, 25 bp, Homo sapien
cagcctggaaatagcgcagcatcgc

SEQ ID NO: 2024308 - DNA, 25 bp, Homo sapien
agcatcgcggctacggaacagggcc

SEQ ID NO: 2024309 - DNA, 25 bp, Homo sapien
cagggcccggagacccgcgcgggag

SEQ ID NO: 2024310 - DNA, 25 bp, Homo sapien
agagcagtgaagtccccgctcgcag

SEQ ID NO: 2024311 - DNA, 25 bp, Homo sapien
gcaaatgctgacagtgagagctaga

SEQ ID NO: 2024312 - DNA, 25 bp, Homo sapien
caggaactggcgagctaggccgcat

SEQ ID NO: 2024313 - DNA, 25 bp, Homo sapien
tcttctgaaaaatacgtctggtgac

SEQ ID NO: 2024314 - DNA, 25 bp, Homo sapien
cgcaagaacgcggatgagcggacac

SEQ ID NO: 2024315 - DNA, 25 bp, Homo sapien
gctaatttaagaggttatgatacca

SEQ ID NO: 2024316 - DNA, 25 bp, Homo sapien
agctaatttaagaggttatgatacc

SEQ ID NO: 2024317 - DNA, 25 bp, Homo sapien
taagctaatttaagaggttatgata

SEQ ID NO: 2024318 - DNA, 25 bp, Homo sapien
taatttaagaggttatgataccata

SEQ ID NO: 2024319 - DNA, 25 bp, Homo sapien
gtgagaacccaaggaaggactttca

SEQ ID NO: 2024320 - DNA, 25 bp, Homo sapien
cgagtgagaacccaaggaaggactt

SEQ ID NO: 2024321 - DNA, 25 bp, Homo sapien
gacctccaggtaagagttttgccaa

SEQ ID NO: 2024322 - DNA, 25 bp, Homo sapien
aaagtggctcatggcttatactcac

SEQ ID NO: 2024323 - DNA, 25 bp, Homo sapien
ggcatccagtcgcatccacatagac

SEQ ID NO: 2024324 - DNA, 25 bp, Homo sapien
tcccatcaagattataaagtggctc

SEQ ID NO: 2024325 - DNA, 25 bp, Homo sapien
gaattccaacttggatggtttgtaa

SEQ ID NO: 2024326 - DNA, 25 bp, Homo sapien
gaggaattccaacttggatggtttg

SEQ ID NO: 2024327 - DNA, 25 bp, Homo sapien
attccaacttggatggtttgtaagt

SEQ ID NO: 2024328 - DNA, 25 bp, Homo sapien
ggaattccaacttggatggtttgta

SEQ ID NO: 2024329 - DNA, 25 bp, Homo sapien
gctccacgttaaggtcatacagctc

SEQ ID NO: 2024330 - DNA, 25 bp, Homo sapien
tcagtgccttatagaggaggccgtt

SEQ ID NO: 2024331 - DNA, 25 bp, Homo sapien
ctcaggcgcgcatggtcttccttcc

SEQ ID NO: 2024332 - DNA, 25 bp, Homo sapien
ggagagctccacgttaaggtcatac

SEQ ID NO: 2024333 - DNA, 25 bp, Homo sapien
tcttccagtacgctcggcaggctga

SEQ ID NO: 2024334 - DNA, 25 bp, Homo sapien
agagagcgttgtcttccagtacgct

SEQ ID NO: 2024335 - DNA, 25 bp, Homo sapien
gcaggacagcctccatgtgtgcgtt

SEQ ID NO: 2024336 - DNA, 25 bp, Homo sapien
atgtgcgcggcacttctctgcagga

SEQ ID NO: 2024337 - DNA, 25 bp, Homo sapien
ctatcggtggcacattcctcagggt

SEQ ID NO: 2024338 - DNA, 25 bp, Homo sapien
ggtctgctgggacatcaaaaggtgc

SEQ ID NO: 2024339 - DNA, 25 bp, Homo sapien
tgaacaaacactatcggtggcacat

SEQ ID NO: 2024340 - DNA, 25 bp, Homo sapien
agggtctgctgggacatcaaaaggt

SEQ ID NO: 2024341 - DNA, 25 bp, Homo sapien
gttgtctctttcatcccggggtcca

SEQ ID NO: 2024342 - DNA, 25 bp, Homo sapien
aaagtctgcgactgccagtaactga

SEQ ID NO: 2024343 - DNA, 25 bp, Homo sapien
gggtccaaagtctgcgactgccagt

SEQ ID NO: 2024344 - DNA, 25 bp, Homo sapien
ttcatcccggggtccaaagtctgcg

SEQ ID NO: 2024345 - DNA, 25 bp, Homo sapien
ctgtggtgccgcagggttgtggggc

SEQ ID NO: 2024346 - DNA, 25 bp, Homo sapien
ccgcagggttgtggggcatcagggt

SEQ ID NO: 2024347 - DNA, 25 bp, Homo sapien
gcagggttgtggggcatcagggtcc

SEQ ID NO: 2024348 - DNA, 25 bp, Homo sapien
tgccgcagggttgtggggcatcagg

SEQ ID NO: 2024349 - DNA, 25 bp, Homo sapien
tttgtactccataatctgcttgttg

SEQ ID NO: 2024350 - DNA, 25 bp, Homo sapien
ctcatgatcgatcccacacagactg

SEQ ID NO: 2024351 - DNA, 25 bp, Homo sapien
taatctgcttgttgagcgcctcatg

SEQ ID NO: 2024352 - DNA, 25 bp, Homo sapien
cacagactggagcttgtggtcggct

SEQ ID NO: 2024353 - DNA, 25 bp, Homo sapien
gctcagccacctgcccctgccacac

SEQ ID NO: 2024354 - DNA, 25 bp, Homo sapien
agctcagccacctgcccctgccaca

SEQ ID NO: 2024355 - DNA, 25 bp, Homo sapien
cagctcagccacctgcccctgccac

SEQ ID NO: 2024356 - DNA, 25 bp, Homo sapien
tcagctcagccacctgcccctgcca

SEQ ID NO: 2024357 - DNA, 25 bp, Homo sapien
tcgcctgacaggtaactcttgaggg

SEQ ID NO: 2024358 - DNA, 25 bp, Homo sapien
atcttcaacctcctcgcctgacagg

SEQ ID NO: 2024359 - DNA, 25 bp, Homo sapien
ctccaggcggggcttggccctcttc

SEQ ID NO: 2024360 - DNA, 25 bp, Homo sapien
ctcttgagggagctgtcctgctcca

SEQ ID NO: 2024361 - DNA, 25 bp, Homo sapien
ccaactcctctgtgtccggggcata

SEQ ID NO: 2024362 - DNA, 25 bp, Homo sapien
ctgtgtccggggcatagcattcgta

SEQ ID NO: 2024363 - DNA, 25 bp, Homo sapien
actcctctgtgtccggggcatagca

SEQ ID NO: 2024364 - DNA, 25 bp, Homo sapien
tgtgtccggggcatagcattcgtac

SEQ ID NO: 2024365 - DNA, 25 bp, Homo sapien
ctccgcagctgtggccatcctctgt

SEQ ID NO: 2024366 - DNA, 25 bp, Homo sapien
tccgcagctgtggccatcctctgtt

SEQ ID NO: 2024367 - DNA, 25 bp, Homo sapien
tgcctcaatgaagccacatgctgcg

SEQ ID NO: 2024368 - DNA, 25 bp, Homo sapien
tgtttagatacacggaaaagctaga

SEQ ID NO: 2024369 - DNA, 25 bp, Homo sapien
tgctgcgttgcgtgccaatgctttt

SEQ ID NO: 2024370 - DNA, 25 bp, Homo sapien
caatgcttttccctgcaaatgtggg

SEQ ID NO: 2024371 - DNA, 25 bp, Homo sapien
tacgggtctgctatcccttggacac

SEQ ID NO: 2024372 - DNA, 25 bp, Homo sapien
gaatctttgcgtcggaggtgacaca

SEQ ID NO: 2024373 - DNA, 25 bp, Homo sapien
gactcgtagtgcagaacctgacaga

SEQ ID NO: 2024374 - DNA, 25 bp, Homo sapien
agattctactcctgcaccgtgggca

SEQ ID NO: 2024375 - DNA, 25 bp, Homo sapien
tctcctactcataccatcatgtggg

SEQ ID NO: 2024376 - DNA, 25 bp, Homo sapien
agggagtcagcatcttgcagcagca

SEQ ID NO: 2024377 - DNA, 25 bp, Homo sapien
taactggcctgaggtagtggcctcc

SEQ ID NO: 2024378 - DNA, 25 bp, Homo sapien
tgccatttgatgacttatacacagc

SEQ ID NO: 2024379 - DNA, 25 bp, Homo sapien
tttctcatggagtcatcatggtcaa

SEQ ID NO: 2024380 - DNA, 25 bp, Homo sapien
tggtcaagtaccagagccttgtaac

SEQ ID NO: 2024381 - DNA, 25 bp, Homo sapien
cagagccttgtaacctgaagttatc

SEQ ID NO: 2024382 - DNA, 25 bp, Homo sapien
gcaaagctggcgttctgctgttttc

SEQ ID NO: 2024383 - DNA, 25 bp, Homo sapien
catctggagagctgcggaaaatccc

SEQ ID NO: 2024384 - DNA, 25 bp, Homo sapien
tgcaaaggacacaccattgagggcg

SEQ ID NO: 2024385 - DNA, 25 bp, Homo sapien
tgcgagactgctatggatgccaaca

SEQ ID NO: 2024386 - DNA, 25 bp, Homo sapien
taccaaggaacagcgaaccagaagg

SEQ ID NO: 2024387 - DNA, 25 bp, Homo sapien
tattcctaagagagggtctcaggcc

SEQ ID NO: 2024388 - DNA, 25 bp, Homo sapien
gcatttatgatctttgaggccacag

SEQ ID NO: 2024389 - DNA, 25 bp, Homo sapien
tctctccttcaaggcagctggcaaa

SEQ ID NO: 2024390 - DNA, 25 bp, Homo sapien
tatttcagtatcttgccagcaccca

SEQ ID NO: 2024391 - DNA, 25 bp, Homo sapien
cagaggttttggtgtcttgtgtctc

SEQ ID NO: 2024392 - DNA, 25 bp, Homo sapien
cttcagctcatcattgtggacatca

SEQ ID NO: 2024393 - DNA, 25 bp, Homo sapien
tataagcttccgttttagcactgct

SEQ ID NO: 2024394 - DNA, 25 bp, Homo sapien
acatcaccaggaacatacaacccaa

SEQ ID NO: 2024395 - DNA, 25 bp, Homo sapien
aggattggtaccgattcctctttgc

SEQ ID NO: 2024396 - DNA, 25 bp, Homo sapien
tgttgttttggctgtgtgcctagct

SEQ ID NO: 2024397 - DNA, 25 bp, Homo sapien
ggcatgaatctgtctggccctgggc

SEQ ID NO: 2024398 - DNA, 25 bp, Homo sapien
tctttgcatgtccagtagaacttgg

SEQ ID NO: 2024399 - DNA, 25 bp, Homo sapien
tttaattgtgtatgtggtgaatcac

SEQ ID NO: 2024400 - DNA, 25 bp, Homo sapien
tttttaattgtgtatgtggtgaatc

SEQ ID NO: 2024401 - DNA, 25 bp, Homo sapien
ttttaattgtgtatgtggtgaatca

SEQ ID NO: 2024402 - DNA, 25 bp, Homo sapien
tgcatcatttcagatgatcatatgg

SEQ ID NO: 2024403 - DNA, 25 bp, Homo sapien
ccaaaactatgttcaataagtggtc

SEQ ID NO: 2024404 - DNA, 25 bp, Homo sapien
tgcctggatgctctaactagaactt

SEQ ID NO: 2024405 - DNA, 25 bp, Homo sapien
taagtggtcaaaatgggcatccctg

SEQ ID NO: 2024406 - DNA, 25 bp, Homo sapien
ttataaacgttgctacaggtccctg

SEQ ID NO: 2024407 - DNA, 25 bp, Homo sapien
tcttttttcacaatggcggcccgtg

SEQ ID NO: 2024408 - DNA, 25 bp, Homo sapien
caggctacttcagggcagatgtcca

SEQ ID NO: 2024409 - DNA, 25 bp, Homo sapien
tacagacttgatgccaaggacccag

SEQ ID NO: 2024410 - DNA, 25 bp, Homo sapien
tctggagcccttgctagttaggacc

SEQ ID NO: 2024411 - DNA, 25 bp, Homo sapien
taaatctgacttggccaagggcatg

SEQ ID NO: 2024412 - DNA, 25 bp, Homo sapien
tcagttggtgcaaacaggagcggct

SEQ ID NO: 2024413 - DNA, 25 bp, Homo sapien
tgcagaagggcatgtcacaacaacg

SEQ ID NO: 2024414 - DNA, 25 bp, Homo sapien
tcccattgttattcacattcttgag

SEQ ID NO: 2024415 - DNA, 25 bp, Homo sapien
aaaatataatgagtgcaaatcccat

SEQ ID NO: 2024416 - DNA, 25 bp, Homo sapien
actggtgaacttcaatgatcaggtc

SEQ ID NO: 2024417 - DNA, 25 bp, Homo sapien
tgaaaattatgcgaagccattctaa

SEQ ID NO: 2024418 - DNA, 25 bp, Homo sapien
cagatattctgagcacaactacaaa

SEQ ID NO: 2024419 - DNA, 25 bp, Homo sapien
agaagtccatgtcttgccaactaat

SEQ ID NO: 2024420 - DNA, 25 bp, Homo sapien
caatatctaacgtgaaaaatctact

SEQ ID NO: 2024421 - DNA, 25 bp, Homo sapien
tgcgtcagctaatattccacagata

SEQ ID NO: 2024422 - DNA, 25 bp, Homo sapien
tccagggggtacaggaagcaaagga

SEQ ID NO: 2024423 - DNA, 25 bp, Homo sapien
ccaccaggtacctccagagccgtgt

SEQ ID NO: 2024424 - DNA, 25 bp, Homo sapien
caggcaggtctggcgaaatccaggg

SEQ ID NO: 2024425 - DNA, 25 bp, Homo sapien
acttcccgacatcggctgccaggca

SEQ ID NO: 2024426 - DNA, 25 bp, Homo sapien
tcggcggccggtaggtgatggtgtc

SEQ ID NO: 2024427 - DNA, 25 bp, Homo sapien
ggtcggcggccggtaggtgatggtg

SEQ ID NO: 2024428 - DNA, 25 bp, Homo sapien
gtcggcggccggtaggtgatggtgt

SEQ ID NO: 2024429 - DNA, 25 bp, Homo sapien
cgggagctcgcccttggctgaattc

SEQ ID NO: 2024430 - DNA, 25 bp, Homo sapien
tggcatccgggagctcgcccttggc

SEQ ID NO: 2024431 - DNA, 25 bp, Homo sapien
gagctcgcccttggctgaattcttc

SEQ ID NO: 2024432 - DNA, 25 bp, Homo sapien
catccgggagctcgcccttggctga

SEQ ID NO: 2024433 - DNA, 25 bp, Homo sapien
tcgtctgccacaccgcgtggaaggg

SEQ ID NO: 2024434 - DNA, 25 bp, Homo sapien
caacagccgagggtgccgtgtacgt

SEQ ID NO: 2024435 - DNA, 25 bp, Homo sapien
tgcagccacggtggtcgtccatctc

SEQ ID NO: 2024436 - DNA, 25 bp, Homo sapien
ccgtgtacgtgatgtgagctgctct

SEQ ID NO: 2024437 - DNA, 25 bp, Homo sapien
gccagggcccttagatgacctttca

SEQ ID NO: 2024438 - DNA, 25 bp, Homo sapien
tcgaaggtcaatggtctgcacagtt

SEQ ID NO: 2024439 - DNA, 25 bp, Homo sapien
gaatttctcgaaggtcaatggtctg

SEQ ID NO: 2024440 - DNA, 25 bp, Homo sapien
gggcccttagatgacctttcagctc

SEQ ID NO: 2024441 - DNA, 25 bp, Homo sapien
tcaagatatggaaccgaagccacag

SEQ ID NO: 2024442 - DNA, 25 bp, Homo sapien
ccgccctgcggtgatcaagatatgg

SEQ ID NO: 2024443 - DNA, 25 bp, Homo sapien
gaagccacagttggatcacgagaca

SEQ ID NO: 2024444 - DNA, 25 bp, Homo sapien
tctaggtctgagtagcggagtgccc

SEQ ID NO: 2024445 - DNA, 25 bp, Homo sapien
ctccgctgggtaggtggctcccgca

SEQ ID NO: 2024446 - DNA, 25 bp, Homo sapien
ggcacggccacagctgcatttgtgt

SEQ ID NO: 2024447 - DNA, 25 bp, Homo sapien
aactcagactctgaggctccgctgg

SEQ ID NO: 2024448 - DNA, 25 bp, Homo sapien
aggaacgcgttcaacacacacaggc

SEQ ID NO: 2024449 - DNA, 25 bp, Homo sapien
ccaagttgcccgctgtgattaaaat

SEQ ID NO: 2024450 - DNA, 25 bp, Homo sapien
ggttttgtacaagttctcagccatc

SEQ ID NO: 2024451 - DNA, 25 bp, Homo sapien
gaagtgctggttccaagcaccaaaa

SEQ ID NO: 2024452 - DNA, 25 bp, Homo sapien
taaaagaccacataagactgctgct

SEQ ID NO: 2024453 - DNA, 25 bp, Homo sapien
tcagcaaccctgatggtggacggtg

SEQ ID NO: 2024454 - DNA, 25 bp, Homo sapien
gctgcaattaccaactgtcacaggt

SEQ ID NO: 2024455 - DNA, 25 bp, Homo sapien
tccaacatgctcaggttaaccacag

SEQ ID NO: 2024456 - DNA, 25 bp, Homo sapien
tgagactcctgaacactgctcctgt

SEQ ID NO: 2024457 - DNA, 25 bp, Homo sapien
gaaacatcgccaattcctgggaaag

SEQ ID NO: 2024458 - DNA, 25 bp, Homo sapien
gacagagaactaagggcagtcagga

SEQ ID NO: 2024459 - DNA, 25 bp, Homo sapien
cacaaggaagacaagacactggact

SEQ ID NO: 2024460 - DNA, 25 bp, Homo sapien
tcttagctgtgctcaagatgctgaa

SEQ ID NO: 2024461 - DNA, 25 bp, Homo sapien
gtttccctggtgatccacagccaag

SEQ ID NO: 2024462 - DNA, 25 bp, Homo sapien
cagaggctgctcactcgaagctgta

SEQ ID NO: 2024463 - DNA, 25 bp, Homo sapien
agaaattcatttggaggcctctgca

SEQ ID NO: 2024464 - DNA, 25 bp, Homo sapien
catagctgagcaaagtggtgggact

SEQ ID NO: 2024465 - DNA, 25 bp, Homo sapien
tctccatattcacgaactgtttcct

SEQ ID NO: 2024466 - DNA, 25 bp, Homo sapien
tcatctccatattcacgaactgttt

SEQ ID NO: 2024467 - DNA, 25 bp, Homo sapien
ccagacgggctctttcatctccata

SEQ ID NO: 2024468 - DNA, 25 bp, Homo sapien
acacccactactccccagacgggct

SEQ ID NO: 2024469 - DNA, 25 bp, Homo sapien
caggcagttccttcttggcgaagcc

SEQ ID NO: 2024470 - DNA, 25 bp, Homo sapien
cctaactcagccgcgccctcagtgg

SEQ ID NO: 2024471 - DNA, 25 bp, Homo sapien
ggcagttccttcttggcgaagccgt

SEQ ID NO: 2024472 - DNA, 25 bp, Homo sapien
actcagccgcgccctcagtggctgt

SEQ ID NO: 2024473 - DNA, 25 bp, Homo sapien
cctcatttgcatgtaggcgcagcca

SEQ ID NO: 2024474 - DNA, 25 bp, Homo sapien
gggcccctgcctaaagctggactgg

SEQ ID NO: 2024475 - DNA, 25 bp, Homo sapien
cctcaggaagtgacgttggccctca

SEQ ID NO: 2024476 - DNA, 25 bp, Homo sapien
aatggcgctcgattggcctcaggaa

SEQ ID NO: 2024477 - DNA, 25 bp, Homo sapien
ttaaagtcaacatctgcatatcaat

SEQ ID NO: 2024478 - DNA, 25 bp, Homo sapien
ggccccgttatcagctgttcttcaa

SEQ ID NO: 2024479 - DNA, 25 bp, Homo sapien
caaccagcaacggcagatgaaaagt

SEQ ID NO: 2024480 - DNA, 25 bp, Homo sapien
tattcgcatcaaaagctcaacgatg

SEQ ID NO: 2024481 - DNA, 25 bp, Homo sapien
gctgtcaagcccaatatccacaaga

SEQ ID NO: 2024482 - DNA, 25 bp, Homo sapien
caccttttttcgcacctttctgatg

SEQ ID NO: 2024483 - DNA, 25 bp, Homo sapien
gttgtcaagattttccacaggaatt

SEQ ID NO: 2024484 - DNA, 25 bp, Homo sapien
agtaactccttgcagctgtcaagcc

SEQ ID NO: 2024485 - DNA, 25 bp, Homo sapien
tcccttgtgaagtaccgtatctctg

SEQ ID NO: 2024486 - DNA, 25 bp, Homo sapien
ccttgtgaagtaccgtatctctgca

SEQ ID NO: 2024487 - DNA, 25 bp, Homo sapien
tttcccttgtgaagtaccgtatctc

SEQ ID NO: 2024488 - DNA, 25 bp, Homo sapien
gtgaagtaccgtatctctgcatcag

SEQ ID NO: 2024489 - DNA, 25 bp, Homo sapien
ggaacaactgtatgtgaacaaacaa

SEQ ID NO: 2024490 - DNA, 25 bp, Homo sapien
gttgtgggaacaccagtttatagcc

SEQ ID NO: 2024491 - DNA, 25 bp, Homo sapien
gagagacagattattaggaacaact

SEQ ID NO: 2024492 - DNA, 25 bp, Homo sapien
cactggtgaatcctaaaaaatactt

SEQ ID NO: 2024493 - DNA, 25 bp, Homo sapien
caccgagatgggagatttaaaacca

SEQ ID NO: 2024494 - DNA, 25 bp, Homo sapien
agcagccttggacgatatattaaac

SEQ ID NO: 2024495 - DNA, 25 bp, Homo sapien
ttaaagcatactactctaaggttct

SEQ ID NO: 2024496 - DNA, 25 bp, Homo sapien
aatcctgccacaccgtgcacaaaag

SEQ ID NO: 2024497 - DNA, 25 bp, Homo sapien
cagaaatgcatgagccgagacctcc

SEQ ID NO: 2024498 - DNA, 25 bp, Homo sapien
cactgcgtattggtaactctcaggg

SEQ ID NO: 2024499 - DNA, 25 bp, Homo sapien
tgtgagaaacacactgcgtattggt

SEQ ID NO: 2024500 - DNA, 25 bp, Homo sapien
tgaaagaggcagtagtgtgagaaac

SEQ ID NO: 2024501 - DNA, 25 bp, Homo sapien
gaaacatcaccccatgatgtgttat

SEQ ID NO: 2024502 - DNA, 25 bp, Homo sapien
cagagagaaacatcaccccatgatg

SEQ ID NO: 2024503 - DNA, 25 bp, Homo sapien
caccccatgatgtgttatgaaagta

SEQ ID NO: 2024504 - DNA, 25 bp, Homo sapien
catcaccccatgatgtgttatgaaa

SEQ ID NO: 2024505 - DNA, 25 bp, Homo sapien
catggtaacgatgtaaatgattctt

SEQ ID NO: 2024506 - DNA, 25 bp, Homo sapien
gccacaacagtatggctttgttcga

SEQ ID NO: 2024507 - DNA, 25 bp, Homo sapien
tagagtatttacagaggccacaaca

SEQ ID NO: 2024508 - DNA, 25 bp, Homo sapien
gaatgaagtaagcacctttgtagag

SEQ ID NO: 2024509 - DNA, 25 bp, Homo sapien
ggcaacacaggaggattcacagact

SEQ ID NO: 2024510 - DNA, 25 bp, Homo sapien
tttacaggcacaacagctgaggagg

SEQ ID NO: 2024511 - DNA, 25 bp, Homo sapien
cattaacgcatcctggctgctggca

SEQ ID NO: 2024512 - DNA, 25 bp, Homo sapien
aacaggtctgtttatgggtcccaca

SEQ ID NO: 2024513 - DNA, 25 bp, Homo sapien
ggccagcgtgtaggttggaatccca

SEQ ID NO: 2024514 - DNA, 25 bp, Homo sapien
cagtctggttgagttgcaagacccc

SEQ ID NO: 2024515 - DNA, 25 bp, Homo sapien
ttccctgtagggatgagctgtctga

SEQ ID NO: 2024516 - DNA, 25 bp, Homo sapien
gtgttctgcgaagcaccaggtctca

SEQ ID NO: 2024517 - DNA, 25 bp, Homo sapien
acgctctgagcagcattcaccagca

SEQ ID NO: 2024518 - DNA, 25 bp, Homo sapien
catggaaccggccattggtgcagct

SEQ ID NO: 2024519 - DNA, 25 bp, Homo sapien
gcagctgcacctgacggcaggagct

SEQ ID NO: 2024520 - DNA, 25 bp, Homo sapien
cggagcgacagtcgcaaggcctcca

SEQ ID NO: 2024521 - DNA, 25 bp, Homo sapien
ttctgcagcgcaccaaatggacggc

SEQ ID NO: 2024522 - DNA, 25 bp, Homo sapien
tcaaatgcagctcataggcctcagt

SEQ ID NO: 2024523 - DNA, 25 bp, Homo sapien
gaaagagctcgttgcagacagggca

SEQ ID NO: 2024524 - DNA, 25 bp, Homo sapien
gacttggagtgtatcccagccagga

SEQ ID NO: 2024525 - DNA, 25 bp, Homo sapien
tgttgtgaataaaacccggctgggc

SEQ ID NO: 2024526 - DNA, 25 bp, Homo sapien
gaagagcctcgtccttgacaatagg

SEQ ID NO: 2024527 - DNA, 25 bp, Homo sapien
ttttaaaaggcacaacactcgtcac

SEQ ID NO: 2024528 - DNA, 25 bp, Homo sapien
gacaataggtccctctgttctgctt

SEQ ID NO: 2024529 - DNA, 25 bp, Homo sapien
tcttcataagaacggccttcatatt

SEQ ID NO: 2024530 - DNA, 25 bp, Homo sapien
tactaggatatggtttcttatggaa

SEQ ID NO: 2024531 - DNA, 25 bp, Homo sapien
aatgaagccacatcaattttccaca

SEQ ID NO: 2024532 - DNA, 25 bp, Homo sapien
tccacacccaaaagagtgaggacaa

SEQ ID NO: 2024533 - DNA, 25 bp, Homo sapien
ttaagttcagacatatcaaagccta

SEQ ID NO: 2024534 - DNA, 25 bp, Homo sapien
gttcagacatatcaaagcctaaaag

SEQ ID NO: 2024535 - DNA, 25 bp, Homo sapien
catatcaaagcctaaaagtacagaa

SEQ ID NO: 2024536 - DNA, 25 bp, Homo sapien
tcaaagcctaaaagtacagaaggct

SEQ ID NO: 2024537 - DNA, 25 bp, Homo sapien
ttcatattcaaagttcaatctatgt

SEQ ID NO: 2024538 - DNA, 25 bp, Homo sapien
attcaaagttcaatctatgtttcac

SEQ ID NO: 2024539 - DNA, 25 bp, Homo sapien
catattcaaagttcaatctatgttt

SEQ ID NO: 2024540 - DNA, 25 bp, Homo sapien
tattcaaagttcaatctatgtttca

SEQ ID NO: 2024541 - DNA, 25 bp, Homo sapien
catacgatactgacactagtgggaa

SEQ ID NO: 2024542 - DNA, 25 bp, Homo sapien
ggagatcgatgcttccactcgcagt

SEQ ID NO: 2024543 - DNA, 25 bp, Homo sapien
taactactggcttcctggtaacagg

SEQ ID NO: 2024544 - DNA, 25 bp, Homo sapien
tgaccactgaggttgattcaccaac

SEQ ID NO: 2024545 - DNA, 25 bp, Homo sapien
gaaagacttactgtaccaaccatgg

SEQ ID NO: 2024546 - DNA, 25 bp, Homo sapien
gcttccagcctaaaccagctagaga

SEQ ID NO: 2024547 - DNA, 25 bp, Homo sapien
tgtaaacttcgccatgtcccctgaa

SEQ ID NO: 2024548 - DNA, 25 bp, Homo sapien
taacatccacaggacagtgacgaca

SEQ ID NO: 2024549 - DNA, 25 bp, Homo sapien
tcagaggctgtcacatcctccaaat

SEQ ID NO: 2024550 - DNA, 25 bp, Homo sapien
gaatttacaacagagtacaccaaca

SEQ ID NO: 2024551 - DNA, 25 bp, Homo sapien
gaacattatagcaattacatgcaag

SEQ ID NO: 2024552 - DNA, 25 bp, Homo sapien
tctgctgtgtaccaccagaaatatg

SEQ ID NO: 2024553 - DNA, 25 bp, Homo sapien
ctagtcccgctgaagcacaggagca

SEQ ID NO: 2024554 - DNA, 25 bp, Homo sapien
agacgcggcctgatgcagtccagta

SEQ ID NO: 2024555 - DNA, 25 bp, Homo sapien
ggtgagcccctaaactggagctcag

SEQ ID NO: 2024556 - DNA, 25 bp, Homo sapien
tacaggactcggaacgatgcaaggc

SEQ ID NO: 2024557 - DNA, 25 bp, Homo sapien
cagatgctaggaacggagtccggat

SEQ ID NO: 2024558 - DNA, 25 bp, Homo sapien
ctaggagagttgttatcacacggtt

SEQ ID NO: 2024559 - DNA, 25 bp, Homo sapien
ttttatagcatgttcgtctccgtcc

SEQ ID NO: 2024560 - DNA, 25 bp, Homo sapien
tccgtcctgaggtagcagatgctag

SEQ ID NO: 2024561 - DNA, 25 bp, Homo sapien
tgtacttgtgaacgcaggcatggct

SEQ ID NO: 2024562 - DNA, 25 bp, Homo sapien
tggcgtcctcttacccgaaattcag

SEQ ID NO: 2024563 - DNA, 25 bp, Homo sapien
tttccgacctctttcagcagcagtt

SEQ ID NO: 2024564 - DNA, 25 bp, Homo sapien
gcagctttcaaactggatctcgtaa

SEQ ID NO: 2024565 - DNA, 25 bp, Homo sapien
ttaaagaacgagactgacactgcgc

SEQ ID NO: 2024566 - DNA, 25 bp, Homo sapien
agacgagacctgtgctgatgggacc

SEQ ID NO: 2024567 - DNA, 25 bp, Homo sapien
caagcctttccaggtaagacgagac

SEQ ID NO: 2024568 - DNA, 25 bp, Homo sapien
cctggagacaaacggagctggtgca

SEQ ID NO: 2024569 - DNA, 25 bp, Homo sapien
atttaatatccagaagaaaagcaca

SEQ ID NO: 2024570 - DNA, 25 bp, Homo sapien
tgaaatttaatatccagaagaaaag

SEQ ID NO: 2024571 - DNA, 25 bp, Homo sapien
aatttaatatccagaagaaaagcac

SEQ ID NO: 2024572 - DNA, 25 bp, Homo sapien
gtggatatgaaatttaatatccaga

SEQ ID NO: 2024573 - DNA, 25 bp, Homo sapien
tggtgcagggcagcatcacctcagt

SEQ ID NO: 2024574 - DNA, 25 bp, Homo sapien
ggcagcatcacctcagtgaaccact

SEQ ID NO: 2024575 - DNA, 25 bp, Homo sapien
agggcagcatcacctcagtgaacca

SEQ ID NO: 2024576 - DNA, 25 bp, Homo sapien
gcagggcagcatcacctcagtgaac

SEQ ID NO: 2024577 - DNA, 25 bp, Homo sapien
ctcttcgctctgcctcagtttaggg

SEQ ID NO: 2024578 - DNA, 25 bp, Homo sapien
ctctgccagttggagccctcttcgc

SEQ ID NO: 2024579 - DNA, 25 bp, Homo sapien
gccagttggagccctcttcgctctg

SEQ ID NO: 2024580 - DNA, 25 bp, Homo sapien
tctgccagttggagccctcttcgct

SEQ ID NO: 2024581 - DNA, 25 bp, Homo sapien
gaaccctctctcgaagtctttttga

SEQ ID NO: 2024582 - DNA, 25 bp, Homo sapien
tgaatatttatacagcacacagtcc

SEQ ID NO: 2024583 - DNA, 25 bp, Homo sapien
catcagatagacagatgacagtcca

SEQ ID NO: 2024584 - DNA, 25 bp, Homo sapien
ccttcctaaatgtgccctggttggc

SEQ ID NO: 2024585 - DNA, 25 bp, Homo sapien
ctttcacggaatccgcacatactct

SEQ ID NO: 2024586 - DNA, 25 bp, Homo sapien
tgtaccatctttcacggaatccgca

SEQ ID NO: 2024587 - DNA, 25 bp, Homo sapien
tcatgtaccatctttcacggaatcc

SEQ ID NO: 2024588 - DNA, 25 bp, Homo sapien
catctttcacggaatccgcacatac

SEQ ID NO: 2024589 - DNA, 25 bp, Homo sapien
atgtcgttcagtgccccagcagtca

SEQ ID NO: 2024590 - DNA, 25 bp, Homo sapien
cccggacttgctctctgatgaaggg

SEQ ID NO: 2024591 - DNA, 25 bp, Homo sapien
taactgggtcggctatcaagaagga

SEQ ID NO: 2024592 - DNA, 25 bp, Homo sapien
taggaattactgcttagaacagctg

SEQ ID NO: 2024593 - DNA, 25 bp, Homo sapien
tgcaatggattgctggccctttgtt

SEQ ID NO: 2024594 - DNA, 25 bp, Homo sapien
tagcttttgctgaggagttgtgaat

SEQ ID NO: 2024595 - DNA, 25 bp, Homo sapien
cttttgctgaggagttgtgaattcc

SEQ ID NO: 2024596 - DNA, 25 bp, Homo sapien
gcacctgtgtttgatgttatttgta

SEQ ID NO: 2024597 - DNA, 25 bp, Homo sapien
gacttcgtgaacatggaactgctaa

SEQ ID NO: 2024598 - DNA, 25 bp, Homo sapien
tgaacatggaactgctaagagggaa

SEQ ID NO: 2024599 - DNA, 25 bp, Homo sapien
cagaactgtcctgacttcgtgaaca

SEQ ID NO: 2024600 - DNA, 25 bp, Homo sapien
gaactgctaagagggaaaactgcat

SEQ ID NO: 2024601 - DNA, 25 bp, Homo sapien
tatttttctaggttgtcggagctgc

SEQ ID NO: 2024602 - DNA, 25 bp, Homo sapien
agaatggtcactggcagttctcact

SEQ ID NO: 2024603 - DNA, 25 bp, Homo sapien
gaccaaatctttcatacagatacag

SEQ ID NO: 2024604 - DNA, 25 bp, Homo sapien
taactataagaagtcacgtggaact

SEQ ID NO: 2024605 - DNA, 25 bp, Homo sapien
tgcagtcatttgcacgtgagttctc

SEQ ID NO: 2024606 - DNA, 25 bp, Homo sapien
cagtcatttgcacgtgagttctcat

SEQ ID NO: 2024607 - DNA, 25 bp, Homo sapien
gtcatttgcacgtgagttctcatct

SEQ ID NO: 2024608 - DNA, 25 bp, Homo sapien
tttgcacgtgagttctcatctttgt

SEQ ID NO: 2024609 - DNA, 25 bp, Homo sapien
tctaagatgacccttttcctgtggg

SEQ ID NO: 2024610 - DNA, 25 bp, Homo sapien
ttcctgtgggttgactgactctgag

SEQ ID NO: 2024611 - DNA, 25 bp, Homo sapien
taagcatcgcacatgtccagcaatg

SEQ ID NO: 2024612 - DNA, 25 bp, Homo sapien
gactctgagggcgatttcggaaatg

SEQ ID NO: 2024613 - DNA, 25 bp, Homo sapien
tgtgacccacataggtggcccattc

SEQ ID NO: 2024614 - DNA, 25 bp, Homo sapien
taggtggcccattcagcctcaaggg

SEQ ID NO: 2024615 - DNA, 25 bp, Homo sapien
gggctatttttgtgacccacatagg

SEQ ID NO: 2024616 - DNA, 25 bp, Homo sapien
cagcctcaaggggaaatccagggta

SEQ ID NO: 2024617 - DNA, 25 bp, Homo sapien
gtcatcgagggcacactggagcctg

SEQ ID NO: 2024618 - DNA, 25 bp, Homo sapien
atcctagctccagttccccggtaag

SEQ ID NO: 2024619 - DNA, 25 bp, Homo sapien
ggtcacgctctagactcccgagagg

SEQ ID NO: 2024620 - DNA, 25 bp, Homo sapien
taaaatgaacgcctgtagagacact

SEQ ID NO: 2024621 - DNA, 25 bp, Homo sapien
tcagctgctaaccaaaaacgcaggg

SEQ ID NO: 2024622 - DNA, 25 bp, Homo sapien
tagcactgactgtgcgggacctcac

SEQ ID NO: 2024623 - DNA, 25 bp, Homo sapien
aaagcttaagaagtccccagtccag

SEQ ID NO: 2024624 - DNA, 25 bp, Homo sapien
acgagcctccgtcttacagttgaga

SEQ ID NO: 2024625 - DNA, 25 bp, Homo sapien
gatgggttccgtcactgagcagcat

SEQ ID NO: 2024626 - DNA, 25 bp, Homo sapien
tctccaaagcaagtcataatgggcc

SEQ ID NO: 2024627 - DNA, 25 bp, Homo sapien
tgataactgatgacggatgggttcc

SEQ ID NO: 2024628 - DNA, 25 bp, Homo sapien
cctgaatgttgcctccatggtggaa

SEQ ID NO: 2024629 - DNA, 25 bp, Homo sapien
tctatgaggtgcagagaggccgggt

SEQ ID NO: 2024630 - DNA, 25 bp, Homo sapien
ttgcagtgtctatgaggtgcagaga

SEQ ID NO: 2024631 - DNA, 25 bp, Homo sapien
gaagtcactgagtaaggatttgcag

SEQ ID NO: 2024632 - DNA, 25 bp, Homo sapien
gctggccaggaaccaagatcccatt

SEQ ID NO: 2024633 - DNA, 25 bp, Homo sapien
gtttgttggatgcttatcagtggtt

SEQ ID NO: 2024634 - DNA, 25 bp, Homo sapien
tgttagaccgttattagtacgtctg

SEQ ID NO: 2024635 - DNA, 25 bp, Homo sapien
ccgttattagtacgtctgctttttg

SEQ ID NO: 2024636 - DNA, 25 bp, Homo sapien
cttatcagtggttccgctttttcct

SEQ ID NO: 2024637 - DNA, 25 bp, Homo sapien
gacatatccattgcgggaagtcagg

SEQ ID NO: 2024638 - DNA, 25 bp, Homo sapien
agacatatccattgcgggaagtcag

SEQ ID NO: 2024639 - DNA, 25 bp, Homo sapien
aagacatatccattgcgggaagtca

SEQ ID NO: 2024640 - DNA, 25 bp, Homo sapien
aaagacatatccattgcgggaagtc

SEQ ID NO: 2024641 - DNA, 25 bp, Homo sapien
tccactgagacaaggcgtcctgatg

SEQ ID NO: 2024642 - DNA, 25 bp, Homo sapien
ggaggctgtaactgatcgctttcaa

SEQ ID NO: 2024643 - DNA, 25 bp, Homo sapien
catgaccgagggtcacaccagcagt

SEQ ID NO: 2024644 - DNA, 25 bp, Homo sapien
tgaacttgacgcctttaaattctaa

SEQ ID NO: 2024645 - DNA, 25 bp, Homo sapien
tgtctgacgctctctacagaggaca

SEQ ID NO: 2024646 - DNA, 25 bp, Homo sapien
cctgcttgtctgacgctctctacag

SEQ ID NO: 2024647 - DNA, 25 bp, Homo sapien
gctgctgtaaaaaagctgccacgga

SEQ ID NO: 2024648 - DNA, 25 bp, Homo sapien
gaggacatttaccagaaacttgaaa

SEQ ID NO: 2024649 - DNA, 25 bp, Homo sapien
gccctgaaaagtggtaattattcca

SEQ ID NO: 2024650 - DNA, 25 bp, Homo sapien
ttgattggccattgtcttgccctga

SEQ ID NO: 2024651 - DNA, 25 bp, Homo sapien
tattccatacggtgacacacggagc

SEQ ID NO: 2024652 - DNA, 25 bp, Homo sapien
acacggagccctgcacctttagatg

SEQ ID NO: 2024653 - DNA, 25 bp, Homo sapien
ctgcctttgtacagggtggtctgtg

SEQ ID NO: 2024654 - DNA, 25 bp, Homo sapien
ctcagaaatcccctgggcgttcatc

SEQ ID NO: 2024655 - DNA, 25 bp, Homo sapien
tttgtacagggtggtctgtgtgcct

SEQ ID NO: 2024656 - DNA, 25 bp, Homo sapien
ttaggccatgttcccatggtcgtcc

SEQ ID NO: 2024657 - DNA, 25 bp, Homo sapien
gagggttccccgcaattctgagtcc

SEQ ID NO: 2024658 - DNA, 25 bp, Homo sapien
tcaaatgcaatgttgagcgtgggcc

SEQ ID NO: 2024659 - DNA, 25 bp, Homo sapien
tgagcgctcgcaggaatcaaatgca

SEQ ID NO: 2024660 - DNA, 25 bp, Homo sapien
cagcttgttggacgaggcacagcaa

SEQ ID NO: 2024661 - DNA, 25 bp, Homo sapien
tgttctgtaaagacacttgtgccat

SEQ ID NO: 2024662 - DNA, 25 bp, Homo sapien
tcccatcctggcaggaaccatctgg

SEQ ID NO: 2024663 - DNA, 25 bp, Homo sapien
ggtggcactccttcaaactctgtga

SEQ ID NO: 2024664 - DNA, 25 bp, Homo sapien
tgagagtcggcgttgctagggagac

SEQ ID NO: 2024665 - DNA, 25 bp, Homo sapien
gattcgtggacgtctgttttctgcc

SEQ ID NO: 2024666 - DNA, 25 bp, Homo sapien
catctgcccagattcgtggacgtct

SEQ ID NO: 2024667 - DNA, 25 bp, Homo sapien
tcctacacatgggaggaagtgatgg

SEQ ID NO: 2024668 - DNA, 25 bp, Homo sapien
gggaccttgccatgctgtcggcatg

SEQ ID NO: 2024669 - DNA, 25 bp, Homo sapien
tcgggggcagtgagttcccactggc

SEQ ID NO: 2024670 - DNA, 25 bp, Homo sapien
cagctgatgcgtcgggaggtgtcgg

SEQ ID NO: 2024671 - DNA, 25 bp, Homo sapien
agtgagttcccactggcgctttgtg

SEQ ID NO: 2024672 - DNA, 25 bp, Homo sapien
gggcagtgagttcccactggcgctt

SEQ ID NO: 2024673 - DNA, 25 bp, Homo sapien
tggcaagggagcgggcgtgggcggg

SEQ ID NO: 2024674 - DNA, 25 bp, Homo sapien
cctggcaagggagcgggcgtgggcg

SEQ ID NO: 2024675 - DNA, 25 bp, Homo sapien
ggagcgggcgtgggcgggagggcat

SEQ ID NO: 2024676 - DNA, 25 bp, Homo sapien
caagggagcgggcgtgggcgggagg

SEQ ID NO: 2024677 - DNA, 25 bp, Homo sapien
tggcatgggcatccgccactgtgct

SEQ ID NO: 2024678 - DNA, 25 bp, Homo sapien
actccgtgtggtgatggtgaccgcc

SEQ ID NO: 2024679 - DNA, 25 bp, Homo sapien
ccactgtgcttgttaactgaggagg

SEQ ID NO: 2024680 - DNA, 25 bp, Homo sapien
taataacagtgtcttggcagagttc

SEQ ID NO: 2024681 - DNA, 25 bp, Homo sapien
tcctgacaggaacttcccaagcaga

SEQ ID NO: 2024682 - DNA, 25 bp, Homo sapien
cctgacaggaacttcccaagcagag

SEQ ID NO: 2024683 - DNA, 25 bp, Homo sapien
ctctcctgacaggaacttcccaagc

SEQ ID NO: 2024684 - DNA, 25 bp, Homo sapien
ggcctcaggtagcaggcgctccttg

SEQ ID NO: 2024685 - DNA, 25 bp, Homo sapien
ctccctttgagacctgtcaccagct

SEQ ID NO: 2024686 - DNA, 25 bp, Homo sapien
ccctccctttgagacctgtcaccag

SEQ ID NO: 2024687 - DNA, 25 bp, Homo sapien
gcagagatgtagggttgctccctcc

SEQ ID NO: 2024688 - DNA, 25 bp, Homo sapien
agcagagatgtagggttgctccctc

SEQ ID NO: 2024689 - DNA, 25 bp, Homo sapien
cactggaaacgtgttgtgtgctgca

SEQ ID NO: 2024690 - DNA, 25 bp, Homo sapien
gaggcctgcgagagctctgaactct

SEQ ID NO: 2024691 - DNA, 25 bp, Homo sapien
atgaggagttgaacacgaggcctgc

SEQ ID NO: 2024692 - DNA, 25 bp, Homo sapien
tcttgcgtaacaaaagcaggtggca

SEQ ID NO: 2024693 - DNA, 25 bp, Homo sapien
aaggtcgcagttgtggaagtgggag

SEQ ID NO: 2024694 - DNA, 25 bp, Homo sapien
agcagctcgtcaaaggcagcccagt

SEQ ID NO: 2024695 - DNA, 25 bp, Homo sapien
gctcgtcaaaggcagcccagttggt

SEQ ID NO: 2024696 - DNA, 25 bp, Homo sapien
aaggcagcccagttggtcacaggca

SEQ ID NO: 2024697 - DNA, 25 bp, Homo sapien
ttgataagccccgtggatgcacctg

SEQ ID NO: 2024698 - DNA, 25 bp, Homo sapien
tgcacctgacacgagagaatcaatg

SEQ ID NO: 2024699 - DNA, 25 bp, Homo sapien
gaaagggtgtctgttggacttgcac

SEQ ID NO: 2024700 - DNA, 25 bp, Homo sapien
caacacccaggtgatgtctaggtga

SEQ ID NO: 2024701 - DNA, 25 bp, Homo sapien
tagagttgccctaggaccatcagtg

SEQ ID NO: 2024702 - DNA, 25 bp, Homo sapien
tgtacgaccggcaggatcacgtgct

SEQ ID NO: 2024703 - DNA, 25 bp, Homo sapien
gccactgtgaatgatgccgctgcga

SEQ ID NO: 2024704 - DNA, 25 bp, Homo sapien
ctgaaaggaataagagcggacaccc

SEQ ID NO: 2024705 - DNA, 25 bp, Homo sapien
caagtctctgcctgttaagtagtct

SEQ ID NO: 2024706 - DNA, 25 bp, Homo sapien
catttaggttgtccaagccagtgtt

SEQ ID NO: 2024707 - DNA, 25 bp, Homo sapien
tgcctgttaagtagtctctccccat

SEQ ID NO: 2024708 - DNA, 25 bp, Homo sapien
ttgagacctaagtcagcatccgacc

SEQ ID NO: 2024709 - DNA, 25 bp, Homo sapien
cagggccagagaacaggttagagca

SEQ ID NO: 2024710 - DNA, 25 bp, Homo sapien
tccagggccagagaacaggttagag

SEQ ID NO: 2024711 - DNA, 25 bp, Homo sapien
aacaggttagagcaggcagccccat

SEQ ID NO: 2024712 - DNA, 25 bp, Homo sapien
cttccagggccagagaacaggttag

SEQ ID NO: 2024713 - DNA, 25 bp, Homo sapien
ctttggggatgctgcgttgtccccc

SEQ ID NO: 2024714 - DNA, 25 bp, Homo sapien
gggatgctgcgttgtcccccttgct

SEQ ID NO: 2024715 - DNA, 25 bp, Homo sapien
cgttgtcccccttgctgaagctcat

SEQ ID NO: 2024716 - DNA, 25 bp, Homo sapien
atgctgcgttgtcccccttgctgaa

SEQ ID NO: 2024717 - DNA, 25 bp, Homo sapien
cctccaggttgtgtgagtgcgctca

SEQ ID NO: 2024718 - DNA, 25 bp, Homo sapien
aaccatggcaatctctccgaacggg

SEQ ID NO: 2024719 - DNA, 25 bp, Homo sapien
cacgatgtatgggtgtgtagcccca

SEQ ID NO: 2024720 - DNA, 25 bp, Homo sapien
cagagcaatgggctactccacgtag

SEQ ID NO: 2024721 - DNA, 25 bp, Homo sapien
aacggttggtttgatgtgttggcaa

SEQ ID NO: 2024722 - DNA, 25 bp, Homo sapien
taaatatgggcttttctgccaacgg

SEQ ID NO: 2024723 - DNA, 25 bp, Homo sapien
tgaatcacaaccaggccatgaagcc

SEQ ID NO: 2024724 - DNA, 25 bp, Homo sapien
gccttgaatgctggccatgggaatt

SEQ ID NO: 2024725 - DNA, 25 bp, Homo sapien
gccagtccgatgaggaccacgttga

SEQ ID NO: 2024726 - DNA, 25 bp, Homo sapien
accattggccagtccgatgaggacc

SEQ ID NO: 2024727 - DNA, 25 bp, Homo sapien
tgaggaccacgttgacgtgccccag

SEQ ID NO: 2024728 - DNA, 25 bp, Homo sapien
cagtggcccttggttgagttaggaa

SEQ ID NO: 2024729 - DNA, 25 bp, Homo sapien
tgttgtgtttgtgttggactcagct

SEQ ID NO: 2024730 - DNA, 25 bp, Homo sapien
aacatgaaagtacacgtttttgatg

SEQ ID NO: 2024731 - DNA, 25 bp, Homo sapien
tgtacattgaaaacatgaaagtaca

SEQ ID NO: 2024732 - DNA, 25 bp, Homo sapien
cttgtacattgaaaacatgaaagta

SEQ ID NO: 2024733 - DNA, 25 bp, Homo sapien
aaagtacacgtttttgatgttcaga

SEQ ID NO: 2024734 - DNA, 25 bp, Homo sapien
tgaacagtggagatttgggactggt

SEQ ID NO: 2024735 - DNA, 25 bp, Homo sapien
gaacagtggagatttgggactggtt

SEQ ID NO: 2024736 - DNA, 25 bp, Homo sapien
aatgaacagtggagatttgggactg

SEQ ID NO: 2024737 - DNA, 25 bp, Homo sapien
taatgaacagtggagatttgggact

SEQ ID NO: 2024738 - DNA, 25 bp, Homo sapien
gaggacttggacacattggtgcttc

SEQ ID NO: 2024739 - DNA, 25 bp, Homo sapien
caagttctgtcttgagatgtcagtc

SEQ ID NO: 2024740 - DNA, 25 bp, Homo sapien
gggcctttctgaactaggaagcaag

SEQ ID NO: 2024741 - DNA, 25 bp, Homo sapien
tgatgtgttgacatgttggcagcag

SEQ ID NO: 2024742 - DNA, 25 bp, Homo sapien
caagggtctggcctgaggtgcaggg

SEQ ID NO: 2024743 - DNA, 25 bp, Homo sapien
ggggccaggtacatggctgcccacc

SEQ ID NO: 2024744 - DNA, 25 bp, Homo sapien
tttcctgccggaatagcaccgaggg

SEQ ID NO: 2024745 - DNA, 25 bp, Homo sapien
tcatggacgctcctgtcagcctggc

SEQ ID NO: 2024746 - DNA, 25 bp, Homo sapien
gaagactcttattgtgtgggacagg

SEQ ID NO: 2024747 - DNA, 25 bp, Homo sapien
ctcttattgtgtgggacaggaactc

SEQ ID NO: 2024748 - DNA, 25 bp, Homo sapien
gacaggaactcctgatctttgaatt

SEQ ID NO: 2024749 - DNA, 25 bp, Homo sapien
tctttgaagactcttattgtgtggg

SEQ ID NO: 2024750 - DNA, 25 bp, Homo sapien
gttcttgctgggttaaaaggtatga

SEQ ID NO: 2024751 - DNA, 25 bp, Homo sapien
ttgtcaggttctgtctttaagggaa

SEQ ID NO: 2024752 - DNA, 25 bp, Homo sapien
tatatatattgccaggggaccactc

SEQ ID NO: 2024753 - DNA, 25 bp, Homo sapien
ggaccactcttttgcagggctctag

SEQ ID NO: 2024754 - DNA, 25 bp, Homo sapien
cactgtagacgtggttagttggacg

SEQ ID NO: 2024755 - DNA, 25 bp, Homo sapien
cgtagttttacacaaacagggtcat

SEQ ID NO: 2024756 - DNA, 25 bp, Homo sapien
tggcagaatcattccaggcctctca

SEQ ID NO: 2024757 - DNA, 25 bp, Homo sapien
ccaccccgaggcaatgacttttgca

SEQ ID NO: 2024758 - DNA, 25 bp, Homo sapien
ccgtttgcgtatggctgttcactgt

SEQ ID NO: 2024759 - DNA, 25 bp, Homo sapien
tcagtattgcccgtttgcgtatggc

SEQ ID NO: 2024760 - DNA, 25 bp, Homo sapien
tgcccgtttgcgtatggctgttcac

SEQ ID NO: 2024761 - DNA, 25 bp, Homo sapien
tattgcccgtttgcgtatggctgtt

SEQ ID NO: 2024762 - DNA, 25 bp, Homo sapien
tacaccgaaagatgttcagcacaga

SEQ ID NO: 2024763 - DNA, 25 bp, Homo sapien
cacagcccaggacttggtagggtgt

SEQ ID NO: 2024764 - DNA, 25 bp, Homo sapien
cctcctcaggaatatgaaggcttaa

SEQ ID NO: 2024765 - DNA, 25 bp, Homo sapien
ggtgtcttagtagctcctcctcagg

SEQ ID NO: 2024766 - DNA, 25 bp, Homo sapien
ggacaggctgatgatcagacccctg

SEQ ID NO: 2024767 - DNA, 25 bp, Homo sapien
ggcggacaggctgatgatcagaccc

SEQ ID NO: 2024768 - DNA, 25 bp, Homo sapien
gcggacaggctgatgatcagacccc

SEQ ID NO: 2024769 - DNA, 25 bp, Homo sapien
cggacaggctgatgatcagacccct

SEQ ID NO: 2024770 - DNA, 25 bp, Homo sapien
gtgtgtttgcgtttggggcagagct

SEQ ID NO: 2024771 - DNA, 25 bp, Homo sapien
ctgtgtgtttgcgtttggggcagag

SEQ ID NO: 2024772 - DNA, 25 bp, Homo sapien
tgtgtgtttgcgtttggggcagagc

SEQ ID NO: 2024773 - DNA, 25 bp, Homo sapien
ggcaccctccctgcatagtaatctg

SEQ ID NO: 2024774 - DNA, 25 bp, Homo sapien
tttccggtgcacagtcaggcaccct

SEQ ID NO: 2024775 - DNA, 25 bp, Homo sapien
cagttgtttccggtgcacagtcagg

SEQ ID NO: 2024776 - DNA, 25 bp, Homo sapien
tctcgctgtcctcagtggatttgac

SEQ ID NO: 2024777 - DNA, 25 bp, Homo sapien
tctagtgcaaatcccctgctcaggg

SEQ ID NO: 2024778 - DNA, 25 bp, Homo sapien
tctggaccgtcataagcctgggaag

SEQ ID NO: 2024779 - DNA, 25 bp, Homo sapien
cagggtcttcatccagaaacgaggt

SEQ ID NO: 2024780 - DNA, 25 bp, Homo sapien
tctacaagctggttgtgcacaccca

SEQ ID NO: 2024781 - DNA, 25 bp, Homo sapien
ctctcagcactagagtctcctgagc

SEQ ID NO: 2024782 - DNA, 25 bp, Homo sapien
tagttgcttctggagtaaccctggc

SEQ ID NO: 2024783 - DNA, 25 bp, Homo sapien
tggagtaaccctggcccgttcatcc

SEQ ID NO: 2024784 - DNA, 25 bp, Homo sapien
agagtctcctgagcccttagttgct

SEQ ID NO: 2024785 - DNA, 25 bp, Homo sapien
tggcctgcagtcaccttgggcccat

SEQ ID NO: 2024786 - DNA, 25 bp, Homo sapien
ccatggcctgcagtcaccttgggcc

SEQ ID NO: 2024787 - DNA, 25 bp, Homo sapien
atggcctgcagtcaccttgggccca

SEQ ID NO: 2024788 - DNA, 25 bp, Homo sapien
ggcctgcagtcaccttgggcccatc

SEQ ID NO: 2024789 - DNA, 25 bp, Homo sapien
cctttgtgtacaatgaaagttggac

SEQ ID NO: 2024790 - DNA, 25 bp, Homo sapien
agaggtccaggacatcgctgtgctg

SEQ ID NO: 2024791 - DNA, 25 bp, Homo sapien
cttggaaaacgtgcctgaacttgac

SEQ ID NO: 2024792 - DNA, 25 bp, Homo sapien
gccagaggtccaggacatcgctgtg

SEQ ID NO: 2024793 - DNA, 25 bp, Homo sapien
cctgttgtagaccagcagccctaca

SEQ ID NO: 2024794 - DNA, 25 bp, Homo sapien
gctggaccagagcacttctggtaca

SEQ ID NO: 2024795 - DNA, 25 bp, Homo sapien
gagttgcctgggcacactcaagtgc

SEQ ID NO: 2024796 - DNA, 25 bp, Homo sapien
tgtgtcatcaggtaccttcgacccc

SEQ ID NO: 2024797 - DNA, 25 bp, Homo sapien
cacttagcttcgactttggcctctc

SEQ ID NO: 2024798 - DNA, 25 bp, Homo sapien
gcagtatgtacttccaattccctag

SEQ ID NO: 2024799 - DNA, 25 bp, Homo sapien
caaaccagctgcagtatgtacttcc

SEQ ID NO: 2024800 - DNA, 25 bp, Homo sapien
cctagttctgttcatgggaccaccc

SEQ ID NO: 2024801 - DNA, 25 bp, Homo sapien
actttatggttaatatttgttactg

SEQ ID NO: 2024802 - DNA, 25 bp, Homo sapien
tatggttaatatttgttactgtagc

SEQ ID NO: 2024803 - DNA, 25 bp, Homo sapien
tagcatctatctccatagggagccg

SEQ ID NO: 2024804 - DNA, 25 bp, Homo sapien
tgttactgtagcatctatctccata

SEQ ID NO: 2024805 - DNA, 25 bp, Homo sapien
gtccagagggtccgtgtggctcttc

SEQ ID NO: 2024806 - DNA, 25 bp, Homo sapien
tgtccagagggtccgtgtggctctt

SEQ ID NO: 2024807 - DNA, 25 bp, Homo sapien
ttgtccagagggtccgtgtggctct

SEQ ID NO: 2024808 - DNA, 25 bp, Homo sapien
tccagagggtccgtgtggctcttcc

SEQ ID NO: 2024809 - DNA, 25 bp, Homo sapien
ggacttgctgttgtgccctccccac

SEQ ID NO: 2024810 - DNA, 25 bp, Homo sapien
ctgggccttactggacttgctgttg

SEQ ID NO: 2024811 - DNA, 25 bp, Homo sapien
gccttactggacttgctgttgtgcc

SEQ ID NO: 2024812 - DNA, 25 bp, Homo sapien
tgggccttactggacttgctgttgt

SEQ ID NO: 2024813 - DNA, 25 bp, Homo sapien
ctctgacctttggagtaggatttcc

SEQ ID NO: 2024814 - DNA, 25 bp, Homo sapien
acccctaactgtgtgcctatcttgg

SEQ ID NO: 2024815 - DNA, 25 bp, Homo sapien
atcttgggcgcagggcgggtgttcc

SEQ ID NO: 2024816 - DNA, 25 bp, Homo sapien
ctaacggcggagtgggagcccgcac

SEQ ID NO: 2024817 - DNA, 25 bp, Homo sapien
taattggctggtaggatctggcgct

SEQ ID NO: 2024818 - DNA, 25 bp, Homo sapien
tactctctgggagttgagcggccct

SEQ ID NO: 2024819 - DNA, 25 bp, Homo sapien
gggtggttccttcgccgcagatgct

SEQ ID NO: 2024820 - DNA, 25 bp, Homo sapien
caccccggttctcagagttgtggga

SEQ ID NO: 2024821 - DNA, 25 bp, Homo sapien
gccatcggacagtccgggcagactc

SEQ ID NO: 2024822 - DNA, 25 bp, Homo sapien
tggccaaggcgccttcaaggctgca

SEQ ID NO: 2024823 - DNA, 25 bp, Homo sapien
agactctggacccgctccgcgggag

SEQ ID NO: 2024824 - DNA, 25 bp, Homo sapien
ttgttccacgagtgagaggcgatcg

SEQ ID NO: 2024825 - DNA, 25 bp, Homo sapien
agacaggtgaagaacctgaggtcgc

SEQ ID NO: 2024826 - DNA, 25 bp, Homo sapien
aagaacctgaggtcgcaggaggaca

SEQ ID NO: 2024827 - DNA, 25 bp, Homo sapien
aaacaaccttgccataccagcccat

SEQ ID NO: 2024828 - DNA, 25 bp, Homo sapien
aacctgaggtcgcaggaggacaccc

SEQ ID NO: 2024829 - DNA, 25 bp, Homo sapien
tgctctggccctcgccgcggtctct

SEQ ID NO: 2024830 - DNA, 25 bp, Homo sapien
actagtaaggcagtcgggcccctgg

SEQ ID NO: 2024831 - DNA, 25 bp, Homo sapien
aggggtgcgcgccagcggtgtccgg

SEQ ID NO: 2024832 - DNA, 25 bp, Homo sapien
ctgaccctgccattcagcggggctg

SEQ ID NO: 2024833 - DNA, 25 bp, Homo sapien
tggcattcagcgcgctcccgggggc

SEQ ID NO: 2024834 - DNA, 25 bp, Homo sapien
acctggcattcagcgcgctcccggg

SEQ ID NO: 2024835 - DNA, 25 bp, Homo sapien
ctggcattcagcgcgctcccggggg

SEQ ID NO: 2024836 - DNA, 25 bp, Homo sapien
cacctggcattcagcgcgctcccgg

SEQ ID NO: 2024837 - DNA, 25 bp, Homo sapien
agcggaaagccgcaccctggtggcc

SEQ ID NO: 2024838 - DNA, 25 bp, Homo sapien
agaagcggcggtccagggccgcctg

SEQ ID NO: 2024839 - DNA, 25 bp, Homo sapien
cacgacaggggccataaactctcca

SEQ ID NO: 2024840 - DNA, 25 bp, Homo sapien
ctgcgcagccgtcccacgacagggg

SEQ ID NO: 2024841 - DNA, 25 bp, Homo sapien
tactatacctaatacactactttgg

SEQ ID NO: 2024842 - DNA, 25 bp, Homo sapien
tggattctgttatcacacggacttt

SEQ ID NO: 2024843 - DNA, 25 bp, Homo sapien
ttccttgaggcctaaatgcatcggg

SEQ ID NO: 2024844 - DNA, 25 bp, Homo sapien
ttctgttatcacacggacttttcct

SEQ ID NO: 2024845 - DNA, 25 bp, Homo sapien
gaattacttctcagaatattgcaca

SEQ ID NO: 2024846 - DNA, 25 bp, Homo sapien
caatcaatcgcctttggaaggagca

SEQ ID NO: 2024847 - DNA, 25 bp, Homo sapien
ttggaaggagcatatatccccagca

SEQ ID NO: 2024848 - DNA, 25 bp, Homo sapien
tattgcacacaatcaatcgcctttg

SEQ ID NO: 2024849 - DNA, 25 bp, Homo sapien
tgaatgtcacagcaggtggccggca

SEQ ID NO: 2024850 - DNA, 25 bp, Homo sapien
cactgaatgtcacagcaggtggccg

SEQ ID NO: 2024851 - DNA, 25 bp, Homo sapien
ctagctgcaaacaaggccactgaat

SEQ ID NO: 2024852 - DNA, 25 bp, Homo sapien
gccactgaatgtcacagcaggtggc

SEQ ID NO: 2024853 - DNA, 25 bp, Homo sapien
ggcagccaaacagctggcagaggcc

SEQ ID NO: 2024854 - DNA, 25 bp, Homo sapien
gggcagccaaacagctggcagaggc

SEQ ID NO: 2024855 - DNA, 25 bp, Homo sapien
gacagcttccgccttgcaggacaac

SEQ ID NO: 2024856 - DNA, 25 bp, Homo sapien
agcccataccgacccctcctggagc

SEQ ID NO: 2024857 - DNA, 25 bp, Homo sapien
atgtccacagcccataccgacccct

SEQ ID NO: 2024858 - DNA, 25 bp, Homo sapien
atgtgatgaacccagacagcttccg

SEQ ID NO: 2024859 - DNA, 25 bp, Homo sapien
ctcctcggccgtggcatcctgatat

SEQ ID NO: 2024860 - DNA, 25 bp, Homo sapien
atcctgatattgctgatattcagac

SEQ ID NO: 2024861 - DNA, 25 bp, Homo sapien
cctcctcctcggcatactcctcatc

SEQ ID NO: 2024862 - DNA, 25 bp, Homo sapien
ctcctcggcatactcctcatcctcc

SEQ ID NO: 2024863 - DNA, 25 bp, Homo sapien
gagacacatgtgaagagttcctgga

SEQ ID NO: 2024864 - DNA, 25 bp, Homo sapien
tattcccaatgaaggtggctgacat

SEQ ID NO: 2024865 - DNA, 25 bp, Homo sapien
actgctctgagacacatgtgaagag

SEQ ID NO: 2024866 - DNA, 25 bp, Homo sapien
cctggatggccgcattattcccaat

SEQ ID NO: 2024867 - DNA, 25 bp, Homo sapien
tcggggaaccagtcagcaaagtagc

SEQ ID NO: 2024868 - DNA, 25 bp, Homo sapien
cggggaaccagtcagcaaagtagct

SEQ ID NO: 2024869 - DNA, 25 bp, Homo sapien
gttgtcggggaaccagtcagcaaag

SEQ ID NO: 2024870 - DNA, 25 bp, Homo sapien
tgtcggggaaccagtcagcaaagta

SEQ ID NO: 2024871 - DNA, 25 bp, Homo sapien
cttgaatgttgaacatttgttcatc

SEQ ID NO: 2024872 - DNA, 25 bp, Homo sapien
tatcttgaatgttgaacatttgttc

SEQ ID NO: 2024873 - DNA, 25 bp, Homo sapien
cttatcttgaatgttgaacatttgt

SEQ ID NO: 2024874 - DNA, 25 bp, Homo sapien
tcttgaatgttgaacatttgttcat

SEQ ID NO: 2024875 - DNA, 25 bp, Homo sapien
agctccgcgccttctgtgtagcgtc

SEQ ID NO: 2024876 - DNA, 25 bp, Homo sapien
agccaccgttaggtagcagccgtga

SEQ ID NO: 2024877 - DNA, 25 bp, Homo sapien
tatctatgcagaaggtctcatccgc

SEQ ID NO: 2024878 - DNA, 25 bp, Homo sapien
tcttactaatgagaagggtacccat

SEQ ID NO: 2024879 - DNA, 25 bp, Homo sapien
taagacagcacagccggtcactcga

SEQ ID NO: 2024880 - DNA, 25 bp, Homo sapien
gccaggtatacggtcatcagtggtc

SEQ ID NO: 2024881 - DNA, 25 bp, Homo sapien
cagtggtcaccaccataatgcagaa

SEQ ID NO: 2024882 - DNA, 25 bp, Homo sapien
ctgtaagacagcacagccggtcact

SEQ ID NO: 2024883 - DNA, 25 bp, Homo sapien
gatgaccttgggcactcctggattt

SEQ ID NO: 2024884 - DNA, 25 bp, Homo sapien
accttgggcactcctggattttgag

SEQ ID NO: 2024885 - DNA, 25 bp, Homo sapien
atgaccttgggcactcctggatttt

SEQ ID NO: 2024886 - DNA, 25 bp, Homo sapien
gtctggcctgaagacctgcccgaag

SEQ ID NO: 2024887 - DNA, 25 bp, Homo sapien
tggcctgaagacctgcccgaagggc

SEQ ID NO: 2024888 - DNA, 25 bp, Homo sapien
tgcacagagtccatggtgcccggct

SEQ ID NO: 2024889 - DNA, 25 bp, Homo sapien
ttgtctggcctgaagacctgcccga

SEQ ID NO: 2024890 - DNA, 25 bp, Homo sapien
gggagggcatgagcgaggggagggc

SEQ ID NO: 2024891 - DNA, 25 bp, Homo sapien
gagggcatgagcgaggggagggccg

SEQ ID NO: 2024892 - DNA, 25 bp, Homo sapien
gggcgggagggcatgagcgagggga

SEQ ID NO: 2024893 - DNA, 25 bp, Homo sapien
cgggagggcatgagcgaggggaggg

SEQ ID NO: 2024894 - DNA, 25 bp, Homo sapien
ctggcctcgtggtggtgcacgttga

SEQ ID NO: 2024895 - DNA, 25 bp, Homo sapien
tcgtggtggtgcacgttgatgcgct

SEQ ID NO: 2024896 - DNA, 25 bp, Homo sapien
gcctcgtggtggtgcacgttgatgc

SEQ ID NO: 2024897 - DNA, 25 bp, Homo sapien
cgctggcctcgtggtggtgcacgtt

SEQ ID NO: 2024898 - DNA, 25 bp, Homo sapien
ggggccgcaatgcaggggcaccgct

SEQ ID NO: 2024899 - DNA, 25 bp, Homo sapien
gggccgcaatgcaggggcaccgctc

SEQ ID NO: 2024900 - DNA, 25 bp, Homo sapien
caccgctcccgccactgccaacatc

SEQ ID NO: 2024901 - DNA, 25 bp, Homo sapien
gggcaccgctcccgccactgccaac

SEQ ID NO: 2024902 - DNA, 25 bp, Homo sapien
cactgcccggtctgcgtgagcacga

SEQ ID NO: 2024903 - DNA, 25 bp, Homo sapien
cgcactgcccggtctgcgtgagcac

SEQ ID NO: 2024904 - DNA, 25 bp, Homo sapien
cccggtctgcgtgagcacgatttcc

SEQ ID NO: 2024905 - DNA, 25 bp, Homo sapien
tgcccggtctgcgtgagcacgattt

SEQ ID NO: 2024906 - DNA, 25 bp, Homo sapien
taacgcttaaatagccccgcgtcca

SEQ ID NO: 2024907 - DNA, 25 bp, Homo sapien
gctaacgcttaaatagccccgcgtc

SEQ ID NO: 2024908 - DNA, 25 bp, Homo sapien
cgctaacgcttaaatagccccgcgt

SEQ ID NO: 2024909 - DNA, 25 bp, Homo sapien
tcgtaaccggcatcttggccttgcg

SEQ ID NO: 2024910 - DNA, 25 bp, Homo sapien
tgtggcccctgccagtccccaacct

SEQ ID NO: 2024911 - DNA, 25 bp, Homo sapien
ttacctcggcctcaggctgtggccc

SEQ ID NO: 2024912 - DNA, 25 bp, Homo sapien
ccctgccagtccccaacctccagac

SEQ ID NO: 2024913 - DNA, 25 bp, Homo sapien
tggcccctgccagtccccaacctcc

SEQ ID NO: 2024914 - DNA, 25 bp, Homo sapien
taaccggcatcttgtcctgtgctgg

SEQ ID NO: 2024915 - DNA, 25 bp, Homo sapien
gacggcacaacggcgtctccacgtt

SEQ ID NO: 2024916 - DNA, 25 bp, Homo sapien
aagggacgctcgtacaaagtgaagt

SEQ ID NO: 2024917 - DNA, 25 bp, Homo sapien
tccgggtacaaatggccagacggga

SEQ ID NO: 2024918 - DNA, 25 bp, Homo sapien
tttcgactgaaatggagcccgccat

SEQ ID NO: 2024919 - DNA, 25 bp, Homo sapien
acgacgccgccgtgcggttcggaca

SEQ ID NO: 2024920 - DNA, 25 bp, Homo sapien
tctctcaaaatcagcgtctggattt

SEQ ID NO: 2024921 - DNA, 25 bp, Homo sapien
ccaggccgatattttggaaatttcg

SEQ ID NO: 2024922 - DNA, 25 bp, Homo sapien
ccaccctgctgtccccggagctgcc

SEQ ID NO: 2024923 - DNA, 25 bp, Homo sapien
cccggagctgcccctgagcctccac

SEQ ID NO: 2024924 - DNA, 25 bp, Homo sapien
gctgtccccggagctgcccctgagc

SEQ ID NO: 2024925 - DNA, 25 bp, Homo sapien
ctccaccctgctgtccccggagctg

SEQ ID NO: 2024926 - DNA, 25 bp, Homo sapien
caccctgctgtccccgaaactgtca

SEQ ID NO: 2024927 - DNA, 25 bp, Homo sapien
accctgctgtccccgaaactgtcat

SEQ ID NO: 2024928 - DNA, 25 bp, Homo sapien
ccaccctgctgtccccgaaactgtc

SEQ ID NO: 2024929 - DNA, 25 bp, Homo sapien
ctaaggacccgctgggccacaggtg

SEQ ID NO: 2024930 - DNA, 25 bp, Homo sapien
catgctctgagctcaggtcccagtg

SEQ ID NO: 2024931 - DNA, 25 bp, Homo sapien
caaggctcctcatcgggtgccagca

SEQ ID NO: 2024932 - DNA, 25 bp, Homo sapien
aggcccacagatttctaaggacccg

SEQ ID NO: 2024933 - DNA, 25 bp, Homo sapien
attgtgcacaccgtagaggggctag

SEQ ID NO: 2024934 - DNA, 25 bp, Homo sapien
acattctagtagaaggttctcttca

SEQ ID NO: 2024935 - DNA, 25 bp, Homo sapien
gagagggcacattctagtagaaggt

SEQ ID NO: 2024936 - DNA, 25 bp, Homo sapien
gctagagagggcacattctagtaga

SEQ ID NO: 2024937 - DNA, 25 bp, Homo sapien
tgggcgacagcttgaacaggaggta

SEQ ID NO: 2024938 - DNA, 25 bp, Homo sapien
ctgggcgacagcttgaacaggaggt

SEQ ID NO: 2024939 - DNA, 25 bp, Homo sapien
gcgacagcttgaacaggaggtaggt

SEQ ID NO: 2024940 - DNA, 25 bp, Homo sapien
ggcgacagcttgaacaggaggtagg

SEQ ID NO: 2024941 - DNA, 25 bp, Homo sapien
tgggatcagagggtccgtgggcagg

SEQ ID NO: 2024942 - DNA, 25 bp, Homo sapien
ccagggtgggatcagagggtccgtg

SEQ ID NO: 2024943 - DNA, 25 bp, Homo sapien
gggtgggatcagagggtccgtgggc

SEQ ID NO: 2024944 - DNA, 25 bp, Homo sapien
ggatcagagggtccgtgggcaggaa

SEQ ID NO: 2024945 - DNA, 25 bp, Homo sapien
acacgggctggctcccctcgctcct

SEQ ID NO: 2024946 - DNA, 25 bp, Homo sapien
tcatcccccagcatggccgtctgga

SEQ ID NO: 2024947 - DNA, 25 bp, Homo sapien
agcctggaagcacacgggctggctc

SEQ ID NO: 2024948 - DNA, 25 bp, Homo sapien
cctcgctcctcctgtgccccgtcat

SEQ ID NO: 2024949 - DNA, 25 bp, Homo sapien
gcctggcctcaaggataaagccagg

SEQ ID NO: 2024950 - DNA, 25 bp, Homo sapien
ctcaaaggcttcaagtatgagccag

SEQ ID NO: 2024951 - DNA, 25 bp, Homo sapien
atgagccaggtcaccccgacaatgt

SEQ ID NO: 2024952 - DNA, 25 bp, Homo sapien
aaggataaagccagggtccagctca

SEQ ID NO: 2024953 - DNA, 25 bp, Homo sapien
tcctgcctcttgaagtccagctcat

SEQ ID NO: 2024954 - DNA, 25 bp, Homo sapien
ctcccaggcctcttcctgcctcttg

SEQ ID NO: 2024955 - DNA, 25 bp, Homo sapien
cttcctgcctcttgaagtccagctc

SEQ ID NO: 2024956 - DNA, 25 bp, Homo sapien
ctgcctcttgaagtccagctcatag

SEQ ID NO: 2024957 - DNA, 25 bp, Homo sapien
ggatgcagtggcgagctgacgtgct

SEQ ID NO: 2024958 - DNA, 25 bp, Homo sapien
tcaggatgcagtggcgagctgacgt

SEQ ID NO: 2024959 - DNA, 25 bp, Homo sapien
ccaggtcaggatgcagtggcgagct

SEQ ID NO: 2024960 - DNA, 25 bp, Homo sapien
gagaagtgtggtcattgactccaag

SEQ ID NO: 2024961 - DNA, 25 bp, Homo sapien
tgccttgggcggcaacactacagtg

SEQ ID NO: 2024962 - DNA, 25 bp, Homo sapien
cggcaacactacagtgcactcactg

SEQ ID NO: 2024963 - DNA, 25 bp, Homo sapien
gagtgctgccttgggcggcaacact

SEQ ID NO: 2024964 - DNA, 25 bp, Homo sapien
gggcggcaacactacagtgcactca

SEQ ID NO: 2024965 - DNA, 25 bp, Homo sapien
tggggcagaccagtggcaatcaatc

SEQ ID NO: 2024966 - DNA, 25 bp, Homo sapien
gacccagctctggggcagaccagtg

SEQ ID NO: 2024967 - DNA, 25 bp, Homo sapien
ctgatgaaggggagcccggggctgg

SEQ ID NO: 2024968 - DNA, 25 bp, Homo sapien
ggctggagccctgacccagctctgg

SEQ ID NO: 2024969 - DNA, 25 bp, Homo sapien
aggcaggtggaggttccagcccttg

SEQ ID NO: 2024970 - DNA, 25 bp, Homo sapien
tggtgaggcaggtggaggttccagc

SEQ ID NO: 2024971 - DNA, 25 bp, Homo sapien
gaatgttgttggtgaggcaggtgga

SEQ ID NO: 2024972 - DNA, 25 bp, Homo sapien
caggtggaggttccagcccttggcc

SEQ ID NO: 2024973 - DNA, 25 bp, Homo sapien
gagacagtgacggctgggagcccac

SEQ ID NO: 2024974 - DNA, 25 bp, Homo sapien
tggagacagtgacggctgggagccc

SEQ ID NO: 2024975 - DNA, 25 bp, Homo sapien
ggagacagtgacggctgggagccca

SEQ ID NO: 2024976 - DNA, 25 bp, Homo sapien
agacagtgacggctgggagcccaca

SEQ ID NO: 2024977 - DNA, 25 bp, Homo sapien
tagaaggtgatcatcagctcgtctg

SEQ ID NO: 2024978 - DNA, 25 bp, Homo sapien
agctcgtctgcagagcaagtctgaa

SEQ ID NO: 2024979 - DNA, 25 bp, Homo sapien
ctgcagagcaagtctgaagctgcat

SEQ ID NO: 2024980 - DNA, 25 bp, Homo sapien
gaattgcagcacttgtagaaggtga

SEQ ID NO: 2024981 - DNA, 25 bp, Homo sapien
tcctccggggaactcgctgtgcgga

SEQ ID NO: 2024982 - DNA, 25 bp, Homo sapien
ttcccacctggagtgcggcgtctgc

SEQ ID NO: 2024983 - DNA, 25 bp, Homo sapien
tgctcttcaactctgcgaaggctcc

SEQ ID NO: 2024984 - DNA, 25 bp, Homo sapien
aaactggacccagatggaaagagac

SEQ ID NO: 2024985 - DNA, 25 bp, Homo sapien
tgagttattttactactagagacat

SEQ ID NO: 2024986 - DNA, 25 bp, Homo sapien
gcatttttgccaagccatattgagt

SEQ ID NO: 2024987 - DNA, 25 bp, Homo sapien
taaaagccttactgttgattgccca

SEQ ID NO: 2024988 - DNA, 25 bp, Homo sapien
ttactactagagacattaggaaact

SEQ ID NO: 2024989 - DNA, 25 bp, Homo sapien
gctgaagtaacaggctcactaggcc

SEQ ID NO: 2024990 - DNA, 25 bp, Homo sapien
atttaaactatgaactctgggctgg

SEQ ID NO: 2024991 - DNA, 25 bp, Homo sapien
gtaagattccacctagatgacattc

SEQ ID NO: 2024992 - DNA, 25 bp, Homo sapien
gggtatatgacattctacacttgtg

SEQ ID NO: 2024993 - DNA, 25 bp, Homo sapien
taattggtgatcttctaagggtctg

SEQ ID NO: 2024994 - DNA, 25 bp, Homo sapien
gctcctcttgattaggtaagtgtta

SEQ ID NO: 2024995 - DNA, 25 bp, Homo sapien
aagtgttatgggcatagaaagatga

SEQ ID NO: 2024996 - DNA, 25 bp, Homo sapien
ctcccgataactgcctaattggtga

SEQ ID NO: 2024997 - DNA, 25 bp, Homo sapien
tcggaggaatccacaacaacgtaaa

SEQ ID NO: 2024998 - DNA, 25 bp, Homo sapien
taagttatgcagtcctttcgaagcc

SEQ ID NO: 2024999 - DNA, 25 bp, Homo sapien
tcctcagtccaagatcagccggctg

SEQ ID NO: 2025000 - DNA, 25 bp, Homo sapien
ggctgcctgcttacttgaccattca

SEQ ID NO: 2025001 - DNA, 25 bp, Homo sapien
tatcttacggctttctggtggtgga

SEQ ID NO: 2025002 - DNA, 25 bp, Homo sapien
tcactgggtcgcacttggaggactg

SEQ ID NO: 2025003 - DNA, 25 bp, Homo sapien
gacaaagtcagcatcgtaacaccag

SEQ ID NO: 2025004 - DNA, 25 bp, Homo sapien
tgcagtggaactctgagacgaatcc

SEQ ID NO: 2025005 - DNA, 25 bp, Homo sapien
atcatttctataatccagagcttta

SEQ ID NO: 2025006 - DNA, 25 bp, Homo sapien
ctttagaggaagacacataggtggg

SEQ ID NO: 2025007 - DNA, 25 bp, Homo sapien
gaccactctgtgcaccaacctaaaa

SEQ ID NO: 2025008 - DNA, 25 bp, Homo sapien
aagaggaaagtgaacagtaatcttc

SEQ ID NO: 2025009 - DNA, 25 bp, Homo sapien
ctgaagatggttattaacactgtgc

SEQ ID NO: 2025010 - DNA, 25 bp, Homo sapien
agtatttgtccagcctattgcaggc

SEQ ID NO: 2025011 - DNA, 25 bp, Homo sapien
ttctgagtgttggagcttggctgaa

SEQ ID NO: 2025012 - DNA, 25 bp, Homo sapien
aaacatgggcacaatcaagtatttg

SEQ ID NO: 2025013 - DNA, 25 bp, Homo sapien
gcacaacactgatgataactattaa

SEQ ID NO: 2025014 - DNA, 25 bp, Homo sapien
gttgttttaatgctcggcagagcac

SEQ ID NO: 2025015 - DNA, 25 bp, Homo sapien
ggataaagcatagaataccagccag

SEQ ID NO: 2025016 - DNA, 25 bp, Homo sapien
ccaggacccttgactgatgctaggg

SEQ ID NO: 2025017 - DNA, 25 bp, Homo sapien
taatgatcaagactcgtggcaggca

SEQ ID NO: 2025018 - DNA, 25 bp, Homo sapien
cttgactgactagctaggttaggcc

SEQ ID NO: 2025019 - DNA, 25 bp, Homo sapien
taaatgttgtagctactagaccagg

SEQ ID NO: 2025020 - DNA, 25 bp, Homo sapien
tatgtgggaacaagaaaagtcggtg

SEQ ID NO: 2025021 - DNA, 25 bp, Homo sapien
tcaaatgctgcttggtaacaaaatc

SEQ ID NO: 2025022 - DNA, 25 bp, Homo sapien
accagtggacctcttatcaaatgct

SEQ ID NO: 2025023 - DNA, 25 bp, Homo sapien
ggacctcttatcaaatgctgcttgg

SEQ ID NO: 2025024 - DNA, 25 bp, Homo sapien
taacaaaatctatcacagttttaat

SEQ ID NO: 2025025 - DNA, 25 bp, Homo sapien
ttcatttccaagtagggagccagaa

SEQ ID NO: 2025026 - DNA, 25 bp, Homo sapien
gaactccctcttgatcttgccaggc

SEQ ID NO: 2025027 - DNA, 25 bp, Homo sapien
tctcaggtgttgcatgaactccctc

SEQ ID NO: 2025028 - DNA, 25 bp, Homo sapien
ttacaggtttgtctcgccgaacatc

SEQ ID NO: 2025029 - DNA, 25 bp, Homo sapien
cattttccttcagtagagcatcatt

SEQ ID NO: 2025030 - DNA, 25 bp, Homo sapien
tttccttcagtagagcatcattatc

SEQ ID NO: 2025031 - DNA, 25 bp, Homo sapien
ccttcagtagagcatcattatcttc

SEQ ID NO: 2025032 - DNA, 25 bp, Homo sapien
ttcattttccttcagtagagcatca

SEQ ID NO: 2025033 - DNA, 25 bp, Homo sapien
gattccaagtacagggtgccagaac

SEQ ID NO: 2025034 - DNA, 25 bp, Homo sapien
gaatgtttgaaagaatgccagcctc

SEQ ID NO: 2025035 - DNA, 25 bp, Homo sapien
taagtgggactatcttcacctgcag

SEQ ID NO: 2025036 - DNA, 25 bp, Homo sapien
gccagcctctgaagtaaggtaacag

SEQ ID NO: 2025037 - DNA, 25 bp, Homo sapien
cccacagccctgttgaactttaaat

SEQ ID NO: 2025038 - DNA, 25 bp, Homo sapien
tggtttttcacatgattaagtcagt

SEQ ID NO: 2025039 - DNA, 25 bp, Homo sapien
agaagatgtcaactaaagggtatga

SEQ ID NO: 2025040 - DNA, 25 bp, Homo sapien
tcagttttttgctcacatagtgaca

SEQ ID NO: 2025041 - DNA, 25 bp, Homo sapien
agtgagggcttctccgtgctaatag

SEQ ID NO: 2025042 - DNA, 25 bp, Homo sapien
aattccttggctagctttattacca

SEQ ID NO: 2025043 - DNA, 25 bp, Homo sapien
tgctaatagtctcagggctctccaa

SEQ ID NO: 2025044 - DNA, 25 bp, Homo sapien
cggtaattccttggctagctttatt

SEQ ID NO: 2025045 - DNA, 25 bp, Homo sapien
ttccaccatattttcagggtctgcc

SEQ ID NO: 2025046 - DNA, 25 bp, Homo sapien
agggtctgcctgttcaatggcttct

SEQ ID NO: 2025047 - DNA, 25 bp, Homo sapien
ccaccatattttcagggtctgcctg

SEQ ID NO: 2025048 - DNA, 25 bp, Homo sapien
tcagggtctgcctgttcaatggctt

SEQ ID NO: 2025049 - DNA, 25 bp, Homo sapien
aaaaataaccagtgaggatggcata

SEQ ID NO: 2025050 - DNA, 25 bp, Homo sapien
caaaaataaccagtgaggatggcat

SEQ ID NO: 2025051 - DNA, 25 bp, Homo sapien
tacaaaaataaccagtgaggatggc

SEQ ID NO: 2025052 - DNA, 25 bp, Homo sapien
acaaaaataaccagtgaggatggca

SEQ ID NO: 2025053 - DNA, 25 bp, Homo sapien
cttcatttgaaaaatgttcaacttg

SEQ ID NO: 2025054 - DNA, 25 bp, Homo sapien
acttcatttgaaaaatgttcaactt

SEQ ID NO: 2025055 - DNA, 25 bp, Homo sapien
ttcatttgaaaaatgttcaacttgc

SEQ ID NO: 2025056 - DNA, 25 bp, Homo sapien
gcttccatattatcagggcaaagat

SEQ ID NO: 2025057 - DNA, 25 bp, Homo sapien
ttccatattatcagggcaaagattc

SEQ ID NO: 2025058 - DNA, 25 bp, Homo sapien
gattccaaagccttgttaactcctc

SEQ ID NO: 2025059 - DNA, 25 bp, Homo sapien
aggcttccatattatcagggcaaag

SEQ ID NO: 2025060 - DNA, 25 bp, Homo sapien
ttccctaggaagtcctcgggtgctg

SEQ ID NO: 2025061 - DNA, 25 bp, Homo sapien
gttctcttccgaattattctcgtag

SEQ ID NO: 2025062 - DNA, 25 bp, Homo sapien
tattctcgtaggtttggtatctgat

SEQ ID NO: 2025063 - DNA, 25 bp, Homo sapien
aagtcctcgggtgctgttctcttcc

SEQ ID NO: 2025064 - DNA, 25 bp, Homo sapien
ccttcatttttccacgagttccagt

SEQ ID NO: 2025065 - DNA, 25 bp, Homo sapien
tccacgagttccagttttcttcagt

SEQ ID NO: 2025066 - DNA, 25 bp, Homo sapien
cacaaaacttgggcaaccttcattt

SEQ ID NO: 2025067 - DNA, 25 bp, Homo sapien
ttcacaaaacttgggcaaccttcat

SEQ ID NO: 2025068 - DNA, 25 bp, Homo sapien
gctaagaagaggatgtaagcataaa

SEQ ID NO: 2025069 - DNA, 25 bp, Homo sapien
acattttggttagtggaatcctctg

SEQ ID NO: 2025070 - DNA, 25 bp, Homo sapien
ctgaagttctatttcgtgctaagaa

SEQ ID NO: 2025071 - DNA, 25 bp, Homo sapien
ctatttcgtgctaagaagaggatgt

SEQ ID NO: 2025072 - DNA, 25 bp, Homo sapien
ctccatcgggggggttttcagatag

SEQ ID NO: 2025073 - DNA, 25 bp, Homo sapien
tctccatcgggggggttttcagata

SEQ ID NO: 2025074 - DNA, 25 bp, Homo sapien
gagtgtttgtggtcttgtacctgag

SEQ ID NO: 2025075 - DNA, 25 bp, Homo sapien
gtacctgagcttaactttatcctta

SEQ ID NO: 2025076 - DNA, 25 bp, Homo sapien
tgtaggcagagaaccaaggagtgtt

SEQ ID NO: 2025077 - DNA, 25 bp, Homo sapien
caatcatgggtttgttgcgtgttga

SEQ ID NO: 2025078 - DNA, 25 bp, Homo sapien
ccaaagtgattgctcatcagttaaa

SEQ ID NO: 2025079 - DNA, 25 bp, Homo sapien
aaactgattttgtagtatcttcaat

SEQ ID NO: 2025080 - DNA, 25 bp, Homo sapien
tatcttcaatccaaagtgattgctc

SEQ ID NO: 2025081 - DNA, 25 bp, Homo sapien
tgattgctcatcagttaaaacatag

SEQ ID NO: 2025082 - DNA, 25 bp, Homo sapien
cctcaagagggttggtactgaagac

SEQ ID NO: 2025083 - DNA, 25 bp, Homo sapien
cagcaaatgacgagcctgggattca

SEQ ID NO: 2025084 - DNA, 25 bp, Homo sapien
tgctaataaagacgacaactcctgg

SEQ ID NO: 2025085 - DNA, 25 bp, Homo sapien
cgttaagtaacagtgggctccacct

SEQ ID NO: 2025086 - DNA, 25 bp, Homo sapien
tgtgtcgacgaaagttactgtcact

SEQ ID NO: 2025087 - DNA, 25 bp, Homo sapien
tttgacctgccccttgagatattgg

SEQ ID NO: 2025088 - DNA, 25 bp, Homo sapien
cctgccccttgagatattggaataa

SEQ ID NO: 2025089 - DNA, 25 bp, Homo sapien
gagatactgcaacaggatgtgtcga

SEQ ID NO: 2025090 - DNA, 25 bp, Homo sapien
tattctaaccctaaaaaggctcatg

SEQ ID NO: 2025091 - DNA, 25 bp, Homo sapien
ccttagcttttatggcacatcttag

SEQ ID NO: 2025092 - DNA, 25 bp, Homo sapien
tggaacttcaggcatacatcactgg

SEQ ID NO: 2025093 - DNA, 25 bp, Homo sapien
ttagtcatccttacatgcctctctg

SEQ ID NO: 2025094 - DNA, 25 bp, Homo sapien
tactttctaaagtttcataattgtg

SEQ ID NO: 2025095 - DNA, 25 bp, Homo sapien
tggttagatcctccagtacggtgtt

SEQ ID NO: 2025096 - DNA, 25 bp, Homo sapien
tgtgtatgatgtttgcaatagggtt

SEQ ID NO: 2025097 - DNA, 25 bp, Homo sapien
cagaaatatggttagtgtccatcca

SEQ ID NO: 2025098 - DNA, 25 bp, Homo sapien
tatgtgagatgaatatacatacaca

SEQ ID NO: 2025099 - DNA, 25 bp, Homo sapien
ctttctgatgaaccatacttacatt

SEQ ID NO: 2025100 - DNA, 25 bp, Homo sapien
acattcctaggataaactgtatgtc

SEQ ID NO: 2025101 - DNA, 25 bp, Homo sapien
cagccaatcggttgttaatctggca

SEQ ID NO: 2025102 - DNA, 25 bp, Homo sapien
gaatgttccacgtatacacaaaaag

SEQ ID NO: 2025103 - DNA, 25 bp, Homo sapien
tgtggccagagaatgtgttcttcgt

SEQ ID NO: 2025104 - DNA, 25 bp, Homo sapien
tgagttgaacgctcaatttgtcact

SEQ ID NO: 2025105 - DNA, 25 bp, Homo sapien
ttatttgcaacccacacttctgaca

SEQ ID NO: 2025106 - DNA, 25 bp, Homo sapien
tcccttgtggatacaaactgctcca

SEQ ID NO: 2025107 - DNA, 25 bp, Homo sapien
ccttgtggatacaaactgctccatc

SEQ ID NO: 2025108 - DNA, 25 bp, Homo sapien
tatcccttgtggatacaaactgctc

SEQ ID NO: 2025109 - DNA, 25 bp, Homo sapien
cccttgtggatacaaactgctccat

SEQ ID NO: 2025110 - DNA, 25 bp, Homo sapien
atccccatgcctccgcctctagggc

SEQ ID NO: 2025111 - DNA, 25 bp, Homo sapien
tcaatggatccccatgcctccgcct

SEQ ID NO: 2025112 - DNA, 25 bp, Homo sapien
ggatccccatgcctccgcctctagg

SEQ ID NO: 2025113 - DNA, 25 bp, Homo sapien
atggatccccatgcctccgcctcta

SEQ ID NO: 2025114 - DNA, 25 bp, Homo sapien
tatcaaaagttgaaagtaacatcag

SEQ ID NO: 2025115 - DNA, 25 bp, Homo sapien
aagttgaaagtaacatcaggcccaa

SEQ ID NO: 2025116 - DNA, 25 bp, Homo sapien
aaagtaacatcaggcccaaaactgg

SEQ ID NO: 2025117 - DNA, 25 bp, Homo sapien
aggcccaaaactggcatatatttag

SEQ ID NO: 2025118 - DNA, 25 bp, Homo sapien
cgtgatgtgatattaattaatgaaa

SEQ ID NO: 2025119 - DNA, 25 bp, Homo sapien
tcctcgtgatgtgatattaattaat

SEQ ID NO: 2025120 - DNA, 25 bp, Homo sapien
ctcgtgatgtgatattaattaatga

SEQ ID NO: 2025121 - DNA, 25 bp, Homo sapien
cttcctcgtgatgtgatattaatta

SEQ ID NO: 2025122 - DNA, 25 bp, Homo sapien
gggcccctgagtccaaaagtctaga

SEQ ID NO: 2025123 - DNA, 25 bp, Homo sapien
catatctggtcactgagcaagcaga

SEQ ID NO: 2025124 - DNA, 25 bp, Homo sapien
tactagacagatgttggaaattccc

SEQ ID NO: 2025125 - DNA, 25 bp, Homo sapien
caccacctgccttggatagagagtc

SEQ ID NO: 2025126 - DNA, 25 bp, Homo sapien
agtttaacttagaaaggctgtcagc

SEQ ID NO: 2025127 - DNA, 25 bp, Homo sapien
caaaacagacttaatgtagaactac

SEQ ID NO: 2025128 - DNA, 25 bp, Homo sapien
gaaaccaaattagtcctacttctga

SEQ ID NO: 2025129 - DNA, 25 bp, Homo sapien
ggctgtcagctaaacggaaataaaa

SEQ ID NO: 2025130 - DNA, 25 bp, Homo sapien
gcaaaatatacatgttctcctcctg

SEQ ID NO: 2025131 - DNA, 25 bp, Homo sapien
cctgagtatcatctaatttataact

SEQ ID NO: 2025132 - DNA, 25 bp, Homo sapien
cttttttcttgaggcctgagtatca

SEQ ID NO: 2025133 - DNA, 25 bp, Homo sapien
tcttgaggcctgagtatcatctaat

SEQ ID NO: 2025134 - DNA, 25 bp, Homo sapien
caggttgtaatcaattggaatagag

SEQ ID NO: 2025135 - DNA, 25 bp, Homo sapien
aaatcttctcatagcattgcacagg

SEQ ID NO: 2025136 - DNA, 25 bp, Homo sapien
catagcattgcacagggttcctgaa

SEQ ID NO: 2025137 - DNA, 25 bp, Homo sapien
ccagaattttcgatacaggttgtaa

SEQ ID NO: 2025138 - DNA, 25 bp, Homo sapien
gttgttggagcttcctcgtctccca

SEQ ID NO: 2025139 - DNA, 25 bp, Homo sapien
tcccatttcgccttcttctacatcc

SEQ ID NO: 2025140 - DNA, 25 bp, Homo sapien
cacgttgttggagcttcctcgtctc

SEQ ID NO: 2025141 - DNA, 25 bp, Homo sapien
gttggagcttcctcgtctcccattt

SEQ ID NO: 2025142 - DNA, 25 bp, Homo sapien
tcatttgtattgaaaacagtgacat

SEQ ID NO: 2025143 - DNA, 25 bp, Homo sapien
tgacattttccagattaaactgact

SEQ ID NO: 2025144 - DNA, 25 bp, Homo sapien
cttctgacccagggtgctttcctgc

SEQ ID NO: 2025145 - DNA, 25 bp, Homo sapien
tctgacccagggtgctttcctgctc

SEQ ID NO: 2025146 - DNA, 25 bp, Homo sapien
gaatccgtccacagaagactgtatt

SEQ ID NO: 2025147 - DNA, 25 bp, Homo sapien
tctgggatttagacaatcttcttag

SEQ ID NO: 2025148 - DNA, 25 bp, Homo sapien
agagctgaatccgtccacagaagac

SEQ ID NO: 2025149 - DNA, 25 bp, Homo sapien
ggatttagacaatcttcttaggaga

SEQ ID NO: 2025150 - DNA, 25 bp, Homo sapien
cattgcacatacgtagtaagtaatt

SEQ ID NO: 2025151 - DNA, 25 bp, Homo sapien
attgcacatacgtagtaagtaattt

SEQ ID NO: 2025152 - DNA, 25 bp, Homo sapien
gtgtcacactgatccaaaggaagac

SEQ ID NO: 2025153 - DNA, 25 bp, Homo sapien
agtgaatattgtgtcacactgatcc

SEQ ID NO: 2025154 - DNA, 25 bp, Homo sapien
tattgtgtcacactgatccaaagga

SEQ ID NO: 2025155 - DNA, 25 bp, Homo sapien
tccaaaggaagacaatccaaaacat

SEQ ID NO: 2025156 - DNA, 25 bp, Homo sapien
cccaacaatacaaaaggtgtagatg

SEQ ID NO: 2025157 - DNA, 25 bp, Homo sapien
atacaaaaggtgtagatgcggtaca

SEQ ID NO: 2025158 - DNA, 25 bp, Homo sapien
tacaaaaggtgtagatgcggtacaa

SEQ ID NO: 2025159 - DNA, 25 bp, Homo sapien
tcaagtggagcacaagccaatttaa

SEQ ID NO: 2025160 - DNA, 25 bp, Homo sapien
gagcacaagccaatttaaaagttta

SEQ ID NO: 2025161 - DNA, 25 bp, Homo sapien
agtggagcacaagccaatttaaaag

SEQ ID NO: 2025162 - DNA, 25 bp, Homo sapien
cttcaagtggagcacaagccaattt

SEQ ID NO: 2025163 - DNA, 25 bp, Homo sapien
tataacgactataataacttggaaa

SEQ ID NO: 2025164 - DNA, 25 bp, Homo sapien
cttcaccactaagctattcaaaaga

SEQ ID NO: 2025165 - DNA, 25 bp, Homo sapien
aatgcagccaattaaaaatgatggt

SEQ ID NO: 2025166 - DNA, 25 bp, Homo sapien
ataacttcaccaagatcatagagcc

SEQ ID NO: 2025167 - DNA, 25 bp, Homo sapien
aatgcgacgtgagggatattgccta

SEQ ID NO: 2025168 - DNA, 25 bp, Homo sapien
gagatgagactggactaggtgacct

SEQ ID NO: 2025169 - DNA, 25 bp, Homo sapien
gcccttagttgcagtatagcctgga

SEQ ID NO: 2025170 - DNA, 25 bp, Homo sapien
gcagagaagcagtctaggccagaga

SEQ ID NO: 2025171 - DNA, 25 bp, Homo sapien
taattcaactgggacttcttggcaa

SEQ ID NO: 2025172 - DNA, 25 bp, Homo sapien
ccaggtcctagctcagtaccaggca

SEQ ID NO: 2025173 - DNA, 25 bp, Homo sapien
aaggaagtgccaaaatgtgcactgc

SEQ ID NO: 2025174 - DNA, 25 bp, Homo sapien
tgaagtttagagagccatgttggct

SEQ ID NO: 2025175 - DNA, 25 bp, Homo sapien
ttcagttactcccccaatagcaaga

SEQ ID NO: 2025176 - DNA, 25 bp, Homo sapien
gttactcccccaatagcaagagaaa

SEQ ID NO: 2025177 - DNA, 25 bp, Homo sapien
taatagctaaaacgttttcacatga

SEQ ID NO: 2025178 - DNA, 25 bp, Homo sapien
aataatagctaaaacgttttcacat

SEQ ID NO: 2025179 - DNA, 25 bp, Homo sapien
tctgaaagcttggtcaagggtacat

SEQ ID NO: 2025180 - DNA, 25 bp, Homo sapien
tacctctgaaagcttggtcaagggt

SEQ ID NO: 2025181 - DNA, 25 bp, Homo sapien
gaatacctctgaaagcttggtcaag

SEQ ID NO: 2025182 - DNA, 25 bp, Homo sapien
cttctagaatacctctgaaagcttg

SEQ ID NO: 2025183 - DNA, 25 bp, Homo sapien
gaaggtacttaacaatggcttgatg

SEQ ID NO: 2025184 - DNA, 25 bp, Homo sapien
ggctgaaggtacttaacaatggctt

SEQ ID NO: 2025185 - DNA, 25 bp, Homo sapien
tgttcaaggcctctctggtagactt

SEQ ID NO: 2025186 - DNA, 25 bp, Homo sapien
ggtacttaacaatggcttgatgttt

SEQ ID NO: 2025187 - DNA, 25 bp, Homo sapien
gctgagaggatggacccaaccagca

SEQ ID NO: 2025188 - DNA, 25 bp, Homo sapien
aaacgagctgagaggatggacccaa

SEQ ID NO: 2025189 - DNA, 25 bp, Homo sapien
acctgccccactaaacgagctgaga

SEQ ID NO: 2025190 - DNA, 25 bp, Homo sapien
cactaaacgagctgagaggatggac

SEQ ID NO: 2025191 - DNA, 25 bp, Homo sapien
ggcaaactgaagagcggcggcgtcg

SEQ ID NO: 2025192 - DNA, 25 bp, Homo sapien
tgaagagcggcggcgtcggagacat

SEQ ID NO: 2025193 - DNA, 25 bp, Homo sapien
actgaagagcggcggcgtcggagac

SEQ ID NO: 2025194 - DNA, 25 bp, Homo sapien
gcgtccgcgcttcgggcaaactgaa

SEQ ID NO: 2025195 - DNA, 25 bp, Homo sapien
tgccgatgacgtcaagccaggagca

SEQ ID NO: 2025196 - DNA, 25 bp, Homo sapien
gccaggagcaacgagactgcggtct

SEQ ID NO: 2025197 - DNA, 25 bp, Homo sapien
tgacgtcaagccaggagcaacgaga

SEQ ID NO: 2025198 - DNA, 25 bp, Homo sapien
gcggcgcctgccgatgacgtcaagc

SEQ ID NO: 2025199 - DNA, 25 bp, Homo sapien
tccctagcgactcagttcgggtggg

SEQ ID NO: 2025200 - DNA, 25 bp, Homo sapien
tgggagtttccctagcgactcagtt

SEQ ID NO: 2025201 - DNA, 25 bp, Homo sapien
ttgggcgcctgagtcagccaaacag

SEQ ID NO: 2025202 - DNA, 25 bp, Homo sapien
ctcagttcgggtgggcgttgggcgc

SEQ ID NO: 2025203 - DNA, 25 bp, Homo sapien
ctctgcgttcccgggcgtggaagag

SEQ ID NO: 2025204 - DNA, 25 bp, Homo sapien
cgtggaagagactggccgcgcacat

SEQ ID NO: 2025205 - DNA, 25 bp, Homo sapien
gactggccgcgcacatgcgtttctg

SEQ ID NO: 2025206 - DNA, 25 bp, Homo sapien
ttcccgggcgtggaagagactggcc

SEQ ID NO: 2025207 - DNA, 25 bp, Homo sapien
acagctggagcagtggtcctgggcc

SEQ ID NO: 2025208 - DNA, 25 bp, Homo sapien
gtcctgggccgccagtccgcggtca

SEQ ID NO: 2025209 - DNA, 25 bp, Homo sapien
tcctgggccgccagtccgcggtcat

SEQ ID NO: 2025210 - DNA, 25 bp, Homo sapien
ctggggaaacagctggagcagtggt

SEQ ID NO: 2025211 - DNA, 25 bp, Homo sapien
ctagttctttgatattgcttggtct

SEQ ID NO: 2025212 - DNA, 25 bp, Homo sapien
tagttctttgatattgcttggtctg

SEQ ID NO: 2025213 - DNA, 25 bp, Homo sapien
catgtcctcctgtcttcggttcccc

SEQ ID NO: 2025214 - DNA, 25 bp, Homo sapien
cacatgacagttgttacagccagag

SEQ ID NO: 2025215 - DNA, 25 bp, Homo sapien
agccttgaaacttgagtgttgagcc

SEQ ID NO: 2025216 - DNA, 25 bp, Homo sapien
ggagaggcagccttgaaacttgagt

SEQ ID NO: 2025217 - DNA, 25 bp, Homo sapien
acttaagcgatctactggcctcggc

SEQ ID NO: 2025218 - DNA, 25 bp, Homo sapien
gcacactaaatagaccgcagtatag

SEQ ID NO: 2025219 - DNA, 25 bp, Homo sapien
tggacttaagcgatctactggcctc

SEQ ID NO: 2025220 - DNA, 25 bp, Homo sapien
aaatagaccgcagtatagtataaac

SEQ ID NO: 2025221 - DNA, 25 bp, Homo sapien
taaagcagtcaatagggaaatggga

SEQ ID NO: 2025222 - DNA, 25 bp, Homo sapien
ccatagtaatggtttagggatagac

SEQ ID NO: 2025223 - DNA, 25 bp, Homo sapien
ggagagaaaatagaatgccttcgtg

SEQ ID NO: 2025224 - DNA, 25 bp, Homo sapien
cattgtatcccgttgtaaagcagtc

SEQ ID NO: 2025225 - DNA, 25 bp, Homo sapien
tttcattagtttcgagccactcagc

SEQ ID NO: 2025226 - DNA, 25 bp, Homo sapien
caagtgttgtgttagaatactgtac

SEQ ID NO: 2025227 - DNA, 25 bp, Homo sapien
taagtaagttactgtcacagcaagt

SEQ ID NO: 2025228 - DNA, 25 bp, Homo sapien
caactatcttagtcaatggaaattt

SEQ ID NO: 2025229 - DNA, 25 bp, Homo sapien
acagcagcctcctcggttcaaccat

SEQ ID NO: 2025230 - DNA, 25 bp, Homo sapien
ttgtttttaaggctcccagacagca

SEQ ID NO: 2025231 - DNA, 25 bp, Homo sapien
tttgtttttaaggctcccagacagc

SEQ ID NO: 2025232 - DNA, 25 bp, Homo sapien
ccagacagcagcctcctcggttcaa

SEQ ID NO: 2025233 - DNA, 25 bp, Homo sapien
tgtacagtaggttgaaaggttgatc

SEQ ID NO: 2025234 - DNA, 25 bp, Homo sapien
cattagtgtgatgaaaaggacttcc

SEQ ID NO: 2025235 - DNA, 25 bp, Homo sapien
gatcaattggtaatttgtacagtag

SEQ ID NO: 2025236 - DNA, 25 bp, Homo sapien
tatctgggtcatgctttgtgtgtct

SEQ ID NO: 2025237 - DNA, 25 bp, Homo sapien
tattcatggctctggttctcacagg

SEQ ID NO: 2025238 - DNA, 25 bp, Homo sapien
gaagccgtgactactgccaggtcct

SEQ ID NO: 2025239 - DNA, 25 bp, Homo sapien
gaaaccaggcagtcgttgaacttga

SEQ ID NO: 2025240 - DNA, 25 bp, Homo sapien
gaagctattcaatgtcagtgaacaa

SEQ ID NO: 2025241 - DNA, 25 bp, Homo sapien
ctgtgttgttgactgtgtgaatctt

SEQ ID NO: 2025242 - DNA, 25 bp, Homo sapien
ctggcacaacatctggaacataatg

SEQ ID NO: 2025243 - DNA, 25 bp, Homo sapien
ttgttgactgtgtgaatctttgatg

SEQ ID NO: 2025244 - DNA, 25 bp, Homo sapien
ggcacaacatctggaacataatggg

SEQ ID NO: 2025245 - DNA, 25 bp, Homo sapien
cagcaaggtgctctgcgtgtccttc

SEQ ID NO: 2025246 - DNA, 25 bp, Homo sapien
catgcgaatgtgtggcactcccagc

SEQ ID NO: 2025247 - DNA, 25 bp, Homo sapien
ccagggttcttgtggtgaaggctca

SEQ ID NO: 2025248 - DNA, 25 bp, Homo sapien
tgaaggctcacacacaactttggaa

SEQ ID NO: 2025249 - DNA, 25 bp, Homo sapien
catgggtctggctagtcctgatggc

SEQ ID NO: 2025250 - DNA, 25 bp, Homo sapien
tgggtctggctagtcctgatggctt

SEQ ID NO: 2025251 - DNA, 25 bp, Homo sapien
atgggtctggctagtcctgatggct

SEQ ID NO: 2025252 - DNA, 25 bp, Homo sapien
gctgagttctgttgagagctgtctt

SEQ ID NO: 2025253 - DNA, 25 bp, Homo sapien
aatcagataattcatccaggaagag

SEQ ID NO: 2025254 - DNA, 25 bp, Homo sapien
tcagataattcatccaggaagagcc

SEQ ID NO: 2025255 - DNA, 25 bp, Homo sapien
tcaatcagataattcatccaggaag

SEQ ID NO: 2025256 - DNA, 25 bp, Homo sapien
cagataattcatccaggaagagcct

SEQ ID NO: 2025257 - DNA, 25 bp, Homo sapien
gggctctttctgtagtggaggtggc

SEQ ID NO: 2025258 - DNA, 25 bp, Homo sapien
ggctctttctgtagtggaggtggcc

SEQ ID NO: 2025259 - DNA, 25 bp, Homo sapien
ctctttctgtagtggaggtggccct

SEQ ID NO: 2025260 - DNA, 25 bp, Homo sapien
gctctttctgtagtggaggtggccc

SEQ ID NO: 2025261 - DNA, 25 bp, Homo sapien
gacatttactgcgagtgaaggaggc

SEQ ID NO: 2025262 - DNA, 25 bp, Homo sapien
atagacatttactgcgagtgaagga

SEQ ID NO: 2025263 - DNA, 25 bp, Homo sapien
tagacatttactgcgagtgaaggag

SEQ ID NO: 2025264 - DNA, 25 bp, Homo sapien
acatttactgcgagtgaaggaggca

SEQ ID NO: 2025265 - DNA, 25 bp, Homo sapien
gaaacaccaaggtctccatgaaggt

SEQ ID NO: 2025266 - DNA, 25 bp, Homo sapien
aagaaacaccaaggtctccatgaag

SEQ ID NO: 2025267 - DNA, 25 bp, Homo sapien
ccaaggtctccatgaaggtgctggt

SEQ ID NO: 2025268 - DNA, 25 bp, Homo sapien
ttttgaagaaacaccaaggtctcca

SEQ ID NO: 2025269 - DNA, 25 bp, Homo sapien
aagcttcaattaagtggcatcttat

SEQ ID NO: 2025270 - DNA, 25 bp, Homo sapien
ttcgcccagggaggttgtaggtaca

SEQ ID NO: 2025271 - DNA, 25 bp, Homo sapien
taggactctcagtaaccttcgccca

SEQ ID NO: 2025272 - DNA, 25 bp, Homo sapien
tgaaccccaaaccatatatttggag

SEQ ID NO: 2025273 - DNA, 25 bp, Homo sapien
tagtaagtagcaactcaggtgcctg

SEQ ID NO: 2025274 - DNA, 25 bp, Homo sapien
tatcttctcatagtagtaagtagca

SEQ ID NO: 2025275 - DNA, 25 bp, Homo sapien
cctgaagaccccatcatattttact

SEQ ID NO: 2025276 - DNA, 25 bp, Homo sapien
tagcaactcaggtgcctgaagaccc

SEQ ID NO: 2025277 - DNA, 25 bp, Homo sapien
gtaatggagtgacccaggaaaccgc

SEQ ID NO: 2025278 - DNA, 25 bp, Homo sapien
tgtagtaagacctgcttcctagggc

SEQ ID NO: 2025279 - DNA, 25 bp, Homo sapien
gtgtgctattaagaagggcccttcc

SEQ ID NO: 2025280 - DNA, 25 bp, Homo sapien
caatctgattgaaggacttggacca

SEQ ID NO: 2025281 - DNA, 25 bp, Homo sapien
tgatgacggcatcagatacttattt

SEQ ID NO: 2025282 - DNA, 25 bp, Homo sapien
gatgacggcatcagatacttatttt

SEQ ID NO: 2025283 - DNA, 25 bp, Homo sapien
tcctgatgacggcatcagatactta

SEQ ID NO: 2025284 - DNA, 25 bp, Homo sapien
cctgatgacggcatcagatacttat

SEQ ID NO: 2025285 - DNA, 25 bp, Homo sapien
catgaaaaagaggactcagtgtagc

SEQ ID NO: 2025286 - DNA, 25 bp, Homo sapien
aggtgttggaatgccgtgcccgcct

SEQ ID NO: 2025287 - DNA, 25 bp, Homo sapien
agcctctaaaggctgttgagcctga

SEQ ID NO: 2025288 - DNA, 25 bp, Homo sapien
gcccgccttgtggtgcaggcttcag

SEQ ID NO: 2025289 - DNA, 25 bp, Homo sapien
tatttgggataagtagcagcactgc

SEQ ID NO: 2025290 - DNA, 25 bp, Homo sapien
tatttaatgcctagtttcagccctt

SEQ ID NO: 2025291 - DNA, 25 bp, Homo sapien
gaaagtcaaggagcgaaaggaagat

SEQ ID NO: 2025292 - DNA, 25 bp, Homo sapien
ggatggaaatcttacctttgagcat

SEQ ID NO: 2025293 - DNA, 25 bp, Homo sapien
tctggtcaggcacacgtcaagaatg

SEQ ID NO: 2025294 - DNA, 25 bp, Homo sapien
tagctcagccatgacacagggcctt

SEQ ID NO: 2025295 - DNA, 25 bp, Homo sapien
caggtaacacgtagccggttcccat

SEQ ID NO: 2025296 - DNA, 25 bp, Homo sapien
gacgccatacgttcctgacagttaa

SEQ ID NO: 2025297 - DNA, 25 bp, Homo sapien
aaattctttgccactgggtagaatt

SEQ ID NO: 2025298 - DNA, 25 bp, Homo sapien
ttctttgccactgggtagaattaaa

SEQ ID NO: 2025299 - DNA, 25 bp, Homo sapien
attctttgccactgggtagaattaa

SEQ ID NO: 2025300 - DNA, 25 bp, Homo sapien
aattctttgccactgggtagaatta

SEQ ID NO: 2025301 - DNA, 25 bp, Homo sapien
gaaaatttgctcatgtgatcccatc

SEQ ID NO: 2025302 - DNA, 25 bp, Homo sapien
tgacggatggtaaaaaacactagct

SEQ ID NO: 2025303 - DNA, 25 bp, Homo sapien
ccaagtctttgggtaatgacggatg

SEQ ID NO: 2025304 - DNA, 25 bp, Homo sapien
tataatcgcacggttactgacggag

SEQ ID NO: 2025305 - DNA, 25 bp, Homo sapien
taaatcaacccagcacagtcttctc

SEQ ID NO: 2025306 - DNA, 25 bp, Homo sapien
agttattgacgtcttcacattggaa

SEQ ID NO: 2025307 - DNA, 25 bp, Homo sapien
ctgtctttttcgcaaatgaagttat

SEQ ID NO: 2025308 - DNA, 25 bp, Homo sapien
tgaccccagttatccggctgtccag

SEQ ID NO: 2025309 - DNA, 25 bp, Homo sapien
tctgtgttggccctgccagtctttc

SEQ ID NO: 2025310 - DNA, 25 bp, Homo sapien
gtccgggccattgcaggtggcatct

SEQ ID NO: 2025311 - DNA, 25 bp, Homo sapien
aactgtccgggccattgcaggtggc

SEQ ID NO: 2025312 - DNA, 25 bp, Homo sapien
tctaaaagccttgtccttaattggc

SEQ ID NO: 2025313 - DNA, 25 bp, Homo sapien
attttcacgctctgagtctgtgagg

SEQ ID NO: 2025314 - DNA, 25 bp, Homo sapien
tctgtgaggccgatccagtggctct

SEQ ID NO: 2025315 - DNA, 25 bp, Homo sapien
atccagccacttccattcattttca

SEQ ID NO: 2025316 - DNA, 25 bp, Homo sapien
tagtctggagatgtcccatccagcc

SEQ ID NO: 2025317 - DNA, 25 bp, Homo sapien
cagtgtgttgcacgcagtgtgtctc

SEQ ID NO: 2025318 - DNA, 25 bp, Homo sapien
tcccatgtcctaatcataggaatag

SEQ ID NO: 2025319 - DNA, 25 bp, Homo sapien
tgggccccacgtgcagtgtgttgca

SEQ ID NO: 2025320 - DNA, 25 bp, Homo sapien
gtctccaagcttttataacaaccca

SEQ ID NO: 2025321 - DNA, 25 bp, Homo sapien
gttcctctctagtgtttatgaaaac

SEQ ID NO: 2025322 - DNA, 25 bp, Homo sapien
aaaatagtagcatttgtctgtgaag

SEQ ID NO: 2025323 - DNA, 25 bp, Homo sapien
gaaaacaagatgtgaagacttgtct

SEQ ID NO: 2025324 - DNA, 25 bp, Homo sapien
gaagttcttccagtgaggcgggcag

SEQ ID NO: 2025325 - DNA, 25 bp, Homo sapien
caaaactgggctcacggatcaacaa

SEQ ID NO: 2025326 - DNA, 25 bp, Homo sapien
caaaactgtggtcccgctgggagca

SEQ ID NO: 2025327 - DNA, 25 bp, Homo sapien
tcgcagcaagcatgacccaaagtgg

SEQ ID NO: 2025328 - DNA, 25 bp, Homo sapien
tgagcactagagaacccaatggcgt

SEQ ID NO: 2025329 - DNA, 25 bp, Homo sapien
ggctggagggagggcttggacttac

SEQ ID NO: 2025330 - DNA, 25 bp, Homo sapien
tcaagcacatgcactgccctgtccc

SEQ ID NO: 2025331 - DNA, 25 bp, Homo sapien
ccctgtccccctggctggagggagg

SEQ ID NO: 2025332 - DNA, 25 bp, Homo sapien
caagcacatgcactgccctgtcccc

SEQ ID NO: 2025333 - DNA, 25 bp, Homo sapien
accaccgctcctgatgggccaggag

SEQ ID NO: 2025334 - DNA, 25 bp, Homo sapien
gaccagctggtccaattgggcctct

SEQ ID NO: 2025335 - DNA, 25 bp, Homo sapien
tgtcccttgttgccagttgggccag

SEQ ID NO: 2025336 - DNA, 25 bp, Homo sapien
gccctgggagcctttagatcctttg

SEQ ID NO: 2025337 - DNA, 25 bp, Homo sapien
gggctctgggtccttatttgcaccc

SEQ ID NO: 2025338 - DNA, 25 bp, Homo sapien
tccttatttgcacccgctagtgaag

SEQ ID NO: 2025339 - DNA, 25 bp, Homo sapien
tctgggtccttatttgcacccgcta

SEQ ID NO: 2025340 - DNA, 25 bp, Homo sapien
ttgcacccgctagtgaagggtccat

SEQ ID NO: 2025341 - DNA, 25 bp, Homo sapien
aaagctgtcacaagctccagagatg

SEQ ID NO: 2025342 - DNA, 25 bp, Homo sapien
tacccacgcggctggtaaagctgtc

SEQ ID NO: 2025343 - DNA, 25 bp, Homo sapien
gaatatgaacaataccagagctcca

SEQ ID NO: 2025344 - DNA, 25 bp, Homo sapien
tctgaaatgccaggatacccacgcg

SEQ ID NO: 2025345 - DNA, 25 bp, Homo sapien
tcaagtgcgagtcaacaggaatttt

SEQ ID NO: 2025346 - DNA, 25 bp, Homo sapien
taagccaacgttaatccatcctgct

SEQ ID NO: 2025347 - DNA, 25 bp, Homo sapien
caacaggaattttccggaaagcatc

SEQ ID NO: 2025348 - DNA, 25 bp, Homo sapien
cagccccacataagccaacgttaat

SEQ ID NO: 2025349 - DNA, 25 bp, Homo sapien
tcttgattcgctggatagcctggct

SEQ ID NO: 2025350 - DNA, 25 bp, Homo sapien
gacatagccattatacgcctggagg

SEQ ID NO: 2025351 - DNA, 25 bp, Homo sapien
cagaccgctgcagattcgtgatgag

SEQ ID NO: 2025352 - DNA, 25 bp, Homo sapien
taatctcacgaagttgctgacggag

SEQ ID NO: 2025353 - DNA, 25 bp, Homo sapien
tattggtggtatggagaagtgttca

SEQ ID NO: 2025354 - DNA, 25 bp, Homo sapien
gaacacacttaatcggtatgcactg

SEQ ID NO: 2025355 - DNA, 25 bp, Homo sapien
ttcaggcaaggccaaagatcccgaa

SEQ ID NO: 2025356 - DNA, 25 bp, Homo sapien
aaaattggcagtataagcggacagc

SEQ ID NO: 2025357 - DNA, 25 bp, Homo sapien
tgtacatatctattaaaactgggtc

SEQ ID NO: 2025358 - DNA, 25 bp, Homo sapien
atgtacatatctattaaaactgggt

SEQ ID NO: 2025359 - DNA, 25 bp, Homo sapien
catcataggtttggcgagatgtttc

SEQ ID NO: 2025360 - DNA, 25 bp, Homo sapien
cgagatgtttccatgccacctgtga

SEQ ID NO: 2025361 - DNA, 25 bp, Homo sapien
ctgtgagcttgtcatcataggtttg

SEQ ID NO: 2025362 - DNA, 25 bp, Homo sapien
taggtttggcgagatgtttccatgc

SEQ ID NO: 2025363 - DNA, 25 bp, Homo sapien
tttctgcctcttacaacattgggtc

SEQ ID NO: 2025364 - DNA, 25 bp, Homo sapien
ggtcactagaatcttaccagcaaga

SEQ ID NO: 2025365 - DNA, 25 bp, Homo sapien
gacatcatctcgtttccccttgtac

SEQ ID NO: 2025366 - DNA, 25 bp, Homo sapien
tctctagacttcaaagggggaatgt

SEQ ID NO: 2025367 - DNA, 25 bp, Homo sapien
tttgccattctaactgctagtgctg

SEQ ID NO: 2025368 - DNA, 25 bp, Homo sapien
ctaaaagtcccgactgtactgagga

SEQ ID NO: 2025369 - DNA, 25 bp, Homo sapien
taactgctagtgctgtgtaatgtgg

SEQ ID NO: 2025370 - DNA, 25 bp, Homo sapien
agtcccgactgtactgaggatgttt

SEQ ID NO: 2025371 - DNA, 25 bp, Homo sapien
gattgttagcaaggcacacaaaatg

SEQ ID NO: 2025372 - DNA, 25 bp, Homo sapien
gtgattgttagcaaggcacacaaaa

SEQ ID NO: 2025373 - DNA, 25 bp, Homo sapien
gcaaggcacacaaaatgtataataa

SEQ ID NO: 2025374 - DNA, 25 bp, Homo sapien
tgttagcaaggcacacaaaatgtat

SEQ ID NO: 2025375 - DNA, 25 bp, Homo sapien
ctttattaaaataccactgtcctca

SEQ ID NO: 2025376 - DNA, 25 bp, Homo sapien
taaaataccactgtcctcatgacat

SEQ ID NO: 2025377 - DNA, 25 bp, Homo sapien
attaaaataccactgtcctcatgac

SEQ ID NO: 2025378 - DNA, 25 bp, Homo sapien
aataccactgtcctcatgacatttg

SEQ ID NO: 2025379 - DNA, 25 bp, Homo sapien
cattaagagatccagcgtgccaaag

SEQ ID NO: 2025380 - DNA, 25 bp, Homo sapien
cctggcgccaatagcacatttgaaa

SEQ ID NO: 2025381 - DNA, 25 bp, Homo sapien
ttgaaattcagaggcctacaggcag

SEQ ID NO: 2025382 - DNA, 25 bp, Homo sapien
tgaagggtgcatgcctttccgctgc

SEQ ID NO: 2025383 - DNA, 25 bp, Homo sapien
aaatttacaatctctgtggcgtgat

SEQ ID NO: 2025384 - DNA, 25 bp, Homo sapien
caccccacggatacaggctgactta

SEQ ID NO: 2025385 - DNA, 25 bp, Homo sapien
gctatgtgccctcttactagtgata

SEQ ID NO: 2025386 - DNA, 25 bp, Homo sapien
taggttcctagtgaaactgagaatg

SEQ ID NO: 2025387 - DNA, 25 bp, Homo sapien
aaacccagatcgactccattccgtg

SEQ ID NO: 2025388 - DNA, 25 bp, Homo sapien
atcttacagattccaagatggaggc

SEQ ID NO: 2025389 - DNA, 25 bp, Homo sapien
tccacattagtgactggcagagaga

SEQ ID NO: 2025390 - DNA, 25 bp, Homo sapien
cagagtaatttacctgaagttccac

SEQ ID NO: 2025391 - DNA, 25 bp, Homo sapien
tgtgctgtgactcctgtaaaaccca

SEQ ID NO: 2025392 - DNA, 25 bp, Homo sapien
tacactgcatggatctaacatggcg

SEQ ID NO: 2025393 - DNA, 25 bp, Homo sapien
gaaggatagatgtcagggttcccct

SEQ ID NO: 2025394 - DNA, 25 bp, Homo sapien
cagtgtcaggcacggtaacaggcac

SEQ ID NO: 2025395 - DNA, 25 bp, Homo sapien
tccaagtatgagacccacagacaac

SEQ ID NO: 2025396 - DNA, 25 bp, Homo sapien
gagacaaaagctgatgagcggccca

SEQ ID NO: 2025397 - DNA, 25 bp, Homo sapien
tgctggcagctttgaagacctattt

SEQ ID NO: 2025398 - DNA, 25 bp, Homo sapien
caatgcttattcttcggcctccaag

SEQ ID NO: 2025399 - DNA, 25 bp, Homo sapien
tgttacagaaagaacgcagaccgct

SEQ ID NO: 2025400 - DNA, 25 bp, Homo sapien
tgaagaggccaggtgtacagctgac

SEQ ID NO: 2025401 - DNA, 25 bp, Homo sapien
tctgctgaaggtagggtgcccacat

SEQ ID NO: 2025402 - DNA, 25 bp, Homo sapien
tgggcacacatagcttctgaagagg

SEQ ID NO: 2025403 - DNA, 25 bp, Homo sapien
gccattggctcgcactgagggacat

SEQ ID NO: 2025404 - DNA, 25 bp, Homo sapien
tagtgcggggatattgttgaagata

SEQ ID NO: 2025405 - DNA, 25 bp, Homo sapien
ctgagggacattacaagaaacagtc

SEQ ID NO: 2025406 - DNA, 25 bp, Homo sapien
gtcttataaaaattgctagtgcggg

SEQ ID NO: 2025407 - DNA, 25 bp, Homo sapien
tatattgattctaagtgtccatgga

SEQ ID NO: 2025408 - DNA, 25 bp, Homo sapien
ttatatattgattctaagtgtccat

SEQ ID NO: 2025409 - DNA, 25 bp, Homo sapien
tgtttatatattgattctaagtgtc

SEQ ID NO: 2025410 - DNA, 25 bp, Homo sapien
tgtgcttcttggagatgtttatata

SEQ ID NO: 2025411 - DNA, 25 bp, Homo sapien
gtgttttcaatcacccaagttatcc

SEQ ID NO: 2025412 - DNA, 25 bp, Homo sapien
tgtgttttcaatcacccaagttatc

SEQ ID NO: 2025413 - DNA, 25 bp, Homo sapien
tgttttcaatcacccaagttatcct

SEQ ID NO: 2025414 - DNA, 25 bp, Homo sapien
ttcaatcacccaagttatccttttg

SEQ ID NO: 2025415 - DNA, 25 bp, Homo sapien
aaaagggaggtgctacagatgagca

SEQ ID NO: 2025416 - DNA, 25 bp, Homo sapien
taaggttaactcagtcagaatgtgc

SEQ ID NO: 2025417 - DNA, 25 bp, Homo sapien
tctctctcatcctagaagacagtct

SEQ ID NO: 2025418 - DNA, 25 bp, Homo sapien
ctaaaccgagtttccagaacagcat

SEQ ID NO: 2025419 - DNA, 25 bp, Homo sapien
agctgcgagcccgtcgccatccagc

SEQ ID NO: 2025420 - DNA, 25 bp, Homo sapien
gagcccgtcgccatccagccctctg

SEQ ID NO: 2025421 - DNA, 25 bp, Homo sapien
cccccacattgctatgaaattccag

SEQ ID NO: 2025422 - DNA, 25 bp, Homo sapien
gggaaatgctatcatagcttttgcc

SEQ ID NO: 2025423 - DNA, 25 bp, Homo sapien
gctttccccgacagtgatggaaggg

SEQ ID NO: 2025424 - DNA, 25 bp, Homo sapien
ttctttgtatacctcccatggctgg

SEQ ID NO: 2025425 - DNA, 25 bp, Homo sapien
gccaagtttcgaggccaaggtccag

SEQ ID NO: 2025426 - DNA, 25 bp, Homo sapien
acacacaattacatgagctaggagc

SEQ ID NO: 2025427 - DNA, 25 bp, Homo sapien
ccaggaggttgaggaccttccaaag

SEQ ID NO: 2025428 - DNA, 25 bp, Homo sapien
aaaaggcatgtatttcattcccatt

SEQ ID NO: 2025429 - DNA, 25 bp, Homo sapien
agtccagttgatcttactgtacaat

SEQ ID NO: 2025430 - DNA, 25 bp, Homo sapien
catatttataactgagcacccctaa

SEQ ID NO: 2025431 - DNA, 25 bp, Homo sapien
tgcttccaagtgttggctctggcag

SEQ ID NO: 2025432 - DNA, 25 bp, Homo sapien
cttccaagtgttggctctggcagga

SEQ ID NO: 2025433 - DNA, 25 bp, Homo sapien
gaagcatcttcctccgcctcacaac

SEQ ID NO: 2025434 - DNA, 25 bp, Homo sapien
gtgtgcttccaagtgttggctctgg

SEQ ID NO: 2025435 - DNA, 25 bp, Homo sapien
aggatgacttctgcgttaccgacga

SEQ ID NO: 2025436 - DNA, 25 bp, Homo sapien
tccgcttaggaaggtcacaaaccca

SEQ ID NO: 2025437 - DNA, 25 bp, Homo sapien
catgtgccgtgagcaacttgtactc

SEQ ID NO: 2025438 - DNA, 25 bp, Homo sapien
gatgagacgctttacacaaggaggg

SEQ ID NO: 2025439 - DNA, 25 bp, Homo sapien
cgatgtaacctgtaagatttccaga

SEQ ID NO: 2025440 - DNA, 25 bp, Homo sapien
tttccagaaggcgtattttcttctc

SEQ ID NO: 2025441 - DNA, 25 bp, Homo sapien
tgttttgagaataaacgatgtaacc

SEQ ID NO: 2025442 - DNA, 25 bp, Homo sapien
cagaaggcgtattttcttctccaac

SEQ ID NO: 2025443 - DNA, 25 bp, Homo sapien
ctgtggaccgcaagcagtggcagcc

SEQ ID NO: 2025444 - DNA, 25 bp, Homo sapien
tccgggtggtaaggaagagccaggc

SEQ ID NO: 2025445 - DNA, 25 bp, Homo sapien
gccccttggctgctcgctattttga

SEQ ID NO: 2025446 - DNA, 25 bp, Homo sapien
gagagattgttcacgaggagcacag

SEQ ID NO: 2025447 - DNA, 25 bp, Homo sapien
gagccgtgtaaatgggaacggagcc

SEQ ID NO: 2025448 - DNA, 25 bp, Homo sapien
cctgactgggattatggacgcgagc

SEQ ID NO: 2025449 - DNA, 25 bp, Homo sapien
taagccaacagtcctcggcctgctg

SEQ ID NO: 2025450 - DNA, 25 bp, Homo sapien
ctgtgaacgaacaggcctgactggg

SEQ ID NO: 2025451 - DNA, 25 bp, Homo sapien
tgcacctgaacgatccaggttggcc

SEQ ID NO: 2025452 - DNA, 25 bp, Homo sapien
agaggagaagtgcacctgaacgatc

SEQ ID NO: 2025453 - DNA, 25 bp, Homo sapien
ccagacaactgagaacacacgtggg

SEQ ID NO: 2025454 - DNA, 25 bp, Homo sapien
agacaactgagaacacacgtgggtg

SEQ ID NO: 2025455 - DNA, 25 bp, Homo sapien
caatgtcaatctgccataagtctgg

SEQ ID NO: 2025456 - DNA, 25 bp, Homo sapien
tgtccagtcaatgtcaatctgccat

SEQ ID NO: 2025457 - DNA, 25 bp, Homo sapien
aatctgccataagtctggaaggtca

SEQ ID NO: 2025458 - DNA, 25 bp, Homo sapien
agtctggaaggtcatttgctgtgtc

SEQ ID NO: 2025459 - DNA, 25 bp, Homo sapien
gcaatgcctgtgtctaacccttctg

SEQ ID NO: 2025460 - DNA, 25 bp, Homo sapien
aatgcctgtgtctaacccttctgca

SEQ ID NO: 2025461 - DNA, 25 bp, Homo sapien
cgcaatgcctgtgtctaacccttct

SEQ ID NO: 2025462 - DNA, 25 bp, Homo sapien
atgcctgtgtctaacccttctgcac

SEQ ID NO: 2025463 - DNA, 25 bp, Homo sapien
agcttcaatggtggaagcagagcca

SEQ ID NO: 2025464 - DNA, 25 bp, Homo sapien
gcttcaatggtggaagcagagccag

SEQ ID NO: 2025465 - DNA, 25 bp, Homo sapien
gaagcttcaatggtggaagcagagc

SEQ ID NO: 2025466 - DNA, 25 bp, Homo sapien
cagaagcttcaatggtggaagcaga

SEQ ID NO: 2025467 - DNA, 25 bp, Homo sapien
tagaggcccgcactgctgctgcgct

SEQ ID NO: 2025468 - DNA, 25 bp, Homo sapien
cattgaagctttgccagtactgaac

SEQ ID NO: 2025469 - DNA, 25 bp, Homo sapien
gaaaccattgaagctttgccagtac

SEQ ID NO: 2025470 - DNA, 25 bp, Homo sapien
ttcacttgcacagacggaaagaggt

SEQ ID NO: 2025471 - DNA, 25 bp, Homo sapien
ggaaagggacttcatacaagttctc

SEQ ID NO: 2025472 - DNA, 25 bp, Homo sapien
gcttactcagtcgttccccacagga

SEQ ID NO: 2025473 - DNA, 25 bp, Homo sapien
ccatcagggaatgggtcagctttct

SEQ ID NO: 2025474 - DNA, 25 bp, Homo sapien
tcactgtgcttactcagtcgttccc

SEQ ID NO: 2025475 - DNA, 25 bp, Homo sapien
aatgatggaaattcctggcattccc

SEQ ID NO: 2025476 - DNA, 25 bp, Homo sapien
cagaggagcaaagaagtgacaaaac

SEQ ID NO: 2025477 - DNA, 25 bp, Homo sapien
tctcctctttagacacctgcccaga

SEQ ID NO: 2025478 - DNA, 25 bp, Homo sapien
cattgacgcttttgtcagaggagca

SEQ ID NO: 2025479 - DNA, 25 bp, Homo sapien
tcaaagtctcccctcattgacgctt

SEQ ID NO: 2025480 - DNA, 25 bp, Homo sapien
gccacctatattccttgaccagaga

SEQ ID NO: 2025481 - DNA, 25 bp, Homo sapien
tgcggctgctgtaaaaggttaccac

SEQ ID NO: 2025482 - DNA, 25 bp, Homo sapien
taccacgaacgtgctggcttaaaca

SEQ ID NO: 2025483 - DNA, 25 bp, Homo sapien
ctttgaaactctgcaatgaccactg

SEQ ID NO: 2025484 - DNA, 25 bp, Homo sapien
gagccacaaacacccatgtgcatga

SEQ ID NO: 2025485 - DNA, 25 bp, Homo sapien
tttccaaccaaaattggacctcaga

SEQ ID NO: 2025486 - DNA, 25 bp, Homo sapien
tccaaccaaaattggacctcagagc

SEQ ID NO: 2025487 - DNA, 25 bp, Homo sapien
ccaaccaaaattggacctcagagcc

SEQ ID NO: 2025488 - DNA, 25 bp, Homo sapien
ggaacacagctttgttaggactcac

SEQ ID NO: 2025489 - DNA, 25 bp, Homo sapien
aggaacacagctttgttaggactca

SEQ ID NO: 2025490 - DNA, 25 bp, Homo sapien
aaccgcttgtaaccgaaggattgca

SEQ ID NO: 2025491 - DNA, 25 bp, Homo sapien
tgtaaccgaaggattgcacctcctc

SEQ ID NO: 2025492 - DNA, 25 bp, Homo sapien
cgcttgtaaccgaaggattgcacct

SEQ ID NO: 2025493 - DNA, 25 bp, Homo sapien
caaaccgcttgtaaccgaaggattg

SEQ ID NO: 2025494 - DNA, 25 bp, Homo sapien
gagaagaagagacacgatgttaatc

SEQ ID NO: 2025495 - DNA, 25 bp, Homo sapien
ctgtgagagaagaagagacacgatg

SEQ ID NO: 2025496 - DNA, 25 bp, Homo sapien
tgagagaagaagagacacgatgtta

SEQ ID NO: 2025497 - DNA, 25 bp, Homo sapien
tgtgagagaagaagagacacgatgt

SEQ ID NO: 2025498 - DNA, 25 bp, Homo sapien
tgcctctcaggagccgacataactc

SEQ ID NO: 2025499 - DNA, 25 bp, Homo sapien
tgggaccaaccgatggtttcgcagt

SEQ ID NO: 2025500 - DNA, 25 bp, Homo sapien
gacataactcctgcagtgacaacca

SEQ ID NO: 2025501 - DNA, 25 bp, Homo sapien
tccttccgatgggtaactgggacca

SEQ ID NO: 2025502 - DNA, 25 bp, Homo sapien
atgacagagactgccaggctgtggc

SEQ ID NO: 2025503 - DNA, 25 bp, Homo sapien
tgtggcttcagaggtgagtaagtca

SEQ ID NO: 2025504 - DNA, 25 bp, Homo sapien
ggctgtggcttcagaggtgagtaag

SEQ ID NO: 2025505 - DNA, 25 bp, Homo sapien
catgacagagactgccaggctgtgg

SEQ ID NO: 2025506 - DNA, 25 bp, Homo sapien
agcagaatccactcacacttaggca

SEQ ID NO: 2025507 - DNA, 25 bp, Homo sapien
cctagcggagttgatgagacatgaa

SEQ ID NO: 2025508 - DNA, 25 bp, Homo sapien
atcagtggtacccagacatccgtgc

SEQ ID NO: 2025509 - DNA, 25 bp, Homo sapien
gaatatcagcatcagtggtacccag

SEQ ID NO: 2025510 - DNA, 25 bp, Homo sapien
tacagtctgttcatgaaaatggcac

SEQ ID NO: 2025511 - DNA, 25 bp, Homo sapien
cggtggttacagtctgttcatgaaa

SEQ ID NO: 2025512 - DNA, 25 bp, Homo sapien
cagtctgttcatgaaaatggcactt

SEQ ID NO: 2025513 - DNA, 25 bp, Homo sapien
ggttacagtctgttcatgaaaatgg

SEQ ID NO: 2025514 - DNA, 25 bp, Homo sapien
gaagtcgtcccgagcggctgctcac

SEQ ID NO: 2025515 - DNA, 25 bp, Homo sapien
gagcgccgcgcagccgaggaagtcg

SEQ ID NO: 2025516 - DNA, 25 bp, Homo sapien
agctccgcgcgagcgccgcgcagcc

SEQ ID NO: 2025517 - DNA, 25 bp, Homo sapien
tcaccgcacgcccatggtagccgcg

SEQ ID NO: 2025518 - DNA, 25 bp, Homo sapien
tgcctcggggctgccgcgcgcgccg

SEQ ID NO: 2025519 - DNA, 25 bp, Homo sapien
gctgcctcggggctgccgcgcgcgc

SEQ ID NO: 2025520 - DNA, 25 bp, Homo sapien
ctgctgcctcggggctgccgcgcgc

SEQ ID NO: 2025521 - DNA, 25 bp, Homo sapien
ccgcgctctgctgcctcggggctgc

SEQ ID NO: 2025522 - DNA, 25 bp, Homo sapien
caggcctatttggagcgacgtgaaa

SEQ ID NO: 2025523 - DNA, 25 bp, Homo sapien
gagcgacgtgaaatatgccttgctg

SEQ ID NO: 2025524 - DNA, 25 bp, Homo sapien
tcacaggcctatttggagcgacgtg

SEQ ID NO: 2025525 - DNA, 25 bp, Homo sapien
tatttggagcgacgtgaaatatgcc

SEQ ID NO: 2025526 - DNA, 25 bp, Homo sapien
ttccattgatgcaggagtaagggtc

SEQ ID NO: 2025527 - DNA, 25 bp, Homo sapien
ttgcctagggttcttttagtcctca

SEQ ID NO: 2025528 - DNA, 25 bp, Homo sapien
taagggtcagcttggctcgcttagt

SEQ ID NO: 2025529 - DNA, 25 bp, Homo sapien
gcaggtggttgaagcttgaagcttt

SEQ ID NO: 2025530 - DNA, 25 bp, Homo sapien
tcaggatagagcgagcagttgcagt

SEQ ID NO: 2025531 - DNA, 25 bp, Homo sapien
cctgaaactcaggatagagcgagca

SEQ ID NO: 2025532 - DNA, 25 bp, Homo sapien
catcaatctcatcctgaaactcagg

SEQ ID NO: 2025533 - DNA, 25 bp, Homo sapien
aactcaggatagagcgagcagttgc

SEQ ID NO: 2025534 - DNA, 25 bp, Homo sapien
tgggcatgaggactgctgttttgta

SEQ ID NO: 2025535 - DNA, 25 bp, Homo sapien
gcatgaggactgctgttttgtagac

SEQ ID NO: 2025536 - DNA, 25 bp, Homo sapien
caaatgggcatgaggactgctgttt

SEQ ID NO: 2025537 - DNA, 25 bp, Homo sapien
gactcaaatgggcatgaggactgct

SEQ ID NO: 2025538 - DNA, 25 bp, Homo sapien
ctgtgttcattagcaaagcaatagt

SEQ ID NO: 2025539 - DNA, 25 bp, Homo sapien
ttgggtaagagcctctcctcaacat

SEQ ID NO: 2025540 - DNA, 25 bp, Homo sapien
cctgcagatgaaggcttgggtaaga

SEQ ID NO: 2025541 - DNA, 25 bp, Homo sapien
tgctccactttgtgcctgcagatga

SEQ ID NO: 2025542 - DNA, 25 bp, Homo sapien
cctgctccactttgtgcctgcagat

SEQ ID NO: 2025543 - DNA, 25 bp, Homo sapien
tctccgggttccttgatggtgacct

SEQ ID NO: 2025544 - DNA, 25 bp, Homo sapien
catccagttggatattttgcccggg

SEQ ID NO: 2025545 - DNA, 25 bp, Homo sapien
tggagttcctcagtatgctggacag

SEQ ID NO: 2025546 - DNA, 25 bp, Homo sapien
catgggtgacaatccagcgacaaag

SEQ ID NO: 2025547 - DNA, 25 bp, Homo sapien
tttcagctctgttaggaggtactca

SEQ ID NO: 2025548 - DNA, 25 bp, Homo sapien
aacacggccggctctttccaccctg

SEQ ID NO: 2025549 - DNA, 25 bp, Homo sapien
agcctcttctagaggaacccgaaga

SEQ ID NO: 2025550 - DNA, 25 bp, Homo sapien
tagaggaacccgaagatgagttttc

SEQ ID NO: 2025551 - DNA, 25 bp, Homo sapien
tctcttccaatcacaattgtggagg

SEQ ID NO: 2025552 - DNA, 25 bp, Homo sapien
gaaattgttctcttccaatcacaat

SEQ ID NO: 2025553 - DNA, 25 bp, Homo sapien
tccaatcacaattgtggaggaactc

SEQ ID NO: 2025554 - DNA, 25 bp, Homo sapien
ttgttctcttccaatcacaattgtg

SEQ ID NO: 2025555 - DNA, 25 bp, Homo sapien
caaaaagcacatgtttgctatttcg

SEQ ID NO: 2025556 - DNA, 25 bp, Homo sapien
ggtctcaaaaagcacatgtttgcta

SEQ ID NO: 2025557 - DNA, 25 bp, Homo sapien
tggtctcaaaaagcacatgtttgct

SEQ ID NO: 2025558 - DNA, 25 bp, Homo sapien
aagcacatgtttgctatttcgacga

SEQ ID NO: 2025559 - DNA, 25 bp, Homo sapien
ctccaccagaggcaaagtcacacca

SEQ ID NO: 2025560 - DNA, 25 bp, Homo sapien
tccaccagaggcaaagtcacaccaa

SEQ ID NO: 2025561 - DNA, 25 bp, Homo sapien
accagaggcaaagtcacaccaaccc

SEQ ID NO: 2025562 - DNA, 25 bp, Homo sapien
ccaccagaggcaaagtcacaccaac

SEQ ID NO: 2025563 - DNA, 25 bp, Homo sapien
tggcgagttgggcagtttcatccac

SEQ ID NO: 2025564 - DNA, 25 bp, Homo sapien
gtgctgattgttgtttctcgggatg

SEQ ID NO: 2025565 - DNA, 25 bp, Homo sapien
acctatggataaactggatggtgct

SEQ ID NO: 2025566 - DNA, 25 bp, Homo sapien
tgattgttgtttctcgggatggcga

SEQ ID NO: 2025567 - DNA, 25 bp, Homo sapien
tctcagcctgtttccatcaaagcaa

SEQ ID NO: 2025568 - DNA, 25 bp, Homo sapien
ggagtttatgtcaacatagatcttg

SEQ ID NO: 2025569 - DNA, 25 bp, Homo sapien
tccatcaaagcaatgcttaattggg

SEQ ID NO: 2025570 - DNA, 25 bp, Homo sapien
gggtgggacaactgccgaattgcaa

SEQ ID NO: 2025571 - DNA, 25 bp, Homo sapien
gccaagcagaataaaccctggtagt

SEQ ID NO: 2025572 - DNA, 25 bp, Homo sapien
cagaataaaccctggtagtcaatgg

SEQ ID NO: 2025573 - DNA, 25 bp, Homo sapien
caagcagaataaaccctggtagtca

SEQ ID NO: 2025574 - DNA, 25 bp, Homo sapien
gcagaataaaccctggtagtcaatg

SEQ ID NO: 2025575 - DNA, 25 bp, Homo sapien
cccatttctccggagagccagagaa

SEQ ID NO: 2025576 - DNA, 25 bp, Homo sapien
tgacaggtgagaacatcctccgggc

SEQ ID NO: 2025577 - DNA, 25 bp, Homo sapien
aagtccaaggccgagctccgcagac

SEQ ID NO: 2025578 - DNA, 25 bp, Homo sapien
ggcagcactcaagcgcatcttagga

SEQ ID NO: 2025579 - DNA, 25 bp, Homo sapien
caaaaagtcttctattgttctcaac

SEQ ID NO: 2025580 - DNA, 25 bp, Homo sapien
tgcaaaaagtcttctattgttctca

SEQ ID NO: 2025581 - DNA, 25 bp, Homo sapien
aaaagtcttctattgttctcaacca

SEQ ID NO: 2025582 - DNA, 25 bp, Homo sapien
aaagtcttctattgttctcaaccat

SEQ ID NO: 2025583 - DNA, 25 bp, Homo sapien
ttttccaagatgtgcacagcctgac

SEQ ID NO: 2025584 - DNA, 25 bp, Homo sapien
tcttggcatgacactaccaccacag

SEQ ID NO: 2025585 - DNA, 25 bp, Homo sapien
cagatggtatttagcgcctctggct

SEQ ID NO: 2025586 - DNA, 25 bp, Homo sapien
tatgcaagtcctcccctaagggtgg

SEQ ID NO: 2025587 - DNA, 25 bp, Homo sapien
cgttcaaatcggagttctttcttca

SEQ ID NO: 2025588 - DNA, 25 bp, Homo sapien
ccagcttccgttcaaatcggagttc

SEQ ID NO: 2025589 - DNA, 25 bp, Homo sapien
cagcccatcgtccacaacgtggaag

SEQ ID NO: 2025590 - DNA, 25 bp, Homo sapien
ccatcgtccacaacgtggaagtcca

SEQ ID NO: 2025591 - DNA, 25 bp, Homo sapien
gacatttctttgcaaagtcccggaa

SEQ ID NO: 2025592 - DNA, 25 bp, Homo sapien
gattccgaatttatacgctactgac

SEQ ID NO: 2025593 - DNA, 25 bp, Homo sapien
tatatctggcatgctcagaaaagct

SEQ ID NO: 2025594 - DNA, 25 bp, Homo sapien
cccatcacatgaggttaagtgtaga

SEQ ID NO: 2025595 - DNA, 25 bp, Homo sapien
gaagcaaggtgtccctgtctcagcc

SEQ ID NO: 2025596 - DNA, 25 bp, Homo sapien
catatgccacagtataaagttcagt

SEQ ID NO: 2025597 - DNA, 25 bp, Homo sapien
cagctatagcttgaattacatattt

SEQ ID NO: 2025598 - DNA, 25 bp, Homo sapien
caaacattacccttaaatcaaagag

SEQ ID NO: 2025599 - DNA, 25 bp, Homo sapien
attatagacattgaatagcttgcag

SEQ ID NO: 2025600 - DNA, 25 bp, Homo sapien
aaagctgtgtgtcagcgtcaccgga

SEQ ID NO: 2025601 - DNA, 25 bp, Homo sapien
tcatcaggaaaatgtggaagcccct

SEQ ID NO: 2025602 - DNA, 25 bp, Homo sapien
caccggactggttgatgttgcagcc

SEQ ID NO: 2025603 - DNA, 25 bp, Homo sapien
tctgggagtccgttaagcaactgga

SEQ ID NO: 2025604 - DNA, 25 bp, Homo sapien
ggtattctattacccatcctggact

SEQ ID NO: 2025605 - DNA, 25 bp, Homo sapien
gaaaagaccatcttagaggctcaac

SEQ ID NO: 2025606 - DNA, 25 bp, Homo sapien
tccaaaagccaacagcaggtattct

SEQ ID NO: 2025607 - DNA, 25 bp, Homo sapien
gaggctcaacaacccaggaaagctg

SEQ ID NO: 2025608 - DNA, 25 bp, Homo sapien
aagatctaatgcatcctatatccag

SEQ ID NO: 2025609 - DNA, 25 bp, Homo sapien
taagaagatctaatgcatcctatat

SEQ ID NO: 2025610 - DNA, 25 bp, Homo sapien
tatctcttcatctgggacctggaaa

SEQ ID NO: 2025611 - DNA, 25 bp, Homo sapien
tccagtaagtagaattatctcttca

SEQ ID NO: 2025612 - DNA, 25 bp, Homo sapien
ggataatgcaataaacacagttgca

SEQ ID NO: 2025613 - DNA, 25 bp, Homo sapien
tacttatgttgaatggcttagctat

SEQ ID NO: 2025614 - DNA, 25 bp, Homo sapien
cacagttgcaggaaagtatgttagc

SEQ ID NO: 2025615 - DNA, 25 bp, Homo sapien
catttcatggtacattagtagttct

SEQ ID NO: 2025616 - DNA, 25 bp, Homo sapien
aaatacacatggcattaatttacca

SEQ ID NO: 2025617 - DNA, 25 bp, Homo sapien
ctctaggtactgcatgtaggtggaa

SEQ ID NO: 2025618 - DNA, 25 bp, Homo sapien
tctgtactcgttaagcactcacttc

SEQ ID NO: 2025619 - DNA, 25 bp, Homo sapien
gcaaccacgactgtactttctatga

SEQ ID NO: 2025620 - DNA, 25 bp, Homo sapien
gcagaggagcctagtcttgagatgt

SEQ ID NO: 2025621 - DNA, 25 bp, Homo sapien
aactactttgaaaagaaccattctg

SEQ ID NO: 2025622 - DNA, 25 bp, Homo sapien
tagtcttgagatgtgatttagctgg

SEQ ID NO: 2025623 - DNA, 25 bp, Homo sapien
ttactatcaagccaagatactcaag

SEQ ID NO: 2025624 - DNA, 25 bp, Homo sapien
catatggttggctttccacagtcct

SEQ ID NO: 2025625 - DNA, 25 bp, Homo sapien
aatgccaacatatggttggctttcc

SEQ ID NO: 2025626 - DNA, 25 bp, Homo sapien
gggaatgccaacatatggttggctt

SEQ ID NO: 2025627 - DNA, 25 bp, Homo sapien
caacatatggttggctttccacagt

SEQ ID NO: 2025628 - DNA, 25 bp, Homo sapien
agatccaacacatcctccgctgcgg

SEQ ID NO: 2025629 - DNA, 25 bp, Homo sapien
gcagatccaacacatcctccgctgc

SEQ ID NO: 2025630 - DNA, 25 bp, Homo sapien
atccaacacatcctccgctgcggcg

SEQ ID NO: 2025631 - DNA, 25 bp, Homo sapien
gggcagatccaacacatcctccgct

SEQ ID NO: 2025632 - DNA, 25 bp, Homo sapien
tcaggaaggacgaccgcacgggcac

SEQ ID NO: 2025633 - DNA, 25 bp, Homo sapien
ggcaccggcaccctgtcggtattcg

SEQ ID NO: 2025634 - DNA, 25 bp, Homo sapien
cagcctgagaggtgacgccgcgggc

SEQ ID NO: 2025635 - DNA, 25 bp, Homo sapien
catgcaggcgcgctacagcctgaga

SEQ ID NO: 2025636 - DNA, 25 bp, Homo sapien
agggaggggacgcatcgtcctcctc

SEQ ID NO: 2025637 - DNA, 25 bp, Homo sapien
ctaacctcaatcctgcgagggaggg

SEQ ID NO: 2025638 - DNA, 25 bp, Homo sapien
gcgctgcggaccccgtttagtccta

SEQ ID NO: 2025639 - DNA, 25 bp, Homo sapien
tggggagagcgctcgggagctgccg

SEQ ID NO: 2025640 - DNA, 25 bp, Homo sapien
tcccattagggacgtgactggcgcg

SEQ ID NO: 2025641 - DNA, 25 bp, Homo sapien
gactggcgcgggcaacacacacagc

SEQ ID NO: 2025642 - DNA, 25 bp, Homo sapien
cagccgggaggtaagccgcgtccca

SEQ ID NO: 2025643 - DNA, 25 bp, Homo sapien
tcgcagtcgccccagtgatgccgtg

SEQ ID NO: 2025644 - DNA, 25 bp, Homo sapien
gcttgaccgcgcgccggtctcaaag

SEQ ID NO: 2025645 - DNA, 25 bp, Homo sapien
tgggcttgaccgcgcgccggtctca

SEQ ID NO: 2025646 - DNA, 25 bp, Homo sapien
gcctgggcttgaccgcgcgccggtc

SEQ ID NO: 2025647 - DNA, 25 bp, Homo sapien
gaccgcgcgccggtctcaaagtcct

SEQ ID NO: 2025648 - DNA, 25 bp, Homo sapien
ttgccacaatttcagctcctgttat

SEQ ID NO: 2025649 - DNA, 25 bp, Homo sapien
tgattattgccacaatttcagctcc

SEQ ID NO: 2025650 - DNA, 25 bp, Homo sapien
ttttttggttgtgtctctgcccagc

SEQ ID NO: 2025651 - DNA, 25 bp, Homo sapien
tacatttattgatttgtgtatattg

SEQ ID NO: 2025652 - DNA, 25 bp, Homo sapien
taatctccctttcgaggctgagcca

SEQ ID NO: 2025653 - DNA, 25 bp, Homo sapien
tccatactgtgtcatcggcagatag

SEQ ID NO: 2025654 - DNA, 25 bp, Homo sapien
aagttcatcggtgggacaagggaca

SEQ ID NO: 2025655 - DNA, 25 bp, Homo sapien
caagggacaaaatgcccccattgct

SEQ ID NO: 2025656 - DNA, 25 bp, Homo sapien
ccaagtcagtcgtgtgttgagctgc

SEQ ID NO: 2025657 - DNA, 25 bp, Homo sapien
cagtgaccatgagaggactttcctc

SEQ ID NO: 2025658 - DNA, 25 bp, Homo sapien
gaaacatgctgctgaggtgatagaa

SEQ ID NO: 2025659 - DNA, 25 bp, Homo sapien
cagaaatgggagcaaagtacaaggt

SEQ ID NO: 2025660 - DNA, 25 bp, Homo sapien
tattgtaaaattcaactctaccagg

SEQ ID NO: 2025661 - DNA, 25 bp, Homo sapien
gcctagaaactacatgtaagatgtt

SEQ ID NO: 2025662 - DNA, 25 bp, Homo sapien
tctaccagggtgtagagccaggtgt

SEQ ID NO: 2025663 - DNA, 25 bp, Homo sapien
atgaagttccagctcgctgccacct

SEQ ID NO: 2025664 - DNA, 25 bp, Homo sapien
agagtgagaccctgaatatttaaaa

SEQ ID NO: 2025665 - DNA, 25 bp, Homo sapien
caacagagtgagaccctgaatattt

SEQ ID NO: 2025666 - DNA, 25 bp, Homo sapien
cagagtgagaccctgaatatttaaa

SEQ ID NO: 2025667 - DNA, 25 bp, Homo sapien
gtgagaccctgaatatttaaaaaca

SEQ ID NO: 2025668 - DNA, 25 bp, Homo sapien
tacatgattgcgcacatcacgggcc

SEQ ID NO: 2025669 - DNA, 25 bp, Homo sapien
gatggatagtctccctcagctccgt

SEQ ID NO: 2025670 - DNA, 25 bp, Homo sapien
cagaaaccttgcaccgatggatagt

SEQ ID NO: 2025671 - DNA, 25 bp, Homo sapien
cagctgtaccagagatcgggagaca

SEQ ID NO: 2025672 - DNA, 25 bp, Homo sapien
tttctggccctgtggtatacgcact

SEQ ID NO: 2025673 - DNA, 25 bp, Homo sapien
tgtgtaagtaagaaatgaaccagct

SEQ ID NO: 2025674 - DNA, 25 bp, Homo sapien
tcaaaagctatgctgaggttgggta

SEQ ID NO: 2025675 - DNA, 25 bp, Homo sapien
tacaggttgtttgtgatacagcttc

SEQ ID NO: 2025676 - DNA, 25 bp, Homo sapien
tagccccttccaggttagatccagg

SEQ ID NO: 2025677 - DNA, 25 bp, Homo sapien
gataaagatgactgctccaaatgtg

SEQ ID NO: 2025678 - DNA, 25 bp, Homo sapien
tactaagcaccagtaccagagaggg

SEQ ID NO: 2025679 - DNA, 25 bp, Homo sapien
gaaatccctaagttatagcagccaa

SEQ ID NO: 2025680 - DNA, 25 bp, Homo sapien
tgactgtgttcctgtctttaataaa

SEQ ID NO: 2025681 - DNA, 25 bp, Homo sapien
ctttaataaatttgccaagagtggt

SEQ ID NO: 2025682 - DNA, 25 bp, Homo sapien
gccaagagtggttataagaacttac

SEQ ID NO: 2025683 - DNA, 25 bp, Homo sapien
aatttgccaagagtggttataagaa

SEQ ID NO: 2025684 - DNA, 25 bp, Homo sapien
tacggcaaggtatcgacaggatcat

SEQ ID NO: 2025685 - DNA, 25 bp, Homo sapien
gagaacagctggttgcgctccaatc

SEQ ID NO: 2025686 - DNA, 25 bp, Homo sapien
tttagcttcagcgagaacccagacc

SEQ ID NO: 2025687 - DNA, 25 bp, Homo sapien
tgaagggtacaatccgcatccaact

SEQ ID NO: 2025688 - DNA, 25 bp, Homo sapien
gagttaactcactgagggtatctga

SEQ ID NO: 2025689 - DNA, 25 bp, Homo sapien
aatttttaaggatgttgccactggc

SEQ ID NO: 2025690 - DNA, 25 bp, Homo sapien
actgtgccagttctttccataataa

SEQ ID NO: 2025691 - DNA, 25 bp, Homo sapien
gaactaggtcaaaaatctgtccgtg

SEQ ID NO: 2025692 - DNA, 25 bp, Homo sapien
taaagaaggttggtgaatttcacaa

SEQ ID NO: 2025693 - DNA, 25 bp, Homo sapien
gtgttctgcattcgtccacgctttg

SEQ ID NO: 2025694 - DNA, 25 bp, Homo sapien
tctccttaagtaaacatgtgctgta

SEQ ID NO: 2025695 - DNA, 25 bp, Homo sapien
caaatctgagggagctgagtaacac

SEQ ID NO: 2025696 - DNA, 25 bp, Homo sapien
taatctatggactaccattttgccc

SEQ ID NO: 2025697 - DNA, 25 bp, Homo sapien
cacttcggggttaatcagtgaaata

SEQ ID NO: 2025698 - DNA, 25 bp, Homo sapien
cagcatggtgtgacttctctaataa

SEQ ID NO: 2025699 - DNA, 25 bp, Homo sapien
ttcgttgcataccagatacccccgg

SEQ ID NO: 2025700 - DNA, 25 bp, Homo sapien
ttatgacaagtgttaaacagaacaa

SEQ ID NO: 2025701 - DNA, 25 bp, Homo sapien
gaattattccaacaagttatgcaac

SEQ ID NO: 2025702 - DNA, 25 bp, Homo sapien
caaggaattattccaacaagttatg

SEQ ID NO: 2025703 - DNA, 25 bp, Homo sapien
aatttatgacaagtgttaaacagaa

SEQ ID NO: 2025704 - DNA, 25 bp, Homo sapien
tatagctatttttgtaagaacatcc

SEQ ID NO: 2025705 - DNA, 25 bp, Homo sapien
ttaatgtctaggtgccagcccttga

SEQ ID NO: 2025706 - DNA, 25 bp, Homo sapien
cgtgcattgatttgctaaaagaatc

SEQ ID NO: 2025707 - DNA, 25 bp, Homo sapien
ttaaggattaagtaggataacgtgc

SEQ ID NO: 2025708 - DNA, 25 bp, Homo sapien
tgattcctgagggtggtatgacttc

SEQ ID NO: 2025709 - DNA, 25 bp, Homo sapien
ggtggtatgacttctagctgaactc

SEQ ID NO: 2025710 - DNA, 25 bp, Homo sapien
catcttgatcggtaggattttttaa

SEQ ID NO: 2025711 - DNA, 25 bp, Homo sapien
ctagctgaactcatcttgatcggta

SEQ ID NO: 2025712 - DNA, 25 bp, Homo sapien
ggatactggtgtttctttacagatt

SEQ ID NO: 2025713 - DNA, 25 bp, Homo sapien
tggatactggtgtttctttacagat

SEQ ID NO: 2025714 - DNA, 25 bp, Homo sapien
gatactggtgtttctttacagattc

SEQ ID NO: 2025715 - DNA, 25 bp, Homo sapien
ctggatactggtgtttctttacaga

SEQ ID NO: 2025716 - DNA, 25 bp, Homo sapien
caggtggtcaacatactcacacacc

SEQ ID NO: 2025717 - DNA, 25 bp, Homo sapien
aaatgctcatgcaggtggtcaacat

SEQ ID NO: 2025718 - DNA, 25 bp, Homo sapien
aggcatgtaggaagcccgctggatc

SEQ ID NO: 2025719 - DNA, 25 bp, Homo sapien
gatcatcacgggatacttgaaatgc

SEQ ID NO: 2025720 - DNA, 25 bp, Homo sapien
tatcttaggaggcaaaatgaccgtt

SEQ ID NO: 2025721 - DNA, 25 bp, Homo sapien
tgagggaccctactgaaacagaaag

SEQ ID NO: 2025722 - DNA, 25 bp, Homo sapien
taaagtgagtcagctaccagaccct

SEQ ID NO: 2025723 - DNA, 25 bp, Homo sapien
gagttataggacatgccagcggaca

SEQ ID NO: 2025724 - DNA, 25 bp, Homo sapien
tgcagaaactgatatgtagtcaaat

SEQ ID NO: 2025725 - DNA, 25 bp, Homo sapien
ttgcagaaactgatatgtagtcaaa

SEQ ID NO: 2025726 - DNA, 25 bp, Homo sapien
gggaaatgaaggtctggtctgcagc

SEQ ID NO: 2025727 - DNA, 25 bp, Homo sapien
gaaatgaaggtctggtctgcagccg

SEQ ID NO: 2025728 - DNA, 25 bp, Homo sapien
tcaagggaggtgtctgattagtggg

SEQ ID NO: 2025729 - DNA, 25 bp, Homo sapien
ttagtggggaaatgaaggtctggtc

SEQ ID NO: 2025730 - DNA, 25 bp, Homo sapien
aactgcagggccttcgcctgtagga

SEQ ID NO: 2025731 - DNA, 25 bp, Homo sapien
aactttttggccatcagcaatactg

SEQ ID NO: 2025732 - DNA, 25 bp, Homo sapien
gaggttctcattgacactgcccagt

SEQ ID NO: 2025733 - DNA, 25 bp, Homo sapien
cctgtaggagttgcttaaatatcac

SEQ ID NO: 2025734 - DNA, 25 bp, Homo sapien
gcttttatagcgtgggcagggacct

SEQ ID NO: 2025735 - DNA, 25 bp, Homo sapien
caacagtgtgagtcaggtcaaaatc

SEQ ID NO: 2025736 - DNA, 25 bp, Homo sapien
cactggctcgccatttatgagggaa

SEQ ID NO: 2025737 - DNA, 25 bp, Homo sapien
ggaaccacggcagagcagtattgct

SEQ ID NO: 2025738 - DNA, 25 bp, Homo sapien
gctcaaaaagtgaacgcagtcatgt

SEQ ID NO: 2025739 - DNA, 25 bp, Homo sapien
ttcccaactcaaagtacagcaggtg

SEQ ID NO: 2025740 - DNA, 25 bp, Homo sapien
tctagactctgataaaatgacccag

SEQ ID NO: 2025741 - DNA, 25 bp, Homo sapien
tgtgtcctcggtcactggtcagcgt

SEQ ID NO: 2025742 - DNA, 25 bp, Homo sapien
atgccaattcctaatgggaccagtg

SEQ ID NO: 2025743 - DNA, 25 bp, Homo sapien
aatgccaattcctaatgggaccagt

SEQ ID NO: 2025744 - DNA, 25 bp, Homo sapien
tgccaattcctaatgggaccagtgc

SEQ ID NO: 2025745 - DNA, 25 bp, Homo sapien
gctgagaccattgctcacctggtag

SEQ ID NO: 2025746 - DNA, 25 bp, Homo sapien
tgtctttgttgattccaaaatcctc

SEQ ID NO: 2025747 - DNA, 25 bp, Homo sapien
acctggtgaggtactggactctgca

SEQ ID NO: 2025748 - DNA, 25 bp, Homo sapien
caatctgcaggttaggctgagacca

SEQ ID NO: 2025749 - DNA, 25 bp, Homo sapien
tctttcatcggagaagctgcggtgg

SEQ ID NO: 2025750 - DNA, 25 bp, Homo sapien
ctcatgtaagcaaaacctgggaggg

SEQ ID NO: 2025751 - DNA, 25 bp, Homo sapien
gactggctgcatcctctgagtggac

SEQ ID NO: 2025752 - DNA, 25 bp, Homo sapien
cagagatcaggttggtgctaggcca

SEQ ID NO: 2025753 - DNA, 25 bp, Homo sapien
gatgcatcaaggtgtccctcctaga

SEQ ID NO: 2025754 - DNA, 25 bp, Homo sapien
tcctagaactggaaccaagactgct

SEQ ID NO: 2025755 - DNA, 25 bp, Homo sapien
cagagttaaaggtgtaagatcaaca

SEQ ID NO: 2025756 - DNA, 25 bp, Homo sapien
cagtacgacccatgaatttatgtgg

SEQ ID NO: 2025757 - DNA, 25 bp, Homo sapien
acagaaaaataagctgccacagcag

SEQ ID NO: 2025758 - DNA, 25 bp, Homo sapien
gaagaaattttaggatctgtcccca

SEQ ID NO: 2025759 - DNA, 25 bp, Homo sapien
aaatgcaagagggaacaagtgaaga

SEQ ID NO: 2025760 - DNA, 25 bp, Homo sapien
aaggaatgtcaggtctgtaacccct

SEQ ID NO: 2025761 - DNA, 25 bp, Homo sapien
tcaggcacatcccagcgctggttgg

SEQ ID NO: 2025762 - DNA, 25 bp, Homo sapien
ggcgtgccccagaatgtcatcaggg

SEQ ID NO: 2025763 - DNA, 25 bp, Homo sapien
ttggccagcttggacatccactcca

SEQ ID NO: 2025764 - DNA, 25 bp, Homo sapien
ggttggctcctcaatccacaatggc

SEQ ID NO: 2025765 - DNA, 25 bp, Homo sapien
tttaacttatgcaaaaaagcctcca

SEQ ID NO: 2025766 - DNA, 25 bp, Homo sapien
cagcatctggccagcccagaatcaa

SEQ ID NO: 2025767 - DNA, 25 bp, Homo sapien
gtataaatagtgatcctgggtcaag

SEQ ID NO: 2025768 - DNA, 25 bp, Homo sapien
cataagttatttggatacagatgac

SEQ ID NO: 2025769 - DNA, 25 bp, Homo sapien
tcttttccggtccaatcatgtctcg

SEQ ID NO: 2025770 - DNA, 25 bp, Homo sapien
ccaatcatgtctcggatgatttggc

SEQ ID NO: 2025771 - DNA, 25 bp, Homo sapien
atgatttggcatcttcgcatgtcat

SEQ ID NO: 2025772 - DNA, 25 bp, Homo sapien
gatttggcatcttcgcatgtcatcc

SEQ ID NO: 2025773 - DNA, 25 bp, Homo sapien
tgcatttggtttgctagtttagacc

SEQ ID NO: 2025774 - DNA, 25 bp, Homo sapien
ttggtttgctagtttagacctgtac

SEQ ID NO: 2025775 - DNA, 25 bp, Homo sapien
catttggtttgctagtttagacctg

SEQ ID NO: 2025776 - DNA, 25 bp, Homo sapien
aaatgcatttggtttgctagtttag

SEQ ID NO: 2025777 - DNA, 25 bp, Homo sapien
gacttggcaagggcatctggagttt

SEQ ID NO: 2025778 - DNA, 25 bp, Homo sapien
ctggacttggcaagggcatctggag

SEQ ID NO: 2025779 - DNA, 25 bp, Homo sapien
tggacttggcaagggcatctggagt

SEQ ID NO: 2025780 - DNA, 25 bp, Homo sapien
ggacttggcaagggcatctggagtt

SEQ ID NO: 2025781 - DNA, 25 bp, Homo sapien
cacagatatgttttttagtaacctc

SEQ ID NO: 2025782 - DNA, 25 bp, Homo sapien
ctgtcaacaattcacagatatgttt

SEQ ID NO: 2025783 - DNA, 25 bp, Homo sapien
tagtaacctcttgctctttcctcat

SEQ ID NO: 2025784 - DNA, 25 bp, Homo sapien
tttagtaacctcttgctctttcctc

SEQ ID NO: 2025785 - DNA, 25 bp, Homo sapien
atctgccccctcgaacagcagccta

SEQ ID NO: 2025786 - DNA, 25 bp, Homo sapien
tctgccccctcgaacagcagcctac

SEQ ID NO: 2025787 - DNA, 25 bp, Homo sapien
gcatctgccccctcgaacagcagcc

SEQ ID NO: 2025788 - DNA, 25 bp, Homo sapien
tcagaagagtgtgttgctggcctca

SEQ ID NO: 2025789 - DNA, 25 bp, Homo sapien
ctgccctgtgctggtccttctgaga

SEQ ID NO: 2025790 - DNA, 25 bp, Homo sapien
tacatgatccgtgatgctccagaga

SEQ ID NO: 2025791 - DNA, 25 bp, Homo sapien
cagcttgcagagtgccgcacattct

SEQ ID NO: 2025792 - DNA, 25 bp, Homo sapien
tccctgtgcgcctccttggctgagg

SEQ ID NO: 2025793 - DNA, 25 bp, Homo sapien
gatgcagggtcatcaaccatcgagg

SEQ ID NO: 2025794 - DNA, 25 bp, Homo sapien
caaaaagtgccaccgtgagctgtgc

SEQ ID NO: 2025795 - DNA, 25 bp, Homo sapien
catcgaggttcatccagagaaggtc

SEQ ID NO: 2025796 - DNA, 25 bp, Homo sapien
cagaggtctttacctgcacaggcga

SEQ ID NO: 2025797 - DNA, 25 bp, Homo sapien
tctcctgccgccaactgggaaagtc

SEQ ID NO: 2025798 - DNA, 25 bp, Homo sapien
tcctgccgccaactgggaaagtcag

SEQ ID NO: 2025799 - DNA, 25 bp, Homo sapien
tgagtctctcctgccgccaactggg

SEQ ID NO: 2025800 - DNA, 25 bp, Homo sapien
cgccaactgggaaagtcaggtccat

SEQ ID NO: 2025801 - DNA, 25 bp, Homo sapien
ccatccttcagcgcctgggcacaga

SEQ ID NO: 2025802 - DNA, 25 bp, Homo sapien
catccttcagcgcctgggcacagag

SEQ ID NO: 2025803 - DNA, 25 bp, Homo sapien
ccagccaggcgcacgatgtcgtgta

SEQ ID NO: 2025804 - DNA, 25 bp, Homo sapien
gtgtcatctgagtaccccagccagg

SEQ ID NO: 2025805 - DNA, 25 bp, Homo sapien
tgcttcaacgtgtcatctgagtacc

SEQ ID NO: 2025806 - DNA, 25 bp, Homo sapien
taagcagggtatccttgtgccagca

SEQ ID NO: 2025807 - DNA, 25 bp, Homo sapien
ggcccttcggaattggaagtgcctg

SEQ ID NO: 2025808 - DNA, 25 bp, Homo sapien
tgtgaaaacacagcgccgtcaacat

SEQ ID NO: 2025809 - DNA, 25 bp, Homo sapien
cacagcgccgtcaacattttgcact

SEQ ID NO: 2025810 - DNA, 25 bp, Homo sapien
tgtagctaagctgtttcccctggag

SEQ ID NO: 2025811 - DNA, 25 bp, Homo sapien
tgatcaggatactctcacggactgc

SEQ ID NO: 2025812 - DNA, 25 bp, Homo sapien
gatttgagggcctagctgctcagca

SEQ ID NO: 2025813 - DNA, 25 bp, Homo sapien
gcaggcttcaccatgcagacttgaa

SEQ ID NO: 2025814 - DNA, 25 bp, Homo sapien
tctgcagtcagaggtcatacccagc

SEQ ID NO: 2025815 - DNA, 25 bp, Homo sapien
tttaccaatttgacctttctgcagt

SEQ ID NO: 2025816 - DNA, 25 bp, Homo sapien
taccaatttgacctttctgcagtat

SEQ ID NO: 2025817 - DNA, 25 bp, Homo sapien
ttaccaatttgacctttctgcagta

SEQ ID NO: 2025818 - DNA, 25 bp, Homo sapien
tactgtgtgtgcacgtcgtgtatcc

SEQ ID NO: 2025819 - DNA, 25 bp, Homo sapien
cacgtcgtgtatcccagaaagcttc

SEQ ID NO: 2025820 - DNA, 25 bp, Homo sapien
gaaacaaagcatgccactactgtgt

SEQ ID NO: 2025821 - DNA, 25 bp, Homo sapien
ttttaggaaacaaagcatgccacta

SEQ ID NO: 2025822 - DNA, 25 bp, Homo sapien
ctgaaatctatgcaggataccagca

SEQ ID NO: 2025823 - DNA, 25 bp, Homo sapien
gaaatctatgcaggataccagcatc

SEQ ID NO: 2025824 - DNA, 25 bp, Homo sapien
tgaaatctatgcaggataccagcat

SEQ ID NO: 2025825 - DNA, 25 bp, Homo sapien
ctgtccacggtgagctatgaggctg

SEQ ID NO: 2025826 - DNA, 25 bp, Homo sapien
gaagccctcaaacgctcatgctctg

SEQ ID NO: 2025827 - DNA, 25 bp, Homo sapien
ccagctaaaatgacttcccggaagg

SEQ ID NO: 2025828 - DNA, 25 bp, Homo sapien
gaacgcctggcatcactctgtacat

SEQ ID NO: 2025829 - DNA, 25 bp, Homo sapien
caacatttcggcggggcctcgtgct

SEQ ID NO: 2025830 - DNA, 25 bp, Homo sapien
ttcggcggggcctcgtgctgagacc

SEQ ID NO: 2025831 - DNA, 25 bp, Homo sapien
ggcctcgtgctgagacctctcccca

SEQ ID NO: 2025832 - DNA, 25 bp, Homo sapien
gcggggcctcgtgctgagacctctc

SEQ ID NO: 2025833 - DNA, 25 bp, Homo sapien
tcagagacgatgtgacagcctcctg

SEQ ID NO: 2025834 - DNA, 25 bp, Homo sapien
cacatttctggtggcctgcaaatca

SEQ ID NO: 2025835 - DNA, 25 bp, Homo sapien
tccggagttcgagctcagactgacc

SEQ ID NO: 2025836 - DNA, 25 bp, Homo sapien
gaacagtcagttggaaaacagccag

SEQ ID NO: 2025837 - DNA, 25 bp, Homo sapien
ccttccctgctggaattgtacagta

SEQ ID NO: 2025838 - DNA, 25 bp, Homo sapien
aaaacagtcaagtgcatagctttag

SEQ ID NO: 2025839 - DNA, 25 bp, Homo sapien
cagtcaagtgcatagctttagaatt

SEQ ID NO: 2025840 - DNA, 25 bp, Homo sapien
aagtgcatagctttagaattcagtg

SEQ ID NO: 2025841 - DNA, 25 bp, Homo sapien
tgtccacaagtaacttccagacagg

SEQ ID NO: 2025842 - DNA, 25 bp, Homo sapien
atgtccacaagtaacttccagacag

SEQ ID NO: 2025843 - DNA, 25 bp, Homo sapien
catgtccacaagtaacttccagaca

SEQ ID NO: 2025844 - DNA, 25 bp, Homo sapien
acatatgtgtaaagtccccattttt

SEQ ID NO: 2025845 - DNA, 25 bp, Homo sapien
gacatatgtgtaaagtccccatttt

SEQ ID NO: 2025846 - DNA, 25 bp, Homo sapien
catatgtgtaaagtccccatttttt

SEQ ID NO: 2025847 - DNA, 25 bp, Homo sapien
agacatatgtgtaaagtccccattt

SEQ ID NO: 2025848 - DNA, 25 bp, Homo sapien
tgcgccttccgccatcctgtctcct

SEQ ID NO: 2025849 - DNA, 25 bp, Homo sapien
agtaaacgcgttggcagctctaatg

SEQ ID NO: 2025850 - DNA, 25 bp, Homo sapien
cgcgttggcagctctaatgctggct

SEQ ID NO: 2025851 - DNA, 25 bp, Homo sapien
tggcagctctaatgctggctgtcag

SEQ ID NO: 2025852 - DNA, 25 bp, Homo sapien
ccgcgtttaggacggccgctgtcgc

SEQ ID NO: 2025853 - DNA, 25 bp, Homo sapien
cacaccgcgtttaggacggccgctg

SEQ ID NO: 2025854 - DNA, 25 bp, Homo sapien
gtcgccaggtgcaccacgccctttt

SEQ ID NO: 2025855 - DNA, 25 bp, Homo sapien
caagtcccacaccgcgtttaggacg

SEQ ID NO: 2025856 - DNA, 25 bp, Homo sapien
gtattacatttagtcgccatgcctc

SEQ ID NO: 2025857 - DNA, 25 bp, Homo sapien
aatattgctgtctaaaggccagtcc

SEQ ID NO: 2025858 - DNA, 25 bp, Homo sapien
ggccagtccataatcaaatgtcacc

SEQ ID NO: 2025859 - DNA, 25 bp, Homo sapien
cccatctgggatcacgtattacatt

SEQ ID NO: 2025860 - DNA, 25 bp, Homo sapien
tacaggccacttgatttgtacagca

SEQ ID NO: 2025861 - DNA, 25 bp, Homo sapien
aattgtcccagattcagccaatggg

SEQ ID NO: 2025862 - DNA, 25 bp, Homo sapien
cagtatcacgggacaaaggcaaagg

SEQ ID NO: 2025863 - DNA, 25 bp, Homo sapien
cagtgcatggatgggagactaagcc

SEQ ID NO: 2025864 - DNA, 25 bp, Homo sapien
tgagctgcctatagaagcctctgaa

SEQ ID NO: 2025865 - DNA, 25 bp, Homo sapien
tgagctgcccatcacttgtgagctg

SEQ ID NO: 2025866 - DNA, 25 bp, Homo sapien
tccttgttgagcacatggtgggcga

SEQ ID NO: 2025867 - DNA, 25 bp, Homo sapien
gaagtcaccaacaatgtccttgagg

SEQ ID NO: 2025868 - DNA, 25 bp, Homo sapien
tagagacgcagtttcgacatgctgc

SEQ ID NO: 2025869 - DNA, 25 bp, Homo sapien
tcctgagtagagaacacattgtgat

SEQ ID NO: 2025870 - DNA, 25 bp, Homo sapien
ggtgtcaaattactgcgctcaagtg

SEQ ID NO: 2025871 - DNA, 25 bp, Homo sapien
ttcctaaggaataagaaggctgact

SEQ ID NO: 2025872 - DNA, 25 bp, Homo sapien
gagatggtttagacattctgcacaa

SEQ ID NO: 2025873 - DNA, 25 bp, Homo sapien
tgatcctttcgacataggacgtgcc

SEQ ID NO: 2025874 - DNA, 25 bp, Homo sapien
gtttagcactatcccattggtactg

SEQ ID NO: 2025875 - DNA, 25 bp, Homo sapien
agcctaatatatcctctctctgtaa

SEQ ID NO: 2025876 - DNA, 25 bp, Homo sapien
tctgcatcagtttctatgacgacat

SEQ ID NO: 2025877 - DNA, 25 bp, Homo sapien
ggtaattccacaccccttgattcca

SEQ ID NO: 2025878 - DNA, 25 bp, Homo sapien
cagtttctatgacgacataggcagc

SEQ ID NO: 2025879 - DNA, 25 bp, Homo sapien
ataggcagccgagtagtcagggtcc

SEQ ID NO: 2025880 - DNA, 25 bp, Homo sapien
ttccccgccgaaacaatgccagtgt

SEQ ID NO: 2025881 - DNA, 25 bp, Homo sapien
tgcaggagaagagttccccgccgaa

SEQ ID NO: 2025882 - DNA, 25 bp, Homo sapien
gaatgatgtcacatgaggacagaca

SEQ ID NO: 2025883 - DNA, 25 bp, Homo sapien
gagaaacccgaaaagaaccatgaga

SEQ ID NO: 2025884 - DNA, 25 bp, Homo sapien
cgcacctggtcgcaatgtatacatt

SEQ ID NO: 2025885 - DNA, 25 bp, Homo sapien
acctggtcgcaatgtatacattttt

SEQ ID NO: 2025886 - DNA, 25 bp, Homo sapien
gcacctggtcgcaatgtatacattt

SEQ ID NO: 2025887 - DNA, 25 bp, Homo sapien
accgcacctggtcgcaatgtataca

SEQ ID NO: 2025888 - DNA, 25 bp, Homo sapien
taggtgctcttatccttattaaaga

SEQ ID NO: 2025889 - DNA, 25 bp, Homo sapien
caggcagaagatgtgaatgcattca

SEQ ID NO: 2025890 - DNA, 25 bp, Homo sapien
agacacactatattctaagagctcc

SEQ ID NO: 2025891 - DNA, 25 bp, Homo sapien
gcattcataaagaagaattgtgcat

SEQ ID NO: 2025892 - DNA, 25 bp, Homo sapien
gaacgactggcagagagcgctgtta

SEQ ID NO: 2025893 - DNA, 25 bp, Homo sapien
tacagatacgtctgcccttgaggag

SEQ ID NO: 2025894 - DNA, 25 bp, Homo sapien
gagaagacctgcttatagaacgggc

SEQ ID NO: 2025895 - DNA, 25 bp, Homo sapien
gcatcaagtacgtgtcagagctggt

SEQ ID NO: 2025896 - DNA, 25 bp, Homo sapien
tccataaaggattgcctgctgggtg

SEQ ID NO: 2025897 - DNA, 25 bp, Homo sapien
caactttactgacggccttctctga

SEQ ID NO: 2025898 - DNA, 25 bp, Homo sapien
caaaggcagttgcatgagatcgagt

SEQ ID NO: 2025899 - DNA, 25 bp, Homo sapien
ttttaaagaggatgacagcctgggc

SEQ ID NO: 2025900 - DNA, 25 bp, Homo sapien
tccgcgcttaccatggcgtccgcgc

SEQ ID NO: 2025901 - DNA, 25 bp, Homo sapien
cgtccgcgccgtggcccccaagcga

SEQ ID NO: 2025902 - DNA, 25 bp, Homo sapien
gggaagcgcacgtcccggaccgaga

SEQ ID NO: 2025903 - DNA, 25 bp, Homo sapien
ccccaagcgacgtggggaagcgcac

SEQ ID NO: 2025904 - DNA, 25 bp, Homo sapien
gtcccggaccgagagccgggagatc

SEQ ID NO: 2025905 - DNA, 25 bp, Homo sapien
gtcaggactggtcgggatcccgagc

SEQ ID NO: 2025906 - DNA, 25 bp, Homo sapien
ccgcggcccccgtgcggtcaggact

SEQ ID NO: 2025907 - DNA, 25 bp, Homo sapien
ccccgtgcggtcaggactggtcggg

SEQ ID NO: 2025908 - DNA, 25 bp, Homo sapien
tgcggtcaggactggtcgggatccc

SEQ ID NO: 2025909 - DNA, 25 bp, Homo sapien
gagagcggtgccctagaaaatgcta

SEQ ID NO: 2025910 - DNA, 25 bp, Homo sapien
ctctgctcggatggaagactcgtga

SEQ ID NO: 2025911 - DNA, 25 bp, Homo sapien
aaatgctaggtctctttcagtgccc

SEQ ID NO: 2025912 - DNA, 25 bp, Homo sapien
tgcattcgctcagcggcagattccg

SEQ ID NO: 2025913 - DNA, 25 bp, Homo sapien
cattatgctaaacgaaagacatcag

SEQ ID NO: 2025914 - DNA, 25 bp, Homo sapien
gacacagtgactacatatgattcca

SEQ ID NO: 2025915 - DNA, 25 bp, Homo sapien
aaacactcagtggttgacagaggtc

SEQ ID NO: 2025916 - DNA, 25 bp, Homo sapien
ggaagagattgactgtaaaagggca

SEQ ID NO: 2025917 - DNA, 25 bp, Homo sapien
gaggaactattgctatactacaaaa

SEQ ID NO: 2025918 - DNA, 25 bp, Homo sapien
tgtgaatagctacactcaaattact

SEQ ID NO: 2025919 - DNA, 25 bp, Homo sapien
tacaaatgtacaacttacatgtcag

SEQ ID NO: 2025920 - DNA, 25 bp, Homo sapien
attacttaggtttctgcattaactg

SEQ ID NO: 2025921 - DNA, 25 bp, Homo sapien
atgtcactcacttgacatagaaaat

SEQ ID NO: 2025922 - DNA, 25 bp, Homo sapien
ctcacttgacatagaaaattgacca

SEQ ID NO: 2025923 - DNA, 25 bp, Homo sapien
cactcacttgacatagaaaattgac

SEQ ID NO: 2025924 - DNA, 25 bp, Homo sapien
cacttgacatagaaaattgaccaca

SEQ ID NO: 2025925 - DNA, 25 bp, Homo sapien
aaggattgattaaattctgctcagt

SEQ ID NO: 2025926 - DNA, 25 bp, Homo sapien
attctgctcagtagttacaagtaac

SEQ ID NO: 2025927 - DNA, 25 bp, Homo sapien
gattgattaaattctgctcagtagt

SEQ ID NO: 2025928 - DNA, 25 bp, Homo sapien
gattaaattctgctcagtagttaca

SEQ ID NO: 2025929 - DNA, 25 bp, Homo sapien
tgtttggaccctgaaatacgctgat

SEQ ID NO: 2025930 - DNA, 25 bp, Homo sapien
gcaaagccattctgtcactccatga

SEQ ID NO: 2025931 - DNA, 25 bp, Homo sapien
atttttagtaccagaaccactgcca

SEQ ID NO: 2025932 - DNA, 25 bp, Homo sapien
cccctttgattggacagtagtttca

SEQ ID NO: 2025933 - DNA, 25 bp, Homo sapien
ttataaattttctcctggctggtac

SEQ ID NO: 2025934 - DNA, 25 bp, Homo sapien
tctaatacttcacggttcaccatac

SEQ ID NO: 2025935 - DNA, 25 bp, Homo sapien
gtatcctcgctccacttgttctaat

SEQ ID NO: 2025936 - DNA, 25 bp, Homo sapien
gctccacttgttctaatacttcacg

SEQ ID NO: 2025937 - DNA, 25 bp, Homo sapien
cacttgttctaatacttcacggttc

SEQ ID NO: 2025938 - DNA, 25 bp, Homo sapien
ccagtacattttactaacagtggaa

SEQ ID NO: 2025939 - DNA, 25 bp, Homo sapien
taatattcagtgagggcttactata

SEQ ID NO: 2025940 - DNA, 25 bp, Homo sapien
tgactgttaggattaagcaatccaa

SEQ ID NO: 2025941 - DNA, 25 bp, Homo sapien
caactagaagttgttgggtgaagga

SEQ ID NO: 2025942 - DNA, 25 bp, Homo sapien
cctgcgtagataatatataggctga

SEQ ID NO: 2025943 - DNA, 25 bp, Homo sapien
tctaccctttgtgttactgtcacag

SEQ ID NO: 2025944 - DNA, 25 bp, Homo sapien
tagctgtctgactgttgttcctgcg

SEQ ID NO: 2025945 - DNA, 25 bp, Homo sapien
tgagactacaatatgcttccttggt

SEQ ID NO: 2025946 - DNA, 25 bp, Homo sapien
tgtaatttgaccatgatatgtttgc

SEQ ID NO: 2025947 - DNA, 25 bp, Homo sapien
catgatatgtttgcttgaatttcac

SEQ ID NO: 2025948 - DNA, 25 bp, Homo sapien
tttgaccatgatatgtttgcttgaa

SEQ ID NO: 2025949 - DNA, 25 bp, Homo sapien
tttttgtaatttgaccatgatatgt

SEQ ID NO: 2025950 - DNA, 25 bp, Homo sapien
aatgccttcagaaaagccaatataa

SEQ ID NO: 2025951 - DNA, 25 bp, Homo sapien
tgggcttccttgatgcaatgtccta

SEQ ID NO: 2025952 - DNA, 25 bp, Homo sapien
tctgtctgggttttactgccctgtg

SEQ ID NO: 2025953 - DNA, 25 bp, Homo sapien
tctgcctcatttgcttaataagact

SEQ ID NO: 2025954 - DNA, 25 bp, Homo sapien
gatggcattagatctacagctggag

SEQ ID NO: 2025955 - DNA, 25 bp, Homo sapien
caagattacacaggagaagagttca

SEQ ID NO: 2025956 - DNA, 25 bp, Homo sapien
tatcagtgaataacagcaaccagac

SEQ ID NO: 2025957 - DNA, 25 bp, Homo sapien
gagttcaagctacaagagaccaggg

SEQ ID NO: 2025958 - DNA, 25 bp, Homo sapien
ccctttgttactagttctgtttgca

SEQ ID NO: 2025959 - DNA, 25 bp, Homo sapien
ctttgttactagttctgtttgcaga

SEQ ID NO: 2025960 - DNA, 25 bp, Homo sapien
cctttgttactagttctgtttgcag

SEQ ID NO: 2025961 - DNA, 25 bp, Homo sapien
tcacatgtaaagattacaggccggg

SEQ ID NO: 2025962 - DNA, 25 bp, Homo sapien
gaacctctggcctttctaggaaaga

SEQ ID NO: 2025963 - DNA, 25 bp, Homo sapien
ggaaaaccctgtatagtcaagagag

SEQ ID NO: 2025964 - DNA, 25 bp, Homo sapien
agtggcggtacagggcaatatctcc

SEQ ID NO: 2025965 - DNA, 25 bp, Homo sapien
tctcctacaagaatattagcagccc

SEQ ID NO: 2025966 - DNA, 25 bp, Homo sapien
tttctcctacaagaatattagcagc

SEQ ID NO: 2025967 - DNA, 25 bp, Homo sapien
ttctcctacaagaatattagcagcc

SEQ ID NO: 2025968 - DNA, 25 bp, Homo sapien
tggtaacagggtatagtctagaaga

SEQ ID NO: 2025969 - DNA, 25 bp, Homo sapien
caagacatacgatacaaagggaagc

SEQ ID NO: 2025970 - DNA, 25 bp, Homo sapien
tatcaaattgtgtcactgaaaatca

SEQ ID NO: 2025971 - DNA, 25 bp, Homo sapien
aaggagatgatggtaacagggtata

SEQ ID NO: 2025972 - DNA, 25 bp, Homo sapien
tctaactcagaagcatgaactggcg

SEQ ID NO: 2025973 - DNA, 25 bp, Homo sapien
ccagcatgtcaaccaaagccaataa

SEQ ID NO: 2025974 - DNA, 25 bp, Homo sapien
taataaggcctctcaaatacctacc

SEQ ID NO: 2025975 - DNA, 25 bp, Homo sapien
ggtaagattccaaaaccagcatgtc

SEQ ID NO: 2025976 - DNA, 25 bp, Homo sapien
gattatctctgacgttcctgccagt

SEQ ID NO: 2025977 - DNA, 25 bp, Homo sapien
ggacaccactggactaagagttaga

SEQ ID NO: 2025978 - DNA, 25 bp, Homo sapien
gaaaccgtatgatacaggacaccac

SEQ ID NO: 2025979 - DNA, 25 bp, Homo sapien
tgtatcattaagagctcacattgga

SEQ ID NO: 2025980 - DNA, 25 bp, Homo sapien
tcttcaagcacggagctatcagtgc

SEQ ID NO: 2025981 - DNA, 25 bp, Homo sapien
tcaaggctcttcaagcacggagcta

SEQ ID NO: 2025982 - DNA, 25 bp, Homo sapien
cacggagctatcagtgcaccactgc

SEQ ID NO: 2025983 - DNA, 25 bp, Homo sapien
aagaattcaaggctcttcaagcacg

SEQ ID NO: 2025984 - DNA, 25 bp, Homo sapien
tgagcagccatatcaaccagctgtg

SEQ ID NO: 2025985 - DNA, 25 bp, Homo sapien
tccttaaggaaatctaataagcttc

SEQ ID NO: 2025986 - DNA, 25 bp, Homo sapien
gctgtggaagcttcaaatactttcc

SEQ ID NO: 2025987 - DNA, 25 bp, Homo sapien
agccatatcaaccagctgtggaagc

SEQ ID NO: 2025988 - DNA, 25 bp, Homo sapien
ccaaataattatctaggtcctagaa

SEQ ID NO: 2025989 - DNA, 25 bp, Homo sapien
gaaaacttctgataacacatgcaaa

SEQ ID NO: 2025990 - DNA, 25 bp, Homo sapien
tcagacaactaggaatatcttgggt

SEQ ID NO: 2025991 - DNA, 25 bp, Homo sapien
ggtcctagaagaggtctctaagctg

SEQ ID NO: 2025992 - DNA, 25 bp, Homo sapien
tctaatatactctttgaaagggcat

SEQ ID NO: 2025993 - DNA, 25 bp, Homo sapien
tgagtagggaatacatgtgtgtgca

SEQ ID NO: 2025994 - DNA, 25 bp, Homo sapien
tgtgtgtgcaaccacgtcctgctaa

SEQ ID NO: 2025995 - DNA, 25 bp, Homo sapien
tacatgtgtgtgcaaccacgtcctg

SEQ ID NO: 2025996 - DNA, 25 bp, Homo sapien
tgaccaagacacaccactggagagg

SEQ ID NO: 2025997 - DNA, 25 bp, Homo sapien
cccatcttgtggtctagagttaagg

SEQ ID NO: 2025998 - DNA, 25 bp, Homo sapien
taaccctgttactgaagatcccatc

SEQ ID NO: 2025999 - DNA, 25 bp, Homo sapien
taaaaatcaggcctgtcagcttatc

SEQ ID NO: 2026000 - DNA, 25 bp, Homo sapien
ggcatcattgtacctggttttagtg

SEQ ID NO: 2026001 - DNA, 25 bp, Homo sapien
ttctggcatcattgtacctggtttt

SEQ ID NO: 2026002 - DNA, 25 bp, Homo sapien
caacagcatatagtggaacaagttt

SEQ ID NO: 2026003 - DNA, 25 bp, Homo sapien
aaacaacagcatatagtggaacaag

SEQ ID NO: 2026004 - DNA, 25 bp, Homo sapien
ttgtggcataaaccatcagcatgtt

SEQ ID NO: 2026005 - DNA, 25 bp, Homo sapien
ggtttcacagttggacacacagttg

SEQ ID NO: 2026006 - DNA, 25 bp, Homo sapien
tctgaggtttcacagttggacacac

SEQ ID NO: 2026007 - DNA, 25 bp, Homo sapien
cctagtttaacctctagtcgcaaag

SEQ ID NO: 2026008 - DNA, 25 bp, Homo sapien
gatagactcagtttgcagctagctg

SEQ ID NO: 2026009 - DNA, 25 bp, Homo sapien
cactgcttggtaacatgcttgatca

SEQ ID NO: 2026010 - DNA, 25 bp, Homo sapien
tcagggaaccctagattcataacag

SEQ ID NO: 2026011 - DNA, 25 bp, Homo sapien
gattgctggctgacttgatagactc

SEQ ID NO: 2026012 - DNA, 25 bp, Homo sapien
tattagcacattatctgagtagcac

SEQ ID NO: 2026013 - DNA, 25 bp, Homo sapien
tatgccagtaagatataaggaccca

SEQ ID NO: 2026014 - DNA, 25 bp, Homo sapien
ttatgcgatccagcccatgcagagg

SEQ ID NO: 2026015 - DNA, 25 bp, Homo sapien
gagtagcacaatgcaagtactaagt

SEQ ID NO: 2026016 - DNA, 25 bp, Homo sapien
tatctcatcccaatcacgaatagaa

SEQ ID NO: 2026017 - DNA, 25 bp, Homo sapien
gctctggttgtgatatagtatccac

SEQ ID NO: 2026018 - DNA, 25 bp, Homo sapien
tcacgaatagaaagggaataagcac

SEQ ID NO: 2026019 - DNA, 25 bp, Homo sapien
tagtgtttcaccaatttctgcagag

SEQ ID NO: 2026020 - DNA, 25 bp, Homo sapien
actttcactatatctttctcaaaat

SEQ ID NO: 2026021 - DNA, 25 bp, Homo sapien
caagaaattttatacttatactaat

SEQ ID NO: 2026022 - DNA, 25 bp, Homo sapien
acttatactaatataacaatattca

SEQ ID NO: 2026023 - DNA, 25 bp, Homo sapien
ctgccccaagaaattttatacttat

SEQ ID NO: 2026024 - DNA, 25 bp, Homo sapien
tatactaatataacaatattcatac

SEQ ID NO: 2026025 - DNA, 25 bp, Homo sapien
ctttagttgtttcactctctcttac

SEQ ID NO: 2026026 - DNA, 25 bp, Homo sapien
tacctcgttgatttccaggattcaa

SEQ ID NO: 2026027 - DNA, 25 bp, Homo sapien
caggattcaaaagtaatctttcagc

SEQ ID NO: 2026028 - DNA, 25 bp, Homo sapien
cgttgatttccaggattcaaaagta

SEQ ID NO: 2026029 - DNA, 25 bp, Homo sapien
taagaaaatacctcgttgatttcca

SEQ ID NO: 2026030 - DNA, 25 bp, Homo sapien
aatggaatctgcaggcgctacataa

SEQ ID NO: 2026031 - DNA, 25 bp, Homo sapien
gaatggaatctgcaggcgctacata

SEQ ID NO: 2026032 - DNA, 25 bp, Homo sapien
ctctatggatatgcccactgcatgc

SEQ ID NO: 2026033 - DNA, 25 bp, Homo sapien
taaaggttcatctaggttatagcat

SEQ ID NO: 2026034 - DNA, 25 bp, Homo sapien
cttaagatgtacaattcactagttt

SEQ ID NO: 2026035 - DNA, 25 bp, Homo sapien
tgcccactgcatgcaccttatataa

SEQ ID NO: 2026036 - DNA, 25 bp, Homo sapien
tgtggtttataacacataagccgtc

SEQ ID NO: 2026037 - DNA, 25 bp, Homo sapien
tcctcatatatactaagcactttca

SEQ ID NO: 2026038 - DNA, 25 bp, Homo sapien
tcagaacatgagaactacatgtggt

SEQ ID NO: 2026039 - DNA, 25 bp, Homo sapien
taaatgcctagataaatttgctctc

SEQ ID NO: 2026040 - DNA, 25 bp, Homo sapien
ttcataatcatataaggccacaaat

SEQ ID NO: 2026041 - DNA, 25 bp, Homo sapien
cttcataatcatataaggccacaaa

SEQ ID NO: 2026042 - DNA, 25 bp, Homo sapien
gcttcataatcatataaggccacaa

SEQ ID NO: 2026043 - DNA, 25 bp, Homo sapien
gatgcacctccaaaaggcgttaccc

SEQ ID NO: 2026044 - DNA, 25 bp, Homo sapien
ctccaaatggtgtcatggaaagact

SEQ ID NO: 2026045 - DNA, 25 bp, Homo sapien
ccaaatggtgtcatggaaagactgc

SEQ ID NO: 2026046 - DNA, 25 bp, Homo sapien
aaatggtgtcatggaaagactgctg

SEQ ID NO: 2026047 - DNA, 25 bp, Homo sapien
gtgcatatgccctgtgctttcccat

SEQ ID NO: 2026048 - DNA, 25 bp, Homo sapien
acacacacaaatcttgtttccccag

SEQ ID NO: 2026049 - DNA, 25 bp, Homo sapien
ttccccagtgcatatgccctgtgct

SEQ ID NO: 2026050 - DNA, 25 bp, Homo sapien
cacacacaaatcttgtttccccagt

SEQ ID NO: 2026051 - DNA, 25 bp, Homo sapien
gcttgctaagacctgccaaaccatg

SEQ ID NO: 2026052 - DNA, 25 bp, Homo sapien
caaaccatgcatgagggtctttgca

SEQ ID NO: 2026053 - DNA, 25 bp, Homo sapien
agcaggctcagacaatacgcacaac

SEQ ID NO: 2026054 - DNA, 25 bp, Homo sapien
ggaccatatggtgtctgtaacaact

SEQ ID NO: 2026055 - DNA, 25 bp, Homo sapien
taacgttgggctcttttggactgaa

SEQ ID NO: 2026056 - DNA, 25 bp, Homo sapien
catttatactcagcttaacgttggg

SEQ ID NO: 2026057 - DNA, 25 bp, Homo sapien
gcttggtaagtctaaacatttatac

SEQ ID NO: 2026058 - DNA, 25 bp, Homo sapien
cacacttcggccttccctgggatta

SEQ ID NO: 2026059 - DNA, 25 bp, Homo sapien
tcttcctggataacgggcaagagaa

SEQ ID NO: 2026060 - DNA, 25 bp, Homo sapien
agagggaggagtcaggtcagtacag

SEQ ID NO: 2026061 - DNA, 25 bp, Homo sapien
tcctcatacctgaactactttcatc

SEQ ID NO: 2026062 - DNA, 25 bp, Homo sapien
tcaggtcagtacagacagctttact

SEQ ID NO: 2026063 - DNA, 25 bp, Homo sapien
tgtctacgcaataccttcacttgga

SEQ ID NO: 2026064 - DNA, 25 bp, Homo sapien
cacttggacgtctaaaaggatttca

SEQ ID NO: 2026065 - DNA, 25 bp, Homo sapien
tttacggacttctggacttctcact

SEQ ID NO: 2026066 - DNA, 25 bp, Homo sapien
tacacactggactgttgccgaaaag

SEQ ID NO: 2026067 - DNA, 25 bp, Homo sapien
tggtatttgaagcacgaatgtttgc

SEQ ID NO: 2026068 - DNA, 25 bp, Homo sapien
cacgaatgtttgcaactgtgatcat

SEQ ID NO: 2026069 - DNA, 25 bp, Homo sapien
gatcattttgataatggtggctctc

SEQ ID NO: 2026070 - DNA, 25 bp, Homo sapien
ctaacatagtggctggtatttgaag

SEQ ID NO: 2026071 - DNA, 25 bp, Homo sapien
gaaccaccgcacctagctcattaat

SEQ ID NO: 2026072 - DNA, 25 bp, Homo sapien
tatttgtaacatgcaataaacacta

SEQ ID NO: 2026073 - DNA, 25 bp, Homo sapien
gtaacatgcaataaacactaaaagc

SEQ ID NO: 2026074 - DNA, 25 bp, Homo sapien
ttttgaggataattagaaaaatcca

SEQ ID NO: 2026075 - DNA, 25 bp, Homo sapien
tatcttacagttcagaagtctgacg

SEQ ID NO: 2026076 - DNA, 25 bp, Homo sapien
agacaaaatcagttcttgccctttc

SEQ ID NO: 2026077 - DNA, 25 bp, Homo sapien
gccggtgtccctggactaaaatcaa

SEQ ID NO: 2026078 - DNA, 25 bp, Homo sapien
tgcatttccttctggagattcaaag

SEQ ID NO: 2026079 - DNA, 25 bp, Homo sapien
tactgagtgttaggggggagaaaga

SEQ ID NO: 2026080 - DNA, 25 bp, Homo sapien
gcttctgaagtataatactgagtgt

SEQ ID NO: 2026081 - DNA, 25 bp, Homo sapien
agaaacaagtaaagctgggcttgtt

SEQ ID NO: 2026082 - DNA, 25 bp, Homo sapien
agagaaacaagtaaagctgggcttg

SEQ ID NO: 2026083 - DNA, 25 bp, Homo sapien
tggtctccacacaggaattactcaa

SEQ ID NO: 2026084 - DNA, 25 bp, Homo sapien
aatcaccaggactcaaaagatagaa

SEQ ID NO: 2026085 - DNA, 25 bp, Homo sapien
taaatgagaatttggcaggaagctg

SEQ ID NO: 2026086 - DNA, 25 bp, Homo sapien
ctttgtcacaatatcaaacatggag

SEQ ID NO: 2026087 - DNA, 25 bp, Homo sapien
aaaacagcacgtatatgagaaaggc

SEQ ID NO: 2026088 - DNA, 25 bp, Homo sapien
gtccaggtaaggcatcaacgctggg

SEQ ID NO: 2026089 - DNA, 25 bp, Homo sapien
gctttagcctcgaaatgtccaggta

SEQ ID NO: 2026090 - DNA, 25 bp, Homo sapien
gctgtgaagacttgataatgctctg

SEQ ID NO: 2026091 - DNA, 25 bp, Homo sapien
cacagtccctcactactacaaattc

SEQ ID NO: 2026092 - DNA, 25 bp, Homo sapien
acagtccctcactactacaaattct

SEQ ID NO: 2026093 - DNA, 25 bp, Homo sapien
atggatgagcctcactctgagaacc

SEQ ID NO: 2026094 - DNA, 25 bp, Homo sapien
gatgagcctcactctgagaaccacc

SEQ ID NO: 2026095 - DNA, 25 bp, Homo sapien
aaggactgcttaagctattttgtaa

SEQ ID NO: 2026096 - DNA, 25 bp, Homo sapien
taattgtaatactgattgtcactac

SEQ ID NO: 2026097 - DNA, 25 bp, Homo sapien
ttcagttcatattagaaatatcaaa

SEQ ID NO: 2026098 - DNA, 25 bp, Homo sapien
aacttcaactacaatgaattttcag

SEQ ID NO: 2026099 - DNA, 25 bp, Homo sapien
atccctcttgaaggccttccacttc

SEQ ID NO: 2026100 - DNA, 25 bp, Homo sapien
ttatccctcttgaaggccttccact

SEQ ID NO: 2026101 - DNA, 25 bp, Homo sapien
tatccctcttgaaggccttccactt

SEQ ID NO: 2026102 - DNA, 25 bp, Homo sapien
cccagcctgacgtgttcaaagtagt

SEQ ID NO: 2026103 - DNA, 25 bp, Homo sapien
cagctggtatatgacaattatgatt

SEQ ID NO: 2026104 - DNA, 25 bp, Homo sapien
cctgacgtgttcaaagtagttatac

SEQ ID NO: 2026105 - DNA, 25 bp, Homo sapien
taaatctaatcctatttgcaaagga

SEQ ID NO: 2026106 - DNA, 25 bp, Homo sapien
caagacaaattccacctaacccagg

SEQ ID NO: 2026107 - DNA, 25 bp, Homo sapien
aagtaagtcttacaccatcggttgg

SEQ ID NO: 2026108 - DNA, 25 bp, Homo sapien
ggaccctctgaattgtcaaccagca

SEQ ID NO: 2026109 - DNA, 25 bp, Homo sapien
tctttttcaaatgtaggaccctctg

SEQ ID NO: 2026110 - DNA, 25 bp, Homo sapien
gtacaatatatgaacatcgtaagtg

SEQ ID NO: 2026111 - DNA, 25 bp, Homo sapien
ccaagcactgtgatagttaagatat

SEQ ID NO: 2026112 - DNA, 25 bp, Homo sapien
tcgtaagtgatgcatacaagatcct

SEQ ID NO: 2026113 - DNA, 25 bp, Homo sapien
aagatactcctttattacctgacca

SEQ ID NO: 2026114 - DNA, 25 bp, Homo sapien
tgctaccggcgtcggccgatacaca

SEQ ID NO: 2026115 - DNA, 25 bp, Homo sapien
cggtccacacgaccccaaagacaag

SEQ ID NO: 2026116 - DNA, 25 bp, Homo sapien
ctggaacctcaggtcggacttgggc

SEQ ID NO: 2026117 - DNA, 25 bp, Homo sapien
cccgcacagctgctaccggcgtcgg

SEQ ID NO: 2026118 - DNA, 25 bp, Homo sapien
gctctcatgagtcgctgctaccgca

SEQ ID NO: 2026119 - DNA, 25 bp, Homo sapien
tccggccgcgctctcatgagtcgct

SEQ ID NO: 2026120 - DNA, 25 bp, Homo sapien
gccgcgctctcatgagtcgctgcta

SEQ ID NO: 2026121 - DNA, 25 bp, Homo sapien
gcgctctcatgagtcgctgctaccg

SEQ ID NO: 2026122 - DNA, 25 bp, Homo sapien
gcccggcggcagcaacgacggcaga

SEQ ID NO: 2026123 - DNA, 25 bp, Homo sapien
cggcagcaacgacggcagagccggc

SEQ ID NO: 2026124 - DNA, 25 bp, Homo sapien
ggcggcagcaacgacggcagagccg

SEQ ID NO: 2026125 - DNA, 25 bp, Homo sapien
caacgacggcagagccggcccggga

SEQ ID NO: 2026126 - DNA, 25 bp, Homo sapien
tcaggaggagggagttcccgggctc

SEQ ID NO: 2026127 - DNA, 25 bp, Homo sapien
gcgcgccgccgtccgctcaccggaa

SEQ ID NO: 2026128 - DNA, 25 bp, Homo sapien
tgcgcgcgccgccgtccgctcaccg

SEQ ID NO: 2026129 - DNA, 25 bp, Homo sapien
ctcgggccacgccggcccggctccg

SEQ ID NO: 2026130 - DNA, 25 bp, Homo sapien
ccgctttgctgtggtcaggataggc

SEQ ID NO: 2026131 - DNA, 25 bp, Homo sapien
taggcgaccggtccgtgtcacttct

SEQ ID NO: 2026132 - DNA, 25 bp, Homo sapien
gtcacttctcccgacccaacatggc

SEQ ID NO: 2026133 - DNA, 25 bp, Homo sapien
tcaggataggcgaccggtccgtgtc

SEQ ID NO: 2026134 - DNA, 25 bp, Homo sapien
gagattgaatggagcgctccgattc

SEQ ID NO: 2026135 - DNA, 25 bp, Homo sapien
gaatggagcgctccgattctgcccc

SEQ ID NO: 2026136 - DNA, 25 bp, Homo sapien
ctgccgcggagattgaatggagcgc

SEQ ID NO: 2026137 - DNA, 25 bp, Homo sapien
ttggcccagctctcagtagtggcca

SEQ ID NO: 2026138 - DNA, 25 bp, Homo sapien
aaatctcaagcccaaccgcgtgagc

SEQ ID NO: 2026139 - DNA, 25 bp, Homo sapien
cttctcagcgctacgcttccgcacc

SEQ ID NO: 2026140 - DNA, 25 bp, Homo sapien
tacgcttccgcaccctttgtcgttg

SEQ ID NO: 2026141 - DNA, 25 bp, Homo sapien
tccgcaccctttgtcgttggtagta

SEQ ID NO: 2026142 - DNA, 25 bp, Homo sapien
ccgaagctgagttctgtttggcgac

SEQ ID NO: 2026143 - DNA, 25 bp, Homo sapien
actgtaggtcgaaccagccttgccg

SEQ ID NO: 2026144 - DNA, 25 bp, Homo sapien
tccttccgaggcagggatcctgtcc

SEQ ID NO: 2026145 - DNA, 25 bp, Homo sapien
tgatcgccgtccaaaaaacgttcac

SEQ ID NO: 2026146 - DNA, 25 bp, Homo sapien
gaagtgcaacaagtatggttctcct

SEQ ID NO: 2026147 - DNA, 25 bp, Homo sapien
cacagctggaatcgtgtccgtctga

SEQ ID NO: 2026148 - DNA, 25 bp, Homo sapien
caactgtggaaacagcgaccctgaa

SEQ ID NO: 2026149 - DNA, 25 bp, Homo sapien
tctatatgatgctggcggcagccca

SEQ ID NO: 2026150 - DNA, 25 bp, Homo sapien
cagggggacatcaggtgtctgagcc

SEQ ID NO: 2026151 - DNA, 25 bp, Homo sapien
caactgtgatccaggttggggttcg

SEQ ID NO: 2026152 - DNA, 25 bp, Homo sapien
caggttggggttcgtaaactcagag

SEQ ID NO: 2026153 - DNA, 25 bp, Homo sapien
ttcgtaaactcagaggtcaggggga

SEQ ID NO: 2026154 - DNA, 25 bp, Homo sapien
ctggcagagtccaggggagatttag

SEQ ID NO: 2026155 - DNA, 25 bp, Homo sapien
gccctaggtctttgcgagctgcctt

SEQ ID NO: 2026156 - DNA, 25 bp, Homo sapien
ctctttttgggaaatcggcgggctg

SEQ ID NO: 2026157 - DNA, 25 bp, Homo sapien
gtctttgcgagctgccttccctgag

SEQ ID NO: 2026158 - DNA, 25 bp, Homo sapien
tctttttgggaaatcggcgggctgc

SEQ ID NO: 2026159 - DNA, 25 bp, Homo sapien
tctccagccacttagccctttgaat

SEQ ID NO: 2026160 - DNA, 25 bp, Homo sapien
taagtgggaaatctgtatgaactct

SEQ ID NO: 2026161 - DNA, 25 bp, Homo sapien
tgctctttgatagctatctccagcc

SEQ ID NO: 2026162 - DNA, 25 bp, Homo sapien
gtaagtgggaaatctgtatgaactc

SEQ ID NO: 2026163 - DNA, 25 bp, Homo sapien
tccagcagtcagatcaccatgtacg

SEQ ID NO: 2026164 - DNA, 25 bp, Homo sapien
ccagcagtcagatcaccatgtacgt

SEQ ID NO: 2026165 - DNA, 25 bp, Homo sapien
tttcattccagcagtcagatcacca

SEQ ID NO: 2026166 - DNA, 25 bp, Homo sapien
atcaccatgtacgtctggatgactt

SEQ ID NO: 2026167 - DNA, 25 bp, Homo sapien
gaaagcagaacttatactgagtgcc

SEQ ID NO: 2026168 - DNA, 25 bp, Homo sapien
tcagaactacggagtcagaatctgc

SEQ ID NO: 2026169 - DNA, 25 bp, Homo sapien
caaatcctgctctgttggactgtaa

SEQ ID NO: 2026170 - DNA, 25 bp, Homo sapien
tcctataggtgactgggatgcacat

SEQ ID NO: 2026171 - DNA, 25 bp, Homo sapien
tgatggacaacaccaagaagtgagg

SEQ ID NO: 2026172 - DNA, 25 bp, Homo sapien
tcccaggattaggtggctgagttcc

SEQ ID NO: 2026173 - DNA, 25 bp, Homo sapien
tgtccctggagccatacctgatgga

SEQ ID NO: 2026174 - DNA, 25 bp, Homo sapien
gagggcggctacaacaaggtgttcc

SEQ ID NO: 2026175 - DNA, 25 bp, Homo sapien
cttctgaatcccgacttccattatt

SEQ ID NO: 2026176 - DNA, 25 bp, Homo sapien
tcccatgtagggaagtctcttcatc

SEQ ID NO: 2026177 - DNA, 25 bp, Homo sapien
tcccgacttccattattcaggaggg

SEQ ID NO: 2026178 - DNA, 25 bp, Homo sapien
gtcccatgtagggaagtctcttcat

SEQ ID NO: 2026179 - DNA, 25 bp, Homo sapien
aaatgaagaatagcctgagatgtgc

SEQ ID NO: 2026180 - DNA, 25 bp, Homo sapien
cctgtagcataaggacaagcagccc

SEQ ID NO: 2026181 - DNA, 25 bp, Homo sapien
tgacatcggcaattcaggcaatgct

SEQ ID NO: 2026182 - DNA, 25 bp, Homo sapien
acaaggctacccagagttcccaggg

SEQ ID NO: 2026183 - DNA, 25 bp, Homo sapien
taatctcctggtttatgaaagccca

SEQ ID NO: 2026184 - DNA, 25 bp, Homo sapien
aatctcctggtttatgaaagcccaa

SEQ ID NO: 2026185 - DNA, 25 bp, Homo sapien
ataatctcctggtttatgaaagccc

SEQ ID NO: 2026186 - DNA, 25 bp, Homo sapien
tagcatgaaaggacaaatcaaggtt

SEQ ID NO: 2026187 - DNA, 25 bp, Homo sapien
attgtagcatgaaaggacaaatcaa

SEQ ID NO: 2026188 - DNA, 25 bp, Homo sapien
gaacattgtagctattgtagcatga

SEQ ID NO: 2026189 - DNA, 25 bp, Homo sapien
ttagaacattgtagctattgtagca

SEQ ID NO: 2026190 - DNA, 25 bp, Homo sapien
cactggaaagtttctcgtgctctca

SEQ ID NO: 2026191 - DNA, 25 bp, Homo sapien
cctgtgagagtggtggcctaggcag

SEQ ID NO: 2026192 - DNA, 25 bp, Homo sapien
accaccagtcatggcgagtgggaca

SEQ ID NO: 2026193 - DNA, 25 bp, Homo sapien
agtttctcgtgctctcaagagaggc

SEQ ID NO: 2026194 - DNA, 25 bp, Homo sapien
gctgcatggcccatttgaaagagaa

SEQ ID NO: 2026195 - DNA, 25 bp, Homo sapien
caatcacgatgaaggggagccgtca

SEQ ID NO: 2026196 - DNA, 25 bp, Homo sapien
tcagcagatgctgcatggcccattt

SEQ ID NO: 2026197 - DNA, 25 bp, Homo sapien
gatggagtagaagtggctgccaatc

SEQ ID NO: 2026198 - DNA, 25 bp, Homo sapien
gtggctttaaaggtgaggtgagtct

SEQ ID NO: 2026199 - DNA, 25 bp, Homo sapien
tctggtgttcaacaggggttggtct

SEQ ID NO: 2026200 - DNA, 25 bp, Homo sapien
gggttggtcttgctcttcctgtgct

SEQ ID NO: 2026201 - DNA, 25 bp, Homo sapien
gctttaaaggtgaggtgagtctggt

SEQ ID NO: 2026202 - DNA, 25 bp, Homo sapien
gcctctgggtggatatggtcttccc

SEQ ID NO: 2026203 - DNA, 25 bp, Homo sapien
tgtgtctcccaaacagagctgaagt

SEQ ID NO: 2026204 - DNA, 25 bp, Homo sapien
tgagatccaaatcgtagtaacagga

SEQ ID NO: 2026205 - DNA, 25 bp, Homo sapien
ggtgaacttgtactgggaaccctca

SEQ ID NO: 2026206 - DNA, 25 bp, Homo sapien
gatgcttaattccagagaccagagc

SEQ ID NO: 2026207 - DNA, 25 bp, Homo sapien
tattaataggagagcttgatgatgc

SEQ ID NO: 2026208 - DNA, 25 bp, Homo sapien
gagagcttgatgatgcttaattcca

SEQ ID NO: 2026209 - DNA, 25 bp, Homo sapien
cagagaccagagctctgattggtga

SEQ ID NO: 2026210 - DNA, 25 bp, Homo sapien
gagggactaggatgctgacgtcttt

SEQ ID NO: 2026211 - DNA, 25 bp, Homo sapien
ctgtccttgagaaacgggtgaaatt

SEQ ID NO: 2026212 - DNA, 25 bp, Homo sapien
gactccggatcttatcatccaagag

SEQ ID NO: 2026213 - DNA, 25 bp, Homo sapien
agtgaaaggtgtttatgagaagtcg

SEQ ID NO: 2026214 - DNA, 25 bp, Homo sapien
tgaataaaaatcggagcgcaacagt

SEQ ID NO: 2026215 - DNA, 25 bp, Homo sapien
aaaggaagtcatttcatgaataaaa

SEQ ID NO: 2026216 - DNA, 25 bp, Homo sapien
aaaaaaggaagtcatttcatgaata

SEQ ID NO: 2026217 - DNA, 25 bp, Homo sapien
aataaaaatcggagcgcaacagtgc

SEQ ID NO: 2026218 - DNA, 25 bp, Homo sapien
agacaccaacgccagacggcgatgc

SEQ ID NO: 2026219 - DNA, 25 bp, Homo sapien
cttgaagaagcgctttgcccgccgt

SEQ ID NO: 2026220 - DNA, 25 bp, Homo sapien
gtggtgactccagcgcaggaacttg

SEQ ID NO: 2026221 - DNA, 25 bp, Homo sapien
tgcggcttctgctcagacaccaacg

SEQ ID NO: 2026222 - DNA, 25 bp, Homo sapien
aattggatttgcattcccaggcggg

SEQ ID NO: 2026223 - DNA, 25 bp, Homo sapien
tgctgccaggagatcacattgcaaa

SEQ ID NO: 2026224 - DNA, 25 bp, Homo sapien
aatgtgacacgggatgcagtttgca

SEQ ID NO: 2026225 - DNA, 25 bp, Homo sapien
ttaaattgccacgaatcacagatgg

SEQ ID NO: 2026226 - DNA, 25 bp, Homo sapien
tagcctctcagagtcacaatcatct

SEQ ID NO: 2026227 - DNA, 25 bp, Homo sapien
gttccgtaactgtttcataagagca

SEQ ID NO: 2026228 - DNA, 25 bp, Homo sapien
cacattgctctgtccagttccgtaa

SEQ ID NO: 2026229 - DNA, 25 bp, Homo sapien
tgtaaggtccaactcaagctctcct

SEQ ID NO: 2026230 - DNA, 25 bp, Homo sapien
tatccttggcgcatcctgccagggt

SEQ ID NO: 2026231 - DNA, 25 bp, Homo sapien
ttcagtatccttggcgcatcctgcc

SEQ ID NO: 2026232 - DNA, 25 bp, Homo sapien
gtatccttggcgcatcctgccaggg

SEQ ID NO: 2026233 - DNA, 25 bp, Homo sapien
ccttggcgcatcctgccagggtgac

SEQ ID NO: 2026234 - DNA, 25 bp, Homo sapien
gacagcaggctagtgctagaggaaa

SEQ ID NO: 2026235 - DNA, 25 bp, Homo sapien
aatttgatgagcatggttttccagg

SEQ ID NO: 2026236 - DNA, 25 bp, Homo sapien
ttcctttagcgaactgagctggagg

SEQ ID NO: 2026237 - DNA, 25 bp, Homo sapien
gcctggttgttgcaaggatacttaa

SEQ ID NO: 2026238 - DNA, 25 bp, Homo sapien
acacagtgtcttgatccaggtaaaa

SEQ ID NO: 2026239 - DNA, 25 bp, Homo sapien
tgcagcggtccgtcttgtgtggcca

SEQ ID NO: 2026240 - DNA, 25 bp, Homo sapien
tgaccagataaacgaacctttccag

SEQ ID NO: 2026241 - DNA, 25 bp, Homo sapien
tgtgaactgtaaattcctgtgcagc

SEQ ID NO: 2026242 - DNA, 25 bp, Homo sapien
gaaactcaggcttgtgtgtgaagct

SEQ ID NO: 2026243 - DNA, 25 bp, Homo sapien
tggaaactcaggcttgtgtgtgaag

SEQ ID NO: 2026244 - DNA, 25 bp, Homo sapien
aactcaggcttgtgtgtgaagcttt

SEQ ID NO: 2026245 - DNA, 25 bp, Homo sapien
caggcttgtgtgtgaagcttttgga

SEQ ID NO: 2026246 - DNA, 25 bp, Homo sapien
aatggtcaatccatagaggttgggc

SEQ ID NO: 2026247 - DNA, 25 bp, Homo sapien
gggcaagtcagagagctcaattctg

SEQ ID NO: 2026248 - DNA, 25 bp, Homo sapien
tctctgaggagaatggtcaatccat

SEQ ID NO: 2026249 - DNA, 25 bp, Homo sapien
gtcttcccctcaacatgtgtgcctg

SEQ ID NO: 2026250 - DNA, 25 bp, Homo sapien
ggagagagggattaccctcaaggag

SEQ ID NO: 2026251 - DNA, 25 bp, Homo sapien
gaaggcagtactagggctaccaggg

SEQ ID NO: 2026252 - DNA, 25 bp, Homo sapien
tgaaggcagtactagggctaccagg

SEQ ID NO: 2026253 - DNA, 25 bp, Homo sapien
ctgaaggcagtactagggctaccag

SEQ ID NO: 2026254 - DNA, 25 bp, Homo sapien
atccgagtattaggtttctttgccg

SEQ ID NO: 2026255 - DNA, 25 bp, Homo sapien
attgggtgagaaagttctaacttca

SEQ ID NO: 2026256 - DNA, 25 bp, Homo sapien
tgtctttcccgctaaagcctggtcc

SEQ ID NO: 2026257 - DNA, 25 bp, Homo sapien
ctaacttcaagagccctaatccgag

SEQ ID NO: 2026258 - DNA, 25 bp, Homo sapien
tatcgcaggcatttaggtgaatgtc

SEQ ID NO: 2026259 - DNA, 25 bp, Homo sapien
tataatggtggtcttatcgcaggca

SEQ ID NO: 2026260 - DNA, 25 bp, Homo sapien
taagcgtgtagacctgggatgacct

SEQ ID NO: 2026261 - DNA, 25 bp, Homo sapien
tggatcccaaaacctgaccatctga

SEQ ID NO: 2026262 - DNA, 25 bp, Homo sapien
gaatcgggataagctgaattggaaa

SEQ ID NO: 2026263 - DNA, 25 bp, Homo sapien
cagaagggcccagaatcgggataag

SEQ ID NO: 2026264 - DNA, 25 bp, Homo sapien
gataagctgaattggaaaatccagc

SEQ ID NO: 2026265 - DNA, 25 bp, Homo sapien
gcccagaatcgggataagctgaatt

SEQ ID NO: 2026266 - DNA, 25 bp, Homo sapien
atatggcattcagggcggctgggtc

SEQ ID NO: 2026267 - DNA, 25 bp, Homo sapien
tggaattagtagtactttgatggac

SEQ ID NO: 2026268 - DNA, 25 bp, Homo sapien
ggcaaagtgaaatgatctggatgat

SEQ ID NO: 2026269 - DNA, 25 bp, Homo sapien
tctggatgatctggcaaagcacagg

SEQ ID NO: 2026270 - DNA, 25 bp, Homo sapien
gagcatttatgctgttctcccacag

SEQ ID NO: 2026271 - DNA, 25 bp, Homo sapien
gagccgtgtcccagagcaaattgtc

SEQ ID NO: 2026272 - DNA, 25 bp, Homo sapien
tgcaggcaatttggagccgtgtccc

SEQ ID NO: 2026273 - DNA, 25 bp, Homo sapien
gtagaacagtgaaaaaggagcattt

SEQ ID NO: 2026274 - DNA, 25 bp, Homo sapien
gctgcaatatggtgtactcgagtgt

SEQ ID NO: 2026275 - DNA, 25 bp, Homo sapien
tgtggttgcagttgctgactcagct

SEQ ID NO: 2026276 - DNA, 25 bp, Homo sapien
actcgagtgtggtgtctctagtgac

SEQ ID NO: 2026277 - DNA, 25 bp, Homo sapien
tagggcttttcttcggaagctgcaa

SEQ ID NO: 2026278 - DNA, 25 bp, Homo sapien
ctcttgccgctccttggggtggcag

SEQ ID NO: 2026279 - DNA, 25 bp, Homo sapien
gttgcttgtgttacagatggaagat

SEQ ID NO: 2026280 - DNA, 25 bp, Homo sapien
agttttgagtctctgacaacagggc

SEQ ID NO: 2026281 - DNA, 25 bp, Homo sapien
tgccagattgcatcaaaccgtttta

SEQ ID NO: 2026282 - DNA, 25 bp, Homo sapien
tacagatggaagataagattggaga

SEQ ID NO: 2026283 - DNA, 25 bp, Homo sapien
aaaggtctcgatacggctgaacaag

SEQ ID NO: 2026284 - DNA, 25 bp, Homo sapien
gaggcttctgctctattgaagtaaa

SEQ ID NO: 2026285 - DNA, 25 bp, Homo sapien
cattataaaccttgttagtgtgaca

SEQ ID NO: 2026286 - DNA, 25 bp, Homo sapien
tgacagccccttgtgtattgtttaa

SEQ ID NO: 2026287 - DNA, 25 bp, Homo sapien
ctgtctttggcaaactgtgaacaaa

SEQ ID NO: 2026288 - DNA, 25 bp, Homo sapien
tggtactggctggagtacccccagc

SEQ ID NO: 2026289 - DNA, 25 bp, Homo sapien
taggagtgctattctctggatggct

SEQ ID NO: 2026290 - DNA, 25 bp, Homo sapien
ctttgtggacgtgcagtgcctggct

SEQ ID NO: 2026291 - DNA, 25 bp, Homo sapien
cctgttgacgggctggactttcaat

SEQ ID NO: 2026292 - DNA, 25 bp, Homo sapien
tgggttttggtgctccctgttgacg

SEQ ID NO: 2026293 - DNA, 25 bp, Homo sapien
tcatcttggatgcttgtgggttttg

SEQ ID NO: 2026294 - DNA, 25 bp, Homo sapien
gacgggctggactttcaatgtagtt

SEQ ID NO: 2026295 - DNA, 25 bp, Homo sapien
gatgttggttctctcctggtttctc

SEQ ID NO: 2026296 - DNA, 25 bp, Homo sapien
gtcagatgttggttctctcctggtt

SEQ ID NO: 2026297 - DNA, 25 bp, Homo sapien
cagatgttggttctctcctggtttc

SEQ ID NO: 2026298 - DNA, 25 bp, Homo sapien
tcagatgttggttctctcctggttt

SEQ ID NO: 2026299 - DNA, 25 bp, Homo sapien
gtggtaactggtaaggcagccagat

SEQ ID NO: 2026300 - DNA, 25 bp, Homo sapien
tcttcttggtggtaactggtaaggc

SEQ ID NO: 2026301 - DNA, 25 bp, Homo sapien
tgcctgatggaaggcacaattctcc

SEQ ID NO: 2026302 - DNA, 25 bp, Homo sapien
ctggcttggaagaagcaatgtgttt

SEQ ID NO: 2026303 - DNA, 25 bp, Homo sapien
gagtcagtggacagagattaatgtc

SEQ ID NO: 2026304 - DNA, 25 bp, Homo sapien
ctgagtcagtggacagagattaatg

SEQ ID NO: 2026305 - DNA, 25 bp, Homo sapien
tcagtggacagagattaatgtccat

SEQ ID NO: 2026306 - DNA, 25 bp, Homo sapien
agtcagtggacagagattaatgtcc

SEQ ID NO: 2026307 - DNA, 25 bp, Homo sapien
ggtttgttccccattaatagtctgc

SEQ ID NO: 2026308 - DNA, 25 bp, Homo sapien
gattctactaatgcagatcatgaaa

SEQ ID NO: 2026309 - DNA, 25 bp, Homo sapien
ttttgataggtacttgggaactgat

SEQ ID NO: 2026310 - DNA, 25 bp, Homo sapien
cattaatagtctgcaacattttcag

SEQ ID NO: 2026311 - DNA, 25 bp, Homo sapien
tttttgactggatgcttcggcctca

SEQ ID NO: 2026312 - DNA, 25 bp, Homo sapien
gaaacagactcacgaggacaagatg

SEQ ID NO: 2026313 - DNA, 25 bp, Homo sapien
tccaaccttgatgcaggaggaacct

SEQ ID NO: 2026314 - DNA, 25 bp, Homo sapien
ggagccaggcatgccgtctttttga

SEQ ID NO: 2026315 - DNA, 25 bp, Homo sapien
ttctgccaggtcatggtaatgccaa

SEQ ID NO: 2026316 - DNA, 25 bp, Homo sapien
cacctcttggatgtcctctatgtgg

SEQ ID NO: 2026317 - DNA, 25 bp, Homo sapien
cttcagttcatcttgggagtgtttc

SEQ ID NO: 2026318 - DNA, 25 bp, Homo sapien
tgtagcagcttctgccaggtcatgg

SEQ ID NO: 2026319 - DNA, 25 bp, Homo sapien
cttttgcatagacaaccacatagtg

SEQ ID NO: 2026320 - DNA, 25 bp, Homo sapien
ttttgcatagacaaccacatagtga

SEQ ID NO: 2026321 - DNA, 25 bp, Homo sapien
ctaattctttgagtgggttttggag

SEQ ID NO: 2026322 - DNA, 25 bp, Homo sapien
gcctgggtaggcagcaatcgctgtc

SEQ ID NO: 2026323 - DNA, 25 bp, Homo sapien
gatccgataatacttcagaccctaa

SEQ ID NO: 2026324 - DNA, 25 bp, Homo sapien
gctggttagtgagagtgaagcccct

SEQ ID NO: 2026325 - DNA, 25 bp, Homo sapien
ataagatgaagcctcctgctgtgag

SEQ ID NO: 2026326 - DNA, 25 bp, Homo sapien
atgtccaccttgcatgtatgaccag

SEQ ID NO: 2026327 - DNA, 25 bp, Homo sapien
ttcccaccagggaccatgctgctgg

SEQ ID NO: 2026328 - DNA, 25 bp, Homo sapien
ctgcctacagtctccttcccaccag

SEQ ID NO: 2026329 - DNA, 25 bp, Homo sapien
tgattcctccggctcatttaggagc

SEQ ID NO: 2026330 - DNA, 25 bp, Homo sapien
ccatttggataggtaagtaggattc

SEQ ID NO: 2026331 - DNA, 25 bp, Homo sapien
aaagttctcgttttgcttagaccat

SEQ ID NO: 2026332 - DNA, 25 bp, Homo sapien
tggaagaggccttagggccaaggcg

SEQ ID NO: 2026333 - DNA, 25 bp, Homo sapien
cagatttagccctctccttatgagt

SEQ ID NO: 2026334 - DNA, 25 bp, Homo sapien
tccagatttagccctctccttatga

SEQ ID NO: 2026335 - DNA, 25 bp, Homo sapien
ctggttccagatttagccctctcct

SEQ ID NO: 2026336 - DNA, 25 bp, Homo sapien
gttccagatttagccctctccttat

SEQ ID NO: 2026337 - DNA, 25 bp, Homo sapien
agactgaaaaacctgttgtattaca

SEQ ID NO: 2026338 - DNA, 25 bp, Homo sapien
tgttgtattacactttccaatctct

SEQ ID NO: 2026339 - DNA, 25 bp, Homo sapien
aacctgttgtattacactttccaat

SEQ ID NO: 2026340 - DNA, 25 bp, Homo sapien
gagccatcaataaaacaatcatttc

SEQ ID NO: 2026341 - DNA, 25 bp, Homo sapien
tcaaacctcctgatcttgaagatat

SEQ ID NO: 2026342 - DNA, 25 bp, Homo sapien
actcaaacctcctgatcttgaagat

SEQ ID NO: 2026343 - DNA, 25 bp, Homo sapien
ctcaaacctcctgatcttgaagata

SEQ ID NO: 2026344 - DNA, 25 bp, Homo sapien
cactcaaacctcctgatcttgaaga

SEQ ID NO: 2026345 - DNA, 25 bp, Homo sapien
gcaaagggagaagctatgcccacta

SEQ ID NO: 2026346 - DNA, 25 bp, Homo sapien
cagatgaattcagtctgcaggtttc

SEQ ID NO: 2026347 - DNA, 25 bp, Homo sapien
tgtggacccattggaaagctgataa

SEQ ID NO: 2026348 - DNA, 25 bp, Homo sapien
tagtctgcaagaatgcatgccacca

SEQ ID NO: 2026349 - DNA, 25 bp, Homo sapien
gggtccccatttccaagcactgtat

SEQ ID NO: 2026350 - DNA, 25 bp, Homo sapien
tccctgaccacgtggaatggatgtt

SEQ ID NO: 2026351 - DNA, 25 bp, Homo sapien
gatgttaggagcctgctttgttcca

SEQ ID NO: 2026352 - DNA, 25 bp, Homo sapien
gattgacttccacgctggtcgtaag

SEQ ID NO: 2026353 - DNA, 25 bp, Homo sapien
gatctgctgatattcacgggctgct

SEQ ID NO: 2026354 - DNA, 25 bp, Homo sapien
gaaaccacccagaatagtaattcca

SEQ ID NO: 2026355 - DNA, 25 bp, Homo sapien
gggttgatgtgacaaaagttgcccc

SEQ ID NO: 2026356 - DNA, 25 bp, Homo sapien
caactgcttgatagaggtcctctgt

SEQ ID NO: 2026357 - DNA, 25 bp, Homo sapien
tttgaaattctacatcagcagcttt

SEQ ID NO: 2026358 - DNA, 25 bp, Homo sapien
cattcatgagggaccatctctcttt

SEQ ID NO: 2026359 - DNA, 25 bp, Homo sapien
tcagaacattagcatgccctggctt

SEQ ID NO: 2026360 - DNA, 25 bp, Homo sapien
gctttcattggagccagggcaaagt

SEQ ID NO: 2026361 - DNA, 25 bp, Homo sapien
aaaatctgtgtacaccttctttctt

SEQ ID NO: 2026362 - DNA, 25 bp, Homo sapien
aaaaatctgtgtacaccttctttct

SEQ ID NO: 2026363 - DNA, 25 bp, Homo sapien
tgtaaaaatctgtgtacaccttctt

SEQ ID NO: 2026364 - DNA, 25 bp, Homo sapien
taaaaatctgtgtacaccttctttc

SEQ ID NO: 2026365 - DNA, 25 bp, Homo sapien
gctcggccagaaggccatgcatccg

SEQ ID NO: 2026366 - DNA, 25 bp, Homo sapien
tatgaaattgcagatgctcggccag

SEQ ID NO: 2026367 - DNA, 25 bp, Homo sapien
ggttttgtcaaagcatgggaagcca

SEQ ID NO: 2026368 - DNA, 25 bp, Homo sapien
ctgcaagctccagggataccatgaa

SEQ ID NO: 2026369 - DNA, 25 bp, Homo sapien
tgatataagagtcagaacatctgct

SEQ ID NO: 2026370 - DNA, 25 bp, Homo sapien
tataagacttgctgtgctttttggc

SEQ ID NO: 2026371 - DNA, 25 bp, Homo sapien
gtattagaaggtgtccaatgtctca

SEQ ID NO: 2026372 - DNA, 25 bp, Homo sapien
gcccagaattctcctttatctgata

SEQ ID NO: 2026373 - DNA, 25 bp, Homo sapien
taacgcttttgcaaagacaactaga

SEQ ID NO: 2026374 - DNA, 25 bp, Homo sapien
aaacagaagtggtcaagaaatggca

SEQ ID NO: 2026375 - DNA, 25 bp, Homo sapien
catttatcgattctgagagtgggct

SEQ ID NO: 2026376 - DNA, 25 bp, Homo sapien
tagttgaatgtcagaagtcagagcc

SEQ ID NO: 2026377 - DNA, 25 bp, Homo sapien
caaaaagtctccatgggaaggtgaa

SEQ ID NO: 2026378 - DNA, 25 bp, Homo sapien
gagtttagaaccagtgtcggaggcc

SEQ ID NO: 2026379 - DNA, 25 bp, Homo sapien
tgagagaccatgtgaagctggagac

SEQ ID NO: 2026380 - DNA, 25 bp, Homo sapien
gagacataaattccaaactcgaggg

SEQ ID NO: 2026381 - DNA, 25 bp, Homo sapien
ttgtcatattttgaagttgcatggg

SEQ ID NO: 2026382 - DNA, 25 bp, Homo sapien
catattttgaagttgcatggggctg

SEQ ID NO: 2026383 - DNA, 25 bp, Homo sapien
tattttgaagttgcatggggctgga

SEQ ID NO: 2026384 - DNA, 25 bp, Homo sapien
gtcatattttgaagttgcatggggc

SEQ ID NO: 2026385 - DNA, 25 bp, Homo sapien
tcagatctggagaggtttgcacagg

SEQ ID NO: 2026386 - DNA, 25 bp, Homo sapien
tgaattgcagactattagaagccga

SEQ ID NO: 2026387 - DNA, 25 bp, Homo sapien
tagaagccgaatgtagctgttggtg

SEQ ID NO: 2026388 - DNA, 25 bp, Homo sapien
tgtaacctagacagttgcatttgca

SEQ ID NO: 2026389 - DNA, 25 bp, Homo sapien
caaaatggttactagaggtctgagc

SEQ ID NO: 2026390 - DNA, 25 bp, Homo sapien
cacatgctctgggtgtaaggaagac

SEQ ID NO: 2026391 - DNA, 25 bp, Homo sapien
aataatggcctccaagtatgcccac

SEQ ID NO: 2026392 - DNA, 25 bp, Homo sapien
gttgctcagcgtgtaggacttttcc

SEQ ID NO: 2026393 - DNA, 25 bp, Homo sapien
tacgtcaatactaacctaagggtga

SEQ ID NO: 2026394 - DNA, 25 bp, Homo sapien
caaatataagctcggtgaaaataca

SEQ ID NO: 2026395 - DNA, 25 bp, Homo sapien
ggttacaatcttttgtctacagctc

SEQ ID NO: 2026396 - DNA, 25 bp, Homo sapien
agctcctcgtcaccttacgtcaata

SEQ ID NO: 2026397 - DNA, 25 bp, Homo sapien
catatctcaggttctaaagtacagt

SEQ ID NO: 2026398 - DNA, 25 bp, Homo sapien
gatccctcttgtcttcagcaggtaa

SEQ ID NO: 2026399 - DNA, 25 bp, Homo sapien
tgcaaatctgaagaagagatccctc

SEQ ID NO: 2026400 - DNA, 25 bp, Homo sapien
ttcttgaaattcagactggccgatg

SEQ ID NO: 2026401 - DNA, 25 bp, Homo sapien
atagccaatagcatgaaatgacaat

SEQ ID NO: 2026402 - DNA, 25 bp, Homo sapien
tagccaatagcatgaaatgacaatt

SEQ ID NO: 2026403 - DNA, 25 bp, Homo sapien
tttcaccaataattggacaattgca

SEQ ID NO: 2026404 - DNA, 25 bp, Homo sapien
aatagccaatagcatgaaatgacaa

SEQ ID NO: 2026405 - DNA, 25 bp, Homo sapien
tatcaagtaatgtgtgatgagatac

SEQ ID NO: 2026406 - DNA, 25 bp, Homo sapien
catctcctgacgctatgtacaaatc

SEQ ID NO: 2026407 - DNA, 25 bp, Homo sapien
agaggtagaagtcaagtcttgccac

SEQ ID NO: 2026408 - DNA, 25 bp, Homo sapien
ttgacactacgcacatctcctgacg

SEQ ID NO: 2026409 - DNA, 25 bp, Homo sapien
caatggtttttgtatgcatttttga

SEQ ID NO: 2026410 - DNA, 25 bp, Homo sapien
tttcatgcaatggtttttgtatgca

SEQ ID NO: 2026411 - DNA, 25 bp, Homo sapien
catgcaatggtttttgtatgcattt

SEQ ID NO: 2026412 - DNA, 25 bp, Homo sapien
gcaatggtttttgtatgcatttttg

SEQ ID NO: 2026413 - DNA, 25 bp, Homo sapien
cctcatccctagaggtagcagctgc

SEQ ID NO: 2026414 - DNA, 25 bp, Homo sapien
cttagaattgtctcttgcgtcatta

SEQ ID NO: 2026415 - DNA, 25 bp, Homo sapien
tgttttgaaagtccttagaattgtc

SEQ ID NO: 2026416 - DNA, 25 bp, Homo sapien
ctgttttgaaagtccttagaattgt

SEQ ID NO: 2026417 - DNA, 25 bp, Homo sapien
ttgacagttgggtctggacagagta

SEQ ID NO: 2026418 - DNA, 25 bp, Homo sapien
tttggcttctgttgacagttgggtc

SEQ ID NO: 2026419 - DNA, 25 bp, Homo sapien
tggcttctgttgacagttgggtctg

SEQ ID NO: 2026420 - DNA, 25 bp, Homo sapien
ttggcttctgttgacagttgggtct

SEQ ID NO: 2026421 - DNA, 25 bp, Homo sapien
tgccgcctttatccaggtaccgtgg

SEQ ID NO: 2026422 - DNA, 25 bp, Homo sapien
tgaactccgtgctagtgaaggtaac

SEQ ID NO: 2026423 - DNA, 25 bp, Homo sapien
tacccaattactgaagccccagatg

SEQ ID NO: 2026424 - DNA, 25 bp, Homo sapien
gaccacagaggtaggcttgcaagac

SEQ ID NO: 2026425 - DNA, 25 bp, Homo sapien
tactgctggcaacttcgctcaattg

SEQ ID NO: 2026426 - DNA, 25 bp, Homo sapien
gctcaattgtgtgcccagtgggtgt

SEQ ID NO: 2026427 - DNA, 25 bp, Homo sapien
tgtggtgcagtctcaaatggcggct

SEQ ID NO: 2026428 - DNA, 25 bp, Homo sapien
aatggcggcttctcttactgctggc

SEQ ID NO: 2026429 - DNA, 25 bp, Homo sapien
atcacattcttcagataatttatta

SEQ ID NO: 2026430 - DNA, 25 bp, Homo sapien
taatcacattcttcagataatttat

SEQ ID NO: 2026431 - DNA, 25 bp, Homo sapien
tcacattcttcagataatttattac

SEQ ID NO: 2026432 - DNA, 25 bp, Homo sapien
ttaatcacattcttcagataattta

SEQ ID NO: 2026433 - DNA, 25 bp, Homo sapien
tggatgtgccttcagtgtgcattta

SEQ ID NO: 2026434 - DNA, 25 bp, Homo sapien
ttccctgtatagtcctctgcagcat

SEQ ID NO: 2026435 - DNA, 25 bp, Homo sapien
ctcaggtgttccaatgatagtttta

SEQ ID NO: 2026436 - DNA, 25 bp, Homo sapien
catcaaacccagaccatttgtggaa

SEQ ID NO: 2026437 - DNA, 25 bp, Homo sapien
cgggcacccacaaagagagcattta

SEQ ID NO: 2026438 - DNA, 25 bp, Homo sapien
cagtgatcatctccctacaggaaca

SEQ ID NO: 2026439 - DNA, 25 bp, Homo sapien
gatgtccaaatacaagcttccagtg

SEQ ID NO: 2026440 - DNA, 25 bp, Homo sapien
tgaacaagttaaggaaagaggcacc

SEQ ID NO: 2026441 - DNA, 25 bp, Homo sapien
gcttcaagagggacacacttggaga

SEQ ID NO: 2026442 - DNA, 25 bp, Homo sapien
catgcagcttcaagagggacacact

SEQ ID NO: 2026443 - DNA, 25 bp, Homo sapien
atgcagcttcaagagggacacactt

SEQ ID NO: 2026444 - DNA, 25 bp, Homo sapien
tcaagagggacacacttggagaggt

SEQ ID NO: 2026445 - DNA, 25 bp, Homo sapien
cctgtgtgagctgatctaccatgac

SEQ ID NO: 2026446 - DNA, 25 bp, Homo sapien
ccagaggctgcgtaggtgataagca

SEQ ID NO: 2026447 - DNA, 25 bp, Homo sapien
tgctggatgagaaatcacacaagtg

SEQ ID NO: 2026448 - DNA, 25 bp, Homo sapien
tctgtgcccaactagtgcacctgtg

SEQ ID NO: 2026449 - DNA, 25 bp, Homo sapien
tggttccaggattccatttcccttc

SEQ ID NO: 2026450 - DNA, 25 bp, Homo sapien
atttcccttctcttgttctgttgtt

SEQ ID NO: 2026451 - DNA, 25 bp, Homo sapien
ttctcttgttctgttgttgaagcat

SEQ ID NO: 2026452 - DNA, 25 bp, Homo sapien
ccttctcttgttctgttgttgaagc

SEQ ID NO: 2026453 - DNA, 25 bp, Homo sapien
aggaaagcaagttcttcagacggaa

SEQ ID NO: 2026454 - DNA, 25 bp, Homo sapien
gcaagttcttcagacggaaaggaaa

SEQ ID NO: 2026455 - DNA, 25 bp, Homo sapien
cggaaaggaaatgataccagatgaa

SEQ ID NO: 2026456 - DNA, 25 bp, Homo sapien
acggaaaggaaatgataccagatga

SEQ ID NO: 2026457 - DNA, 25 bp, Homo sapien
gctatggtgatcaggagggtgtggt

SEQ ID NO: 2026458 - DNA, 25 bp, Homo sapien
aagctatggtgatcaggagggtgtg

SEQ ID NO: 2026459 - DNA, 25 bp, Homo sapien
aaagctatggtgatcaggagggtgt

SEQ ID NO: 2026460 - DNA, 25 bp, Homo sapien
atggtgatcaggagggtgtggtgtt

SEQ ID NO: 2026461 - DNA, 25 bp, Homo sapien
atatcctttaagaatgaggatgaaa

SEQ ID NO: 2026462 - DNA, 25 bp, Homo sapien
gatgaaaatatcctttaagaatgag

SEQ ID NO: 2026463 - DNA, 25 bp, Homo sapien
gaaaatatcctttaagaatgaggat

SEQ ID NO: 2026464 - DNA, 25 bp, Homo sapien
tgatgaaaatatcctttaagaatga

SEQ ID NO: 2026465 - DNA, 25 bp, Homo sapien
tccagagaaactaaggaattggccc

SEQ ID NO: 2026466 - DNA, 25 bp, Homo sapien
ccatgtgactgtggagattggcatg

SEQ ID NO: 2026467 - DNA, 25 bp, Homo sapien
ggttagagcagcagacttaagacct

SEQ ID NO: 2026468 - DNA, 25 bp, Homo sapien
gattggcatgtccaaaatttgtagg

SEQ ID NO: 2026469 - DNA, 25 bp, Homo sapien
cagtgaactgtgcaaatgatcttca

SEQ ID NO: 2026470 - DNA, 25 bp, Homo sapien
attttttcaatgctgcatccttcga

SEQ ID NO: 2026471 - DNA, 25 bp, Homo sapien
ttcaatgctgcatccttcgatttct

SEQ ID NO: 2026472 - DNA, 25 bp, Homo sapien
tcagtgaactgtgcaaatgatcttc

SEQ ID NO: 2026473 - DNA, 25 bp, Homo sapien
aattcttctcgttatagccgtgtca

SEQ ID NO: 2026474 - DNA, 25 bp, Homo sapien
ttctcgttatagccgtgtcaatgtc

SEQ ID NO: 2026475 - DNA, 25 bp, Homo sapien
tcttctcgttatagccgtgtcaatg

SEQ ID NO: 2026476 - DNA, 25 bp, Homo sapien
ttcttctcgttatagccgtgtcaat

SEQ ID NO: 2026477 - DNA, 25 bp, Homo sapien
gcagcggtgatcagtgtccagtcca

SEQ ID NO: 2026478 - DNA, 25 bp, Homo sapien
gacctggcagcggtgatcagtgtcc

SEQ ID NO: 2026479 - DNA, 25 bp, Homo sapien
ggtgatcagtgtccagtccatccca

SEQ ID NO: 2026480 - DNA, 25 bp, Homo sapien
tatgacctggcagcggtgatcagtg

SEQ ID NO: 2026481 - DNA, 25 bp, Homo sapien
gagtctatttcgtctataatgatga

SEQ ID NO: 2026482 - DNA, 25 bp, Homo sapien
aaaggagtctatttcgtctataatg

SEQ ID NO: 2026483 - DNA, 25 bp, Homo sapien
tttcgtctataatgatgatggacag

SEQ ID NO: 2026484 - DNA, 25 bp, Homo sapien
cgtctataatgatgatggacagttg

SEQ ID NO: 2026485 - DNA, 25 bp, Homo sapien
ctgtggccttggcaatcaacgtttt

SEQ ID NO: 2026486 - DNA, 25 bp, Homo sapien
tggccttggcaatcaacgttttacc

SEQ ID NO: 2026487 - DNA, 25 bp, Homo sapien
ggccttggcaatcaacgttttacca

SEQ ID NO: 2026488 - DNA, 25 bp, Homo sapien
ttggcaatcaacgttttaccacagc

SEQ ID NO: 2026489 - DNA, 25 bp, Homo sapien
cagaagcctggaattctcaaacaaa

SEQ ID NO: 2026490 - DNA, 25 bp, Homo sapien
tgcagaagcctggaattctcaaaca

SEQ ID NO: 2026491 - DNA, 25 bp, Homo sapien
ctgcagaagcctggaattctcaaac

SEQ ID NO: 2026492 - DNA, 25 bp, Homo sapien
agaagcctggaattctcaaacaaat

SEQ ID NO: 2026493 - DNA, 25 bp, Homo sapien
tccaagtaacatgcatattaagagg

SEQ ID NO: 2026494 - DNA, 25 bp, Homo sapien
catattctgagagcttcacgttttt

SEQ ID NO: 2026495 - DNA, 25 bp, Homo sapien
tttcatattctgagagcttcacgtt

SEQ ID NO: 2026496 - DNA, 25 bp, Homo sapien
catttcatattctgagagcttcacg

SEQ ID NO: 2026497 - DNA, 25 bp, Homo sapien
tctgagagcttcacgtttttcacac

SEQ ID NO: 2026498 - DNA, 25 bp, Homo sapien
atttgatactaaagtatgttactga

SEQ ID NO: 2026499 - DNA, 25 bp, Homo sapien
tactaaagtatgttactgaaccaaa

SEQ ID NO: 2026500 - DNA, 25 bp, Homo sapien
ctaaagtatgttactgaaccaaata

SEQ ID NO: 2026501 - DNA, 25 bp, Homo sapien
gatactaaagtatgttactgaacca

SEQ ID NO: 2026502 - DNA, 25 bp, Homo sapien
ctgttataataaggcagcactgagt

SEQ ID NO: 2026503 - DNA, 25 bp, Homo sapien
caattcaagacggtttttcctgcct

SEQ ID NO: 2026504 - DNA, 25 bp, Homo sapien
tacgaagttaaagccaggtactcac

SEQ ID NO: 2026505 - DNA, 25 bp, Homo sapien
caaaaatgttctctgcaccatgcca

SEQ ID NO: 2026506 - DNA, 25 bp, Homo sapien
aatgttataaaggtttgcccctgtg

SEQ ID NO: 2026507 - DNA, 25 bp, Homo sapien
gttgactggtctaaaaactacacag

SEQ ID NO: 2026508 - DNA, 25 bp, Homo sapien
gaatagacctccacttataggctga

SEQ ID NO: 2026509 - DNA, 25 bp, Homo sapien
gagaagcactggcatatttggaaac

SEQ ID NO: 2026510 - DNA, 25 bp, Homo sapien
gagttagagaacacagatcgcatct

SEQ ID NO: 2026511 - DNA, 25 bp, Homo sapien
tggaaagaacaatggatggctcctc

SEQ ID NO: 2026512 - DNA, 25 bp, Homo sapien
tattagccatgtagaaaactgacgc

SEQ ID NO: 2026513 - DNA, 25 bp, Homo sapien
tattacaagacactacagaatgggt

SEQ ID NO: 2026514 - DNA, 25 bp, Homo sapien
ctgcttctaggatggcaccttgctg

SEQ ID NO: 2026515 - DNA, 25 bp, Homo sapien
gttgtctggtaagggtctgctctct

SEQ ID NO: 2026516 - DNA, 25 bp, Homo sapien
gatcatggcaccagctggttggttg

SEQ ID NO: 2026517 - DNA, 25 bp, Homo sapien
tgctgctgtgtcctctgatggtaaa

SEQ ID NO: 2026518 - DNA, 25 bp, Homo sapien
ctgaaggggcaagggtcaagagcat

SEQ ID NO: 2026519 - DNA, 25 bp, Homo sapien
gtgtgggcaggttattaccatccat

SEQ ID NO: 2026520 - DNA, 25 bp, Homo sapien
tattaccatccataggtctgaaggg

SEQ ID NO: 2026521 - DNA, 25 bp, Homo sapien
caggttattaccatccataggtctg

SEQ ID NO: 2026522 - DNA, 25 bp, Homo sapien
ttttgcatcccagaacgaagctcaa

SEQ ID NO: 2026523 - DNA, 25 bp, Homo sapien
aatgtggaacaatggctctcatgac

SEQ ID NO: 2026524 - DNA, 25 bp, Homo sapien
acaccaggagtagcacttgtttcaa

SEQ ID NO: 2026525 - DNA, 25 bp, Homo sapien
tgtccaaagctcacataacaccagg

SEQ ID NO: 2026526 - DNA, 25 bp, Homo sapien
aactgacagaagagatcacttaaat

SEQ ID NO: 2026527 - DNA, 25 bp, Homo sapien
tgtgaatacattgtgtcagttagaa

SEQ ID NO: 2026528 - DNA, 25 bp, Homo sapien
gaaatcactgtatagcaaactgcct

SEQ ID NO: 2026529 - DNA, 25 bp, Homo sapien
tggattgaaagacactatattgtga

SEQ ID NO: 2026530 - DNA, 25 bp, Homo sapien
tacattgtgtcagttagaaatcact

SEQ ID NO: 2026531 - DNA, 25 bp, Homo sapien
gaagcaggagagagttttcaaggct

SEQ ID NO: 2026532 - DNA, 25 bp, Homo sapien
ctgcagtgagaatcagagggaagca

SEQ ID NO: 2026533 - DNA, 25 bp, Homo sapien
tgagcaggtagaaaaaaccaagttg

SEQ ID NO: 2026534 - DNA, 25 bp, Homo sapien
gagttttcaaggctgagcaggtaga

SEQ ID NO: 2026535 - DNA, 25 bp, Homo sapien
ggtaaatctctgcttattctctgaa

SEQ ID NO: 2026536 - DNA, 25 bp, Homo sapien
ttggtacggcagaacagtgcctagg

SEQ ID NO: 2026537 - DNA, 25 bp, Homo sapien
gaaacgggcagtagagccaactggt

SEQ ID NO: 2026538 - DNA, 25 bp, Homo sapien
ctgtgccagcaaaggatactctgga

SEQ ID NO: 2026539 - DNA, 25 bp, Homo sapien
ctgggaagtgtctatccattcccat

SEQ ID NO: 2026540 - DNA, 25 bp, Homo sapien
ttatttgcgtgcatttgatgcagag

SEQ ID NO: 2026541 - DNA, 25 bp, Homo sapien
ttgcgtgcatttgatgcagagttgg

SEQ ID NO: 2026542 - DNA, 25 bp, Homo sapien
tgttcttttgtactgcccggtttca

SEQ ID NO: 2026543 - DNA, 25 bp, Homo sapien
gttgggaatgaaactcggaaagcat

SEQ ID NO: 2026544 - DNA, 25 bp, Homo sapien
aagtctggtttgatctgagtataat

SEQ ID NO: 2026545 - DNA, 25 bp, Homo sapien
gagcacgtgcaaagtctggtttgat

SEQ ID NO: 2026546 - DNA, 25 bp, Homo sapien
aatggttctgagcagtcaaaggtca

SEQ ID NO: 2026547 - DNA, 25 bp, Homo sapien
ggagcacgtgcaaagtctggtttga

SEQ ID NO: 2026548 - DNA, 25 bp, Homo sapien
ggtgatacagaatagggggcgatga

SEQ ID NO: 2026549 - DNA, 25 bp, Homo sapien
tgatacagaatagggggcgatgagg

SEQ ID NO: 2026550 - DNA, 25 bp, Homo sapien
gtgatacagaatagggggcgatgag

SEQ ID NO: 2026551 - DNA, 25 bp, Homo sapien
tggaagtaattgtatcatatttttt

SEQ ID NO: 2026552 - DNA, 25 bp, Homo sapien
ttaataatggaagtaattgtatcat

SEQ ID NO: 2026553 - DNA, 25 bp, Homo sapien
aataatggaagtaattgtatcatat

SEQ ID NO: 2026554 - DNA, 25 bp, Homo sapien
taatggaagtaattgtatcatattt

SEQ ID NO: 2026555 - DNA, 25 bp, Homo sapien
tcagacagaagttcacatactggaa

SEQ ID NO: 2026556 - DNA, 25 bp, Homo sapien
caagggatgcgagaccctttgctga

SEQ ID NO: 2026557 - DNA, 25 bp, Homo sapien
tccccgatccaactaggttaatgag

SEQ ID NO: 2026558 - DNA, 25 bp, Homo sapien
ccctgaggaggagaatttctcccaa

SEQ ID NO: 2026559 - DNA, 25 bp, Homo sapien
tcagtatgagcacgataagaagatg

SEQ ID NO: 2026560 - DNA, 25 bp, Homo sapien
gcacgataagaagatgggtcaggca

SEQ ID NO: 2026561 - DNA, 25 bp, Homo sapien
tactgaagagatcagtatgagcacg

SEQ ID NO: 2026562 - DNA, 25 bp, Homo sapien
taatcagtgctactgaagagatcag

SEQ ID NO: 2026563 - DNA, 25 bp, Homo sapien
cttgatggtctggagtggctcctag

SEQ ID NO: 2026564 - DNA, 25 bp, Homo sapien
ttgatggtctggagtggctcctaga

SEQ ID NO: 2026565 - DNA, 25 bp, Homo sapien
ggtctggagtggctcctagagccat

SEQ ID NO: 2026566 - DNA, 25 bp, Homo sapien
atggtctggagtggctcctagagcc

SEQ ID NO: 2026567 - DNA, 25 bp, Homo sapien
gaatgacgtggagcagtcgaagcaa

SEQ ID NO: 2026568 - DNA, 25 bp, Homo sapien
gcaatggaacctgagtacttcaggg

SEQ ID NO: 2026569 - DNA, 25 bp, Homo sapien
aaatgaacggctttcttttgtaatg

SEQ ID NO: 2026570 - DNA, 25 bp, Homo sapien
tgggcagtcagcagaaagtaaatct

SEQ ID NO: 2026571 - DNA, 25 bp, Homo sapien
tggactatgatgatatactccgtgt

SEQ ID NO: 2026572 - DNA, 25 bp, Homo sapien
gctggactatgatgatatactccgt

SEQ ID NO: 2026573 - DNA, 25 bp, Homo sapien
gactatgatgatatactccgtgtta

SEQ ID NO: 2026574 - DNA, 25 bp, Homo sapien
tatgatgatatactccgtgttaaaa

SEQ ID NO: 2026575 - DNA, 25 bp, Homo sapien
taggcaggccattttgccgcttgcc

SEQ ID NO: 2026576 - DNA, 25 bp, Homo sapien
ttataagggtgattccttcataggc

SEQ ID NO: 2026577 - DNA, 25 bp, Homo sapien
tgattccttcataggcaggccattt

SEQ ID NO: 2026578 - DNA, 25 bp, Homo sapien
ccttcataggcaggccattttgccg

SEQ ID NO: 2026579 - DNA, 25 bp, Homo sapien
aatgctgccaatttgctgggagcaa

SEQ ID NO: 2026580 - DNA, 25 bp, Homo sapien
ttgctgggagcaaattcatcaaatg

SEQ ID NO: 2026581 - DNA, 25 bp, Homo sapien
tatacactgatagagcagctaatct

SEQ ID NO: 2026582 - DNA, 25 bp, Homo sapien
taacttgttggatgagggttgctgc

SEQ ID NO: 2026583 - DNA, 25 bp, Homo sapien
tattgcaacgacgacttatacactg

SEQ ID NO: 2026584 - DNA, 25 bp, Homo sapien
ttgctgctggcatgatttactcggg

SEQ ID NO: 2026585 - DNA, 25 bp, Homo sapien
gatgccaaggaaatgctgcattctt

SEQ ID NO: 2026586 - DNA, 25 bp, Homo sapien
atttacagatttacagatgccaagg

SEQ ID NO: 2026587 - DNA, 25 bp, Homo sapien
agatttacagatgccaaggaaatgc

SEQ ID NO: 2026588 - DNA, 25 bp, Homo sapien
tcgatctcccgaactcaggtaatct

SEQ ID NO: 2026589 - DNA, 25 bp, Homo sapien
tcatccacgtttcctcgagcactag

SEQ ID NO: 2026590 - DNA, 25 bp, Homo sapien
cgtttcctcgagcactagcctctct

SEQ ID NO: 2026591 - DNA, 25 bp, Homo sapien
gtttcctcgagcactagcctctctt

SEQ ID NO: 2026592 - DNA, 25 bp, Homo sapien
ctttcatccacgtttcctcgagcac

SEQ ID NO: 2026593 - DNA, 25 bp, Homo sapien
tgaggagatcgtgacccaggtcttt

SEQ ID NO: 2026594 - DNA, 25 bp, Homo sapien
taatgacgcgtgtagcgcctgtgga

SEQ ID NO: 2026595 - DNA, 25 bp, Homo sapien
gctggcattcagttagggcaaggaa

SEQ ID NO: 2026596 - DNA, 25 bp, Homo sapien
gaagttgcccacttcacatgccagg

SEQ ID NO: 2026597 - DNA, 25 bp, Homo sapien
caggaaagaatgtgtttgtccggac

SEQ ID NO: 2026598 - DNA, 25 bp, Homo sapien
aactgaaggcaagataatgagggag

SEQ ID NO: 2026599 - DNA, 25 bp, Homo sapien
ttaaactgaaggcaagataatgagg

SEQ ID NO: 2026600 - DNA, 25 bp, Homo sapien
gtccggacaccaacagcctgtaagt

SEQ ID NO: 2026601 - DNA, 25 bp, Homo sapien
caaggaatgaggcatccgcgaggct

SEQ ID NO: 2026602 - DNA, 25 bp, Homo sapien
tagcacgttatcctaaaacagcctg

SEQ ID NO: 2026603 - DNA, 25 bp, Homo sapien
tagtcatttctttgcgctctccagg

SEQ ID NO: 2026604 - DNA, 25 bp, Homo sapien
tttccactttgcacgactttagcag

SEQ ID NO: 2026605 - DNA, 25 bp, Homo sapien
ccctctcctgtggtgaaatgctgaa

SEQ ID NO: 2026606 - DNA, 25 bp, Homo sapien
ttttctggtcgtcaatgctcggttt

SEQ ID NO: 2026607 - DNA, 25 bp, Homo sapien
cactgggttccatatgaaagtcccg

SEQ ID NO: 2026608 - DNA, 25 bp, Homo sapien
agtgattatttcagtgacgctacca

SEQ ID NO: 2026609 - DNA, 25 bp, Homo sapien
gctgtagcttgtacacttgtttaat

SEQ ID NO: 2026610 - DNA, 25 bp, Homo sapien
tgtagcttgtacacttgtttaatgt

SEQ ID NO: 2026611 - DNA, 25 bp, Homo sapien
tgtacacttgtttaatgtatagatc

SEQ ID NO: 2026612 - DNA, 25 bp, Homo sapien
gcttgtacacttgtttaatgtatag

SEQ ID NO: 2026613 - DNA, 25 bp, Homo sapien
aggctcattagctccttcctcaaag

SEQ ID NO: 2026614 - DNA, 25 bp, Homo sapien
ttgaccatcctgaatacctgatggg

SEQ ID NO: 2026615 - DNA, 25 bp, Homo sapien
atacctgatggggaatcacttccca

SEQ ID NO: 2026616 - DNA, 25 bp, Homo sapien
tcaagtttgaccatcctgaatacct

SEQ ID NO: 2026617 - DNA, 25 bp, Homo sapien
ttcaggtccctctttgcataccctt

SEQ ID NO: 2026618 - DNA, 25 bp, Homo sapien
ggtccctctttgcatacccttcacc

SEQ ID NO: 2026619 - DNA, 25 bp, Homo sapien
caggtccctctttgcatacccttca

SEQ ID NO: 2026620 - DNA, 25 bp, Homo sapien
attcaggtccctctttgcataccct

SEQ ID NO: 2026621 - DNA, 25 bp, Homo sapien
gaagtgagagaacaagctatgcaga

SEQ ID NO: 2026622 - DNA, 25 bp, Homo sapien
tgcctgctcgaatgccctgggttta

SEQ ID NO: 2026623 - DNA, 25 bp, Homo sapien
ggaacagtgaggaccaagcccttgg

SEQ ID NO: 2026624 - DNA, 25 bp, Homo sapien
gagagttactcagacatgcaatgca

SEQ ID NO: 2026625 - DNA, 25 bp, Homo sapien
tgtgaacgaaggactggcaaaatta

SEQ ID NO: 2026626 - DNA, 25 bp, Homo sapien
gggtcacatgtaaatgcaaggatat

SEQ ID NO: 2026627 - DNA, 25 bp, Homo sapien
tatgcatgttgagcatttgccgaga

SEQ ID NO: 2026628 - DNA, 25 bp, Homo sapien
ccaagagatggtagtaggtaggcct

SEQ ID NO: 2026629 - DNA, 25 bp, Homo sapien
ttttaagagctacaagtatgagacc

SEQ ID NO: 2026630 - DNA, 25 bp, Homo sapien
taagccctatgaagatggaattcct

SEQ ID NO: 2026631 - DNA, 25 bp, Homo sapien
tatgagaccagaaagcagtaagttg

SEQ ID NO: 2026632 - DNA, 25 bp, Homo sapien
tcttgatcccctcctaatgggaaat

SEQ ID NO: 2026633 - DNA, 25 bp, Homo sapien
cacttattgatctagctggcagaac

SEQ ID NO: 2026634 - DNA, 25 bp, Homo sapien
taattgctgtgcacacattctgtgc

SEQ ID NO: 2026635 - DNA, 25 bp, Homo sapien
gataattccaactctcggttgtcac

SEQ ID NO: 2026636 - DNA, 25 bp, Homo sapien
tatgggattgatacccgtccgtcaa

SEQ ID NO: 2026637 - DNA, 25 bp, Homo sapien
caggtacttctgtacagcccgaggg

SEQ ID NO: 2026638 - DNA, 25 bp, Homo sapien
gagtcaatgaatttatccacgaatg

SEQ ID NO: 2026639 - DNA, 25 bp, Homo sapien
cagcccgagggggaatatgtccttt

SEQ ID NO: 2026640 - DNA, 25 bp, Homo sapien
cacgaatgggtatctgccttcagtc

SEQ ID NO: 2026641 - DNA, 25 bp, Homo sapien
actccagacataaactgcccaaaac

SEQ ID NO: 2026642 - DNA, 25 bp, Homo sapien
gctgccttcagccactcacactcca

SEQ ID NO: 2026643 - DNA, 25 bp, Homo sapien
cactcacactccagacataaactgc

SEQ ID NO: 2026644 - DNA, 25 bp, Homo sapien
tcacactccagacataaactgccca

SEQ ID NO: 2026645 - DNA, 25 bp, Homo sapien
tattcaccttctggagaggttgctg

SEQ ID NO: 2026646 - DNA, 25 bp, Homo sapien
aatatattcaccttctggagaggtt

SEQ ID NO: 2026647 - DNA, 25 bp, Homo sapien
tcagctggggatgcgaagtaagtat

SEQ ID NO: 2026648 - DNA, 25 bp, Homo sapien
gatgcgaagtaagtattttaaggct

SEQ ID NO: 2026649 - DNA, 25 bp, Homo sapien
gagatatcaagtcctagatgctaga

SEQ ID NO: 2026650 - DNA, 25 bp, Homo sapien
ttaaaggtaatagcaaaatccgcaa

SEQ ID NO: 2026651 - DNA, 25 bp, Homo sapien
actttgctaagatgactgctaagag

SEQ ID NO: 2026652 - DNA, 25 bp, Homo sapien
cctagatgctagatatgctcattac

SEQ ID NO: 2026653 - DNA, 25 bp, Homo sapien
aaccacagaaccctcatggtttcct

SEQ ID NO: 2026654 - DNA, 25 bp, Homo sapien
accacagaaccctcatggtttcctg

SEQ ID NO: 2026655 - DNA, 25 bp, Homo sapien
agccctcaaccacacaggaaaccac

SEQ ID NO: 2026656 - DNA, 25 bp, Homo sapien
ctcaaccacacaggaaaccacagaa

SEQ ID NO: 2026657 - DNA, 25 bp, Homo sapien
tgaaaatgtgctggccgattcgcat

SEQ ID NO: 2026658 - DNA, 25 bp, Homo sapien
tgtaatgacaaggactaaggccggg

SEQ ID NO: 2026659 - DNA, 25 bp, Homo sapien
tataactccattacagagccgtctg

SEQ ID NO: 2026660 - DNA, 25 bp, Homo sapien
tacaaaggctcaaggaggagtcatg

SEQ ID NO: 2026661 - DNA, 25 bp, Homo sapien
gacagtcgccactttgtgtatgaga

SEQ ID NO: 2026662 - DNA, 25 bp, Homo sapien
tggcacttctgcctacagacacaga

SEQ ID NO: 2026663 - DNA, 25 bp, Homo sapien
tgtatgagacactgggttgcaccac

SEQ ID NO: 2026664 - DNA, 25 bp, Homo sapien
tgggctctggaaccactgccagtag

SEQ ID NO: 2026665 - DNA, 25 bp, Homo sapien
ctttcaaactccagctcagctttcc

SEQ ID NO: 2026666 - DNA, 25 bp, Homo sapien
aactccagctcagctttccagttat

SEQ ID NO: 2026667 - DNA, 25 bp, Homo sapien
tgtctttcaaactccagctcagctt

SEQ ID NO: 2026668 - DNA, 25 bp, Homo sapien
agctcagctttccagttatcttccc

SEQ ID NO: 2026669 - DNA, 25 bp, Homo sapien
tgttctattgacaagtctaattacc

SEQ ID NO: 2026670 - DNA, 25 bp, Homo sapien
attatggacacagaaatctgttcta

SEQ ID NO: 2026671 - DNA, 25 bp, Homo sapien
ttgacaagtctaattaccaaggaac

SEQ ID NO: 2026672 - DNA, 25 bp, Homo sapien
cttatgcattatggacacagaaatc

SEQ ID NO: 2026673 - DNA, 25 bp, Homo sapien
tgttgctccaacaagccaggcaggt

SEQ ID NO: 2026674 - DNA, 25 bp, Homo sapien
ggaggattgctcttaaagtttcttg

SEQ ID NO: 2026675 - DNA, 25 bp, Homo sapien
ctggcaaatggaggattgctcttaa

SEQ ID NO: 2026676 - DNA, 25 bp, Homo sapien
ccaggcaggtgagctgttatttgtc

SEQ ID NO: 2026677 - DNA, 25 bp, Homo sapien
tgttcacgtttcaagacccaatcag

SEQ ID NO: 2026678 - DNA, 25 bp, Homo sapien
cgtttcaagacccaatcagactctg

SEQ ID NO: 2026679 - DNA, 25 bp, Homo sapien
tcaagacccaatcagactctgcttc

SEQ ID NO: 2026680 - DNA, 25 bp, Homo sapien
ctgaattctgttcacgtttcaagac

SEQ ID NO: 2026681 - DNA, 25 bp, Homo sapien
gaatcccctgatatcataatgcggc

SEQ ID NO: 2026682 - DNA, 25 bp, Homo sapien
cctgatatcataatgcggcagttga

SEQ ID NO: 2026683 - DNA, 25 bp, Homo sapien
tgattggtgtctcctgaatcccctg

SEQ ID NO: 2026684 - DNA, 25 bp, Homo sapien
tcagacatcagtttgattggtgtct

SEQ ID NO: 2026685 - DNA, 25 bp, Homo sapien
ggcaaagcatgtctttgtactgggt

SEQ ID NO: 2026686 - DNA, 25 bp, Homo sapien
aaataaaccacagatgtccttggac

SEQ ID NO: 2026687 - DNA, 25 bp, Homo sapien
ccacagatgtccttggacgccaact

SEQ ID NO: 2026688 - DNA, 25 bp, Homo sapien
aaagcatgtctttgtactgggtcct

SEQ ID NO: 2026689 - DNA, 25 bp, Homo sapien
gagtatcttgcacagtacttaaatc

SEQ ID NO: 2026690 - DNA, 25 bp, Homo sapien
tatacttctgtagctcaatgttcac

SEQ ID NO: 2026691 - DNA, 25 bp, Homo sapien
taaatctatgtcattcagctccttg

SEQ ID NO: 2026692 - DNA, 25 bp, Homo sapien
cacagtacttaaatctatgtcattc

SEQ ID NO: 2026693 - DNA, 25 bp, Homo sapien
aggaactctagcgggaaaagaatcg

SEQ ID NO: 2026694 - DNA, 25 bp, Homo sapien
ttccaaatactgtttttcatcaggt

SEQ ID NO: 2026695 - DNA, 25 bp, Homo sapien
aatactgtttttcatcaggtactaa

SEQ ID NO: 2026696 - DNA, 25 bp, Homo sapien
ccaaatactgtttttcatcaggtac

SEQ ID NO: 2026697 - DNA, 25 bp, Homo sapien
ctgtttttcatcaggtactaaagtt

SEQ ID NO: 2026698 - DNA, 25 bp, Homo sapien
gtaatctctgacttgagtgctgggc

SEQ ID NO: 2026699 - DNA, 25 bp, Homo sapien
gcagtaccatgtgtataaggagaaa

SEQ ID NO: 2026700 - DNA, 25 bp, Homo sapien
gggcatttggatcactcggagctcc

SEQ ID NO: 2026701 - DNA, 25 bp, Homo sapien
ggatttcctcataggtgactgagca

SEQ ID NO: 2026702 - DNA, 25 bp, Homo sapien
tgcagcccattatcaccctgaggtg

SEQ ID NO: 2026703 - DNA, 25 bp, Homo sapien
tgctcagttctcgatgctcctgtgg

SEQ ID NO: 2026704 - DNA, 25 bp, Homo sapien
tatggcagtgcctagaatgtcccgg

SEQ ID NO: 2026705 - DNA, 25 bp, Homo sapien
tgaatactagaaggcaagacagccc

SEQ ID NO: 2026706 - DNA, 25 bp, Homo sapien
tccttttggcaaaaggaagctgatc

SEQ ID NO: 2026707 - DNA, 25 bp, Homo sapien
aagcaccaggagaacagctgccctg

SEQ ID NO: 2026708 - DNA, 25 bp, Homo sapien
aagtaatccaagcaccaggagaaca

SEQ ID NO: 2026709 - DNA, 25 bp, Homo sapien
ccttttggcaaaaggaagctgatca

SEQ ID NO: 2026710 - DNA, 25 bp, Homo sapien
tcaggctagtaaagctatggctgga

SEQ ID NO: 2026711 - DNA, 25 bp, Homo sapien
gctagtaaagctatggctggacccc

SEQ ID NO: 2026712 - DNA, 25 bp, Homo sapien
taaagctatggctggaccccaaatg

SEQ ID NO: 2026713 - DNA, 25 bp, Homo sapien
tggctggaccccaaatgctcttggg

SEQ ID NO: 2026714 - DNA, 25 bp, Homo sapien
ctgtcagcgtcttttcaggagatga

SEQ ID NO: 2026715 - DNA, 25 bp, Homo sapien
tgtcactattggctaccttctgcat

SEQ ID NO: 2026716 - DNA, 25 bp, Homo sapien
cacagcctttgtcctgtcactattg

SEQ ID NO: 2026717 - DNA, 25 bp, Homo sapien
gtcagcgtcttttcaggagatgaca

SEQ ID NO: 2026718 - DNA, 25 bp, Homo sapien
gtctgttgtatcctgccatgctcca

SEQ ID NO: 2026719 - DNA, 25 bp, Homo sapien
tctgttgtatcctgccatgctccat

SEQ ID NO: 2026720 - DNA, 25 bp, Homo sapien
tgtctgttgtatcctgccatgctcc

SEQ ID NO: 2026721 - DNA, 25 bp, Homo sapien
gtatttccatatcgcccatccattt

SEQ ID NO: 2026722 - DNA, 25 bp, Homo sapien
ttccatatcgcccatccattttctg

SEQ ID NO: 2026723 - DNA, 25 bp, Homo sapien
tcgcccatccattttctgtcttgaa

SEQ ID NO: 2026724 - DNA, 25 bp, Homo sapien
catatcgcccatccattttctgtct

SEQ ID NO: 2026725 - DNA, 25 bp, Homo sapien
tccagagctgctggagaagatctat

SEQ ID NO: 2026726 - DNA, 25 bp, Homo sapien
ttttagaaatgattctctccacagc

SEQ ID NO: 2026727 - DNA, 25 bp, Homo sapien
tggagaagatctattgtagattctt

SEQ ID NO: 2026728 - DNA, 25 bp, Homo sapien
tccacagctgggtctgacctccaga

SEQ ID NO: 2026729 - DNA, 25 bp, Homo sapien
taaggtcgtcaacctcatgtatcca

SEQ ID NO: 2026730 - DNA, 25 bp, Homo sapien
cactaaaatggaacttgtgcctcca

SEQ ID NO: 2026731 - DNA, 25 bp, Homo sapien
ccagcctatttagagccaagcgtca

SEQ ID NO: 2026732 - DNA, 25 bp, Homo sapien
tacaaactgatcatatgccatctgc

SEQ ID NO: 2026733 - DNA, 25 bp, Homo sapien
gatggcattattcctgcaccactaa

SEQ ID NO: 2026734 - DNA, 25 bp, Homo sapien
ttttcttagcatacctctggatgca

SEQ ID NO: 2026735 - DNA, 25 bp, Homo sapien
gtaatatctgtacatctgatggcat

SEQ ID NO: 2026736 - DNA, 25 bp, Homo sapien
taaagacctcaacaaacttgagatg

SEQ ID NO: 2026737 - DNA, 25 bp, Homo sapien
gaaatcttagtactttaatgatagc

SEQ ID NO: 2026738 - DNA, 25 bp, Homo sapien
tttgagaaatcttagtactttaatg

SEQ ID NO: 2026739 - DNA, 25 bp, Homo sapien
aaatcttagtactttaatgatagcc

SEQ ID NO: 2026740 - DNA, 25 bp, Homo sapien
gagaaatcttagtactttaatgata

SEQ ID NO: 2026741 - DNA, 25 bp, Homo sapien
agaccgtgcatctatggttggtggt

SEQ ID NO: 2026742 - DNA, 25 bp, Homo sapien
tctgcctgttactgagcctatctta

SEQ ID NO: 2026743 - DNA, 25 bp, Homo sapien
ggtgttactgtcctcggtaccattc

SEQ ID NO: 2026744 - DNA, 25 bp, Homo sapien
gcctatcttaggtagctcaaatgct

SEQ ID NO: 2026745 - DNA, 25 bp, Homo sapien
tttctcatttgcaggctgtggtaac

SEQ ID NO: 2026746 - DNA, 25 bp, Homo sapien
ttgcaggctgtggtaactttcccat

SEQ ID NO: 2026747 - DNA, 25 bp, Homo sapien
cccaggcaggctctcatcatttctc

SEQ ID NO: 2026748 - DNA, 25 bp, Homo sapien
catcatttttctctgatctccacat

SEQ ID NO: 2026749 - DNA, 25 bp, Homo sapien
tagactattggatctatccattgct

SEQ ID NO: 2026750 - DNA, 25 bp, Homo sapien
tgaaatgggtaccacaaatggcaac

SEQ ID NO: 2026751 - DNA, 25 bp, Homo sapien
tcttgtgacaactttagactattgg

SEQ ID NO: 2026752 - DNA, 25 bp, Homo sapien
gggaacgtatctgaaatgggtacca

SEQ ID NO: 2026753 - DNA, 25 bp, Homo sapien
aatcctgcccagtgtcgtactcttt

SEQ ID NO: 2026754 - DNA, 25 bp, Homo sapien
atcctgcccagtgtcgtactctttt

SEQ ID NO: 2026755 - DNA, 25 bp, Homo sapien
aaatcctgcccagtgtcgtactctt

SEQ ID NO: 2026756 - DNA, 25 bp, Homo sapien
ctgttcttttgagccaaccatttgg

SEQ ID NO: 2026757 - DNA, 25 bp, Homo sapien
gaagtattttgagctcctggtcctg

SEQ ID NO: 2026758 - DNA, 25 bp, Homo sapien
tgttcaagaccatgacatactctct

SEQ ID NO: 2026759 - DNA, 25 bp, Homo sapien
tactctctctgttgcaaaatccctg

SEQ ID NO: 2026760 - DNA, 25 bp, Homo sapien
tattctcacagtggtccccacaaga

SEQ ID NO: 2026761 - DNA, 25 bp, Homo sapien
tctcacagtggtccccacaagagat

SEQ ID NO: 2026762 - DNA, 25 bp, Homo sapien
tcacagtggtccccacaagagatgt

SEQ ID NO: 2026763 - DNA, 25 bp, Homo sapien
ttctcacagtggtccccacaagaga

SEQ ID NO: 2026764 - DNA, 25 bp, Homo sapien
tctccccagtactaactatagttgt

SEQ ID NO: 2026765 - DNA, 25 bp, Homo sapien
ctttctggtaacaactggtaaatat

SEQ ID NO: 2026766 - DNA, 25 bp, Homo sapien
ttctccccagtactaactatagttg

SEQ ID NO: 2026767 - DNA, 25 bp, Homo sapien
ggtaaatatgattgaattttgctcc

SEQ ID NO: 2026768 - DNA, 25 bp, Homo sapien
tgtatttaggatgggctctgccaag

SEQ ID NO: 2026769 - DNA, 25 bp, Homo sapien
cataaatgttgtatttaggatgggc

SEQ ID NO: 2026770 - DNA, 25 bp, Homo sapien
ctcaggttccttccacggcttctta

SEQ ID NO: 2026771 - DNA, 25 bp, Homo sapien
gctctgccaagtgacacagccttcc

SEQ ID NO: 2026772 - DNA, 25 bp, Homo sapien
attctacagtcaaagtatctttttc

SEQ ID NO: 2026773 - DNA, 25 bp, Homo sapien
gattctacagtcaaagtatcttttt

SEQ ID NO: 2026774 - DNA, 25 bp, Homo sapien
gccagattctacagtcaaagtatct

SEQ ID NO: 2026775 - DNA, 25 bp, Homo sapien
cagattctacagtcaaagtatcttt

SEQ ID NO: 2026776 - DNA, 25 bp, Homo sapien
caagtgtgtgcccaaatacatggat

SEQ ID NO: 2026777 - DNA, 25 bp, Homo sapien
ccaaatacatggattttagctcccc

SEQ ID NO: 2026778 - DNA, 25 bp, Homo sapien
aatacatggattttagctcccctgg

SEQ ID NO: 2026779 - DNA, 25 bp, Homo sapien
gcaatattgttcaagtgtgtgccca

SEQ ID NO: 2026780 - DNA, 25 bp, Homo sapien
cattacgttgcctacagctcatccg

SEQ ID NO: 2026781 - DNA, 25 bp, Homo sapien
catccgccctgatcccttaaagaaa

SEQ ID NO: 2026782 - DNA, 25 bp, Homo sapien
taaccagactagagttggcagccca

SEQ ID NO: 2026783 - DNA, 25 bp, Homo sapien
tggcatcactgcctgcattacgttg

SEQ ID NO: 2026784 - DNA, 25 bp, Homo sapien
aggctccacagtgcatctgatctga

SEQ ID NO: 2026785 - DNA, 25 bp, Homo sapien
gacataggctccacagtgcatctga

SEQ ID NO: 2026786 - DNA, 25 bp, Homo sapien
cataggctccacagtgcatctgatc

SEQ ID NO: 2026787 - DNA, 25 bp, Homo sapien
ctagacataggctccacagtgcatc

SEQ ID NO: 2026788 - DNA, 25 bp, Homo sapien
ctcattaaatgagtggctcaccggc

SEQ ID NO: 2026789 - DNA, 25 bp, Homo sapien
ctcccctcattaaatgagtggctca

SEQ ID NO: 2026790 - DNA, 25 bp, Homo sapien
cattaaatgagtggctcaccggcat

SEQ ID NO: 2026791 - DNA, 25 bp, Homo sapien
ccctcattaaatgagtggctcaccg

SEQ ID NO: 2026792 - DNA, 25 bp, Homo sapien
tacaacagcaaggactgagaaacaa

SEQ ID NO: 2026793 - DNA, 25 bp, Homo sapien
gcgtacaacagcaaggactgagaaa

SEQ ID NO: 2026794 - DNA, 25 bp, Homo sapien
acagcaaggactgagaaacaataca

SEQ ID NO: 2026795 - DNA, 25 bp, Homo sapien
catgctatgcgtacaacagcaagga

SEQ ID NO: 2026796 - DNA, 25 bp, Homo sapien
gctgaccggtcccagaggccagcat

SEQ ID NO: 2026797 - DNA, 25 bp, Homo sapien
accggtcccagaggccagcatgtcg

SEQ ID NO: 2026798 - DNA, 25 bp, Homo sapien
ctgctgaccggtcccagaggccagc

SEQ ID NO: 2026799 - DNA, 25 bp, Homo sapien
tgaccggtcccagaggccagcatgt

SEQ ID NO: 2026800 - DNA, 25 bp, Homo sapien
aatcactccatagattcttgccccg

SEQ ID NO: 2026801 - DNA, 25 bp, Homo sapien
tgatgctaatgccttttcaggttct

SEQ ID NO: 2026802 - DNA, 25 bp, Homo sapien
tgccccgcagcccaaaaatatgttc

SEQ ID NO: 2026803 - DNA, 25 bp, Homo sapien
tttcagttgctaactttgccaggca

SEQ ID NO: 2026804 - DNA, 25 bp, Homo sapien
aaatctacttcatcactcccctctc

SEQ ID NO: 2026805 - DNA, 25 bp, Homo sapien
cggtggcccagattcggaaaagtgc

SEQ ID NO: 2026806 - DNA, 25 bp, Homo sapien
gtgtattctctgttccggtggccca

SEQ ID NO: 2026807 - DNA, 25 bp, Homo sapien
tccatttctggaatcagatccacag

SEQ ID NO: 2026808 - DNA, 25 bp, Homo sapien
gcatcggccagggtgctccattcta

SEQ ID NO: 2026809 - DNA, 25 bp, Homo sapien
gcctttccatttgagctcagaatca

SEQ ID NO: 2026810 - DNA, 25 bp, Homo sapien
cagcctttccatttgagctcagaat

SEQ ID NO: 2026811 - DNA, 25 bp, Homo sapien
cacagcctttccatttgagctcaga

SEQ ID NO: 2026812 - DNA, 25 bp, Homo sapien
acagcctttccatttgagctcagaa

SEQ ID NO: 2026813 - DNA, 25 bp, Homo sapien
agctggtagctccggcatgatcagc

SEQ ID NO: 2026814 - DNA, 25 bp, Homo sapien
tcagcatcaacttctgagccacgat

SEQ ID NO: 2026815 - DNA, 25 bp, Homo sapien
gcatcaacttctgagccacgatcat

SEQ ID NO: 2026816 - DNA, 25 bp, Homo sapien
gctccggcatgatcagcatcaactt

SEQ ID NO: 2026817 - DNA, 25 bp, Homo sapien
tttctctccatgcaacccccagcca

SEQ ID NO: 2026818 - DNA, 25 bp, Homo sapien
ttccaaggtgaccccaagaaccatc

SEQ ID NO: 2026819 - DNA, 25 bp, Homo sapien
attccaaggtgaccccaagaaccat

SEQ ID NO: 2026820 - DNA, 25 bp, Homo sapien
aaggtgaccccaagaaccatcagcc

SEQ ID NO: 2026821 - DNA, 25 bp, Homo sapien
ccaaggtgaccccaagaaccatcag

SEQ ID NO: 2026822 - DNA, 25 bp, Homo sapien
actagaattctgtttgactggggcc

SEQ ID NO: 2026823 - DNA, 25 bp, Homo sapien
tatgcccacactaaaaagtgggctg

SEQ ID NO: 2026824 - DNA, 25 bp, Homo sapien
tctgcttcaacagatcttctctctg

SEQ ID NO: 2026825 - DNA, 25 bp, Homo sapien
gactccaatatcctcaacacagctg

SEQ ID NO: 2026826 - DNA, 25 bp, Homo sapien
agttgctacctcttcgcaggaaaac

SEQ ID NO: 2026827 - DNA, 25 bp, Homo sapien
tgtcggatggctcgttttttaatga

SEQ ID NO: 2026828 - DNA, 25 bp, Homo sapien
aaaccttcgtttgtgtcggatggct

SEQ ID NO: 2026829 - DNA, 25 bp, Homo sapien
tttttaatgattgggtcctgccttg

SEQ ID NO: 2026830 - DNA, 25 bp, Homo sapien
ctgaatgtcgtgtccaagttcacac

SEQ ID NO: 2026831 - DNA, 25 bp, Homo sapien
aaggctgaatgtcgtgtccaagttc

SEQ ID NO: 2026832 - DNA, 25 bp, Homo sapien
ctaggaggtgataatcctggagaag

SEQ ID NO: 2026833 - DNA, 25 bp, Homo sapien
gtgataatcctggagaaggctgaat

SEQ ID NO: 2026834 - DNA, 25 bp, Homo sapien
acttaagtcaattaggtcttcatcc

SEQ ID NO: 2026835 - DNA, 25 bp, Homo sapien
cataagccaatagctttctaccaaa

SEQ ID NO: 2026836 - DNA, 25 bp, Homo sapien
tttcatgacataagccaatagcttt

SEQ ID NO: 2026837 - DNA, 25 bp, Homo sapien
tttacttaagtcaattaggtcttca

SEQ ID NO: 2026838 - DNA, 25 bp, Homo sapien
ggcaggacaactatcctcacatgat

SEQ ID NO: 2026839 - DNA, 25 bp, Homo sapien
aaatgcccaggcaggacaactatcc

SEQ ID NO: 2026840 - DNA, 25 bp, Homo sapien
tgcccaggcaggacaactatcctca

SEQ ID NO: 2026841 - DNA, 25 bp, Homo sapien
ttcaccttttttgaccagaaattca

SEQ ID NO: 2026842 - DNA, 25 bp, Homo sapien
cgagtgcattggagttgttgaccct

SEQ ID NO: 2026843 - DNA, 25 bp, Homo sapien
gttgacccttgctctaccatccttc

SEQ ID NO: 2026844 - DNA, 25 bp, Homo sapien
caacattactttcagtccagcacat

SEQ ID NO: 2026845 - DNA, 25 bp, Homo sapien
cgatctttaacaggctcaacattac

SEQ ID NO: 2026846 - DNA, 25 bp, Homo sapien
ccttttgctcaagtgggacacaacg

SEQ ID NO: 2026847 - DNA, 25 bp, Homo sapien
cctcttgtacaagaagaacatcttt

SEQ ID NO: 2026848 - DNA, 25 bp, Homo sapien
cgaaaagccatcttgtgtccctctt

SEQ ID NO: 2026849 - DNA, 25 bp, Homo sapien
gaacatcttttcacggaattccaga

SEQ ID NO: 2026850 - DNA, 25 bp, Homo sapien
tatttgtgcagcaggcatccaaaaa

SEQ ID NO: 2026851 - DNA, 25 bp, Homo sapien
gatgctaaacaataacaccactgag

SEQ ID NO: 2026852 - DNA, 25 bp, Homo sapien
tacagcgattccagatacatctcat

SEQ ID NO: 2026853 - DNA, 25 bp, Homo sapien
gagaccttagcagaggtttgccagt

SEQ ID NO: 2026854 - DNA, 25 bp, Homo sapien
agcaggctccacacgcataaggcac

SEQ ID NO: 2026855 - DNA, 25 bp, Homo sapien
catcagagcaggctccacacgcata

SEQ ID NO: 2026856 - DNA, 25 bp, Homo sapien
aggcaccactactatgctaagaagt

SEQ ID NO: 2026857 - DNA, 25 bp, Homo sapien
catctggtctgtccctcacacagag

SEQ ID NO: 2026858 - DNA, 25 bp, Homo sapien
taacattgtcatggtgccaccggca

SEQ ID NO: 2026859 - DNA, 25 bp, Homo sapien
ttaggcctacagttgaatcaagcgt

SEQ ID NO: 2026860 - DNA, 25 bp, Homo sapien
gatcctggcttaggccacatgccca

SEQ ID NO: 2026861 - DNA, 25 bp, Homo sapien
aacactgggcttggatccttataac

SEQ ID NO: 2026862 - DNA, 25 bp, Homo sapien
ggaagcccttaacccattcttgaga

SEQ ID NO: 2026863 - DNA, 25 bp, Homo sapien
aatacaatacagagcaatgcgtgtc

SEQ ID NO: 2026864 - DNA, 25 bp, Homo sapien
tctggcagtgcttaaggaagccctt

SEQ ID NO: 2026865 - DNA, 25 bp, Homo sapien
ctagcccctgggaatttatagtcca

SEQ ID NO: 2026866 - DNA, 25 bp, Homo sapien
cagacggtcttatgcaggcaggaca

SEQ ID NO: 2026867 - DNA, 25 bp, Homo sapien
tcctaccttacgtgggctactgaag

SEQ ID NO: 2026868 - DNA, 25 bp, Homo sapien
cctggatttgagaggcagcgacact

SEQ ID NO: 2026869 - DNA, 25 bp, Homo sapien
attgtttcctgagtgtccggtccca

SEQ ID NO: 2026870 - DNA, 25 bp, Homo sapien
gcagaaggcctggcaaaaaagacaa

SEQ ID NO: 2026871 - DNA, 25 bp, Homo sapien
ggcctttgttagtgcagtccaggaa

SEQ ID NO: 2026872 - DNA, 25 bp, Homo sapien
cagaggcctacagagactgacagtt

SEQ ID NO: 2026873 - DNA, 25 bp, Homo sapien
gattaaatagtcacagctccggctg

SEQ ID NO: 2026874 - DNA, 25 bp, Homo sapien
aaagccttgctgaaatagcctcgcc

SEQ ID NO: 2026875 - DNA, 25 bp, Homo sapien
atgtgggacatgaagcaatgagtga

SEQ ID NO: 2026876 - DNA, 25 bp, Homo sapien
ctactggtgtccaaggatgtgggac

SEQ ID NO: 2026877 - DNA, 25 bp, Homo sapien
taacagcacccaagaatgcagggcc

SEQ ID NO: 2026878 - DNA, 25 bp, Homo sapien
tgaggggcgctacgtcaagcatgtt

SEQ ID NO: 2026879 - DNA, 25 bp, Homo sapien
tcctctcaatcacatcaggagaaaa

SEQ ID NO: 2026880 - DNA, 25 bp, Homo sapien
gtaaatcggacagcatcttcaggga

SEQ ID NO: 2026881 - DNA, 25 bp, Homo sapien
ccagtggtgcatgacatgaatcaaa

SEQ ID NO: 2026882 - DNA, 25 bp, Homo sapien
caagacatggtaggccagtggtgca

SEQ ID NO: 2026883 - DNA, 25 bp, Homo sapien
gaactaatgatagaaagcaaaccag

SEQ ID NO: 2026884 - DNA, 25 bp, Homo sapien
gatactatactcacacactcaaagg

SEQ ID NO: 2026885 - DNA, 25 bp, Homo sapien
caaaattaagcctctgatactatac

SEQ ID NO: 2026886 - DNA, 25 bp, Homo sapien
gacaaaatcagtaaattggcaagct

SEQ ID NO: 2026887 - DNA, 25 bp, Homo sapien
tggcaaagtggagagcacaaggctc

SEQ ID NO: 2026888 - DNA, 25 bp, Homo sapien
tgcaaattcaggtcatacaagggcc

SEQ ID NO: 2026889 - DNA, 25 bp, Homo sapien
ccagaaagtgcttggaaagtgacct

SEQ ID NO: 2026890 - DNA, 25 bp, Homo sapien
ggattaagacctctggtccacggtg

SEQ ID NO: 2026891 - DNA, 25 bp, Homo sapien
tttcgagcaaacaactccaaatatt

SEQ ID NO: 2026892 - DNA, 25 bp, Homo sapien
ccacatgctgaaatttgagaacttc

SEQ ID NO: 2026893 - DNA, 25 bp, Homo sapien
cccaactagtccaacctggctgtaa

SEQ ID NO: 2026894 - DNA, 25 bp, Homo sapien
caacctggctgtaaatttcgagcaa

SEQ ID NO: 2026895 - DNA, 25 bp, Homo sapien
ctcaatgtagtaagtttttgcatgg

SEQ ID NO: 2026896 - DNA, 25 bp, Homo sapien
catacaacctaaacccatttactgc

SEQ ID NO: 2026897 - DNA, 25 bp, Homo sapien
ccaggtacttggatggagtggaaaa

SEQ ID NO: 2026898 - DNA, 25 bp, Homo sapien
cagaatattaagttgtgtttttata

SEQ ID NO: 2026899 - DNA, 25 bp, Homo sapien
gatcaggccactgtatgtgacagag

SEQ ID NO: 2026900 - DNA, 25 bp, Homo sapien
ccatttcccaggtcataaactgcct

SEQ ID NO: 2026901 - DNA, 25 bp, Homo sapien
tttcctgagtggtaacttgtagcag

SEQ ID NO: 2026902 - DNA, 25 bp, Homo sapien
ttctgcaaggtaacataagctcctg

SEQ ID NO: 2026903 - DNA, 25 bp, Homo sapien
gtggcttatgtgagtgaagagtaca

SEQ ID NO: 2026904 - DNA, 25 bp, Homo sapien
cagggcacgctgacaattaatttgt

SEQ ID NO: 2026905 - DNA, 25 bp, Homo sapien
gaatggggagcacgtttacatctgc

SEQ ID NO: 2026906 - DNA, 25 bp, Homo sapien
caattaatttgtggtctggaatggg

SEQ ID NO: 2026907 - DNA, 25 bp, Homo sapien
cagtataagaccttcgtagggcttt

SEQ ID NO: 2026908 - DNA, 25 bp, Homo sapien
ttcttgaaccctccccagtataaga

SEQ ID NO: 2026909 - DNA, 25 bp, Homo sapien
ttttgtgtggagaatctaatgggaa

SEQ ID NO: 2026910 - DNA, 25 bp, Homo sapien
ccttcgtagggctttttgtgtggag

SEQ ID NO: 2026911 - DNA, 25 bp, Homo sapien
acctccacagaccaagagggataaa

SEQ ID NO: 2026912 - DNA, 25 bp, Homo sapien
gtgccactcagcaactacctccaca

SEQ ID NO: 2026913 - DNA, 25 bp, Homo sapien
tacctccacagaccaagagggataa

SEQ ID NO: 2026914 - DNA, 25 bp, Homo sapien
ccactcagcaactacctccacagac

SEQ ID NO: 2026915 - DNA, 25 bp, Homo sapien
aagacagtttggagcagccaattta

SEQ ID NO: 2026916 - DNA, 25 bp, Homo sapien
ctgtctattggtcacccaagtaaca

SEQ ID NO: 2026917 - DNA, 25 bp, Homo sapien
ctattggtcacccaagtaacaagaa

SEQ ID NO: 2026918 - DNA, 25 bp, Homo sapien
gataggtatttgctgtatttgcagg

SEQ ID NO: 2026919 - DNA, 25 bp, Homo sapien
aagtactcatcaattcttttactca

SEQ ID NO: 2026920 - DNA, 25 bp, Homo sapien
ttcctgcaaacctcccatcttaaat

SEQ ID NO: 2026921 - DNA, 25 bp, Homo sapien
tcagatgaagaaaatgcggaagaac

SEQ ID NO: 2026922 - DNA, 25 bp, Homo sapien
tactcatccttggtcaagtaccaca

SEQ ID NO: 2026923 - DNA, 25 bp, Homo sapien
tgttctgccatggtggatctatcac

SEQ ID NO: 2026924 - DNA, 25 bp, Homo sapien
gatttgttctgccatggtggatcta

SEQ ID NO: 2026925 - DNA, 25 bp, Homo sapien
ccatggtggatctatcacaattaca

SEQ ID NO: 2026926 - DNA, 25 bp, Homo sapien
ggatctatcacaattacatcaaatg

SEQ ID NO: 2026927 - DNA, 25 bp, Homo sapien
aatacaggtctgtgtgactgcggac

SEQ ID NO: 2026928 - DNA, 25 bp, Homo sapien
tataatggaatgcaccaaagggatc

SEQ ID NO: 2026929 - DNA, 25 bp, Homo sapien
tctgtgaattccctatgcgtcttgg

SEQ ID NO: 2026930 - DNA, 25 bp, Homo sapien
gaggaccaccaaagtaatgcctgcc

SEQ ID NO: 2026931 - DNA, 25 bp, Homo sapien
caccaattgtaatgtctgatgttcc

SEQ ID NO: 2026932 - DNA, 25 bp, Homo sapien
taatgggcttactacccttgtcctg

SEQ ID NO: 2026933 - DNA, 25 bp, Homo sapien
gaaaactgcttttcggtggtagcag

SEQ ID NO: 2026934 - DNA, 25 bp, Homo sapien
caaactgcaggcgtcaagtggtaaa

SEQ ID NO: 2026935 - DNA, 25 bp, Homo sapien
gacaattaaaacacaacacatcgga

SEQ ID NO: 2026936 - DNA, 25 bp, Homo sapien
ttctagcttccaacacgagagggct

SEQ ID NO: 2026937 - DNA, 25 bp, Homo sapien
cggaacgtacatgatgttgctaaag

SEQ ID NO: 2026938 - DNA, 25 bp, Homo sapien
agttctccagcgtgcaaacatccta

SEQ ID NO: 2026939 - DNA, 25 bp, Homo sapien
tggcactaccggatagtcaaacctc

SEQ ID NO: 2026940 - DNA, 25 bp, Homo sapien
cttaacaagaaacctgcaaggcctt

SEQ ID NO: 2026941 - DNA, 25 bp, Homo sapien
taaagatgtcaacactgccctaatt

SEQ ID NO: 2026942 - DNA, 25 bp, Homo sapien
gggcggaatcaccaacatcttaaag

SEQ ID NO: 2026943 - DNA, 25 bp, Homo sapien
ccaattcaccttgattgaaaacaac

SEQ ID NO: 2026944 - DNA, 25 bp, Homo sapien
catccaattcaccttgattgaaaac

SEQ ID NO: 2026945 - DNA, 25 bp, Homo sapien
atccaattcaccttgattgaaaaca

SEQ ID NO: 2026946 - DNA, 25 bp, Homo sapien
tccaattcaccttgattgaaaacaa

SEQ ID NO: 2026947 - DNA, 25 bp, Homo sapien
caaacgtttgttcggtgagtaatga

SEQ ID NO: 2026948 - DNA, 25 bp, Homo sapien
caccgaattataagatccatcaggg

SEQ ID NO: 2026949 - DNA, 25 bp, Homo sapien
tacaatggcacatagaaagagctca

SEQ ID NO: 2026950 - DNA, 25 bp, Homo sapien
caagatcaccctggcttaacacagt

SEQ ID NO: 2026951 - DNA, 25 bp, Homo sapien
ctttatacttaacgaatcaccagat

SEQ ID NO: 2026952 - DNA, 25 bp, Homo sapien
tacttaacgaatcaccagatattta

SEQ ID NO: 2026953 - DNA, 25 bp, Homo sapien
taacgaatcaccagatatttaagac

SEQ ID NO: 2026954 - DNA, 25 bp, Homo sapien
ttctttatacttaacgaatcaccag

SEQ ID NO: 2026955 - DNA, 25 bp, Homo sapien
caaagtgaacagaagtagtgaactc

SEQ ID NO: 2026956 - DNA, 25 bp, Homo sapien
tacggcaacaaggttcatgatgctg

SEQ ID NO: 2026957 - DNA, 25 bp, Homo sapien
tagtgaactcctttttacggcaaca

SEQ ID NO: 2026958 - DNA, 25 bp, Homo sapien
aagcaataaatgcagcacagactcc

SEQ ID NO: 2026959 - DNA, 25 bp, Homo sapien
taaaagaaagatgatccagtaacca

SEQ ID NO: 2026960 - DNA, 25 bp, Homo sapien
agtaaccacccagctgacaactggt

SEQ ID NO: 2026961 - DNA, 25 bp, Homo sapien
ctgacaactggtgtaccacagacat

SEQ ID NO: 2026962 - DNA, 25 bp, Homo sapien
gatgatccagtaaccacccagctga

SEQ ID NO: 2026963 - DNA, 25 bp, Homo sapien
attttcagccaaaatttggccaaag

SEQ ID NO: 2026964 - DNA, 25 bp, Homo sapien
acaagtacaaaaacctgacatgcac

SEQ ID NO: 2026965 - DNA, 25 bp, Homo sapien
cattcatgatgttaatatatacaga

SEQ ID NO: 2026966 - DNA, 25 bp, Homo sapien
atttcaataaacatacacttcatac

SEQ ID NO: 2026967 - DNA, 25 bp, Homo sapien
cccacgacttcttgctttggtcctt

SEQ ID NO: 2026968 - DNA, 25 bp, Homo sapien
tatgtctggaatcccaatgtgatcc

SEQ ID NO: 2026969 - DNA, 25 bp, Homo sapien
tggtccttgggtctagccactaggt

SEQ ID NO: 2026970 - DNA, 25 bp, Homo sapien
tccaagtcaggaagtcattgaatcc

SEQ ID NO: 2026971 - DNA, 25 bp, Homo sapien
cttgtcagaaaagcggacgccgcct

SEQ ID NO: 2026972 - DNA, 25 bp, Homo sapien
gtttccagggcgagttgagcgttca

SEQ ID NO: 2026973 - DNA, 25 bp, Homo sapien
tgatcatgaaaaatgccccttccag

SEQ ID NO: 2026974 - DNA, 25 bp, Homo sapien
gcgccgccatgttgctgtacggaaa

SEQ ID NO: 2026975 - DNA, 25 bp, Homo sapien
gaaaaccatctagactgccaagcct

SEQ ID NO: 2026976 - DNA, 25 bp, Homo sapien
tagaaagtcaaacgagtgtggttcc

SEQ ID NO: 2026977 - DNA, 25 bp, Homo sapien
ttgaacaggatcaggcaaaatgagg

SEQ ID NO: 2026978 - DNA, 25 bp, Homo sapien
actacaacctgcaggcccaattggg

SEQ ID NO: 2026979 - DNA, 25 bp, Homo sapien
caagttatttggatccttgaaaatg

SEQ ID NO: 2026980 - DNA, 25 bp, Homo sapien
ttagatctactctcacacccgcatc

SEQ ID NO: 2026981 - DNA, 25 bp, Homo sapien
ttggatccttgaaaatgaattttag

SEQ ID NO: 2026982 - DNA, 25 bp, Homo sapien
cacacccgcatcttcatgcctcaca

SEQ ID NO: 2026983 - DNA, 25 bp, Homo sapien
ttacttgtccctaacaccatgttgc

SEQ ID NO: 2026984 - DNA, 25 bp, Homo sapien
ttggcacctgggagcacaagtcctc

SEQ ID NO: 2026985 - DNA, 25 bp, Homo sapien
tgttcagtgctcattgaattgccct

SEQ ID NO: 2026986 - DNA, 25 bp, Homo sapien
gccctttgttgcatagctagctaga

SEQ ID NO: 2026987 - DNA, 25 bp, Homo sapien
tcctctgagtgcttctctaggctca

SEQ ID NO: 2026988 - DNA, 25 bp, Homo sapien
ccctcctctgagtgcttctctaggc

SEQ ID NO: 2026989 - DNA, 25 bp, Homo sapien
cctcctctgagtgcttctctaggct

SEQ ID NO: 2026990 - DNA, 25 bp, Homo sapien
cctctgagtgcttctctaggctcac

SEQ ID NO: 2026991 - DNA, 25 bp, Homo sapien
gctggcaagcatcacgttattttcc

SEQ ID NO: 2026992 - DNA, 25 bp, Homo sapien
tcttgctggcaagcatcacgttatt

SEQ ID NO: 2026993 - DNA, 25 bp, Homo sapien
tgctggcaagcatcacgttattttc

SEQ ID NO: 2026994 - DNA, 25 bp, Homo sapien
atctcttgctggcaagcatcacgtt

SEQ ID NO: 2026995 - DNA, 25 bp, Homo sapien
atgtttcccgaatttgtgtgtcttc

SEQ ID NO: 2026996 - DNA, 25 bp, Homo sapien
tttcccgaatttgtgtgtcttccta

SEQ ID NO: 2026997 - DNA, 25 bp, Homo sapien
tgtggaatgtttcccgaatttgtgt

SEQ ID NO: 2026998 - DNA, 25 bp, Homo sapien
tataatgtggaatgtttcccgaatt

SEQ ID NO: 2026999 - DNA, 25 bp, Homo sapien
gaaagtaagcaatacacactcaggt

SEQ ID NO: 2027000 - DNA, 25 bp, Homo sapien
tgatcgccattcagcagtatctgca

SEQ ID NO: 2027001 - DNA, 25 bp, Homo sapien
gccaccaggtctcaaacagcaacat

SEQ ID NO: 2027002 - DNA, 25 bp, Homo sapien
tataaagctacgtattgatcgccat

SEQ ID NO: 2027003 - DNA, 25 bp, Homo sapien
gcttagaacgatggcattccagaag

SEQ ID NO: 2027004 - DNA, 25 bp, Homo sapien
gccgtgcccggctctgatttggctt

SEQ ID NO: 2027005 - DNA, 25 bp, Homo sapien
taagatgatctattctttgggctgc

SEQ ID NO: 2027006 - DNA, 25 bp, Homo sapien
aacttgaatttacccatgattgtga

SEQ ID NO: 2027007 - DNA, 25 bp, Homo sapien
gacacttcgtgtttgcccctttgcg

SEQ ID NO: 2027008 - DNA, 25 bp, Homo sapien
taggatcaagagttctggcaaagtc

SEQ ID NO: 2027009 - DNA, 25 bp, Homo sapien
ttttgcaatgtacagtggccctcag

SEQ ID NO: 2027010 - DNA, 25 bp, Homo sapien
tatcctcgggttccgcattcctgga

SEQ ID NO: 2027011 - DNA, 25 bp, Homo sapien
agcgcccttctgacgttctcacgga

SEQ ID NO: 2027012 - DNA, 25 bp, Homo sapien
agggacccacgtgctcgctttggtg

SEQ ID NO: 2027013 - DNA, 25 bp, Homo sapien
tggagcccacccagtactactaaga

SEQ ID NO: 2027014 - DNA, 25 bp, Homo sapien
cgcctattttctcggcagagggacc

SEQ ID NO: 2027015 - DNA, 25 bp, Homo sapien
gagcgctcggactacgcgggatttc

SEQ ID NO: 2027016 - DNA, 25 bp, Homo sapien
ggcaggcgtcgctgtcttttctcct

SEQ ID NO: 2027017 - DNA, 25 bp, Homo sapien
gcgtcggccacaggacggtgtactt

SEQ ID NO: 2027018 - DNA, 25 bp, Homo sapien
ggtgtacttgtttgatcggcgcgaa

SEQ ID NO: 2027019 - DNA, 25 bp, Homo sapien
tgcggccttggcttccctctcccgt

SEQ ID NO: 2027020 - DNA, 25 bp, Homo sapien
cggtcccggtcctgcggccttggct

SEQ ID NO: 2027021 - DNA, 25 bp, Homo sapien
cttccctctcccgtgtgcccgccat

SEQ ID NO: 2027022 - DNA, 25 bp, Homo sapien
gccttggcttccctctcccgtgtgc

SEQ ID NO: 2027023 - DNA, 25 bp, Homo sapien
tatcctgaatgaggatgtcacaggg

SEQ ID NO: 2027024 - DNA, 25 bp, Homo sapien
taactctgtatagcctctgtagcag

SEQ ID NO: 2027025 - DNA, 25 bp, Homo sapien
tctaacaacatacttgggaagagtc

SEQ ID NO: 2027026 - DNA, 25 bp, Homo sapien
taagaagagctttgacccacaagtc

SEQ ID NO: 2027027 - DNA, 25 bp, Homo sapien
taatttcaatcagcctaccttcaag

SEQ ID NO: 2027028 - DNA, 25 bp, Homo sapien
tgccaacccaaatctgctcatgagt

SEQ ID NO: 2027029 - DNA, 25 bp, Homo sapien
caactgatactctctgtttggtgaa

SEQ ID NO: 2027030 - DNA, 25 bp, Homo sapien
taatggcttccctgaactaattctg

SEQ ID NO: 2027031 - DNA, 25 bp, Homo sapien
atgataagcaaacctgcagattccc

SEQ ID NO: 2027032 - DNA, 25 bp, Homo sapien
taagcaaacctgcagattcccaaga

SEQ ID NO: 2027033 - DNA, 25 bp, Homo sapien
cccaagatgttcacgagcttgtgct

SEQ ID NO: 2027034 - DNA, 25 bp, Homo sapien
cagattcccaagatgttcacgagct

SEQ ID NO: 2027035 - DNA, 25 bp, Homo sapien
taagccttctagaatgatgccagga

SEQ ID NO: 2027036 - DNA, 25 bp, Homo sapien
ggattcaggaactcgctgctgtatc

SEQ ID NO: 2027037 - DNA, 25 bp, Homo sapien
tcagttagaggaccaccactgggtc

SEQ ID NO: 2027038 - DNA, 25 bp, Homo sapien
gctgtatctgtgatccacgagttgg

SEQ ID NO: 2027039 - DNA, 25 bp, Homo sapien
gctggaagaacagagcagatcgtta

SEQ ID NO: 2027040 - DNA, 25 bp, Homo sapien
tgtgacatccctagagccaagtgaa

SEQ ID NO: 2027041 - DNA, 25 bp, Homo sapien
tggagctttcccaacatttagtggt

SEQ ID NO: 2027042 - DNA, 25 bp, Homo sapien
tagaggctcaggtttacacagataa

SEQ ID NO: 2027043 - DNA, 25 bp, Homo sapien
gtagagacaagccatcactatatgg

SEQ ID NO: 2027044 - DNA, 25 bp, Homo sapien
gactgcttagccggaccatgcctgg

SEQ ID NO: 2027045 - DNA, 25 bp, Homo sapien
ttgcccagactggtaccttcatagc

SEQ ID NO: 2027046 - DNA, 25 bp, Homo sapien
accttcatagctcgctgtggccttg

SEQ ID NO: 2027047 - DNA, 25 bp, Homo sapien
gctggtctcgatctcataacttctg

SEQ ID NO: 2027048 - DNA, 25 bp, Homo sapien
tgaacaattgggtaaccatctcgat

SEQ ID NO: 2027049 - DNA, 25 bp, Homo sapien
gctttgtaagtctactcgataatca

SEQ ID NO: 2027050 - DNA, 25 bp, Homo sapien
tatgcaggaagaccactaccatcta

SEQ ID NO: 2027051 - DNA, 25 bp, Homo sapien
tgacatcagaggtagtgggcaatct

SEQ ID NO: 2027052 - DNA, 25 bp, Homo sapien
gtttatgaacgaatcagactggctt

SEQ ID NO: 2027053 - DNA, 25 bp, Homo sapien
taaaacttagcctagacaccaagca

SEQ ID NO: 2027054 - DNA, 25 bp, Homo sapien
aactgattaagcatggacattgcct

SEQ ID NO: 2027055 - DNA, 25 bp, Homo sapien
actcatagaccaaatctcagtgaca

SEQ ID NO: 2027056 - DNA, 25 bp, Homo sapien
gactattagtgattttaaggccaga

SEQ ID NO: 2027057 - DNA, 25 bp, Homo sapien
tgtatacgtacctactgaacctaaa

SEQ ID NO: 2027058 - DNA, 25 bp, Homo sapien
aacaaacttgtatacgtacctactg

SEQ ID NO: 2027059 - DNA, 25 bp, Homo sapien
ggaattggaggctccagtgagctat

SEQ ID NO: 2027060 - DNA, 25 bp, Homo sapien
tgagcccaggaattggaggctccag

SEQ ID NO: 2027061 - DNA, 25 bp, Homo sapien
gcccaggaattggaggctccagtga

SEQ ID NO: 2027062 - DNA, 25 bp, Homo sapien
caggaattggaggctccagtgagct

SEQ ID NO: 2027063 - DNA, 25 bp, Homo sapien
tgccagtaacagtgaaaacacctgc

SEQ ID NO: 2027064 - DNA, 25 bp, Homo sapien
actgtaatcttgcactgaattggcc

SEQ ID NO: 2027065 - DNA, 25 bp, Homo sapien
tacactggcctatcaatttcttggc

SEQ ID NO: 2027066 - DNA, 25 bp, Homo sapien
gaattggccttctagtagctggaac

SEQ ID NO: 2027067 - DNA, 25 bp, Homo sapien
aggaatactataatattggagtaaa

SEQ ID NO: 2027068 - DNA, 25 bp, Homo sapien
gatattctaccaataagacagatcc

SEQ ID NO: 2027069 - DNA, 25 bp, Homo sapien
tgctcatttgcaactttactggagt

SEQ ID NO: 2027070 - DNA, 25 bp, Homo sapien
cctgaacggtctgagaaaagaagga

SEQ ID NO: 2027071 - DNA, 25 bp, Homo sapien
tagaccttccagttactacagcgct

SEQ ID NO: 2027072 - DNA, 25 bp, Homo sapien
aattcctcaaggtgcagttctaggc

SEQ ID NO: 2027073 - DNA, 25 bp, Homo sapien
cagcgctactgtggacattgatttg

SEQ ID NO: 2027074 - DNA, 25 bp, Homo sapien
cagtgttgtactatacgtgagtcac

SEQ ID NO: 2027075 - DNA, 25 bp, Homo sapien
tctcaattaggactagctacgttgc

SEQ ID NO: 2027076 - DNA, 25 bp, Homo sapien
ggtggctaccgttttggactgcaca

SEQ ID NO: 2027077 - DNA, 25 bp, Homo sapien
ctatatgggtctaatgtcatgactc

SEQ ID NO: 2027078 - DNA, 25 bp, Homo sapien
tacgttgcaagtactctggagccac

SEQ ID NO: 2027079 - DNA, 25 bp, Homo sapien
tcccactcggagaagagacttgttg

SEQ ID NO: 2027080 - DNA, 25 bp, Homo sapien
catatgagggtagccagcaacgtga

SEQ ID NO: 2027081 - DNA, 25 bp, Homo sapien
ttaaagcaaaacctgtggacccatg

SEQ ID NO: 2027082 - DNA, 25 bp, Homo sapien
ggacccatgacgttgatttgcccta

SEQ ID NO: 2027083 - DNA, 25 bp, Homo sapien
gagtgtcagtgattttagagaagcc

SEQ ID NO: 2027084 - DNA, 25 bp, Homo sapien
gaaagagtgtcagtgattttagaga

SEQ ID NO: 2027085 - DNA, 25 bp, Homo sapien
tgtcagtgattttagagaagccaaa

SEQ ID NO: 2027086 - DNA, 25 bp, Homo sapien
agagtgtcagtgattttagagaagc

SEQ ID NO: 2027087 - DNA, 25 bp, Homo sapien
tctggtagaaagttgctgcaaaaac

SEQ ID NO: 2027088 - DNA, 25 bp, Homo sapien
gaattgaaatgttaagatacccaga

SEQ ID NO: 2027089 - DNA, 25 bp, Homo sapien
tcaatgagtgaacttgtgacagtgg

SEQ ID NO: 2027090 - DNA, 25 bp, Homo sapien
tggtaagtaagtttgtgtcccagga

SEQ ID NO: 2027091 - DNA, 25 bp, Homo sapien
caaggcattgagactatctagaagc

SEQ ID NO: 2027092 - DNA, 25 bp, Homo sapien
ttttttcccttgagcgacagtggcc

SEQ ID NO: 2027093 - DNA, 25 bp, Homo sapien
ggagtcatgttttaaatccaaggca

SEQ ID NO: 2027094 - DNA, 25 bp, Homo sapien
tatggatattatctagccccaagcc

SEQ ID NO: 2027095 - DNA, 25 bp, Homo sapien
gaagacaaggaggagcaagtcccat

SEQ ID NO: 2027096 - DNA, 25 bp, Homo sapien
caatcatggcagaagacaaggagga

SEQ ID NO: 2027097 - DNA, 25 bp, Homo sapien
atggcagaagacaaggaggagcaag

SEQ ID NO: 2027098 - DNA, 25 bp, Homo sapien
agaagacaaggaggagcaagtccca

SEQ ID NO: 2027099 - DNA, 25 bp, Homo sapien
tggcattatggcattattccattat

SEQ ID NO: 2027100 - DNA, 25 bp, Homo sapien
attatggcattattccattatatgc

SEQ ID NO: 2027101 - DNA, 25 bp, Homo sapien
taacctgcctttatggcattatggc

SEQ ID NO: 2027102 - DNA, 25 bp, Homo sapien
gcattatggcattattccattatat

SEQ ID NO: 2027103 - DNA, 25 bp, Homo sapien
cctgccatcccacacagaggagcag

SEQ ID NO: 2027104 - DNA, 25 bp, Homo sapien
agttctccaggcagcgaggttagcc

SEQ ID NO: 2027105 - DNA, 25 bp, Homo sapien
ctgaagggcctccaatcacacgtaa

SEQ ID NO: 2027106 - DNA, 25 bp, Homo sapien
cttgtaggtggagctgaagttctcc

SEQ ID NO: 2027107 - DNA, 25 bp, Homo sapien
tttttcagcgtgctttaattgccag

SEQ ID NO: 2027108 - DNA, 25 bp, Homo sapien
ttaattgccagcagctgattagatt

SEQ ID NO: 2027109 - DNA, 25 bp, Homo sapien
tttcacgtttttcagcgtgctttaa

SEQ ID NO: 2027110 - DNA, 25 bp, Homo sapien
gtctgagtctcaaaattgaaggact

SEQ ID NO: 2027111 - DNA, 25 bp, Homo sapien
cttgtttcttatgcagggctctctg

SEQ ID NO: 2027112 - DNA, 25 bp, Homo sapien
tatccacgttattgttcatggcagg

SEQ ID NO: 2027113 - DNA, 25 bp, Homo sapien
ggatcagaagtcctgcccaattagt

SEQ ID NO: 2027114 - DNA, 25 bp, Homo sapien
gctgaagctctctatcctccggaag

SEQ ID NO: 2027115 - DNA, 25 bp, Homo sapien
cggccctgtcttgcccgaggaggaa

SEQ ID NO: 2027116 - DNA, 25 bp, Homo sapien
gaggaggaaattcgagtcgagcccc

SEQ ID NO: 2027117 - DNA, 25 bp, Homo sapien
ataaacatgtccctcattcgccccg

SEQ ID NO: 2027118 - DNA, 25 bp, Homo sapien
ctccccgcgggactgataaacatgt

SEQ ID NO: 2027119 - DNA, 25 bp, Homo sapien
ggtgggaggcggagtcgctcggcat

SEQ ID NO: 2027120 - DNA, 25 bp, Homo sapien
ggacggccagactcgccgacggcgg

SEQ ID NO: 2027121 - DNA, 25 bp, Homo sapien
ggagcgagcctgtcggaaggtggga

SEQ ID NO: 2027122 - DNA, 25 bp, Homo sapien
caggcacgacgcgaggacggccaga

SEQ ID NO: 2027123 - DNA, 25 bp, Homo sapien
ggaatgagtcattggaaatgctgta

SEQ ID NO: 2027124 - DNA, 25 bp, Homo sapien
gctgtaacgtagacccttatcccaa

SEQ ID NO: 2027125 - DNA, 25 bp, Homo sapien
cacgtttcggagagggaagtgaaat

SEQ ID NO: 2027126 - DNA, 25 bp, Homo sapien
cccctgccgagaagcgaagggactg

SEQ ID NO: 2027127 - DNA, 25 bp, Homo sapien
gagcctcttgccttcgcgggcggcg

SEQ ID NO: 2027128 - DNA, 25 bp, Homo sapien
cgctgcgcgcgggatgtggcagccc

SEQ ID NO: 2027129 - DNA, 25 bp, Homo sapien
gagctgccctgccaaagacgacgag

SEQ ID NO: 2027130 - DNA, 25 bp, Homo sapien
ggaacaagtaagtgcgcgccccttg

SEQ ID NO: 2027131 - DNA, 25 bp, Homo sapien
aattcctaagggtggctcaatagaa

SEQ ID NO: 2027132 - DNA, 25 bp, Homo sapien
cctctgtaaattcctaagggtggct

SEQ ID NO: 2027133 - DNA, 25 bp, Homo sapien
gattgcttcaacaaaacatgatttg

SEQ ID NO: 2027134 - DNA, 25 bp, Homo sapien
gctctggatcctccgggcacaggat

SEQ ID NO: 2027135 - DNA, 25 bp, Homo sapien
atcgcccgtcagtgtggtggacgca

SEQ ID NO: 2027136 - DNA, 25 bp, Homo sapien
aacagtctggtagatcctgccaccc

SEQ ID NO: 2027137 - DNA, 25 bp, Homo sapien
agcttgaacagtctggtagatcctg

SEQ ID NO: 2027138 - DNA, 25 bp, Homo sapien
ttgggacattcccagcgatcgcccg

SEQ ID NO: 2027139 - DNA, 25 bp, Homo sapien
agagcctgtgctgctgagataaggc

SEQ ID NO: 2027140 - DNA, 25 bp, Homo sapien
gtggggccaacacacagagcctgtg

SEQ ID NO: 2027141 - DNA, 25 bp, Homo sapien
tctgggtggggccaacacacagagc

SEQ ID NO: 2027142 - DNA, 25 bp, Homo sapien
acagagcctgtgctgctgagataag

SEQ ID NO: 2027143 - DNA, 25 bp, Homo sapien
caccacgatgggcaatgcgcccttt

SEQ ID NO: 2027144 - DNA, 25 bp, Homo sapien
tcctggccactctcgagatttgcga

SEQ ID NO: 2027145 - DNA, 25 bp, Homo sapien
aacaagtttcatcacctcctggcca

SEQ ID NO: 2027146 - DNA, 25 bp, Homo sapien
cttggagattttgggcagctttcag

SEQ ID NO: 2027147 - DNA, 25 bp, Homo sapien
cctcctttctggtttcttcctccat

SEQ ID NO: 2027148 - DNA, 25 bp, Homo sapien
tctttatttgggtctagcgccggaa

SEQ ID NO: 2027149 - DNA, 25 bp, Homo sapien
taacggcagccagtaaagagagatg

SEQ ID NO: 2027150 - DNA, 25 bp, Homo sapien
cggctcggcctcgaaacagcttgaa

SEQ ID NO: 2027151 - DNA, 25 bp, Homo sapien
gctgatctgagttaggctgaacccc

SEQ ID NO: 2027152 - DNA, 25 bp, Homo sapien
tgaagacggaccagatgtgcacgga

SEQ ID NO: 2027153 - DNA, 25 bp, Homo sapien
taagtgtggtcccttacagatcggg

SEQ ID NO: 2027154 - DNA, 25 bp, Homo sapien
ggtcaaggccccatgtcatctgcag

SEQ ID NO: 2027155 - DNA, 25 bp, Homo sapien
cgagctcttgggtttctaagcagca

SEQ ID NO: 2027156 - DNA, 25 bp, Homo sapien
catctggaaagagcacttacttcag

SEQ ID NO: 2027157 - DNA, 25 bp, Homo sapien
cacagtacccaaaaacggaggcagc

SEQ ID NO: 2027158 - DNA, 25 bp, Homo sapien
tggaagctctacaacacgggaaaac

SEQ ID NO: 2027159 - DNA, 25 bp, Homo sapien
tgcatgctccaggtctacacgagca

SEQ ID NO: 2027160 - DNA, 25 bp, Homo sapien
gggcagacagcaactcacacgggac

SEQ ID NO: 2027161 - DNA, 25 bp, Homo sapien
cagcaaagcaaatacgagacttaga

SEQ ID NO: 2027162 - DNA, 25 bp, Homo sapien
aatacgagacttagactgaactgca

SEQ ID NO: 2027163 - DNA, 25 bp, Homo sapien
aactcacacgggacgagcttcagca

SEQ ID NO: 2027164 - DNA, 25 bp, Homo sapien
tgtacaaacacactcgagggcatct

SEQ ID NO: 2027165 - DNA, 25 bp, Homo sapien
tctggagcagcttatggcacacctt

SEQ ID NO: 2027166 - DNA, 25 bp, Homo sapien
ccgtcactgaagatagcgcgagggt

SEQ ID NO: 2027167 - DNA, 25 bp, Homo sapien
tgaaaatacataggcacccgtgtcc

SEQ ID NO: 2027168 - DNA, 25 bp, Homo sapien
taagggctcgtggagttgtcacaga

SEQ ID NO: 2027169 - DNA, 25 bp, Homo sapien
cagtgtagcaggaaatgaggcgacc

SEQ ID NO: 2027170 - DNA, 25 bp, Homo sapien
tgagacctgttcttctggtgaggac

SEQ ID NO: 2027171 - DNA, 25 bp, Homo sapien
cagggaccctgacatctgaagacag

SEQ ID NO: 2027172 - DNA, 25 bp, Homo sapien
agccacctcaactgcccagtggaaa

SEQ ID NO: 2027173 - DNA, 25 bp, Homo sapien
aaactggaacacttcactgtgtgca

SEQ ID NO: 2027174 - DNA, 25 bp, Homo sapien
tgtgcgacccacaaaggagggatcc

SEQ ID NO: 2027175 - DNA, 25 bp, Homo sapien
tgtgtgcgacccacaaaggagggat

SEQ ID NO: 2027176 - DNA, 25 bp, Homo sapien
agcaggaaacatgtgtgcgacccac

SEQ ID NO: 2027177 - DNA, 25 bp, Homo sapien
aaacatgtgtgcgacccacaaagga

SEQ ID NO: 2027178 - DNA, 25 bp, Homo sapien
cacccgtccccgctggggaaggctg

SEQ ID NO: 2027179 - DNA, 25 bp, Homo sapien
gctccagaagcacccgtccccgctg

SEQ ID NO: 2027180 - DNA, 25 bp, Homo sapien
ggatggcgggaccagctccagaagc

SEQ ID NO: 2027181 - DNA, 25 bp, Homo sapien
caaaggaggatggcgggaccagctc

SEQ ID NO: 2027182 - DNA, 25 bp, Homo sapien
aaggagctgaactccgggcagggaa

SEQ ID NO: 2027183 - DNA, 25 bp, Homo sapien
gaattctgctccttactgagaaggg

SEQ ID NO: 2027184 - DNA, 25 bp, Homo sapien
atcgggtctcgccagtagcagaagg

SEQ ID NO: 2027185 - DNA, 25 bp, Homo sapien
cagggaaaagcggaattctgctcct

SEQ ID NO: 2027186 - DNA, 25 bp, Homo sapien
cggtgaatattctacagtctggaac

SEQ ID NO: 2027187 - DNA, 25 bp, Homo sapien
gggttcacggtgaatattctacagt

SEQ ID NO: 2027188 - DNA, 25 bp, Homo sapien
ttcacggtgaatattctacagtctg

SEQ ID NO: 2027189 - DNA, 25 bp, Homo sapien
cacggtgaatattctacagtctgga

SEQ ID NO: 2027190 - DNA, 25 bp, Homo sapien
ctccccagttgctatagatatttgg

SEQ ID NO: 2027191 - DNA, 25 bp, Homo sapien
tatagatatttggaatagatcaagt

SEQ ID NO: 2027192 - DNA, 25 bp, Homo sapien
tccccagttgctatagatatttgga

SEQ ID NO: 2027193 - DNA, 25 bp, Homo sapien
tagatatttggaatagatcaagtga

SEQ ID NO: 2027194 - DNA, 25 bp, Homo sapien
tttgagaattgggacgtggctacac

SEQ ID NO: 2027195 - DNA, 25 bp, Homo sapien
ttcacccacatcagaacccagagcc

SEQ ID NO: 2027196 - DNA, 25 bp, Homo sapien
cacgaagtacatccctctgaatttc

SEQ ID NO: 2027197 - DNA, 25 bp, Homo sapien
cccacgaagtacatccctctgaatt

SEQ ID NO: 2027198 - DNA, 25 bp, Homo sapien
agtacatccctctgaatttcaccca

SEQ ID NO: 2027199 - DNA, 25 bp, Homo sapien
acggggcaaacagattcttgatatc

SEQ ID NO: 2027200 - DNA, 25 bp, Homo sapien
gggcaaacagattcttgatatcatt

SEQ ID NO: 2027201 - DNA, 25 bp, Homo sapien
ttcttgatatcatttagacactcaa

SEQ ID NO: 2027202 - DNA, 25 bp, Homo sapien
gaagggctgcttagacggggcaaac

SEQ ID NO: 2027203 - DNA, 25 bp, Homo sapien
ctcaaaatggtcgttttccccagtg

SEQ ID NO: 2027204 - DNA, 25 bp, Homo sapien
ggttcctagaacctgcctttcttca

SEQ ID NO: 2027205 - DNA, 25 bp, Homo sapien
gtggcggctccaacatctgacttct

SEQ ID NO: 2027206 - DNA, 25 bp, Homo sapien
caccagggaccaaagaactgggaga

SEQ ID NO: 2027207 - DNA, 25 bp, Homo sapien
atgctggggcggtgggcagagggct

SEQ ID NO: 2027208 - DNA, 25 bp, Homo sapien
agagggctgcctgccggagaggtac

SEQ ID NO: 2027209 - DNA, 25 bp, Homo sapien
gcagagggctgcctgccggagaggt

SEQ ID NO: 2027210 - DNA, 25 bp, Homo sapien
gtgggcagagggctgcctgccggag

SEQ ID NO: 2027211 - DNA, 25 bp, Homo sapien
aggtagccacgggtcatgtcggcca

SEQ ID NO: 2027212 - DNA, 25 bp, Homo sapien
gcagtacagaaacttgtagccattc

SEQ ID NO: 2027213 - DNA, 25 bp, Homo sapien
catgtcggccatgccgatggcacga

SEQ ID NO: 2027214 - DNA, 25 bp, Homo sapien
ctgtggaaggcggagaacaagctgc

SEQ ID NO: 2027215 - DNA, 25 bp, Homo sapien
ccacatgttctggctaagggaaaag

SEQ ID NO: 2027216 - DNA, 25 bp, Homo sapien
gaaaacacaccctgttagcccacat

SEQ ID NO: 2027217 - DNA, 25 bp, Homo sapien
gcccacatgttctggctaagggaaa

SEQ ID NO: 2027218 - DNA, 25 bp, Homo sapien
agaaaacacaccctgttagcccaca

SEQ ID NO: 2027219 - DNA, 25 bp, Homo sapien
tgctataccctggtgggtccagtct

SEQ ID NO: 2027220 - DNA, 25 bp, Homo sapien
tcattgatggaatggtagagctttg

SEQ ID NO: 2027221 - DNA, 25 bp, Homo sapien
ctttgctataccctggtgggtccag

SEQ ID NO: 2027222 - DNA, 25 bp, Homo sapien
taccctggtgggtccagtctttgcc

SEQ ID NO: 2027223 - DNA, 25 bp, Homo sapien
gcgttttcctatttggttgactatc

SEQ ID NO: 2027224 - DNA, 25 bp, Homo sapien
tcaggaatcaaacacatacagcgtt

SEQ ID NO: 2027225 - DNA, 25 bp, Homo sapien
gaaacaggaaaagctatcaggaatc

SEQ ID NO: 2027226 - DNA, 25 bp, Homo sapien
ttggttgactatcagctgccaataa

SEQ ID NO: 2027227 - DNA, 25 bp, Homo sapien
ccttgatactgggttgtaatactaa

SEQ ID NO: 2027228 - DNA, 25 bp, Homo sapien
ggtaaatggtccctgcacagcgaca

SEQ ID NO: 2027229 - DNA, 25 bp, Homo sapien
cacagcgacaggtgccttgatactg

SEQ ID NO: 2027230 - DNA, 25 bp, Homo sapien
catcatttgggccatcgtggagctt

SEQ ID NO: 2027231 - DNA, 25 bp, Homo sapien
tagctgtgtacgactgactctcaag

SEQ ID NO: 2027232 - DNA, 25 bp, Homo sapien
ggtggcaggacccaagccacaggtt

SEQ ID NO: 2027233 - DNA, 25 bp, Homo sapien
gactgactctcaagagatggaggaa

SEQ ID NO: 2027234 - DNA, 25 bp, Homo sapien
ctggctcagcgctgggttagctgtg

SEQ ID NO: 2027235 - DNA, 25 bp, Homo sapien
gatctggtctgaggagaggcggaga

SEQ ID NO: 2027236 - DNA, 25 bp, Homo sapien
cactcgaggagtcattctcggccgg

SEQ ID NO: 2027237 - DNA, 25 bp, Homo sapien
ccactgtgatggattcttcgagctc

SEQ ID NO: 2027238 - DNA, 25 bp, Homo sapien
gaggcggagagacttcttatatgaa

SEQ ID NO: 2027239 - DNA, 25 bp, Homo sapien
ggctggcggtgcctcagattttccc

SEQ ID NO: 2027240 - DNA, 25 bp, Homo sapien
ctggctggcggtgcctcagattttc

SEQ ID NO: 2027241 - DNA, 25 bp, Homo sapien
tcactggctggcggtgcctcagatt

SEQ ID NO: 2027242 - DNA, 25 bp, Homo sapien
ctggcaccggccggctccttggagc

SEQ ID NO: 2027243 - DNA, 25 bp, Homo sapien
ctgtaacagcaagatgataatggca

SEQ ID NO: 2027244 - DNA, 25 bp, Homo sapien
gatgataatggcaacatgcaatttt

SEQ ID NO: 2027245 - DNA, 25 bp, Homo sapien
gataatggcaacatgcaattttttc

SEQ ID NO: 2027246 - DNA, 25 bp, Homo sapien
gtaacagcaagatgataatggcaac

SEQ ID NO: 2027247 - DNA, 25 bp, Homo sapien
ctacagataagccaagttcatcagc

SEQ ID NO: 2027248 - DNA, 25 bp, Homo sapien
agataagccaagttcatcagcagcc

SEQ ID NO: 2027249 - DNA, 25 bp, Homo sapien
gataagccaagttcatcagcagccc

SEQ ID NO: 2027250 - DNA, 25 bp, Homo sapien
acagataagccaagttcatcagcag

SEQ ID NO: 2027251 - DNA, 25 bp, Homo sapien
tgctttctctctttcgccaaaacca

SEQ ID NO: 2027252 - DNA, 25 bp, Homo sapien
tctctttcgccaaaaccaccagcga

SEQ ID NO: 2027253 - DNA, 25 bp, Homo sapien
gccaaaaccaccagcgaccagattt

SEQ ID NO: 2027254 - DNA, 25 bp, Homo sapien
aaaccaccagcgaccagatttcttt

SEQ ID NO: 2027255 - DNA, 25 bp, Homo sapien
ttgcaagctaaggatcatgggagct

SEQ ID NO: 2027256 - DNA, 25 bp, Homo sapien
agctgccaaagcccagttatagtaa

SEQ ID NO: 2027257 - DNA, 25 bp, Homo sapien
tgcaagctaaggatcatgggagctg

SEQ ID NO: 2027258 - DNA, 25 bp, Homo sapien
ggagctgccaaagcccagttatagt

SEQ ID NO: 2027259 - DNA, 25 bp, Homo sapien
ccttattacaaggttaggattgtct

SEQ ID NO: 2027260 - DNA, 25 bp, Homo sapien
cagggttttctgcaaattcgtgata

SEQ ID NO: 2027261 - DNA, 25 bp, Homo sapien
gataagtaatgatatgctccatgaa

SEQ ID NO: 2027262 - DNA, 25 bp, Homo sapien
gattgtctataagtccagggttttc

SEQ ID NO: 2027263 - DNA, 25 bp, Homo sapien
tatcttaaaattgtttgggccaggc

SEQ ID NO: 2027264 - DNA, 25 bp, Homo sapien
acatatcttaaaattgtttgggcca

SEQ ID NO: 2027265 - DNA, 25 bp, Homo sapien
atcttaaaattgtttgggccaggca

SEQ ID NO: 2027266 - DNA, 25 bp, Homo sapien
catatcttaaaattgtttgggccag

SEQ ID NO: 2027267 - DNA, 25 bp, Homo sapien
gaatctgagaggcactcggtgccgc

SEQ ID NO: 2027268 - DNA, 25 bp, Homo sapien
gagggtaacgtcaggcaagtccatg

SEQ ID NO: 2027269 - DNA, 25 bp, Homo sapien
cagagagtgtgtcagactcgggcca

SEQ ID NO: 2027270 - DNA, 25 bp, Homo sapien
ggtgccgctatctgcagctgcgctt

SEQ ID NO: 2027271 - DNA, 25 bp, Homo sapien
aaatatcatcaggtccctggtgttg

SEQ ID NO: 2027272 - DNA, 25 bp, Homo sapien
catcaggtccctggtgttggcttct

SEQ ID NO: 2027273 - DNA, 25 bp, Homo sapien
atcatcaggtccctggtgttggctt

SEQ ID NO: 2027274 - DNA, 25 bp, Homo sapien
gcaacttcaggttctagacccttta

SEQ ID NO: 2027275 - DNA, 25 bp, Homo sapien
tggagccaaattaaacaaacgatta

SEQ ID NO: 2027276 - DNA, 25 bp, Homo sapien
ctggagccaaattaaacaaacgatt

SEQ ID NO: 2027277 - DNA, 25 bp, Homo sapien
tctgatggtgtaattgtagctgtcc

SEQ ID NO: 2027278 - DNA, 25 bp, Homo sapien
tctcaagaggaggttcgagaagctc

SEQ ID NO: 2027279 - DNA, 25 bp, Homo sapien
gagtctactttagctgccggtttgg

SEQ ID NO: 2027280 - DNA, 25 bp, Homo sapien
gaaggtggtcagcatctaacataga

SEQ ID NO: 2027281 - DNA, 25 bp, Homo sapien
gagactctgatctgagcaggctctc

SEQ ID NO: 2027282 - DNA, 25 bp, Homo sapien
ccacgtccactccatgtgagactct

SEQ ID NO: 2027283 - DNA, 25 bp, Homo sapien
cttggtggactctgggaatccgccc

SEQ ID NO: 2027284 - DNA, 25 bp, Homo sapien
tggactctgggaatccgccccacgt

SEQ ID NO: 2027285 - DNA, 25 bp, Homo sapien
gaatcactcttaggacacgctgtct

SEQ ID NO: 2027286 - DNA, 25 bp, Homo sapien
aatcactcttaggacacgctgtctg

SEQ ID NO: 2027287 - DNA, 25 bp, Homo sapien
tcactcttaggacacgctgtctggg

SEQ ID NO: 2027288 - DNA, 25 bp, Homo sapien
ctgaatcactcttaggacacgctgt

SEQ ID NO: 2027289 - DNA, 25 bp, Homo sapien
gggaccaatctccatcagataaggg

SEQ ID NO: 2027290 - DNA, 25 bp, Homo sapien
cagataaggggtaatgatccccaga

SEQ ID NO: 2027291 - DNA, 25 bp, Homo sapien
taaggggtaatgatccccagaatgg

SEQ ID NO: 2027292 - DNA, 25 bp, Homo sapien
aggggtaatgatccccagaatggaa

SEQ ID NO: 2027293 - DNA, 25 bp, Homo sapien
acatccctcagaagcactgtgggcc

SEQ ID NO: 2027294 - DNA, 25 bp, Homo sapien
catataaccttgaaaacatccctca

SEQ ID NO: 2027295 - DNA, 25 bp, Homo sapien
gaaaacatccctcagaagcactgtg

SEQ ID NO: 2027296 - DNA, 25 bp, Homo sapien
cttgccatataaccttgaaaacatc

SEQ ID NO: 2027297 - DNA, 25 bp, Homo sapien
tcaaattccgcatcattttctaagc

SEQ ID NO: 2027298 - DNA, 25 bp, Homo sapien
cacatctttcaaattccgcatcatt

SEQ ID NO: 2027299 - DNA, 25 bp, Homo sapien
tccgcatcattttctaagcctaaca

SEQ ID NO: 2027300 - DNA, 25 bp, Homo sapien
gatgtgctacaacatcacatctttc

SEQ ID NO: 2027301 - DNA, 25 bp, Homo sapien
acccaccactacgcccagctaattt

SEQ ID NO: 2027302 - DNA, 25 bp, Homo sapien
caccgcgcccggcctccacaaacct

SEQ ID NO: 2027303 - DNA, 25 bp, Homo sapien
ggcacccaccactacgcccagctaa

SEQ ID NO: 2027304 - DNA, 25 bp, Homo sapien
tgccagctccgcctcttaggttcac

SEQ ID NO: 2027305 - DNA, 25 bp, Homo sapien
tactatactacctcagaattaatcc

SEQ ID NO: 2027306 - DNA, 25 bp, Homo sapien
ttactatactacctcagaattaatc

SEQ ID NO: 2027307 - DNA, 25 bp, Homo sapien
aatactgcaattatggttatgggct

SEQ ID NO: 2027308 - DNA, 25 bp, Homo sapien
aatctgctgtgtcgtctttttgttt

SEQ ID NO: 2027309 - DNA, 25 bp, Homo sapien
tcaatctgctgtgtcgtctttttgt

SEQ ID NO: 2027310 - DNA, 25 bp, Homo sapien
tgctgtgtcgtctttttgtttttcc

SEQ ID NO: 2027311 - DNA, 25 bp, Homo sapien
tagctgcaggcagttcaaggcttgc

SEQ ID NO: 2027312 - DNA, 25 bp, Homo sapien
taacttcgctttacatcaatcacac

SEQ ID NO: 2027313 - DNA, 25 bp, Homo sapien
agttaataacttcgctttacatcaa

SEQ ID NO: 2027314 - DNA, 25 bp, Homo sapien
ttaataacttcgctttacatcaatc

SEQ ID NO: 2027315 - DNA, 25 bp, Homo sapien
aataacttcgctttacatcaatcac

SEQ ID NO: 2027316 - DNA, 25 bp, Homo sapien
atacaatatgcgcatctaacaatgt

SEQ ID NO: 2027317 - DNA, 25 bp, Homo sapien
tcaaatacaatatgcgcatctaaca

SEQ ID NO: 2027318 - DNA, 25 bp, Homo sapien
caaatacaatatgcgcatctaacaa

SEQ ID NO: 2027319 - DNA, 25 bp, Homo sapien
caatatgcgcatctaacaatgtgct

SEQ ID NO: 2027320 - DNA, 25 bp, Homo sapien
ctcatggaaaataggtactccagaa

SEQ ID NO: 2027321 - DNA, 25 bp, Homo sapien
catggaaaataggtactccagaatg

SEQ ID NO: 2027322 - DNA, 25 bp, Homo sapien
ccctcatggaaaataggtactccag

SEQ ID NO: 2027323 - DNA, 25 bp, Homo sapien
atggaaaataggtactccagaatga

SEQ ID NO: 2027324 - DNA, 25 bp, Homo sapien
ttttatcgcgtctactgtcttaggg

SEQ ID NO: 2027325 - DNA, 25 bp, Homo sapien
tggtctttttatcgcgtctactgtc

SEQ ID NO: 2027326 - DNA, 25 bp, Homo sapien
gcttggtctttttatcgcgtctact

SEQ ID NO: 2027327 - DNA, 25 bp, Homo sapien
cgcgtctactgtcttaggggcttga

SEQ ID NO: 2027328 - DNA, 25 bp, Homo sapien
aaaatcagttgttcttctcttacag

SEQ ID NO: 2027329 - DNA, 25 bp, Homo sapien
aaaaatcagttgttcttctcttaca

SEQ ID NO: 2027330 - DNA, 25 bp, Homo sapien
ttgtacagcctacaatgcttaagaa

SEQ ID NO: 2027331 - DNA, 25 bp, Homo sapien
cttttgtacagcctacaatgcttaa

SEQ ID NO: 2027332 - DNA, 25 bp, Homo sapien
atatgtgcaagcatcgtcggaattg

SEQ ID NO: 2027333 - DNA, 25 bp, Homo sapien
tgggtgatatgtgcaagcatcgtcg

SEQ ID NO: 2027334 - DNA, 25 bp, Homo sapien
tgcatcgtgaaagactggaacgcct

SEQ ID NO: 2027335 - DNA, 25 bp, Homo sapien
actggaacgcctgggtgatatgtgc

SEQ ID NO: 2027336 - DNA, 25 bp, Homo sapien
ctccggttgtagcacagcaaggcca

SEQ ID NO: 2027337 - DNA, 25 bp, Homo sapien
cgcagctccggttgtagcacagcaa

SEQ ID NO: 2027338 - DNA, 25 bp, Homo sapien
gctccggttgtagcacagcaaggcc

SEQ ID NO: 2027339 - DNA, 25 bp, Homo sapien
cagctccggttgtagcacagcaagg

SEQ ID NO: 2027340 - DNA, 25 bp, Homo sapien
gccaatcccgtgttgctagcaccag

SEQ ID NO: 2027341 - DNA, 25 bp, Homo sapien
agccaatcccgtgttgctagcacca

SEQ ID NO: 2027342 - DNA, 25 bp, Homo sapien
cagtacgagtcaacgaatttcagcg

SEQ ID NO: 2027343 - DNA, 25 bp, Homo sapien
tgttaacaacgtctagcagcaacct

SEQ ID NO: 2027344 - DNA, 25 bp, Homo sapien
tttcagcgtggctaatgatctcagc

SEQ ID NO: 2027345 - DNA, 25 bp, Homo sapien
gcagcaaccttagcacagtacgagt

SEQ ID NO: 2027346 - DNA, 25 bp, Homo sapien
tattctcctagtgaagagaaggaca

SEQ ID NO: 2027347 - DNA, 25 bp, Homo sapien
tttattctcctagtgaagagaagga

SEQ ID NO: 2027348 - DNA, 25 bp, Homo sapien
ctagtgaagagaaggacaaataacc

SEQ ID NO: 2027349 - DNA, 25 bp, Homo sapien
tctcctagtgaagagaaggacaaat

SEQ ID NO: 2027350 - DNA, 25 bp, Homo sapien
caataaagagaatccccaccacggt

SEQ ID NO: 2027351 - DNA, 25 bp, Homo sapien
gaaaacgtgttctactcccaactgc

SEQ ID NO: 2027352 - DNA, 25 bp, Homo sapien
tagggtgtgacctcttttcgacaga

SEQ ID NO: 2027353 - DNA, 25 bp, Homo sapien
caaccccaagcggtgctgacatgaa

SEQ ID NO: 2027354 - DNA, 25 bp, Homo sapien
tgtctctgtttccaagacgtgtgag

SEQ ID NO: 2027355 - DNA, 25 bp, Homo sapien
atctccacccgatttcaccaaaggg

SEQ ID NO: 2027356 - DNA, 25 bp, Homo sapien
gcctacatcacatgtgtcttctgca

SEQ ID NO: 2027357 - DNA, 25 bp, Homo sapien
ttgtcatcatcggagctcacgccta

SEQ ID NO: 2027358 - DNA, 25 bp, Homo sapien
aagaaagcttctccgttatcaccca

SEQ ID NO: 2027359 - DNA, 25 bp, Homo sapien
cgttatcacccaacttcatgtgaag

SEQ ID NO: 2027360 - DNA, 25 bp, Homo sapien
caacttcatgtgaagatccactgca

SEQ ID NO: 2027361 - DNA, 25 bp, Homo sapien
gaagatccactgcactgccgttgat

SEQ ID NO: 2027362 - DNA, 25 bp, Homo sapien
tgttttctaatttgattgacatcag

SEQ ID NO: 2027363 - DNA, 25 bp, Homo sapien
tgccaagtgttattactagctctgt

SEQ ID NO: 2027364 - DNA, 25 bp, Homo sapien
tgttattactagctctgttttctaa

SEQ ID NO: 2027365 - DNA, 25 bp, Homo sapien
tgacatcagatatactagcaaaact

SEQ ID NO: 2027366 - DNA, 25 bp, Homo sapien
cacaatagcgatttattcatagagg

SEQ ID NO: 2027367 - DNA, 25 bp, Homo sapien
tcatagaggatgacttttctactcc

SEQ ID NO: 2027368 - DNA, 25 bp, Homo sapien
caatacataaaggttgacttctcgt

SEQ ID NO: 2027369 - DNA, 25 bp, Homo sapien
tctgcagtcgagctttgtggttttc

SEQ ID NO: 2027370 - DNA, 25 bp, Homo sapien
gctgctgtaccacgatgacatcaat

SEQ ID NO: 2027371 - DNA, 25 bp, Homo sapien
tgacatcaatgcacccagagagggt

SEQ ID NO: 2027372 - DNA, 25 bp, Homo sapien
gggtggcctggttaatgcccttgta

SEQ ID NO: 2027373 - DNA, 25 bp, Homo sapien
ccgaacgtgaaaaggtgaacactga

SEQ ID NO: 2027374 - DNA, 25 bp, Homo sapien
tgacctcctgcccaagaccctttgg

SEQ ID NO: 2027375 - DNA, 25 bp, Homo sapien
tgcccaagaccctttggaacctgcg

SEQ ID NO: 2027376 - DNA, 25 bp, Homo sapien
gcggctactgcatccactttggcca

SEQ ID NO: 2027377 - DNA, 25 bp, Homo sapien
gcaacctggatagtactgactgcca

SEQ ID NO: 2027378 - DNA, 25 bp, Homo sapien
cagagaggcaccgaaacacaagggt

SEQ ID NO: 2027379 - DNA, 25 bp, Homo sapien
gtagccatgtctataatacgggacc

SEQ ID NO: 2027380 - DNA, 25 bp, Homo sapien
gaaacgtatatggagagccaaggcc

SEQ ID NO: 2027381 - DNA, 25 bp, Homo sapien
tctgaacgatgagccagtcataagt

SEQ ID NO: 2027382 - DNA, 25 bp, Homo sapien
ccgaggcaggggcaagggtgccgta

SEQ ID NO: 2027383 - DNA, 25 bp, Homo sapien
tcagccgaggcaggggcaagggtgc

SEQ ID NO: 2027384 - DNA, 25 bp, Homo sapien
agccgaggcaggggcaagggtgccg

SEQ ID NO: 2027385 - DNA, 25 bp, Homo sapien
cgaggcaggggcaagggtgccgtaa

SEQ ID NO: 2027386 - DNA, 25 bp, Homo sapien
gaggttgcctcctacactgcactcc

SEQ ID NO: 2027387 - DNA, 25 bp, Homo sapien
agaggttgcctcctacactgcactc

SEQ ID NO: 2027388 - DNA, 25 bp, Homo sapien
cagaggttgcctcctacactgcact

SEQ ID NO: 2027389 - DNA, 25 bp, Homo sapien
tcttgacaaactgagtacaaactgc

SEQ ID NO: 2027390 - DNA, 25 bp, Homo sapien
tacttaatgagcctttacaaaccac

SEQ ID NO: 2027391 - DNA, 25 bp, Homo sapien
tccaaacagaaagctgctctcttga

SEQ ID NO: 2027392 - DNA, 25 bp, Homo sapien
tacaaactgcttgcagacacagtta

SEQ ID NO: 2027393 - DNA, 25 bp, Homo sapien
caatactgagagttgcctggctgta

SEQ ID NO: 2027394 - DNA, 25 bp, Homo sapien
tttgcacagtgatgacacccttagg

SEQ ID NO: 2027395 - DNA, 25 bp, Homo sapien
tgtacacatcgcagtttaaggagct

SEQ ID NO: 2027396 - DNA, 25 bp, Homo sapien
cctggctgtagcagtcaagtgcatc

SEQ ID NO: 2027397 - DNA, 25 bp, Homo sapien
cagacctatggtcaggctccctagg

SEQ ID NO: 2027398 - DNA, 25 bp, Homo sapien
gtgcagcagacctatggtcaggctc

SEQ ID NO: 2027399 - DNA, 25 bp, Homo sapien
gacctatggtcaggctccctagggc

SEQ ID NO: 2027400 - DNA, 25 bp, Homo sapien
aaggacaaggcttctgcagggccac

SEQ ID NO: 2027401 - DNA, 25 bp, Homo sapien
ttgataagcctgttctgactgggtc

SEQ ID NO: 2027402 - DNA, 25 bp, Homo sapien
cggtgtgtgggcaaaattgtctgca

SEQ ID NO: 2027403 - DNA, 25 bp, Homo sapien
gtatatggccctgtattgataagcc

SEQ ID NO: 2027404 - DNA, 25 bp, Homo sapien
ttatttctgaatgtccccggcggcg

SEQ ID NO: 2027405 - DNA, 25 bp, Homo sapien
ctcttcagcctatttgtccccagtg

SEQ ID NO: 2027406 - DNA, 25 bp, Homo sapien
ttaattccactgatacaccactgtg

SEQ ID NO: 2027407 - DNA, 25 bp, Homo sapien
taaatcaatcacctctgaaggctac

SEQ ID NO: 2027408 - DNA, 25 bp, Homo sapien
tatgccttaagactcatccaactga

SEQ ID NO: 2027409 - DNA, 25 bp, Homo sapien
aaatatgattcatctgacatgcgtg

SEQ ID NO: 2027410 - DNA, 25 bp, Homo sapien
gatgttgctttgaatggcttctggc

SEQ ID NO: 2027411 - DNA, 25 bp, Homo sapien
ctaatctaccttgaagggtaaagat

SEQ ID NO: 2027412 - DNA, 25 bp, Homo sapien
catgcgtggttcatcagatgttgct

SEQ ID NO: 2027413 - DNA, 25 bp, Homo sapien
tacacactcaacgacagtcactggg

SEQ ID NO: 2027414 - DNA, 25 bp, Homo sapien
ctaccaatctggcacggcaagtcgg

SEQ ID NO: 2027415 - DNA, 25 bp, Homo sapien
caaatggtaggtcacgagactctgg

SEQ ID NO: 2027416 - DNA, 25 bp, Homo sapien
tgactgcttcatttggaccccaggg

SEQ ID NO: 2027417 - DNA, 25 bp, Homo sapien
tcaacagacctcgaccgaatcgcat

SEQ ID NO: 2027418 - DNA, 25 bp, Homo sapien
tactgagcagctatggagtttggct

SEQ ID NO: 2027419 - DNA, 25 bp, Homo sapien
tccaggtcactggtaaggacaaact

SEQ ID NO: 2027420 - DNA, 25 bp, Homo sapien
aatcgcatcccaaagccggctatgt

SEQ ID NO: 2027421 - DNA, 25 bp, Homo sapien
aggatgactgccctccaacaactga

SEQ ID NO: 2027422 - DNA, 25 bp, Homo sapien
gaagagccgatgttggacggctatc

SEQ ID NO: 2027423 - DNA, 25 bp, Homo sapien
tctctggctgggtacggcctgagga

SEQ ID NO: 2027424 - DNA, 25 bp, Homo sapien
tggacggctatcacacgtggcttca

SEQ ID NO: 2027425 - DNA, 25 bp, Homo sapien
cttctcccccgcttcagcatcacct

SEQ ID NO: 2027426 - DNA, 25 bp, Homo sapien
cactgtgtggccggctctgccgctt

SEQ ID NO: 2027427 - DNA, 25 bp, Homo sapien
cacacagcttgaaggcggaggtacg

SEQ ID NO: 2027428 - DNA, 25 bp, Homo sapien
gtccacacagcttgaaggcggaggt

SEQ ID NO: 2027429 - DNA, 25 bp, Homo sapien
atttgaatccggtccacacagcttg

SEQ ID NO: 2027430 - DNA, 25 bp, Homo sapien
ggaagaaacaccagcaactcggcgg

SEQ ID NO: 2027431 - DNA, 25 bp, Homo sapien
ctccgctcccggccagcgggcggct

SEQ ID NO: 2027432 - DNA, 25 bp, Homo sapien
gctcccggccagcgggcggctgagg

SEQ ID NO: 2027433 - DNA, 25 bp, Homo sapien
ccgctcccggccagcgggcggctga

SEQ ID NO: 2027434 - DNA, 25 bp, Homo sapien
gggctccgctcccggccagcgggcg

SEQ ID NO: 2027435 - DNA, 25 bp, Homo sapien
acaaagctgctccttgaaggatcca

SEQ ID NO: 2027436 - DNA, 25 bp, Homo sapien
ccagctgcagcccagtttcttccca

SEQ ID NO: 2027437 - DNA, 25 bp, Homo sapien
aggatccagctgcagcccagtttct

SEQ ID NO: 2027438 - DNA, 25 bp, Homo sapien
caaagctgctccttgaaggatccag

SEQ ID NO: 2027439 - DNA, 25 bp, Homo sapien
gggagcaggcgaccacttcttcact

SEQ ID NO: 2027440 - DNA, 25 bp, Homo sapien
tctgtgaaactcgatcaagttttgc

SEQ ID NO: 2027441 - DNA, 25 bp, Homo sapien
gattcagggagcaggcgaccacttc

SEQ ID NO: 2027442 - DNA, 25 bp, Homo sapien
tgcttttctgtgaaactcgatcaag

SEQ ID NO: 2027443 - DNA, 25 bp, Homo sapien
gtgattaggccctcgccatttctct

SEQ ID NO: 2027444 - DNA, 25 bp, Homo sapien
tgtgattaggccctcgccatttctc

SEQ ID NO: 2027445 - DNA, 25 bp, Homo sapien
ccctgcttgtgattaggccctcgcc

SEQ ID NO: 2027446 - DNA, 25 bp, Homo sapien
tgcttgtgattaggccctcgccatt

SEQ ID NO: 2027447 - DNA, 25 bp, Homo sapien
aatttattggtgagtattaagaggg

SEQ ID NO: 2027448 - DNA, 25 bp, Homo sapien
ttattggtgagtattaagagggggc

SEQ ID NO: 2027449 - DNA, 25 bp, Homo sapien
ttggtgagtattaagagggggcagc

SEQ ID NO: 2027450 - DNA, 25 bp, Homo sapien
gaatttattggtgagtattaagagg

SEQ ID NO: 2027451 - DNA, 25 bp, Homo sapien
accacttatccagagggccacgaat

SEQ ID NO: 2027452 - DNA, 25 bp, Homo sapien
cagggcccaccacttatccagaggg

SEQ ID NO: 2027453 - DNA, 25 bp, Homo sapien
cccaccacttatccagagggccacg

SEQ ID NO: 2027454 - DNA, 25 bp, Homo sapien
tgcagggcccaccacttatccagag

SEQ ID NO: 2027455 - DNA, 25 bp, Homo sapien
gtggatcttctggtgaccagagaac

SEQ ID NO: 2027456 - DNA, 25 bp, Homo sapien
tgtggatcttctggtgaccagagaa

SEQ ID NO: 2027457 - DNA, 25 bp, Homo sapien
atgtggatcttctggtgaccagaga

SEQ ID NO: 2027458 - DNA, 25 bp, Homo sapien
gaacttggccctgcacagggcctca

SEQ ID NO: 2027459 - DNA, 25 bp, Homo sapien
taacttggccaatgttaaccctggc

SEQ ID NO: 2027460 - DNA, 25 bp, Homo sapien
ctgcacagggcctcaatcacatgct

SEQ ID NO: 2027461 - DNA, 25 bp, Homo sapien
ttggccaatgttaaccctggccaca

SEQ ID NO: 2027462 - DNA, 25 bp, Homo sapien
ttccaaaggcacctcacatgcctgt

SEQ ID NO: 2027463 - DNA, 25 bp, Homo sapien
aaaggcacctcacatgcctgtttgg

SEQ ID NO: 2027464 - DNA, 25 bp, Homo sapien
ggctttctttccaaaggcacctcac

SEQ ID NO: 2027465 - DNA, 25 bp, Homo sapien
ggcacctcacatgcctgtttggagc

SEQ ID NO: 2027466 - DNA, 25 bp, Homo sapien
cagagacatgaacccccatctgaaa

SEQ ID NO: 2027467 - DNA, 25 bp, Homo sapien
aaggtcagagacatgaacccccatc

SEQ ID NO: 2027468 - DNA, 25 bp, Homo sapien
caaggtcagagacatgaacccccat

SEQ ID NO: 2027469 - DNA, 25 bp, Homo sapien
ggtcagagacatgaacccccatctg

SEQ ID NO: 2027470 - DNA, 25 bp, Homo sapien
tacaagaaacaggctgcacacactg

SEQ ID NO: 2027471 - DNA, 25 bp, Homo sapien
acaagaaacaggctgcacacactgc

SEQ ID NO: 2027472 - DNA, 25 bp, Homo sapien
gaaacaggctgcacacactgccaag

SEQ ID NO: 2027473 - DNA, 25 bp, Homo sapien
aagaaacaggctgcacacactgcca

SEQ ID NO: 2027474 - DNA, 25 bp, Homo sapien
tctgttaactagacgcgctccctgc

SEQ ID NO: 2027475 - DNA, 25 bp, Homo sapien
tctattgccttcacgcgtcctccaa

SEQ ID NO: 2027476 - DNA, 25 bp, Homo sapien
ccaatcctgtctgttaactagacgc

SEQ ID NO: 2027477 - DNA, 25 bp, Homo sapien
tcctgtctgttaactagacgcgctc

SEQ ID NO: 2027478 - DNA, 25 bp, Homo sapien
agacgattgtggcattgtcctcacc

SEQ ID NO: 2027479 - DNA, 25 bp, Homo sapien
tcaggagacgattgtggcattgtcc

SEQ ID NO: 2027480 - DNA, 25 bp, Homo sapien
gtcctcaccactgttcgccagccat

SEQ ID NO: 2027481 - DNA, 25 bp, Homo sapien
cactgttcgccagccatctttgtct

SEQ ID NO: 2027482 - DNA, 25 bp, Homo sapien
ttgctgaaaagggtaaactgtgcag

SEQ ID NO: 2027483 - DNA, 25 bp, Homo sapien
ggtaaactgtgcagatgggccaccc

SEQ ID NO: 2027484 - DNA, 25 bp, Homo sapien
tttctgcttgctgaaaagggtaaac

SEQ ID NO: 2027485 - DNA, 25 bp, Homo sapien
gtaaactgtgcagatgggccaccca

SEQ ID NO: 2027486 - DNA, 25 bp, Homo sapien
ggaatgtagccaagacgtaggaaag

SEQ ID NO: 2027487 - DNA, 25 bp, Homo sapien
gagcaagaactgtatctggtggaat

SEQ ID NO: 2027488 - DNA, 25 bp, Homo sapien
ctcaagatcgtctgagcaagaactg

SEQ ID NO: 2027489 - DNA, 25 bp, Homo sapien
tagccaagacgtaggaaagctgcac

SEQ ID NO: 2027490 - DNA, 25 bp, Homo sapien
gagggcccgggacaatgcctggtgt

SEQ ID NO: 2027491 - DNA, 25 bp, Homo sapien
aggagggcccgggacaatgcctggt

SEQ ID NO: 2027492 - DNA, 25 bp, Homo sapien
agctgctctggtgcaggagggcccg

SEQ ID NO: 2027493 - DNA, 25 bp, Homo sapien
tctggtgcaggagggcccgggacaa

SEQ ID NO: 2027494 - DNA, 25 bp, Homo sapien
gagggcagaggggcagaaaaggccc

SEQ ID NO: 2027495 - DNA, 25 bp, Homo sapien
aggagggcagaggggcagaaaaggc

SEQ ID NO: 2027496 - DNA, 25 bp, Homo sapien
aggaggagggcagaggggcagaaaa

SEQ ID NO: 2027497 - DNA, 25 bp, Homo sapien
gaggagggcagaggggcagaaaagg

SEQ ID NO: 2027498 - DNA, 25 bp, Homo sapien
acttccatgacttccggcagtgtct

SEQ ID NO: 2027499 - DNA, 25 bp, Homo sapien
agctgttggtgattttccacttgtg

SEQ ID NO: 2027500 - DNA, 25 bp, Homo sapien
ccatgacttccggcagtgtctgttc

SEQ ID NO: 2027501 - DNA, 25 bp, Homo sapien
aagctgttggtgattttccacttgt

SEQ ID NO: 2027502 - DNA, 25 bp, Homo sapien
tgggaagcttatgaaccagaggtgc

SEQ ID NO: 2027503 - DNA, 25 bp, Homo sapien
cacgcttctcgtgaaattctggaga

SEQ ID NO: 2027504 - DNA, 25 bp, Homo sapien
aatgtctccggactgcgtgggaagc

SEQ ID NO: 2027505 - DNA, 25 bp, Homo sapien
tgtgtaaggaagacacacgcttctc

SEQ ID NO: 2027506 - DNA, 25 bp, Homo sapien
ctaagctattaaatcttgaggtcac

SEQ ID NO: 2027507 - DNA, 25 bp, Homo sapien
ttgagcaatctcagcgtatggagct

SEQ ID NO: 2027508 - DNA, 25 bp, Homo sapien
gcgtatggagctccgaacacaaaag

SEQ ID NO: 2027509 - DNA, 25 bp, Homo sapien
gaggtcactggtttagtttggtcat

SEQ ID NO: 2027510 - DNA, 25 bp, Homo sapien
ttaggggcctctcgcttgcacagcc

SEQ ID NO: 2027511 - DNA, 25 bp, Homo sapien
tctgacactgggagctctgttgctg

SEQ ID NO: 2027512 - DNA, 25 bp, Homo sapien
tttcggagagtcttaggggcctctc

SEQ ID NO: 2027513 - DNA, 25 bp, Homo sapien
acactgggagctctgttgctggctt

SEQ ID NO: 2027514 - DNA, 25 bp, Homo sapien
gaagacgtctcatccttaacccaaa

SEQ ID NO: 2027515 - DNA, 25 bp, Homo sapien
tctgtaacaacacacgagacacggc

SEQ ID NO: 2027516 - DNA, 25 bp, Homo sapien
ttcccctcaagccagaaaataatag

SEQ ID NO: 2027517 - DNA, 25 bp, Homo sapien
cgtcgaaaagcacatcacctctgta

SEQ ID NO: 2027518 - DNA, 25 bp, Homo sapien
ggccagggccttctcgttcttcaac

SEQ ID NO: 2027519 - DNA, 25 bp, Homo sapien
aaccagcccgtatttgcccgagtca

SEQ ID NO: 2027520 - DNA, 25 bp, Homo sapien
tgaacacgctgacggtgaagtcgct

SEQ ID NO: 2027521 - DNA, 25 bp, Homo sapien
ttgatggtgaagtacgcggtcctcc

SEQ ID NO: 2027522 - DNA, 25 bp, Homo sapien
gcgggtctccccacacgttgcaagt

SEQ ID NO: 2027523 - DNA, 25 bp, Homo sapien
ggaggcgggtctccccacacgttgc

SEQ ID NO: 2027524 - DNA, 25 bp, Homo sapien
acacgttgcaagtgagattaagggc

SEQ ID NO: 2027525 - DNA, 25 bp, Homo sapien
cacacgttgcaagtgagattaaggg

SEQ ID NO: 2027526 - DNA, 25 bp, Homo sapien
gtgaccacgtctgggagacctccca

SEQ ID NO: 2027527 - DNA, 25 bp, Homo sapien
gatggtgaccacgtctgggagacct

SEQ ID NO: 2027528 - DNA, 25 bp, Homo sapien
tggtgaccacgtctgggagacctcc

SEQ ID NO: 2027529 - DNA, 25 bp, Homo sapien
agacctcccaacacccgggcacgat

SEQ ID NO: 2027530 - DNA, 25 bp, Homo sapien
gaagccttctctagagagtgtccct

SEQ ID NO: 2027531 - DNA, 25 bp, Homo sapien
tagttcttggtagtgctgtgcaggc

SEQ ID NO: 2027532 - DNA, 25 bp, Homo sapien
tcagccaagctatatgccctgggca

SEQ ID NO: 2027533 - DNA, 25 bp, Homo sapien
tatggctaggagtataaaggcctgc

SEQ ID NO: 2027534 - DNA, 25 bp, Homo sapien
ggctttgctcagtaccaaacaagaa

SEQ ID NO: 2027535 - DNA, 25 bp, Homo sapien
ctgcttgtggatgtaggctttgctc

SEQ ID NO: 2027536 - DNA, 25 bp, Homo sapien
ggttgcttccagttctaaagagttc

SEQ ID NO: 2027537 - DNA, 25 bp, Homo sapien
caatttgaagtaagtgttccatagc

SEQ ID NO: 2027538 - DNA, 25 bp, Homo sapien
cagctgcagtccacatacacagggc

SEQ ID NO: 2027539 - DNA, 25 bp, Homo sapien
ccagctgcagtccacatacacaggg

SEQ ID NO: 2027540 - DNA, 25 bp, Homo sapien
cccagctgcagtccacatacacagg

SEQ ID NO: 2027541 - DNA, 25 bp, Homo sapien
ttctggctcccactcggacaaagaa

SEQ ID NO: 2027542 - DNA, 25 bp, Homo sapien
gggagcagtgcaagtttcaggttca

SEQ ID NO: 2027543 - DNA, 25 bp, Homo sapien
gactctaccattttagcctgtaaca

SEQ ID NO: 2027544 - DNA, 25 bp, Homo sapien
caaagttcaaagttgcacccagagg

SEQ ID NO: 2027545 - DNA, 25 bp, Homo sapien
ttacaggcacccgccactacacccg

SEQ ID NO: 2027546 - DNA, 25 bp, Homo sapien
attacaggcacccgccactacaccc

SEQ ID NO: 2027547 - DNA, 25 bp, Homo sapien
gatcttggctcacgggttcaagtga

SEQ ID NO: 2027548 - DNA, 25 bp, Homo sapien
gtgatcttggctcacgggttcaagt

SEQ ID NO: 2027549 - DNA, 25 bp, Homo sapien
tcaatataacaatgggaagtgctgc

SEQ ID NO: 2027550 - DNA, 25 bp, Homo sapien
tgagagaaacgaacaaacagacgaa

SEQ ID NO: 2027551 - DNA, 25 bp, Homo sapien
tcaaagtagctaaacttgacgacat

SEQ ID NO: 2027552 - DNA, 25 bp, Homo sapien
cagagacattttgctgttcaatata

SEQ ID NO: 2027553 - DNA, 25 bp, Homo sapien
tcaacctctggaattcagcataggc

SEQ ID NO: 2027554 - DNA, 25 bp, Homo sapien
caacctctggaattcagcataggcc

SEQ ID NO: 2027555 - DNA, 25 bp, Homo sapien
acctctggaattcagcataggcctc

SEQ ID NO: 2027556 - DNA, 25 bp, Homo sapien
ttcaacctctggaattcagcatagg

SEQ ID NO: 2027557 - DNA, 25 bp, Homo sapien
gtgcaatcatagcttgaggtagcct

SEQ ID NO: 2027558 - DNA, 25 bp, Homo sapien
atagcttgaggtagcctcgaactcc

SEQ ID NO: 2027559 - DNA, 25 bp, Homo sapien
gctcccattactgaaaggtcctgca

SEQ ID NO: 2027560 - DNA, 25 bp, Homo sapien
tagaaagtccgcgtccctctggagc

SEQ ID NO: 2027561 - DNA, 25 bp, Homo sapien
gcagctgctcccattactgaaaggt

SEQ ID NO: 2027562 - DNA, 25 bp, Homo sapien
gaaagtccgcgtccctctggagcag

SEQ ID NO: 2027563 - DNA, 25 bp, Homo sapien
cattcatctagagtaaatttgaatc

SEQ ID NO: 2027564 - DNA, 25 bp, Homo sapien
aaaggctcattcatctagagtaaat

SEQ ID NO: 2027565 - DNA, 25 bp, Homo sapien
taaaaggctcattcatctagagtaa

SEQ ID NO: 2027566 - DNA, 25 bp, Homo sapien
ggctcattcatctagagtaaatttg

SEQ ID NO: 2027567 - DNA, 25 bp, Homo sapien
cgttgatttgtagccagatctgctc

SEQ ID NO: 2027568 - DNA, 25 bp, Homo sapien
tcaaagagctccatgacatacttcc

SEQ ID NO: 2027569 - DNA, 25 bp, Homo sapien
gaccccggtcttaactctgtctgag

SEQ ID NO: 2027570 - DNA, 25 bp, Homo sapien
tgggctcgttgatttgtagccagat

SEQ ID NO: 2027571 - DNA, 25 bp, Homo sapien
taagttacaaaagagtacagttgga

SEQ ID NO: 2027572 - DNA, 25 bp, Homo sapien
ccctcggctgtgctctggattttca

SEQ ID NO: 2027573 - DNA, 25 bp, Homo sapien
aagagtacagttggatgccctcggc

SEQ ID NO: 2027574 - DNA, 25 bp, Homo sapien
caaatcctccacatagtaagttaca

SEQ ID NO: 2027575 - DNA, 25 bp, Homo sapien
tttttttgcatacttccatcatcag

SEQ ID NO: 2027576 - DNA, 25 bp, Homo sapien
ctatttttttgcatacttccatcat

SEQ ID NO: 2027577 - DNA, 25 bp, Homo sapien
tatttttttgcatacttccatcatc

SEQ ID NO: 2027578 - DNA, 25 bp, Homo sapien
tttttgcatacttccatcatcagtt

SEQ ID NO: 2027579 - DNA, 25 bp, Homo sapien
gataacttcataaatcccagcatct

SEQ ID NO: 2027580 - DNA, 25 bp, Homo sapien
tgctcttatcttttcctcggtcatc

SEQ ID NO: 2027581 - DNA, 25 bp, Homo sapien
ttcatccacaagcttcagtctgctc

SEQ ID NO: 2027582 - DNA, 25 bp, Homo sapien
cggtcatctttcaggataacttcat

SEQ ID NO: 2027583 - DNA, 25 bp, Homo sapien
taataatttgaccagcgagctagca

SEQ ID NO: 2027584 - DNA, 25 bp, Homo sapien
catctaacttgtgagtggtgaaccg

SEQ ID NO: 2027585 - DNA, 25 bp, Homo sapien
aaggcccttgatttacagaattgcc

SEQ ID NO: 2027586 - DNA, 25 bp, Homo sapien
tccaaggctgtaattgatatgaggc

SEQ ID NO: 2027587 - DNA, 25 bp, Homo sapien
caactcagaaaagcaagagttgtgg

SEQ ID NO: 2027588 - DNA, 25 bp, Homo sapien
aatgaagaatgatccacttcactgc

SEQ ID NO: 2027589 - DNA, 25 bp, Homo sapien
ttaggaccacgaggcttaagcacaa

SEQ ID NO: 2027590 - DNA, 25 bp, Homo sapien
atgtctctgtacttttaggaccacg

SEQ ID NO: 2027591 - DNA, 25 bp, Homo sapien
tgatatctccctctcatctttgtac

SEQ ID NO: 2027592 - DNA, 25 bp, Homo sapien
gatatctccctctcatctttgtacc

SEQ ID NO: 2027593 - DNA, 25 bp, Homo sapien
tgagctttctgttgtccgggatggc

SEQ ID NO: 2027594 - DNA, 25 bp, Homo sapien
tccgggatggcaaaggtcatagctc

SEQ ID NO: 2027595 - DNA, 25 bp, Homo sapien
tgttgtccgggatggcaaaggtcat

SEQ ID NO: 2027596 - DNA, 25 bp, Homo sapien
gatggcaaaggtcatagctccacat

SEQ ID NO: 2027597 - DNA, 25 bp, Homo sapien
gaaagaacgtcattccaggcattgg

SEQ ID NO: 2027598 - DNA, 25 bp, Homo sapien
cagtaacggaacaaagagctatgcg

SEQ ID NO: 2027599 - DNA, 25 bp, Homo sapien
aactgtaatgcgacacgtgagtggc

SEQ ID NO: 2027600 - DNA, 25 bp, Homo sapien
caggcattggaacgacagcataaca

SEQ ID NO: 2027601 - DNA, 25 bp, Homo sapien
cttcccagctcaaatactcaacaaa

SEQ ID NO: 2027602 - DNA, 25 bp, Homo sapien
acttcccagctcaaatactcaacaa

SEQ ID NO: 2027603 - DNA, 25 bp, Homo sapien
cacttcccagctcaaatactcaaca

SEQ ID NO: 2027604 - DNA, 25 bp, Homo sapien
tcctgatccattcttgccgctggaa

SEQ ID NO: 2027605 - DNA, 25 bp, Homo sapien
ccattcttgccgctggaattcagct

SEQ ID NO: 2027606 - DNA, 25 bp, Homo sapien
tgatccattcttgccgctggaattc

SEQ ID NO: 2027607 - DNA, 25 bp, Homo sapien
tcttgccgctggaattcagcttctt

SEQ ID NO: 2027608 - DNA, 25 bp, Homo sapien
catcttgaagctggaaagtgtacgt

SEQ ID NO: 2027609 - DNA, 25 bp, Homo sapien
tccatgaacatttcgatgatgccag

SEQ ID NO: 2027610 - DNA, 25 bp, Homo sapien
catctccaacgagaacaacagtaga

SEQ ID NO: 2027611 - DNA, 25 bp, Homo sapien
gccagtgtttcggtcaatatgcatt

SEQ ID NO: 2027612 - DNA, 25 bp, Homo sapien
catgaatgttcactcaatggctgtg

SEQ ID NO: 2027613 - DNA, 25 bp, Homo sapien
gagcagctgcataccctcaaggcaa

SEQ ID NO: 2027614 - DNA, 25 bp, Homo sapien
accaggtggtgatcacagcagtcga

SEQ ID NO: 2027615 - DNA, 25 bp, Homo sapien
ctaagaaacttaagagagcagctgc

SEQ ID NO: 2027616 - DNA, 25 bp, Homo sapien
ccatgatagcacaggtcagtgcccc

SEQ ID NO: 2027617 - DNA, 25 bp, Homo sapien
ccatttacacccatgatagcacagg

SEQ ID NO: 2027618 - DNA, 25 bp, Homo sapien
tacacccatgatagcacaggtcagt

SEQ ID NO: 2027619 - DNA, 25 bp, Homo sapien
tttcagtttcccatttacacccatg

SEQ ID NO: 2027620 - DNA, 25 bp, Homo sapien
tatgtagttgactttggcattgcca

SEQ ID NO: 2027621 - DNA, 25 bp, Homo sapien
gccaactctgatttaactgggacag

SEQ ID NO: 2027622 - DNA, 25 bp, Homo sapien
aatttccttctcgttaaatatgtag

SEQ ID NO: 2027623 - DNA, 25 bp, Homo sapien
gcattgccagacagtttctcagcct

SEQ ID NO: 2027624 - DNA, 25 bp, Homo sapien
gacagtggtaacacgtctgggtggt

SEQ ID NO: 2027625 - DNA, 25 bp, Homo sapien
tggttttccagtgtgagcaggatgt

SEQ ID NO: 2027626 - DNA, 25 bp, Homo sapien
tcttggtcctcgttgtccacacggt

SEQ ID NO: 2027627 - DNA, 25 bp, Homo sapien
tcttctgtattcctcttggtcctcg

SEQ ID NO: 2027628 - DNA, 25 bp, Homo sapien
cctgaatagttcatggattcatcaa

SEQ ID NO: 2027629 - DNA, 25 bp, Homo sapien
gaaagtacaaccatcttatgtagct

SEQ ID NO: 2027630 - DNA, 25 bp, Homo sapien
ttggagacttctgcgttgggcagca

SEQ ID NO: 2027631 - DNA, 25 bp, Homo sapien
tctgtcaatgttcgagagtagaaag

SEQ ID NO: 2027632 - DNA, 25 bp, Homo sapien
ctgagagcaagtaaacgtttcaatt

SEQ ID NO: 2027633 - DNA, 25 bp, Homo sapien
tccatcccaaggtctttgaaggtca

SEQ ID NO: 2027634 - DNA, 25 bp, Homo sapien
cgcaagagtaaatacccaagtcatc

SEQ ID NO: 2027635 - DNA, 25 bp, Homo sapien
catcagtgtctgttacatcgcaaga

SEQ ID NO: 2027636 - DNA, 25 bp, Homo sapien
cctcatctattaagtagcttgatgc

SEQ ID NO: 2027637 - DNA, 25 bp, Homo sapien
tgttgcccttgctttcgacttccaa

SEQ ID NO: 2027638 - DNA, 25 bp, Homo sapien
gacttccaatcgtggagagtcctca

SEQ ID NO: 2027639 - DNA, 25 bp, Homo sapien
ggagtcatcttatcacactcgaagt

SEQ ID NO: 2027640 - DNA, 25 bp, Homo sapien
ttggaccaggagaactcggactttg

SEQ ID NO: 2027641 - DNA, 25 bp, Homo sapien
accaggtagtgccttgtggagatta

SEQ ID NO: 2027642 - DNA, 25 bp, Homo sapien
ccggccaatgacagcatttcagaat

SEQ ID NO: 2027643 - DNA, 25 bp, Homo sapien
ccgtgtccggccaatgacagcattt

SEQ ID NO: 2027644 - DNA, 25 bp, Homo sapien
caggtagtgccttgtggagattaac

SEQ ID NO: 2027645 - DNA, 25 bp, Homo sapien
aactcccgcctggtttatggctcga

SEQ ID NO: 2027646 - DNA, 25 bp, Homo sapien
tggacgggtctctgccacaacaggg

SEQ ID NO: 2027647 - DNA, 25 bp, Homo sapien
gtagctgacgccctccttgaggcct

SEQ ID NO: 2027648 - DNA, 25 bp, Homo sapien
ggctcgaacacggaacacgtagctg

SEQ ID NO: 2027649 - DNA, 25 bp, Homo sapien
ttgccatgtttcccatggtcttgaa

SEQ ID NO: 2027650 - DNA, 25 bp, Homo sapien
cagggttttgccatgtttcccatgg

SEQ ID NO: 2027651 - DNA, 25 bp, Homo sapien
tttgccatgtttcccatggtcttga

SEQ ID NO: 2027652 - DNA, 25 bp, Homo sapien
ggttttgccatgtttcccatggtct

SEQ ID NO: 2027653 - DNA, 25 bp, Homo sapien
tcttctgccaaaagataggactgtg

SEQ ID NO: 2027654 - DNA, 25 bp, Homo sapien
ttctgccaaaagataggactgtgca

SEQ ID NO: 2027655 - DNA, 25 bp, Homo sapien
ctgtgcaaacgcagtgtgtaacttc

SEQ ID NO: 2027656 - DNA, 25 bp, Homo sapien
ataggactgtgcaaacgcagtgtgt

SEQ ID NO: 2027657 - DNA, 25 bp, Homo sapien
tcgagaggatcagtagtcacaggct

SEQ ID NO: 2027658 - DNA, 25 bp, Homo sapien
ctagaggaacctgaaaggcagtgac

SEQ ID NO: 2027659 - DNA, 25 bp, Homo sapien
tgagagctcatgtgagaaccggcct

SEQ ID NO: 2027660 - DNA, 25 bp, Homo sapien
taacgtgagacaggagtgactcgag

SEQ ID NO: 2027661 - DNA, 25 bp, Homo sapien
ctggcggcttccactggagaaccag

SEQ ID NO: 2027662 - DNA, 25 bp, Homo sapien
taatagccgcctcattgagccctcg

SEQ ID NO: 2027663 - DNA, 25 bp, Homo sapien
tcaggtatacgtttttaatagccgc

SEQ ID NO: 2027664 - DNA, 25 bp, Homo sapien
tggcctccttcaagtccacgaagta

SEQ ID NO: 2027665 - DNA, 25 bp, Homo sapien
ctacacttgagactgtgcggtggtc

SEQ ID NO: 2027666 - DNA, 25 bp, Homo sapien
ctgcctgtgctaatcctactcctcg

SEQ ID NO: 2027667 - DNA, 25 bp, Homo sapien
tcctcgcacaggctgagcgatgagg

SEQ ID NO: 2027668 - DNA, 25 bp, Homo sapien
cacaggctgagcgatgagggctcta

SEQ ID NO: 2027669 - DNA, 25 bp, Homo sapien
ttcatttgcactcaagccggctgcc

SEQ ID NO: 2027670 - DNA, 25 bp, Homo sapien
gacggcgatggtccactcttcacat

SEQ ID NO: 2027671 - DNA, 25 bp, Homo sapien
ctgggacggcgatggtccactcttc

SEQ ID NO: 2027672 - DNA, 25 bp, Homo sapien
cattcgcttactgcggagggcgcgc

SEQ ID NO: 2027673 - DNA, 25 bp, Homo sapien
cttcacatttgaagcattcgcttac

SEQ ID NO: 2027674 - DNA, 25 bp, Homo sapien
caacattgacaacatcacagatact

SEQ ID NO: 2027675 - DNA, 25 bp, Homo sapien
tgcaacattgacaacatcacagata

SEQ ID NO: 2027676 - DNA, 25 bp, Homo sapien
ctgcaacattgacaacatcacagat

SEQ ID NO: 2027677 - DNA, 25 bp, Homo sapien
gcaacattgacaacatcacagatac

SEQ ID NO: 2027678 - DNA, 25 bp, Homo sapien
gtgctaaagtcactatgcagaaagt

SEQ ID NO: 2027679 - DNA, 25 bp, Homo sapien
tagatgtctacaaaacacctgtaac

SEQ ID NO: 2027680 - DNA, 25 bp, Homo sapien
gaagtaaattgccactatttgcaga

SEQ ID NO: 2027681 - DNA, 25 bp, Homo sapien
tatcaagcctagaatgaccaacatc

SEQ ID NO: 2027682 - DNA, 25 bp, Homo sapien
tcgcgatagttcacataatagccag

SEQ ID NO: 2027683 - DNA, 25 bp, Homo sapien
tcctcactgacagccttgacattgg

SEQ ID NO: 2027684 - DNA, 25 bp, Homo sapien
tccatccaagaaccattgagtcacg

SEQ ID NO: 2027685 - DNA, 25 bp, Homo sapien
tggtaccccatcaatgacctcgcga

SEQ ID NO: 2027686 - DNA, 25 bp, Homo sapien
caaaagtcctccttcatttatgtgg

SEQ ID NO: 2027687 - DNA, 25 bp, Homo sapien
ccatgtttatcagtgcttagctaga

SEQ ID NO: 2027688 - DNA, 25 bp, Homo sapien
tcaggcacacttacccttgtgagac

SEQ ID NO: 2027689 - DNA, 25 bp, Homo sapien
tgaagtggtggaaagaaatacatct

SEQ ID NO: 2027690 - DNA, 25 bp, Homo sapien
taacaactatgaccctggtacgatg

SEQ ID NO: 2027691 - DNA, 25 bp, Homo sapien
tttcaaaggacctcacacaggctag

SEQ ID NO: 2027692 - DNA, 25 bp, Homo sapien
gatggagacggatggaacagcttcc

SEQ ID NO: 2027693 - DNA, 25 bp, Homo sapien
ggtgtatctgcctgacaaaccaaga

SEQ ID NO: 2027694 - DNA, 25 bp, Homo sapien
tctgtcttctttttcagggggtcag

SEQ ID NO: 2027695 - DNA, 25 bp, Homo sapien
tctgtctgtcttctttttcaggggg

SEQ ID NO: 2027696 - DNA, 25 bp, Homo sapien
ctgtcttctttttcagggggtcaga

SEQ ID NO: 2027697 - DNA, 25 bp, Homo sapien
tgtctgtcttctttttcagggggtc

SEQ ID NO: 2027698 - DNA, 25 bp, Homo sapien
cgctcagtgcgggacacacatctgg

SEQ ID NO: 2027699 - DNA, 25 bp, Homo sapien
cggttagtccaccaggctcatcgct

SEQ ID NO: 2027700 - DNA, 25 bp, Homo sapien
aggtttgttaggtttgctgccaagc

SEQ ID NO: 2027701 - DNA, 25 bp, Homo sapien
ttttgagagctactgggtagtgaag

SEQ ID NO: 2027702 - DNA, 25 bp, Homo sapien
ctacagttgccagacaacaacagaa

SEQ ID NO: 2027703 - DNA, 25 bp, Homo sapien
gccagacaacaacagaaacgcattg

SEQ ID NO: 2027704 - DNA, 25 bp, Homo sapien
gaaacgcattgagcccggacagagt

SEQ ID NO: 2027705 - DNA, 25 bp, Homo sapien
caacaacagaaacgcattgagcccg

SEQ ID NO: 2027706 - DNA, 25 bp, Homo sapien
caatagcagctttgacttcaatagc

SEQ ID NO: 2027707 - DNA, 25 bp, Homo sapien
gctgcattgactgctctgacccgga

SEQ ID NO: 2027708 - DNA, 25 bp, Homo sapien
tgaccagtcactaatccatgacaag

SEQ ID NO: 2027709 - DNA, 25 bp, Homo sapien
aatcctgggaatattcactaagtcc

SEQ ID NO: 2027710 - DNA, 25 bp, Homo sapien
tagacaagaaggtaactaaggcact

SEQ ID NO: 2027711 - DNA, 25 bp, Homo sapien
tccccaaatgctcaccagtaaaata

SEQ ID NO: 2027712 - DNA, 25 bp, Homo sapien
tatatactttagacaagaaggtaac

SEQ ID NO: 2027713 - DNA, 25 bp, Homo sapien
ccccaaatgctcaccagtaaaatag

SEQ ID NO: 2027714 - DNA, 25 bp, Homo sapien
gcaacgctcgcctctatgtagtacc

SEQ ID NO: 2027715 - DNA, 25 bp, Homo sapien
tagtacccgaccagctctttggcat

SEQ ID NO: 2027716 - DNA, 25 bp, Homo sapien
gcatctttggactcctcccacgaaa

SEQ ID NO: 2027717 - DNA, 25 bp, Homo sapien
tcccacgaaactaccactgaggtgt

SEQ ID NO: 2027718 - DNA, 25 bp, Homo sapien
tttaaaacagttagggagcatggat

SEQ ID NO: 2027719 - DNA, 25 bp, Homo sapien
catatactagatccttgctttgaaa

SEQ ID NO: 2027720 - DNA, 25 bp, Homo sapien
gttaagtacagccatcgagtaaatt

SEQ ID NO: 2027721 - DNA, 25 bp, Homo sapien
atattgttgaaactcccaaagaagt

SEQ ID NO: 2027722 - DNA, 25 bp, Homo sapien
acagtcacctccgttgcctctgagg

SEQ ID NO: 2027723 - DNA, 25 bp, Homo sapien
gtcacctccgttgcctctgagggct

SEQ ID NO: 2027724 - DNA, 25 bp, Homo sapien
caagtttgtcccctaccacagtcac

SEQ ID NO: 2027725 - DNA, 25 bp, Homo sapien
acctccgttgcctctgagggctcac

SEQ ID NO: 2027726 - DNA, 25 bp, Homo sapien
taggatttcccctcggccaagtcaa

SEQ ID NO: 2027727 - DNA, 25 bp, Homo sapien
tcacagggagctccgtgttcactcg

SEQ ID NO: 2027728 - DNA, 25 bp, Homo sapien
tgcagaattagaacagcggacacgg

SEQ ID NO: 2027729 - DNA, 25 bp, Homo sapien
tgttcactcgctgccagttttctgt

SEQ ID NO: 2027730 - DNA, 25 bp, Homo sapien
aagtcttattttgaggatcgtttgg

SEQ ID NO: 2027731 - DNA, 25 bp, Homo sapien
ttattttgaggatcgtttggggtca

SEQ ID NO: 2027732 - DNA, 25 bp, Homo sapien
tttgaggatcgtttggggtcaggta

SEQ ID NO: 2027733 - DNA, 25 bp, Homo sapien
agtcttattttgaggatcgtttggg

SEQ ID NO: 2027734 - DNA, 25 bp, Homo sapien
ggcttagaatgctactcaagttata

SEQ ID NO: 2027735 - DNA, 25 bp, Homo sapien
cattgttactgatttgctaggaata

SEQ ID NO: 2027736 - DNA, 25 bp, Homo sapien
aagaatgcagctcaaagatatttgc

SEQ ID NO: 2027737 - DNA, 25 bp, Homo sapien
catattgcatgtagaggagataagg

SEQ ID NO: 2027738 - DNA, 25 bp, Homo sapien
caatctagtgagatcaggacatgct

SEQ ID NO: 2027739 - DNA, 25 bp, Homo sapien
gatgttcatgtcctactacagaagg

SEQ ID NO: 2027740 - DNA, 25 bp, Homo sapien
tacaggcaatctaccatttcaggaa

SEQ ID NO: 2027741 - DNA, 25 bp, Homo sapien
tgtactcagagtggagctagccaag

SEQ ID NO: 2027742 - DNA, 25 bp, Homo sapien
caaagtacataatgccctcatgacc

SEQ ID NO: 2027743 - DNA, 25 bp, Homo sapien
tgagcaccacatagctccgggtggc

SEQ ID NO: 2027744 - DNA, 25 bp, Homo sapien
cttttccacaaagtacataatgccc

SEQ ID NO: 2027745 - DNA, 25 bp, Homo sapien
agggggcttccagctgagcaccaca

SEQ ID NO: 2027746 - DNA, 25 bp, Homo sapien
cctcttcagtaacaatgatctgtcc

SEQ ID NO: 2027747 - DNA, 25 bp, Homo sapien
gtaacaatgatctgtccagtccagg

SEQ ID NO: 2027748 - DNA, 25 bp, Homo sapien
aaggttcctcttcagtaacaatgat

SEQ ID NO: 2027749 - DNA, 25 bp, Homo sapien
tcagtaacaatgatctgtccagtcc

SEQ ID NO: 2027750 - DNA, 25 bp, Homo sapien
ggaaaacgagcaaacttcacaggtg

SEQ ID NO: 2027751 - DNA, 25 bp, Homo sapien
caggtgtgtcattgcactgcgacca

SEQ ID NO: 2027752 - DNA, 25 bp, Homo sapien
cggaaactcgagatgggaaacctat

SEQ ID NO: 2027753 - DNA, 25 bp, Homo sapien
gaacgaccttcgatcaatccagtga

SEQ ID NO: 2027754 - DNA, 25 bp, Homo sapien
taaaatatccaagtcaggcgtggct

SEQ ID NO: 2027755 - DNA, 25 bp, Homo sapien
gagctgcagaatcacccagttgttt

SEQ ID NO: 2027756 - DNA, 25 bp, Homo sapien
catgcaggcactccgtttcactcaa

SEQ ID NO: 2027757 - DNA, 25 bp, Homo sapien
ggcgtggctcgctacctggtgaact

SEQ ID NO: 2027758 - DNA, 25 bp, Homo sapien
tccatcgacagctggctgtttccag

SEQ ID NO: 2027759 - DNA, 25 bp, Homo sapien
gagaataggactccctccatcgaca

SEQ ID NO: 2027760 - DNA, 25 bp, Homo sapien
tatcaataaaatatccgagaatagg

SEQ ID NO: 2027761 - DNA, 25 bp, Homo sapien
aaaatatccgagaataggactccct

SEQ ID NO: 2027762 - DNA, 25 bp, Homo sapien
attataggtatactccactatgccc

SEQ ID NO: 2027763 - DNA, 25 bp, Homo sapien
catagttcccggtggctttgacctc

SEQ ID NO: 2027764 - DNA, 25 bp, Homo sapien
tcctctctgcatgagagagagcaag

SEQ ID NO: 2027765 - DNA, 25 bp, Homo sapien
ggcaatcatagttcccggtggcttt

SEQ ID NO: 2027766 - DNA, 25 bp, Homo sapien
agtgtttgcacccattttgatggag

SEQ ID NO: 2027767 - DNA, 25 bp, Homo sapien
caaagacataagcactatattgttc

SEQ ID NO: 2027768 - DNA, 25 bp, Homo sapien
cacggattgtatagaggccttcatc

SEQ ID NO: 2027769 - DNA, 25 bp, Homo sapien
taatattctcccatccgtacacgga

SEQ ID NO: 2027770 - DNA, 25 bp, Homo sapien
gccagagtcagaggaactgacaatg

SEQ ID NO: 2027771 - DNA, 25 bp, Homo sapien
cagggacatcagtagaacttggata

SEQ ID NO: 2027772 - DNA, 25 bp, Homo sapien
ccaaactatcatggctctaggccct

SEQ ID NO: 2027773 - DNA, 25 bp, Homo sapien
tctaccagcctgttataatatgatg

SEQ ID NO: 2027774 - DNA, 25 bp, Homo sapien
caacacgacagcctagactcattgt

SEQ ID NO: 2027775 - DNA, 25 bp, Homo sapien
ttgtcatcaaagtggatctcaaacc

SEQ ID NO: 2027776 - DNA, 25 bp, Homo sapien
aaaccgggatgcataaccatatggg

SEQ ID NO: 2027777 - DNA, 25 bp, Homo sapien
gacagcctagactcattgtctctcc

SEQ ID NO: 2027778 - DNA, 25 bp, Homo sapien
gaagcgagtctcatcaaactctccc

SEQ ID NO: 2027779 - DNA, 25 bp, Homo sapien
gaagccccagcgtggaagcgagtct

SEQ ID NO: 2027780 - DNA, 25 bp, Homo sapien
cagcgtggaagcgagtctcatcaaa

SEQ ID NO: 2027781 - DNA, 25 bp, Homo sapien
ggtggaagccccagcgtggaagcga

SEQ ID NO: 2027782 - DNA, 25 bp, Homo sapien
tttaccacaactgaagcatatgccg

SEQ ID NO: 2027783 - DNA, 25 bp, Homo sapien
tttaacattcatcgccgaggcccgg

SEQ ID NO: 2027784 - DNA, 25 bp, Homo sapien
gccgaggcccggtactgagctgtat

SEQ ID NO: 2027785 - DNA, 25 bp, Homo sapien
tgccgaaagctctcctttaacattc

SEQ ID NO: 2027786 - DNA, 25 bp, Homo sapien
ccattaatctccagagtgtgcatcc

SEQ ID NO: 2027787 - DNA, 25 bp, Homo sapien
catggacatttattggcacctggtt

SEQ ID NO: 2027788 - DNA, 25 bp, Homo sapien
gggtttgcatggacatttattggca

SEQ ID NO: 2027789 - DNA, 25 bp, Homo sapien
gtgcatcccatatcgactctcaata

SEQ ID NO: 2027790 - DNA, 25 bp, Homo sapien
gttgggaataggacggtactgcatc

SEQ ID NO: 2027791 - DNA, 25 bp, Homo sapien
cctgactttaatgagggatgtgtgt

SEQ ID NO: 2027792 - DNA, 25 bp, Homo sapien
actaacttttctaccgaggccagtg

SEQ ID NO: 2027793 - DNA, 25 bp, Homo sapien
gatgtgtgtgcccttattcagtgct

SEQ ID NO: 2027794 - DNA, 25 bp, Homo sapien
gcaaatacctgcaccagagagtaaa

SEQ ID NO: 2027795 - DNA, 25 bp, Homo sapien
gaaagttctcaggttagggatcaaa

SEQ ID NO: 2027796 - DNA, 25 bp, Homo sapien
gaaaggagaaggacgcagacactct

SEQ ID NO: 2027797 - DNA, 25 bp, Homo sapien
tgcaacctaaggtgcatttaccacc

SEQ ID NO: 2027798 - DNA, 25 bp, Homo sapien
tgggagcgaggtttaatgataaact

SEQ ID NO: 2027799 - DNA, 25 bp, Homo sapien
tggcatgatatgtctcggtttcttc

SEQ ID NO: 2027800 - DNA, 25 bp, Homo sapien
tggccagcctgctatggagcaatgc

SEQ ID NO: 2027801 - DNA, 25 bp, Homo sapien
ttctcccaaaccgtgtgggagcgag

SEQ ID NO: 2027802 - DNA, 25 bp, Homo sapien
tcctcactagcaagaagattcctct

SEQ ID NO: 2027803 - DNA, 25 bp, Homo sapien
gattcctctgggctatataagcagc

SEQ ID NO: 2027804 - DNA, 25 bp, Homo sapien
gcttagatgccgtggtctgcttgga

SEQ ID NO: 2027805 - DNA, 25 bp, Homo sapien
tcctgttgaagagcggatgtggcct

SEQ ID NO: 2027806 - DNA, 25 bp, Homo sapien
gatggcagtgataagattgagtaat

SEQ ID NO: 2027807 - DNA, 25 bp, Homo sapien
acacaacaatggcaaaatgtagatg

SEQ ID NO: 2027808 - DNA, 25 bp, Homo sapien
ttcaaagtaccacatctcagacact

SEQ ID NO: 2027809 - DNA, 25 bp, Homo sapien
aagtaccacatctcagacactgtat

SEQ ID NO: 2027810 - DNA, 25 bp, Homo sapien
aaatccgacatagaaaaagcaggtg

SEQ ID NO: 2027811 - DNA, 25 bp, Homo sapien
tccgacatagaaaaagcaggtgaat

SEQ ID NO: 2027812 - DNA, 25 bp, Homo sapien
aagaaaatccgacatagaaaaagca

SEQ ID NO: 2027813 - DNA, 25 bp, Homo sapien
cgacatagaaaaagcaggtgaatca

SEQ ID NO: 2027814 - DNA, 25 bp, Homo sapien
agattatggttcctttccagaaaag

SEQ ID NO: 2027815 - DNA, 25 bp, Homo sapien
agatctagtttgtgtgcctgtgacc

SEQ ID NO: 2027816 - DNA, 25 bp, Homo sapien
caaggtcgtctcactggttgtctta

SEQ ID NO: 2027817 - DNA, 25 bp, Homo sapien
taggagcttgatctgggttctgtca

SEQ ID NO: 2027818 - DNA, 25 bp, Homo sapien
tctcctcagattgttaatactgcca

SEQ ID NO: 2027819 - DNA, 25 bp, Homo sapien
tgatcacttcttgagattggcccgg

SEQ ID NO: 2027820 - DNA, 25 bp, Homo sapien
gaagcttcattttgtgccctgccag

SEQ ID NO: 2027821 - DNA, 25 bp, Homo sapien
caggtggagtcatgtcacgtaggct

SEQ ID NO: 2027822 - DNA, 25 bp, Homo sapien
caacttggatgaataatcatctaac

SEQ ID NO: 2027823 - DNA, 25 bp, Homo sapien
tggctctctttggtttggggctcaa

SEQ ID NO: 2027824 - DNA, 25 bp, Homo sapien
ttctccagacagtaggctgtgcttg

SEQ ID NO: 2027825 - DNA, 25 bp, Homo sapien
aatcatctaacagcagactggaatc

SEQ ID NO: 2027826 - DNA, 25 bp, Homo sapien
tcatcaggaacatagaatacttgca

SEQ ID NO: 2027827 - DNA, 25 bp, Homo sapien
ttttcaacattctcaaggagggttc

SEQ ID NO: 2027828 - DNA, 25 bp, Homo sapien
caccttgacgtgactgatctttctt

SEQ ID NO: 2027829 - DNA, 25 bp, Homo sapien
ctttacccaaggacgacagaatact

SEQ ID NO: 2027830 - DNA, 25 bp, Homo sapien
gaaaagatcagagaaactccctaag

SEQ ID NO: 2027831 - DNA, 25 bp, Homo sapien
cagttgtactgtaaacccatatgtg

SEQ ID NO: 2027832 - DNA, 25 bp, Homo sapien
cccatatgtgaaaggacgaatttag

SEQ ID NO: 2027833 - DNA, 25 bp, Homo sapien
gaaagacactgcagtaaagagaagg

SEQ ID NO: 2027834 - DNA, 25 bp, Homo sapien
catctctcatctttaggaccctgtg

SEQ ID NO: 2027835 - DNA, 25 bp, Homo sapien
ggatctacttttgattgagaacagc

SEQ ID NO: 2027836 - DNA, 25 bp, Homo sapien
tttgatacaggcaatcccggtggcc

SEQ ID NO: 2027837 - DNA, 25 bp, Homo sapien
gaccctgtgcagagtcgctgggaat

SEQ ID NO: 2027838 - DNA, 25 bp, Homo sapien
tatttataaagcagcccagacacca

SEQ ID NO: 2027839 - DNA, 25 bp, Homo sapien
tctaaaagatggctgtgggaaacct

SEQ ID NO: 2027840 - DNA, 25 bp, Homo sapien
tcactgggattgactagacattgca

SEQ ID NO: 2027841 - DNA, 25 bp, Homo sapien
gaggtgtccagggtttgtcaaagca

SEQ ID NO: 2027842 - DNA, 25 bp, Homo sapien
gcccagggaggtagcagctttgccc

SEQ ID NO: 2027843 - DNA, 25 bp, Homo sapien
ccagggaggtagcagctttgccctt

SEQ ID NO: 2027844 - DNA, 25 bp, Homo sapien
ctggccagtgccgacactatggagg

SEQ ID NO: 2027845 - DNA, 25 bp, Homo sapien
agtgccgacactatggaggccaagg

SEQ ID NO: 2027846 - DNA, 25 bp, Homo sapien
caggcttggcattcatggacactcc

SEQ ID NO: 2027847 - DNA, 25 bp, Homo sapien
ggcattcatggacactccttgggtt

SEQ ID NO: 2027848 - DNA, 25 bp, Homo sapien
cttggttattttggtattcaatagc

SEQ ID NO: 2027849 - DNA, 25 bp, Homo sapien
tgctgttccctgctgtaaatcttgg

SEQ ID NO: 2027850 - DNA, 25 bp, Homo sapien
gagccataatcgtaggctgaggctg

SEQ ID NO: 2027851 - DNA, 25 bp, Homo sapien
aggagccataatcgtaggctgaggc

SEQ ID NO: 2027852 - DNA, 25 bp, Homo sapien
gccataatcgtaggctgaggctgcc

SEQ ID NO: 2027853 - DNA, 25 bp, Homo sapien
tgggaggagccataatcgtaggctg

SEQ ID NO: 2027854 - DNA, 25 bp, Homo sapien
tcagagctcagggcgtgctgcgagg

SEQ ID NO: 2027855 - DNA, 25 bp, Homo sapien
agctcagggcgtgctgcgaggcctg

SEQ ID NO: 2027856 - DNA, 25 bp, Homo sapien
cttcagagctcagggcgtgctgcga

SEQ ID NO: 2027857 - DNA, 25 bp, Homo sapien
agagctcagggcgtgctgcgaggcc

SEQ ID NO: 2027858 - DNA, 25 bp, Homo sapien
tcttctcccgctggtagtgactcac

SEQ ID NO: 2027859 - DNA, 25 bp, Homo sapien
gagccctgggtgtagacggcggagc

SEQ ID NO: 2027860 - DNA, 25 bp, Homo sapien
tgtagacggcggagcgtttcttctc

SEQ ID NO: 2027861 - DNA, 25 bp, Homo sapien
tgcgcacgtccttgttgcggtagct

SEQ ID NO: 2027862 - DNA, 25 bp, Homo sapien
tgtgccccttgaaggaaccgggcca

SEQ ID NO: 2027863 - DNA, 25 bp, Homo sapien
ctgctaagctcataagctatcaagt

SEQ ID NO: 2027864 - DNA, 25 bp, Homo sapien
actgctgctaagctcataagctatc

SEQ ID NO: 2027865 - DNA, 25 bp, Homo sapien
gctgctaagctcataagctatcaag

SEQ ID NO: 2027866 - DNA, 25 bp, Homo sapien
tgctgctaagctcataagctatcaa

SEQ ID NO: 2027867 - DNA, 25 bp, Homo sapien
aatgttccgatgaggccgaggagct

SEQ ID NO: 2027868 - DNA, 25 bp, Homo sapien
tttccaaaggagtaatggtggtgga

SEQ ID NO: 2027869 - DNA, 25 bp, Homo sapien
cagtttccaaaggagtaatggtggt

SEQ ID NO: 2027870 - DNA, 25 bp, Homo sapien
gtggtggaaatgttccgatgaggcc

SEQ ID NO: 2027871 - DNA, 25 bp, Homo sapien
ctaggttgaatccaagacaatgtta

SEQ ID NO: 2027872 - DNA, 25 bp, Homo sapien
gcagataaatatagcagcagatggg

SEQ ID NO: 2027873 - DNA, 25 bp, Homo sapien
gcaggtagcagccttagtaatataa

SEQ ID NO: 2027874 - DNA, 25 bp, Homo sapien
acacaaccagccttttatggccaag

SEQ ID NO: 2027875 - DNA, 25 bp, Homo sapien
acatttaatatgtcccaaggccatg

SEQ ID NO: 2027876 - DNA, 25 bp, Homo sapien
ctctggttaatgaagaattgtctgc

SEQ ID NO: 2027877 - DNA, 25 bp, Homo sapien
tggttatgctgatccacaccctcct

SEQ ID NO: 2027878 - DNA, 25 bp, Homo sapien
gaattgtctgcatgctgtattatgg

SEQ ID NO: 2027879 - DNA, 25 bp, Homo sapien
acctggaaatttccagtcattcacc

SEQ ID NO: 2027880 - DNA, 25 bp, Homo sapien
gagcacctggaaatttccagtcatt

SEQ ID NO: 2027881 - DNA, 25 bp, Homo sapien
tctaagtgttgagcacctggaaatt

SEQ ID NO: 2027882 - DNA, 25 bp, Homo sapien
agtgttgagcacctggaaatttcca

SEQ ID NO: 2027883 - DNA, 25 bp, Homo sapien
agcctctcgggctcttgtttattca

SEQ ID NO: 2027884 - DNA, 25 bp, Homo sapien
tttagcctctcgggctcttgtttat

SEQ ID NO: 2027885 - DNA, 25 bp, Homo sapien
tagcctctcgggctcttgtttattc

SEQ ID NO: 2027886 - DNA, 25 bp, Homo sapien
ttttagcctctcgggctcttgttta

SEQ ID NO: 2027887 - DNA, 25 bp, Homo sapien
tgagggaccgcaaactaaagttagc

SEQ ID NO: 2027888 - DNA, 25 bp, Homo sapien
atttggcccatgaaacccttgagag

SEQ ID NO: 2027889 - DNA, 25 bp, Homo sapien
gcagtaatccagtcatgtgtatccc

SEQ ID NO: 2027890 - DNA, 25 bp, Homo sapien
gtatttggaatcagatgagccacag

SEQ ID NO: 2027891 - DNA, 25 bp, Homo sapien
cttgcacggttgctacaggaaagca

SEQ ID NO: 2027892 - DNA, 25 bp, Homo sapien
gcctggcccgacatacttttgatat

SEQ ID NO: 2027893 - DNA, 25 bp, Homo sapien
ggcggcgattctcacagcattttga

SEQ ID NO: 2027894 - DNA, 25 bp, Homo sapien
ctagggacaccagcatccagagtcg

SEQ ID NO: 2027895 - DNA, 25 bp, Homo sapien
tcactgaggacacagtccctgcttc

SEQ ID NO: 2027896 - DNA, 25 bp, Homo sapien
cactgaggacacagtccctgcttcc

SEQ ID NO: 2027897 - DNA, 25 bp, Homo sapien
aaaaagaggtggcaaaggtgagtca

SEQ ID NO: 2027898 - DNA, 25 bp, Homo sapien
cctgagcaacttaaaggatggagaa

SEQ ID NO: 2027899 - DNA, 25 bp, Homo sapien
gagtcaaagttttcggcctgagcaa

SEQ ID NO: 2027900 - DNA, 25 bp, Homo sapien
cttgcactgggatagtggcagtaga

SEQ ID NO: 2027901 - DNA, 25 bp, Homo sapien
aaggagctcctcctactgttttcct

SEQ ID NO: 2027902 - DNA, 25 bp, Homo sapien
agtatggaagtaataagtatcccca

SEQ ID NO: 2027903 - DNA, 25 bp, Homo sapien
catccctgactttaatgataattct

SEQ ID NO: 2027904 - DNA, 25 bp, Homo sapien
cagatttatgtaaacgcttattcat

SEQ ID NO: 2027905 - DNA, 25 bp, Homo sapien
caagtttacgcttcgtttgtgctcc

SEQ ID NO: 2027906 - DNA, 25 bp, Homo sapien
caataggccctaactaactgtactg

SEQ ID NO: 2027907 - DNA, 25 bp, Homo sapien
cgagatgctatttttccacattggt

SEQ ID NO: 2027908 - DNA, 25 bp, Homo sapien
gaattagctctttaacatcccctgg

SEQ ID NO: 2027909 - DNA, 25 bp, Homo sapien
caagctgaggggaagactgaactgt

SEQ ID NO: 2027910 - DNA, 25 bp, Homo sapien
actgaactgtccgtttctttctgct

SEQ ID NO: 2027911 - DNA, 25 bp, Homo sapien
caaaagaatgctgccttcaagctga

SEQ ID NO: 2027912 - DNA, 25 bp, Homo sapien
agagaagcaaaagaatgctgccttc

SEQ ID NO: 2027913 - DNA, 25 bp, Homo sapien
ggaacaaacgcatccgcgcagccgt

SEQ ID NO: 2027914 - DNA, 25 bp, Homo sapien
tggaggtgtccatgcattgcaagtg

SEQ ID NO: 2027915 - DNA, 25 bp, Homo sapien
aagtgctcgcaagctccaggaacaa

SEQ ID NO: 2027916 - DNA, 25 bp, Homo sapien
tggagaggacgctggcggagctggt

SEQ ID NO: 2027917 - DNA, 25 bp, Homo sapien
gagatccctcaagaaagaagctacg

SEQ ID NO: 2027918 - DNA, 25 bp, Homo sapien
gcaacactgtccgttccagaaggat

SEQ ID NO: 2027919 - DNA, 25 bp, Homo sapien
tccgcggcgtttacagcaacactgt

SEQ ID NO: 2027920 - DNA, 25 bp, Homo sapien
tacttagaagatactattccgcggc

SEQ ID NO: 2027921 - DNA, 25 bp, Homo sapien
acggctcgagtgttagaggatccca

SEQ ID NO: 2027922 - DNA, 25 bp, Homo sapien
tcaagtggcggcctgctttgaaggc

SEQ ID NO: 2027923 - DNA, 25 bp, Homo sapien
acttcagaagggttctggccacggg

SEQ ID NO: 2027924 - DNA, 25 bp, Homo sapien
ctttgaaggcgaagaccacagggca

SEQ ID NO: 2027925 - DNA, 25 bp, Homo sapien
tcctaatcgtagcaagaggtgcggg

SEQ ID NO: 2027926 - DNA, 25 bp, Homo sapien
tgttttcaccaagtcgcaagtccta

SEQ ID NO: 2027927 - DNA, 25 bp, Homo sapien
tgttctaggcaagcagacctcagga

SEQ ID NO: 2027928 - DNA, 25 bp, Homo sapien
tccttcctgcatagtgggatccaag

SEQ ID NO: 2027929 - DNA, 25 bp, Homo sapien
aaagccacaggacggacgcaaccat

SEQ ID NO: 2027930 - DNA, 25 bp, Homo sapien
ttcgccgtgccctggaatgtgcggc

SEQ ID NO: 2027931 - DNA, 25 bp, Homo sapien
gcccttcgccgtgccctggaatgtg

SEQ ID NO: 2027932 - DNA, 25 bp, Homo sapien
ggaatgtgcggccaggcaaagccac

SEQ ID NO: 2027933 - DNA, 25 bp, Homo sapien
tccttctcatgcacttggtcaatac

SEQ ID NO: 2027934 - DNA, 25 bp, Homo sapien
ttctaggtcgcccactttacacttc

SEQ ID NO: 2027935 - DNA, 25 bp, Homo sapien
ttacacttccttctcatgcacttgg

SEQ ID NO: 2027936 - DNA, 25 bp, Homo sapien
tattgctctatattctaggtcgccc

SEQ ID NO: 2027937 - DNA, 25 bp, Homo sapien
gtttttagcggctctctgggtagca

SEQ ID NO: 2027938 - DNA, 25 bp, Homo sapien
cgtgaagtcagacccactctgcggg

SEQ ID NO: 2027939 - DNA, 25 bp, Homo sapien
gcttccttccggcttgctaagcaga

SEQ ID NO: 2027940 - DNA, 25 bp, Homo sapien
tgctcggattctcgtagctgtgccg

SEQ ID NO: 2027941 - DNA, 25 bp, Homo sapien
cccgaacttcgctcctgtgcccaaa

SEQ ID NO: 2027942 - DNA, 25 bp, Homo sapien
gagtggcccagacccgaacttcgct

SEQ ID NO: 2027943 - DNA, 25 bp, Homo sapien
tcctgtgcccaaacttggaactctg

SEQ ID NO: 2027944 - DNA, 25 bp, Homo sapien
cttggagtggcccagacccgaactt

SEQ ID NO: 2027945 - DNA, 25 bp, Homo sapien
cccgattcaagagggtttgcgcaaa

SEQ ID NO: 2027946 - DNA, 25 bp, Homo sapien
gaagttcttcagctcagtatccgct

SEQ ID NO: 2027947 - DNA, 25 bp, Homo sapien
tcaattcgccatggaagtgtcttct

SEQ ID NO: 2027948 - DNA, 25 bp, Homo sapien
ttgcgcaaaaacgtagcccgttgtc

SEQ ID NO: 2027949 - DNA, 25 bp, Homo sapien
gtgcaacatccaatgtgtttgctat

SEQ ID NO: 2027950 - DNA, 25 bp, Homo sapien
gcaacatccaatgtgtttgctatgt

SEQ ID NO: 2027951 - DNA, 25 bp, Homo sapien
cgtgcaacatccaatgtgtttgcta

SEQ ID NO: 2027952 - DNA, 25 bp, Homo sapien
tgcaacatccaatgtgtttgctatg

SEQ ID NO: 2027953 - DNA, 25 bp, Homo sapien
tccaggccccatcaatttcaccatg

SEQ ID NO: 2027954 - DNA, 25 bp, Homo sapien
gggaagaatccaactgatgagtatc

SEQ ID NO: 2027955 - DNA, 25 bp, Homo sapien
gatgagtatctagatgccatgatga

SEQ ID NO: 2027956 - DNA, 25 bp, Homo sapien
gaatccaactgatgagtatctagat

SEQ ID NO: 2027957 - DNA, 25 bp, Homo sapien
tagagcaaatgatagagcggagcag

SEQ ID NO: 2027958 - DNA, 25 bp, Homo sapien
gaggctgttttaagtaggtggacac

SEQ ID NO: 2027959 - DNA, 25 bp, Homo sapien
gctgctaagcagctaggcatttttc

SEQ ID NO: 2027960 - DNA, 25 bp, Homo sapien
catacagaacatgcttagtcaagta

SEQ ID NO: 2027961 - DNA, 25 bp, Homo sapien
cacgcatcctgaaacatggagccaa

SEQ ID NO: 2027962 - DNA, 25 bp, Homo sapien
caattacatcgagttcacacgcatc

SEQ ID NO: 2027963 - DNA, 25 bp, Homo sapien
tccagccaaacgttccttgttgcca

SEQ ID NO: 2027964 - DNA, 25 bp, Homo sapien
caataactgtggtctatacagagtc

SEQ ID NO: 2027965 - DNA, 25 bp, Homo sapien
tttgttggtttcagtcgtatctccc

SEQ ID NO: 2027966 - DNA, 25 bp, Homo sapien
atctcccaaagaaaggtagatgagg

SEQ ID NO: 2027967 - DNA, 25 bp, Homo sapien
tctcccaaagaaaggtagatgaggg

SEQ ID NO: 2027968 - DNA, 25 bp, Homo sapien
ctcccaaagaaaggtagatgaggga

SEQ ID NO: 2027969 - DNA, 25 bp, Homo sapien
gagcaggtccaatatgccagacttg

SEQ ID NO: 2027970 - DNA, 25 bp, Homo sapien
gccagacttgtgtgtgtcgaattag

SEQ ID NO: 2027971 - DNA, 25 bp, Homo sapien
gaattaggtcctcttcacgggtaca

SEQ ID NO: 2027972 - DNA, 25 bp, Homo sapien
tcactttcgatttcctgagcaggtc

SEQ ID NO: 2027973 - DNA, 25 bp, Homo sapien
cagcatccggcacatgttaaggcag

SEQ ID NO: 2027974 - DNA, 25 bp, Homo sapien
tgaaccgcgtttagagctgtgctgc

SEQ ID NO: 2027975 - DNA, 25 bp, Homo sapien
ctgatacccggttttgaggctcaaa

SEQ ID NO: 2027976 - DNA, 25 bp, Homo sapien
tacagagtgctgaacacaaggtccc

SEQ ID NO: 2027977 - DNA, 25 bp, Homo sapien
ttcgaataaaactttcttgtggcca

SEQ ID NO: 2027978 - DNA, 25 bp, Homo sapien
cacaaacacgatctagaacaaaacc

SEQ ID NO: 2027979 - DNA, 25 bp, Homo sapien
tcgaataaaactttcttgtggccaa

SEQ ID NO: 2027980 - DNA, 25 bp, Homo sapien
aacacagccacaaacacgatctaga

SEQ ID NO: 2027981 - DNA, 25 bp, Homo sapien
taactcgggctgtaatgcggtttga

SEQ ID NO: 2027982 - DNA, 25 bp, Homo sapien
tcaaacagccgtaggctgcggccgt

SEQ ID NO: 2027983 - DNA, 25 bp, Homo sapien
tgatacggccgtaaaccttatgagg

SEQ ID NO: 2027984 - DNA, 25 bp, Homo sapien
gcagagaggagtaggttaaagaatt

SEQ ID NO: 2027985 - DNA, 25 bp, Homo sapien
acggagaagaatccgcccaggcgcc

SEQ ID NO: 2027986 - DNA, 25 bp, Homo sapien
tggaacggagaagaatccgcccagg

SEQ ID NO: 2027987 - DNA, 25 bp, Homo sapien
gaacggagaagaatccgcccaggcg

SEQ ID NO: 2027988 - DNA, 25 bp, Homo sapien
ctggaacggagaagaatccgcccag

SEQ ID NO: 2027989 - DNA, 25 bp, Homo sapien
gatcgcggcccactcgggtcaaatt

SEQ ID NO: 2027990 - DNA, 25 bp, Homo sapien
tagaagaactgtacttttacttgct

SEQ ID NO: 2027991 - DNA, 25 bp, Homo sapien
tacatgagacgaaccctaaaacctg

SEQ ID NO: 2027992 - DNA, 25 bp, Homo sapien
actcgggtcaaattccagcggcctg

SEQ ID NO: 2027993 - DNA, 25 bp, Homo sapien
caccctcatagaacctgttgcatgc

SEQ ID NO: 2027994 - DNA, 25 bp, Homo sapien
gccacttagcacttgtataatcaga

SEQ ID NO: 2027995 - DNA, 25 bp, Homo sapien
tattccagacctttctgccacttag

SEQ ID NO: 2027996 - DNA, 25 bp, Homo sapien
gttgcatgcaacttagtttcacagc

SEQ ID NO: 2027997 - DNA, 25 bp, Homo sapien
gcccttgagttctgcgctgctcttc

SEQ ID NO: 2027998 - DNA, 25 bp, Homo sapien
ccgtttatcaggcagtgggatctgt

SEQ ID NO: 2027999 - DNA, 25 bp, Homo sapien
ggcttcttcttagccactgtggtct

SEQ ID NO: 2028000 - DNA, 25 bp, Homo sapien
ccgtgggtatgaaaacaccaaggat

SEQ ID NO: 2028001 - DNA, 25 bp, Homo sapien
tagttcccagtctaaggtagctagg

SEQ ID NO: 2028002 - DNA, 25 bp, Homo sapien
tcagtggtgctgagaaactcttccc

SEQ ID NO: 2028003 - DNA, 25 bp, Homo sapien
tagaacatttgccattcataacggc

SEQ ID NO: 2028004 - DNA, 25 bp, Homo sapien
cctcccttgtttgtgagtctggcta

SEQ ID NO: 2028005 - DNA, 25 bp, Homo sapien
aatccctctttatctgatgggcttg

SEQ ID NO: 2028006 - DNA, 25 bp, Homo sapien
gcggaccctgagttgcctggcagat

SEQ ID NO: 2028007 - DNA, 25 bp, Homo sapien
acactggagagacctgcaaatccgg

SEQ ID NO: 2028008 - DNA, 25 bp, Homo sapien
gctggccgtgcaaatccgggctcat

SEQ ID NO: 2028009 - DNA, 25 bp, Homo sapien
gtcaggctggcagcattggccaggc

SEQ ID NO: 2028010 - DNA, 25 bp, Homo sapien
tgtcaggctggcagcattggccagg

SEQ ID NO: 2028011 - DNA, 25 bp, Homo sapien
tgagggtgggatgggccggccgtga

SEQ ID NO: 2028012 - DNA, 25 bp, Homo sapien
cagattgagggtgggatgggccggc

SEQ ID NO: 2028013 - DNA, 25 bp, Homo sapien
cactgataacagattgagggtggga

SEQ ID NO: 2028014 - DNA, 25 bp, Homo sapien
ctgtgaaagagacactgataacaga

SEQ ID NO: 2028015 - DNA, 25 bp, Homo sapien
tctttcaactacttaaagatgtaca

SEQ ID NO: 2028016 - DNA, 25 bp, Homo sapien
cctgcctccgactacccttcctagc

SEQ ID NO: 2028017 - DNA, 25 bp, Homo sapien
atactctttcaactacttaaagatg

SEQ ID NO: 2028018 - DNA, 25 bp, Homo sapien
actatactctttcaactacttaaag

SEQ ID NO: 2028019 - DNA, 25 bp, Homo sapien
taccggctgaggcatgaatgcagcc

SEQ ID NO: 2028020 - DNA, 25 bp, Homo sapien
caggcacttggtagtctggatgtgt

SEQ ID NO: 2028021 - DNA, 25 bp, Homo sapien
ggtttccgtgcactctcatacttgg

SEQ ID NO: 2028022 - DNA, 25 bp, Homo sapien
ttcatttaccggctgaggcatgaat

SEQ ID NO: 2028023 - DNA, 25 bp, Homo sapien
cagccacaggttgcttcgtactcac

SEQ ID NO: 2028024 - DNA, 25 bp, Homo sapien
ccagccacaggttgcttcgtactca

SEQ ID NO: 2028025 - DNA, 25 bp, Homo sapien
tccagccacaggttgcttcgtactc

SEQ ID NO: 2028026 - DNA, 25 bp, Homo sapien
cagacctgagctcatcgcttcctct

SEQ ID NO: 2028027 - DNA, 25 bp, Homo sapien
ctccctcagacctgagctcatcgct

SEQ ID NO: 2028028 - DNA, 25 bp, Homo sapien
tcctctggccctcgcccaaggtcag

SEQ ID NO: 2028029 - DNA, 25 bp, Homo sapien
cctcagacctgagctcatcgcttcc

SEQ ID NO: 2028030 - DNA, 25 bp, Homo sapien
caacttacagtggggttatgtcctg

SEQ ID NO: 2028031 - DNA, 25 bp, Homo sapien
cattgaattcatacacagatgctcc

SEQ ID NO: 2028032 - DNA, 25 bp, Homo sapien
taagtaaaaagtgcattaatacacc

SEQ ID NO: 2028033 - DNA, 25 bp, Homo sapien
tgccttacgtccctttgatttcttg

SEQ ID NO: 2028034 - DNA, 25 bp, Homo sapien
ggaaatgacgttgtatcagaaaact

SEQ ID NO: 2028035 - DNA, 25 bp, Homo sapien
gatgtgagctcagcagtggtcccac

SEQ ID NO: 2028036 - DNA, 25 bp, Homo sapien
gaaaacttcctaggaagtacagtga

SEQ ID NO: 2028037 - DNA, 25 bp, Homo sapien
tacagtgactgatgtgagctcagca

SEQ ID NO: 2028038 - DNA, 25 bp, Homo sapien
ttgcactcaggtccaatttcagcat

SEQ ID NO: 2028039 - DNA, 25 bp, Homo sapien
cactgatgttccataccagacactc

SEQ ID NO: 2028040 - DNA, 25 bp, Homo sapien
ctttgcactcaggtccaatttcagc

SEQ ID NO: 2028041 - DNA, 25 bp, Homo sapien
cccagtacactgatgttccatacca

SEQ ID NO: 2028042 - DNA, 25 bp, Homo sapien
taatagtgaaggcttgaaaatgaac

SEQ ID NO: 2028043 - DNA, 25 bp, Homo sapien
gaacacataggacttggcacattac

SEQ ID NO: 2028044 - DNA, 25 bp, Homo sapien
atgaacttttggtgttaaaggccag

SEQ ID NO: 2028045 - DNA, 25 bp, Homo sapien
tacctttgtgggaaattgataagag

SEQ ID NO: 2028046 - DNA, 25 bp, Homo sapien
gagcatgcttgacttttcagagtac

SEQ ID NO: 2028047 - DNA, 25 bp, Homo sapien
tttccaagggcacgggagagccatg

SEQ ID NO: 2028048 - DNA, 25 bp, Homo sapien
cttatactcacagagcatgcttgac

SEQ ID NO: 2028049 - DNA, 25 bp, Homo sapien
gctgaataggtgctgcagagccaat

SEQ ID NO: 2028050 - DNA, 25 bp, Homo sapien
tcctggaggctgaaggaaaggatcc

SEQ ID NO: 2028051 - DNA, 25 bp, Homo sapien
tttggacccgcaggtaataggtggc

SEQ ID NO: 2028052 - DNA, 25 bp, Homo sapien
gcccttgcctggattaccattctgg

SEQ ID NO: 2028053 - DNA, 25 bp, Homo sapien
cactgagtgctgtttattaattgat

SEQ ID NO: 2028054 - DNA, 25 bp, Homo sapien
ttaattgtatttctagagagcaggc

SEQ ID NO: 2028055 - DNA, 25 bp, Homo sapien
gacaggggctgcttgtttaattgta

SEQ ID NO: 2028056 - DNA, 25 bp, Homo sapien
agcaggctctgataaccacttgctc

SEQ ID NO: 2028057 - DNA, 25 bp, Homo sapien
caatcccttccccaagactgaaagt

SEQ ID NO: 2028058 - DNA, 25 bp, Homo sapien
tgcaatagtcctagccttccagtaa

SEQ ID NO: 2028059 - DNA, 25 bp, Homo sapien
gcattcttcagtgcgtggcccagtt

SEQ ID NO: 2028060 - DNA, 25 bp, Homo sapien
ccagttttcttgtggggccaggctt

SEQ ID NO: 2028061 - DNA, 25 bp, Homo sapien
ggcttatgttcgacagtccccaggg

SEQ ID NO: 2028062 - DNA, 25 bp, Homo sapien
gtagctatagagataatgtaccagt

SEQ ID NO: 2028063 - DNA, 25 bp, Homo sapien
agacactcctgggaaatacagtgag

SEQ ID NO: 2028064 - DNA, 25 bp, Homo sapien
tacttgactatagtgaccacctcac

SEQ ID NO: 2028065 - DNA, 25 bp, Homo sapien
aagttcattagcaattgtctctgtg

SEQ ID NO: 2028066 - DNA, 25 bp, Homo sapien
tgcaaaaccttatacattggcctct

SEQ ID NO: 2028067 - DNA, 25 bp, Homo sapien
tcttcgaggaccaaaccaactgaaa

SEQ ID NO: 2028068 - DNA, 25 bp, Homo sapien
cgtgagtcccagctcccatgaggga

SEQ ID NO: 2028069 - DNA, 25 bp, Homo sapien
aacctgtattggctgcgtgagtccc

SEQ ID NO: 2028070 - DNA, 25 bp, Homo sapien
gaccattttccttcacgcgtctcag

SEQ ID NO: 2028071 - DNA, 25 bp, Homo sapien
ccattttccttcacgcgtctcagga

SEQ ID NO: 2028072 - DNA, 25 bp, Homo sapien
tgaccattttccttcacgcgtctca

SEQ ID NO: 2028073 - DNA, 25 bp, Homo sapien
tctgaccattttccttcacgcgtct

SEQ ID NO: 2028074 - DNA, 25 bp, Homo sapien
taaaaggcccagagaacatatatcg

SEQ ID NO: 2028075 - DNA, 25 bp, Homo sapien
tcctctttccttttgtgtttgtcat

SEQ ID NO: 2028076 - DNA, 25 bp, Homo sapien
gcccagagaacatatatcgggtgcc

SEQ ID NO: 2028077 - DNA, 25 bp, Homo sapien
aaggcccagagaacatatatcgggt

SEQ ID NO: 2028078 - DNA, 25 bp, Homo sapien
tttggtgacccgtgaccctcaggaa

SEQ ID NO: 2028079 - DNA, 25 bp, Homo sapien
atgtttggtgacccgtgaccctcag

SEQ ID NO: 2028080 - DNA, 25 bp, Homo sapien
catcgaagacttcatgataacactt

SEQ ID NO: 2028081 - DNA, 25 bp, Homo sapien
ttagacaacatcgaagacttcatga

SEQ ID NO: 2028082 - DNA, 25 bp, Homo sapien
atttccagttttgcagatttggtca

SEQ ID NO: 2028083 - DNA, 25 bp, Homo sapien
cagttttgcagatttggtcatccaa

SEQ ID NO: 2028084 - DNA, 25 bp, Homo sapien
gatttggtcatccaaatccaaagcc

SEQ ID NO: 2028085 - DNA, 25 bp, Homo sapien
gcagatttggtcatccaaatccaaa

SEQ ID NO: 2028086 - DNA, 25 bp, Homo sapien
ataaaggattgagctagatttgtgg

SEQ ID NO: 2028087 - DNA, 25 bp, Homo sapien
gattgagctagatttgtggttctga

SEQ ID NO: 2028088 - DNA, 25 bp, Homo sapien
aaccaagccaacagtcaagtaagca

SEQ ID NO: 2028089 - DNA, 25 bp, Homo sapien
ggttctgaaccaggggtgatcctcc

SEQ ID NO: 2028090 - DNA, 25 bp, Homo sapien
gaagttagcaaacaaagcgtctccc

SEQ ID NO: 2028091 - DNA, 25 bp, Homo sapien
ttcaaacgaaatagcgaggcggccc

SEQ ID NO: 2028092 - DNA, 25 bp, Homo sapien
gccgaagccgctttcgaagttagca

SEQ ID NO: 2028093 - DNA, 25 bp, Homo sapien
caccgggcgcagcagctgattcatc

SEQ ID NO: 2028094 - DNA, 25 bp, Homo sapien
agtcgagttagttatcccttggccg

SEQ ID NO: 2028095 - DNA, 25 bp, Homo sapien
taaccacgcgaaaactagaaccaga

SEQ ID NO: 2028096 - DNA, 25 bp, Homo sapien
tgaaacagacgctccgaagtcgagt

SEQ ID NO: 2028097 - DNA, 25 bp, Homo sapien
caaaacaacaggacgtaaccacgcg

SEQ ID NO: 2028098 - DNA, 25 bp, Homo sapien
tggcagccgcgcattctggaagaag

SEQ ID NO: 2028099 - DNA, 25 bp, Homo sapien
aggatcgtgtttctggacccggcca

SEQ ID NO: 2028100 - DNA, 25 bp, Homo sapien
acaagtgtctgtccgcaacgtgtca

SEQ ID NO: 2028101 - DNA, 25 bp, Homo sapien
tccagtccggaactcgcagctttag

SEQ ID NO: 2028102 - DNA, 25 bp, Homo sapien
tttcctgctagacacaacacgaggg

SEQ ID NO: 2028103 - DNA, 25 bp, Homo sapien
cacttggtggacttttccgcccagg

SEQ ID NO: 2028104 - DNA, 25 bp, Homo sapien
ggcacgttgtcaagaaacacgctca

SEQ ID NO: 2028105 - DNA, 25 bp, Homo sapien
tctttgttgaggctgcgtctgaaac

SEQ ID NO: 2028106 - DNA, 25 bp, Homo sapien
aattggccctgggagaaaacgcgcg

SEQ ID NO: 2028107 - DNA, 25 bp, Homo sapien
aagttaatcactcgggaagcggacg

SEQ ID NO: 2028108 - DNA, 25 bp, Homo sapien
tcgaggatggttctagcgcagagcc

SEQ ID NO: 2028109 - DNA, 25 bp, Homo sapien
tgaaactcggatcaactggcagtcg

SEQ ID NO: 2028110 - DNA, 25 bp, Homo sapien
tctctctgccagtcggtcggtgtgg

SEQ ID NO: 2028111 - DNA, 25 bp, Homo sapien
catttcattcctgtacagctgggcc

SEQ ID NO: 2028112 - DNA, 25 bp, Homo sapien
catccccgggatcagttttggctcg

SEQ ID NO: 2028113 - DNA, 25 bp, Homo sapien
cagatatacagcagatagcggccaa

SEQ ID NO: 2028114 - DNA, 25 bp, Homo sapien
tattttttcagactgtgcaatactt

SEQ ID NO: 2028115 - DNA, 25 bp, Homo sapien
tcaaacaagtatgaatctagttggt

SEQ ID NO: 2028116 - DNA, 25 bp, Homo sapien
cattcccatgtggaacaggatgccc

SEQ ID NO: 2028117 - DNA, 25 bp, Homo sapien
tacttagagaacctatagcatcttc

SEQ ID NO: 2028118 - DNA, 25 bp, Homo sapien
ggatgatcatcccaggcatcaggtg

SEQ ID NO: 2028119 - DNA, 25 bp, Homo sapien
tcccaggcatcaggtgtgaagccct

SEQ ID NO: 2028120 - DNA, 25 bp, Homo sapien
gcatcaggtgtgaagccctgcatcc

SEQ ID NO: 2028121 - DNA, 25 bp, Homo sapien
cacatccaggggctatcaaatctct

SEQ ID NO: 2028122 - DNA, 25 bp, Homo sapien
gggtcctggcctcgcctatttccca

SEQ ID NO: 2028123 - DNA, 25 bp, Homo sapien
tcaggttctgactccggtttccact

SEQ ID NO: 2028124 - DNA, 25 bp, Homo sapien
ccccgatccttaatgctgtctttac

SEQ ID NO: 2028125 - DNA, 25 bp, Homo sapien
gtttcttacaacagcagcagtaaag

SEQ ID NO: 2028126 - DNA, 25 bp, Homo sapien
tcttccaggttcagacagagatgct

SEQ ID NO: 2028127 - DNA, 25 bp, Homo sapien
aggtcaccacaaaagatgaccagtg

SEQ ID NO: 2028128 - DNA, 25 bp, Homo sapien
tgaggccaaggtcaccacaaaagat

SEQ ID NO: 2028129 - DNA, 25 bp, Homo sapien
gaggccaaggtcaccacaaaagatg

SEQ ID NO: 2028130 - DNA, 25 bp, Homo sapien
ggcatcctggccttggagatagtcg

SEQ ID NO: 2028131 - DNA, 25 bp, Homo sapien
catcctggccttggagatagtcggg

SEQ ID NO: 2028132 - DNA, 25 bp, Homo sapien
ctggccttggagatagtcggggctg

SEQ ID NO: 2028133 - DNA, 25 bp, Homo sapien
tcctggccttggagatagtcggggc

SEQ ID NO: 2028134 - DNA, 25 bp, Homo sapien
gcctgcaagtcaaactccacttctt

SEQ ID NO: 2028135 - DNA, 25 bp, Homo sapien
tgggggccccaagcgattcttagga

SEQ ID NO: 2028136 - DNA, 25 bp, Homo sapien
taaatctttgcctatctccactcca

SEQ ID NO: 2028137 - DNA, 25 bp, Homo sapien
tgaaggctgtcaaaagcctgcaagt

SEQ ID NO: 2028138 - DNA, 25 bp, Homo sapien
ggtctcgaaagtcacgggctctgat

SEQ ID NO: 2028139 - DNA, 25 bp, Homo sapien
gggctctgatatgggccttgtctga

SEQ ID NO: 2028140 - DNA, 25 bp, Homo sapien
agacgagcaggtctcgaaagtcacg

SEQ ID NO: 2028141 - DNA, 25 bp, Homo sapien
tgatatgggccttgtctgaacagga

SEQ ID NO: 2028142 - DNA, 25 bp, Homo sapien
caaagatcatgatgccctgtaggcc

SEQ ID NO: 2028143 - DNA, 25 bp, Homo sapien
tgtgaccataggctacccaagtggc

SEQ ID NO: 2028144 - DNA, 25 bp, Homo sapien
gaacctcaagatgacagcggcagct

SEQ ID NO: 2028145 - DNA, 25 bp, Homo sapien
ggaggcctagtttctttcacgtgga

SEQ ID NO: 2028146 - DNA, 25 bp, Homo sapien
cctcggggatgtagatctcgatgct

SEQ ID NO: 2028147 - DNA, 25 bp, Homo sapien
gcctcggggatgtagatctcgatgc

SEQ ID NO: 2028148 - DNA, 25 bp, Homo sapien
ccttcgccggcttctttggcactgg

SEQ ID NO: 2028149 - DNA, 25 bp, Homo sapien
ctgcgagctctccagcgagcgctcc

SEQ ID NO: 2028150 - DNA, 25 bp, Homo sapien
tccagcgagcgctcccggatcagcg

SEQ ID NO: 2028151 - DNA, 25 bp, Homo sapien
agctctccagcgagcgctcccggat

SEQ ID NO: 2028152 - DNA, 25 bp, Homo sapien
tggattttttaaacaatgattacta

SEQ ID NO: 2028153 - DNA, 25 bp, Homo sapien
taaacaatgattactattattatta

SEQ ID NO: 2028154 - DNA, 25 bp, Homo sapien
tgtgagcctcgtggaacaccataat

SEQ ID NO: 2028155 - DNA, 25 bp, Homo sapien
tggacattggatacccgtgtgagcc

SEQ ID NO: 2028156 - DNA, 25 bp, Homo sapien
gtcacgtttgacatgccagcctggg

SEQ ID NO: 2028157 - DNA, 25 bp, Homo sapien
aactgatgcatgaggaccccagtga

SEQ ID NO: 2028158 - DNA, 25 bp, Homo sapien
tgaaccatacaaaatctacattgtt

SEQ ID NO: 2028159 - DNA, 25 bp, Homo sapien
aaccatacaaaatctacattgttct

SEQ ID NO: 2028160 - DNA, 25 bp, Homo sapien
ccatacaaaatctacattgttctac

SEQ ID NO: 2028161 - DNA, 25 bp, Homo sapien
gaaccatacaaaatctacattgttc

SEQ ID NO: 2028162 - DNA, 25 bp, Homo sapien
gatccatctgtttccaattattggc

SEQ ID NO: 2028163 - DNA, 25 bp, Homo sapien
atattttctatggacaactgcagca

SEQ ID NO: 2028164 - DNA, 25 bp, Homo sapien
tattggcctttaactgatgaagttc

SEQ ID NO: 2028165 - DNA, 25 bp, Homo sapien
cttcttgtcaagaggatccatctgt

SEQ ID NO: 2028166 - DNA, 25 bp, Homo sapien
cccatttgctaagtgatagtaaaca

SEQ ID NO: 2028167 - DNA, 25 bp, Homo sapien
cagtgtttcaggattgactttcttt

SEQ ID NO: 2028168 - DNA, 25 bp, Homo sapien
tctctacatctatatgtctgtaatg

SEQ ID NO: 2028169 - DNA, 25 bp, Homo sapien
tgtttcaggattgactttctttgcc

SEQ ID NO: 2028170 - DNA, 25 bp, Homo sapien
ctgcccactgcggttcggatttttc

SEQ ID NO: 2028171 - DNA, 25 bp, Homo sapien
tctctgaactggtagaatttctggg

SEQ ID NO: 2028172 - DNA, 25 bp, Homo sapien
ggcactgcccactgcggttcggatt

SEQ ID NO: 2028173 - DNA, 25 bp, Homo sapien
cactgcccactgcggttcggatttt

SEQ ID NO: 2028174 - DNA, 25 bp, Homo sapien
ggaaagagcaaacatacgagaaatt

SEQ ID NO: 2028175 - DNA, 25 bp, Homo sapien
aacatacgagaaatttacacatcat

SEQ ID NO: 2028176 - DNA, 25 bp, Homo sapien
aagagcaaacatacgagaaatttac

SEQ ID NO: 2028177 - DNA, 25 bp, Homo sapien
gcaaacatacgagaaatttacacat

SEQ ID NO: 2028178 - DNA, 25 bp, Homo sapien
gagatttagtctggtaaagcaaaga

SEQ ID NO: 2028179 - DNA, 25 bp, Homo sapien
cattgttgagatttagtctggtaaa

SEQ ID NO: 2028180 - DNA, 25 bp, Homo sapien
tgttgagatttagtctggtaaagca

SEQ ID NO: 2028181 - DNA, 25 bp, Homo sapien
gcttcattgttgagatttagtctgg

SEQ ID NO: 2028182 - DNA, 25 bp, Homo sapien
taagtaaatctagcctccccagaca

SEQ ID NO: 2028183 - DNA, 25 bp, Homo sapien
gccaggcaagccgtttaaccatgac

SEQ ID NO: 2028184 - DNA, 25 bp, Homo sapien
tgtccctcagtggaagtacaaaaca

SEQ ID NO: 2028185 - DNA, 25 bp, Homo sapien
cagacaccgtataggcacctgatgg

SEQ ID NO: 2028186 - DNA, 25 bp, Homo sapien
tcaactcaacccctattccctcatc

SEQ ID NO: 2028187 - DNA, 25 bp, Homo sapien
gaatcttatccattctcaactcaac

SEQ ID NO: 2028188 - DNA, 25 bp, Homo sapien
tccctctctaactctaatttcctga

SEQ ID NO: 2028189 - DNA, 25 bp, Homo sapien
tattccctcatcttcaacaaccttg

SEQ ID NO: 2028190 - DNA, 25 bp, Homo sapien
ttatctcatgtaattctcatgctga

SEQ ID NO: 2028191 - DNA, 25 bp, Homo sapien
tatctcatgtaattctcatgctgac

SEQ ID NO: 2028192 - DNA, 25 bp, Homo sapien
tctccctgtatctagcaaagtcctc

SEQ ID NO: 2028193 - DNA, 25 bp, Homo sapien
ggtgcaccttgccagaaagccttac

SEQ ID NO: 2028194 - DNA, 25 bp, Homo sapien
tctgctgactccttcggtgctccaa

SEQ ID NO: 2028195 - DNA, 25 bp, Homo sapien
tggttcccctgctccatatgataag

SEQ ID NO: 2028196 - DNA, 25 bp, Homo sapien
tgccttttcctcattcttttcaaca

SEQ ID NO: 2028197 - DNA, 25 bp, Homo sapien
ttttcctcattcttttcaacatgtt

SEQ ID NO: 2028198 - DNA, 25 bp, Homo sapien
agctgtctctgccttttcctcattc

SEQ ID NO: 2028199 - DNA, 25 bp, Homo sapien
ccttttcctcattcttttcaacatg

SEQ ID NO: 2028200 - DNA, 25 bp, Homo sapien
tcagatttccgaccagaatgtgagc

SEQ ID NO: 2028201 - DNA, 25 bp, Homo sapien
ctgttaatatgtcagatttccgacc

SEQ ID NO: 2028202 - DNA, 25 bp, Homo sapien
gatttccgaccagaatgtgagctct

SEQ ID NO: 2028203 - DNA, 25 bp, Homo sapien
tatgtcagatttccgaccagaatgt

SEQ ID NO: 2028204 - DNA, 25 bp, Homo sapien
gctgaaacttggtggctaatgaata

SEQ ID NO: 2028205 - DNA, 25 bp, Homo sapien
tggattctctagtagaagttttccc

SEQ ID NO: 2028206 - DNA, 25 bp, Homo sapien
gctgatctgcattgcacaacagtgc

SEQ ID NO: 2028207 - DNA, 25 bp, Homo sapien
gactaacaccagagtttccacagtg

SEQ ID NO: 2028208 - DNA, 25 bp, Homo sapien
gctggaggcagatgaattgcagaac

SEQ ID NO: 2028209 - DNA, 25 bp, Homo sapien
tggaggcagatgaattgcagaactc

SEQ ID NO: 2028210 - DNA, 25 bp, Homo sapien
gggctggaggcagatgaattgcaga

SEQ ID NO: 2028211 - DNA, 25 bp, Homo sapien
gaggcagatgaattgcagaactcac

SEQ ID NO: 2028212 - DNA, 25 bp, Homo sapien
caatcccaggcggataaaccctggg

SEQ ID NO: 2028213 - DNA, 25 bp, Homo sapien
gactgtgcacagtttccgtaaccaa

SEQ ID NO: 2028214 - DNA, 25 bp, Homo sapien
caccgatagaccatcacaatgactg

SEQ ID NO: 2028215 - DNA, 25 bp, Homo sapien
aaccctgggtgatggcaccgataga

SEQ ID NO: 2028216 - DNA, 25 bp, Homo sapien
gaaggccaagtttcactagcttgga

SEQ ID NO: 2028217 - DNA, 25 bp, Homo sapien
actgaaggccaagtttcactagctt

SEQ ID NO: 2028218 - DNA, 25 bp, Homo sapien
tgccaagggtcccaagccttctagg

SEQ ID NO: 2028219 - DNA, 25 bp, Homo sapien
cagccccgcattcgctgccaagggt

SEQ ID NO: 2028220 - DNA, 25 bp, Homo sapien
gacagatctgcatggcgggctttaa

SEQ ID NO: 2028221 - DNA, 25 bp, Homo sapien
cagtgccaggcaacgcaaagtatca

SEQ ID NO: 2028222 - DNA, 25 bp, Homo sapien
tatcagaacagagtggtgcttgcca

SEQ ID NO: 2028223 - DNA, 25 bp, Homo sapien
cagtgaagtgtaccattcggaggca

SEQ ID NO: 2028224 - DNA, 25 bp, Homo sapien
cttggacaagatactgccagagaac

SEQ ID NO: 2028225 - DNA, 25 bp, Homo sapien
caagatactgccagagaactgttgt

SEQ ID NO: 2028226 - DNA, 25 bp, Homo sapien
actgccagagaactgttgtgagggc

SEQ ID NO: 2028227 - DNA, 25 bp, Homo sapien
gatactgccagagaactgttgtgag

SEQ ID NO: 2028228 - DNA, 25 bp, Homo sapien
tcaaagtctctaggccatcgtcagg

SEQ ID NO: 2028229 - DNA, 25 bp, Homo sapien
cctgatctggattggccgcatttga

SEQ ID NO: 2028230 - DNA, 25 bp, Homo sapien
ctgtcctgggcgcagggtttgccac

SEQ ID NO: 2028231 - DNA, 25 bp, Homo sapien
ttatggtccaattctccctgatctg

SEQ ID NO: 2028232 - DNA, 25 bp, Homo sapien
cacctgtcccacacggaagtgcttt

SEQ ID NO: 2028233 - DNA, 25 bp, Homo sapien
gctcatcatctgtcacgggaacacc

SEQ ID NO: 2028234 - DNA, 25 bp, Homo sapien
gaagctcctatttcgtgtctctcaa

SEQ ID NO: 2028235 - DNA, 25 bp, Homo sapien
ggttcatctggactagccacctgtc

SEQ ID NO: 2028236 - DNA, 25 bp, Homo sapien
ggtcaaaatccgtgtcaaagtcatc

SEQ ID NO: 2028237 - DNA, 25 bp, Homo sapien
tatcatggaagtccaggtcggcctg

SEQ ID NO: 2028238 - DNA, 25 bp, Homo sapien
cactgttggatcgagtgaacctgcg

SEQ ID NO: 2028239 - DNA, 25 bp, Homo sapien
catcgcgggagaactgtctggccat

SEQ ID NO: 2028240 - DNA, 25 bp, Homo sapien
gctaagtactaaaattggcctgcca

SEQ ID NO: 2028241 - DNA, 25 bp, Homo sapien
aaaatacccctcagctgtcattaag

SEQ ID NO: 2028242 - DNA, 25 bp, Homo sapien
gataagttgttaactggccattcag

SEQ ID NO: 2028243 - DNA, 25 bp, Homo sapien
tcattaagtaatcccatctgcccga

SEQ ID NO: 2028244 - DNA, 25 bp, Homo sapien
aaatgaaatttgaggccgggggcag

SEQ ID NO: 2028245 - DNA, 25 bp, Homo sapien
aatgaaatttgaggccgggggcagt

SEQ ID NO: 2028246 - DNA, 25 bp, Homo sapien
gaaatgaaatttgaggccgggggca

SEQ ID NO: 2028247 - DNA, 25 bp, Homo sapien
ccacggactggaacttactgggtgc

SEQ ID NO: 2028248 - DNA, 25 bp, Homo sapien
ctggaacttactgggtgctttattc

SEQ ID NO: 2028249 - DNA, 25 bp, Homo sapien
ttctacttgcactcccacggactgg

SEQ ID NO: 2028250 - DNA, 25 bp, Homo sapien
tgcactcccacggactggaacttac

SEQ ID NO: 2028251 - DNA, 25 bp, Homo sapien
gctattcacaaagtcgatcccatta

SEQ ID NO: 2028252 - DNA, 25 bp, Homo sapien
tagttgagacacaggtgtgcatgac

SEQ ID NO: 2028253 - DNA, 25 bp, Homo sapien
gtggacaccccatcactatagtgca

SEQ ID NO: 2028254 - DNA, 25 bp, Homo sapien
tagtgatcagcagggcaattttgac

SEQ ID NO: 2028255 - DNA, 25 bp, Homo sapien
gctgacacgataataagatgtgagg

SEQ ID NO: 2028256 - DNA, 25 bp, Homo sapien
gaggcacatcttaaacttttgtgtg

SEQ ID NO: 2028257 - DNA, 25 bp, Homo sapien
gggaggcacatcttaaacttttgtg

SEQ ID NO: 2028258 - DNA, 25 bp, Homo sapien
agacaggaaatatgctgacacgata

SEQ ID NO: 2028259 - DNA, 25 bp, Homo sapien
aactgccagctcatttgcatcaagt

SEQ ID NO: 2028260 - DNA, 25 bp, Homo sapien
ctgccagctcatttgcatcaagtat

SEQ ID NO: 2028261 - DNA, 25 bp, Homo sapien
ccagctcatttgcatcaagtattag

SEQ ID NO: 2028262 - DNA, 25 bp, Homo sapien
gctcatttgcatcaagtattagcat

SEQ ID NO: 2028263 - DNA, 25 bp, Homo sapien
gcagggtaacccaagctaaacagat

SEQ ID NO: 2028264 - DNA, 25 bp, Homo sapien
actgttatgtggctcgatgaccccg

SEQ ID NO: 2028265 - DNA, 25 bp, Homo sapien
gatgaccccggctattcctgcaagt

SEQ ID NO: 2028266 - DNA, 25 bp, Homo sapien
tgaattatcctgcagcttgagtcac

SEQ ID NO: 2028267 - DNA, 25 bp, Homo sapien
cgggtggacattcccctcaggtgaa

SEQ ID NO: 2028268 - DNA, 25 bp, Homo sapien
tctgaaaagaccagtcagtggagtg

SEQ ID NO: 2028269 - DNA, 25 bp, Homo sapien
cctgatttgagccagacgtccaaag

SEQ ID NO: 2028270 - DNA, 25 bp, Homo sapien
ggtttgtgctacacctctgccagct

SEQ ID NO: 2028271 - DNA, 25 bp, Homo sapien
caggtgtgaccggagactttgcagt

SEQ ID NO: 2028272 - DNA, 25 bp, Homo sapien
gaccggagactttgcagtgtgcatg

SEQ ID NO: 2028273 - DNA, 25 bp, Homo sapien
cctcaggtgtgaccggagactttgc

SEQ ID NO: 2028274 - DNA, 25 bp, Homo sapien
agactttgcagtgtgcatggtcagg

SEQ ID NO: 2028275 - DNA, 25 bp, Homo sapien
tgccgtgcggaccgtggaaaataaa

SEQ ID NO: 2028276 - DNA, 25 bp, Homo sapien
ctgccgtgcggaccgtggaaaataa

SEQ ID NO: 2028277 - DNA, 25 bp, Homo sapien
ctgcccccggggtgagtgtggccgg

SEQ ID NO: 2028278 - DNA, 25 bp, Homo sapien
cttccaaccccaggctgcttatgtg

SEQ ID NO: 2028279 - DNA, 25 bp, Homo sapien
tcttctgggaggttcccgcttgctg

SEQ ID NO: 2028280 - DNA, 25 bp, Homo sapien
gcttatgtggcccaaccccaatgct

SEQ ID NO: 2028281 - DNA, 25 bp, Homo sapien
aggcttgaaccccacagcggctgtg

SEQ ID NO: 2028282 - DNA, 25 bp, Homo sapien
ctgtatcccgatagacaggcatcga

SEQ ID NO: 2028283 - DNA, 25 bp, Homo sapien
tcctgtcctccgtggtgacggtggc

SEQ ID NO: 2028284 - DNA, 25 bp, Homo sapien
ctatggtagtcgtggtggtgacggt

SEQ ID NO: 2028285 - DNA, 25 bp, Homo sapien
ggcagtgttattgcccatgtgttga

SEQ ID NO: 2028286 - DNA, 25 bp, Homo sapien
tctgggcgtttgcagcttcgatggc

SEQ ID NO: 2028287 - DNA, 25 bp, Homo sapien
gataatatctcctcgctggccctgt

SEQ ID NO: 2028288 - DNA, 25 bp, Homo sapien
cttcgatggcggctgtcagagcctt

SEQ ID NO: 2028289 - DNA, 25 bp, Homo sapien
tgtccgtccatgtaggcatcctggg

SEQ ID NO: 2028290 - DNA, 25 bp, Homo sapien
tgatagaaatgaaaggtttcgtggt

SEQ ID NO: 2028291 - DNA, 25 bp, Homo sapien
ctgtgatagaaatgaaaggtttcgt

SEQ ID NO: 2028292 - DNA, 25 bp, Homo sapien
tgtgatagaaatgaaaggtttcgtg

SEQ ID NO: 2028293 - DNA, 25 bp, Homo sapien
atagaaatgaaaggtttcgtggtag

SEQ ID NO: 2028294 - DNA, 25 bp, Homo sapien
tcttatatgttgtaatgcaagatga

SEQ ID NO: 2028295 - DNA, 25 bp, Homo sapien
ggactggaggtggtgtcttcttata

SEQ ID NO: 2028296 - DNA, 25 bp, Homo sapien
ttatatgttgtaatgcaagatgaca

SEQ ID NO: 2028297 - DNA, 25 bp, Homo sapien
gaggtggtgtcttcttatatgttgt

SEQ ID NO: 2028298 - DNA, 25 bp, Homo sapien
actgcaattggacgccacctggtgg

SEQ ID NO: 2028299 - DNA, 25 bp, Homo sapien
gactgagcctccagtgcggctccta

SEQ ID NO: 2028300 - DNA, 25 bp, Homo sapien
tatcgatagggataactctggatac

SEQ ID NO: 2028301 - DNA, 25 bp, Homo sapien
gttgtcagctcatcttcgctatcga

SEQ ID NO: 2028302 - DNA, 25 bp, Homo sapien
gcagagttccagtaatgcttgacat

SEQ ID NO: 2028303 - DNA, 25 bp, Homo sapien
cagagttccagtaatgcttgacatc

SEQ ID NO: 2028304 - DNA, 25 bp, Homo sapien
ggcagagttccagtaatgcttgaca

SEQ ID NO: 2028305 - DNA, 25 bp, Homo sapien
tctcccatgttgttatacggaggga

SEQ ID NO: 2028306 - DNA, 25 bp, Homo sapien
ccaacttcgaataagggagctgaat

SEQ ID NO: 2028307 - DNA, 25 bp, Homo sapien
ccccaacacccaaagaagataagat

SEQ ID NO: 2028308 - DNA, 25 bp, Homo sapien
ttagactggacagggagaatactgg

SEQ ID NO: 2028309 - DNA, 25 bp, Homo sapien
ttatctctatgtggcgggaaacacc

SEQ ID NO: 2028310 - DNA, 25 bp, Homo sapien
tctcaggccagaagcactgctcatt

SEQ ID NO: 2028311 - DNA, 25 bp, Homo sapien
cacgaaaatgccaacggcggtattt

SEQ ID NO: 2028312 - DNA, 25 bp, Homo sapien
gctcatttgtattgctggcttccag

SEQ ID NO: 2028313 - DNA, 25 bp, Homo sapien
tgacattgtctcctgttggagttct

SEQ ID NO: 2028314 - DNA, 25 bp, Homo sapien
ttctgacattgtctcctgttggagt

SEQ ID NO: 2028315 - DNA, 25 bp, Homo sapien
tctgacattgtctcctgttggagtt

SEQ ID NO: 2028316 - DNA, 25 bp, Homo sapien
agatttgttaatccttctgacattg

SEQ ID NO: 2028317 - DNA, 25 bp, Homo sapien
gaagctaacttctacaccaacgtgg

SEQ ID NO: 2028318 - DNA, 25 bp, Homo sapien
acaccaacgtggtcagatgatgcca

SEQ ID NO: 2028319 - DNA, 25 bp, Homo sapien
tgatgccatcccgtatccatggcaa

SEQ ID NO: 2028320 - DNA, 25 bp, Homo sapien
ccatggcaaccagatgtctccagta

SEQ ID NO: 2028321 - DNA, 25 bp, Homo sapien
tgtgtatggacttggtggaatttag

SEQ ID NO: 2028322 - DNA, 25 bp, Homo sapien
gtgaattgtgcatcaaataaataac

SEQ ID NO: 2028323 - DNA, 25 bp, Homo sapien
gtgtatggacttggtggaatttagg

SEQ ID NO: 2028324 - DNA, 25 bp, Homo sapien
cgtgcggatgcccgtttcccctcct

SEQ ID NO: 2028325 - DNA, 25 bp, Homo sapien
accgctccagcagcggaagtaaggc

SEQ ID NO: 2028326 - DNA, 25 bp, Homo sapien
cggaagtaaggcacatttaggccct

SEQ ID NO: 2028327 - DNA, 25 bp, Homo sapien
cggttcagtgggatctggtactttt

SEQ ID NO: 2028328 - DNA, 25 bp, Homo sapien
tcagtgggatctggtacttttcctc

SEQ ID NO: 2028329 - DNA, 25 bp, Homo sapien
tttgtgcgcataggtctgacactgc

SEQ ID NO: 2028330 - DNA, 25 bp, Homo sapien
catgagcctgtccaacggttggcct

SEQ ID NO: 2028331 - DNA, 25 bp, Homo sapien
tgtgacctgggcgtgaaccgtctgt

SEQ ID NO: 2028332 - DNA, 25 bp, Homo sapien
tccattgactgtgccgctgagcaca

SEQ ID NO: 2028333 - DNA, 25 bp, Homo sapien
ggcctctggaatttcaaagccgaca

SEQ ID NO: 2028334 - DNA, 25 bp, Homo sapien
tggaatttcaaagccgacagcctgg

SEQ ID NO: 2028335 - DNA, 25 bp, Homo sapien
aaagccgacagcctggccctgctgg

SEQ ID NO: 2028336 - DNA, 25 bp, Homo sapien
tctggaatttcaaagccgacagcct

SEQ ID NO: 2028337 - DNA, 25 bp, Homo sapien
tgataccccatccttttgattgttg

SEQ ID NO: 2028338 - DNA, 25 bp, Homo sapien
ctgaactatcacaaaatgaacccct

SEQ ID NO: 2028339 - DNA, 25 bp, Homo sapien
cgcccggccacttttacatgtctta

SEQ ID NO: 2028340 - DNA, 25 bp, Homo sapien
tccaataggcaacagtgatacccca

SEQ ID NO: 2028341 - DNA, 25 bp, Homo sapien
atagcacagggcattggcggtcacg

SEQ ID NO: 2028342 - DNA, 25 bp, Homo sapien
gctattagcagcgtccagaggagcc

SEQ ID NO: 2028343 - DNA, 25 bp, Homo sapien
gaagcacaggaagagcacgaactga

SEQ ID NO: 2028344 - DNA, 25 bp, Homo sapien
cacgaactgatgctttgtggagata

SEQ ID NO: 2028345 - DNA, 25 bp, Homo sapien
tgtggtgctccagcctccacgtcat

SEQ ID NO: 2028346 - DNA, 25 bp, Homo sapien
cattcgtttgtttagtgtggtgctc

SEQ ID NO: 2028347 - DNA, 25 bp, Homo sapien
atctgagaagagaacattcgtttgt

SEQ ID NO: 2028348 - DNA, 25 bp, Homo sapien
ggtgctccagcctccacgtcatttt

SEQ ID NO: 2028349 - DNA, 25 bp, Homo sapien
tcagacaataagctgcccaaaaaga

SEQ ID NO: 2028350 - DNA, 25 bp, Homo sapien
cagacaataagctgcccaaaaagat

SEQ ID NO: 2028351 - DNA, 25 bp, Homo sapien
agacaataagctgcccaaaaagatg

SEQ ID NO: 2028352 - DNA, 25 bp, Homo sapien
gacaataagctgcccaaaaagatgc

SEQ ID NO: 2028353 - DNA, 25 bp, Homo sapien
tcaagcaacagtcgcagtgggcctg

SEQ ID NO: 2028354 - DNA, 25 bp, Homo sapien
cttctggtatccgcagccactccag

SEQ ID NO: 2028355 - DNA, 25 bp, Homo sapien
ctggtatccgcagccactccagaga

SEQ ID NO: 2028356 - DNA, 25 bp, Homo sapien
tgacttctggtatccgcagccactc

SEQ ID NO: 2028357 - DNA, 25 bp, Homo sapien
ggactagccccaagcagtcactctg

SEQ ID NO: 2028358 - DNA, 25 bp, Homo sapien
cagaggctgccggactagccccaag

SEQ ID NO: 2028359 - DNA, 25 bp, Homo sapien
ggctgccggactagccccaagcagt

SEQ ID NO: 2028360 - DNA, 25 bp, Homo sapien
aggctgccggactagccccaagcag

SEQ ID NO: 2028361 - DNA, 25 bp, Homo sapien
aaattccactttgatgcgcaaagcg

SEQ ID NO: 2028362 - DNA, 25 bp, Homo sapien
taccacaggcctgcaacatgcactt

SEQ ID NO: 2028363 - DNA, 25 bp, Homo sapien
catgcactttctcctcgaggtgaga

SEQ ID NO: 2028364 - DNA, 25 bp, Homo sapien
cgaacttgaatttctgcttggccta

SEQ ID NO: 2028365 - DNA, 25 bp, Homo sapien
cccactgcaatttcccactccccac

SEQ ID NO: 2028366 - DNA, 25 bp, Homo sapien
ccccactgcaatttcccactcccca

SEQ ID NO: 2028367 - DNA, 25 bp, Homo sapien
ccaacccccactgcaatttcccact

SEQ ID NO: 2028368 - DNA, 25 bp, Homo sapien
caacccccactgcaatttcccactc

SEQ ID NO: 2028369 - DNA, 25 bp, Homo sapien
tgaaaactcacccgaaagcccacta

SEQ ID NO: 2028370 - DNA, 25 bp, Homo sapien
catgcattgcccattcaccaagcca

SEQ ID NO: 2028371 - DNA, 25 bp, Homo sapien
ccagccacatctccctttaagttga

SEQ ID NO: 2028372 - DNA, 25 bp, Homo sapien
cccgaaagcccactacctcttccat

SEQ ID NO: 2028373 - DNA, 25 bp, Homo sapien
cttcaactgcagaactcagttttat

SEQ ID NO: 2028374 - DNA, 25 bp, Homo sapien
actgcagaactcagttttatgacac

SEQ ID NO: 2028375 - DNA, 25 bp, Homo sapien
tcaactgcagaactcagttttatga

SEQ ID NO: 2028376 - DNA, 25 bp, Homo sapien
caactgcagaactcagttttatgac

SEQ ID NO: 2028377 - DNA, 25 bp, Homo sapien
tcttctacttcatctcacatgactt

SEQ ID NO: 2028378 - DNA, 25 bp, Homo sapien
cttctacttcatctcacatgacttt

SEQ ID NO: 2028379 - DNA, 25 bp, Homo sapien
ttcttctacttcatctcacatgact

SEQ ID NO: 2028380 - DNA, 25 bp, Homo sapien
ttctacttcatctcacatgactttt

SEQ ID NO: 2028381 - DNA, 25 bp, Homo sapien
tactatgctattgtctgtgacggca

SEQ ID NO: 2028382 - DNA, 25 bp, Homo sapien
ggccactggtcctactatgctattg

SEQ ID NO: 2028383 - DNA, 25 bp, Homo sapien
ttaatatgaggccactggtcctact

SEQ ID NO: 2028384 - DNA, 25 bp, Homo sapien
ctgtgacggcagctaagcacaactg

SEQ ID NO: 2028385 - DNA, 25 bp, Homo sapien
ccccctggcgtttgtgtgctgtcat

SEQ ID NO: 2028386 - DNA, 25 bp, Homo sapien
gtgaaactgcattgccccctggcgt

SEQ ID NO: 2028387 - DNA, 25 bp, Homo sapien
tcctaggattcttcggtgaaactgc

SEQ ID NO: 2028388 - DNA, 25 bp, Homo sapien
cctgccaatgttcttagtcaaagcc

SEQ ID NO: 2028389 - DNA, 25 bp, Homo sapien
tgcttggcccttgattgaaactgct

SEQ ID NO: 2028390 - DNA, 25 bp, Homo sapien
tgtcccataactaagcacactgaga

SEQ ID NO: 2028391 - DNA, 25 bp, Homo sapien
taatgtggcttacaacgttctgggc

SEQ ID NO: 2028392 - DNA, 25 bp, Homo sapien
gaaactgcttaataatctcccactg

SEQ ID NO: 2028393 - DNA, 25 bp, Homo sapien
cctcaaccaccagttgaggaattga

SEQ ID NO: 2028394 - DNA, 25 bp, Homo sapien
tgggctttctatcccatcctctgag

SEQ ID NO: 2028395 - DNA, 25 bp, Homo sapien
caacattcatgtttatggtctcaca

SEQ ID NO: 2028396 - DNA, 25 bp, Homo sapien
gtagcgacttcagcccgtttcattg

SEQ ID NO: 2028397 - DNA, 25 bp, Homo sapien
tgcagggacatgttaataagaaaca

SEQ ID NO: 2028398 - DNA, 25 bp, Homo sapien
tttactgtcgactccactgcaggga

SEQ ID NO: 2028399 - DNA, 25 bp, Homo sapien
cagatttgatactgggaatgctgtc

SEQ ID NO: 2028400 - DNA, 25 bp, Homo sapien
cttggagacatctggcaatgcttgc

SEQ ID NO: 2028401 - DNA, 25 bp, Homo sapien
tccatgtgtctaggtctaggaccca

SEQ ID NO: 2028402 - DNA, 25 bp, Homo sapien
tatgccttggaagaccagttctgag

SEQ ID NO: 2028403 - DNA, 25 bp, Homo sapien
tgatatgtgtggagaattgctaccc

SEQ ID NO: 2028404 - DNA, 25 bp, Homo sapien
tcaagaagagaaggtaatcagccat

SEQ ID NO: 2028405 - DNA, 25 bp, Homo sapien
tctcagtgtcatgatcagtgtctga

SEQ ID NO: 2028406 - DNA, 25 bp, Homo sapien
tgtattgatgtttgtcagggatatt

SEQ ID NO: 2028407 - DNA, 25 bp, Homo sapien
ttgaagtgacacttggttcggtttg

SEQ ID NO: 2028408 - DNA, 25 bp, Homo sapien
gaagtgacacttggttcggtttgcc

SEQ ID NO: 2028409 - DNA, 25 bp, Homo sapien
tctgtattgatgtttgtcagggata

SEQ ID NO: 2028410 - DNA, 25 bp, Homo sapien
ctgggtaatatcctgaagaacgttt

SEQ ID NO: 2028411 - DNA, 25 bp, Homo sapien
gacctttctctctgatgattatgtg

SEQ ID NO: 2028412 - DNA, 25 bp, Homo sapien
tgaatattagcctccactgtcttct

SEQ ID NO: 2028413 - DNA, 25 bp, Homo sapien
aatgttgaatattagcctccactgt

SEQ ID NO: 2028414 - DNA, 25 bp, Homo sapien
agacctgaacttgccaactgagagc

SEQ ID NO: 2028415 - DNA, 25 bp, Homo sapien
aactgagagcctttgattcacgtgc

SEQ ID NO: 2028416 - DNA, 25 bp, Homo sapien
tgtggcgctgtcctgacaaaagacc

SEQ ID NO: 2028417 - DNA, 25 bp, Homo sapien
caggatcaccggatatagctggtcc

SEQ ID NO: 2028418 - DNA, 25 bp, Homo sapien
acagcattgtgcttgtatggtgcag

SEQ ID NO: 2028419 - DNA, 25 bp, Homo sapien
aatattgtttcaccaagggcccagg

SEQ ID NO: 2028420 - DNA, 25 bp, Homo sapien
aactgcagagtggaataagcttagc

SEQ ID NO: 2028421 - DNA, 25 bp, Homo sapien
tgacttcagcgaaccatctgcaagg

SEQ ID NO: 2028422 - DNA, 25 bp, Homo sapien
acagcattgatgtgcttaatgagga

SEQ ID NO: 2028423 - DNA, 25 bp, Homo sapien
gaacagcattgatgtgcttaatgag

SEQ ID NO: 2028424 - DNA, 25 bp, Homo sapien
caggaacagcattgatgtgcttaat

SEQ ID NO: 2028425 - DNA, 25 bp, Homo sapien
cactcaggaacagcattgatgtgct

SEQ ID NO: 2028426 - DNA, 25 bp, Homo sapien
gggtgatctttacccattttgcctg

SEQ ID NO: 2028427 - DNA, 25 bp, Homo sapien
tgttttttattgtgagagctgtgaa

SEQ ID NO: 2028428 - DNA, 25 bp, Homo sapien
ccattttgcctgagtggtatcaggg

SEQ ID NO: 2028429 - DNA, 25 bp, Homo sapien
gctgtgaattcaccaagttgaagtt

SEQ ID NO: 2028430 - DNA, 25 bp, Homo sapien
tagcgcccaggattccagcttcttg

SEQ ID NO: 2028431 - DNA, 25 bp, Homo sapien
cccaggattccagcttcttgtcaag

SEQ ID NO: 2028432 - DNA, 25 bp, Homo sapien
gcgcccaggattccagcttcttgtc

SEQ ID NO: 2028433 - DNA, 25 bp, Homo sapien
cctagcgcccaggattccagcttct

SEQ ID NO: 2028434 - DNA, 25 bp, Homo sapien
ttgacagtacgcgtaaagagactcc

SEQ ID NO: 2028435 - DNA, 25 bp, Homo sapien
aataaattgtaagagcgtacttgac

SEQ ID NO: 2028436 - DNA, 25 bp, Homo sapien
cgtacttgacagtacgcgtaaagag

SEQ ID NO: 2028437 - DNA, 25 bp, Homo sapien
taagagcgtacttgacagtacgcgt

SEQ ID NO: 2028438 - DNA, 25 bp, Homo sapien
tcctattttcgagagcactttccct

SEQ ID NO: 2028439 - DNA, 25 bp, Homo sapien
tttagcgtaggtttgtcaatatcac

SEQ ID NO: 2028440 - DNA, 25 bp, Homo sapien
gatgatttgccatgactcttcacaa

SEQ ID NO: 2028441 - DNA, 25 bp, Homo sapien
tctctctgaatggataacgatgatg

SEQ ID NO: 2028442 - DNA, 25 bp, Homo sapien
gtgtgtatgtacaaaaacacactat

SEQ ID NO: 2028443 - DNA, 25 bp, Homo sapien
ttcttgacacattctgagttatgtg

SEQ ID NO: 2028444 - DNA, 25 bp, Homo sapien
tagagaggtgccgtctctataaaaa

SEQ ID NO: 2028445 - DNA, 25 bp, Homo sapien
cacattctgagttatgtgtgtatgt

SEQ ID NO: 2028446 - DNA, 25 bp, Homo sapien
tttctgagaacgagaacagctcttc

SEQ ID NO: 2028447 - DNA, 25 bp, Homo sapien
tagtaccaaggttgtattagcccca

SEQ ID NO: 2028448 - DNA, 25 bp, Homo sapien
ctctagaaatgtgatcagcagtcca

SEQ ID NO: 2028449 - DNA, 25 bp, Homo sapien
tatagacagagatttgagaccaggt

SEQ ID NO: 2028450 - DNA, 25 bp, Homo sapien
aattatggactatttggccaggtgc

SEQ ID NO: 2028451 - DNA, 25 bp, Homo sapien
tgtggatactaggagatctttgtgg

SEQ ID NO: 2028452 - DNA, 25 bp, Homo sapien
ggagatcaagacctgatacagcaaa

SEQ ID NO: 2028453 - DNA, 25 bp, Homo sapien
tacttcatccaactggcaaaatgtg

SEQ ID NO: 2028454 - DNA, 25 bp, Homo sapien
tattggtgattacagagagaatttc

SEQ ID NO: 2028455 - DNA, 25 bp, Homo sapien
gtgaatgatctcatgtgaaccttac

SEQ ID NO: 2028456 - DNA, 25 bp, Homo sapien
tcatgtgcaagtcatagagtattca

SEQ ID NO: 2028457 - DNA, 25 bp, Homo sapien
ttaaactaagccacattgagagatt

SEQ ID NO: 2028458 - DNA, 25 bp, Homo sapien
cactgtttgccatgcaataaccccg

SEQ ID NO: 2028459 - DNA, 25 bp, Homo sapien
gccagtgtgccagaaaaccctggaa

SEQ ID NO: 2028460 - DNA, 25 bp, Homo sapien
ggacttgcttgttggctgtctgtga

SEQ ID NO: 2028461 - DNA, 25 bp, Homo sapien
cccgaatgtgggcaaaggtggactt

SEQ ID NO: 2028462 - DNA, 25 bp, Homo sapien
caaggttggcactccgttcccaaga

SEQ ID NO: 2028463 - DNA, 25 bp, Homo sapien
caggagatggaagcacatggtattc

SEQ ID NO: 2028464 - DNA, 25 bp, Homo sapien
gcctgataggacttttgcattttta

SEQ ID NO: 2028465 - DNA, 25 bp, Homo sapien
tattatagaggaatcctacctcgag

SEQ ID NO: 2028466 - DNA, 25 bp, Homo sapien
caagggtggaagtacgcgatgtctc

SEQ ID NO: 2028467 - DNA, 25 bp, Homo sapien
ttgcctcacaaaaggagtaggttgt

SEQ ID NO: 2028468 - DNA, 25 bp, Homo sapien
cagcagacaaggataagttgcctca

SEQ ID NO: 2028469 - DNA, 25 bp, Homo sapien
ttttctttcgtctgagcctgcaagg

SEQ ID NO: 2028470 - DNA, 25 bp, Homo sapien
tgacttggaatgaagacccaaaccc

SEQ ID NO: 2028471 - DNA, 25 bp, Homo sapien
tctcctgggtaggatgactgacttg

SEQ ID NO: 2028472 - DNA, 25 bp, Homo sapien
tatgtttgcagaccactagactgga

SEQ ID NO: 2028473 - DNA, 25 bp, Homo sapien
tgtgggccaaaacattcctgcagag

SEQ ID NO: 2028474 - DNA, 25 bp, Homo sapien
tatacggacatctaccatctctggt

SEQ ID NO: 2028475 - DNA, 25 bp, Homo sapien
tggagaatttcctagtgagcaagaa

SEQ ID NO: 2028476 - DNA, 25 bp, Homo sapien
aagcatctcttctcctaacactgag

SEQ ID NO: 2028477 - DNA, 25 bp, Homo sapien
caacgcaaggtctggaagcatctct

SEQ ID NO: 2028478 - DNA, 25 bp, Homo sapien
agctggcggggatcggctcctagga

SEQ ID NO: 2028479 - DNA, 25 bp, Homo sapien
tgtggggatcttggaagtccctccc

SEQ ID NO: 2028480 - DNA, 25 bp, Homo sapien
ctgtgtggggatcttggaagtccct

SEQ ID NO: 2028481 - DNA, 25 bp, Homo sapien
gatcggctcctaggacctgtgtggg

SEQ ID NO: 2028482 - DNA, 25 bp, Homo sapien
catggtgccgttgttgcagtttccc

SEQ ID NO: 2028483 - DNA, 25 bp, Homo sapien
tcatggtgccgttgttgcagtttcc

SEQ ID NO: 2028484 - DNA, 25 bp, Homo sapien
ggacagtcgtgccatagccagcaca

SEQ ID NO: 2028485 - DNA, 25 bp, Homo sapien
tggtatcttgttcctggcaactatg

SEQ ID NO: 2028486 - DNA, 25 bp, Homo sapien
ggcaactatgtgtgttgacagcaag

SEQ ID NO: 2028487 - DNA, 25 bp, Homo sapien
taggacatgggtggtatcttgttcc

SEQ ID NO: 2028488 - DNA, 25 bp, Homo sapien
tgctctggatggtcctaacggtggt

SEQ ID NO: 2028489 - DNA, 25 bp, Homo sapien
gctctggatggtcctaacggtggtg

SEQ ID NO: 2028490 - DNA, 25 bp, Homo sapien
acacgcactcgtcgtcctgggagca

SEQ ID NO: 2028491 - DNA, 25 bp, Homo sapien
acggactcgaactgcccgttcactt

SEQ ID NO: 2028492 - DNA, 25 bp, Homo sapien
atgggcaggtccagcgcttccacgg

SEQ ID NO: 2028493 - DNA, 25 bp, Homo sapien
gactccagctcgctgaacacggact

SEQ ID NO: 2028494 - DNA, 25 bp, Homo sapien
tgtgacactcgcctccacctggtgg

SEQ ID NO: 2028495 - DNA, 25 bp, Homo sapien
ctccacctggtggaggatcaacctc

SEQ ID NO: 2028496 - DNA, 25 bp, Homo sapien
gcagacacaggcgttgtgacactcg

SEQ ID NO: 2028497 - DNA, 25 bp, Homo sapien
acaggcgttgtgacactcgcctcca

SEQ ID NO: 2028498 - DNA, 25 bp, Homo sapien
tccagattcagagatttgatcagct

SEQ ID NO: 2028499 - DNA, 25 bp, Homo sapien
gatttgttaatccttgggagctgca

SEQ ID NO: 2028500 - DNA, 25 bp, Homo sapien
agaacacaatctgggtactagggag

SEQ ID NO: 2028501 - DNA, 25 bp, Homo sapien
ggctagaggccatgtgtttatttca

SEQ ID NO: 2028502 - DNA, 25 bp, Homo sapien
tatcattggacaagcagtaaccagc

SEQ ID NO: 2028503 - DNA, 25 bp, Homo sapien
cgaataggtttgcatgttcttggag

SEQ ID NO: 2028504 - DNA, 25 bp, Homo sapien
cagtaaccagcacgaataggtttgc

SEQ ID NO: 2028505 - DNA, 25 bp, Homo sapien
ggataatgtatatcattggacaagc

SEQ ID NO: 2028506 - DNA, 25 bp, Homo sapien
caggctccggttgatggagacttca

SEQ ID NO: 2028507 - DNA, 25 bp, Homo sapien
caggtaactatgactccggatctgg

SEQ ID NO: 2028508 - DNA, 25 bp, Homo sapien
tcctggagcggaactttggtgatgt

SEQ ID NO: 2028509 - DNA, 25 bp, Homo sapien
gctgatggtgctcatggctcgcatg

SEQ ID NO: 2028510 - DNA, 25 bp, Homo sapien
gacattcgagagcaattaacattct

SEQ ID NO: 2028511 - DNA, 25 bp, Homo sapien
ctgatgacattcgagagcaattaac

SEQ ID NO: 2028512 - DNA, 25 bp, Homo sapien
aagatctgatgacattcgagagcaa

SEQ ID NO: 2028513 - DNA, 25 bp, Homo sapien
tgacaggaaatcatcaagatctgat

SEQ ID NO: 2028514 - DNA, 25 bp, Homo sapien
agtattggaatgtaaggctcttcca

SEQ ID NO: 2028515 - DNA, 25 bp, Homo sapien
gtattggaatgtaaggctcttccat

SEQ ID NO: 2028516 - DNA, 25 bp, Homo sapien
aaaagtattggaatgtaaggctctt

SEQ ID NO: 2028517 - DNA, 25 bp, Homo sapien
aagtattggaatgtaaggctcttcc

SEQ ID NO: 2028518 - DNA, 25 bp, Homo sapien
gctggcatgctagctgtgaacagat

SEQ ID NO: 2028519 - DNA, 25 bp, Homo sapien
tgaactaagtaaccaaaggcaggga

SEQ ID NO: 2028520 - DNA, 25 bp, Homo sapien
ggcagggaacgaacaaactcattta

SEQ ID NO: 2028521 - DNA, 25 bp, Homo sapien
gacagagaggaattaggttaacata

SEQ ID NO: 2028522 - DNA, 25 bp, Homo sapien
ctgccatgatgaaccagggtctgtg

SEQ ID NO: 2028523 - DNA, 25 bp, Homo sapien
ccattttccctgtctgataggtcag

SEQ ID NO: 2028524 - DNA, 25 bp, Homo sapien
aggcactactatgcataaggcctgc

SEQ ID NO: 2028525 - DNA, 25 bp, Homo sapien
cctgtctgataggtcagtgctgtca

SEQ ID NO: 2028526 - DNA, 25 bp, Homo sapien
agctgagagtgcgtctgtgtttccc

SEQ ID NO: 2028527 - DNA, 25 bp, Homo sapien
acgtgccgtgtgtactgcgggactt

SEQ ID NO: 2028528 - DNA, 25 bp, Homo sapien
gccgtgtgtactgcgggacttgcat

SEQ ID NO: 2028529 - DNA, 25 bp, Homo sapien
tgtgtttccccggagacgcgctcgg

SEQ ID NO: 2028530 - DNA, 25 bp, Homo sapien
tggtaactgtggagtcttagaggca

SEQ ID NO: 2028531 - DNA, 25 bp, Homo sapien
tgacggcaggacttgtggtaactgt

SEQ ID NO: 2028532 - DNA, 25 bp, Homo sapien
ttttcttagcccatttaggagagac

SEQ ID NO: 2028533 - DNA, 25 bp, Homo sapien
tgacatattcgtcctgctggaaggg

SEQ ID NO: 2028534 - DNA, 25 bp, Homo sapien
ctttgcctctcgctcctggagatga

SEQ ID NO: 2028535 - DNA, 25 bp, Homo sapien
tttgcctctcgctcctggagatgat

SEQ ID NO: 2028536 - DNA, 25 bp, Homo sapien
gctttgcctctcgctcctggagatg

SEQ ID NO: 2028537 - DNA, 25 bp, Homo sapien
tgctttgcctctcgctcctggagat

SEQ ID NO: 2028538 - DNA, 25 bp, Homo sapien
gtggtgggcccagtcgttccattcg

SEQ ID NO: 2028539 - DNA, 25 bp, Homo sapien
tgggcccagtcgttccattcggtta

SEQ ID NO: 2028540 - DNA, 25 bp, Homo sapien
gatagtggtggtgggcccagtcgtt

SEQ ID NO: 2028541 - DNA, 25 bp, Homo sapien
cggcacaggattgatgagcagagaa

SEQ ID NO: 2028542 - DNA, 25 bp, Homo sapien
tccggcacaggattgatgagcagag

SEQ ID NO: 2028543 - DNA, 25 bp, Homo sapien
ccggcacaggattgatgagcagaga

SEQ ID NO: 2028544 - DNA, 25 bp, Homo sapien
catccggcacaggattgatgagcag

SEQ ID NO: 2028545 - DNA, 25 bp, Homo sapien
taagtttgtgcattccgcatacggg

SEQ ID NO: 2028546 - DNA, 25 bp, Homo sapien
aagatggtaagtttgtgcattccgc

SEQ ID NO: 2028547 - DNA, 25 bp, Homo sapien
gcctctgagtaacagatcgtgtgca

SEQ ID NO: 2028548 - DNA, 25 bp, Homo sapien
cgcatacgggatcaccagcctctga

SEQ ID NO: 2028549 - DNA, 25 bp, Homo sapien
attcagaaatacccccagggaccag

SEQ ID NO: 2028550 - DNA, 25 bp, Homo sapien
gaaagggtttagatgaatattcgga

SEQ ID NO: 2028551 - DNA, 25 bp, Homo sapien
gatgaatattcggaaggaaattcag

SEQ ID NO: 2028552 - DNA, 25 bp, Homo sapien
taaacacccattcataggtatggct

SEQ ID NO: 2028553 - DNA, 25 bp, Homo sapien
tctgcgcccgcgatgctcctggggt

SEQ ID NO: 2028554 - DNA, 25 bp, Homo sapien
ccacaatgtcagtgcgttctctgat

SEQ ID NO: 2028555 - DNA, 25 bp, Homo sapien
ttaggcctcttgatgacggccggat

SEQ ID NO: 2028556 - DNA, 25 bp, Homo sapien
tcagtgcgttctctgattaggcctc

SEQ ID NO: 2028557 - DNA, 25 bp, Homo sapien
tcagcccagattgagcctgtgttag

SEQ ID NO: 2028558 - DNA, 25 bp, Homo sapien
ctgtgttagctgaactgctggaata

SEQ ID NO: 2028559 - DNA, 25 bp, Homo sapien
ggggcttgtgcatgtaccttccaga

SEQ ID NO: 2028560 - DNA, 25 bp, Homo sapien
cctgtgtcagcccagattgagcctg

SEQ ID NO: 2028561 - DNA, 25 bp, Homo sapien
gaagctagacagaggcttgccaagc

SEQ ID NO: 2028562 - DNA, 25 bp, Homo sapien
tgggcaaccacttaaataaactcag

SEQ ID NO: 2028563 - DNA, 25 bp, Homo sapien
tactcagctcagctacttaaagtgt

SEQ ID NO: 2028564 - DNA, 25 bp, Homo sapien
gctggaaaattctaactgttgatca

SEQ ID NO: 2028565 - DNA, 25 bp, Homo sapien
tccctcagggcatttagcagcttga

SEQ ID NO: 2028566 - DNA, 25 bp, Homo sapien
tggctctcattggacgactggaccc

SEQ ID NO: 2028567 - DNA, 25 bp, Homo sapien
gctgaagagcttaagcgaggcacct

SEQ ID NO: 2028568 - DNA, 25 bp, Homo sapien
gctcttggcggcactgaatcgtata

SEQ ID NO: 2028569 - DNA, 25 bp, Homo sapien
tgaaggcacaaaccccaggaggagg

SEQ ID NO: 2028570 - DNA, 25 bp, Homo sapien
aggctctgaaggcacaaaccccagg

SEQ ID NO: 2028571 - DNA, 25 bp, Homo sapien
gctctgaaggcacaaaccccaggag

SEQ ID NO: 2028572 - DNA, 25 bp, Homo sapien
tctgaaggcacaaaccccaggagga

SEQ ID NO: 2028573 - DNA, 25 bp, Homo sapien
tcaggcacttgtacccacagcagtg

SEQ ID NO: 2028574 - DNA, 25 bp, Homo sapien
tatatgcagttggtaatttggatct

SEQ ID NO: 2028575 - DNA, 25 bp, Homo sapien
aatgatgctaccgaggtggtggcaa

SEQ ID NO: 2028576 - DNA, 25 bp, Homo sapien
gtgtccatctcttttggaatctggc

SEQ ID NO: 2028577 - DNA, 25 bp, Homo sapien
tctgagctgtaagtcaagaacaatg

SEQ ID NO: 2028578 - DNA, 25 bp, Homo sapien
actgttcagggaaaagtcctcagag

SEQ ID NO: 2028579 - DNA, 25 bp, Homo sapien
ctcgtgaggctcacaaccatgagaa

SEQ ID NO: 2028580 - DNA, 25 bp, Homo sapien
gaaagccttggtgtatcagtaaagt

SEQ ID NO: 2028581 - DNA, 25 bp, Homo sapien
gcactttaacgggaacatagatatt

SEQ ID NO: 2028582 - DNA, 25 bp, Homo sapien
tgtctgcactttaacgggaacatag

SEQ ID NO: 2028583 - DNA, 25 bp, Homo sapien
ctcgttgtctgcactttaacgggaa

SEQ ID NO: 2028584 - DNA, 25 bp, Homo sapien
aaagacgaaggaattttgaggctct

SEQ ID NO: 2028585 - DNA, 25 bp, Homo sapien
ctgcaaagagaagccgtcctggaag

SEQ ID NO: 2028586 - DNA, 25 bp, Homo sapien
aaagagaagccgtcctggaaggaca

SEQ ID NO: 2028587 - DNA, 25 bp, Homo sapien
cctggaaggacagtgggcagcatct

SEQ ID NO: 2028588 - DNA, 25 bp, Homo sapien
gggcagcatctctgatcagcactac

SEQ ID NO: 2028589 - DNA, 25 bp, Homo sapien
cacgtcagtgctgaaaggttcctgg

SEQ ID NO: 2028590 - DNA, 25 bp, Homo sapien
tagactaaggatagcacctgtgggc

SEQ ID NO: 2028591 - DNA, 25 bp, Homo sapien
cctgggagacatttcctgtagacta

SEQ ID NO: 2028592 - DNA, 25 bp, Homo sapien
tgggcatctcggatcgatgaatcat

SEQ ID NO: 2028593 - DNA, 25 bp, Homo sapien
agaattccaggatatagggatcttt

SEQ ID NO: 2028594 - DNA, 25 bp, Homo sapien
gaattccaggatatagggatctttt

SEQ ID NO: 2028595 - DNA, 25 bp, Homo sapien
attccaggatatagggatctttttt

SEQ ID NO: 2028596 - DNA, 25 bp, Homo sapien
tagaattccaggatatagggatctt

SEQ ID NO: 2028597 - DNA, 25 bp, Homo sapien
aaaatatggaatcaaaggcacttaa

SEQ ID NO: 2028598 - DNA, 25 bp, Homo sapien
tttccttaactcgactgctttgatt

SEQ ID NO: 2028599 - DNA, 25 bp, Homo sapien
cattccaagactctaaagaatttac

SEQ ID NO: 2028600 - DNA, 25 bp, Homo sapien
tatccgtaatatatttttcaggtcc

SEQ ID NO: 2028601 - DNA, 25 bp, Homo sapien
taaagcacggtcacactctataagc

SEQ ID NO: 2028602 - DNA, 25 bp, Homo sapien
cagaatgtagctccgtccttaaatg

SEQ ID NO: 2028603 - DNA, 25 bp, Homo sapien
tcgtgcctgagcaaacgttcaagaa

SEQ ID NO: 2028604 - DNA, 25 bp, Homo sapien
caattgtaatacatatcgagtgccc

SEQ ID NO: 2028605 - DNA, 25 bp, Homo sapien
caatcaatgtactgcactgctccac

SEQ ID NO: 2028606 - DNA, 25 bp, Homo sapien
tactctaggagacacaccatctgag

SEQ ID NO: 2028607 - DNA, 25 bp, Homo sapien
ggtacggacgtcagatctaaagtca

SEQ ID NO: 2028608 - DNA, 25 bp, Homo sapien
tctgagcctcggtgataatacaagc

SEQ ID NO: 2028609 - DNA, 25 bp, Homo sapien
gagatagctttctctccgcgcagca

SEQ ID NO: 2028610 - DNA, 25 bp, Homo sapien
gccttgatataactgccactccgca

SEQ ID NO: 2028611 - DNA, 25 bp, Homo sapien
tcttcggcatggaatttcatcatct

SEQ ID NO: 2028612 - DNA, 25 bp, Homo sapien
agaaggcttaggactcgtgtctgag

SEQ ID NO: 2028613 - DNA, 25 bp, Homo sapien
aaccagtggtctctaccagctgcat

SEQ ID NO: 2028614 - DNA, 25 bp, Homo sapien
taaaccagtggtctctaccagctgc

SEQ ID NO: 2028615 - DNA, 25 bp, Homo sapien
ttcctaaaccagtggtctctaccag

SEQ ID NO: 2028616 - DNA, 25 bp, Homo sapien
ctaaaccagtggtctctaccagctg

SEQ ID NO: 2028617 - DNA, 25 bp, Homo sapien
aatatcatagtgttttaaggtctgt

SEQ ID NO: 2028618 - DNA, 25 bp, Homo sapien
tgatccttacaactatcatgaagga

SEQ ID NO: 2028619 - DNA, 25 bp, Homo sapien
gtaactagtgtagggtgacactgcc

SEQ ID NO: 2028620 - DNA, 25 bp, Homo sapien
gaggtcaggagagattagtaactag

SEQ ID NO: 2028621 - DNA, 25 bp, Homo sapien
acaaatgcgacttggcttaaatgtc

SEQ ID NO: 2028622 - DNA, 25 bp, Homo sapien
gcatcttctttgcagctgggagaac

SEQ ID NO: 2028623 - DNA, 25 bp, Homo sapien
accttgacaaatgcgacttggctta

SEQ ID NO: 2028624 - DNA, 25 bp, Homo sapien
tcaccttgacaaatgcgacttggct

SEQ ID NO: 2028625 - DNA, 25 bp, Homo sapien
ttgaagcttgttcccataaatcccc

SEQ ID NO: 2028626 - DNA, 25 bp, Homo sapien
tcctactgggtttgaagcttgttcc

SEQ ID NO: 2028627 - DNA, 25 bp, Homo sapien
atatgtgtgtgaagtgcaaatgcca

SEQ ID NO: 2028628 - DNA, 25 bp, Homo sapien
tatgtgtgtgaagtgcaaatgccac

SEQ ID NO: 2028629 - DNA, 25 bp, Homo sapien
ctgtgtcttcagaataaacacagac

SEQ ID NO: 2028630 - DNA, 25 bp, Homo sapien
tagtcgtgtagaagaatatttctta

SEQ ID NO: 2028631 - DNA, 25 bp, Homo sapien
cctctgtgtcttcagaataaacaca

SEQ ID NO: 2028632 - DNA, 25 bp, Homo sapien
tgtacttctgtactgattgtagtcg

SEQ ID NO: 2028633 - DNA, 25 bp, Homo sapien
tcacatgtgcaaagttagggcaaga

SEQ ID NO: 2028634 - DNA, 25 bp, Homo sapien
gagtccatcatctgggttatcacat

SEQ ID NO: 2028635 - DNA, 25 bp, Homo sapien
agtcagacaaaacaccagccagggt

SEQ ID NO: 2028636 - DNA, 25 bp, Homo sapien
ccctgtgtagccaagagtcagacaa

SEQ ID NO: 2028637 - DNA, 25 bp, Homo sapien
gaggaacacatctccgtgcacgaag

SEQ ID NO: 2028638 - DNA, 25 bp, Homo sapien
gattttcctctaccaagggcaggga

SEQ ID NO: 2028639 - DNA, 25 bp, Homo sapien
caaacagggatcatggaggaacaca

SEQ ID NO: 2028640 - DNA, 25 bp, Homo sapien
gaagaaacctcgcaatggttgtggg

SEQ ID NO: 2028641 - DNA, 25 bp, Homo sapien
tgggtatatgccatcactatgcaac

SEQ ID NO: 2028642 - DNA, 25 bp, Homo sapien
catttatcgggtaatatgaaagagg

SEQ ID NO: 2028643 - DNA, 25 bp, Homo sapien
gaaaagtgcatttatcgggtaatat

SEQ ID NO: 2028644 - DNA, 25 bp, Homo sapien
gtgagggcatgggtatatgccatca

SEQ ID NO: 2028645 - DNA, 25 bp, Homo sapien
gaattgcacttttcgaccctcctag

SEQ ID NO: 2028646 - DNA, 25 bp, Homo sapien
caggtggatgagatttgtccactga

SEQ ID NO: 2028647 - DNA, 25 bp, Homo sapien
gctcctgctctgaggtagccgctga

SEQ ID NO: 2028648 - DNA, 25 bp, Homo sapien
taggatgtgacttgaatacctggct

SEQ ID NO: 2028649 - DNA, 25 bp, Homo sapien
tgccaaacagaatgtctttatggaa

SEQ ID NO: 2028650 - DNA, 25 bp, Homo sapien
cgattctaagtggttgagtgaggca

SEQ ID NO: 2028651 - DNA, 25 bp, Homo sapien
tcatctcagctttgatttggtatag

SEQ ID NO: 2028652 - DNA, 25 bp, Homo sapien
ttagcttctctctatgatttgccga

SEQ ID NO: 2028653 - DNA, 25 bp, Homo sapien
cacaactcaagatttgcaactttac

SEQ ID NO: 2028654 - DNA, 25 bp, Homo sapien
tagggggtaacgtatattctgtcaa

SEQ ID NO: 2028655 - DNA, 25 bp, Homo sapien
tgatcactttgcagcccatataggg

SEQ ID NO: 2028656 - DNA, 25 bp, Homo sapien
ttcattatctcagtaaattctgggc

SEQ ID NO: 2028657 - DNA, 25 bp, Homo sapien
aattctgggctattgatcactttgc

SEQ ID NO: 2028658 - DNA, 25 bp, Homo sapien
ctgtgccggtgttttatcatggcta

SEQ ID NO: 2028659 - DNA, 25 bp, Homo sapien
tgtgccggtgttttatcatggctaa

SEQ ID NO: 2028660 - DNA, 25 bp, Homo sapien
gtgccggtgttttatcatggctaat

SEQ ID NO: 2028661 - DNA, 25 bp, Homo sapien
gccggtgttttatcatggctaattt

SEQ ID NO: 2028662 - DNA, 25 bp, Homo sapien
ctggaagcatttaggtctctgaggg

SEQ ID NO: 2028663 - DNA, 25 bp, Homo sapien
tgctactgctatccacagcgtccat

SEQ ID NO: 2028664 - DNA, 25 bp, Homo sapien
tctctgggtgcacagtgttgctact

SEQ ID NO: 2028665 - DNA, 25 bp, Homo sapien
tggaagcatttaggtctctgagggt

SEQ ID NO: 2028666 - DNA, 25 bp, Homo sapien
ccttgagttacagataagcctttga

SEQ ID NO: 2028667 - DNA, 25 bp, Homo sapien
aaatgaactgacaccccttgagtta

SEQ ID NO: 2028668 - DNA, 25 bp, Homo sapien
agagtgtaaactgcaggtcctggga

SEQ ID NO: 2028669 - DNA, 25 bp, Homo sapien
gatgctagccagatggacgtccaca

SEQ ID NO: 2028670 - DNA, 25 bp, Homo sapien
caaaaatggcaagcctatttggtca

SEQ ID NO: 2028671 - DNA, 25 bp, Homo sapien
gcgaggtagaatttagactgcccaa

SEQ ID NO: 2028672 - DNA, 25 bp, Homo sapien
taaatgtattaaacccttcctgtga

SEQ ID NO: 2028673 - DNA, 25 bp, Homo sapien
cattggagaagcaggcgaggtagaa

SEQ ID NO: 2028674 - DNA, 25 bp, Homo sapien
cctggcttagcgactttgggcacga

SEQ ID NO: 2028675 - DNA, 25 bp, Homo sapien
cacgagcaaagaagagtgatggcca

SEQ ID NO: 2028676 - DNA, 25 bp, Homo sapien
tgatggccaaggacatttggtcatc

SEQ ID NO: 2028677 - DNA, 25 bp, Homo sapien
tatcaatggtggaaaagcaccacgg

SEQ ID NO: 2028678 - DNA, 25 bp, Homo sapien
caaaagtttaacaccatcctaggca

SEQ ID NO: 2028679 - DNA, 25 bp, Homo sapien
tctggcacggtgacctgagtctgta

SEQ ID NO: 2028680 - DNA, 25 bp, Homo sapien
tacactaaagcttgaagaagccaga

SEQ ID NO: 2028681 - DNA, 25 bp, Homo sapien
caaaagattaatccaggctggtgca

SEQ ID NO: 2028682 - DNA, 25 bp, Homo sapien
ttgctgcagttgctcccatttaata

SEQ ID NO: 2028683 - DNA, 25 bp, Homo sapien
taatatatttggtcccatggtccca

SEQ ID NO: 2028684 - DNA, 25 bp, Homo sapien
gcttttagcgtatgtatcctgcaca

SEQ ID NO: 2028685 - DNA, 25 bp, Homo sapien
cgtaattcctacctgtcacaccata

SEQ ID NO: 2028686 - DNA, 25 bp, Homo sapien
gtaacagctatgttaatttttatcc

SEQ ID NO: 2028687 - DNA, 25 bp, Homo sapien
agaagtaagatgagggatgctgatt

SEQ ID NO: 2028688 - DNA, 25 bp, Homo sapien
taacagctatgttaatttttatcct

SEQ ID NO: 2028689 - DNA, 25 bp, Homo sapien
aacagctatgttaatttttatcctg

SEQ ID NO: 2028690 - DNA, 25 bp, Homo sapien
cctaaaatttcatctctgggagtgc

SEQ ID NO: 2028691 - DNA, 25 bp, Homo sapien
gccttaaaaaggtcgatcattttgc

SEQ ID NO: 2028692 - DNA, 25 bp, Homo sapien
tgcacacaaactgaagaaacccact

SEQ ID NO: 2028693 - DNA, 25 bp, Homo sapien
tgctttccttctcggtctgtcttgc

SEQ ID NO: 2028694 - DNA, 25 bp, Homo sapien
taagcctccatcattgacagaaatg

SEQ ID NO: 2028695 - DNA, 25 bp, Homo sapien
aagcctccatcattgacagaaatgg

SEQ ID NO: 2028696 - DNA, 25 bp, Homo sapien
gcctccatcattgacagaaatggta

SEQ ID NO: 2028697 - DNA, 25 bp, Homo sapien
ctaagcctccatcattgacagaaat

SEQ ID NO: 2028698 - DNA, 25 bp, Homo sapien
tgagcgtggaggaccaggcgctctt

SEQ ID NO: 2028699 - DNA, 25 bp, Homo sapien
tggcctggtccatgttcaccgaggc

SEQ ID NO: 2028700 - DNA, 25 bp, Homo sapien
gctgacacgactcggacttcaccat

SEQ ID NO: 2028701 - DNA, 25 bp, Homo sapien
tgcaggtactggcaggagcgttctt

SEQ ID NO: 2028702 - DNA, 25 bp, Homo sapien
ttcagcagcggggtgtccaggctga

SEQ ID NO: 2028703 - DNA, 25 bp, Homo sapien
cttcagcagcggggtgtccaggctg

SEQ ID NO: 2028704 - DNA, 25 bp, Homo sapien
tcagcagcggggtgtccaggctgac

SEQ ID NO: 2028705 - DNA, 25 bp, Homo sapien
tgaagagcttctggaccgagtgcac

SEQ ID NO: 2028706 - DNA, 25 bp, Homo sapien
acgtcgttgttgctccgggaggcct

SEQ ID NO: 2028707 - DNA, 25 bp, Homo sapien
tcttgctgcgaggtgtagtgcctgc

SEQ ID NO: 2028708 - DNA, 25 bp, Homo sapien
actgcagggtgtgatagccatcgcg

SEQ ID NO: 2028709 - DNA, 25 bp, Homo sapien
gctccagacccgtcttgggcaggga

SEQ ID NO: 2028710 - DNA, 25 bp, Homo sapien
caggctccagacccgtcttgggcag

SEQ ID NO: 2028711 - DNA, 25 bp, Homo sapien
aggctccagacccgtcttgggcagg

SEQ ID NO: 2028712 - DNA, 25 bp, Homo sapien
ctccagacccgtcttgggcagggat

SEQ ID NO: 2028713 - DNA, 25 bp, Homo sapien
gcaaattcccggtgtccactcttgg

SEQ ID NO: 2028714 - DNA, 25 bp, Homo sapien
tgtggacaatatacatcaaggactg

SEQ ID NO: 2028715 - DNA, 25 bp, Homo sapien
gatgggactggtgccatggcaaatt

SEQ ID NO: 2028716 - DNA, 25 bp, Homo sapien
gactgatgctactgtccttctgtct

SEQ ID NO: 2028717 - DNA, 25 bp, Homo sapien
ccagtttagcatatgtgttgctgaa

SEQ ID NO: 2028718 - DNA, 25 bp, Homo sapien
tcccagtttagcatatgtgttgctg

SEQ ID NO: 2028719 - DNA, 25 bp, Homo sapien
attcccagtttagcatatgtgttgc

SEQ ID NO: 2028720 - DNA, 25 bp, Homo sapien
cccagtttagcatatgtgttgctga

SEQ ID NO: 2028721 - DNA, 25 bp, Homo sapien
ctaaagcctgctttgctgtttcatc

SEQ ID NO: 2028722 - DNA, 25 bp, Homo sapien
ctttgctgtttcatccgcagcacac

SEQ ID NO: 2028723 - DNA, 25 bp, Homo sapien
cctgctttgctgtttcatccgcagc

SEQ ID NO: 2028724 - DNA, 25 bp, Homo sapien
tgctttgctgtttcatccgcagcac

SEQ ID NO: 2028725 - DNA, 25 bp, Homo sapien
tgttgaaaagtccacgccaaattct

SEQ ID NO: 2028726 - DNA, 25 bp, Homo sapien
tacaatggcaacgattgaagaaact

SEQ ID NO: 2028727 - DNA, 25 bp, Homo sapien
tagaggctcctgaactacaatggca

SEQ ID NO: 2028728 - DNA, 25 bp, Homo sapien
ttcttcaacctcctccacagttaga

SEQ ID NO: 2028729 - DNA, 25 bp, Homo sapien
tctgatattggcaacacagcgtgtc

SEQ ID NO: 2028730 - DNA, 25 bp, Homo sapien
gacattgttgtttctcatcagctcc

SEQ ID NO: 2028731 - DNA, 25 bp, Homo sapien
tgtctgtatttctgggcaccaggtc

SEQ ID NO: 2028732 - DNA, 25 bp, Homo sapien
gtctgccctgataccgacattgttg

SEQ ID NO: 2028733 - DNA, 25 bp, Homo sapien
tacgactttgaggatggtgcttacg

SEQ ID NO: 2028734 - DNA, 25 bp, Homo sapien
gatggtgcttacgtcctccacttaa

SEQ ID NO: 2028735 - DNA, 25 bp, Homo sapien
tgaggatggtgcttacgtcctccac

SEQ ID NO: 2028736 - DNA, 25 bp, Homo sapien
ttacgtcctccacttaagcaatgcc

SEQ ID NO: 2028737 - DNA, 25 bp, Homo sapien
cgctccaccaagctctcagagaata

SEQ ID NO: 2028738 - DNA, 25 bp, Homo sapien
tttgcaacattcatttgtgggcttg

SEQ ID NO: 2028739 - DNA, 25 bp, Homo sapien
gggcttgtctttccgctccaccaag

SEQ ID NO: 2028740 - DNA, 25 bp, Homo sapien
gctctcagagaataaagtgaagtgc

SEQ ID NO: 2028741 - DNA, 25 bp, Homo sapien
caggaactctcacaccaataagcta

SEQ ID NO: 2028742 - DNA, 25 bp, Homo sapien
agcttttctagacgtttcctcaaat

SEQ ID NO: 2028743 - DNA, 25 bp, Homo sapien
taatccactcaccagcttaagggac

SEQ ID NO: 2028744 - DNA, 25 bp, Homo sapien
tcctcaaatctatttatgttagtgt

SEQ ID NO: 2028745 - DNA, 25 bp, Homo sapien
catggaggacacaggtacacccact

SEQ ID NO: 2028746 - DNA, 25 bp, Homo sapien
gcatggaggacacaggtacacccac

SEQ ID NO: 2028747 - DNA, 25 bp, Homo sapien
taaacatgcaggaagaggcatgtgg

SEQ ID NO: 2028748 - DNA, 25 bp, Homo sapien
acatgcaggaagaggcatgtgggtg

SEQ ID NO: 2028749 - DNA, 25 bp, Homo sapien
ttaatatccccaaggacatccataa

SEQ ID NO: 2028750 - DNA, 25 bp, Homo sapien
aatatccccaaggacatccataagg

SEQ ID NO: 2028751 - DNA, 25 bp, Homo sapien
ccataaggcttccctctcaacatct

SEQ ID NO: 2028752 - DNA, 25 bp, Homo sapien
ataaggcttccctctcaacatctga

SEQ ID NO: 2028753 - DNA, 25 bp, Homo sapien
gacagggacgctgcttcagagacac

SEQ ID NO: 2028754 - DNA, 25 bp, Homo sapien
tatattcaactgctggaaccttgtc

SEQ ID NO: 2028755 - DNA, 25 bp, Homo sapien
ccttgtctggtgctgaatagcccaa

SEQ ID NO: 2028756 - DNA, 25 bp, Homo sapien
gaacagagcagcatatggacggctt

SEQ ID NO: 2028757 - DNA, 25 bp, Homo sapien
taaaattatagtggagcatcttcag

SEQ ID NO: 2028758 - DNA, 25 bp, Homo sapien
aaattatagtggagcatcttcaggt

SEQ ID NO: 2028759 - DNA, 25 bp, Homo sapien
aaaattatagtggagcatcttcagg

SEQ ID NO: 2028760 - DNA, 25 bp, Homo sapien
aattatagtggagcatcttcaggtt

SEQ ID NO: 2028761 - DNA, 25 bp, Homo sapien
ggaagttcaaaatacatcatccatg

SEQ ID NO: 2028762 - DNA, 25 bp, Homo sapien
tataaaagtcagtttttgttgcatt

SEQ ID NO: 2028763 - DNA, 25 bp, Homo sapien
tctaataacagatttgtgggatttt

SEQ ID NO: 2028764 - DNA, 25 bp, Homo sapien
ccatgagtaaagtgacccagtagca

SEQ ID NO: 2028765 - DNA, 25 bp, Homo sapien
caggaagacggtaagctcccggcat

SEQ ID NO: 2028766 - DNA, 25 bp, Homo sapien
ccaggaagacggtaagctcccggca

SEQ ID NO: 2028767 - DNA, 25 bp, Homo sapien
accattttctctactgcctacccct

SEQ ID NO: 2028768 - DNA, 25 bp, Homo sapien
cattttctctactgcctaccccttc

SEQ ID NO: 2028769 - DNA, 25 bp, Homo sapien
tatttagttccctggcatcaatctc

SEQ ID NO: 2028770 - DNA, 25 bp, Homo sapien
tctggttatttagttccctggcatc

SEQ ID NO: 2028771 - DNA, 25 bp, Homo sapien
tccattcggttctctatttcacatg

SEQ ID NO: 2028772 - DNA, 25 bp, Homo sapien
tttctttgtgctctccattcggttc

SEQ ID NO: 2028773 - DNA, 25 bp, Homo sapien
tgaggccccataagactgacagata

SEQ ID NO: 2028774 - DNA, 25 bp, Homo sapien
catccctgggtaagaattactgctg

SEQ ID NO: 2028775 - DNA, 25 bp, Homo sapien
tgtacttctatcttgggcctttgag

SEQ ID NO: 2028776 - DNA, 25 bp, Homo sapien
gataccgcttctaggaaccatgctc

SEQ ID NO: 2028777 - DNA, 25 bp, Homo sapien
ggatggctacatgccaccttcttga

SEQ ID NO: 2028778 - DNA, 25 bp, Homo sapien
acggatggctacatgccaccttctt

SEQ ID NO: 2028779 - DNA, 25 bp, Homo sapien
atggctacatgccaccttcttgatg

SEQ ID NO: 2028780 - DNA, 25 bp, Homo sapien
tggctacatgccaccttcttgatgt

SEQ ID NO: 2028781 - DNA, 25 bp, Homo sapien
aaatggccggagagattccatggct

SEQ ID NO: 2028782 - DNA, 25 bp, Homo sapien
ctagtaagatgggaaaaaatggccg

SEQ ID NO: 2028783 - DNA, 25 bp, Homo sapien
gataaagttgttccatctgaggcct

SEQ ID NO: 2028784 - DNA, 25 bp, Homo sapien
cttgtgcttggagctctttatcatc

SEQ ID NO: 2028785 - DNA, 25 bp, Homo sapien
tacctgaaacgtctacactctcttt

SEQ ID NO: 2028786 - DNA, 25 bp, Homo sapien
ttgtttacctgaaacgtctacactc

SEQ ID NO: 2028787 - DNA, 25 bp, Homo sapien
aacgtctacactctcttttgcacag

SEQ ID NO: 2028788 - DNA, 25 bp, Homo sapien
gaaacgtctacactctcttttgcac

SEQ ID NO: 2028789 - DNA, 25 bp, Homo sapien
tggtgtcacggctgaccttgtatta

SEQ ID NO: 2028790 - DNA, 25 bp, Homo sapien
ccttgtattagtgaatcctggtaca

SEQ ID NO: 2028791 - DNA, 25 bp, Homo sapien
ttggttctgacaaatgagacctggg

SEQ ID NO: 2028792 - DNA, 25 bp, Homo sapien
ggtacatgggaaatgaacttcttct

SEQ ID NO: 2028793 - DNA, 25 bp, Homo sapien
gagacacgaggctggcttgttctct

SEQ ID NO: 2028794 - DNA, 25 bp, Homo sapien
gggcatcacccagaactacgagtcg

SEQ ID NO: 2028795 - DNA, 25 bp, Homo sapien
ccctgaggagttcactgagcaagga

SEQ ID NO: 2028796 - DNA, 25 bp, Homo sapien
actaacctcagacacagagagggaa

SEQ ID NO: 2028797 - DNA, 25 bp, Homo sapien
taagctaagctgtactaaggataac

SEQ ID NO: 2028798 - DNA, 25 bp, Homo sapien
cacagggcaataggtttagaaaatc

SEQ ID NO: 2028799 - DNA, 25 bp, Homo sapien
tccagttgagtaagggaggatcctg

SEQ ID NO: 2028800 - DNA, 25 bp, Homo sapien
tagctttggtcatttaacggtgtcc

SEQ ID NO: 2028801 - DNA, 25 bp, Homo sapien
agctgctgcctttggaggccatgtg

SEQ ID NO: 2028802 - DNA, 25 bp, Homo sapien
ggccatgtggaccataaggtctact

SEQ ID NO: 2028803 - DNA, 25 bp, Homo sapien
ctagctgctgcctttggaggccatg

SEQ ID NO: 2028804 - DNA, 25 bp, Homo sapien
ccatgtggaccataaggtctactac

SEQ ID NO: 2028805 - DNA, 25 bp, Homo sapien
gttgagggcaatgcccaccccagct

SEQ ID NO: 2028806 - DNA, 25 bp, Homo sapien
aatgcccaccccagctttgaaggtg

SEQ ID NO: 2028807 - DNA, 25 bp, Homo sapien
gagggcaatgcccaccccagctttg

SEQ ID NO: 2028808 - DNA, 25 bp, Homo sapien
gggcaatgcccaccccagctttgaa

SEQ ID NO: 2028809 - DNA, 25 bp, Homo sapien
caggatgccctcaagggtcccctct

SEQ ID NO: 2028810 - DNA, 25 bp, Homo sapien
ggatgccctcaagggtcccctctga

SEQ ID NO: 2028811 - DNA, 25 bp, Homo sapien
cccaggatgccctcaagggtcccct

SEQ ID NO: 2028812 - DNA, 25 bp, Homo sapien
gcccaggatgccctcaagggtcccc

SEQ ID NO: 2028813 - DNA, 25 bp, Homo sapien
ctggcaggtcaggtccatgaccaac

SEQ ID NO: 2028814 - DNA, 25 bp, Homo sapien
agccccgtggctgtcatgccagttt

SEQ ID NO: 2028815 - DNA, 25 bp, Homo sapien
gctgtcatgccagtttcttggaggg

SEQ ID NO: 2028816 - DNA, 25 bp, Homo sapien
gtaatggcgtggaccatggccatga

SEQ ID NO: 2028817 - DNA, 25 bp, Homo sapien
gcagtaatggcgtggaccatggcca

SEQ ID NO: 2028818 - DNA, 25 bp, Homo sapien
cagaggtgatgacccttttggtacc

SEQ ID NO: 2028819 - DNA, 25 bp, Homo sapien
cttcccattctcagtcttgacagtg

SEQ ID NO: 2028820 - DNA, 25 bp, Homo sapien
gcttcccattctcagtcttgacagt

SEQ ID NO: 2028821 - DNA, 25 bp, Homo sapien
agcttcccattctcagtcttgacag

SEQ ID NO: 2028822 - DNA, 25 bp, Homo sapien
aagcttcccattctcagtcttgaca

SEQ ID NO: 2028823 - DNA, 25 bp, Homo sapien
acgggtaaccgatggtgacaatatc

SEQ ID NO: 2028824 - DNA, 25 bp, Homo sapien
tgaaaagcagttccggtgaccaggt

SEQ ID NO: 2028825 - DNA, 25 bp, Homo sapien
aggtgcccaacacgaccaagttcgt

SEQ ID NO: 2028826 - DNA, 25 bp, Homo sapien
ttgaggtcaatgaacgggtaaccga

SEQ ID NO: 2028827 - DNA, 25 bp, Homo sapien
gctgaacctccaaggatctgtggct

SEQ ID NO: 2028828 - DNA, 25 bp, Homo sapien
taggcaagttcttagacaacacccc

SEQ ID NO: 2028829 - DNA, 25 bp, Homo sapien
gctccccgggaacatgaaactgcaa

SEQ ID NO: 2028830 - DNA, 25 bp, Homo sapien
ggcttgccagctcacactagttgtt

SEQ ID NO: 2028831 - DNA, 25 bp, Homo sapien
gaaggacgggcttactgttcagtag

SEQ ID NO: 2028832 - DNA, 25 bp, Homo sapien
tgtgctctataaataccccagtatg

SEQ ID NO: 2028833 - DNA, 25 bp, Homo sapien
tgtagcggaaagtcatcctagcgca

SEQ ID NO: 2028834 - DNA, 25 bp, Homo sapien
gatgcattgataaacctgaaggacg

SEQ ID NO: 2028835 - DNA, 25 bp, Homo sapien
tgcaggtggatagtctgcgtcaaga

SEQ ID NO: 2028836 - DNA, 25 bp, Homo sapien
gcccgtttcttatgcaggtggatag

SEQ ID NO: 2028837 - DNA, 25 bp, Homo sapien
tttccttctgtcaccatcgcccgtt

SEQ ID NO: 2028838 - DNA, 25 bp, Homo sapien
tcaccatcgcccgtttcttatgcag

SEQ ID NO: 2028839 - DNA, 25 bp, Homo sapien
tcttccaaatatgtgggattccaag

SEQ ID NO: 2028840 - DNA, 25 bp, Homo sapien
tacaattagtggcattcagctatca

SEQ ID NO: 2028841 - DNA, 25 bp, Homo sapien
gcaaccactcgcatctttttaaaat

SEQ ID NO: 2028842 - DNA, 25 bp, Homo sapien
ccatgagttccttcttttggaagcc

SEQ ID NO: 2028843 - DNA, 25 bp, Homo sapien
ttgtcctgagctccccggatactgg

SEQ ID NO: 2028844 - DNA, 25 bp, Homo sapien
tgacatttagctgttacccatctgg

SEQ ID NO: 2028845 - DNA, 25 bp, Homo sapien
ttttttctagcctgcggaggacatc

SEQ ID NO: 2028846 - DNA, 25 bp, Homo sapien
aggacatcttcaaacgcccagggct

SEQ ID NO: 2028847 - DNA, 25 bp, Homo sapien
cataggctataagtgaaaaatgtac

SEQ ID NO: 2028848 - DNA, 25 bp, Homo sapien
gaaattctacttgcagctttaggac

SEQ ID NO: 2028849 - DNA, 25 bp, Homo sapien
gataaattactttagccaatgcaaa

SEQ ID NO: 2028850 - DNA, 25 bp, Homo sapien
tcctctatctgaataaactgagaga

SEQ ID NO: 2028851 - DNA, 25 bp, Homo sapien
tgcatccatgccttcgagaaacctt

SEQ ID NO: 2028852 - DNA, 25 bp, Homo sapien
taaatcattagcaggagtggttgca

SEQ ID NO: 2028853 - DNA, 25 bp, Homo sapien
tctgtctccgtagagaaagatgcca

SEQ ID NO: 2028854 - DNA, 25 bp, Homo sapien
taggctcggttaaacagtttggtca

SEQ ID NO: 2028855 - DNA, 25 bp, Homo sapien
accctctagtggcattcagtggatc

SEQ ID NO: 2028856 - DNA, 25 bp, Homo sapien
tcaggaattctctcgagcagaccct

SEQ ID NO: 2028857 - DNA, 25 bp, Homo sapien
gttcttagcgccgttgtcattcaat

SEQ ID NO: 2028858 - DNA, 25 bp, Homo sapien
agcgccgttgtcattcaatcaggaa

SEQ ID NO: 2028859 - DNA, 25 bp, Homo sapien
tatgggagactagcaaagcccctgc

SEQ ID NO: 2028860 - DNA, 25 bp, Homo sapien
cactctaagagtgctccagctgttg

SEQ ID NO: 2028861 - DNA, 25 bp, Homo sapien
taatcatagttatcgcaagcagcct

SEQ ID NO: 2028862 - DNA, 25 bp, Homo sapien
tgtccctgggaaaattagtgcctct

SEQ ID NO: 2028863 - DNA, 25 bp, Homo sapien
catctagttcaacaacacgcttttc

SEQ ID NO: 2028864 - DNA, 25 bp, Homo sapien
taggagatggaagaccactgaagtc

SEQ ID NO: 2028865 - DNA, 25 bp, Homo sapien
gaattccatggctgtaggtgtcatc

SEQ ID NO: 2028866 - DNA, 25 bp, Homo sapien
tttcaaataggagatggaagaccac

SEQ ID NO: 2028867 - DNA, 25 bp, Homo sapien
tcccatcctcgtaggatccccactt

SEQ ID NO: 2028868 - DNA, 25 bp, Homo sapien
catcctcgtaggatccccactttcc

SEQ ID NO: 2028869 - DNA, 25 bp, Homo sapien
gaaccctgatctcccatcctcgtag

SEQ ID NO: 2028870 - DNA, 25 bp, Homo sapien
tgatctcccatcctcgtaggatccc

SEQ ID NO: 2028871 - DNA, 25 bp, Homo sapien
gagctgtggtgttcgagagccagat

SEQ ID NO: 2028872 - DNA, 25 bp, Homo sapien
gggagctgtggtgttcgagagccag

SEQ ID NO: 2028873 - DNA, 25 bp, Homo sapien
gtgttcgagagccagatggttgact

SEQ ID NO: 2028874 - DNA, 25 bp, Homo sapien
ttcgagagccagatggttgactcat

SEQ ID NO: 2028875 - DNA, 25 bp, Homo sapien
tttgtagcctttgtgcctagcactg

SEQ ID NO: 2028876 - DNA, 25 bp, Homo sapien
tgccttcttgtgtacagacatgagg

SEQ ID NO: 2028877 - DNA, 25 bp, Homo sapien
actttgtaggtgaaccctgtctcac

SEQ ID NO: 2028878 - DNA, 25 bp, Homo sapien
ctagcactgtggtgggcccatgaaa

SEQ ID NO: 2028879 - DNA, 25 bp, Homo sapien
ctgccatgtgatcagaggcaaaaac

SEQ ID NO: 2028880 - DNA, 25 bp, Homo sapien
gatagtccttctataatcaatttgc

SEQ ID NO: 2028881 - DNA, 25 bp, Homo sapien
aatttgctcactctaataactctag

SEQ ID NO: 2028882 - DNA, 25 bp, Homo sapien
gcaaaaacatgactgccatatccat

SEQ ID NO: 2028883 - DNA, 25 bp, Homo sapien
caccctgacagaagtggccttacaa

SEQ ID NO: 2028884 - DNA, 25 bp, Homo sapien
ggaaaatttgggactcagagcctat

SEQ ID NO: 2028885 - DNA, 25 bp, Homo sapien
gaaacagctattggttggccaccct

SEQ ID NO: 2028886 - DNA, 25 bp, Homo sapien
taatgagaggcgataaatggctagc

SEQ ID NO: 2028887 - DNA, 25 bp, Homo sapien
tcaaacactttaatacgatagctag

SEQ ID NO: 2028888 - DNA, 25 bp, Homo sapien
ctatcttgtgctggtgagtaacagc

SEQ ID NO: 2028889 - DNA, 25 bp, Homo sapien
cgatagctagttctattcttctgag

SEQ ID NO: 2028890 - DNA, 25 bp, Homo sapien
tgagttgtgactgggtcaacctttc

SEQ ID NO: 2028891 - DNA, 25 bp, Homo sapien
cataaatttaaggatagcccagcat

SEQ ID NO: 2028892 - DNA, 25 bp, Homo sapien
taagctgctggcctcattaggcata

SEQ ID NO: 2028893 - DNA, 25 bp, Homo sapien
accattatcattggcagaagacacc

SEQ ID NO: 2028894 - DNA, 25 bp, Homo sapien
gagcacggacttcccacataaattt

SEQ ID NO: 2028895 - DNA, 25 bp, Homo sapien
aagaagctcaacatccctgttcatt

SEQ ID NO: 2028896 - DNA, 25 bp, Homo sapien
agaagctcaacatccctgttcatta

SEQ ID NO: 2028897 - DNA, 25 bp, Homo sapien
gaagctcaacatccctgttcattag

SEQ ID NO: 2028898 - DNA, 25 bp, Homo sapien
gaactatagcttcctgcaatgtgga

SEQ ID NO: 2028899 - DNA, 25 bp, Homo sapien
gcttcctgcaatgtggatgtagtca

SEQ ID NO: 2028900 - DNA, 25 bp, Homo sapien
ggtactgagaactatagcttcctgc

SEQ ID NO: 2028901 - DNA, 25 bp, Homo sapien
gcaatgtggatgtagtcatcctcca

SEQ ID NO: 2028902 - DNA, 25 bp, Homo sapien
tatattatcagtaacgccattgcac

SEQ ID NO: 2028903 - DNA, 25 bp, Homo sapien
agtcagggccttgctttggtttagg

SEQ ID NO: 2028904 - DNA, 25 bp, Homo sapien
gatatgcttccatccaagcttgttg

SEQ ID NO: 2028905 - DNA, 25 bp, Homo sapien
gcagatttagcctacctcttaaagg

SEQ ID NO: 2028906 - DNA, 25 bp, Homo sapien
tctacaagttaaggagagagggctc

SEQ ID NO: 2028907 - DNA, 25 bp, Homo sapien
ttctccgggtcagcataaaatcact

SEQ ID NO: 2028908 - DNA, 25 bp, Homo sapien
gactattgctaggtacagccttgca

SEQ ID NO: 2028909 - DNA, 25 bp, Homo sapien
tatgagtgggccctaatggaatacc

SEQ ID NO: 2028910 - DNA, 25 bp, Homo sapien
taatccgcagcatgacagaaagcca

SEQ ID NO: 2028911 - DNA, 25 bp, Homo sapien
cgtcactgactggtggaaaggctga

SEQ ID NO: 2028912 - DNA, 25 bp, Homo sapien
ggtttcgcctgacaagagaacagat

SEQ ID NO: 2028913 - DNA, 25 bp, Homo sapien
gctagggaggtctataggtttcgcc

SEQ ID NO: 2028914 - DNA, 25 bp, Homo sapien
tccgtttgtctgttgatggacaatt

SEQ ID NO: 2028915 - DNA, 25 bp, Homo sapien
tgagaacatgcgacataccacattt

SEQ ID NO: 2028916 - DNA, 25 bp, Homo sapien
caattaggtagattccaaatcttgg

SEQ ID NO: 2028917 - DNA, 25 bp, Homo sapien
aaaaacttgagagtgcagacaactc

SEQ ID NO: 2028918 - DNA, 25 bp, Homo sapien
tctgggtatctgatgttcaactgct

SEQ ID NO: 2028919 - DNA, 25 bp, Homo sapien
gcttccgagtcaggaaaagatccaa

SEQ ID NO: 2028920 - DNA, 25 bp, Homo sapien
attttccttgcttccgagtcaggaa

SEQ ID NO: 2028921 - DNA, 25 bp, Homo sapien
gtcactctgggtatctgatgttcaa

SEQ ID NO: 2028922 - DNA, 25 bp, Homo sapien
ttgcctgctgagtccctttctttgg

SEQ ID NO: 2028923 - DNA, 25 bp, Homo sapien
tgggagttgcctgctgagtcccttt

SEQ ID NO: 2028924 - DNA, 25 bp, Homo sapien
tcctgcagttgtcaaaggggtcctc

SEQ ID NO: 2028925 - DNA, 25 bp, Homo sapien
ctacttgggagttgcctgctgagtc

SEQ ID NO: 2028926 - DNA, 25 bp, Homo sapien
ctttccccaggacagacaccagtgt

SEQ ID NO: 2028927 - DNA, 25 bp, Homo sapien
ccgaccaaccccacgtgtccatgtg

SEQ ID NO: 2028928 - DNA, 25 bp, Homo sapien
gcaatgaacataagttttccctgtt

SEQ ID NO: 2028929 - DNA, 25 bp, Homo sapien
tcaacccactacctaggtagtaagc

SEQ ID NO: 2028930 - DNA, 25 bp, Homo sapien
ttccgagcctgtgtatgccagttgg

SEQ ID NO: 2028931 - DNA, 25 bp, Homo sapien
aaaatgtaactctgttcccagacag

SEQ ID NO: 2028932 - DNA, 25 bp, Homo sapien
tatgccagttggcaatgctggttcc

SEQ ID NO: 2028933 - DNA, 25 bp, Homo sapien
aaatgtaactctgttcccagacagc

SEQ ID NO: 2028934 - DNA, 25 bp, Homo sapien
tcatagcaagcttgggacagtcatt

SEQ ID NO: 2028935 - DNA, 25 bp, Homo sapien
tacatcctggcattgtaatggcaga

SEQ ID NO: 2028936 - DNA, 25 bp, Homo sapien
caaagcgataatgtctcataggcag

SEQ ID NO: 2028937 - DNA, 25 bp, Homo sapien
caaatactgagtggttacctgtgcc

SEQ ID NO: 2028938 - DNA, 25 bp, Homo sapien
ttgcaggctacaccctaatgtggtc

SEQ ID NO: 2028939 - DNA, 25 bp, Homo sapien
ggtgcccgtcaggatccagcttgtt

SEQ ID NO: 2028940 - DNA, 25 bp, Homo sapien
tgcatagcactggtcaagctcttgg

SEQ ID NO: 2028941 - DNA, 25 bp, Homo sapien
cagtggcagattgtgcgaggctccc

SEQ ID NO: 2028942 - DNA, 25 bp, Homo sapien
cacccattgcaaggaaaattatgtg

SEQ ID NO: 2028943 - DNA, 25 bp, Homo sapien
cacagtatgctaggaacatgattcc

SEQ ID NO: 2028944 - DNA, 25 bp, Homo sapien
caacaaagcagagattaaaatgcaa

SEQ ID NO: 2028945 - DNA, 25 bp, Homo sapien
gtgtaaaggtagctccttcgcagga

SEQ ID NO: 2028946 - DNA, 25 bp, Homo sapien
aaagcacgcagtatttgggtttctg

SEQ ID NO: 2028947 - DNA, 25 bp, Homo sapien
caaattggtggctacatgtgcaggt

SEQ ID NO: 2028948 - DNA, 25 bp, Homo sapien
agaccacagggactactgtcgtcac

SEQ ID NO: 2028949 - DNA, 25 bp, Homo sapien
ctgtcgtcacctttatgcccatgag

SEQ ID NO: 2028950 - DNA, 25 bp, Homo sapien
aaacaagaaaggagagttgaggttg

SEQ ID NO: 2028951 - DNA, 25 bp, Homo sapien
aaatgactgagtctgggtttaaggc

SEQ ID NO: 2028952 - DNA, 25 bp, Homo sapien
gctttttcactccattttgctacca

SEQ ID NO: 2028953 - DNA, 25 bp, Homo sapien
gaggttgaagtttgcaaaaatgact

SEQ ID NO: 2028954 - DNA, 25 bp, Homo sapien
tcattcatctccatcaatttcctgc

SEQ ID NO: 2028955 - DNA, 25 bp, Homo sapien
aatttcctgcttgtttcacagaaag

SEQ ID NO: 2028956 - DNA, 25 bp, Homo sapien
cttcattcatctccatcaatttcct

SEQ ID NO: 2028957 - DNA, 25 bp, Homo sapien
tcctgcttgtttcacagaaagccat

SEQ ID NO: 2028958 - DNA, 25 bp, Homo sapien
gattttattcatagggtggcccatt

SEQ ID NO: 2028959 - DNA, 25 bp, Homo sapien
tcatcctggaattgtgctaggcaca

SEQ ID NO: 2028960 - DNA, 25 bp, Homo sapien
gcagagggtacacacgtaaatttct

SEQ ID NO: 2028961 - DNA, 25 bp, Homo sapien
tttacagtttgcagtggaaagccct

SEQ ID NO: 2028962 - DNA, 25 bp, Homo sapien
gggaatacacctgaagcaattttag

SEQ ID NO: 2028963 - DNA, 25 bp, Homo sapien
taaggattatactagggacatagac

SEQ ID NO: 2028964 - DNA, 25 bp, Homo sapien
ggtaaaacatcacatctctggcagt

SEQ ID NO: 2028965 - DNA, 25 bp, Homo sapien
tttctcctgccaaaagtgggagcag

SEQ ID NO: 2028966 - DNA, 25 bp, Homo sapien
gctctcgcagctgactgctccagtg

SEQ ID NO: 2028967 - DNA, 25 bp, Homo sapien
tcaaggacacaatcagctctcgcag

SEQ ID NO: 2028968 - DNA, 25 bp, Homo sapien
ggtgctagaaagtccgcccagaatt

SEQ ID NO: 2028969 - DNA, 25 bp, Homo sapien
ctccagtgggtgctagaaagtccgc

SEQ ID NO: 2028970 - DNA, 25 bp, Homo sapien
ggctaggtcacccaaagagtactca

SEQ ID NO: 2028971 - DNA, 25 bp, Homo sapien
gatgagggctaggtcacccaaagag

SEQ ID NO: 2028972 - DNA, 25 bp, Homo sapien
ccacgatgagggctaggtcacccaa

SEQ ID NO: 2028973 - DNA, 25 bp, Homo sapien
tgagggctaggtcacccaaagagta

SEQ ID NO: 2028974 - DNA, 25 bp, Homo sapien
agcagtcctcagtggccctcatcac

SEQ ID NO: 2028975 - DNA, 25 bp, Homo sapien
tatgagggctagagatgcactgaca

SEQ ID NO: 2028976 - DNA, 25 bp, Homo sapien
aaagtggccatggagcagtcctcag

SEQ ID NO: 2028977 - DNA, 25 bp, Homo sapien
ggctagagatgcactgacacaaagt

SEQ ID NO: 2028978 - DNA, 25 bp, Homo sapien
ggaggtggactgaccacggatgggc

SEQ ID NO: 2028979 - DNA, 25 bp, Homo sapien
gtggactgaccacggatgggcacag

SEQ ID NO: 2028980 - DNA, 25 bp, Homo sapien
ggactgaccacggatgggcacagtc

SEQ ID NO: 2028981 - DNA, 25 bp, Homo sapien
actgaccacggatgggcacagtctg

SEQ ID NO: 2028982 - DNA, 25 bp, Homo sapien
ccccttggcaagaagtattcttcat

SEQ ID NO: 2028983 - DNA, 25 bp, Homo sapien
ggaagatgcttaagacaaccacaca

SEQ ID NO: 2028984 - DNA, 25 bp, Homo sapien
gattctatatcaaaggttgttcccc

SEQ ID NO: 2028985 - DNA, 25 bp, Homo sapien
aaatctggactaacaacggtcacct

SEQ ID NO: 2028986 - DNA, 25 bp, Homo sapien
tatccgctatcatccagtgtaacga

SEQ ID NO: 2028987 - DNA, 25 bp, Homo sapien
taccattctcaagcttaaaaacgac

SEQ ID NO: 2028988 - DNA, 25 bp, Homo sapien
cacctggatgtctattaccattctc

SEQ ID NO: 2028989 - DNA, 25 bp, Homo sapien
cgagctagaaatatcgatggagagc

SEQ ID NO: 2028990 - DNA, 25 bp, Homo sapien
catgactgtagacaaagcgagctag

SEQ ID NO: 2028991 - DNA, 25 bp, Homo sapien
tgttagcacgtgtactcacagtaga

SEQ ID NO: 2028992 - DNA, 25 bp, Homo sapien
tgactctggcatagattctggctga

SEQ ID NO: 2028993 - DNA, 25 bp, Homo sapien
tggctgagacgaacagcagagtgac

SEQ ID NO: 2028994 - DNA, 25 bp, Homo sapien
cagagcacgtgtgaacagcactgtc

SEQ ID NO: 2028995 - DNA, 25 bp, Homo sapien
tcttcatgggataaatcatcctcat

SEQ ID NO: 2028996 - DNA, 25 bp, Homo sapien
ctttgacccgctggttatttaagag

SEQ ID NO: 2028997 - DNA, 25 bp, Homo sapien
aagagtgtgtcatataatttccaca

SEQ ID NO: 2028998 - DNA, 25 bp, Homo sapien
tccataagtcttactatgcttcctt

SEQ ID NO: 2028999 - DNA, 25 bp, Homo sapien
tccctctaagtaacactttatctgc

SEQ ID NO: 2029000 - DNA, 25 bp, Homo sapien
ccctcagggcacaagcagtgaaaag

SEQ ID NO: 2029001 - DNA, 25 bp, Homo sapien
cacaggattaaaagcgtcagagggt

SEQ ID NO: 2029002 - DNA, 25 bp, Homo sapien
gtacagcagccgtttagcacaggat

SEQ ID NO: 2029003 - DNA, 25 bp, Homo sapien
gactcatttcaagcacggaggatga

SEQ ID NO: 2029004 - DNA, 25 bp, Homo sapien
ccaagcagctctcctatgcctggaa

SEQ ID NO: 2029005 - DNA, 25 bp, Homo sapien
gcatcatctggagttatttttcggg

SEQ ID NO: 2029006 - DNA, 25 bp, Homo sapien
tggcacttgaacctgaccggtactt

SEQ ID NO: 2029007 - DNA, 25 bp, Homo sapien
gacagagcgggtggcatctgaccaa

SEQ ID NO: 2029008 - DNA, 25 bp, Homo sapien
tagaggccactaaaacaattgttga

SEQ ID NO: 2029009 - DNA, 25 bp, Homo sapien
tataggcacctctgttcatgagggc

SEQ ID NO: 2029010 - DNA, 25 bp, Homo sapien
tcattagcaaagttgggagaccagg

SEQ ID NO: 2029011 - DNA, 25 bp, Homo sapien
ggaactttccctgttgactgctggg

SEQ ID NO: 2029012 - DNA, 25 bp, Homo sapien
ttcccatgtccatatccctgctgag

SEQ ID NO: 2029013 - DNA, 25 bp, Homo sapien
gagtccggttactgactgtatgcca

SEQ ID NO: 2029014 - DNA, 25 bp, Homo sapien
tagggacatcaatttgcggttgccc

SEQ ID NO: 2029015 - DNA, 25 bp, Homo sapien
gctctccagcttatttaggataggg

SEQ ID NO: 2029016 - DNA, 25 bp, Homo sapien
cactgtcacaataaaggagtgtact

SEQ ID NO: 2029017 - DNA, 25 bp, Homo sapien
cacaataaaggagtgtacttcttgc

SEQ ID NO: 2029018 - DNA, 25 bp, Homo sapien
tgtacactgtcacaataaaggagtg

SEQ ID NO: 2029019 - DNA, 25 bp, Homo sapien
ttcttgtacactgtcacaataaagg

SEQ ID NO: 2029020 - DNA, 25 bp, Homo sapien
cactaaaacattcctctgtggcttc

SEQ ID NO: 2029021 - DNA, 25 bp, Homo sapien
ggcaaatggctcaaatacttcccag

SEQ ID NO: 2029022 - DNA, 25 bp, Homo sapien
cataatacccaaatatggcaaatgg

SEQ ID NO: 2029023 - DNA, 25 bp, Homo sapien
cagcatcactaaaacattcctctgt

SEQ ID NO: 2029024 - DNA, 25 bp, Homo sapien
gaggtttccgatcttcttagggcag

SEQ ID NO: 2029025 - DNA, 25 bp, Homo sapien
tactgagggatcaactgtacaggaa

SEQ ID NO: 2029026 - DNA, 25 bp, Homo sapien
tgaacttttgcattctactgaggga

SEQ ID NO: 2029027 - DNA, 25 bp, Homo sapien
ggatgggtcatgtgtcttcagcaac

SEQ ID NO: 2029028 - DNA, 25 bp, Homo sapien
ttaatagttcacaaagccaagaagc

SEQ ID NO: 2029029 - DNA, 25 bp, Homo sapien
gccttgcacagtatcagtaataaaa

SEQ ID NO: 2029030 - DNA, 25 bp, Homo sapien
ttaactcagtgccttgcacagtatc

SEQ ID NO: 2029031 - DNA, 25 bp, Homo sapien
taatttaatagttcacaaagccaag

SEQ ID NO: 2029032 - DNA, 25 bp, Homo sapien
ggttgaccggtcattgaaaatgcag

SEQ ID NO: 2029033 - DNA, 25 bp, Homo sapien
ttaggttgaccggtcattgaaaatg

SEQ ID NO: 2029034 - DNA, 25 bp, Homo sapien
aggttgaccggtcattgaaaatgca

SEQ ID NO: 2029035 - DNA, 25 bp, Homo sapien
taggttgaccggtcattgaaaatgc

SEQ ID NO: 2029036 - DNA, 25 bp, Homo sapien
cagaattgaaagactgcgttagaaa

SEQ ID NO: 2029037 - DNA, 25 bp, Homo sapien
tgcactaaacctgagaatgtaaaaa

SEQ ID NO: 2029038 - DNA, 25 bp, Homo sapien
agtgtgcactctactgggcttttga

SEQ ID NO: 2029039 - DNA, 25 bp, Homo sapien
gacagtactgtctggaggaaacaag

SEQ ID NO: 2029040 - DNA, 25 bp, Homo sapien
cattcataggtacttttgctgccca

SEQ ID NO: 2029041 - DNA, 25 bp, Homo sapien
gatacgtatgcaccatacaactcca

SEQ ID NO: 2029042 - DNA, 25 bp, Homo sapien
ttcataggtacttttgctgcccatt

SEQ ID NO: 2029043 - DNA, 25 bp, Homo sapien
gcacagaaaaagatacgtatgcacc

SEQ ID NO: 2029044 - DNA, 25 bp, Homo sapien
ggggctgcgagtcacaattccttga

SEQ ID NO: 2029045 - DNA, 25 bp, Homo sapien
ttccttgatgatcacccaccccaag

SEQ ID NO: 2029046 - DNA, 25 bp, Homo sapien
taggtcccaggggataaactggctc

SEQ ID NO: 2029047 - DNA, 25 bp, Homo sapien
ttcccactgagcacggggctgcgag

SEQ ID NO: 2029048 - DNA, 25 bp, Homo sapien
aatacctctcctatgctatcttgca

SEQ ID NO: 2029049 - DNA, 25 bp, Homo sapien
tgagtctcccatactagactagctg

SEQ ID NO: 2029050 - DNA, 25 bp, Homo sapien
gcatctgctccaatcatagctctga

SEQ ID NO: 2029051 - DNA, 25 bp, Homo sapien
tacttgttgcctttaatacctctcc

SEQ ID NO: 2029052 - DNA, 25 bp, Homo sapien
aaccagagtagctcatctgctccac

SEQ ID NO: 2029053 - DNA, 25 bp, Homo sapien
accagagtagctcatctgctccact

SEQ ID NO: 2029054 - DNA, 25 bp, Homo sapien
ccagagtagctcatctgctccactg

SEQ ID NO: 2029055 - DNA, 25 bp, Homo sapien
ggtcagttcatctaattctggtgca

SEQ ID NO: 2029056 - DNA, 25 bp, Homo sapien
caggtattcggtgctgcctgtggct

SEQ ID NO: 2029057 - DNA, 25 bp, Homo sapien
ctgggtcagttcatctaattctggt

SEQ ID NO: 2029058 - DNA, 25 bp, Homo sapien
cacctgctgtgcaggtattcggtgc

SEQ ID NO: 2029059 - DNA, 25 bp, Homo sapien
gttcttgggtagagaaaatcatctc

SEQ ID NO: 2029060 - DNA, 25 bp, Homo sapien
cctaattcacatcaaggtgttgctg

SEQ ID NO: 2029061 - DNA, 25 bp, Homo sapien
tttaaattacactacagcacatgct

SEQ ID NO: 2029062 - DNA, 25 bp, Homo sapien
cacaaagaaggacaaagtaacaggt

SEQ ID NO: 2029063 - DNA, 25 bp, Homo sapien
gctttgagatctttaacactgtttt

SEQ ID NO: 2029064 - DNA, 25 bp, Homo sapien
tgtttttcacggttcctccatgttc

SEQ ID NO: 2029065 - DNA, 25 bp, Homo sapien
cttttgcctctgacctgtaactgga

SEQ ID NO: 2029066 - DNA, 25 bp, Homo sapien
gaggcccctgggcaaagctttgaga

SEQ ID NO: 2029067 - DNA, 25 bp, Homo sapien
aaaagctaggtatgtctagtttcag

SEQ ID NO: 2029068 - DNA, 25 bp, Homo sapien
aagggccctgagagcatcattaata

SEQ ID NO: 2029069 - DNA, 25 bp, Homo sapien
taagcagcaacctgactcgggaaaa

SEQ ID NO: 2029070 - DNA, 25 bp, Homo sapien
tatgtctagtttcagaagggccctg

SEQ ID NO: 2029071 - DNA, 25 bp, Homo sapien
ctgcaccactcttgaaggcagcttc

SEQ ID NO: 2029072 - DNA, 25 bp, Homo sapien
agcttcctgcaccacatgttccccc

SEQ ID NO: 2029073 - DNA, 25 bp, Homo sapien
ttcctgcaccacatgttcccccacc

SEQ ID NO: 2029074 - DNA, 25 bp, Homo sapien
ggcagcttcctgcaccacatgttcc

SEQ ID NO: 2029075 - DNA, 25 bp, Homo sapien
tgcagcacgcccctgagcatctgcc

SEQ ID NO: 2029076 - DNA, 25 bp, Homo sapien
tcctcctgaaccactacccgggaca

SEQ ID NO: 2029077 - DNA, 25 bp, Homo sapien
acgcccctgagcatctgcctgcact

SEQ ID NO: 2029078 - DNA, 25 bp, Homo sapien
accactacccgggacatccacctgc

SEQ ID NO: 2029079 - DNA, 25 bp, Homo sapien
agcaatctgcctgtgtcagcctccc

SEQ ID NO: 2029080 - DNA, 25 bp, Homo sapien
cagctaatttttttgtagttctagt

SEQ ID NO: 2029081 - DNA, 25 bp, Homo sapien
gcacccgccaccatcacattcagct

SEQ ID NO: 2029082 - DNA, 25 bp, Homo sapien
caccatgcctggcctgcatattgcc

SEQ ID NO: 2029083 - DNA, 25 bp, Homo sapien
gctaaatttccctagcagcatccat

SEQ ID NO: 2029084 - DNA, 25 bp, Homo sapien
taaagataatacaagctggccagtc

SEQ ID NO: 2029085 - DNA, 25 bp, Homo sapien
tgaaatccaactgtaaaactaactg

SEQ ID NO: 2029086 - DNA, 25 bp, Homo sapien
ccagggagatgcaacataaccacgc

SEQ ID NO: 2029087 - DNA, 25 bp, Homo sapien
gagggtgaaggaaggtgccacgtcc

SEQ ID NO: 2029088 - DNA, 25 bp, Homo sapien
aactgtcctcctgttgatgtgaggg

SEQ ID NO: 2029089 - DNA, 25 bp, Homo sapien
gctccaactgtcctcctgttgatgt

SEQ ID NO: 2029090 - DNA, 25 bp, Homo sapien
ttcccagggactggcgtagtggtac

SEQ ID NO: 2029091 - DNA, 25 bp, Homo sapien
tgacaggacacactgaacacaaacc

SEQ ID NO: 2029092 - DNA, 25 bp, Homo sapien
aggacacactgaacacaaacctgca

SEQ ID NO: 2029093 - DNA, 25 bp, Homo sapien
gatgacaggacacactgaacacaaa

SEQ ID NO: 2029094 - DNA, 25 bp, Homo sapien
gacaggacacactgaacacaaacct

SEQ ID NO: 2029095 - DNA, 25 bp, Homo sapien
gatttgaggccacgatagaagaaga

SEQ ID NO: 2029096 - DNA, 25 bp, Homo sapien
aatgctggcggtgactgcttgtgct

SEQ ID NO: 2029097 - DNA, 25 bp, Homo sapien
gataaaagttctccatagagcagca

SEQ ID NO: 2029098 - DNA, 25 bp, Homo sapien
tgtgcacaagagctgctgatccttt

SEQ ID NO: 2029099 - DNA, 25 bp, Homo sapien
gcataaagacatatgtggcagccca

SEQ ID NO: 2029100 - DNA, 25 bp, Homo sapien
gcaataccacgtagcaaaacagctg

SEQ ID NO: 2029101 - DNA, 25 bp, Homo sapien
aagctggcactttgcatagcctggc

SEQ ID NO: 2029102 - DNA, 25 bp, Homo sapien
tcaatgctattatccactggccaga

SEQ ID NO: 2029103 - DNA, 25 bp, Homo sapien
ggtgaatgtaatccctgtgatcagc

SEQ ID NO: 2029104 - DNA, 25 bp, Homo sapien
tgggaccagcacttgccaaggctga

SEQ ID NO: 2029105 - DNA, 25 bp, Homo sapien
ctgttgtggtatggccaagcctgga

SEQ ID NO: 2029106 - DNA, 25 bp, Homo sapien
ggcaactgttgtggtatggccaagc

SEQ ID NO: 2029107 - DNA, 25 bp, Homo sapien
tatagtcagtgcagacatagctgcc

SEQ ID NO: 2029108 - DNA, 25 bp, Homo sapien
aagggactaatgctctttgggaaca

SEQ ID NO: 2029109 - DNA, 25 bp, Homo sapien
cacactcttgcatgaataaggagaa

SEQ ID NO: 2029110 - DNA, 25 bp, Homo sapien
taaaaaccacttagctctaccagga

SEQ ID NO: 2029111 - DNA, 25 bp, Homo sapien
ggaaggagagagatgtccccgcgac

SEQ ID NO: 2029112 - DNA, 25 bp, Homo sapien
aggagagagatgtccccgcgaccag

SEQ ID NO: 2029113 - DNA, 25 bp, Homo sapien
agatgtccccgcgaccaggaccggc

SEQ ID NO: 2029114 - DNA, 25 bp, Homo sapien
gagatgtccccgcgaccaggaccgg

SEQ ID NO: 2029115 - DNA, 25 bp, Homo sapien
atgctgccgattccccgaggcggaa

SEQ ID NO: 2029116 - DNA, 25 bp, Homo sapien
cctgggtgcatgttaatacggtggg

SEQ ID NO: 2029117 - DNA, 25 bp, Homo sapien
gcttcctccgcccaaccaccggagc

SEQ ID NO: 2029118 - DNA, 25 bp, Homo sapien
ggactcgagagaggagccgaggcgg

SEQ ID NO: 2029119 - DNA, 25 bp, Homo sapien
agcttgagcattttataactaacaa

SEQ ID NO: 2029120 - DNA, 25 bp, Homo sapien
gagcattttataactaacaatttgt

SEQ ID NO: 2029121 - DNA, 25 bp, Homo sapien
tatgtccacttttctcacttcagta

SEQ ID NO: 2029122 - DNA, 25 bp, Homo sapien
atacagcagcttgagcattttataa

SEQ ID NO: 2029123 - DNA, 25 bp, Homo sapien
ttaaagatactccatggctagaatt

SEQ ID NO: 2029124 - DNA, 25 bp, Homo sapien
tgttgttgcattcctgctatcccat

SEQ ID NO: 2029125 - DNA, 25 bp, Homo sapien
ctccatggctagaatttgttgttgc

SEQ ID NO: 2029126 - DNA, 25 bp, Homo sapien
tgttgcattcctgctatcccatgtc

SEQ ID NO: 2029127 - DNA, 25 bp, Homo sapien
tcattgagtgagaagactagagaag

SEQ ID NO: 2029128 - DNA, 25 bp, Homo sapien
tggcttcccgtgaactgtcattgag

SEQ ID NO: 2029129 - DNA, 25 bp, Homo sapien
gctgattattggcatagatatctct

SEQ ID NO: 2029130 - DNA, 25 bp, Homo sapien
gagaggaaagtgcatggcttcccgt

SEQ ID NO: 2029131 - DNA, 25 bp, Homo sapien
gctgaattaattgtatccacagttt

SEQ ID NO: 2029132 - DNA, 25 bp, Homo sapien
aagaagttactggatgctttttgtt

SEQ ID NO: 2029133 - DNA, 25 bp, Homo sapien
catgtaggccttggaaaatctgcca

SEQ ID NO: 2029134 - DNA, 25 bp, Homo sapien
tttaatcctatgacatttcgctgaa

SEQ ID NO: 2029135 - DNA, 25 bp, Homo sapien
ccatcttcattttccatcatgttgc

SEQ ID NO: 2029136 - DNA, 25 bp, Homo sapien
tcattttccatcatgttgctaaagt

SEQ ID NO: 2029137 - DNA, 25 bp, Homo sapien
tcttcattttccatcatgttgctaa

SEQ ID NO: 2029138 - DNA, 25 bp, Homo sapien
ttttccatcatgttgctaaagtgac

SEQ ID NO: 2029139 - DNA, 25 bp, Homo sapien
ttgtcgctggttcttttctactcat

SEQ ID NO: 2029140 - DNA, 25 bp, Homo sapien
ttagcactcttttgtcgctggttct

SEQ ID NO: 2029141 - DNA, 25 bp, Homo sapien
gcactcttttgtcgctggttctttt

SEQ ID NO: 2029142 - DNA, 25 bp, Homo sapien
tcttttgtcgctggttcttttctac

SEQ ID NO: 2029143 - DNA, 25 bp, Homo sapien
ttccatagcactggttagcgtataa

SEQ ID NO: 2029144 - DNA, 25 bp, Homo sapien
cagggtgacttgctgtcactctgtg

SEQ ID NO: 2029145 - DNA, 25 bp, Homo sapien
cgtataatgaatcaaaaagttgggt

SEQ ID NO: 2029146 - DNA, 25 bp, Homo sapien
tgacttgctgtcactctgtgctttc

SEQ ID NO: 2029147 - DNA, 25 bp, Homo sapien
aatcctttttgatctctcatctgtg

SEQ ID NO: 2029148 - DNA, 25 bp, Homo sapien
aaatcctttttgatctctcatctgt

SEQ ID NO: 2029149 - DNA, 25 bp, Homo sapien
cactttatcaagcaagatatgctca

SEQ ID NO: 2029150 - DNA, 25 bp, Homo sapien
tgtacaggagtaccatggtcagcat

SEQ ID NO: 2029151 - DNA, 25 bp, Homo sapien
tgctcaaaagcttggctgttcctgc

SEQ ID NO: 2029152 - DNA, 25 bp, Homo sapien
tcgatggctccaacactttatcaag

SEQ ID NO: 2029153 - DNA, 25 bp, Homo sapien
cacaatggggtactggttgctgtcc

SEQ ID NO: 2029154 - DNA, 25 bp, Homo sapien
agctacctcattgggttcctttgtg

SEQ ID NO: 2029155 - DNA, 25 bp, Homo sapien
cctttgtggttagcacaatggggta

SEQ ID NO: 2029156 - DNA, 25 bp, Homo sapien
ctaattgtaccatagccaccagcta

SEQ ID NO: 2029157 - DNA, 25 bp, Homo sapien
gcccctgacccaactagcattgtca

SEQ ID NO: 2029158 - DNA, 25 bp, Homo sapien
cctgacccaactagcattgtcatac

SEQ ID NO: 2029159 - DNA, 25 bp, Homo sapien
ccctgacccaactagcattgtcata

SEQ ID NO: 2029160 - DNA, 25 bp, Homo sapien
agcccctgacccaactagcattgtc

SEQ ID NO: 2029161 - DNA, 25 bp, Homo sapien
tcatcccaggtctgtccatttccga

SEQ ID NO: 2029162 - DNA, 25 bp, Homo sapien
caggtctgtccatttccgagaggcc

SEQ ID NO: 2029163 - DNA, 25 bp, Homo sapien
cactttgtaataatccaaagattct

SEQ ID NO: 2029164 - DNA, 25 bp, Homo sapien
taatccaaagattcttcatcccagg

SEQ ID NO: 2029165 - DNA, 25 bp, Homo sapien
aagcaattcacatcctgatgctgaa

SEQ ID NO: 2029166 - DNA, 25 bp, Homo sapien
ataagcaattcacatcctgatgctg

SEQ ID NO: 2029167 - DNA, 25 bp, Homo sapien
caataagcaattcacatcctgatgc

SEQ ID NO: 2029168 - DNA, 25 bp, Homo sapien
tgacaataagcaattcacatcctga

SEQ ID NO: 2029169 - DNA, 25 bp, Homo sapien
tttcactgagcctactcctacatgc

SEQ ID NO: 2029170 - DNA, 25 bp, Homo sapien
tgctttcactgagcctactcctaca

SEQ ID NO: 2029171 - DNA, 25 bp, Homo sapien
tggctgctttcactgagcctactcc

SEQ ID NO: 2029172 - DNA, 25 bp, Homo sapien
actgagcctactcctacatgcatct

SEQ ID NO: 2029173 - DNA, 25 bp, Homo sapien
ctgactgttcttatctgtgcaaggc

SEQ ID NO: 2029174 - DNA, 25 bp, Homo sapien
cagctgactgttcttatctgtgcaa

SEQ ID NO: 2029175 - DNA, 25 bp, Homo sapien
tcagctgactgttcttatctgtgca

SEQ ID NO: 2029176 - DNA, 25 bp, Homo sapien
gctgactgttcttatctgtgcaagg

SEQ ID NO: 2029177 - DNA, 25 bp, Homo sapien
gaagtagccccgatactcaaaatga

SEQ ID NO: 2029178 - DNA, 25 bp, Homo sapien
catgcccttgatagaagtagccccg

SEQ ID NO: 2029179 - DNA, 25 bp, Homo sapien
tagccccgatactcaaaatgactca

SEQ ID NO: 2029180 - DNA, 25 bp, Homo sapien
ttgatagaagtagccccgatactca

SEQ ID NO: 2029181 - DNA, 25 bp, Homo sapien
tctgaaagacctcataatcgcctgt

SEQ ID NO: 2029182 - DNA, 25 bp, Homo sapien
gacctccttcacctgcagtctgaaa

SEQ ID NO: 2029183 - DNA, 25 bp, Homo sapien
gacaatataatccactcgacctcct

SEQ ID NO: 2029184 - DNA, 25 bp, Homo sapien
taatcgcctgttccacattggcagc

SEQ ID NO: 2029185 - DNA, 25 bp, Homo sapien
taaaccaggaaactgtatcataatc

SEQ ID NO: 2029186 - DNA, 25 bp, Homo sapien
cctgaagtctatatccacaatggta

SEQ ID NO: 2029187 - DNA, 25 bp, Homo sapien
taaataaatactgcacctgaagtct

SEQ ID NO: 2029188 - DNA, 25 bp, Homo sapien
gtagccccacaaatctaaaccagga

SEQ ID NO: 2029189 - DNA, 25 bp, Homo sapien
cgccaaaagtgatgcacacagcagc

SEQ ID NO: 2029190 - DNA, 25 bp, Homo sapien
accacgccgccaaaagtgatgcaca

SEQ ID NO: 2029191 - DNA, 25 bp, Homo sapien
tttcttgtgccagttgcaggattcg

SEQ ID NO: 2029192 - DNA, 25 bp, Homo sapien
tgtgccagttgcaggattcgccacc

SEQ ID NO: 2029193 - DNA, 25 bp, Homo sapien
tgcctccagggtaatctggcttcat

SEQ ID NO: 2029194 - DNA, 25 bp, Homo sapien
aatgtcttgatcactgcctccaggg

SEQ ID NO: 2029195 - DNA, 25 bp, Homo sapien
ctggaagaatgtcttgatcactgcc

SEQ ID NO: 2029196 - DNA, 25 bp, Homo sapien
ctgcctccagggtaatctggcttca

SEQ ID NO: 2029197 - DNA, 25 bp, Homo sapien
gcagctggcttgtctgaattgctta

SEQ ID NO: 2029198 - DNA, 25 bp, Homo sapien
attgcttaagccgtacagtagcctt

SEQ ID NO: 2029199 - DNA, 25 bp, Homo sapien
acagtagccttgcaattatgatgtg

SEQ ID NO: 2029200 - DNA, 25 bp, Homo sapien
tgtgcgctttatccttacaaaatca

SEQ ID NO: 2029201 - DNA, 25 bp, Homo sapien
tcaggacgctgaagaatgatccctg

SEQ ID NO: 2029202 - DNA, 25 bp, Homo sapien
gcgaagcagcgacaaagaaaacact

SEQ ID NO: 2029203 - DNA, 25 bp, Homo sapien
cgctgaagaatgatccctgattgct

SEQ ID NO: 2029204 - DNA, 25 bp, Homo sapien
tgtgttgcctgcgaagcagcgacaa

SEQ ID NO: 2029205 - DNA, 25 bp, Homo sapien
ccttataatagaagtggtgaggcac

SEQ ID NO: 2029206 - DNA, 25 bp, Homo sapien
gcagaagaccaccatacacagaagt

SEQ ID NO: 2029207 - DNA, 25 bp, Homo sapien
gaagactgtactccccaacatagaa

SEQ ID NO: 2029208 - DNA, 25 bp, Homo sapien
gcctagcttcagcaacagttcagaa

SEQ ID NO: 2029209 - DNA, 25 bp, Homo sapien
tgactgcgatcccacttgtgttagg

SEQ ID NO: 2029210 - DNA, 25 bp, Homo sapien
cctaacatatagagaacctggaacc

SEQ ID NO: 2029211 - DNA, 25 bp, Homo sapien
gcagctgagttcagtaactgcctga

SEQ ID NO: 2029212 - DNA, 25 bp, Homo sapien
ctatgcctctctttggtgaagtgac

SEQ ID NO: 2029213 - DNA, 25 bp, Homo sapien
ttcactctgaagagtggctgcattt

SEQ ID NO: 2029214 - DNA, 25 bp, Homo sapien
gccgtcaagaagttcactctgaaga

SEQ ID NO: 2029215 - DNA, 25 bp, Homo sapien
caagaagttcactctgaagagtggc

SEQ ID NO: 2029216 - DNA, 25 bp, Homo sapien
ctaggtagccgtcaagaagttcact

SEQ ID NO: 2029217 - DNA, 25 bp, Homo sapien
agttgatgcagagattcaggtattt

SEQ ID NO: 2029218 - DNA, 25 bp, Homo sapien
gttgatgcagagattcaggtatttc

SEQ ID NO: 2029219 - DNA, 25 bp, Homo sapien
ctgtgtcaactctcaagcaagctgt

SEQ ID NO: 2029220 - DNA, 25 bp, Homo sapien
gtgtcaactctcaagcaagctgtag

SEQ ID NO: 2029221 - DNA, 25 bp, Homo sapien
caactctcaagcaagctgtagatgg

SEQ ID NO: 2029222 - DNA, 25 bp, Homo sapien
actctcaagcaagctgtagatggta

SEQ ID NO: 2029223 - DNA, 25 bp, Homo sapien
ctctcttccagagctctctgcccac

SEQ ID NO: 2029224 - DNA, 25 bp, Homo sapien
tgagagccttcacattcactgtcca

SEQ ID NO: 2029225 - DNA, 25 bp, Homo sapien
ctgagagccttcacattcactgtcc

SEQ ID NO: 2029226 - DNA, 25 bp, Homo sapien
gagagccttcacattcactgtccat

SEQ ID NO: 2029227 - DNA, 25 bp, Homo sapien
accttcctctcaccccctcagccca

SEQ ID NO: 2029228 - DNA, 25 bp, Homo sapien
gtttgtgctgtcctccagccacctt

SEQ ID NO: 2029229 - DNA, 25 bp, Homo sapien
ccaccttcctctcaccccctcagcc

SEQ ID NO: 2029230 - DNA, 25 bp, Homo sapien
ttcctctcaccccctcagcccacat

SEQ ID NO: 2029231 - DNA, 25 bp, Homo sapien
tgtgctcatgtcacttaggaacagc

SEQ ID NO: 2029232 - DNA, 25 bp, Homo sapien
cgtaaagttgtttatgagctcccag

SEQ ID NO: 2029233 - DNA, 25 bp, Homo sapien
gcatggcagagcagataactaaagc

SEQ ID NO: 2029234 - DNA, 25 bp, Homo sapien
tacaagtcacagattagccagtggg

SEQ ID NO: 2029235 - DNA, 25 bp, Homo sapien
cacataagcaaggattcacataaca

SEQ ID NO: 2029236 - DNA, 25 bp, Homo sapien
cataacaccgactgccactgatggc

SEQ ID NO: 2029237 - DNA, 25 bp, Homo sapien
gacttatattcgttgcttggaaaga

SEQ ID NO: 2029238 - DNA, 25 bp, Homo sapien
ctattttggacttatattcgttgct

SEQ ID NO: 2029239 - DNA, 25 bp, Homo sapien
ccattatggtatgtagaaataagtg

SEQ ID NO: 2029240 - DNA, 25 bp, Homo sapien
ctgtcttcagaaacttgtctgcaag

SEQ ID NO: 2029241 - DNA, 25 bp, Homo sapien
gcaactcaaagcagacatggcccaa

SEQ ID NO: 2029242 - DNA, 25 bp, Homo sapien
tgcaagcaactcaaagcagacatgg

SEQ ID NO: 2029243 - DNA, 25 bp, Homo sapien
ttgtctgcaagcaactcaaagcaga

SEQ ID NO: 2029244 - DNA, 25 bp, Homo sapien
cgttgatggcgatgtcaaagaacat

SEQ ID NO: 2029245 - DNA, 25 bp, Homo sapien
acagggctcccagtggcagctgcat

SEQ ID NO: 2029246 - DNA, 25 bp, Homo sapien
cacagggctcccagtggcagctgca

SEQ ID NO: 2029247 - DNA, 25 bp, Homo sapien
tgaccatggctaaggcacagggctc

SEQ ID NO: 2029248 - DNA, 25 bp, Homo sapien
ggtgggttgaccatggctaaggcac

SEQ ID NO: 2029249 - DNA, 25 bp, Homo sapien
agctgggagccagtactgtaagtaa

SEQ ID NO: 2029250 - DNA, 25 bp, Homo sapien
gagccagtactgtaagtaatggttt

SEQ ID NO: 2029251 - DNA, 25 bp, Homo sapien
taaatctaaattgtcctttaagctg

SEQ ID NO: 2029252 - DNA, 25 bp, Homo sapien
ctaaattgtcctttaagctgggagc

SEQ ID NO: 2029253 - DNA, 25 bp, Homo sapien
ttgctcccaacgtctggacccaggt

SEQ ID NO: 2029254 - DNA, 25 bp, Homo sapien
caccggattgctcccaacgtctgga

SEQ ID NO: 2029255 - DNA, 25 bp, Homo sapien
tcaggccaccggattgctcccaacg

SEQ ID NO: 2029256 - DNA, 25 bp, Homo sapien
ggattgctcccaacgtctggaccca

SEQ ID NO: 2029257 - DNA, 25 bp, Homo sapien
tatgctatggcttttccaatagccc

SEQ ID NO: 2029258 - DNA, 25 bp, Homo sapien
tttgtgtggcatatgagtcacatat

SEQ ID NO: 2029259 - DNA, 25 bp, Homo sapien
tgtgtggcatatgagtcacatatgc

SEQ ID NO: 2029260 - DNA, 25 bp, Homo sapien
tgagtcacatatgctatggcttttc

SEQ ID NO: 2029261 - DNA, 25 bp, Homo sapien
tagtacaacctctaggcaaaacagt

SEQ ID NO: 2029262 - DNA, 25 bp, Homo sapien
cagtggtagagggaactcttacaca

SEQ ID NO: 2029263 - DNA, 25 bp, Homo sapien
tttggagtgagatagttatatctgt

SEQ ID NO: 2029264 - DNA, 25 bp, Homo sapien
ggagtgagatagttatatctgtgca

SEQ ID NO: 2029265 - DNA, 25 bp, Homo sapien
ccttgaaatccagaggtggctactg

SEQ ID NO: 2029266 - DNA, 25 bp, Homo sapien
gctcttcccgggtcgtgcctgccat

SEQ ID NO: 2029267 - DNA, 25 bp, Homo sapien
cttgaaatccagaggtggctactgc

SEQ ID NO: 2029268 - DNA, 25 bp, Homo sapien
ctgcaggctcttcccgggtcgtgcc

SEQ ID NO: 2029269 - DNA, 25 bp, Homo sapien
ggcaattaccacatcagaaacaagg

SEQ ID NO: 2029270 - DNA, 25 bp, Homo sapien
cccaagattcgctgagtttctgcag

SEQ ID NO: 2029271 - DNA, 25 bp, Homo sapien
gtttgtcattaacccgcagccagta

SEQ ID NO: 2029272 - DNA, 25 bp, Homo sapien
tgattcccgctaaggttaacaggcg

SEQ ID NO: 2029273 - DNA, 25 bp, Homo sapien
gcacactcacactagaaaaattcat

SEQ ID NO: 2029274 - DNA, 25 bp, Homo sapien
tgcacactcacactagaaaaattca

SEQ ID NO: 2029275 - DNA, 25 bp, Homo sapien
ttcttgcctcatcacttcacacaga

SEQ ID NO: 2029276 - DNA, 25 bp, Homo sapien
cttcacacagaatggagccctccat

SEQ ID NO: 2029277 - DNA, 25 bp, Homo sapien
cttgcctcatcacttcacacagaat

SEQ ID NO: 2029278 - DNA, 25 bp, Homo sapien
tcatcacttcacacagaatggagcc

SEQ ID NO: 2029279 - DNA, 25 bp, Homo sapien
cagagtctttaataagttcatgccc

SEQ ID NO: 2029280 - DNA, 25 bp, Homo sapien
taataagttcatgcccattgcaagt

SEQ ID NO: 2029281 - DNA, 25 bp, Homo sapien
gcaagtttctgagagtgggtcactg

SEQ ID NO: 2029282 - DNA, 25 bp, Homo sapien
ctttaataagttcatgcccattgca

SEQ ID NO: 2029283 - DNA, 25 bp, Homo sapien
ctatttactctgagagaaggtaacc

SEQ ID NO: 2029284 - DNA, 25 bp, Homo sapien
tcagttctatttactctgagagaag

SEQ ID NO: 2029285 - DNA, 25 bp, Homo sapien
tctgagagaaggtaacctctccatc

SEQ ID NO: 2029286 - DNA, 25 bp, Homo sapien
tactctgagagaaggtaacctctcc

SEQ ID NO: 2029287 - DNA, 25 bp, Homo sapien
tcagggatattcttgggaagtgctc

SEQ ID NO: 2029288 - DNA, 25 bp, Homo sapien
tagagctggagtgtcctggcccttt

SEQ ID NO: 2029289 - DNA, 25 bp, Homo sapien
tgcgtctgatcatttcccaataggc

SEQ ID NO: 2029290 - DNA, 25 bp, Homo sapien
tgtacagacaccgaatgctcagctt

SEQ ID NO: 2029291 - DNA, 25 bp, Homo sapien
ggcctggctcttgagctgctccagg

SEQ ID NO: 2029292 - DNA, 25 bp, Homo sapien
tgagctgctccaggctgagagcagc

SEQ ID NO: 2029293 - DNA, 25 bp, Homo sapien
gggggcctggctcttgagctgctcc

SEQ ID NO: 2029294 - DNA, 25 bp, Homo sapien
agctgctccaggctgagagcagcga

SEQ ID NO: 2029295 - DNA, 25 bp, Homo sapien
ccgggaggcagcgaggcgggttgat

SEQ ID NO: 2029296 - DNA, 25 bp, Homo sapien
gcgaggcgggttgatggggccgccc

SEQ ID NO: 2029297 - DNA, 25 bp, Homo sapien
gcgggttcccgggaggcagcgaggc

SEQ ID NO: 2029298 - DNA, 25 bp, Homo sapien
ctgcgggttcccgggaggcagcgag

SEQ ID NO: 2029299 - DNA, 25 bp, Homo sapien
tagtccaaaacaatgactccctgta

SEQ ID NO: 2029300 - DNA, 25 bp, Homo sapien
tttttagtctgatctattgaggacc

SEQ ID NO: 2029301 - DNA, 25 bp, Homo sapien
taaagacagtaatttagaaagtcta

SEQ ID NO: 2029302 - DNA, 25 bp, Homo sapien
tctgatctattgaggacctagtgca

SEQ ID NO: 2029303 - DNA, 25 bp, Homo sapien
gaacttttctaagcacatccattca

SEQ ID NO: 2029304 - DNA, 25 bp, Homo sapien
gatcataagttctcaatgcaatgaa

SEQ ID NO: 2029305 - DNA, 25 bp, Homo sapien
tgaactcccttaacatgacacgttt

SEQ ID NO: 2029306 - DNA, 25 bp, Homo sapien
cagtgcctaggatcataagttctca

SEQ ID NO: 2029307 - DNA, 25 bp, Homo sapien
ggtgcttgtgagcacgcacactcat

SEQ ID NO: 2029308 - DNA, 25 bp, Homo sapien
tgcttgtgagcacgcacactcatac

SEQ ID NO: 2029309 - DNA, 25 bp, Homo sapien
acacattgctacatcgagcaaaaaa

SEQ ID NO: 2029310 - DNA, 25 bp, Homo sapien
tacatcgagcaaaaaacttactctt

SEQ ID NO: 2029311 - DNA, 25 bp, Homo sapien
cacttcttttatttcacggttgtat

SEQ ID NO: 2029312 - DNA, 25 bp, Homo sapien
cacggttgtatttaaaattgttcag

SEQ ID NO: 2029313 - DNA, 25 bp, Homo sapien
aaaattgttcaggaatgaagaggca

SEQ ID NO: 2029314 - DNA, 25 bp, Homo sapien
atttaaaattgttcaggaatgaaga

SEQ ID NO: 2029315 - DNA, 25 bp, Homo sapien
tattgaggacaggcattgctgaacc

SEQ ID NO: 2029316 - DNA, 25 bp, Homo sapien
ctattgaggacaggcattgctgaac

SEQ ID NO: 2029317 - DNA, 25 bp, Homo sapien
attgaggacaggcattgctgaacct

SEQ ID NO: 2029318 - DNA, 25 bp, Homo sapien
tatttggccccactatgtctcagag

SEQ ID NO: 2029319 - DNA, 25 bp, Homo sapien
caataacttttgtgaagcccaggaa

SEQ ID NO: 2029320 - DNA, 25 bp, Homo sapien
aaacagcattcgttaaggaccccag

SEQ ID NO: 2029321 - DNA, 25 bp, Homo sapien
tctacagctaggtgccggtgacact

SEQ ID NO: 2029322 - DNA, 25 bp, Homo sapien
gatgtggtcccggttgtcactgatt

SEQ ID NO: 2029323 - DNA, 25 bp, Homo sapien
cattctgcacaatctgtttgctggc

SEQ ID NO: 2029324 - DNA, 25 bp, Homo sapien
gcacagcttgcaggattgcattctg

SEQ ID NO: 2029325 - DNA, 25 bp, Homo sapien
tcttctctgcgctgactctcctggg

SEQ ID NO: 2029326 - DNA, 25 bp, Homo sapien
tgccctcattaccacttcgttttgg

SEQ ID NO: 2029327 - DNA, 25 bp, Homo sapien
tcattaccacttcgttttggatcac

SEQ ID NO: 2029328 - DNA, 25 bp, Homo sapien
gccctcattaccacttcgttttgga

SEQ ID NO: 2029329 - DNA, 25 bp, Homo sapien
taccacttcgttttggatcacacat

SEQ ID NO: 2029330 - DNA, 25 bp, Homo sapien
cctctcctcatccccaggcatccac

SEQ ID NO: 2029331 - DNA, 25 bp, Homo sapien
cggatttttacttgcctctcctcat

SEQ ID NO: 2029332 - DNA, 25 bp, Homo sapien
ctcggatttttacttgcctctcctc

SEQ ID NO: 2029333 - DNA, 25 bp, Homo sapien
tctcctcatccccaggcatccacat

SEQ ID NO: 2029334 - DNA, 25 bp, Homo sapien
cggactcaatgatggagatgaccca

SEQ ID NO: 2029335 - DNA, 25 bp, Homo sapien
gaacaatcctgaggaccattgccta

SEQ ID NO: 2029336 - DNA, 25 bp, Homo sapien
gcctagggagatccaagctcttgag

SEQ ID NO: 2029337 - DNA, 25 bp, Homo sapien
tgggtttcctggctacctatgccag

SEQ ID NO: 2029338 - DNA, 25 bp, Homo sapien
ctccggtcggagtttcaggtctaat

SEQ ID NO: 2029339 - DNA, 25 bp, Homo sapien
gagcagcaaagggaccaaggtcctt

SEQ ID NO: 2029340 - DNA, 25 bp, Homo sapien
tcttcgccaactagtagccacggag

SEQ ID NO: 2029341 - DNA, 25 bp, Homo sapien
taagaagtatcgctcctctgccctt

SEQ ID NO: 2029342 - DNA, 25 bp, Homo sapien
gagggagattcccacgcaagtagcc

SEQ ID NO: 2029343 - DNA, 25 bp, Homo sapien
gtagcagtgagggagattcccacgc

SEQ ID NO: 2029344 - DNA, 25 bp, Homo sapien
agattcccacgcaagtagcccgaag

SEQ ID NO: 2029345 - DNA, 25 bp, Homo sapien
aagtagcccgaagcccactactctt

SEQ ID NO: 2029346 - DNA, 25 bp, Homo sapien
gagaagcagcgggacgagggcgagg

SEQ ID NO: 2029347 - DNA, 25 bp, Homo sapien
tcttgcccgtgtaggtgccggtgct

SEQ ID NO: 2029348 - DNA, 25 bp, Homo sapien
ccggtgctgctggcgaaagtcccag

SEQ ID NO: 2029349 - DNA, 25 bp, Homo sapien
gtcccagttcttaaggctcctgagc

SEQ ID NO: 2029350 - DNA, 25 bp, Homo sapien
catgagcacagacagtaactccgaa

SEQ ID NO: 2029351 - DNA, 25 bp, Homo sapien
ccctcctagacacttggtgaaaaag

SEQ ID NO: 2029352 - DNA, 25 bp, Homo sapien
tgctcccctcctagacacttggtga

SEQ ID NO: 2029353 - DNA, 25 bp, Homo sapien
aaacgcgcagatgggccgtaaggta

SEQ ID NO: 2029354 - DNA, 25 bp, Homo sapien
tacgcccccagattaagagagaaag

SEQ ID NO: 2029355 - DNA, 25 bp, Homo sapien
gaggatgggaagaaggccggacttg

SEQ ID NO: 2029356 - DNA, 25 bp, Homo sapien
atgatttcttccagccgctacgccc

SEQ ID NO: 2029357 - DNA, 25 bp, Homo sapien
ccgctacgcccccagattaagagag

SEQ ID NO: 2029358 - DNA, 25 bp, Homo sapien
gctgtggctcgtcgccgtggatatt

SEQ ID NO: 2029359 - DNA, 25 bp, Homo sapien
gtggctcgtcgccgtggatattgga

SEQ ID NO: 2029360 - DNA, 25 bp, Homo sapien
ggctcgtcgccgtggatattggact

SEQ ID NO: 2029361 - DNA, 25 bp, Homo sapien
ctgctgtggctcgtcgccgtggata

SEQ ID NO: 2029362 - DNA, 25 bp, Homo sapien
taaagcgtgtgcatgacaggataga

SEQ ID NO: 2029363 - DNA, 25 bp, Homo sapien
gtgtgcatgacaggatagagttctc

SEQ ID NO: 2029364 - DNA, 25 bp, Homo sapien
ctgatgggcaggataaagcgtgtgc

SEQ ID NO: 2029365 - DNA, 25 bp, Homo sapien
gcaggataaagcgtgtgcatgacag

SEQ ID NO: 2029366 - DNA, 25 bp, Homo sapien
gccttggaagtaaaagatccgtgag

SEQ ID NO: 2029367 - DNA, 25 bp, Homo sapien
acaataaggtcttgagagtggcctt

SEQ ID NO: 2029368 - DNA, 25 bp, Homo sapien
gatgcgtagcccttctggatgacaa

SEQ ID NO: 2029369 - DNA, 25 bp, Homo sapien
aaagaagtaaggctagcaggactgc

SEQ ID NO: 2029370 - DNA, 25 bp, Homo sapien
tgaaactgttcgctgcttaatgcaa

SEQ ID NO: 2029371 - DNA, 25 bp, Homo sapien
gcatgaaactgttcgctgcttaatg

SEQ ID NO: 2029372 - DNA, 25 bp, Homo sapien
aaactgttcgctgcttaatgcaatg

SEQ ID NO: 2029373 - DNA, 25 bp, Homo sapien
tcagcatgaaactgttcgctgctta

SEQ ID NO: 2029374 - DNA, 25 bp, Homo sapien
gggaccagaatgtaattgccctggg

SEQ ID NO: 2029375 - DNA, 25 bp, Homo sapien
cagaatgtaattgccctgggaacat

SEQ ID NO: 2029376 - DNA, 25 bp, Homo sapien
tcacacactccagaccgcattgctg

SEQ ID NO: 2029377 - DNA, 25 bp, Homo sapien
agcagggaccagaatgtaattgccc

SEQ ID NO: 2029378 - DNA, 25 bp, Homo sapien
tatcataagttcctagaaagtatct

SEQ ID NO: 2029379 - DNA, 25 bp, Homo sapien
taagttcctagaaagtatctgatgg

SEQ ID NO: 2029380 - DNA, 25 bp, Homo sapien
gaaagtatctgatggaccttctttc

SEQ ID NO: 2029381 - DNA, 25 bp, Homo sapien
cctagaaagtatctgatggaccttc

SEQ ID NO: 2029382 - DNA, 25 bp, Homo sapien
ttaaaaggcagaatgaaacgtacca

SEQ ID NO: 2029383 - DNA, 25 bp, Homo sapien
taacacaacttataacattggaaat

SEQ ID NO: 2029384 - DNA, 25 bp, Homo sapien
tacatgtagacgacaaatgaaaact

SEQ ID NO: 2029385 - DNA, 25 bp, Homo sapien
gaaaactgtcaaagtatccttctct

SEQ ID NO: 2029386 - DNA, 25 bp, Homo sapien
ttacattgctggttgcacgcaggca

SEQ ID NO: 2029387 - DNA, 25 bp, Homo sapien
tgctgtcaaacttggaatgcctcgt

SEQ ID NO: 2029388 - DNA, 25 bp, Homo sapien
gaagcctgaaagtggttcttgaccg

SEQ ID NO: 2029389 - DNA, 25 bp, Homo sapien
tcacggttggtatttcggacatgca

SEQ ID NO: 2029390 - DNA, 25 bp, Homo sapien
ctttcccgcctaccgagcctgccca

SEQ ID NO: 2029391 - DNA, 25 bp, Homo sapien
gcctttcccgcctaccgagcctgcc

SEQ ID NO: 2029392 - DNA, 25 bp, Homo sapien
ggcctttcccgcctaccgagcctgc

SEQ ID NO: 2029393 - DNA, 25 bp, Homo sapien
tttcccgcctaccgagcctgcccac

SEQ ID NO: 2029394 - DNA, 25 bp, Homo sapien
cacccgaagtttaagctcatcttgg

SEQ ID NO: 2029395 - DNA, 25 bp, Homo sapien
acccgaagtttaagctcatcttgga

SEQ ID NO: 2029396 - DNA, 25 bp, Homo sapien
cccgaagtttaagctcatcttggag

SEQ ID NO: 2029397 - DNA, 25 bp, Homo sapien
ccgaagtttaagctcatcttggagg

SEQ ID NO: 2029398 - DNA, 25 bp, Homo sapien
ttgtggccccaatgtctgtataagc

SEQ ID NO: 2029399 - DNA, 25 bp, Homo sapien
tgttccaccggctttgtggccccaa

SEQ ID NO: 2029400 - DNA, 25 bp, Homo sapien
tcaggaagccgtctcccgttgttcc

SEQ ID NO: 2029401 - DNA, 25 bp, Homo sapien
cccaatgtctgtataagctgctgat

SEQ ID NO: 2029402 - DNA, 25 bp, Homo sapien
cacttgtccagtcattcgggtggca

SEQ ID NO: 2029403 - DNA, 25 bp, Homo sapien
ctgtgaggcgcctagatcgcaaggc

SEQ ID NO: 2029404 - DNA, 25 bp, Homo sapien
gcaaggcgcactccgcaaatgacag

SEQ ID NO: 2029405 - DNA, 25 bp, Homo sapien
tactggataatttgcgctgtgaggc

SEQ ID NO: 2029406 - DNA, 25 bp, Homo sapien
ggaggcataaacattaaggctagga

SEQ ID NO: 2029407 - DNA, 25 bp, Homo sapien
gcacgcaaccgtgcagtcagattcc

SEQ ID NO: 2029408 - DNA, 25 bp, Homo sapien
cggctagcagggacgaagctcaact

SEQ ID NO: 2029409 - DNA, 25 bp, Homo sapien
ttgcctttagccactagcggagccg

SEQ ID NO: 2029410 - DNA, 25 bp, Homo sapien
tctcctcgggctttgccttcgctct

SEQ ID NO: 2029411 - DNA, 25 bp, Homo sapien
gctttgccttcgctctctagctttt

SEQ ID NO: 2029412 - DNA, 25 bp, Homo sapien
ggctcacgctctgccggacaccaat

SEQ ID NO: 2029413 - DNA, 25 bp, Homo sapien
tcttctttcactcccgctcgccgac

SEQ ID NO: 2029414 - DNA, 25 bp, Homo sapien
ccgacggagctcaaggctaggcctg

SEQ ID NO: 2029415 - DNA, 25 bp, Homo sapien
ctaggcctggccttgtccgcggagt

SEQ ID NO: 2029416 - DNA, 25 bp, Homo sapien
aggcctggccttgtccgcggagtcc

SEQ ID NO: 2029417 - DNA, 25 bp, Homo sapien
ctgcccgacggagctcaaggctagg

SEQ ID NO: 2029418 - DNA, 25 bp, Homo sapien
ggagggaccgagcggggagcaaggc

SEQ ID NO: 2029419 - DNA, 25 bp, Homo sapien
gcgccgcggccgggagggaccgagc

SEQ ID NO: 2029420 - DNA, 25 bp, Homo sapien
ttccggcagcgccgcggccgggagg

SEQ ID NO: 2029421 - DNA, 25 bp, Homo sapien
gccgggagggaccgagcggggagca

SEQ ID NO: 2029422 - DNA, 25 bp, Homo sapien
tgatgtaggacctcctgacctagaa

SEQ ID NO: 2029423 - DNA, 25 bp, Homo sapien
ctttttgatgcaggcgttctcttac

SEQ ID NO: 2029424 - DNA, 25 bp, Homo sapien
cagggagaacaacgagcttacggac

SEQ ID NO: 2029425 - DNA, 25 bp, Homo sapien
tgctgtgcgagaaagcctacctgct

SEQ ID NO: 2029426 - DNA, 25 bp, Homo sapien
gctagattctcgaaagacatcctga

SEQ ID NO: 2029427 - DNA, 25 bp, Homo sapien
ttcgaggctagattctcgaaagaca

SEQ ID NO: 2029428 - DNA, 25 bp, Homo sapien
gattctcgaaagacatcctgaaggt

SEQ ID NO: 2029429 - DNA, 25 bp, Homo sapien
atgactttcttcgaggctagattct

SEQ ID NO: 2029430 - DNA, 25 bp, Homo sapien
tacatcgagagggagagccccgtcc

SEQ ID NO: 2029431 - DNA, 25 bp, Homo sapien
tcgccgtcgtgggtaggaaacagtc

SEQ ID NO: 2029432 - DNA, 25 bp, Homo sapien
cgctgtagcgggtcttcgccgtcgt

SEQ ID NO: 2029433 - DNA, 25 bp, Homo sapien
gcggagcagttcgtagtcgcctaca

SEQ ID NO: 2029434 - DNA, 25 bp, Homo sapien
ttgaccctcgctgggaagcttgatc

SEQ ID NO: 2029435 - DNA, 25 bp, Homo sapien
ttgatcgccgcctgttctcgccaat

SEQ ID NO: 2029436 - DNA, 25 bp, Homo sapien
gttctcgccaatctctatgcctttg

SEQ ID NO: 2029437 - DNA, 25 bp, Homo sapien
gggaagcttgatcgccgcctgttct

SEQ ID NO: 2029438 - DNA, 25 bp, Homo sapien
tttcagctttggcaagcttcctctg

SEQ ID NO: 2029439 - DNA, 25 bp, Homo sapien
ggatttcagctttggcaagcttcct

SEQ ID NO: 2029440 - DNA, 25 bp, Homo sapien
tcagctttggcaagcttcctctgtt

SEQ ID NO: 2029441 - DNA, 25 bp, Homo sapien
agctttggcaagcttcctctgtttc

SEQ ID NO: 2029442 - DNA, 25 bp, Homo sapien
tagctgggcacatgactgccctcaa

SEQ ID NO: 2029443 - DNA, 25 bp, Homo sapien
gactggccttactctgaaattagga

SEQ ID NO: 2029444 - DNA, 25 bp, Homo sapien
aactaaagaagtgaccagaatggag

SEQ ID NO: 2029445 - DNA, 25 bp, Homo sapien
tctgggcatcccttggttcactcaa

SEQ ID NO: 2029446 - DNA, 25 bp, Homo sapien
aaatggcaaaggctcaatcctggac

SEQ ID NO: 2029447 - DNA, 25 bp, Homo sapien
aggctcaatcctggacccagcttca

SEQ ID NO: 2029448 - DNA, 25 bp, Homo sapien
tcaatgcctgcatcggaattcccct

SEQ ID NO: 2029449 - DNA, 25 bp, Homo sapien
actcccaagattgagtccctggcag

SEQ ID NO: 2029450 - DNA, 25 bp, Homo sapien
gcctttccagttgcaggtcatgaga

SEQ ID NO: 2029451 - DNA, 25 bp, Homo sapien
tgagatcataattccagagagggtc

SEQ ID NO: 2029452 - DNA, 25 bp, Homo sapien
tctgtggaatctgatgctatcccca

SEQ ID NO: 2029453 - DNA, 25 bp, Homo sapien
gggtcttacctcataccctggaggc

SEQ ID NO: 2029454 - DNA, 25 bp, Homo sapien
tgacactaattcagaaaaacttcag

SEQ ID NO: 2029455 - DNA, 25 bp, Homo sapien
tgttaagaagtgctgctgtgtgatc

SEQ ID NO: 2029456 - DNA, 25 bp, Homo sapien
gaaggcccttaaaataggagcagga

SEQ ID NO: 2029457 - DNA, 25 bp, Homo sapien
gcaggaaatcccaggtttatgtgga

SEQ ID NO: 2029458 - DNA, 25 bp, Homo sapien
gaacgattatgcaaccagcctaagg

SEQ ID NO: 2029459 - DNA, 25 bp, Homo sapien
actgaggaacctgcatcttgtgatc

SEQ ID NO: 2029460 - DNA, 25 bp, Homo sapien
gcttggctcgccacataatggaaca

SEQ ID NO: 2029461 - DNA, 25 bp, Homo sapien
aattatctgtgacattctaccggca

SEQ ID NO: 2029462 - DNA, 25 bp, Homo sapien
ctcagcttctgtctactccattggg

SEQ ID NO: 2029463 - DNA, 25 bp, Homo sapien
gccacaaatggaccgaagcttacag

SEQ ID NO: 2029464 - DNA, 25 bp, Homo sapien
gtctacagctgagggccaatgattg

SEQ ID NO: 2029465 - DNA, 25 bp, Homo sapien
cacttaatgaggtctaggtctacag

SEQ ID NO: 2029466 - DNA, 25 bp, Homo sapien
aaagaacatgtaagaccagactggg

SEQ ID NO: 2029467 - DNA, 25 bp, Homo sapien
ccagggcccctaagatgagatcagt

SEQ ID NO: 2029468 - DNA, 25 bp, Homo sapien
tccagataaattacacccagggccc

SEQ ID NO: 2029469 - DNA, 25 bp, Homo sapien
gaaaacacccaactgctaaaatctg

SEQ ID NO: 2029470 - DNA, 25 bp, Homo sapien
tactacaattgcaccctaaggcttg

SEQ ID NO: 2029471 - DNA, 25 bp, Homo sapien
tgctcaacacaagtaggcaacatgc

SEQ ID NO: 2029472 - DNA, 25 bp, Homo sapien
ccagtgcctcgcatatgatgctcaa

SEQ ID NO: 2029473 - DNA, 25 bp, Homo sapien
ccttaagtagatgcaggattaaccc

SEQ ID NO: 2029474 - DNA, 25 bp, Homo sapien
taacatcttgggcataacacacacc

SEQ ID NO: 2029475 - DNA, 25 bp, Homo sapien
gccaggatgaagctagcatacaaaa

SEQ ID NO: 2029476 - DNA, 25 bp, Homo sapien
taaaacagcctaggaacggcaatca

SEQ ID NO: 2029477 - DNA, 25 bp, Homo sapien
cagtgacaggactacttttagaaca

SEQ ID NO: 2029478 - DNA, 25 bp, Homo sapien
catttcaatatattcctaaagatgg

SEQ ID NO: 2029479 - DNA, 25 bp, Homo sapien
aaagaaatcctagcaatgaaaaatg

SEQ ID NO: 2029480 - DNA, 25 bp, Homo sapien
ttataattctcatttacggctatga

SEQ ID NO: 2029481 - DNA, 25 bp, Homo sapien
gaacacaattcaaactattgttggc

SEQ ID NO: 2029482 - DNA, 25 bp, Homo sapien
gaaatacgtaagaccaacactacta

SEQ ID NO: 2029483 - DNA, 25 bp, Homo sapien
aagtgcagctgtctactttttactt

SEQ ID NO: 2029484 - DNA, 25 bp, Homo sapien
gcaaaaaaagtgcagctgtctactt

SEQ ID NO: 2029485 - DNA, 25 bp, Homo sapien
tgaaatacgtaagaccaacactact

SEQ ID NO: 2029486 - DNA, 25 bp, Homo sapien
caaatcgcagctggtatggactggt

SEQ ID NO: 2029487 - DNA, 25 bp, Homo sapien
taagaggaacctaagagcttggctc

SEQ ID NO: 2029488 - DNA, 25 bp, Homo sapien
tgggtaggtacagggcaatcaagat

SEQ ID NO: 2029489 - DNA, 25 bp, Homo sapien
taagtccagtgagtacaatgttcca

SEQ ID NO: 2029490 - DNA, 25 bp, Homo sapien
ctacaggctatcgtctccagctgct

SEQ ID NO: 2029491 - DNA, 25 bp, Homo sapien
ctagctacaggctatcgtctccagc

SEQ ID NO: 2029492 - DNA, 25 bp, Homo sapien
tgctgttctgcttccgcagccatcg

SEQ ID NO: 2029493 - DNA, 25 bp, Homo sapien
gctacaggctatcgtctccagctgc

SEQ ID NO: 2029494 - DNA, 25 bp, Homo sapien
aactgttctgtctcgctctggatgg

SEQ ID NO: 2029495 - DNA, 25 bp, Homo sapien
caactgttctgtctcgctctggatg

SEQ ID NO: 2029496 - DNA, 25 bp, Homo sapien
tggccgtagcaattgaccttccgaa

SEQ ID NO: 2029497 - DNA, 25 bp, Homo sapien
gggactggacacatcacgcttctga

SEQ ID NO: 2029498 - DNA, 25 bp, Homo sapien
catgtggcacgcaaacggtctttca

SEQ ID NO: 2029499 - DNA, 25 bp, Homo sapien
caggcaatctgctcccgatggtgac

SEQ ID NO: 2029500 - DNA, 25 bp, Homo sapien
cacaaaattctccttccaggcgttg

SEQ ID NO: 2029501 - DNA, 25 bp, Homo sapien
ccaggcgttgttcatttagtgtttt

SEQ ID NO: 2029502 - DNA, 25 bp, Homo sapien
tgaatttcacatcctcaaccacaat

SEQ ID NO: 2029503 - DNA, 25 bp, Homo sapien
gaaacagagttttatgatcatcgtc

SEQ ID NO: 2029504 - DNA, 25 bp, Homo sapien
tcttaatgccttgaacgccaaaatc

SEQ ID NO: 2029505 - DNA, 25 bp, Homo sapien
gccttgaacgccaaaatcttcagat

SEQ ID NO: 2029506 - DNA, 25 bp, Homo sapien
caactcaggctattatcttaatgcc

SEQ ID NO: 2029507 - DNA, 25 bp, Homo sapien
taactctgatcaggagcacgccaga

SEQ ID NO: 2029508 - DNA, 25 bp, Homo sapien
ggaagaactccatcctgcagaccca

SEQ ID NO: 2029509 - DNA, 25 bp, Homo sapien
cggaagaactccatcctgcagaccc

SEQ ID NO: 2029510 - DNA, 25 bp, Homo sapien
aagaactccatcctgcagacccata

SEQ ID NO: 2029511 - DNA, 25 bp, Homo sapien
gaactccatcctgcagacccatatc

SEQ ID NO: 2029512 - DNA, 25 bp, Homo sapien
cgacttccttgttgcaagcttgcaa

SEQ ID NO: 2029513 - DNA, 25 bp, Homo sapien
ccgggcagcccgacaatggcggctg

SEQ ID NO: 2029514 - DNA, 25 bp, Homo sapien
ggctgcacgacttccttgttgcaag

SEQ ID NO: 2029515 - DNA, 25 bp, Homo sapien
caatggcggctgcacgacttccttg

SEQ ID NO: 2029516 - DNA, 25 bp, Homo sapien
ggaggccgtttgcactccttcccag

SEQ ID NO: 2029517 - DNA, 25 bp, Homo sapien
tcataatcagacgtcgagcgcaggc

SEQ ID NO: 2029518 - DNA, 25 bp, Homo sapien
tctcaatttctttgggcctgggagg

SEQ ID NO: 2029519 - DNA, 25 bp, Homo sapien
caagaagccctcaaggcgtatcgag

SEQ ID NO: 2029520 - DNA, 25 bp, Homo sapien
gcgccgctggcggccgccgcacatc

SEQ ID NO: 2029521 - DNA, 25 bp, Homo sapien
cgcgccgcgccgctggcggccgccg

SEQ ID NO: 2029522 - DNA, 25 bp, Homo sapien
ccgcgccgctggcggccgccgcaca

SEQ ID NO: 2029523 - DNA, 25 bp, Homo sapien
cgccgcgccgctggcggccgccgca

SEQ ID NO: 2029524 - DNA, 25 bp, Homo sapien
gcgctcgctagcaaacgcaggccgg

SEQ ID NO: 2029525 - DNA, 25 bp, Homo sapien
gggaaatcgtgcacgtccctgatgg

SEQ ID NO: 2029526 - DNA, 25 bp, Homo sapien
tcctcctgcacgagcacagaatgtc

SEQ ID NO: 2029527 - DNA, 25 bp, Homo sapien
acagaatgtctagccggccgtgaac

SEQ ID NO: 2029528 - DNA, 25 bp, Homo sapien
atgcaggaggccggacagcaatgcc

SEQ ID NO: 2029529 - DNA, 25 bp, Homo sapien
gccgcgccgccttagagtcgctcat

SEQ ID NO: 2029530 - DNA, 25 bp, Homo sapien
cgagatgcaggaggccggacagcaa

SEQ ID NO: 2029531 - DNA, 25 bp, Homo sapien
gacagcaatgccgcgccgccttaga

SEQ ID NO: 2029532 - DNA, 25 bp, Homo sapien
tgtggcgtcaacgcgggggcagggc

SEQ ID NO: 2029533 - DNA, 25 bp, Homo sapien
aaagtacactgtggcgtcaacgcgg

SEQ ID NO: 2029534 - DNA, 25 bp, Homo sapien
taaaagtacactgtggcgtcaacgc

SEQ ID NO: 2029535 - DNA, 25 bp, Homo sapien
tggcgtcaacgcgggggcagggctt

SEQ ID NO: 2029536 - DNA, 25 bp, Homo sapien
ggtgacatttggagcacgttgttcc

SEQ ID NO: 2029537 - DNA, 25 bp, Homo sapien
tgttcctcacttgggacacccatgg

SEQ ID NO: 2029538 - DNA, 25 bp, Homo sapien
tgatgggtgacatttggagcacgtt

SEQ ID NO: 2029539 - DNA, 25 bp, Homo sapien
agcacgttgttcctcacttgggaca

SEQ ID NO: 2029540 - DNA, 25 bp, Homo sapien
ctaagaattgtgaggcccaggccat

SEQ ID NO: 2029541 - DNA, 25 bp, Homo sapien
cacaacacgaccatggttaggccac

SEQ ID NO: 2029542 - DNA, 25 bp, Homo sapien
tcagcttgggcccttgaatgacaaa

SEQ ID NO: 2029543 - DNA, 25 bp, Homo sapien
tgctgtgacgtccagcacaacacga

SEQ ID NO: 2029544 - DNA, 25 bp, Homo sapien
tttgaaacagcaggataccagcaga

SEQ ID NO: 2029545 - DNA, 25 bp, Homo sapien
tgacagccccgaaagcttgggccat

SEQ ID NO: 2029546 - DNA, 25 bp, Homo sapien
ctgtagggccttgtggtttatagga

SEQ ID NO: 2029547 - DNA, 25 bp, Homo sapien
acaatgacagccccgaaagcttggg

SEQ ID NO: 2029548 - DNA, 25 bp, Homo sapien
tgtagggccttgtggtttataggaa

SEQ ID NO: 2029549 - DNA, 25 bp, Homo sapien
aaatcctagtagctggacaaatagc

SEQ ID NO: 2029550 - DNA, 25 bp, Homo sapien
tgaaaatttctccaatcggcatctg

SEQ ID NO: 2029551 - DNA, 25 bp, Homo sapien
ggtttgtgcaaagcgcatgtcactt

SEQ ID NO: 2029552 - DNA, 25 bp, Homo sapien
gagtgggcatgtttcctcctcagga

SEQ ID NO: 2029553 - DNA, 25 bp, Homo sapien
tttgacttcaactccctcttaactc

SEQ ID NO: 2029554 - DNA, 25 bp, Homo sapien
caaaggatgaaagctagcagagcac

SEQ ID NO: 2029555 - DNA, 25 bp, Homo sapien
gatacttcagcaaaggatgaaagct

SEQ ID NO: 2029556 - DNA, 25 bp, Homo sapien
ttttctgtagggatacttcagcaaa

SEQ ID NO: 2029557 - DNA, 25 bp, Homo sapien
tcacgctggcttggtgactggttct

SEQ ID NO: 2029558 - DNA, 25 bp, Homo sapien
cagacttagggtccccagctgaaga

SEQ ID NO: 2029559 - DNA, 25 bp, Homo sapien
attagacttatttccagacttaggg

SEQ ID NO: 2029560 - DNA, 25 bp, Homo sapien
tcaccagaggacagaagacctgaaa

SEQ ID NO: 2029561 - DNA, 25 bp, Homo sapien
gtagaaagtacacgcacttttgtat

SEQ ID NO: 2029562 - DNA, 25 bp, Homo sapien
tgtagaaagtacacgcacttttgta

SEQ ID NO: 2029563 - DNA, 25 bp, Homo sapien
gactgtagaaagtacacgcactttt

SEQ ID NO: 2029564 - DNA, 25 bp, Homo sapien
actgtagaaagtacacgcacttttg

SEQ ID NO: 2029565 - DNA, 25 bp, Homo sapien
tcttcatgtacatgggtcacatatt

SEQ ID NO: 2029566 - DNA, 25 bp, Homo sapien
aaatcgtacttttgagtgaaccagg

SEQ ID NO: 2029567 - DNA, 25 bp, Homo sapien
taggtgggcttctcaaaatcgtact

SEQ ID NO: 2029568 - DNA, 25 bp, Homo sapien
tgtacatgggtcacatattccacat

SEQ ID NO: 2029569 - DNA, 25 bp, Homo sapien
gcattgcacactctcctattgcatt

SEQ ID NO: 2029570 - DNA, 25 bp, Homo sapien
ggaagaaggtgcctgccagtttcac

SEQ ID NO: 2029571 - DNA, 25 bp, Homo sapien
tcttgtgcattgcacactctcctat

SEQ ID NO: 2029572 - DNA, 25 bp, Homo sapien
ctttgctcctctcttgtgcattgca

SEQ ID NO: 2029573 - DNA, 25 bp, Homo sapien
tctggtgccaaggagcttgtcatct

SEQ ID NO: 2029574 - DNA, 25 bp, Homo sapien
gaggacttagtggagaatggctaaa

SEQ ID NO: 2029575 - DNA, 25 bp, Homo sapien
tgtgggacacggagaaggaggactt

SEQ ID NO: 2029576 - DNA, 25 bp, Homo sapien
cttgtcatctcaggagacaaggcac

SEQ ID NO: 2029577 - DNA, 25 bp, Homo sapien
cttccagggcgagataagactttcc

SEQ ID NO: 2029578 - DNA, 25 bp, Homo sapien
ttgaaatttctagcaggcatccgca

SEQ ID NO: 2029579 - DNA, 25 bp, Homo sapien
tctagcaggcatccgcaagcattca

SEQ ID NO: 2029580 - DNA, 25 bp, Homo sapien
aaatttctagcaggcatccgcaagc

SEQ ID NO: 2029581 - DNA, 25 bp, Homo sapien
cgggatacagtataatgcagaaacc

SEQ ID NO: 2029582 - DNA, 25 bp, Homo sapien
tctcccgggatacagtataatgcag

SEQ ID NO: 2029583 - DNA, 25 bp, Homo sapien
tcccgggatacagtataatgcagaa

SEQ ID NO: 2029584 - DNA, 25 bp, Homo sapien
gatacagtataatgcagaaacccca

SEQ ID NO: 2029585 - DNA, 25 bp, Homo sapien
tctaaggccgtgaggaaagataatc

SEQ ID NO: 2029586 - DNA, 25 bp, Homo sapien
gaatgaacagaccagtctaaggccg

SEQ ID NO: 2029587 - DNA, 25 bp, Homo sapien
tccaggtgggacaagtgcgaatgca

SEQ ID NO: 2029588 - DNA, 25 bp, Homo sapien
ctttgtcgggatgagaacacagctg

SEQ ID NO: 2029589 - DNA, 25 bp, Homo sapien
gaaggcatttcaaaggcccaataat

SEQ ID NO: 2029590 - DNA, 25 bp, Homo sapien
tttaggattcaagcccagagtcatt

SEQ ID NO: 2029591 - DNA, 25 bp, Homo sapien
cgagttgtggcaaatgctgctcata

SEQ ID NO: 2029592 - DNA, 25 bp, Homo sapien
aaataatagaccacactgaaggcat

SEQ ID NO: 2029593 - DNA, 25 bp, Homo sapien
ctgccatacatggaaagatcctggg

SEQ ID NO: 2029594 - DNA, 25 bp, Homo sapien
ggtgctcagtactcatccaaatcca

SEQ ID NO: 2029595 - DNA, 25 bp, Homo sapien
gctctgtcctgtgatcggtgctcag

SEQ ID NO: 2029596 - DNA, 25 bp, Homo sapien
agaagagaactcacatgaaggctgc

SEQ ID NO: 2029597 - DNA, 25 bp, Homo sapien
gctggaaaatattctggctcctcct

SEQ ID NO: 2029598 - DNA, 25 bp, Homo sapien
gaaatccatgttattattttggcag

SEQ ID NO: 2029599 - DNA, 25 bp, Homo sapien
gcttagaattagaatcagattggcc

SEQ ID NO: 2029600 - DNA, 25 bp, Homo sapien
tgagtaagactggaattcagctgga

SEQ ID NO: 2029601 - DNA, 25 bp, Homo sapien
aaatctgacacaccggacggaccta

SEQ ID NO: 2029602 - DNA, 25 bp, Homo sapien
tgatcgtgtaatggagaatctctct

SEQ ID NO: 2029603 - DNA, 25 bp, Homo sapien
gaaacatacattcaccatgggctgt

SEQ ID NO: 2029604 - DNA, 25 bp, Homo sapien
aagcattacatatttccagagggtc

SEQ ID NO: 2029605 - DNA, 25 bp, Homo sapien
agcatttgagggtaatcttcattta

SEQ ID NO: 2029606 - DNA, 25 bp, Homo sapien
gcatttgagggtaatcttcatttat

SEQ ID NO: 2029607 - DNA, 25 bp, Homo sapien
ggtatagctgaaaactgagacattt

SEQ ID NO: 2029608 - DNA, 25 bp, Homo sapien
tatattgttggttatgaacgtgcag

SEQ ID NO: 2029609 - DNA, 25 bp, Homo sapien
tgtttatgtgttacatgagaccacg

SEQ ID NO: 2029610 - DNA, 25 bp, Homo sapien
ttatcgttgcttcatgcattatcgg

SEQ ID NO: 2029611 - DNA, 25 bp, Homo sapien
tattatgggaagatctctctgccag

SEQ ID NO: 2029612 - DNA, 25 bp, Homo sapien
gctctggttttcctaacggtttgca

SEQ ID NO: 2029613 - DNA, 25 bp, Homo sapien
gactgaaattttccacggacagata

SEQ ID NO: 2029614 - DNA, 25 bp, Homo sapien
gagggaactccatataggctctggt

SEQ ID NO: 2029615 - DNA, 25 bp, Homo sapien
gtaaccagcccaacaaatgccagtg

SEQ ID NO: 2029616 - DNA, 25 bp, Homo sapien
taattacaacaacgcccaagtggct

SEQ ID NO: 2029617 - DNA, 25 bp, Homo sapien
gatgccatgacattccagcgttaag

SEQ ID NO: 2029618 - DNA, 25 bp, Homo sapien
caccaagttgtgcaagtcgctcgac

SEQ ID NO: 2029619 - DNA, 25 bp, Homo sapien
caatcctctccatcttctggtgtga

SEQ ID NO: 2029620 - DNA, 25 bp, Homo sapien
tcaatcctctccatcttctggtgtg

SEQ ID NO: 2029621 - DNA, 25 bp, Homo sapien
aatcctctccatcttctggtgtgat

SEQ ID NO: 2029622 - DNA, 25 bp, Homo sapien
tctttatggaccactactttggtca

SEQ ID NO: 2029623 - DNA, 25 bp, Homo sapien
ttatggaccactactttggtcactg

SEQ ID NO: 2029624 - DNA, 25 bp, Homo sapien
tgtctctttatggaccactactttg

SEQ ID NO: 2029625 - DNA, 25 bp, Homo sapien
tctctttatggaccactactttggt

SEQ ID NO: 2029626 - DNA, 25 bp, Homo sapien
tcttcggaatacatgctggactaga

SEQ ID NO: 2029627 - DNA, 25 bp, Homo sapien
gccagggtatttaccgtctcacaca

SEQ ID NO: 2029628 - DNA, 25 bp, Homo sapien
gaggtggagacttatgagctagatc

SEQ ID NO: 2029629 - DNA, 25 bp, Homo sapien
catatattggaaagttaattcggaa

SEQ ID NO: 2029630 - DNA, 25 bp, Homo sapien
ctgcatcccccgtgatgactattcg

SEQ ID NO: 2029631 - DNA, 25 bp, Homo sapien
ccccgtgatgactattcgcttctca

SEQ ID NO: 2029632 - DNA, 25 bp, Homo sapien
gcatcccccgtgatgactattcgct

SEQ ID NO: 2029633 - DNA, 25 bp, Homo sapien
gtgatgactattcgcttctcaattc

SEQ ID NO: 2029634 - DNA, 25 bp, Homo sapien
gatgtgatcgtctgtgcactcatca

SEQ ID NO: 2029635 - DNA, 25 bp, Homo sapien
ttggtgatgtgcgtagtggtggtgg

SEQ ID NO: 2029636 - DNA, 25 bp, Homo sapien
gctccagatctgtgcctggatcgac

SEQ ID NO: 2029637 - DNA, 25 bp, Homo sapien
tggtttcagatgtgatcgtctgtgc

SEQ ID NO: 2029638 - DNA, 25 bp, Homo sapien
ccagggctctggtcttcacagaata

SEQ ID NO: 2029639 - DNA, 25 bp, Homo sapien
gtctcatgaattaaatatcgtgcag

SEQ ID NO: 2029640 - DNA, 25 bp, Homo sapien
tgtaaacacactaggccatagaggg

SEQ ID NO: 2029641 - DNA, 25 bp, Homo sapien
gctgctggatcctctaagtctcatg

SEQ ID NO: 2029642 - DNA, 25 bp, Homo sapien
gaaacactgccaaaactgatggttt

SEQ ID NO: 2029643 - DNA, 25 bp, Homo sapien
tgatggttttggtttcggtgtgaac

SEQ ID NO: 2029644 - DNA, 25 bp, Homo sapien
tctagctttactcctcccggtgaaa

SEQ ID NO: 2029645 - DNA, 25 bp, Homo sapien
tttcggtgtgaactactggcacttc

SEQ ID NO: 2029646 - DNA, 25 bp, Homo sapien
aaatgtggatggctgcactctgctc

SEQ ID NO: 2029647 - DNA, 25 bp, Homo sapien
tccaggacagctttagcgacctcct

SEQ ID NO: 2029648 - DNA, 25 bp, Homo sapien
tcttgtcgctcacgggaagcagcgg

SEQ ID NO: 2029649 - DNA, 25 bp, Homo sapien
tctgctcctcttgtcgctcacggga

SEQ ID NO: 2029650 - DNA, 25 bp, Homo sapien
taatgcctgtgaatgcgggctgtgc

SEQ ID NO: 2029651 - DNA, 25 bp, Homo sapien
ctgtctcccgccgagtaagaagcat

SEQ ID NO: 2029652 - DNA, 25 bp, Homo sapien
tttaatgcctgtgaatgcgggctgt

SEQ ID NO: 2029653 - DNA, 25 bp, Homo sapien
gagtaagaagcatccccactcgcgt

SEQ ID NO: 2029654 - DNA, 25 bp, Homo sapien
caccttctcagtgctaagcggcagg

SEQ ID NO: 2029655 - DNA, 25 bp, Homo sapien
gccgctcctccaccaacacggtctc

SEQ ID NO: 2029656 - DNA, 25 bp, Homo sapien
gcaggtggtgcacggtgggttccgt

SEQ ID NO: 2029657 - DNA, 25 bp, Homo sapien
ccaacacggtctcctgcaccacctt

SEQ ID NO: 2029658 - DNA, 25 bp, Homo sapien
ctggactccgtcttggtttccattt

SEQ ID NO: 2029659 - DNA, 25 bp, Homo sapien
actggactccgtcttggtttccatt

SEQ ID NO: 2029660 - DNA, 25 bp, Homo sapien
ctattccactggactccgtcttggt

SEQ ID NO: 2029661 - DNA, 25 bp, Homo sapien
ttccactggactccgtcttggtttc

SEQ ID NO: 2029662 - DNA, 25 bp, Homo sapien
agtgtgaccatccataaaccaaagg

SEQ ID NO: 2029663 - DNA, 25 bp, Homo sapien
gaccatccataaaccaaaggtcaga

SEQ ID NO: 2029664 - DNA, 25 bp, Homo sapien
tgtggcatcagtgtgaccatccata

SEQ ID NO: 2029665 - DNA, 25 bp, Homo sapien
ctgcatgggaagagattgtggcatc

SEQ ID NO: 2029666 - DNA, 25 bp, Homo sapien
caccaaggacgaaaacaaatggcca

SEQ ID NO: 2029667 - DNA, 25 bp, Homo sapien
tatgatcgcctttcgaatagtgaag

SEQ ID NO: 2029668 - DNA, 25 bp, Homo sapien
gcattgcagcgcattcacgttggtt

SEQ ID NO: 2029669 - DNA, 25 bp, Homo sapien
cattcttgagatgcaactaaaggca

SEQ ID NO: 2029670 - DNA, 25 bp, Homo sapien
tttcgcgcagactctaataaactga

SEQ ID NO: 2029671 - DNA, 25 bp, Homo sapien
gaattctgttggttttcgcgcagac

SEQ ID NO: 2029672 - DNA, 25 bp, Homo sapien
gaagtagaagtaacccctcctatga

SEQ ID NO: 2029673 - DNA, 25 bp, Homo sapien
taacccctcctatgaattctgttgg

SEQ ID NO: 2029674 - DNA, 25 bp, Homo sapien
gcagcactatcacatcttgggaaca

SEQ ID NO: 2029675 - DNA, 25 bp, Homo sapien
caaaatcgtaggcagaggagacagg

SEQ ID NO: 2029676 - DNA, 25 bp, Homo sapien
cagggtggcgccgatttaagcagat

SEQ ID NO: 2029677 - DNA, 25 bp, Homo sapien
cagagacggttattaggatcagggt

SEQ ID NO: 2029678 - DNA, 25 bp, Homo sapien
gcagcaagagaaacggaaaggtttg

SEQ ID NO: 2029679 - DNA, 25 bp, Homo sapien
catgctggaattgcaaactgtggcc

SEQ ID NO: 2029680 - DNA, 25 bp, Homo sapien
tctcaacataaagccaagcagcaag

SEQ ID NO: 2029681 - DNA, 25 bp, Homo sapien
aatgctgactttgcactgcggtatt

SEQ ID NO: 2029682 - DNA, 25 bp, Homo sapien
tagcaacggtaaaggctggttcctg

SEQ ID NO: 2029683 - DNA, 25 bp, Homo sapien
aatgggcagtagcaacggtaaaggc

SEQ ID NO: 2029684 - DNA, 25 bp, Homo sapien
ctcgggaggcggatgactcagtaac

SEQ ID NO: 2029685 - DNA, 25 bp, Homo sapien
gatgactcagtaacgtaatgggcag

SEQ ID NO: 2029686 - DNA, 25 bp, Homo sapien
tcatcagcgagggtttccaggacct

SEQ ID NO: 2029687 - DNA, 25 bp, Homo sapien
agtcatagtaacaattctcccggag

SEQ ID NO: 2029688 - DNA, 25 bp, Homo sapien
cagttttactgctcacggtcaccac

SEQ ID NO: 2029689 - DNA, 25 bp, Homo sapien
caatttccgctgtgtcgtctggacc

SEQ ID NO: 2029690 - DNA, 25 bp, Homo sapien
cattcggtaggtagagttgcaactt

SEQ ID NO: 2029691 - DNA, 25 bp, Homo sapien
ggcaactgctacatgcaggtctgtg

SEQ ID NO: 2029692 - DNA, 25 bp, Homo sapien
tactgttatcacagagagcttccca

SEQ ID NO: 2029693 - DNA, 25 bp, Homo sapien
tgatgggaccatacagtgctcatgt

SEQ ID NO: 2029694 - DNA, 25 bp, Homo sapien
ttacagagggaagagatatcaaacc

SEQ ID NO: 2029695 - DNA, 25 bp, Homo sapien
tttagtgttagttccaataaggcaa

SEQ ID NO: 2029696 - DNA, 25 bp, Homo sapien
cttcacagattacagagggaagaga

SEQ ID NO: 2029697 - DNA, 25 bp, Homo sapien
accaggtaggttaatagcttcacag

SEQ ID NO: 2029698 - DNA, 25 bp, Homo sapien
gaagtaaccacagagtcagcagagt

SEQ ID NO: 2029699 - DNA, 25 bp, Homo sapien
tggaaaattatttgacgagaagtaa

SEQ ID NO: 2029700 - DNA, 25 bp, Homo sapien
accacagagtcagcagagtctcctt

SEQ ID NO: 2029701 - DNA, 25 bp, Homo sapien
ttatttgacgagaagtaaccacaga

SEQ ID NO: 2029702 - DNA, 25 bp, Homo sapien
taagagcattttaatgacactgaag

SEQ ID NO: 2029703 - DNA, 25 bp, Homo sapien
ctaagagcattttaatgacactgaa

SEQ ID NO: 2029704 - DNA, 25 bp, Homo sapien
tgaagtctgaagaccaatttcttct

SEQ ID NO: 2029705 - DNA, 25 bp, Homo sapien
taatgacactgaagtctgaagacca

SEQ ID NO: 2029706 - DNA, 25 bp, Homo sapien
aatggagcgcttccttgctgcaaaa

SEQ ID NO: 2029707 - DNA, 25 bp, Homo sapien
gactcaaggaatggagcgcttcctt

SEQ ID NO: 2029708 - DNA, 25 bp, Homo sapien
aggaatggagcgcttccttgctgca

SEQ ID NO: 2029709 - DNA, 25 bp, Homo sapien
ctgagactcaaggaatggagcgctt

SEQ ID NO: 2029710 - DNA, 25 bp, Homo sapien
gaacatctggaatattctgcaggac

SEQ ID NO: 2029711 - DNA, 25 bp, Homo sapien
ggacctaccctgacagattttgata

SEQ ID NO: 2029712 - DNA, 25 bp, Homo sapien
caagcctaagttgaaccaagcgttc

SEQ ID NO: 2029713 - DNA, 25 bp, Homo sapien
agcgttcaacttcacagagcaggga

SEQ ID NO: 2029714 - DNA, 25 bp, Homo sapien
taatagcctggacttatgaagttcc

SEQ ID NO: 2029715 - DNA, 25 bp, Homo sapien
tatccagggaaagttcagtatattc

SEQ ID NO: 2029716 - DNA, 25 bp, Homo sapien
aaacaaccctgcagacgctgaaagc

SEQ ID NO: 2029717 - DNA, 25 bp, Homo sapien
ccattctgcagagggcatgtttttc

SEQ ID NO: 2029718 - DNA, 25 bp, Homo sapien
tccccataaagtggtcttacagaaa

SEQ ID NO: 2029719 - DNA, 25 bp, Homo sapien
tgggagccctgaagtaacaccagct

SEQ ID NO: 2029720 - DNA, 25 bp, Homo sapien
taacagtagacagtcaagttagcac

SEQ ID NO: 2029721 - DNA, 25 bp, Homo sapien
taagcactgcatatagaccactgtt

SEQ ID NO: 2029722 - DNA, 25 bp, Homo sapien
tcagggacaagtggttcgatcatgg

SEQ ID NO: 2029723 - DNA, 25 bp, Homo sapien
gatgtttcatcaggtcatcttgagt

SEQ ID NO: 2029724 - DNA, 25 bp, Homo sapien
ggttcttttcagctcgctaatgttg

SEQ ID NO: 2029725 - DNA, 25 bp, Homo sapien
cattcgttacggcagtgtctgttga

SEQ ID NO: 2029726 - DNA, 25 bp, Homo sapien
cacacaggaaaagggatctatatct

SEQ ID NO: 2029727 - DNA, 25 bp, Homo sapien
caaaattttgatcaaggctcatggc

SEQ ID NO: 2029728 - DNA, 25 bp, Homo sapien
tctatatctaggagcgaataacaaa

SEQ ID NO: 2029729 - DNA, 25 bp, Homo sapien
tctagttcacacaaacatggatacc

SEQ ID NO: 2029730 - DNA, 25 bp, Homo sapien
taacataagattactatgtttgaca

SEQ ID NO: 2029731 - DNA, 25 bp, Homo sapien
ccctttattcgtttaatcagactat

SEQ ID NO: 2029732 - DNA, 25 bp, Homo sapien
ttcaccctttattcgtttaatcaga

SEQ ID NO: 2029733 - DNA, 25 bp, Homo sapien
ctctaacataagattactatgtttg

SEQ ID NO: 2029734 - DNA, 25 bp, Homo sapien
tgagctctgcatcttcctcctggtc

SEQ ID NO: 2029735 - DNA, 25 bp, Homo sapien
gctctgcatcttcctcctggtccga

SEQ ID NO: 2029736 - DNA, 25 bp, Homo sapien
ctgtgccttgagctctgcatcttcc

SEQ ID NO: 2029737 - DNA, 25 bp, Homo sapien
ttgagctctgcatcttcctcctggt

SEQ ID NO: 2029738 - DNA, 25 bp, Homo sapien
tgcggtgtccgtgcgctcactgtca

SEQ ID NO: 2029739 - DNA, 25 bp, Homo sapien
tggtctccccgtcggctgcggtgtc

SEQ ID NO: 2029740 - DNA, 25 bp, Homo sapien
cagtggtctccccgtcggctgcggt

SEQ ID NO: 2029741 - DNA, 25 bp, Homo sapien
tcggctgcggtgtccgtgcgctcac

SEQ ID NO: 2029742 - DNA, 25 bp, Homo sapien
cattgtctagggaggcgctcaagga

SEQ ID NO: 2029743 - DNA, 25 bp, Homo sapien
ttcctctgaactgtcactcgggtca

SEQ ID NO: 2029744 - DNA, 25 bp, Homo sapien
tgtcactcgggtcattgtctaggga

SEQ ID NO: 2029745 - DNA, 25 bp, Homo sapien
aaggagagagtgagagcgtatggca

SEQ ID NO: 2029746 - DNA, 25 bp, Homo sapien
gcacaagggacggtgagcggatcgg

SEQ ID NO: 2029747 - DNA, 25 bp, Homo sapien
tcgggaggtaatgctgcaagctctg

SEQ ID NO: 2029748 - DNA, 25 bp, Homo sapien
catcatcatctaggagggaggggaa

SEQ ID NO: 2029749 - DNA, 25 bp, Homo sapien
gacggtgagcggatcgggaggtaat

SEQ ID NO: 2029750 - DNA, 25 bp, Homo sapien
agggtggtccccttgccagtttgct

SEQ ID NO: 2029751 - DNA, 25 bp, Homo sapien
gctgtctgtagctaaaagccacatc

SEQ ID NO: 2029752 - DNA, 25 bp, Homo sapien
cccttgccagtttgctgtctgtagc

SEQ ID NO: 2029753 - DNA, 25 bp, Homo sapien
ttgctgtctgtagctaaaagccaca

SEQ ID NO: 2029754 - DNA, 25 bp, Homo sapien
tttgcagtcattctccttacacctc

SEQ ID NO: 2029755 - DNA, 25 bp, Homo sapien
tctggacggctcataacctggcagt

SEQ ID NO: 2029756 - DNA, 25 bp, Homo sapien
gcagtttgcagtcattctccttaca

SEQ ID NO: 2029757 - DNA, 25 bp, Homo sapien
agctctggacggctcataacctggc

SEQ ID NO: 2029758 - DNA, 25 bp, Homo sapien
ggatgggggtgacaagggacatgag

SEQ ID NO: 2029759 - DNA, 25 bp, Homo sapien
atgggggtgacaagggacatgagtc

SEQ ID NO: 2029760 - DNA, 25 bp, Homo sapien
ggacatgagtcagtgccaagcccag

SEQ ID NO: 2029761 - DNA, 25 bp, Homo sapien
tgggagatgtgggggcacaatgggt

SEQ ID NO: 2029762 - DNA, 25 bp, Homo sapien
taagatacacatacaggacagctat

SEQ ID NO: 2029763 - DNA, 25 bp, Homo sapien
cagttctgaaatgtgagcccaaaca

SEQ ID NO: 2029764 - DNA, 25 bp, Homo sapien
cactactctgctgattaggcgtaag

SEQ ID NO: 2029765 - DNA, 25 bp, Homo sapien
ggtcactccatgtacttacagtcag

SEQ ID NO: 2029766 - DNA, 25 bp, Homo sapien
gatcaagttggtctgagagatgcct

SEQ ID NO: 2029767 - DNA, 25 bp, Homo sapien
tttgttgtggcgtactggccagtac

SEQ ID NO: 2029768 - DNA, 25 bp, Homo sapien
gccgagatgggcgtgacttcttccc

SEQ ID NO: 2029769 - DNA, 25 bp, Homo sapien
cctcgtgccggatggccgagatggg

SEQ ID NO: 2029770 - DNA, 25 bp, Homo sapien
cagacatagaatccttcatgtatat

SEQ ID NO: 2029771 - DNA, 25 bp, Homo sapien
ctgcagcagacatagaatccttcat

SEQ ID NO: 2029772 - DNA, 25 bp, Homo sapien
gcagcagacatagaatccttcatgt

SEQ ID NO: 2029773 - DNA, 25 bp, Homo sapien
atttcatggttttcattcactgatg

SEQ ID NO: 2029774 - DNA, 25 bp, Homo sapien
tgtcttctcagcagtcattatcaca

SEQ ID NO: 2029775 - DNA, 25 bp, Homo sapien
ttctgtcttctcagcagtcattatc

SEQ ID NO: 2029776 - DNA, 25 bp, Homo sapien
tctgtcttctcagcagtcattatca

SEQ ID NO: 2029777 - DNA, 25 bp, Homo sapien
tcttctgtcttctcagcagtcatta

SEQ ID NO: 2029778 - DNA, 25 bp, Homo sapien
gttattaagggccagtaagcgatgc

SEQ ID NO: 2029779 - DNA, 25 bp, Homo sapien
tattaagggccagtaagcgatgcct

SEQ ID NO: 2029780 - DNA, 25 bp, Homo sapien
ctaggttattaagggccagtaagcg

SEQ ID NO: 2029781 - DNA, 25 bp, Homo sapien
ttaagggccagtaagcgatgcctac

SEQ ID NO: 2029782 - DNA, 25 bp, Homo sapien
tgggcgatctatcaacgcactggct

SEQ ID NO: 2029783 - DNA, 25 bp, Homo sapien
tgtcctgccactataacgaaacttg

SEQ ID NO: 2029784 - DNA, 25 bp, Homo sapien
cgttcaaagtaaggtgctgggcgat

SEQ ID NO: 2029785 - DNA, 25 bp, Homo sapien
caagctgcgagacatggtataacgt

SEQ ID NO: 2029786 - DNA, 25 bp, Homo sapien
gctcaacacatactttccataaacg

SEQ ID NO: 2029787 - DNA, 25 bp, Homo sapien
agctcgatggtttggcagcttaaac

SEQ ID NO: 2029788 - DNA, 25 bp, Homo sapien
tggcagcttaaacccaatggtgctt

SEQ ID NO: 2029789 - DNA, 25 bp, Homo sapien
taaacgcttggcagctcgatggttt

SEQ ID NO: 2029790 - DNA, 25 bp, Homo sapien
gaaccttgggccaggcaaatctgtt

SEQ ID NO: 2029791 - DNA, 25 bp, Homo sapien
cagccggtcgcgatatatcaacaga

SEQ ID NO: 2029792 - DNA, 25 bp, Homo sapien
cggccggatcttaatgtaaaagttg

SEQ ID NO: 2029793 - DNA, 25 bp, Homo sapien
aaatctgtttattcgcagccggtcg

SEQ ID NO: 2029794 - DNA, 25 bp, Homo sapien
tacttgcacatttcatgtttaggta

SEQ ID NO: 2029795 - DNA, 25 bp, Homo sapien
tcagagacgttgtatcaagcttagg

SEQ ID NO: 2029796 - DNA, 25 bp, Homo sapien
ggagatgtaccacatacagtctttc

SEQ ID NO: 2029797 - DNA, 25 bp, Homo sapien
gatgtgtgatgtccagaggtcatca

SEQ ID NO: 2029798 - DNA, 25 bp, Homo sapien
ggcattactgatcctttaaaaccag

SEQ ID NO: 2029799 - DNA, 25 bp, Homo sapien
aaaccagccaatctgtctgcgccac

SEQ ID NO: 2029800 - DNA, 25 bp, Homo sapien
tgacacacagctggcattactgatc

SEQ ID NO: 2029801 - DNA, 25 bp, Homo sapien
tgtctgcgccaccactcagagatga

SEQ ID NO: 2029802 - DNA, 25 bp, Homo sapien
cgaggacgcactgccagaatcactg

SEQ ID NO: 2029803 - DNA, 25 bp, Homo sapien
gaggacgcactgccagaatcactgc

SEQ ID NO: 2029804 - DNA, 25 bp, Homo sapien
ggcagagtgcaggaacgaggacgca

SEQ ID NO: 2029805 - DNA, 25 bp, Homo sapien
tctgggcagtaagagaatcaaagtg

SEQ ID NO: 2029806 - DNA, 25 bp, Homo sapien
tacatcctgaggtgcacttcctgaa

SEQ ID NO: 2029807 - DNA, 25 bp, Homo sapien
tgttatctgagtgcaaaataggtga

SEQ ID NO: 2029808 - DNA, 25 bp, Homo sapien
cctataatgctacagttgcgcttgc

SEQ ID NO: 2029809 - DNA, 25 bp, Homo sapien
gtaaatctaccccatacattgataa

SEQ ID NO: 2029810 - DNA, 25 bp, Homo sapien
gcatgatgtaaatctaccccataca

SEQ ID NO: 2029811 - DNA, 25 bp, Homo sapien
gatgtaaatctaccccatacattga

SEQ ID NO: 2029812 - DNA, 25 bp, Homo sapien
cttagcatgatgtaaatctacccca

SEQ ID NO: 2029813 - DNA, 25 bp, Homo sapien
tcatctgggtcatagtctccgagct

SEQ ID NO: 2029814 - DNA, 25 bp, Homo sapien
tctccgagctctgactggacagtgt

SEQ ID NO: 2029815 - DNA, 25 bp, Homo sapien
gaactcactaatgtaatcgctccca

SEQ ID NO: 2029816 - DNA, 25 bp, Homo sapien
ggtttggtgcaaagcggaactcact

SEQ ID NO: 2029817 - DNA, 25 bp, Homo sapien
ccagcaaggccagggtaacaaagga

SEQ ID NO: 2029818 - DNA, 25 bp, Homo sapien
agggcagccttccggacacgatgtc

SEQ ID NO: 2029819 - DNA, 25 bp, Homo sapien
gccttccggacacgatgtcatctcg

SEQ ID NO: 2029820 - DNA, 25 bp, Homo sapien
ttccggacacgatgtcatctcgcaa

SEQ ID NO: 2029821 - DNA, 25 bp, Homo sapien
caacgaaggcagcatgaggatacag

SEQ ID NO: 2029822 - DNA, 25 bp, Homo sapien
tttcaggtaactcaatagctatgtc

SEQ ID NO: 2029823 - DNA, 25 bp, Homo sapien
aacagatttcaggtaactcaatagc

SEQ ID NO: 2029824 - DNA, 25 bp, Homo sapien
caggtaactcaatagctatgtcatt

SEQ ID NO: 2029825 - DNA, 25 bp, Homo sapien
caatagctatgtcattataaacttc

SEQ ID NO: 2029826 - DNA, 25 bp, Homo sapien
gccatttgagcgtggatgattgtaa

SEQ ID NO: 2029827 - DNA, 25 bp, Homo sapien
ttgtttgccatttgagcgtggatga

SEQ ID NO: 2029828 - DNA, 25 bp, Homo sapien
atttgagcgtggatgattgtaaggc

SEQ ID NO: 2029829 - DNA, 25 bp, Homo sapien
tgagcgtggatgattgtaaggctac

SEQ ID NO: 2029830 - DNA, 25 bp, Homo sapien
tgtcttttgcatagccaactttcaa

SEQ ID NO: 2029831 - DNA, 25 bp, Homo sapien
gtaagcacgctctttccggagcatt

SEQ ID NO: 2029832 - DNA, 25 bp, Homo sapien
caactctcccaatatgcttgtcttt

SEQ ID NO: 2029833 - DNA, 25 bp, Homo sapien
cagatgtaagcacgctctttccgga

SEQ ID NO: 2029834 - DNA, 25 bp, Homo sapien
tggtgatatcttcagatagttgggc

SEQ ID NO: 2029835 - DNA, 25 bp, Homo sapien
ggtgatatcttcagatagttgggca

SEQ ID NO: 2029836 - DNA, 25 bp, Homo sapien
tgatatcttcagatagttgggcagg

SEQ ID NO: 2029837 - DNA, 25 bp, Homo sapien
gtgatatcttcagatagttgggcag

SEQ ID NO: 2029838 - DNA, 25 bp, Homo sapien
ttatttccttagcagggtccaacca

SEQ ID NO: 2029839 - DNA, 25 bp, Homo sapien
gcagtttgggcctgacaaaagtctt

SEQ ID NO: 2029840 - DNA, 25 bp, Homo sapien
ttcttttataaccattgccttcagg

SEQ ID NO: 2029841 - DNA, 25 bp, Homo sapien
atgcacatgtatgcagtttgggcct

SEQ ID NO: 2029842 - DNA, 25 bp, Homo sapien
catgtatgcagtttgggcctgacaa

SEQ ID NO: 2029843 - DNA, 25 bp, Homo sapien
tctcgatacgtaagcccaaagtagt

SEQ ID NO: 2029844 - DNA, 25 bp, Homo sapien
ttctctagcaagttcaagtgttcac

SEQ ID NO: 2029845 - DNA, 25 bp, Homo sapien
ttctggttttcagcatctcgatacg

SEQ ID NO: 2029846 - DNA, 25 bp, Homo sapien
ctagcaagttcaagtgttcacacac

SEQ ID NO: 2029847 - DNA, 25 bp, Homo sapien
caagaggcatgggttagctcaaaca

SEQ ID NO: 2029848 - DNA, 25 bp, Homo sapien
gactgttaatgctacctggctctca

SEQ ID NO: 2029849 - DNA, 25 bp, Homo sapien
gaccacagccatttctcaacggagg

SEQ ID NO: 2029850 - DNA, 25 bp, Homo sapien
gcaggcgccctggttacagttccaa

SEQ ID NO: 2029851 - DNA, 25 bp, Homo sapien
tcccagctgtgtctctgggcactca

SEQ ID NO: 2029852 - DNA, 25 bp, Homo sapien
cccagctgtgtctctgggcactcac

SEQ ID NO: 2029853 - DNA, 25 bp, Homo sapien
atcccagctgtgtctctgggcactc

SEQ ID NO: 2029854 - DNA, 25 bp, Homo sapien
tgcaatggcattgggcctcctgcat

SEQ ID NO: 2029855 - DNA, 25 bp, Homo sapien
catttgcaatggcattgggcctcct

SEQ ID NO: 2029856 - DNA, 25 bp, Homo sapien
cctgaccgtaaagacatttgcaatg

SEQ ID NO: 2029857 - DNA, 25 bp, Homo sapien
taaagacatttgcaatggcattggg

SEQ ID NO: 2029858 - DNA, 25 bp, Homo sapien
caaggcaccagctatcctatgtgaa

SEQ ID NO: 2029859 - DNA, 25 bp, Homo sapien
ggacttaatgggatctttcagccta

SEQ ID NO: 2029860 - DNA, 25 bp, Homo sapien
tctcaagtgtacatgcaatgccacg

SEQ ID NO: 2029861 - DNA, 25 bp, Homo sapien
tactaatcccaaatgtggtccaggc

SEQ ID NO: 2029862 - DNA, 25 bp, Homo sapien
gattcaggtcactaagccaacgcat

SEQ ID NO: 2029863 - DNA, 25 bp, Homo sapien
ctagcagaaacattgggcttgattt

SEQ ID NO: 2029864 - DNA, 25 bp, Homo sapien
gccaacgcatgcaaaatgaacgcag

SEQ ID NO: 2029865 - DNA, 25 bp, Homo sapien
cacatacgagatgttggcagcaaac

SEQ ID NO: 2029866 - DNA, 25 bp, Homo sapien
gaaagccagtgctaatcctctttgc

SEQ ID NO: 2029867 - DNA, 25 bp, Homo sapien
acattcctctatcagggcatcctgg

SEQ ID NO: 2029868 - DNA, 25 bp, Homo sapien
ggcatcctggcttaatactgcgtga

SEQ ID NO: 2029869 - DNA, 25 bp, Homo sapien
tgcgtgaacccacaatcccagaaag

SEQ ID NO: 2029870 - DNA, 25 bp, Homo sapien
gctctctcctgcaaagaggagactg

SEQ ID NO: 2029871 - DNA, 25 bp, Homo sapien
ttctacccgttcgtccttctctcca

SEQ ID NO: 2029872 - DNA, 25 bp, Homo sapien
acacctccacgccccgaagccttct

SEQ ID NO: 2029873 - DNA, 25 bp, Homo sapien
ttctctccaccactcaagcacccct

SEQ ID NO: 2029874 - DNA, 25 bp, Homo sapien
ctgattagtgggtgtgatcatctga

SEQ ID NO: 2029875 - DNA, 25 bp, Homo sapien
caccatctgattagtgggtgtgatc

SEQ ID NO: 2029876 - DNA, 25 bp, Homo sapien
ggtgtgatcatctgatgaatgcaga

SEQ ID NO: 2029877 - DNA, 25 bp, Homo sapien
tcatctgatgaatgcagacagcagt

SEQ ID NO: 2029878 - DNA, 25 bp, Homo sapien
tgcgtctgcaaaccatcacttatgt

SEQ ID NO: 2029879 - DNA, 25 bp, Homo sapien
gaaccaattccttatgctgcctgtg

SEQ ID NO: 2029880 - DNA, 25 bp, Homo sapien
tccaaacaccataacaagaaccaat

SEQ ID NO: 2029881 - DNA, 25 bp, Homo sapien
aataacaagtctctgtattccttcc

SEQ ID NO: 2029882 - DNA, 25 bp, Homo sapien
cactgaggaatctttactcctaaga

SEQ ID NO: 2029883 - DNA, 25 bp, Homo sapien
ccattatgcacaatctgaaccacca

SEQ ID NO: 2029884 - DNA, 25 bp, Homo sapien
tgcacaatctgaaccaccactgagg

SEQ ID NO: 2029885 - DNA, 25 bp, Homo sapien
tcagccctgtttcaaaatctggccc

SEQ ID NO: 2029886 - DNA, 25 bp, Homo sapien
tctagaaagaagtcgggtaaagcgc

SEQ ID NO: 2029887 - DNA, 25 bp, Homo sapien
taagtatagatctacttctagaaag

SEQ ID NO: 2029888 - DNA, 25 bp, Homo sapien
tgatagaaactacaccttaagggat

SEQ ID NO: 2029889 - DNA, 25 bp, Homo sapien
tggtagcagacagtcctgtactggg

SEQ ID NO: 2029890 - DNA, 25 bp, Homo sapien
gtctgttttaatgaaaccttattga

SEQ ID NO: 2029891 - DNA, 25 bp, Homo sapien
gctatcacactaggaaacaacgtta

SEQ ID NO: 2029892 - DNA, 25 bp, Homo sapien
catttggttacagcacgcgatggat

SEQ ID NO: 2029893 - DNA, 25 bp, Homo sapien
tatggttgcaccaaagagctatcac

SEQ ID NO: 2029894 - DNA, 25 bp, Homo sapien
tggaaacttacagagctacgtggaa

SEQ ID NO: 2029895 - DNA, 25 bp, Homo sapien
cagtgtggcccattcgctggcatgt

SEQ ID NO: 2029896 - DNA, 25 bp, Homo sapien
tgtacttcagattccaggcctatcc

SEQ ID NO: 2029897 - DNA, 25 bp, Homo sapien
tatcctggagggatctaaattgtcc

SEQ ID NO: 2029898 - DNA, 25 bp, Homo sapien
attgatttgccccaatctggaggca

SEQ ID NO: 2029899 - DNA, 25 bp, Homo sapien
tagatgagtaattggacacgctggc

SEQ ID NO: 2029900 - DNA, 25 bp, Homo sapien
gatctagatgagtaattggacacgc

SEQ ID NO: 2029901 - DNA, 25 bp, Homo sapien
ccagaattcagatctagatgagtaa

SEQ ID NO: 2029902 - DNA, 25 bp, Homo sapien
ttcagatctagatgagtaattggac

SEQ ID NO: 2029903 - DNA, 25 bp, Homo sapien
atcgagaagtatcactttgcactgc

SEQ ID NO: 2029904 - DNA, 25 bp, Homo sapien
tctgatccatcgagaagtatcactt

SEQ ID NO: 2029905 - DNA, 25 bp, Homo sapien
tatattctgatccatcgagaagtat

SEQ ID NO: 2029906 - DNA, 25 bp, Homo sapien
gatccatcgagaagtatcactttgc

SEQ ID NO: 2029907 - DNA, 25 bp, Homo sapien
gagaccgagagagtttactgctaga

SEQ ID NO: 2029908 - DNA, 25 bp, Homo sapien
tgatattcgagctgttttgcagccc

SEQ ID NO: 2029909 - DNA, 25 bp, Homo sapien
gcagcaaactcctgttccttgtcag

SEQ ID NO: 2029910 - DNA, 25 bp, Homo sapien
tgacaatctttaatggagaccgaga

SEQ ID NO: 2029911 - DNA, 25 bp, Homo sapien
ctccctccgcaccggggtgctgtgc

SEQ ID NO: 2029912 - DNA, 25 bp, Homo sapien
tccctccgcaccggggtgctgtgcg

SEQ ID NO: 2029913 - DNA, 25 bp, Homo sapien
ctgcagcggcggcgaactgctccag

SEQ ID NO: 2029914 - DNA, 25 bp, Homo sapien
gcagcggcggcgaactgctccaggg

SEQ ID NO: 2029915 - DNA, 25 bp, Homo sapien
agcggcggcgaactgctccagggcc

SEQ ID NO: 2029916 - DNA, 25 bp, Homo sapien
cggcggcgaactgctccagggcctg

SEQ ID NO: 2029917 - DNA, 25 bp, Homo sapien
tcctggtccggcttggattccgagt

SEQ ID NO: 2029918 - DNA, 25 bp, Homo sapien
cggcctcctggtccggcttggattc

SEQ ID NO: 2029919 - DNA, 25 bp, Homo sapien
ctcctggtccggcttggattccgag

SEQ ID NO: 2029920 - DNA, 25 bp, Homo sapien
gcctcctggtccggcttggattccg

SEQ ID NO: 2029921 - DNA, 25 bp, Homo sapien
atatatttcaatcccttggaaggat

SEQ ID NO: 2029922 - DNA, 25 bp, Homo sapien
tatatatttcaatcccttggaagga

SEQ ID NO: 2029923 - DNA, 25 bp, Homo sapien
ctgttgtatatcacacaactcacag

SEQ ID NO: 2029924 - DNA, 25 bp, Homo sapien
atatcacacaactcacagcagctca

SEQ ID NO: 2029925 - DNA, 25 bp, Homo sapien
tatcacacaactcacagcagctcat

SEQ ID NO: 2029926 - DNA, 25 bp, Homo sapien
ttgtatatcacacaactcacagcag

SEQ ID NO: 2029927 - DNA, 25 bp, Homo sapien
aagcaccatgcccagggtgttgaga

SEQ ID NO: 2029928 - DNA, 25 bp, Homo sapien
aacacagcccagagagggggcttta

SEQ ID NO: 2029929 - DNA, 25 bp, Homo sapien
ccatgcccagggtgttgagaacaca

SEQ ID NO: 2029930 - DNA, 25 bp, Homo sapien
ctcaagaagcaagccaagcaccatg

SEQ ID NO: 2029931 - DNA, 25 bp, Homo sapien
aagtcacaggataaggagcacagca

SEQ ID NO: 2029932 - DNA, 25 bp, Homo sapien
gggttcagccaggttagtgaacaac

SEQ ID NO: 2029933 - DNA, 25 bp, Homo sapien
gccaggttagtgaacaactcgccta

SEQ ID NO: 2029934 - DNA, 25 bp, Homo sapien
tgaacaactcgcctaagtcacagga

SEQ ID NO: 2029935 - DNA, 25 bp, Homo sapien
tatttcacaataccaaactgaagct

SEQ ID NO: 2029936 - DNA, 25 bp, Homo sapien
tccccagtgcttagttcctcaatac

SEQ ID NO: 2029937 - DNA, 25 bp, Homo sapien
cttaagggcaaaggatcaaaacttg

SEQ ID NO: 2029938 - DNA, 25 bp, Homo sapien
ccttccagacgcatacagacagaga

SEQ ID NO: 2029939 - DNA, 25 bp, Homo sapien
tctcgtatcccaagaagctcctgca

SEQ ID NO: 2029940 - DNA, 25 bp, Homo sapien
tctgtgcaaggctacactaagcggc

SEQ ID NO: 2029941 - DNA, 25 bp, Homo sapien
aggcaagctcttctcatcacggagt

SEQ ID NO: 2029942 - DNA, 25 bp, Homo sapien
ggtaaggtcttagtccagcacacac

SEQ ID NO: 2029943 - DNA, 25 bp, Homo sapien
gaaataactccctatcctcatcaag

SEQ ID NO: 2029944 - DNA, 25 bp, Homo sapien
tactcaaggcaggttaaatattaca

SEQ ID NO: 2029945 - DNA, 25 bp, Homo sapien
gcacccacccaatataactggagag

SEQ ID NO: 2029946 - DNA, 25 bp, Homo sapien
gcaatttaaccaatcatcgcaagga

SEQ ID NO: 2029947 - DNA, 25 bp, Homo sapien
gaaaagacaaggaacatctgcagcc

SEQ ID NO: 2029948 - DNA, 25 bp, Homo sapien
aaagacaaggaacatctgcagccat

SEQ ID NO: 2029949 - DNA, 25 bp, Homo sapien
aaaagacaaggaacatctgcagcca

SEQ ID NO: 2029950 - DNA, 25 bp, Homo sapien
ctcgcaatgcagttcaacttgagaa

SEQ ID NO: 2029951 - DNA, 25 bp, Homo sapien
caatgcagttcaacttgagaaagga

SEQ ID NO: 2029952 - DNA, 25 bp, Homo sapien
gagaaaggagtctcattgattgatc

SEQ ID NO: 2029953 - DNA, 25 bp, Homo sapien
tcattgattgatcaggcaaagtttt

SEQ ID NO: 2029954 - DNA, 25 bp, Homo sapien
gcgcgctgagcgcagggcccctccc

SEQ ID NO: 2029955 - DNA, 25 bp, Homo sapien
cgcgctgagcgcagggcccctcccg

SEQ ID NO: 2029956 - DNA, 25 bp, Homo sapien
cgcgcgctgagcgcagggcccctcc

SEQ ID NO: 2029957 - DNA, 25 bp, Homo sapien
ccgcgcgctgagcgcagggcccctc

SEQ ID NO: 2029958 - DNA, 25 bp, Homo sapien
ggccaccgcagtacttcaggacagt

SEQ ID NO: 2029959 - DNA, 25 bp, Homo sapien
tgccaatgccaatagctttagccct

SEQ ID NO: 2029960 - DNA, 25 bp, Homo sapien
tcaggacagttacatgggcacagcc

SEQ ID NO: 2029961 - DNA, 25 bp, Homo sapien
tattcccacttagatgatggcctgg

SEQ ID NO: 2029962 - DNA, 25 bp, Homo sapien
aactctgtgctgagtttataactcc

SEQ ID NO: 2029963 - DNA, 25 bp, Homo sapien
tataactcctctgtatgtctaaaac

SEQ ID NO: 2029964 - DNA, 25 bp, Homo sapien
cattagggatagctgaatgtggtat

SEQ ID NO: 2029965 - DNA, 25 bp, Homo sapien
tagttttggccattgtgctgtgtat

SEQ ID NO: 2029966 - DNA, 25 bp, Homo sapien
accctgtacctgtgcatgaataagc

SEQ ID NO: 2029967 - DNA, 25 bp, Homo sapien
gaagttaatcaaatgaccgtgggcg

SEQ ID NO: 2029968 - DNA, 25 bp, Homo sapien
tgggcgttagacagcagtcccctct

SEQ ID NO: 2029969 - DNA, 25 bp, Homo sapien
ctcagtatttgagccctaagggtcc

SEQ ID NO: 2029970 - DNA, 25 bp, Homo sapien
cagaggttcccaaggagagcagttc

SEQ ID NO: 2029971 - DNA, 25 bp, Homo sapien
cattcttttgaagcggcctctgatc

SEQ ID NO: 2029972 - DNA, 25 bp, Homo sapien
cgctttgggctttcgaagcttgtcc

SEQ ID NO: 2029973 - DNA, 25 bp, Homo sapien
agagcagttctgtttgaggtcccag

SEQ ID NO: 2029974 - DNA, 25 bp, Homo sapien
ccctaggggccatctcacgtgccat

SEQ ID NO: 2029975 - DNA, 25 bp, Homo sapien
aggtctaccctaggggccatctcac

SEQ ID NO: 2029976 - DNA, 25 bp, Homo sapien
accctaggggccatctcacgtgcca

SEQ ID NO: 2029977 - DNA, 25 bp, Homo sapien
ccttgaggtctaccctaggggccat

SEQ ID NO: 2029978 - DNA, 25 bp, Homo sapien
gataaaagcatagtctatcccagct

SEQ ID NO: 2029979 - DNA, 25 bp, Homo sapien
tataagactggcttggaccaaattg

SEQ ID NO: 2029980 - DNA, 25 bp, Homo sapien
aatctgggtctagcttcaatctacc

SEQ ID NO: 2029981 - DNA, 25 bp, Homo sapien
gagatctgactacatcccattagtg

SEQ ID NO: 2029982 - DNA, 25 bp, Homo sapien
tcagaaggcaagacttggacaaggc

SEQ ID NO: 2029983 - DNA, 25 bp, Homo sapien
ccaacctgcaagtcttgacggtcat

SEQ ID NO: 2029984 - DNA, 25 bp, Homo sapien
tcccgtgttttggaaccttgctcag

SEQ ID NO: 2029985 - DNA, 25 bp, Homo sapien
gctcagccctggaacggaagcatgt

SEQ ID NO: 2029986 - DNA, 25 bp, Homo sapien
cacattatccacgtcccaacaagca

SEQ ID NO: 2029987 - DNA, 25 bp, Homo sapien
caagcaaaggtaacgtatttccaga

SEQ ID NO: 2029988 - DNA, 25 bp, Homo sapien
cacgtcccaacaagcaaaggtaacg

SEQ ID NO: 2029989 - DNA, 25 bp, Homo sapien
acaagcaaaggtaacgtatttccag

SEQ ID NO: 2029990 - DNA, 25 bp, Homo sapien
tgcctgtggcatcccgttctatgcg

SEQ ID NO: 2029991 - DNA, 25 bp, Homo sapien
tgccaggtgttcttgatgtcctttg

SEQ ID NO: 2029992 - DNA, 25 bp, Homo sapien
gaaaagcgtccatgccaggtgttct

SEQ ID NO: 2029993 - DNA, 25 bp, Homo sapien
tctatgcgaatcctggaaaagcgtc

SEQ ID NO: 2029994 - DNA, 25 bp, Homo sapien
cattatataagcaggtcagagtcag

SEQ ID NO: 2029995 - DNA, 25 bp, Homo sapien
tgtgtttcaacaaccctgagctaag

SEQ ID NO: 2029996 - DNA, 25 bp, Homo sapien
ttccaggtaacacggtaaacagtga

SEQ ID NO: 2029997 - DNA, 25 bp, Homo sapien
tgccacttgcgatattccagccagg

SEQ ID NO: 2029998 - DNA, 25 bp, Homo sapien
aaacctcggtacttgatcatgcctg

SEQ ID NO: 2029999 - DNA, 25 bp, Homo sapien
agtacctaattctaacactacgtga

SEQ ID NO: 2030000 - DNA, 25 bp, Homo sapien
tcctgaaatatggaagctggtcatc

SEQ ID NO: 2030001 - DNA, 25 bp, Homo sapien
tcattcctagtgagcaatggactat

SEQ ID NO: 2030002 - DNA, 25 bp, Homo sapien
tcagtgacaagttaccgtggagccc

SEQ ID NO: 2030003 - DNA, 25 bp, Homo sapien
taccgtggagcccccactccggaca

SEQ ID NO: 2030004 - DNA, 25 bp, Homo sapien
cagtgacaagttaccgtggagcccc

SEQ ID NO: 2030005 - DNA, 25 bp, Homo sapien
tgacaagttaccgtggagcccccac

SEQ ID NO: 2030006 - DNA, 25 bp, Homo sapien
tacatgagaagtgccacgagagcag

SEQ ID NO: 2030007 - DNA, 25 bp, Homo sapien
tgaagtcacagctctcaatcagtaa

SEQ ID NO: 2030008 - DNA, 25 bp, Homo sapien
gtcacagctctcaatcagtaaaaca

SEQ ID NO: 2030009 - DNA, 25 bp, Homo sapien
gaatacaaaggtgaataggatgaag

SEQ ID NO: 2030010 - DNA, 25 bp, Homo sapien
taacaatccaagcaggaggtagcaa

SEQ ID NO: 2030011 - DNA, 25 bp, Homo sapien
gtgatacaaccaaaggagcactgta

SEQ ID NO: 2030012 - DNA, 25 bp, Homo sapien
ccacacaggtgactcaggacatggt

SEQ ID NO: 2030013 - DNA, 25 bp, Homo sapien
tctgtcagggagcaacgtgagaaga

SEQ ID NO: 2030014 - DNA, 25 bp, Homo sapien
caagacagtgtccttttagctccca

SEQ ID NO: 2030015 - DNA, 25 bp, Homo sapien
gctgcttgactgaaatcgcacccaa

SEQ ID NO: 2030016 - DNA, 25 bp, Homo sapien
tgcattagttttgggctaggagacc

SEQ ID NO: 2030017 - DNA, 25 bp, Homo sapien
taggagacccttagcacttcagaat

SEQ ID NO: 2030018 - DNA, 25 bp, Homo sapien
cagataaggaagtagttgcccagag

SEQ ID NO: 2030019 - DNA, 25 bp, Homo sapien
ccagagtggactgtgacttatctca

SEQ ID NO: 2030020 - DNA, 25 bp, Homo sapien
tcttgattaaccagctctgcactgg

SEQ ID NO: 2030021 - DNA, 25 bp, Homo sapien
tatgttcccatgtgctaggtctcac

SEQ ID NO: 2030022 - DNA, 25 bp, Homo sapien
gacttctcattagtctgtttacgca

SEQ ID NO: 2030023 - DNA, 25 bp, Homo sapien
ttagtctgtttacgcagtgctccag

SEQ ID NO: 2030024 - DNA, 25 bp, Homo sapien
cttccgcggacttctcattagtctg

SEQ ID NO: 2030025 - DNA, 25 bp, Homo sapien
tctcattagtctgtttacgcagtgc

SEQ ID NO: 2030026 - DNA, 25 bp, Homo sapien
ggtcactttgctgagatcccttaac

SEQ ID NO: 2030027 - DNA, 25 bp, Homo sapien
tgcgaggtcactttgctgagatccc

SEQ ID NO: 2030028 - DNA, 25 bp, Homo sapien
aaagtgcgaggtcactttgctgaga

SEQ ID NO: 2030029 - DNA, 25 bp, Homo sapien
tgttcaaagtgcgaggtcactttgc

SEQ ID NO: 2030030 - DNA, 25 bp, Homo sapien
taatcctgggattccgcgttggtcg

SEQ ID NO: 2030031 - DNA, 25 bp, Homo sapien
caccctttggccagatgattttaat

SEQ ID NO: 2030032 - DNA, 25 bp, Homo sapien
tcattcgcctcgggaacgcctcgat

SEQ ID NO: 2030033 - DNA, 25 bp, Homo sapien
tgattttaatcctgggattccgcgt

SEQ ID NO: 2030034 - DNA, 25 bp, Homo sapien
gagatggaggcggaggctctggcct

SEQ ID NO: 2030035 - DNA, 25 bp, Homo sapien
cacaagccggaatgcggaggtcaga

SEQ ID NO: 2030036 - DNA, 25 bp, Homo sapien
tctggcctcatctgcgaggttcgca

SEQ ID NO: 2030037 - DNA, 25 bp, Homo sapien
aaagcaggggctgaaacgctgagat

SEQ ID NO: 2030038 - DNA, 25 bp, Homo sapien
agggcgagcaaggtctagcttctga

SEQ ID NO: 2030039 - DNA, 25 bp, Homo sapien
tccccagggcgagcaaggtctagct

SEQ ID NO: 2030040 - DNA, 25 bp, Homo sapien
gcttctgagactccgctctctgggc

SEQ ID NO: 2030041 - DNA, 25 bp, Homo sapien
gactccgctctctgggctagcggtt

SEQ ID NO: 2030042 - DNA, 25 bp, Homo sapien
ggcggggacggattcggagggagca

SEQ ID NO: 2030043 - DNA, 25 bp, Homo sapien
actggccagccccactcgcgtccag

SEQ ID NO: 2030044 - DNA, 25 bp, Homo sapien
agcccacaactaggctgccgggacc

SEQ ID NO: 2030045 - DNA, 25 bp, Homo sapien
aggtcgctccaactccggcgagggc

SEQ ID NO: 2030046 - DNA, 25 bp, Homo sapien
aactagcgcgcgctggcaaaagcac

SEQ ID NO: 2030047 - DNA, 25 bp, Homo sapien
tgagtcaccgaagccttcctttggg

SEQ ID NO: 2030048 - DNA, 25 bp, Homo sapien
ctgagtcaccgaagccttcctttgg

SEQ ID NO: 2030049 - DNA, 25 bp, Homo sapien
gttcgcagcccgcaggcacaacctt

SEQ ID NO: 2030050 - DNA, 25 bp, Homo sapien
ctcccggagcttgttcgcagcccgc

SEQ ID NO: 2030051 - DNA, 25 bp, Homo sapien
gagaaaaaaagtagcgcaagggcag

SEQ ID NO: 2030052 - DNA, 25 bp, Homo sapien
tagcgcaagggcagagagaggtagg

SEQ ID NO: 2030053 - DNA, 25 bp, Homo sapien
ttcgaattctccggggtccagtctc

SEQ ID NO: 2030054 - DNA, 25 bp, Homo sapien
caggggctctttccttcgaattctc

SEQ ID NO: 2030055 - DNA, 25 bp, Homo sapien
tctccggggtccagtctcgggctcg

SEQ ID NO: 2030056 - DNA, 25 bp, Homo sapien
attctccggggtccagtctcgggct

SEQ ID NO: 2030057 - DNA, 25 bp, Homo sapien
ccagacccgggctcctcccgcagct

SEQ ID NO: 2030058 - DNA, 25 bp, Homo sapien
gccgccagacccgggctcctcccgc

SEQ ID NO: 2030059 - DNA, 25 bp, Homo sapien
ggtggcggcacctccaagttgccac

SEQ ID NO: 2030060 - DNA, 25 bp, Homo sapien
tcctcccgcagctgcggtggcggca

SEQ ID NO: 2030061 - DNA, 25 bp, Homo sapien
agcggaggaccctggcgttccaggg

SEQ ID NO: 2030062 - DNA, 25 bp, Homo sapien
cagcggaggaccctggcgttccagg

SEQ ID NO: 2030063 - DNA, 25 bp, Homo sapien
gcggaggaccctggcgttccagggc

SEQ ID NO: 2030064 - DNA, 25 bp, Homo sapien
tcagtaaatcaagggcagtccaggg

SEQ ID NO: 2030065 - DNA, 25 bp, Homo sapien
cagtccagggtgcaaaagtctgtca

SEQ ID NO: 2030066 - DNA, 25 bp, Homo sapien
tctgagtacgagtccaagcagtcca

SEQ ID NO: 2030067 - DNA, 25 bp, Homo sapien
cacgaagcctcacgaaatgttgcag

SEQ ID NO: 2030068 - DNA, 25 bp, Homo sapien
gagggatgtccctgtttgggcatct

SEQ ID NO: 2030069 - DNA, 25 bp, Homo sapien
gtgtgattttcatggagggatgtcc

SEQ ID NO: 2030070 - DNA, 25 bp, Homo sapien
ctgttccctcgcctgtgaaagcaga

SEQ ID NO: 2030071 - DNA, 25 bp, Homo sapien
atctgttccctcgcctgtgaaagca

SEQ ID NO: 2030072 - DNA, 25 bp, Homo sapien
gttgctcagatgttcataaaccttg

SEQ ID NO: 2030073 - DNA, 25 bp, Homo sapien
gctcagatgttcataaaccttggaa

SEQ ID NO: 2030074 - DNA, 25 bp, Homo sapien
tgctcagatgttcataaaccttgga

SEQ ID NO: 2030075 - DNA, 25 bp, Homo sapien
cagatgttcataaaccttggaacca

SEQ ID NO: 2030076 - DNA, 25 bp, Homo sapien
cacacatccgacttgaccaccaaaa

SEQ ID NO: 2030077 - DNA, 25 bp, Homo sapien
tgcacacatccgacttgaccaccaa

SEQ ID NO: 2030078 - DNA, 25 bp, Homo sapien
gtgcacacatccgacttgaccacca

SEQ ID NO: 2030079 - DNA, 25 bp, Homo sapien
ctgtgcacacatccgacttgaccac

SEQ ID NO: 2030080 - DNA, 25 bp, Homo sapien
ctgccctgctacctcataaagaaac

SEQ ID NO: 2030081 - DNA, 25 bp, Homo sapien
tgccctgctacctcataaagaaact

SEQ ID NO: 2030082 - DNA, 25 bp, Homo sapien
gccctgctacctcataaagaaactt

SEQ ID NO: 2030083 - DNA, 25 bp, Homo sapien
ttcttctggatgtgatggaacgata

SEQ ID NO: 2030084 - DNA, 25 bp, Homo sapien
cttcttctggatgtgatggaacgat

SEQ ID NO: 2030085 - DNA, 25 bp, Homo sapien
atcctgtccatccactctgagacct

SEQ ID NO: 2030086 - DNA, 25 bp, Homo sapien
tcttctggatgtgatggaacgatat

SEQ ID NO: 2030087 - DNA, 25 bp, Homo sapien
tgcactgtgatcacttccaataccg

SEQ ID NO: 2030088 - DNA, 25 bp, Homo sapien
catggtcaagcctgttgaatggcag

SEQ ID NO: 2030089 - DNA, 25 bp, Homo sapien
cttccaataccgagccatggtcaag

SEQ ID NO: 2030090 - DNA, 25 bp, Homo sapien
gtcaagcctgttgaatggcagagtc

SEQ ID NO: 2030091 - DNA, 25 bp, Homo sapien
ggaggtatttgtacacaagttatgc

SEQ ID NO: 2030092 - DNA, 25 bp, Homo sapien
tgatcctaaaagattacccaggtcc

SEQ ID NO: 2030093 - DNA, 25 bp, Homo sapien
catgtgggcagtgtttgatggcccc

SEQ ID NO: 2030094 - DNA, 25 bp, Homo sapien
caagttatgctaaattcaatgcagg

SEQ ID NO: 2030095 - DNA, 25 bp, Homo sapien
tataatggcatctgcgtcttaacgg

SEQ ID NO: 2030096 - DNA, 25 bp, Homo sapien
taagggaaccgacacaagcatttct

SEQ ID NO: 2030097 - DNA, 25 bp, Homo sapien
cttaacggggaatgagaaatagcca

SEQ ID NO: 2030098 - DNA, 25 bp, Homo sapien
ctgagcagatgtatcattggttagt

SEQ ID NO: 2030099 - DNA, 25 bp, Homo sapien
ggatgaaattagcacagctctgttc

SEQ ID NO: 2030100 - DNA, 25 bp, Homo sapien
tacgcatcgcctgatctatcgtgag

SEQ ID NO: 2030101 - DNA, 25 bp, Homo sapien
gaattctggtctgcgataactaggc

SEQ ID NO: 2030102 - DNA, 25 bp, Homo sapien
tacagttatgacgagcaggatgaaa

SEQ ID NO: 2030103 - DNA, 25 bp, Homo sapien
ctccttatagttttcctgttggatt

SEQ ID NO: 2030104 - DNA, 25 bp, Homo sapien
acttctgcaaagatgcacatctctg

SEQ ID NO: 2030105 - DNA, 25 bp, Homo sapien
tcactgaaggacatgagagcccaca

SEQ ID NO: 2030106 - DNA, 25 bp, Homo sapien
ttctgacttgtaagattcagctttc

SEQ ID NO: 2030107 - DNA, 25 bp, Homo sapien
cactgaaggacatgagagcccacag

SEQ ID NO: 2030108 - DNA, 25 bp, Homo sapien
gtggcctggctagaatttcaaccct

SEQ ID NO: 2030109 - DNA, 25 bp, Homo sapien
tgtggcctggctagaatttcaaccc

SEQ ID NO: 2030110 - DNA, 25 bp, Homo sapien
tgcagctcagtatgtggcctggcta

SEQ ID NO: 2030111 - DNA, 25 bp, Homo sapien
atgtggcctggctagaatttcaacc

SEQ ID NO: 2030112 - DNA, 25 bp, Homo sapien
ccccttgtacacaggattcaccttt

SEQ ID NO: 2030113 - DNA, 25 bp, Homo sapien
gattcacctttggctcgctctgccc

SEQ ID NO: 2030114 - DNA, 25 bp, Homo sapien
cccttgtacacaggattcacctttg

SEQ ID NO: 2030115 - DNA, 25 bp, Homo sapien
ttcacctttggctcgctctgcccca

SEQ ID NO: 2030116 - DNA, 25 bp, Homo sapien
gactcgtggactttcattaatggaa

SEQ ID NO: 2030117 - DNA, 25 bp, Homo sapien
tcaaagtaaaccactgatcttataa

SEQ ID NO: 2030118 - DNA, 25 bp, Homo sapien
ggtggcatccaaggactcgtggact

SEQ ID NO: 2030119 - DNA, 25 bp, Homo sapien
cactgatcttataaagagttcggga

SEQ ID NO: 2030120 - DNA, 25 bp, Homo sapien
gactttcggatatgtgtggctgcca

SEQ ID NO: 2030121 - DNA, 25 bp, Homo sapien
gccacagattggctgactttcataa

SEQ ID NO: 2030122 - DNA, 25 bp, Homo sapien
cctgaagttgattctggtgagctct

SEQ ID NO: 2030123 - DNA, 25 bp, Homo sapien
gcttgggattactgccaaaggaagg

SEQ ID NO: 2030124 - DNA, 25 bp, Homo sapien
catcttctgatgtttcatgatattc

SEQ ID NO: 2030125 - DNA, 25 bp, Homo sapien
tgatatcttttatacttgcacgaat

SEQ ID NO: 2030126 - DNA, 25 bp, Homo sapien
ccagactagtctgcagctgccttgc

SEQ ID NO: 2030127 - DNA, 25 bp, Homo sapien
agagagtgagtctccagactagtct

SEQ ID NO: 2030128 - DNA, 25 bp, Homo sapien
gccatccggttcttatcattagcaa

SEQ ID NO: 2030129 - DNA, 25 bp, Homo sapien
tggtgccagacaggacagaatttcc

SEQ ID NO: 2030130 - DNA, 25 bp, Homo sapien
aatgagtaaagaaacgggagatcaa

SEQ ID NO: 2030131 - DNA, 25 bp, Homo sapien
cagaatttccgcattgccatccggt

SEQ ID NO: 2030132 - DNA, 25 bp, Homo sapien
tgcattatccttgtctacacaacgg

SEQ ID NO: 2030133 - DNA, 25 bp, Homo sapien
tcactgctcaacgttgttgaatgca

SEQ ID NO: 2030134 - DNA, 25 bp, Homo sapien
ttgtctacacaacggtgcttcagga

SEQ ID NO: 2030135 - DNA, 25 bp, Homo sapien
ggtgcttcaggactctgtatgtatg

SEQ ID NO: 2030136 - DNA, 25 bp, Homo sapien
tagcaccgcttatagagaaatatcc

SEQ ID NO: 2030137 - DNA, 25 bp, Homo sapien
taagaggtggaaacacacttcggcg

SEQ ID NO: 2030138 - DNA, 25 bp, Homo sapien
catcatatgggaggatgacttctcc

SEQ ID NO: 2030139 - DNA, 25 bp, Homo sapien
gagagtccattgatagtagcaccgc

SEQ ID NO: 2030140 - DNA, 25 bp, Homo sapien
atgagggacacctgtttattccccg

SEQ ID NO: 2030141 - DNA, 25 bp, Homo sapien
caaattcgttggatgcaccctggga

SEQ ID NO: 2030142 - DNA, 25 bp, Homo sapien
catgttctgttcatgagggacacct

SEQ ID NO: 2030143 - DNA, 25 bp, Homo sapien
taattctggttgtgcaaatcagccc

SEQ ID NO: 2030144 - DNA, 25 bp, Homo sapien
tcccctgcgtcctgccaaaagtctt

SEQ ID NO: 2030145 - DNA, 25 bp, Homo sapien
cctgcgtcctgccaaaagtcttgcc

SEQ ID NO: 2030146 - DNA, 25 bp, Homo sapien
cccctgcgtcctgccaaaagtcttg

SEQ ID NO: 2030147 - DNA, 25 bp, Homo sapien
tgaagcacctgagatttgggagtct

SEQ ID NO: 2030148 - DNA, 25 bp, Homo sapien
cacaggtttccatatatggagccat

SEQ ID NO: 2030149 - DNA, 25 bp, Homo sapien
acacaggtttccatatatggagcca

SEQ ID NO: 2030150 - DNA, 25 bp, Homo sapien
ggcatccttctagaagaccaatttg

SEQ ID NO: 2030151 - DNA, 25 bp, Homo sapien
tgggcatccttctagaagaccaatt

SEQ ID NO: 2030152 - DNA, 25 bp, Homo sapien
gcatccttctagaagaccaatttgg

SEQ ID NO: 2030153 - DNA, 25 bp, Homo sapien
ctgggcatccttctagaagaccaat

SEQ ID NO: 2030154 - DNA, 25 bp, Homo sapien
cccagcactcatctagtctcaattg

SEQ ID NO: 2030155 - DNA, 25 bp, Homo sapien
atggatagactacatacaagtgaag

SEQ ID NO: 2030156 - DNA, 25 bp, Homo sapien
tttgtcgagcttcctagatgtgtag

SEQ ID NO: 2030157 - DNA, 25 bp, Homo sapien
taccattacacagatactgatttgc

SEQ ID NO: 2030158 - DNA, 25 bp, Homo sapien
gcagaaagacttgccgcaggaagcc

SEQ ID NO: 2030159 - DNA, 25 bp, Homo sapien
tgaacaactgaacagtgtatgctgc

SEQ ID NO: 2030160 - DNA, 25 bp, Homo sapien
tcagtaccgccttgttgaacaactg

SEQ ID NO: 2030161 - DNA, 25 bp, Homo sapien
ggaagccgtgttatcagtggcatca

SEQ ID NO: 2030162 - DNA, 25 bp, Homo sapien
tactcatggccctaatcatgtctga

SEQ ID NO: 2030163 - DNA, 25 bp, Homo sapien
ttgaagatgattcatacttacaggc

SEQ ID NO: 2030164 - DNA, 25 bp, Homo sapien
gctgcattacaagttgccacatatc

SEQ ID NO: 2030165 - DNA, 25 bp, Homo sapien
taattgccactgacttaatgaaagc

SEQ ID NO: 2030166 - DNA, 25 bp, Homo sapien
gacctgtggcttgatagaacaaccc

SEQ ID NO: 2030167 - DNA, 25 bp, Homo sapien
tacacacgtctagggaaatgatttc

SEQ ID NO: 2030168 - DNA, 25 bp, Homo sapien
tacggtacatggatcaacacacttg

SEQ ID NO: 2030169 - DNA, 25 bp, Homo sapien
taagaagccctgctagtgaaggtca

SEQ ID NO: 2030170 - DNA, 25 bp, Homo sapien
ggtcacaatgtaggatcagaaagca

SEQ ID NO: 2030171 - DNA, 25 bp, Homo sapien
aaaagcttccctagtgattctggcc

SEQ ID NO: 2030172 - DNA, 25 bp, Homo sapien
caggttattgagacaggcccatact

SEQ ID NO: 2030173 - DNA, 25 bp, Homo sapien
tattgacagtcagccttcgtgggac

SEQ ID NO: 2030174 - DNA, 25 bp, Homo sapien
tggttgtccctaactactgagtagt

SEQ ID NO: 2030175 - DNA, 25 bp, Homo sapien
gatagttctatgttctaccaggagg

SEQ ID NO: 2030176 - DNA, 25 bp, Homo sapien
ccaagtgtgccagtttgggcgttca

SEQ ID NO: 2030177 - DNA, 25 bp, Homo sapien
tatgatcctgggaccataaggagca

SEQ ID NO: 2030178 - DNA, 25 bp, Homo sapien
tattgtagaacaccagaacctgttt

SEQ ID NO: 2030179 - DNA, 25 bp, Homo sapien
ttccccttgaagtaacacgctatct

SEQ ID NO: 2030180 - DNA, 25 bp, Homo sapien
tttacagtgcattctccgaggactg

SEQ ID NO: 2030181 - DNA, 25 bp, Homo sapien
tctgctcctatgaaagttacgattg

SEQ ID NO: 2030182 - DNA, 25 bp, Homo sapien
cagtctccaccacatagcctagtag

SEQ ID NO: 2030183 - DNA, 25 bp, Homo sapien
aagcatggtgtacttgatataaatt

SEQ ID NO: 2030184 - DNA, 25 bp, Homo sapien
aatgtaacagtccatctagttcctg

SEQ ID NO: 2030185 - DNA, 25 bp, Homo sapien
tagcctagtagcaaaacgtacacac

SEQ ID NO: 2030186 - DNA, 25 bp, Homo sapien
gagaactgagacaaactcttctatg

SEQ ID NO: 2030187 - DNA, 25 bp, Homo sapien
agcttttgggcattgggtgagcaca

SEQ ID NO: 2030188 - DNA, 25 bp, Homo sapien
ggcaaggaaagtgctcgttcctgaa

SEQ ID NO: 2030189 - DNA, 25 bp, Homo sapien
tatgttccgcaaaggaatggagaaa

SEQ ID NO: 2030190 - DNA, 25 bp, Homo sapien
gatgtcctcggatcagtccacaaaa

SEQ ID NO: 2030191 - DNA, 25 bp, Homo sapien
cactgattcaagtgggcgtttctcc

SEQ ID NO: 2030192 - DNA, 25 bp, Homo sapien
tacaggaatcttgtggacgcaattc

SEQ ID NO: 2030193 - DNA, 25 bp, Homo sapien
tcaccatcggacataaaaagactag

SEQ ID NO: 2030194 - DNA, 25 bp, Homo sapien
ctgcgtccaagaccgactcggtgga

SEQ ID NO: 2030195 - DNA, 25 bp, Homo sapien
ggtgtgtagcccttattgctgctgg

SEQ ID NO: 2030196 - DNA, 25 bp, Homo sapien
gcgtttgaccagctactgcgtccaa

SEQ ID NO: 2030197 - DNA, 25 bp, Homo sapien
ggccacagcagagtctcgcgtttga

SEQ ID NO: 2030198 - DNA, 25 bp, Homo sapien
cccgcgactgcacgtagctgaggaa

SEQ ID NO: 2030199 - DNA, 25 bp, Homo sapien
ctcagcgaggagtccacgaaggagc

SEQ ID NO: 2030200 - DNA, 25 bp, Homo sapien
tcgcggtagacgctgtacacggcct

SEQ ID NO: 2030201 - DNA, 25 bp, Homo sapien
ggtcatgctcaggtcgagctcgccc

SEQ ID NO: 2030202 - DNA, 25 bp, Homo sapien
tcttgtcccggttctcgtggaggac

SEQ ID NO: 2030203 - DNA, 25 bp, Homo sapien
ttctcgtggaggaccgcgtttgcgc

SEQ ID NO: 2030204 - DNA, 25 bp, Homo sapien
tcgatgacggtggagtagaggtccc

SEQ ID NO: 2030205 - DNA, 25 bp, Homo sapien
ccgcgtttgcgcagatgaagaggaa

SEQ ID NO: 2030206 - DNA, 25 bp, Homo sapien
gaagatgcggaagaagaagcccacg

SEQ ID NO: 2030207 - DNA, 25 bp, Homo sapien
agcttgtcagagtgcaggtagccag

SEQ ID NO: 2030208 - DNA, 25 bp, Homo sapien
gcgcccgcggaactggagttgacac

SEQ ID NO: 2030209 - DNA, 25 bp, Homo sapien
aggcggctcgtgctggaggcgtgct

SEQ ID NO: 2030210 - DNA, 25 bp, Homo sapien
ccgtggttgggacccggtggctgct

SEQ ID NO: 2030211 - DNA, 25 bp, Homo sapien
actgctactgctgttggccgtggtt

SEQ ID NO: 2030212 - DNA, 25 bp, Homo sapien
gagccctagggtggctcctggaccg

SEQ ID NO: 2030213 - DNA, 25 bp, Homo sapien
ctggaccggtttttgctgccactgc

SEQ ID NO: 2030214 - DNA, 25 bp, Homo sapien
tctggcggaaatccttagcaggccg

SEQ ID NO: 2030215 - DNA, 25 bp, Homo sapien
ggatcccacagagggcgatgagccc

SEQ ID NO: 2030216 - DNA, 25 bp, Homo sapien
cacgtcgttcttgcgcctcttcttg

SEQ ID NO: 2030217 - DNA, 25 bp, Homo sapien
tccgcttgcgcttgggtatctggct

SEQ ID NO: 2030218 - DNA, 25 bp, Homo sapien
agtgcaggactagcctctgggatgg

SEQ ID NO: 2030219 - DNA, 25 bp, Homo sapien
gagggcgccaactgcccactagctg

SEQ ID NO: 2030220 - DNA, 25 bp, Homo sapien
ctggagtgcaggactagcctctggg

SEQ ID NO: 2030221 - DNA, 25 bp, Homo sapien
ggatggaggcttgcacagggagggc

SEQ ID NO: 2030222 - DNA, 25 bp, Homo sapien
atacagacaaaggtcagatgccacg

SEQ ID NO: 2030223 - DNA, 25 bp, Homo sapien
ggctgtactcccttttaatgtatca

SEQ ID NO: 2030224 - DNA, 25 bp, Homo sapien
tctgacacgaaatacagacaaaggt

SEQ ID NO: 2030225 - DNA, 25 bp, Homo sapien
tcatcatctgacacgaaatacagac

SEQ ID NO: 2030226 - DNA, 25 bp, Homo sapien
aggctcggaggctcggatcccacag

SEQ ID NO: 2030227 - DNA, 25 bp, Homo sapien
tctgaggctcggaggctcggatccc

SEQ ID NO: 2030228 - DNA, 25 bp, Homo sapien
aggctgggagcgctgtgctgtgccc

SEQ ID NO: 2030229 - DNA, 25 bp, Homo sapien
gggagcgctgtgctgtgcccggtac

SEQ ID NO: 2030230 - DNA, 25 bp, Homo sapien
gcccctcactggcagggcggcgacc

SEQ ID NO: 2030231 - DNA, 25 bp, Homo sapien
tgatgttagctggagtcacatgagt

SEQ ID NO: 2030232 - DNA, 25 bp, Homo sapien
tagctggagtcacatgagtgcagca

SEQ ID NO: 2030233 - DNA, 25 bp, Homo sapien
ctttggtctgcttattgatgttagc

SEQ ID NO: 2030234 - DNA, 25 bp, Homo sapien
ggccggcgaacgggcgctcgggcga

SEQ ID NO: 2030235 - DNA, 25 bp, Homo sapien
ctcgggcgacacaaaggaaccatgg

SEQ ID NO: 2030236 - DNA, 25 bp, Homo sapien
ccggcgaacgggcgctcgggcgaca

SEQ ID NO: 2030237 - DNA, 25 bp, Homo sapien
gcgctcgggcgacacaaaggaacca

SEQ ID NO: 2030238 - DNA, 25 bp, Homo sapien
ccgcatccgagcgcgactcagcagc

SEQ ID NO: 2030239 - DNA, 25 bp, Homo sapien
ggccccgcatccgagcgcgactcag

SEQ ID NO: 2030240 - DNA, 25 bp, Homo sapien
ccccgcatccgagcgcgactcagca

SEQ ID NO: 2030241 - DNA, 25 bp, Homo sapien
ggggccccgcatccgagcgcgactc

SEQ ID NO: 2030242 - DNA, 25 bp, Homo sapien
atcccgcatcccgcctcggagccct

SEQ ID NO: 2030243 - DNA, 25 bp, Homo sapien
cagctcccggcgtcccctagcgcgg

SEQ ID NO: 2030244 - DNA, 25 bp, Homo sapien
tgtcaggtcctccgcatcccgcatc

SEQ ID NO: 2030245 - DNA, 25 bp, Homo sapien
ccaagagtttccaagaagtgtcagg

SEQ ID NO: 2030246 - DNA, 25 bp, Homo sapien
tgaaaatagttcatgcagtacttca

SEQ ID NO: 2030247 - DNA, 25 bp, Homo sapien
cactgatgtgaaagaattaccttca

SEQ ID NO: 2030248 - DNA, 25 bp, Homo sapien
caggcactgatgtgaaagaattacc

SEQ ID NO: 2030249 - DNA, 25 bp, Homo sapien
aaatagttcatgcagtacttcagaa

SEQ ID NO: 2030250 - DNA, 25 bp, Homo sapien
cagctagctgcttagtaggttcaag

SEQ ID NO: 2030251 - DNA, 25 bp, Homo sapien
taggttcaaggctagtggttgtctc

SEQ ID NO: 2030252 - DNA, 25 bp, Homo sapien
ggttcaaggctagtggttgtctcca

SEQ ID NO: 2030253 - DNA, 25 bp, Homo sapien
ttagtaggttcaaggctagtggttg

SEQ ID NO: 2030254 - DNA, 25 bp, Homo sapien
catcagcatgcatgttggatgaggc

SEQ ID NO: 2030255 - DNA, 25 bp, Homo sapien
tccttctagaacctcacagcttgtc

SEQ ID NO: 2030256 - DNA, 25 bp, Homo sapien
gacaaaaaggtgcatttggttcagg

SEQ ID NO: 2030257 - DNA, 25 bp, Homo sapien
gaagaagcatgcagccggattgtga

SEQ ID NO: 2030258 - DNA, 25 bp, Homo sapien
tgttgggtgaacactggactggtcc

SEQ ID NO: 2030259 - DNA, 25 bp, Homo sapien
tagatgtcagatccacgagtcaccc

SEQ ID NO: 2030260 - DNA, 25 bp, Homo sapien
cgagtcaccctaaagcctgaagaga

SEQ ID NO: 2030261 - DNA, 25 bp, Homo sapien
tcagtgtaatgcaggaaggagtcgc

SEQ ID NO: 2030262 - DNA, 25 bp, Homo sapien
taatgctctcatccaagtgaggtgt

SEQ ID NO: 2030263 - DNA, 25 bp, Homo sapien
tggtttggattaggccatgcagatt

SEQ ID NO: 2030264 - DNA, 25 bp, Homo sapien
tgctaatgctctcatccaagtgagg

SEQ ID NO: 2030265 - DNA, 25 bp, Homo sapien
ctcctttgctaatgctctcatccaa

SEQ ID NO: 2030266 - DNA, 25 bp, Homo sapien
gaggatgtgtgtaatgatttattgt

SEQ ID NO: 2030267 - DNA, 25 bp, Homo sapien
gaggaggatgtgtgtaatgatttat

SEQ ID NO: 2030268 - DNA, 25 bp, Homo sapien
tctgaggaggatgtgtgtaatgatt

SEQ ID NO: 2030269 - DNA, 25 bp, Homo sapien
tgaggaggatgtgtgtaatgattta

SEQ ID NO: 2030270 - DNA, 25 bp, Homo sapien
cgccaagggattgcgctgaacagca

SEQ ID NO: 2030271 - DNA, 25 bp, Homo sapien
cctagagagaaccacagcaacatcc

SEQ ID NO: 2030272 - DNA, 25 bp, Homo sapien
tcacaaactgcagggcatgcacaag

SEQ ID NO: 2030273 - DNA, 25 bp, Homo sapien
tgtgaatgcaaacctagacgccaag

SEQ ID NO: 2030274 - DNA, 25 bp, Homo sapien
tccaggaaagcttgggagcacaacc

SEQ ID NO: 2030275 - DNA, 25 bp, Homo sapien
gaaacgcccttcagagtgggagcag

SEQ ID NO: 2030276 - DNA, 25 bp, Homo sapien
taaggcctgacaacaaatcggaatg

SEQ ID NO: 2030277 - DNA, 25 bp, Homo sapien
cacaccagtgttaggacagggtccc

SEQ ID NO: 2030278 - DNA, 25 bp, Homo sapien
aaagagcgcaggtcttggtgccaga

SEQ ID NO: 2030279 - DNA, 25 bp, Homo sapien
tttattgctgaaagagcgcaggtct

SEQ ID NO: 2030280 - DNA, 25 bp, Homo sapien
tgtgctccacttttattgctgaaag

SEQ ID NO: 2030281 - DNA, 25 bp, Homo sapien
tccacttttattgctgaaagagcgc

SEQ ID NO: 2030282 - DNA, 25 bp, Homo sapien
agggagttcctgggaatgcctgaac

SEQ ID NO: 2030283 - DNA, 25 bp, Homo sapien
ttcagggagttcctgggaatgcctg

SEQ ID NO: 2030284 - DNA, 25 bp, Homo sapien
tcagggagttcctgggaatgcctga

SEQ ID NO: 2030285 - DNA, 25 bp, Homo sapien
cagggagttcctgggaatgcctgaa

SEQ ID NO: 2030286 - DNA, 25 bp, Homo sapien
gacaatgtccgtctgtgtcagaagc

SEQ ID NO: 2030287 - DNA, 25 bp, Homo sapien
ttgacaatgtccgtctgtgtcagaa

SEQ ID NO: 2030288 - DNA, 25 bp, Homo sapien
tcactttgacaatgtccgtctgtgt

SEQ ID NO: 2030289 - DNA, 25 bp, Homo sapien
tgacaatgtccgtctgtgtcagaag

SEQ ID NO: 2030290 - DNA, 25 bp, Homo sapien
cagtgagagagaatgacggtagctc

SEQ ID NO: 2030291 - DNA, 25 bp, Homo sapien
agagaatgacggtagctctcactcg

SEQ ID NO: 2030292 - DNA, 25 bp, Homo sapien
tctcactcggcttagttacaaccat

SEQ ID NO: 2030293 - DNA, 25 bp, Homo sapien
tgacggtagctctcactcggcttag

SEQ ID NO: 2030294 - DNA, 25 bp, Homo sapien
gggcccctatagctatggatactaa

SEQ ID NO: 2030295 - DNA, 25 bp, Homo sapien
taattccaggaaatatgcgaagcag

SEQ ID NO: 2030296 - DNA, 25 bp, Homo sapien
ggacaggagatagaaaccccgtaga

SEQ ID NO: 2030297 - DNA, 25 bp, Homo sapien
aaatatgcgaagcagttcagtacat

SEQ ID NO: 2030298 - DNA, 25 bp, Homo sapien
cttggcatgctcttcacagcccaga

SEQ ID NO: 2030299 - DNA, 25 bp, Homo sapien
cttcacagcccagaagagactgtac

SEQ ID NO: 2030300 - DNA, 25 bp, Homo sapien
agcccagaagagactgtacaaactc

SEQ ID NO: 2030301 - DNA, 25 bp, Homo sapien
taaagcacttggcatgctcttcaca

SEQ ID NO: 2030302 - DNA, 25 bp, Homo sapien
tataatgacgacagtaatagcctcc

SEQ ID NO: 2030303 - DNA, 25 bp, Homo sapien
gcagtcatcacagcgaccattagga

SEQ ID NO: 2030304 - DNA, 25 bp, Homo sapien
accattaggagtaaggacctgctca

SEQ ID NO: 2030305 - DNA, 25 bp, Homo sapien
tatgtgaagctctggcattctgcaa

SEQ ID NO: 2030306 - DNA, 25 bp, Homo sapien
aaaggcagacccgaaggcaaggcct

SEQ ID NO: 2030307 - DNA, 25 bp, Homo sapien
aaggcagacccgaaggcaaggcctt

SEQ ID NO: 2030308 - DNA, 25 bp, Homo sapien
ggcagacccgaaggcaaggccttct

SEQ ID NO: 2030309 - DNA, 25 bp, Homo sapien
taaaaggcagacccgaaggcaaggc

SEQ ID NO: 2030310 - DNA, 25 bp, Homo sapien
tggtctcacagctatatttagtctg

SEQ ID NO: 2030311 - DNA, 25 bp, Homo sapien
cacagctatatttagtctgtgcaaa

SEQ ID NO: 2030312 - DNA, 25 bp, Homo sapien
tctgtcccctgtggtctcacagcta

SEQ ID NO: 2030313 - DNA, 25 bp, Homo sapien
ccctgtggtctcacagctatattta

SEQ ID NO: 2030314 - DNA, 25 bp, Homo sapien
agaagaggaaacgaccatccacttg

SEQ ID NO: 2030315 - DNA, 25 bp, Homo sapien
ggtgatcatgctgttggagcccagt

SEQ ID NO: 2030316 - DNA, 25 bp, Homo sapien
agaggaaacgaccatccacttgccc

SEQ ID NO: 2030317 - DNA, 25 bp, Homo sapien
atcatgctgttggagcccagtgggt

SEQ ID NO: 2030318 - DNA, 25 bp, Homo sapien
gagaaggcgggactgtttgagtgta

SEQ ID NO: 2030319 - DNA, 25 bp, Homo sapien
ccgaggatccgcaagagttggaagt

SEQ ID NO: 2030320 - DNA, 25 bp, Homo sapien
agtgtaagaacaggccggggcagca

SEQ ID NO: 2030321 - DNA, 25 bp, Homo sapien
agaccgaggatccgcaagagttgga

SEQ ID NO: 2030322 - DNA, 25 bp, Homo sapien
tgtcagccacgcctggaagcaactt

SEQ ID NO: 2030323 - DNA, 25 bp, Homo sapien
tgactggtgaagcacctgctgcgcc

SEQ ID NO: 2030324 - DNA, 25 bp, Homo sapien
aacttgcagtgttgctccctgccga

SEQ ID NO: 2030325 - DNA, 25 bp, Homo sapien
gctgacaccgtggacatggacactg

SEQ ID NO: 2030326 - DNA, 25 bp, Homo sapien
taacagtgcttgctgtctacacaga

SEQ ID NO: 2030327 - DNA, 25 bp, Homo sapien
tatgctccaggtgcaagcagcagca

SEQ ID NO: 2030328 - DNA, 25 bp, Homo sapien
ccactctcgtggatcggaacagaca

SEQ ID NO: 2030329 - DNA, 25 bp, Homo sapien
cagccaacagtatgtaagcctgcag

SEQ ID NO: 2030330 - DNA, 25 bp, Homo sapien
gaaaaggcagtatgttggcaaatgt

SEQ ID NO: 2030331 - DNA, 25 bp, Homo sapien
aaggcagtatgttggcaaatgtgaa

SEQ ID NO: 2030332 - DNA, 25 bp, Homo sapien
aaaaggcagtatgttggcaaatgtg

SEQ ID NO: 2030333 - DNA, 25 bp, Homo sapien
tgaaaaggcagtatgttggcaaatg

SEQ ID NO: 2030334 - DNA, 25 bp, Homo sapien
tcttggaaagacacctaatgtgtgg

SEQ ID NO: 2030335 - DNA, 25 bp, Homo sapien
agtccactgcttgccactctcaggg

SEQ ID NO: 2030336 - DNA, 25 bp, Homo sapien
cctaatgtgtggctgaacagtccag

SEQ ID NO: 2030337 - DNA, 25 bp, Homo sapien
taattctggaagcaaattatctgct

SEQ ID NO: 2030338 - DNA, 25 bp, Homo sapien
cagcactcagagaggagtaacccat

SEQ ID NO: 2030339 - DNA, 25 bp, Homo sapien
tcaagtttccaaggccaatatgttc

SEQ ID NO: 2030340 - DNA, 25 bp, Homo sapien
agcagcactcagagaggagtaaccc

SEQ ID NO: 2030341 - DNA, 25 bp, Homo sapien
ggccatggatcttgagtctagcagc

SEQ ID NO: 2030342 - DNA, 25 bp, Homo sapien
aaagaaaagtcattgcttgcccttc

SEQ ID NO: 2030343 - DNA, 25 bp, Homo sapien
ctccaaagaaaagtcattgcttgcc

SEQ ID NO: 2030344 - DNA, 25 bp, Homo sapien
ccaaagaaaagtcattgcttgccct

SEQ ID NO: 2030345 - DNA, 25 bp, Homo sapien
tccaaagaaaagtcattgcttgccc

SEQ ID NO: 2030346 - DNA, 25 bp, Homo sapien
tgaaaggggtagcagttctactgtg

SEQ ID NO: 2030347 - DNA, 25 bp, Homo sapien
ctgagggaaccgagtttaggagtct

SEQ ID NO: 2030348 - DNA, 25 bp, Homo sapien
tttaggagtctctggactccggagg

SEQ ID NO: 2030349 - DNA, 25 bp, Homo sapien
ctccggagggcatctttcaggcatt

SEQ ID NO: 2030350 - DNA, 25 bp, Homo sapien
tctggactccggagggcatctttca

SEQ ID NO: 2030351 - DNA, 25 bp, Homo sapien
ctccctccccaaggggctgccatgg

SEQ ID NO: 2030352 - DNA, 25 bp, Homo sapien
ttggttccatccaggaactgagtca

SEQ ID NO: 2030353 - DNA, 25 bp, Homo sapien
aggaactgagtcagctccctccctc

SEQ ID NO: 2030354 - DNA, 25 bp, Homo sapien
cttccttggttccatccaggaactg

SEQ ID NO: 2030355 - DNA, 25 bp, Homo sapien
gggctgattggcaaacacagtagca

SEQ ID NO: 2030356 - DNA, 25 bp, Homo sapien
gctgattggcaaacacagtagcatc

SEQ ID NO: 2030357 - DNA, 25 bp, Homo sapien
caaggggctgattggcaaacacagt

SEQ ID NO: 2030358 - DNA, 25 bp, Homo sapien
tcttgcaaggggctgattggcaaac

SEQ ID NO: 2030359 - DNA, 25 bp, Homo sapien
ccacgtgcagatactgagcaacaag

SEQ ID NO: 2030360 - DNA, 25 bp, Homo sapien
tgctctccacgtgcagatactgagc

SEQ ID NO: 2030361 - DNA, 25 bp, Homo sapien
tctccacgtgcagatactgagcaac

SEQ ID NO: 2030362 - DNA, 25 bp, Homo sapien
cctgctctccacgtgcagatactga

SEQ ID NO: 2030363 - DNA, 25 bp, Homo sapien
tggctcctaggcaccgccgagggct

SEQ ID NO: 2030364 - DNA, 25 bp, Homo sapien
gatgctggctcctaggcaccgccga

SEQ ID NO: 2030365 - DNA, 25 bp, Homo sapien
ccgagggctcccctcatggagtggc

SEQ ID NO: 2030366 - DNA, 25 bp, Homo sapien
ctcccctcatggagtggctgacgtg

SEQ ID NO: 2030367 - DNA, 25 bp, Homo sapien
ccttgcctgggctgatttgtgttcc

SEQ ID NO: 2030368 - DNA, 25 bp, Homo sapien
catacaccaaggctagtgaggcgga

SEQ ID NO: 2030369 - DNA, 25 bp, Homo sapien
agaagcagcggtgcacacaggatga

SEQ ID NO: 2030370 - DNA, 25 bp, Homo sapien
tcaatgaagaagtagctcatgggct

SEQ ID NO: 2030371 - DNA, 25 bp, Homo sapien
gtcacgaggaaacacagtcttgtaa

SEQ ID NO: 2030372 - DNA, 25 bp, Homo sapien
tgtcaccacactctcaagatcctgt

SEQ ID NO: 2030373 - DNA, 25 bp, Homo sapien
tggttatcacgggtaatatttagga

SEQ ID NO: 2030374 - DNA, 25 bp, Homo sapien
gatcctgttggttatcacgggtaat

SEQ ID NO: 2030375 - DNA, 25 bp, Homo sapien
tatcacgggtaatatttaggaacat

SEQ ID NO: 2030376 - DNA, 25 bp, Homo sapien
taatgaaagcttgtacctgctggct

SEQ ID NO: 2030377 - DNA, 25 bp, Homo sapien
cataatggattgaagcagaggcaag

SEQ ID NO: 2030378 - DNA, 25 bp, Homo sapien
cctttgtctgaccaagcctgaacac

SEQ ID NO: 2030379 - DNA, 25 bp, Homo sapien
ttaaggctgacctgaatagccctgg

SEQ ID NO: 2030380 - DNA, 25 bp, Homo sapien
gtctgatgcccccattttgttccct

SEQ ID NO: 2030381 - DNA, 25 bp, Homo sapien
tcaggcgaccaagcctacagcgacc

SEQ ID NO: 2030382 - DNA, 25 bp, Homo sapien
agcctacagcgacctcaaggagcag

SEQ ID NO: 2030383 - DNA, 25 bp, Homo sapien
catcagtgcttgtaggaggctcagg

SEQ ID NO: 2030384 - DNA, 25 bp, Homo sapien
gctcctcccctctccacctttagca

SEQ ID NO: 2030385 - DNA, 25 bp, Homo sapien
tcccctctccacctttagcagccat

SEQ ID NO: 2030386 - DNA, 25 bp, Homo sapien
tcctcccctctccacctttagcagc

SEQ ID NO: 2030387 - DNA, 25 bp, Homo sapien
cttggcactggttccagctcctccc

SEQ ID NO: 2030388 - DNA, 25 bp, Homo sapien
tcttgcataaagtcattgcatgaat

SEQ ID NO: 2030389 - DNA, 25 bp, Homo sapien
agagatggcagagacttcacttgcc

SEQ ID NO: 2030390 - DNA, 25 bp, Homo sapien
gagacgaagctctgctaatgcatat

SEQ ID NO: 2030391 - DNA, 25 bp, Homo sapien
caacgtagtccatcagcaaatcagt

SEQ ID NO: 2030392 - DNA, 25 bp, Homo sapien
tgtgctttccacagcggcgaccacg

SEQ ID NO: 2030393 - DNA, 25 bp, Homo sapien
ctttccacagcggcgaccacgccat

SEQ ID NO: 2030394 - DNA, 25 bp, Homo sapien
tctgtgctttccacagcggcgacca

SEQ ID NO: 2030395 - DNA, 25 bp, Homo sapien
catctgtgctttccacagcggcgac

SEQ ID NO: 2030396 - DNA, 25 bp, Homo sapien
tggaaatacccaaacgtccacagtg

SEQ ID NO: 2030397 - DNA, 25 bp, Homo sapien
ggaatttatcctgtaggcctactag

SEQ ID NO: 2030398 - DNA, 25 bp, Homo sapien
gacttttgtaccatgtgaactggct

SEQ ID NO: 2030399 - DNA, 25 bp, Homo sapien
ttccagggagcacagtacatacagc

SEQ ID NO: 2030400 - DNA, 25 bp, Homo sapien
gcagaaaacacggagtgaagatcac

SEQ ID NO: 2030401 - DNA, 25 bp, Homo sapien
aggtacctgtgctgtaaagcctggc

SEQ ID NO: 2030402 - DNA, 25 bp, Homo sapien
gcctggcacagctaacatctagaaa

SEQ ID NO: 2030403 - DNA, 25 bp, Homo sapien
aaggttatcctaagagctgtcaggg

SEQ ID NO: 2030404 - DNA, 25 bp, Homo sapien
taaaaagtttggttatgaactcaca

SEQ ID NO: 2030405 - DNA, 25 bp, Homo sapien
aaaaggtgaaagatgtagtcgttct

SEQ ID NO: 2030406 - DNA, 25 bp, Homo sapien
ggttatgaactcacaactgtccctc

SEQ ID NO: 2030407 - DNA, 25 bp, Homo sapien
gtcgttctgacaagaaaccagagct

SEQ ID NO: 2030408 - DNA, 25 bp, Homo sapien
cagacaatcttaggtggaggacatc

SEQ ID NO: 2030409 - DNA, 25 bp, Homo sapien
catttataagttgcgaggtgggacc

SEQ ID NO: 2030410 - DNA, 25 bp, Homo sapien
ggcagccaaattacacccagaggtt

SEQ ID NO: 2030411 - DNA, 25 bp, Homo sapien
tgtgccgctccatgtgttaagaact

SEQ ID NO: 2030412 - DNA, 25 bp, Homo sapien
aaggttaatcccatctcttgagttg

SEQ ID NO: 2030413 - DNA, 25 bp, Homo sapien
cccaaggttaatcccatctcttgag

SEQ ID NO: 2030414 - DNA, 25 bp, Homo sapien
ctcccacccaaggttaatcccatct

SEQ ID NO: 2030415 - DNA, 25 bp, Homo sapien
cacccaaggttaatcccatctcttg

SEQ ID NO: 2030416 - DNA, 25 bp, Homo sapien
ccaaacctctgggatgcagcacaag

SEQ ID NO: 2030417 - DNA, 25 bp, Homo sapien
caaacctctgggatgcagcacaagc

SEQ ID NO: 2030418 - DNA, 25 bp, Homo sapien
gaatttcccatcagtagagactctg

SEQ ID NO: 2030419 - DNA, 25 bp, Homo sapien
ctttcttcaaaatgtcggcagtgga

SEQ ID NO: 2030420 - DNA, 25 bp, Homo sapien
taagagcctatttttcagcatggcg

SEQ ID NO: 2030421 - DNA, 25 bp, Homo sapien
cagtggatgattgcggccctttctt

SEQ ID NO: 2030422 - DNA, 25 bp, Homo sapien
ggcaagagtgtataacaatctatca

SEQ ID NO: 2030423 - DNA, 25 bp, Homo sapien
taggcaagagtgtataacaatctat

SEQ ID NO: 2030424 - DNA, 25 bp, Homo sapien
caagagtgtataacaatctatcacc

SEQ ID NO: 2030425 - DNA, 25 bp, Homo sapien
aactaggcaagagtgtataacaatc

SEQ ID NO: 2030426 - DNA, 25 bp, Homo sapien
tgatacacggtgtacccccacaagg

SEQ ID NO: 2030427 - DNA, 25 bp, Homo sapien
tgtgctaataaataaagtccatgac

SEQ ID NO: 2030428 - DNA, 25 bp, Homo sapien
gcagtgtactcagagtgactcaacc

SEQ ID NO: 2030429 - DNA, 25 bp, Homo sapien
aataatgaacgagggagaaccacgt

SEQ ID NO: 2030430 - DNA, 25 bp, Homo sapien
ggctttctctctttgatccaaggta

SEQ ID NO: 2030431 - DNA, 25 bp, Homo sapien
tcacactatcaatctgatggaggga

SEQ ID NO: 2030432 - DNA, 25 bp, Homo sapien
cactatcaatctgatggagggatgc

SEQ ID NO: 2030433 - DNA, 25 bp, Homo sapien
ctatcaatctgatggagggatgcag

SEQ ID NO: 2030434 - DNA, 25 bp, Homo sapien
tggtgagcctggaatccaagaatct

SEQ ID NO: 2030435 - DNA, 25 bp, Homo sapien
catgcatgttaatctgataccggga

SEQ ID NO: 2030436 - DNA, 25 bp, Homo sapien
gagacaaagaagacaaagcctggca

SEQ ID NO: 2030437 - DNA, 25 bp, Homo sapien
tagactctaaggatggaaatgccac

SEQ ID NO: 2030438 - DNA, 25 bp, Homo sapien
tgtgatgacgcttctagcagagctg

SEQ ID NO: 2030439 - DNA, 25 bp, Homo sapien
tggctgctgtgatgacgcttctagc

SEQ ID NO: 2030440 - DNA, 25 bp, Homo sapien
ctgtgagtggaggtgtttcagaaga

SEQ ID NO: 2030441 - DNA, 25 bp, Homo sapien
gcctcattggctgctgtgatgacgc

SEQ ID NO: 2030442 - DNA, 25 bp, Homo sapien
gaagtttgcactatacacttacaac

SEQ ID NO: 2030443 - DNA, 25 bp, Homo sapien
tactagcgctataccatgcaagcac

SEQ ID NO: 2030444 - DNA, 25 bp, Homo sapien
gcaagcaccttatagcagaatattc

SEQ ID NO: 2030445 - DNA, 25 bp, Homo sapien
tacctaagtcctctttctactagcg

SEQ ID NO: 2030446 - DNA, 25 bp, Homo sapien
tctggtattcccattgcacgtttac

SEQ ID NO: 2030447 - DNA, 25 bp, Homo sapien
tgttgactctgttaacgagcccgtc

SEQ ID NO: 2030448 - DNA, 25 bp, Homo sapien
ccacagttctcacagttcacggata

SEQ ID NO: 2030449 - DNA, 25 bp, Homo sapien
gaagttctacggacacagcttaaag

SEQ ID NO: 2030450 - DNA, 25 bp, Homo sapien
cattgttggtgcctactgatttgtg

SEQ ID NO: 2030451 - DNA, 25 bp, Homo sapien
tagcctgagaccttactgaatttgt

SEQ ID NO: 2030452 - DNA, 25 bp, Homo sapien
gccattcagcgtaatgttgcctgtg

SEQ ID NO: 2030453 - DNA, 25 bp, Homo sapien
cattgatgaatcgtgacaatctgag

SEQ ID NO: 2030454 - DNA, 25 bp, Homo sapien
aggaagccaaagataggaccccagt

SEQ ID NO: 2030455 - DNA, 25 bp, Homo sapien
tgtagactttagatagcctgatgac

SEQ ID NO: 2030456 - DNA, 25 bp, Homo sapien
ttaaaactcattccttcatgtagac

SEQ ID NO: 2030457 - DNA, 25 bp, Homo sapien
agccaaagataggaccccagtccct

SEQ ID NO: 2030458 - DNA, 25 bp, Homo sapien
gggttaattctagagcctgatcttt

SEQ ID NO: 2030459 - DNA, 25 bp, Homo sapien
tcttcatctttgactgggttaattc

SEQ ID NO: 2030460 - DNA, 25 bp, Homo sapien
catttccctaagtgtgactttcatt

SEQ ID NO: 2030461 - DNA, 25 bp, Homo sapien
ctttgactgggttaattctagagcc

SEQ ID NO: 2030462 - DNA, 25 bp, Homo sapien
gcagtaaccatgcatttggcctgtg

SEQ ID NO: 2030463 - DNA, 25 bp, Homo sapien
tcccagacgctggttgcagtaacca

SEQ ID NO: 2030464 - DNA, 25 bp, Homo sapien
gcctgtgggtaagttcactgtctcc

SEQ ID NO: 2030465 - DNA, 25 bp, Homo sapien
ccttcaggccaataggagaggtatc

SEQ ID NO: 2030466 - DNA, 25 bp, Homo sapien
gaaacgtcccactagtggaaagatc

SEQ ID NO: 2030467 - DNA, 25 bp, Homo sapien
tttccaagcccctttatgatcagag

SEQ ID NO: 2030468 - DNA, 25 bp, Homo sapien
tgtagactttctttactgcacccag

SEQ ID NO: 2030469 - DNA, 25 bp, Homo sapien
tgcagtggtgtaccagtgggaaaag

SEQ ID NO: 2030470 - DNA, 25 bp, Homo sapien
tgcagtggccgtgagagtgacatct

SEQ ID NO: 2030471 - DNA, 25 bp, Homo sapien
tccaaaggtatctcacaggtggtgc

SEQ ID NO: 2030472 - DNA, 25 bp, Homo sapien
gtctaacggcgacaggacagagcac

SEQ ID NO: 2030473 - DNA, 25 bp, Homo sapien
ttgagggaccaaggagcgtctaacg

SEQ ID NO: 2030474 - DNA, 25 bp, Homo sapien
catctctgctaaactacaaaaagtt

SEQ ID NO: 2030475 - DNA, 25 bp, Homo sapien
tctgctaaactacaaaaagttagcc

SEQ ID NO: 2030476 - DNA, 25 bp, Homo sapien
tctctgctaaactacaaaaagttag

SEQ ID NO: 2030477 - DNA, 25 bp, Homo sapien
ccatctctgctaaactacaaaaagt

SEQ ID NO: 2030478 - DNA, 25 bp, Homo sapien
tgtgctccacctaaggccgactgct

SEQ ID NO: 2030479 - DNA, 25 bp, Homo sapien
tccccaacacacagtggtctgggtc

SEQ ID NO: 2030480 - DNA, 25 bp, Homo sapien
gacataaatgccatatctgatagca

SEQ ID NO: 2030481 - DNA, 25 bp, Homo sapien
agccgtgtgctccacctaaggccga

SEQ ID NO: 2030482 - DNA, 25 bp, Homo sapien
cctcgtgtggctgagatgaaatcca

SEQ ID NO: 2030483 - DNA, 25 bp, Homo sapien
tgactaaatcaaaacggaacctgga

SEQ ID NO: 2030484 - DNA, 25 bp, Homo sapien
caatgggtaacgagatggcacagtc

SEQ ID NO: 2030485 - DNA, 25 bp, Homo sapien
taccaggtcagtagaaagctcagca

SEQ ID NO: 2030486 - DNA, 25 bp, Homo sapien
ctagcctttcttactaatgaggtgc

SEQ ID NO: 2030487 - DNA, 25 bp, Homo sapien
cttcacaagttcagtgagacactcc

SEQ ID NO: 2030488 - DNA, 25 bp, Homo sapien
gttcagtgagacactcctggtttcc

SEQ ID NO: 2030489 - DNA, 25 bp, Homo sapien
tcacaagttcagtgagacactcctg

SEQ ID NO: 2030490 - DNA, 25 bp, Homo sapien
cagtgagacactcctggtttccctc

SEQ ID NO: 2030491 - DNA, 25 bp, Homo sapien
tctgaagagattatccaagtcaata

SEQ ID NO: 2030492 - DNA, 25 bp, Homo sapien
ctgaagagattatccaagtcaatat

SEQ ID NO: 2030493 - DNA, 25 bp, Homo sapien
aagaacagaaataaaatctagattc

SEQ ID NO: 2030494 - DNA, 25 bp, Homo sapien
cagaaataaaatctagattcattat

SEQ ID NO: 2030495 - DNA, 25 bp, Homo sapien
aacagaaataaaatctagattcatt

SEQ ID NO: 2030496 - DNA, 25 bp, Homo sapien
gaacagaaataaaatctagattcat

SEQ ID NO: 2030497 - DNA, 25 bp, Homo sapien
catggagggccttgcatgggttctc

SEQ ID NO: 2030498 - DNA, 25 bp, Homo sapien
tgaagcaccatgcaacgaaaggcag

SEQ ID NO: 2030499 - DNA, 25 bp, Homo sapien
catacagccagtagacatgtttgga

SEQ ID NO: 2030500 - DNA, 25 bp, Homo sapien
tccagggatgtactactgttgcacc

SEQ ID NO: 2030501 - DNA, 25 bp, Homo sapien
cctaaaggcaaaagctgtagctgtc

SEQ ID NO: 2030502 - DNA, 25 bp, Homo sapien
tgcatatgacctaaaggcaaaagct

SEQ ID NO: 2030503 - DNA, 25 bp, Homo sapien
tgacctaaaggcaaaagctgtagct

SEQ ID NO: 2030504 - DNA, 25 bp, Homo sapien
aaggcaaaagctgtagctgtcactg

SEQ ID NO: 2030505 - DNA, 25 bp, Homo sapien
ctctggatattctaatgtgacaaat

SEQ ID NO: 2030506 - DNA, 25 bp, Homo sapien
ctggaggccagtggaaattatagct

SEQ ID NO: 2030507 - DNA, 25 bp, Homo sapien
tttttggacagcagccaagtaaaag

SEQ ID NO: 2030508 - DNA, 25 bp, Homo sapien
tccagagctcaatggtggatggctt

SEQ ID NO: 2030509 - DNA, 25 bp, Homo sapien
gatttggcagaacaggacaaccggt

SEQ ID NO: 2030510 - DNA, 25 bp, Homo sapien
tagactcgaaaagggaatgactgct

SEQ ID NO: 2030511 - DNA, 25 bp, Homo sapien
tgccctggaatttaagactatgaac

SEQ ID NO: 2030512 - DNA, 25 bp, Homo sapien
cacagctaattacaggcaacatagg

SEQ ID NO: 2030513 - DNA, 25 bp, Homo sapien
cttcaaatcttgcacagtcagggtc

SEQ ID NO: 2030514 - DNA, 25 bp, Homo sapien
tcagggtctagggtgctcaaggtct

SEQ ID NO: 2030515 - DNA, 25 bp, Homo sapien
ctcaaggtcttgaacatgattgcct

SEQ ID NO: 2030516 - DNA, 25 bp, Homo sapien
cttaggagaagcagtcgtcccttca

SEQ ID NO: 2030517 - DNA, 25 bp, Homo sapien
tagaatcacgagtttacatttagga

SEQ ID NO: 2030518 - DNA, 25 bp, Homo sapien
gtacttgcagctccttagaatatag

SEQ ID NO: 2030519 - DNA, 25 bp, Homo sapien
cagagggaagatgtgttgtcaataa

SEQ ID NO: 2030520 - DNA, 25 bp, Homo sapien
tcagcccagcgaacctaataatatc

SEQ ID NO: 2030521 - DNA, 25 bp, Homo sapien
tttgttctctcaaacgatcgtgaag

SEQ ID NO: 2030522 - DNA, 25 bp, Homo sapien
gagtctgattccaaatttgcctgtg

SEQ ID NO: 2030523 - DNA, 25 bp, Homo sapien
gattttgaatgtgaagagtctgatt

SEQ ID NO: 2030524 - DNA, 25 bp, Homo sapien
gatcgtgaagtgttgcctccttttt

SEQ ID NO: 2030525 - DNA, 25 bp, Homo sapien
gtctgaatacgggcagccaaaagca

SEQ ID NO: 2030526 - DNA, 25 bp, Homo sapien
tctgccagggccaatgacctggttc

SEQ ID NO: 2030527 - DNA, 25 bp, Homo sapien
gatgttatcagaacccaatagcagg

SEQ ID NO: 2030528 - DNA, 25 bp, Homo sapien
aggctatgggcagaaggatctgcca

SEQ ID NO: 2030529 - DNA, 25 bp, Homo sapien
aacccaatagcaggctatgggcaga

SEQ ID NO: 2030530 - DNA, 25 bp, Homo sapien
aaaactctgccgctgctagaaatga

SEQ ID NO: 2030531 - DNA, 25 bp, Homo sapien
gatccctgtgcccacgtccctgtct

SEQ ID NO: 2030532 - DNA, 25 bp, Homo sapien
tctccaaagaggccccaaaactctg

SEQ ID NO: 2030533 - DNA, 25 bp, Homo sapien
tctgccgctgctagaaatgaggttg

SEQ ID NO: 2030534 - DNA, 25 bp, Homo sapien
tggtgcttatgtgcatgcacgtacg

SEQ ID NO: 2030535 - DNA, 25 bp, Homo sapien
gcttatgtgcatgcacgtacgcatg

SEQ ID NO: 2030536 - DNA, 25 bp, Homo sapien
ggtgcttatgtgcatgcacgtacgc

SEQ ID NO: 2030537 - DNA, 25 bp, Homo sapien
tatgtgcatgcacgtacgcatgcat

SEQ ID NO: 2030538 - DNA, 25 bp, Homo sapien
gttgccaaaccccttggataccaga

SEQ ID NO: 2030539 - DNA, 25 bp, Homo sapien
tgagagccctgttctgctaaaaggg

SEQ ID NO: 2030540 - DNA, 25 bp, Homo sapien
tgctgtgcccgccaattgggatccc

SEQ ID NO: 2030541 - DNA, 25 bp, Homo sapien
tccaagagtctagatggtgattact

SEQ ID NO: 2030542 - DNA, 25 bp, Homo sapien
aagtacagataatacatgttgggat

SEQ ID NO: 2030543 - DNA, 25 bp, Homo sapien
tacatgttgggatatggactgggaa

SEQ ID NO: 2030544 - DNA, 25 bp, Homo sapien
atacatgttgggatatggactggga

SEQ ID NO: 2030545 - DNA, 25 bp, Homo sapien
acagataatacatgttgggatatgg

SEQ ID NO: 2030546 - DNA, 25 bp, Homo sapien
gatggcacctaaatgctaggcacag

SEQ ID NO: 2030547 - DNA, 25 bp, Homo sapien
cagccgaacaattgcagatggcacc

SEQ ID NO: 2030548 - DNA, 25 bp, Homo sapien
ggaactactgtcaaaaggaaccatg

SEQ ID NO: 2030549 - DNA, 25 bp, Homo sapien
tcctcgtgcccaggatgtaacatca

SEQ ID NO: 2030550 - DNA, 25 bp, Homo sapien
cacaaggctgaaaagcgaggtctcc

SEQ ID NO: 2030551 - DNA, 25 bp, Homo sapien
gaagcaaaaacagaccaccaactgg

SEQ ID NO: 2030552 - DNA, 25 bp, Homo sapien
tggactgtgaaacaccactgagggc

SEQ ID NO: 2030553 - DNA, 25 bp, Homo sapien
tgtgtcccaggtttaattcaaggta

SEQ ID NO: 2030554 - DNA, 25 bp, Homo sapien
tcggcacccgggagtaggacagaca

SEQ ID NO: 2030555 - DNA, 25 bp, Homo sapien
ctgtgatgtcccgaataacgtggac

SEQ ID NO: 2030556 - DNA, 25 bp, Homo sapien
cacggatatggcctattcctcggca

SEQ ID NO: 2030557 - DNA, 25 bp, Homo sapien
cacccgggagtaggacagacagctt

SEQ ID NO: 2030558 - DNA, 25 bp, Homo sapien
tggaaggatcttcaggtcattcgtt

SEQ ID NO: 2030559 - DNA, 25 bp, Homo sapien
ctggaaggatcttcaggtcattcgt

SEQ ID NO: 2030560 - DNA, 25 bp, Homo sapien
ggaaggatcttcaggtcattcgttc

SEQ ID NO: 2030561 - DNA, 25 bp, Homo sapien
taatggcaaagacaatacagccacg

SEQ ID NO: 2030562 - DNA, 25 bp, Homo sapien
cagccacgagctgagaatgcgaata

SEQ ID NO: 2030563 - DNA, 25 bp, Homo sapien
ggtcctcagtgaagcctccactcaa

SEQ ID NO: 2030564 - DNA, 25 bp, Homo sapien
cactcaaccacagcaaggatcttag

SEQ ID NO: 2030565 - DNA, 25 bp, Homo sapien
gaaactgtcctggataacaggaccg

SEQ ID NO: 2030566 - DNA, 25 bp, Homo sapien
gataacaggaccgaagggaaaggca

SEQ ID NO: 2030567 - DNA, 25 bp, Homo sapien
aaaggcaccgtaaagacaaatgctt

SEQ ID NO: 2030568 - DNA, 25 bp, Homo sapien
tggtcatggtcacttgaaactgtcc

SEQ ID NO: 2030569 - DNA, 25 bp, Homo sapien
tgctcgggacctgctgtgcgctctg

SEQ ID NO: 2030570 - DNA, 25 bp, Homo sapien
ctgctcgggacctgctgtgcgctct

SEQ ID NO: 2030571 - DNA, 25 bp, Homo sapien
tcgggacctgctgtgcgctctgcat

SEQ ID NO: 2030572 - DNA, 25 bp, Homo sapien
ctcgggacctgctgtgcgctctgca

SEQ ID NO: 2030573 - DNA, 25 bp, Homo sapien
aattctccacctgatgtctgtaaca

SEQ ID NO: 2030574 - DNA, 25 bp, Homo sapien
ctgtactagttgattcactggtggc

SEQ ID NO: 2030575 - DNA, 25 bp, Homo sapien
gataacgtaaaaggagcaaattgcc

SEQ ID NO: 2030576 - DNA, 25 bp, Homo sapien
gtctgtaacagatgcttcgataacg

SEQ ID NO: 2030577 - DNA, 25 bp, Homo sapien
cgctggcaccttgggtataaaggca

SEQ ID NO: 2030578 - DNA, 25 bp, Homo sapien
gtataaaggcactccattcagagaa

SEQ ID NO: 2030579 - DNA, 25 bp, Homo sapien
caaataaaaatgttcgctggcacct

SEQ ID NO: 2030580 - DNA, 25 bp, Homo sapien
aataaaaatgttcgctggcaccttg

SEQ ID NO: 2030581 - DNA, 25 bp, Homo sapien
agtacagccgttctcatccacagca

SEQ ID NO: 2030582 - DNA, 25 bp, Homo sapien
caggaagggtgacgtaagtacagcc

SEQ ID NO: 2030583 - DNA, 25 bp, Homo sapien
gccctgctggtggactggcacattc

SEQ ID NO: 2030584 - DNA, 25 bp, Homo sapien
catttaaaagcatttctacataatc

SEQ ID NO: 2030585 - DNA, 25 bp, Homo sapien
gctcaatgtctgcaatgagattaaa

SEQ ID NO: 2030586 - DNA, 25 bp, Homo sapien
cttggctcaatgtctgcaatgagat

SEQ ID NO: 2030587 - DNA, 25 bp, Homo sapien
tggctcaatgtctgcaatgagatta

SEQ ID NO: 2030588 - DNA, 25 bp, Homo sapien
ggctcaatgtctgcaatgagattaa

SEQ ID NO: 2030589 - DNA, 25 bp, Homo sapien
gagcagaacacaaggaaatagacat

SEQ ID NO: 2030590 - DNA, 25 bp, Homo sapien
gcagaacacaaggaaatagacataa

SEQ ID NO: 2030591 - DNA, 25 bp, Homo sapien
cagagcagaacacaaggaaatagac

SEQ ID NO: 2030592 - DNA, 25 bp, Homo sapien
gaacacaaggaaatagacataaaaa

SEQ ID NO: 2030593 - DNA, 25 bp, Homo sapien
catccgatcgggtggatatcagggc

SEQ ID NO: 2030594 - DNA, 25 bp, Homo sapien
gtagtcatacttatggtcccaacca

SEQ ID NO: 2030595 - DNA, 25 bp, Homo sapien
tgtgacatcacaccatccgatcggg

SEQ ID NO: 2030596 - DNA, 25 bp, Homo sapien
tgtggcacttccagtggatgccctg

SEQ ID NO: 2030597 - DNA, 25 bp, Homo sapien
tggaatgctgttgaggggatactct

SEQ ID NO: 2030598 - DNA, 25 bp, Homo sapien
tgtcctgagcgactgtcctattaac

SEQ ID NO: 2030599 - DNA, 25 bp, Homo sapien
gtcctattaaccacttcaagaacca

SEQ ID NO: 2030600 - DNA, 25 bp, Homo sapien
gggatactctttgtcctgagcgact

SEQ ID NO: 2030601 - DNA, 25 bp, Homo sapien
gagtcaccaacttgacattagtaca

SEQ ID NO: 2030602 - DNA, 25 bp, Homo sapien
taagagtcaccaacttgacattagt

SEQ ID NO: 2030603 - DNA, 25 bp, Homo sapien
cagtaagagtcaccaacttgacatt

SEQ ID NO: 2030604 - DNA, 25 bp, Homo sapien
caccaacttgacattagtacaagtg

SEQ ID NO: 2030605 - DNA, 25 bp, Homo sapien
ctcaaactcatctgcttttccacaa

SEQ ID NO: 2030606 - DNA, 25 bp, Homo sapien
tctgcttttccacaaatatagttgc

SEQ ID NO: 2030607 - DNA, 25 bp, Homo sapien
tttccacaaatatagttgcttccat

SEQ ID NO: 2030608 - DNA, 25 bp, Homo sapien
caaactcatctgcttttccacaaat

SEQ ID NO: 2030609 - DNA, 25 bp, Homo sapien
gtttacaataaagaagacataggat

SEQ ID NO: 2030610 - DNA, 25 bp, Homo sapien
actgtttacaataaagaagacatag

SEQ ID NO: 2030611 - DNA, 25 bp, Homo sapien
ttacaataaagaagacataggattt

SEQ ID NO: 2030612 - DNA, 25 bp, Homo sapien
tgtttacaataaagaagacatagga

SEQ ID NO: 2030613 - DNA, 25 bp, Homo sapien
agttgtggcagtaaatcataaacca

SEQ ID NO: 2030614 - DNA, 25 bp, Homo sapien
aagttgtggcagtaaatcataaacc

SEQ ID NO: 2030615 - DNA, 25 bp, Homo sapien
ttgagatctgccgaaaccccagacc

SEQ ID NO: 2030616 - DNA, 25 bp, Homo sapien
acacagggggatggactttgacaga

SEQ ID NO: 2030617 - DNA, 25 bp, Homo sapien
ggactttgacagaggaagacacagc

SEQ ID NO: 2030618 - DNA, 25 bp, Homo sapien
tgtgttgagatctgccgaaacccca

SEQ ID NO: 2030619 - DNA, 25 bp, Homo sapien
ggagtctgaatgagcccactctccc

SEQ ID NO: 2030620 - DNA, 25 bp, Homo sapien
tcccacagggcgtggcgatggtcac

SEQ ID NO: 2030621 - DNA, 25 bp, Homo sapien
caacatgtaggctgctaaatgccac

SEQ ID NO: 2030622 - DNA, 25 bp, Homo sapien
aaaccggcctgacgtgaagctacat

SEQ ID NO: 2030623 - DNA, 25 bp, Homo sapien
tccaaagctaagacaaattccacag

SEQ ID NO: 2030624 - DNA, 25 bp, Homo sapien
catttggaatgtcagaactgcagct

SEQ ID NO: 2030625 - DNA, 25 bp, Homo sapien
gaaatagtacacttctgttcaggaa

SEQ ID NO: 2030626 - DNA, 25 bp, Homo sapien
tacatattgcacattctgactgaag

SEQ ID NO: 2030627 - DNA, 25 bp, Homo sapien
cctccaggtaggacagacaatgtgg

SEQ ID NO: 2030628 - DNA, 25 bp, Homo sapien
tctgtcaagaactgccagtaccaca

SEQ ID NO: 2030629 - DNA, 25 bp, Homo sapien
tagtggatctgctgcgctctgtcaa

SEQ ID NO: 2030630 - DNA, 25 bp, Homo sapien
tctgctgcgctctgtcaagaactgc

SEQ ID NO: 2030631 - DNA, 25 bp, Homo sapien
catctacaatcgtagcaacacgaat

SEQ ID NO: 2030632 - DNA, 25 bp, Homo sapien
gtcatcaacatctacaatcgtagca

SEQ ID NO: 2030633 - DNA, 25 bp, Homo sapien
aatcgtagcaacacgaattaacctg

SEQ ID NO: 2030634 - DNA, 25 bp, Homo sapien
cgtttatccacaacttcaagtttca

SEQ ID NO: 2030635 - DNA, 25 bp, Homo sapien
atttggcagaaaaccatgaggcaac

SEQ ID NO: 2030636 - DNA, 25 bp, Homo sapien
ttggcagaaaaccatgaggcaacct

SEQ ID NO: 2030637 - DNA, 25 bp, Homo sapien
tttggcagaaaaccatgaggcaacc

SEQ ID NO: 2030638 - DNA, 25 bp, Homo sapien
ctttctgcaatatctggtgtgtttc

SEQ ID NO: 2030639 - DNA, 25 bp, Homo sapien
taataaacagtcaaatctttctgca

SEQ ID NO: 2030640 - DNA, 25 bp, Homo sapien
taattaggtctttcatcccggagaa

SEQ ID NO: 2030641 - DNA, 25 bp, Homo sapien
cacatctactaaatggagtatactg

SEQ ID NO: 2030642 - DNA, 25 bp, Homo sapien
gcattggtttgagtagcttccaggt

SEQ ID NO: 2030643 - DNA, 25 bp, Homo sapien
ctgcattggtttgagtagcttccag

SEQ ID NO: 2030644 - DNA, 25 bp, Homo sapien
caggaactgcattggtttgagtagc

SEQ ID NO: 2030645 - DNA, 25 bp, Homo sapien
tttggcaggaactgcattggtttga

SEQ ID NO: 2030646 - DNA, 25 bp, Homo sapien
tgtatattccctgttcaatgaaccc

SEQ ID NO: 2030647 - DNA, 25 bp, Homo sapien
gaagaatgtcatatggcccagggag

SEQ ID NO: 2030648 - DNA, 25 bp, Homo sapien
ccctgttcaatgaacccaaagagag

SEQ ID NO: 2030649 - DNA, 25 bp, Homo sapien
gagagttgcaaaagccacgtactcc

SEQ ID NO: 2030650 - DNA, 25 bp, Homo sapien
tatctgaacaatgacgcgtggctcc

SEQ ID NO: 2030651 - DNA, 25 bp, Homo sapien
catagaactgcgacagcgagagggc

SEQ ID NO: 2030652 - DNA, 25 bp, Homo sapien
gcagtgcagcaataccgtggaagaa

SEQ ID NO: 2030653 - DNA, 25 bp, Homo sapien
gactgtaaactgctggactggagac

SEQ ID NO: 2030654 - DNA, 25 bp, Homo sapien
tcatggtgccagcaattcttccggt

SEQ ID NO: 2030655 - DNA, 25 bp, Homo sapien
aagcagaacagcctgaacgctcagg

SEQ ID NO: 2030656 - DNA, 25 bp, Homo sapien
taaaacggtagatctgggtgacaaa

SEQ ID NO: 2030657 - DNA, 25 bp, Homo sapien
cagccctggatttcctcatggtgcc

SEQ ID NO: 2030658 - DNA, 25 bp, Homo sapien
catttgctcggtgggagtaattaac

SEQ ID NO: 2030659 - DNA, 25 bp, Homo sapien
ccaactggctggacataagggctat

SEQ ID NO: 2030660 - DNA, 25 bp, Homo sapien
tggctggacataagggctattaaca

SEQ ID NO: 2030661 - DNA, 25 bp, Homo sapien
acaccaaccaactggctggacataa

SEQ ID NO: 2030662 - DNA, 25 bp, Homo sapien
gggtgctatcagagttcttccattc

SEQ ID NO: 2030663 - DNA, 25 bp, Homo sapien
gttgtcaaaatgcactagtaagcga

SEQ ID NO: 2030664 - DNA, 25 bp, Homo sapien
ctatggtcgccacacacaccaagga

SEQ ID NO: 2030665 - DNA, 25 bp, Homo sapien
cagtaatcgtaactatcatcccagt

SEQ ID NO: 2030666 - DNA, 25 bp, Homo sapien
tcaacaatatctgctatggtcgcca

SEQ ID NO: 2030667 - DNA, 25 bp, Homo sapien
gaaattctttagacattggcccatt

SEQ ID NO: 2030668 - DNA, 25 bp, Homo sapien
tccaacctgaaattctttagacatt

SEQ ID NO: 2030669 - DNA, 25 bp, Homo sapien
caacctgaaattctttagacattgg

SEQ ID NO: 2030670 - DNA, 25 bp, Homo sapien
acctgaaattctttagacattggcc

SEQ ID NO: 2030671 - DNA, 25 bp, Homo sapien
gtaatccatccaaacaaatttatct

SEQ ID NO: 2030672 - DNA, 25 bp, Homo sapien
ttggagcattttgcaatttgcaggc

SEQ ID NO: 2030673 - DNA, 25 bp, Homo sapien
caagtaatccatccaaacaaattta

SEQ ID NO: 2030674 - DNA, 25 bp, Homo sapien
aatttgcaggccttcaagtaatcca

SEQ ID NO: 2030675 - DNA, 25 bp, Homo sapien
tggaaatcaatccacaccaggatct

SEQ ID NO: 2030676 - DNA, 25 bp, Homo sapien
tggcccagactcctctagcacataa

SEQ ID NO: 2030677 - DNA, 25 bp, Homo sapien
tcattcccatcgaaagaaaatagtg

SEQ ID NO: 2030678 - DNA, 25 bp, Homo sapien
tccgtgattcctaagtctgaaacaa

SEQ ID NO: 2030679 - DNA, 25 bp, Homo sapien
ttcacaccatcctactggatgaatg

SEQ ID NO: 2030680 - DNA, 25 bp, Homo sapien
ccttagggatgtgcagttcatgttt

SEQ ID NO: 2030681 - DNA, 25 bp, Homo sapien
ccagcattggtccaaaaatcatagc

SEQ ID NO: 2030682 - DNA, 25 bp, Homo sapien
aatgaagtcttagacggtaaccaca

SEQ ID NO: 2030683 - DNA, 25 bp, Homo sapien
gcacacagaataccgatggatgtcg

SEQ ID NO: 2030684 - DNA, 25 bp, Homo sapien
cagaaagcacacagaataccgatgg

SEQ ID NO: 2030685 - DNA, 25 bp, Homo sapien
gatgtcggggatcaatgccttctaa

SEQ ID NO: 2030686 - DNA, 25 bp, Homo sapien
ctccgctacagaaagcacacagaat

SEQ ID NO: 2030687 - DNA, 25 bp, Homo sapien
attttcatgctctggaaaggactga

SEQ ID NO: 2030688 - DNA, 25 bp, Homo sapien
gtgtgtcctatgaacttcccattta

SEQ ID NO: 2030689 - DNA, 25 bp, Homo sapien
gttgtgtgtcctatgaacttcccat

SEQ ID NO: 2030690 - DNA, 25 bp, Homo sapien
atgaagttgtgtgtcctatgaactt

SEQ ID NO: 2030691 - DNA, 25 bp, Homo sapien
tcctatgaacttcccatttattcct

SEQ ID NO: 2030692 - DNA, 25 bp, Homo sapien
ggtgtatcacggaagagcgctcaag

SEQ ID NO: 2030693 - DNA, 25 bp, Homo sapien
aaaacaccgtcaccatgcctagaga

SEQ ID NO: 2030694 - DNA, 25 bp, Homo sapien
tattcaaaggcacgggtaggcagtc

SEQ ID NO: 2030695 - DNA, 25 bp, Homo sapien
gaagcgccagtgctcttgagtacaa

SEQ ID NO: 2030696 - DNA, 25 bp, Homo sapien
aaaacagctcaacaggtgctgcgac

SEQ ID NO: 2030697 - DNA, 25 bp, Homo sapien
gttctttcaagtaccactcccaaga

SEQ ID NO: 2030698 - DNA, 25 bp, Homo sapien
tctgttctttcaagtaccactccca

SEQ ID NO: 2030699 - DNA, 25 bp, Homo sapien
aacagctcaacaggtgctgcgacag

SEQ ID NO: 2030700 - DNA, 25 bp, Homo sapien
cactgtttctgccacgagatgtttt

SEQ ID NO: 2030701 - DNA, 25 bp, Homo sapien
tccaggaagactattcaacatccca

SEQ ID NO: 2030702 - DNA, 25 bp, Homo sapien
tagaacgcctaaaggtttgcactgt

SEQ ID NO: 2030703 - DNA, 25 bp, Homo sapien
gagaaagcaatctgacaaaccctga

SEQ ID NO: 2030704 - DNA, 25 bp, Homo sapien
ttccctcctgagcaattctatgatc

SEQ ID NO: 2030705 - DNA, 25 bp, Homo sapien
tttccctcctgagcaattctatgat

SEQ ID NO: 2030706 - DNA, 25 bp, Homo sapien
tctttccctcctgagcaattctatg

SEQ ID NO: 2030707 - DNA, 25 bp, Homo sapien
tccctcctgagcaattctatgatcc

SEQ ID NO: 2030708 - DNA, 25 bp, Homo sapien
tggagcccacgtgggatgaggtggc

SEQ ID NO: 2030709 - DNA, 25 bp, Homo sapien
cggagggcgtcgagaggacggcttc

SEQ ID NO: 2030710 - DNA, 25 bp, Homo sapien
cagcctggtgcggtattaacgccca

SEQ ID NO: 2030711 - DNA, 25 bp, Homo sapien
caaaggagcttgaagatgacatcca

SEQ ID NO: 2030712 - DNA, 25 bp, Homo sapien
taagtgcactgcctacagggcttga

SEQ ID NO: 2030713 - DNA, 25 bp, Homo sapien
tgtttactcagcaggagacggtgtc

SEQ ID NO: 2030714 - DNA, 25 bp, Homo sapien
taatcttcaagagtgtccaggtcat

SEQ ID NO: 2030715 - DNA, 25 bp, Homo sapien
tctgtggcgctaagagagagcacac

SEQ ID NO: 2030716 - DNA, 25 bp, Homo sapien
aggggttgtgctatccttgggcttc

SEQ ID NO: 2030717 - DNA, 25 bp, Homo sapien
caaaggggttgtgctatccttgggc

SEQ ID NO: 2030718 - DNA, 25 bp, Homo sapien
ggggttgtgctatccttgggcttct

SEQ ID NO: 2030719 - DNA, 25 bp, Homo sapien
actcaaaggggttgtgctatccttg

SEQ ID NO: 2030720 - DNA, 25 bp, Homo sapien
tacaagcacacgcagcaagcaagat

SEQ ID NO: 2030721 - DNA, 25 bp, Homo sapien
tccatttggacgtggaaggaatcca

SEQ ID NO: 2030722 - DNA, 25 bp, Homo sapien
taatattgaggttgacacaggtacc

SEQ ID NO: 2030723 - DNA, 25 bp, Homo sapien
tgacagtcgcacaggagtggctgac

SEQ ID NO: 2030724 - DNA, 25 bp, Homo sapien
cagctactgatttgtggttggcaat

SEQ ID NO: 2030725 - DNA, 25 bp, Homo sapien
tcagctactgatttgtggttggcaa

SEQ ID NO: 2030726 - DNA, 25 bp, Homo sapien
tactgatttgtggttggcaattttg

SEQ ID NO: 2030727 - DNA, 25 bp, Homo sapien
gctactgatttgtggttggcaattt

SEQ ID NO: 2030728 - DNA, 25 bp, Homo sapien
tgctgtcagaccaaagactcctgaa

SEQ ID NO: 2030729 - DNA, 25 bp, Homo sapien
tgttcttgttccataagaacctgct

SEQ ID NO: 2030730 - DNA, 25 bp, Homo sapien
ctcctttgctgtcagaccaaagact

SEQ ID NO: 2030731 - DNA, 25 bp, Homo sapien
aacactcaaggatttctgagaaccc

SEQ ID NO: 2030732 - DNA, 25 bp, Homo sapien
gtccgtcctgatccaaacgctcttt

SEQ ID NO: 2030733 - DNA, 25 bp, Homo sapien
aagcgtccgtcctgatccaaacgct

SEQ ID NO: 2030734 - DNA, 25 bp, Homo sapien
tgatccaaacgctctttggaatcca

SEQ ID NO: 2030735 - DNA, 25 bp, Homo sapien
cgtcctgatccaaacgctctttgga

SEQ ID NO: 2030736 - DNA, 25 bp, Homo sapien
ccccgcactccttggcagtggtttt

SEQ ID NO: 2030737 - DNA, 25 bp, Homo sapien
acccccgcactccttggcagtggtt

SEQ ID NO: 2030738 - DNA, 25 bp, Homo sapien
cccccgcactccttggcagtggttt

SEQ ID NO: 2030739 - DNA, 25 bp, Homo sapien
gtcatacaaggcatagcatagcaat

SEQ ID NO: 2030740 - DNA, 25 bp, Homo sapien
gacacgtattcttggtaagaggtct

SEQ ID NO: 2030741 - DNA, 25 bp, Homo sapien
taagaggtcttagtcatacaaggca

SEQ ID NO: 2030742 - DNA, 25 bp, Homo sapien
cacgtattcttggtaagaggtctta

SEQ ID NO: 2030743 - DNA, 25 bp, Homo sapien
ctgtctgtctatgtcaaggtgctat

SEQ ID NO: 2030744 - DNA, 25 bp, Homo sapien
ccttcatagtagaattatctgtctg

SEQ ID NO: 2030745 - DNA, 25 bp, Homo sapien
gcatgttgccaaatactaaggagat

SEQ ID NO: 2030746 - DNA, 25 bp, Homo sapien
ccaccaatatagtcacaggtacctt

SEQ ID NO: 2030747 - DNA, 25 bp, Homo sapien
tcttcctgcactcttggacaaagcc

SEQ ID NO: 2030748 - DNA, 25 bp, Homo sapien
ttcccttcttgctagagtctctgtc

SEQ ID NO: 2030749 - DNA, 25 bp, Homo sapien
tcaagccaaagtcctgggaaagagc

SEQ ID NO: 2030750 - DNA, 25 bp, Homo sapien
tccaattgaccaatcttagatcttc

SEQ ID NO: 2030751 - DNA, 25 bp, Homo sapien
aaggaaagcagggttctatgagtaa

SEQ ID NO: 2030752 - DNA, 25 bp, Homo sapien
ggaaaaccctaagtcttctctcata

SEQ ID NO: 2030753 - DNA, 25 bp, Homo sapien
ctggaaaaccctaagtcttctctca

SEQ ID NO: 2030754 - DNA, 25 bp, Homo sapien
gaaagcagggttctatgagtaagag

SEQ ID NO: 2030755 - DNA, 25 bp, Homo sapien
gataaggcagcaacaatagtgtggt

SEQ ID NO: 2030756 - DNA, 25 bp, Homo sapien
aaaacaatacccacagagcaagaag

SEQ ID NO: 2030757 - DNA, 25 bp, Homo sapien
taaagtcactgttcaatggaatgtc

SEQ ID NO: 2030758 - DNA, 25 bp, Homo sapien
tcagatcccacattccagataagaa

SEQ ID NO: 2030759 - DNA, 25 bp, Homo sapien
aaaatgagtggcctcccgctgagaa

SEQ ID NO: 2030760 - DNA, 25 bp, Homo sapien
gaatgagaaaaacacgctgcacctg

SEQ ID NO: 2030761 - DNA, 25 bp, Homo sapien
taaactcttgccgaaggcctaagct

SEQ ID NO: 2030762 - DNA, 25 bp, Homo sapien
tctaggaggccaatggattaaccac

SEQ ID NO: 2030763 - DNA, 25 bp, Homo sapien
cactcagataaagcactgtgaggcc

SEQ ID NO: 2030764 - DNA, 25 bp, Homo sapien
gaagccacccgacctaaagtcagag

SEQ ID NO: 2030765 - DNA, 25 bp, Homo sapien
cagtagctgtagcagcttgtgcatg

SEQ ID NO: 2030766 - DNA, 25 bp, Homo sapien
cttgtgcatgttcctcagaaggccc

SEQ ID NO: 2030767 - DNA, 25 bp, Homo sapien
tttgattctttcactatgatgctag

SEQ ID NO: 2030768 - DNA, 25 bp, Homo sapien
tgattctttcactatgatgctagct

SEQ ID NO: 2030769 - DNA, 25 bp, Homo sapien
attctttcactatgatgctagctgg

SEQ ID NO: 2030770 - DNA, 25 bp, Homo sapien
gaatttgattctttcactatgatgc

SEQ ID NO: 2030771 - DNA, 25 bp, Homo sapien
cacccaactaggacatgcaaaggca

SEQ ID NO: 2030772 - DNA, 25 bp, Homo sapien
catgtttaaatgcttaggctaggga

SEQ ID NO: 2030773 - DNA, 25 bp, Homo sapien
tacatgttttggtgaatttatgatc

SEQ ID NO: 2030774 - DNA, 25 bp, Homo sapien
caaaggcatacatgttttggtgaat

SEQ ID NO: 2030775 - DNA, 25 bp, Homo sapien
gctgcacagtccttaacgaggtctt

SEQ ID NO: 2030776 - DNA, 25 bp, Homo sapien
tgatccaagcaaagttaccaggtac

SEQ ID NO: 2030777 - DNA, 25 bp, Homo sapien
tgctagagatcagaggagtaatcct

SEQ ID NO: 2030778 - DNA, 25 bp, Homo sapien
aaatctgcattacgcactcacgtgg

SEQ ID NO: 2030779 - DNA, 25 bp, Homo sapien
gagcgcgaggttccgccagcccagg

SEQ ID NO: 2030780 - DNA, 25 bp, Homo sapien
caacgccgaccgagctacaggcggg

SEQ ID NO: 2030781 - DNA, 25 bp, Homo sapien
ggcgcctgcccgcaacgccgaccga

SEQ ID NO: 2030782 - DNA, 25 bp, Homo sapien
gggcgagtcggagcgcgaggttccg

SEQ ID NO: 2030783 - DNA, 25 bp, Homo sapien
gccccctgcccgccccgcgcgcatg

SEQ ID NO: 2030784 - DNA, 25 bp, Homo sapien
cctgcccgccccgcgcgcatgctcc

SEQ ID NO: 2030785 - DNA, 25 bp, Homo sapien
cccctgcccgccccgcgcgcatgct

SEQ ID NO: 2030786 - DNA, 25 bp, Homo sapien
ggcgcgggagccgccccctgcccgc

SEQ ID NO: 2030787 - DNA, 25 bp, Homo sapien
ccctggcagcgaagtcccagtagct

SEQ ID NO: 2030788 - DNA, 25 bp, Homo sapien
tctctgtattcgttccctgggaagg

SEQ ID NO: 2030789 - DNA, 25 bp, Homo sapien
tggctgcggcggaattttcagatgc

SEQ ID NO: 2030790 - DNA, 25 bp, Homo sapien
ctgcggcggaattttcagatgcgtc

SEQ ID NO: 2030791 - DNA, 25 bp, Homo sapien
agttttagatattgagcctggctcc

SEQ ID NO: 2030792 - DNA, 25 bp, Homo sapien
tcacctcggatatttcaaaacctag

SEQ ID NO: 2030793 - DNA, 25 bp, Homo sapien
tcatcatcgtgaaatactctttggc

SEQ ID NO: 2030794 - DNA, 25 bp, Homo sapien
tagagagcaacacccaaagtccagt

SEQ ID NO: 2030795 - DNA, 25 bp, Homo sapien
agtccctgttcacatgcatagagtg

SEQ ID NO: 2030796 - DNA, 25 bp, Homo sapien
tccctgttcacatgcatagagtggc

SEQ ID NO: 2030797 - DNA, 25 bp, Homo sapien
tcagtccctgttcacatgcatagag

SEQ ID NO: 2030798 - DNA, 25 bp, Homo sapien
ccctgttcacatgcatagagtggct

SEQ ID NO: 2030799 - DNA, 25 bp, Homo sapien
tattacagccctccaatctggagga

SEQ ID NO: 2030800 - DNA, 25 bp, Homo sapien
caatctggaggatattcttctgctt

SEQ ID NO: 2030801 - DNA, 25 bp, Homo sapien
ctccatactcacatcggttttttat

SEQ ID NO: 2030802 - DNA, 25 bp, Homo sapien
cttgggttccaactcaatgcataca

SEQ ID NO: 2030803 - DNA, 25 bp, Homo sapien
cacccagtgctgtggctcgtgtcct

SEQ ID NO: 2030804 - DNA, 25 bp, Homo sapien
cagaagcagcgtctctgtgaggagc

SEQ ID NO: 2030805 - DNA, 25 bp, Homo sapien
caaggttatatgaaggctgcagtga

SEQ ID NO: 2030806 - DNA, 25 bp, Homo sapien
ctccagccggaaggaaggtcaaact

SEQ ID NO: 2030807 - DNA, 25 bp, Homo sapien
gggagatcatggatccctctgttct

SEQ ID NO: 2030808 - DNA, 25 bp, Homo sapien
tcctctagtgggtccatgaaacggg

SEQ ID NO: 2030809 - DNA, 25 bp, Homo sapien
tgttctgcctggtctatttctccct

SEQ ID NO: 2030810 - DNA, 25 bp, Homo sapien
tccctctgttcttgggatcccacat

SEQ ID NO: 2030811 - DNA, 25 bp, Homo sapien
ctatttaattaggttcttaagacat

SEQ ID NO: 2030812 - DNA, 25 bp, Homo sapien
gctatttaattaggttcttaagaca

SEQ ID NO: 2030813 - DNA, 25 bp, Homo sapien
cattcgtcagagcaaacacagatcg

SEQ ID NO: 2030814 - DNA, 25 bp, Homo sapien
taaattccattcgtcagagcaaaca

SEQ ID NO: 2030815 - DNA, 25 bp, Homo sapien
gtcagagcaaacacagatcgcaggt

SEQ ID NO: 2030816 - DNA, 25 bp, Homo sapien
gataaattccattcgtcagagcaaa

SEQ ID NO: 2030817 - DNA, 25 bp, Homo sapien
tgatttttggtaaaatttgtgagtc

SEQ ID NO: 2030818 - DNA, 25 bp, Homo sapien
ctgaggaatagctttgatttttggt

SEQ ID NO: 2030819 - DNA, 25 bp, Homo sapien
tgaggaatagctttgatttttggta

SEQ ID NO: 2030820 - DNA, 25 bp, Homo sapien
gaggaatagctttgatttttggtaa

SEQ ID NO: 2030821 - DNA, 25 bp, Homo sapien
aatcttgcgctgctccgtaatctca

SEQ ID NO: 2030822 - DNA, 25 bp, Homo sapien
cgctgctccgtaatctcatatttct

SEQ ID NO: 2030823 - DNA, 25 bp, Homo sapien
ttgcgctgctccgtaatctcatatt

SEQ ID NO: 2030824 - DNA, 25 bp, Homo sapien
tcttgcgctgctccgtaatctcata

SEQ ID NO: 2030825 - DNA, 25 bp, Homo sapien
tatcgattttggttgaggtggcaat

SEQ ID NO: 2030826 - DNA, 25 bp, Homo sapien
ctgatatcgattttggttgaggtgg

SEQ ID NO: 2030827 - DNA, 25 bp, Homo sapien
gatatcgattttggttgaggtggca

SEQ ID NO: 2030828 - DNA, 25 bp, Homo sapien
tcgattttggttgaggtggcaatga

SEQ ID NO: 2030829 - DNA, 25 bp, Homo sapien
tcacaagtaataagccactagccag

SEQ ID NO: 2030830 - DNA, 25 bp, Homo sapien
gtaataagccactagccagctgctt

SEQ ID NO: 2030831 - DNA, 25 bp, Homo sapien
caagtaataagccactagccagctg

SEQ ID NO: 2030832 - DNA, 25 bp, Homo sapien
aagtaataagccactagccagctgc

SEQ ID NO: 2030833 - DNA, 25 bp, Homo sapien
ctgtggcgtccagtgaggatgatca

SEQ ID NO: 2030834 - DNA, 25 bp, Homo sapien
gatgatcagaatggtcccgggggta

SEQ ID NO: 2030835 - DNA, 25 bp, Homo sapien
aatgctggctcgcagttttctcacg

SEQ ID NO: 2030836 - DNA, 25 bp, Homo sapien
tcagaatggtcccgggggtaatgct

SEQ ID NO: 2030837 - DNA, 25 bp, Homo sapien
tggctcaacagctttcgaggcacat

SEQ ID NO: 2030838 - DNA, 25 bp, Homo sapien
gccgtggctcaacagctttcgaggc

SEQ ID NO: 2030839 - DNA, 25 bp, Homo sapien
ccgtggctcaacagctttcgaggca

SEQ ID NO: 2030840 - DNA, 25 bp, Homo sapien
ctgaagggttttttgccgtggctca

SEQ ID NO: 2030841 - DNA, 25 bp, Homo sapien
ttctacatggcctttctggaataca

SEQ ID NO: 2030842 - DNA, 25 bp, Homo sapien
actggttttgtaacagctgcaagaa

SEQ ID NO: 2030843 - DNA, 25 bp, Homo sapien
ggaatacatggcagatcgggaatac

SEQ ID NO: 2030844 - DNA, 25 bp, Homo sapien
ggtaccgccgttcttgtcaccacca

SEQ ID NO: 2030845 - DNA, 25 bp, Homo sapien
gggttgcggctgcaatggggcttcc

SEQ ID NO: 2030846 - DNA, 25 bp, Homo sapien
gttgcggctgcaatggggcttcccc

SEQ ID NO: 2030847 - DNA, 25 bp, Homo sapien
cagggttgcggctgcaatggggctt

SEQ ID NO: 2030848 - DNA, 25 bp, Homo sapien
ccttcttgggctttttagctttgag

SEQ ID NO: 2030849 - DNA, 25 bp, Homo sapien
cttgccaccagcatcaaccttcttg

SEQ ID NO: 2030850 - DNA, 25 bp, Homo sapien
gcttctcaactttttcacctgccat

SEQ ID NO: 2030851 - DNA, 25 bp, Homo sapien
caccagcatcaaccttcttggcttc

SEQ ID NO: 2030852 - DNA, 25 bp, Homo sapien
ccagcatcaaccttcttggcttcgg

SEQ ID NO: 2030853 - DNA, 25 bp, Homo sapien
ctgctggctcacgagggaagggcct

SEQ ID NO: 2030854 - DNA, 25 bp, Homo sapien
aaggaccgccttacagacctcctgg

SEQ ID NO: 2030855 - DNA, 25 bp, Homo sapien
accctcgctccctgggaagtgcgtg

SEQ ID NO: 2030856 - DNA, 25 bp, Homo sapien
caatgatggctggttggccaaaata

SEQ ID NO: 2030857 - DNA, 25 bp, Homo sapien
cacattccccacgtacctgccctgg

SEQ ID NO: 2030858 - DNA, 25 bp, Homo sapien
cctgggagagcgtggcagggctgca

SEQ ID NO: 2030859 - DNA, 25 bp, Homo sapien
agctcacattccccacgtacctgcc

SEQ ID NO: 2030860 - DNA, 25 bp, Homo sapien
gacagcctgggattggcaaatgcac

SEQ ID NO: 2030861 - DNA, 25 bp, Homo sapien
ttaggcggtcttagcagcgccttgg

SEQ ID NO: 2030862 - DNA, 25 bp, Homo sapien
acatagagcatccaagcctgcctct

SEQ ID NO: 2030863 - DNA, 25 bp, Homo sapien
ctgctgttagccctctggagtttcc

SEQ ID NO: 2030864 - DNA, 25 bp, Homo sapien
gcgccttggaactcttcaacctctg

SEQ ID NO: 2030865 - DNA, 25 bp, Homo sapien
cgtagttctgtgctgagaagacagg

SEQ ID NO: 2030866 - DNA, 25 bp, Homo sapien
gaacatgaccctccatttcaatgga

SEQ ID NO: 2030867 - DNA, 25 bp, Homo sapien
atggagaccatcgtagttctgtgct

SEQ ID NO: 2030868 - DNA, 25 bp, Homo sapien
agacaggccacctgaccgaacatga

SEQ ID NO: 2030869 - DNA, 25 bp, Homo sapien
tggcttcctacaggcactgaccagc

SEQ ID NO: 2030870 - DNA, 25 bp, Homo sapien
ggttcactatggatgcctaaggaaa

SEQ ID NO: 2030871 - DNA, 25 bp, Homo sapien
tggcttcctgccgtagggttcacta

SEQ ID NO: 2030872 - DNA, 25 bp, Homo sapien
gtggccactgttgaagtgactggct

SEQ ID NO: 2030873 - DNA, 25 bp, Homo sapien
gggtcgagccccagaggcatcttgt

SEQ ID NO: 2030874 - DNA, 25 bp, Homo sapien
tcctcagaaagtgcaagggtcgagc

SEQ ID NO: 2030875 - DNA, 25 bp, Homo sapien
tcaggctgtgctttcagggatgctc

SEQ ID NO: 2030876 - DNA, 25 bp, Homo sapien
ccttcagggttggaatcaggctgtg

SEQ ID NO: 2030877 - DNA, 25 bp, Homo sapien
tgaagacctaactctctgatcctac

SEQ ID NO: 2030878 - DNA, 25 bp, Homo sapien
tctgctgaccgaacatgaagaccta

SEQ ID NO: 2030879 - DNA, 25 bp, Homo sapien
cgaacatgaagacctaactctctga

SEQ ID NO: 2030880 - DNA, 25 bp, Homo sapien
catttctgctgaccgaacatgaaga

SEQ ID NO: 2030881 - DNA, 25 bp, Homo sapien
gttctgaatgctgctcccagctggc

SEQ ID NO: 2030882 - DNA, 25 bp, Homo sapien
gctgctttacaagcacagggtgtac

SEQ ID NO: 2030883 - DNA, 25 bp, Homo sapien
gctaactggcaaagttgcgtgaatt

SEQ ID NO: 2030884 - DNA, 25 bp, Homo sapien
cagggtgtacatgagtaacagagac

SEQ ID NO: 2030885 - DNA, 25 bp, Homo sapien
ggctggattgaggttggcttttaac

SEQ ID NO: 2030886 - DNA, 25 bp, Homo sapien
tggattgaggttggcttttaaccac

SEQ ID NO: 2030887 - DNA, 25 bp, Homo sapien
tgaggttggcttttaaccacatttc

SEQ ID NO: 2030888 - DNA, 25 bp, Homo sapien
cacatttctaggagtaaaccctcca

SEQ ID NO: 2030889 - DNA, 25 bp, Homo sapien
cgaggtaacaaggatagcaatgccc

SEQ ID NO: 2030890 - DNA, 25 bp, Homo sapien
cacttgtgcctgtgagaaggagagc

SEQ ID NO: 2030891 - DNA, 25 bp, Homo sapien
taaatggtcaccaagagtgtcagca

SEQ ID NO: 2030892 - DNA, 25 bp, Homo sapien
tcctgtagacaatgagaaatgccgg

SEQ ID NO: 2030893 - DNA, 25 bp, Homo sapien
tggtaagacacccaaatcctaatct

SEQ ID NO: 2030894 - DNA, 25 bp, Homo sapien
ggcttaaatgtagagtgaccagcag

SEQ ID NO: 2030895 - DNA, 25 bp, Homo sapien
tgagaaggcttaaatgtagagtgac

SEQ ID NO: 2030896 - DNA, 25 bp, Homo sapien
gtagcatgtacacagtattgaacct

SEQ ID NO: 2030897 - DNA, 25 bp, Homo sapien
tgctggtcaagggagtgtcttccaa

SEQ ID NO: 2030898 - DNA, 25 bp, Homo sapien
tttcctaaactcagggatccttggc

SEQ ID NO: 2030899 - DNA, 25 bp, Homo sapien
tgtgaatgcagacccactgtaaaca

SEQ ID NO: 2030900 - DNA, 25 bp, Homo sapien
tatctcgctagaatattgttgcagg

SEQ ID NO: 2030901 - DNA, 25 bp, Homo sapien
tagcgtgaagtccaaactgccaatt

SEQ ID NO: 2030902 - DNA, 25 bp, Homo sapien
cgtgaagtccaaactgccaattctt

SEQ ID NO: 2030903 - DNA, 25 bp, Homo sapien
ccctagcgtgaagtccaaactgcca

SEQ ID NO: 2030904 - DNA, 25 bp, Homo sapien
cctagcgtgaagtccaaactgccaa

SEQ ID NO: 2030905 - DNA, 25 bp, Homo sapien
gaaagattgacaggtgcctaaccaa

SEQ ID NO: 2030906 - DNA, 25 bp, Homo sapien
aaaccctggctatctcacgtgggct

SEQ ID NO: 2030907 - DNA, 25 bp, Homo sapien
gggatgtatccagctgaaagactgt

SEQ ID NO: 2030908 - DNA, 25 bp, Homo sapien
gacatgttggccctgtcatgagaaa

SEQ ID NO: 2030909 - DNA, 25 bp, Homo sapien
gactgcgttcatgaacactctggcc

SEQ ID NO: 2030910 - DNA, 25 bp, Homo sapien
gagcattcgtgagtagattctgatc

SEQ ID NO: 2030911 - DNA, 25 bp, Homo sapien
tctccttcagacctgagactgcgtt

SEQ ID NO: 2030912 - DNA, 25 bp, Homo sapien
gattctgatctactgggtgattttg

SEQ ID NO: 2030913 - DNA, 25 bp, Homo sapien
tgatgtaggctcacctccaaatgca

SEQ ID NO: 2030914 - DNA, 25 bp, Homo sapien
attctccaccatcagtatcctgtga

SEQ ID NO: 2030915 - DNA, 25 bp, Homo sapien
tgttttcatggccacgggctgatgt

SEQ ID NO: 2030916 - DNA, 25 bp, Homo sapien
gtatcctgtgaaaccaaccaactcc

SEQ ID NO: 2030917 - DNA, 25 bp, Homo sapien
cagcagcttgtgttgttcccacagt

SEQ ID NO: 2030918 - DNA, 25 bp, Homo sapien
tgactcttctcacatctgttccgac

SEQ ID NO: 2030919 - DNA, 25 bp, Homo sapien
tccactagggctagcatggcccctg

SEQ ID NO: 2030920 - DNA, 25 bp, Homo sapien
tcccaggattccactagggctagca

SEQ ID NO: 2030921 - DNA, 25 bp, Homo sapien
aatttgtgggacacgagagccaggc

SEQ ID NO: 2030922 - DNA, 25 bp, Homo sapien
gccaggctgaggcatgatctctgat

SEQ ID NO: 2030923 - DNA, 25 bp, Homo sapien
aaagcactggaaccatccctgtcat

SEQ ID NO: 2030924 - DNA, 25 bp, Homo sapien
cttccaggaatttgtgggacacgag

SEQ ID NO: 2030925 - DNA, 25 bp, Homo sapien
aagtgtaggaacgttaagccttcat

SEQ ID NO: 2030926 - DNA, 25 bp, Homo sapien
gctgcagtgagacccgcagcgggtc

SEQ ID NO: 2030927 - DNA, 25 bp, Homo sapien
ccgccctgcttggacccctggagga

SEQ ID NO: 2030928 - DNA, 25 bp, Homo sapien
cccgcagcgggtccgccctgcttgg

SEQ ID NO: 2030929 - DNA, 25 bp, Homo sapien
gctggttcccatgagacagagtaac

SEQ ID NO: 2030930 - DNA, 25 bp, Homo sapien
ggtggcttcaaacagcgagttggct

SEQ ID NO: 2030931 - DNA, 25 bp, Homo sapien
tcaaacagcgagttggctggttccc

SEQ ID NO: 2030932 - DNA, 25 bp, Homo sapien
tggttcccatgagacagagtaacaa

SEQ ID NO: 2030933 - DNA, 25 bp, Homo sapien
attcatagagataccagcagtgagg

SEQ ID NO: 2030934 - DNA, 25 bp, Homo sapien
tcatagagataccagcagtgaggat

SEQ ID NO: 2030935 - DNA, 25 bp, Homo sapien
tgaggataacaggaggataactgac

SEQ ID NO: 2030936 - DNA, 25 bp, Homo sapien
ttcatagagataccagcagtgagga

SEQ ID NO: 2030937 - DNA, 25 bp, Homo sapien
gtccgtgtacttcataagcagcaag

SEQ ID NO: 2030938 - DNA, 25 bp, Homo sapien
gaactactgtccgtgtacttcataa

SEQ ID NO: 2030939 - DNA, 25 bp, Homo sapien
cttccctttagaactactgtccgtg

SEQ ID NO: 2030940 - DNA, 25 bp, Homo sapien
tcataagcagcaagtcacagccaaa

SEQ ID NO: 2030941 - DNA, 25 bp, Homo sapien
ctgagaaccataggaggcacaaacc

SEQ ID NO: 2030942 - DNA, 25 bp, Homo sapien
atgtatttggggggcaaatcatcag

SEQ ID NO: 2030943 - DNA, 25 bp, Homo sapien
atttggggggcaaatcatcagtatc

SEQ ID NO: 2030944 - DNA, 25 bp, Homo sapien
ttggggggcaaatcatcagtatcca

SEQ ID NO: 2030945 - DNA, 25 bp, Homo sapien
caaattcttcttctacatagccatc

SEQ ID NO: 2030946 - DNA, 25 bp, Homo sapien
aattcttcttctacatagccatcag

SEQ ID NO: 2030947 - DNA, 25 bp, Homo sapien
tcttcttctacatagccatcagcat

SEQ ID NO: 2030948 - DNA, 25 bp, Homo sapien
ttcttctacatagccatcagcatct

SEQ ID NO: 2030949 - DNA, 25 bp, Homo sapien
cacagactgtgtggctttcagtgta

SEQ ID NO: 2030950 - DNA, 25 bp, Homo sapien
cacgttgacacagactgtgtggctt

SEQ ID NO: 2030951 - DNA, 25 bp, Homo sapien
gttgacacagactgtgtggctttca

SEQ ID NO: 2030952 - DNA, 25 bp, Homo sapien
acacagactgtgtggctttcagtgt

SEQ ID NO: 2030953 - DNA, 25 bp, Homo sapien
caagtcgttcttgtagttgcacaga

SEQ ID NO: 2030954 - DNA, 25 bp, Homo sapien
tcaagcggtgatggacctggatccg

SEQ ID NO: 2030955 - DNA, 25 bp, Homo sapien
cagtgggcccgaatattccttcaag

SEQ ID NO: 2030956 - DNA, 25 bp, Homo sapien
gtctgagagaaccacgaaactgcca

SEQ ID NO: 2030957 - DNA, 25 bp, Homo sapien
cagacatccactgcgttttctcccc

SEQ ID NO: 2030958 - DNA, 25 bp, Homo sapien
accagacatccactgcgttttctcc

SEQ ID NO: 2030959 - DNA, 25 bp, Homo sapien
ccaccagacatccactgcgttttct

SEQ ID NO: 2030960 - DNA, 25 bp, Homo sapien
acatccactgcgttttctcccccat

SEQ ID NO: 2030961 - DNA, 25 bp, Homo sapien
ttctatcatagttgttctcccctgt

SEQ ID NO: 2030962 - DNA, 25 bp, Homo sapien
cagtctcctccgatttaaagcaggc

SEQ ID NO: 2030963 - DNA, 25 bp, Homo sapien
caggaactcattcagtttgcattta

SEQ ID NO: 2030964 - DNA, 25 bp, Homo sapien
tcttgtcttctgctcgatctcctga

SEQ ID NO: 2030965 - DNA, 25 bp, Homo sapien
gaggcttcaccaaatcctgctctag

SEQ ID NO: 2030966 - DNA, 25 bp, Homo sapien
gaaatctccaaggtatcaacttagg

SEQ ID NO: 2030967 - DNA, 25 bp, Homo sapien
ttttttcagtgcttccaggtgagcc

SEQ ID NO: 2030968 - DNA, 25 bp, Homo sapien
tggcttctattcctgctacctgaaa

SEQ ID NO: 2030969 - DNA, 25 bp, Homo sapien
ctcctcagcctgaggtatggtttct

SEQ ID NO: 2030970 - DNA, 25 bp, Homo sapien
agagcacacatatcaaacccggcct

SEQ ID NO: 2030971 - DNA, 25 bp, Homo sapien
tgctttaaatgagagagtgtcacat

SEQ ID NO: 2030972 - DNA, 25 bp, Homo sapien
taacttgactaagtaaacagcaatg

SEQ ID NO: 2030973 - DNA, 25 bp, Homo sapien
gccggtccatgctggtcccggtctt

SEQ ID NO: 2030974 - DNA, 25 bp, Homo sapien
cgcggctgacgatggaggtggagga

SEQ ID NO: 2030975 - DNA, 25 bp, Homo sapien
ggccggcgccgagacatgcgcggct

SEQ ID NO: 2030976 - DNA, 25 bp, Homo sapien
cccggcgcgccggtccatgctggtc

SEQ ID NO: 2030977 - DNA, 25 bp, Homo sapien
aggtgggaaacgctcgaaggctcca

SEQ ID NO: 2030978 - DNA, 25 bp, Homo sapien
gcacgaccgccgtcactggatgttg

SEQ ID NO: 2030979 - DNA, 25 bp, Homo sapien
ttttggtggactagatgagtgagcc

SEQ ID NO: 2030980 - DNA, 25 bp, Homo sapien
ggttcgccgtgcagctgcgccttgt

SEQ ID NO: 2030981 - DNA, 25 bp, Homo sapien
gattcacgttgttccaagtttgcat

SEQ ID NO: 2030982 - DNA, 25 bp, Homo sapien
ttagattcacgttgttccaagtttg

SEQ ID NO: 2030983 - DNA, 25 bp, Homo sapien
aggttgccaattagattcacgttgt

SEQ ID NO: 2030984 - DNA, 25 bp, Homo sapien
ccaattagattcacgttgttccaag

SEQ ID NO: 2030985 - DNA, 25 bp, Homo sapien
ccttggtaccattgttcctctgctg

SEQ ID NO: 2030986 - DNA, 25 bp, Homo sapien
tgccctgcactctgtctatgggagc

SEQ ID NO: 2030987 - DNA, 25 bp, Homo sapien
gggagccttggtaccattgttcctc

SEQ ID NO: 2030988 - DNA, 25 bp, Homo sapien
cactctgtctatgggagccttggta

SEQ ID NO: 2030989 - DNA, 25 bp, Homo sapien
tgttccggagatgttatctgaacat

SEQ ID NO: 2030990 - DNA, 25 bp, Homo sapien
cagtgttccggagatgttatctgaa

SEQ ID NO: 2030991 - DNA, 25 bp, Homo sapien
agtgttccggagatgttatctgaac

SEQ ID NO: 2030992 - DNA, 25 bp, Homo sapien
gtgttccggagatgttatctgaaca

SEQ ID NO: 2030993 - DNA, 25 bp, Homo sapien
gcttcccattaccacagcgttcact

SEQ ID NO: 2030994 - DNA, 25 bp, Homo sapien
ccacaatgtgggctactgggttcgg

SEQ ID NO: 2030995 - DNA, 25 bp, Homo sapien
aggcccacaatgtgggctactgggt

SEQ ID NO: 2030996 - DNA, 25 bp, Homo sapien
acctgcttcccattaccacagcgtt

SEQ ID NO: 2030997 - DNA, 25 bp, Homo sapien
caggtgctgtggaatgcaccgtttg

SEQ ID NO: 2030998 - DNA, 25 bp, Homo sapien
catctgcattcaagctcatggccac

SEQ ID NO: 2030999 - DNA, 25 bp, Homo sapien
ccacaggtgctgtggaatgcaccgt

SEQ ID NO: 2031000 - DNA, 25 bp, Homo sapien
cacaggtgctgtggaatgcaccgtt

SEQ ID NO: 2031001 - DNA, 25 bp, Homo sapien
gtctcagcaaaaccacgaagtgcta

SEQ ID NO: 2031002 - DNA, 25 bp, Homo sapien
ggagaataacaaagattccagtctc

SEQ ID NO: 2031003 - DNA, 25 bp, Homo sapien
tcttcagtgcaaacctcatggagaa

SEQ ID NO: 2031004 - DNA, 25 bp, Homo sapien
acttggtctctcacaatctttttgt

SEQ ID NO: 2031005 - DNA, 25 bp, Homo sapien
ttcacaagcaaagcaagagcgttcc

SEQ ID NO: 2031006 - DNA, 25 bp, Homo sapien
tgtagtaagatagttcttgtcctct

SEQ ID NO: 2031007 - DNA, 25 bp, Homo sapien
agaggttcgtatttcacaagcaaag

SEQ ID NO: 2031008 - DNA, 25 bp, Homo sapien
tcttgagttcaattaaatccccctg

SEQ ID NO: 2031009 - DNA, 25 bp, Homo sapien
gagttgagccttcgtcctgttccag

SEQ ID NO: 2031010 - DNA, 25 bp, Homo sapien
tgctgtctgagctttgaccccaggg

SEQ ID NO: 2031011 - DNA, 25 bp, Homo sapien
tcccacctgggtctctgatatgagt

SEQ ID NO: 2031012 - DNA, 25 bp, Homo sapien
ccagtttctggaaggaactgttcac

SEQ ID NO: 2031013 - DNA, 25 bp, Homo sapien
gatagctccatcactctgggttcct

SEQ ID NO: 2031014 - DNA, 25 bp, Homo sapien
tcagtggtaaagatagctccatcac

SEQ ID NO: 2031015 - DNA, 25 bp, Homo sapien
ttccacctccaatgcatctttctac

SEQ ID NO: 2031016 - DNA, 25 bp, Homo sapien
tataactcagtggtaaagatagctc

SEQ ID NO: 2031017 - DNA, 25 bp, Homo sapien
tagtttgtaagcacctgggacttgg

SEQ ID NO: 2031018 - DNA, 25 bp, Homo sapien
gataaacgactaagccaaccagcag

SEQ ID NO: 2031019 - DNA, 25 bp, Homo sapien
gggtcccttagatcagcacagttgc

SEQ ID NO: 2031020 - DNA, 25 bp, Homo sapien
gaattgatgcgttgactgtggtcct

SEQ ID NO: 2031021 - DNA, 25 bp, Homo sapien
ctcttctcccagcattcgggctcca

SEQ ID NO: 2031022 - DNA, 25 bp, Homo sapien
tcttctcccagcattcgggctccat

SEQ ID NO: 2031023 - DNA, 25 bp, Homo sapien
tctcttctcccagcattcgggctcc

SEQ ID NO: 2031024 - DNA, 25 bp, Homo sapien
tgccactgtaaccttccaaccacac

SEQ ID NO: 2031025 - DNA, 25 bp, Homo sapien
cactgtaaccttccaaccacacgcc

SEQ ID NO: 2031026 - DNA, 25 bp, Homo sapien
ccactgtaaccttccaaccacacgc

SEQ ID NO: 2031027 - DNA, 25 bp, Homo sapien
gccactgtaaccttccaaccacacg

SEQ ID NO: 2031028 - DNA, 25 bp, Homo sapien
ggtgcgctgaccacttcattctttg

SEQ ID NO: 2031029 - DNA, 25 bp, Homo sapien
gggtgcgctgaccacttcattcttt

SEQ ID NO: 2031030 - DNA, 25 bp, Homo sapien
ttggggtgcgctgaccacttcattc

SEQ ID NO: 2031031 - DNA, 25 bp, Homo sapien
tggggtgcgctgaccacttcattct

SEQ ID NO: 2031032 - DNA, 25 bp, Homo sapien
gctggaccaagctctgtaaagccca

SEQ ID NO: 2031033 - DNA, 25 bp, Homo sapien
tcactgtggactttgtacggaatag

SEQ ID NO: 2031034 - DNA, 25 bp, Homo sapien
caccaagcaggtagagagattgccg

SEQ ID NO: 2031035 - DNA, 25 bp, Homo sapien
gattgccggataatacccttgacct

SEQ ID NO: 2031036 - DNA, 25 bp, Homo sapien
tgaaagctttgttcgctttcttctt

SEQ ID NO: 2031037 - DNA, 25 bp, Homo sapien
tcatgaaagctttgttcgctttctt

SEQ ID NO: 2031038 - DNA, 25 bp, Homo sapien
atgaaagctttgttcgctttcttct

SEQ ID NO: 2031039 - DNA, 25 bp, Homo sapien
ccctgagtttctgcagttctgggcc

SEQ ID NO: 2031040 - DNA, 25 bp, Homo sapien
gcttaactgaagcaggagatctgtc

SEQ ID NO: 2031041 - DNA, 25 bp, Homo sapien
tctctctctgattgaattgactgcc

SEQ ID NO: 2031042 - DNA, 25 bp, Homo sapien
gatctgtctgctgaagacatgaaga

SEQ ID NO: 2031043 - DNA, 25 bp, Homo sapien
gccttttttgatgcctttggaattc

SEQ ID NO: 2031044 - DNA, 25 bp, Homo sapien
gtaataccacgtctagtcagcacag

SEQ ID NO: 2031045 - DNA, 25 bp, Homo sapien
caaagaggctggtgttaccactgcc

SEQ ID NO: 2031046 - DNA, 25 bp, Homo sapien
gcagtagcaaaatccagagtccatg

SEQ ID NO: 2031047 - DNA, 25 bp, Homo sapien
caagcaacacctttgtacacacggg

SEQ ID NO: 2031048 - DNA, 25 bp, Homo sapien
aacattttcctaggcttgcattgac

SEQ ID NO: 2031049 - DNA, 25 bp, Homo sapien
tgtttataaaggatgagaagcactc

SEQ ID NO: 2031050 - DNA, 25 bp, Homo sapien
ttaacatgcctgtatcagatagaca

SEQ ID NO: 2031051 - DNA, 25 bp, Homo sapien
tgtagttaagtggataccatagctg

SEQ ID NO: 2031052 - DNA, 25 bp, Homo sapien
tccttcaacaggtgagtgactacag

SEQ ID NO: 2031053 - DNA, 25 bp, Homo sapien
cctttgtgaattgaccaacttacag

SEQ ID NO: 2031054 - DNA, 25 bp, Homo sapien
gaaatgtagaatagggaagtgctgc

SEQ ID NO: 2031055 - DNA, 25 bp, Homo sapien
gcagcaacttgggtagatctctagg

SEQ ID NO: 2031056 - DNA, 25 bp, Homo sapien
gcagtaatttatgaccacgtatgga

SEQ ID NO: 2031057 - DNA, 25 bp, Homo sapien
taaatggcagggacttcgctgagtc

SEQ ID NO: 2031058 - DNA, 25 bp, Homo sapien
tggaaggccatgtcaatactagtat

SEQ ID NO: 2031059 - DNA, 25 bp, Homo sapien
catcccaagatgtaaaacggcagta

SEQ ID NO: 2031060 - DNA, 25 bp, Homo sapien
tgtcagacatttaccaactattttc

SEQ ID NO: 2031061 - DNA, 25 bp, Homo sapien
tagaaaacgccaatgttttatgtct

SEQ ID NO: 2031062 - DNA, 25 bp, Homo sapien
tgcccatctcaaaagctaatattga

SEQ ID NO: 2031063 - DNA, 25 bp, Homo sapien
taatttgacaaatcatgacactaga

SEQ ID NO: 2031064 - DNA, 25 bp, Homo sapien
tattcgtcgctagacggcagcagag

SEQ ID NO: 2031065 - DNA, 25 bp, Homo sapien
tccaaactggttggttaaagcagcc

SEQ ID NO: 2031066 - DNA, 25 bp, Homo sapien
tcttcgtcagcgctcagtcaaggtg

SEQ ID NO: 2031067 - DNA, 25 bp, Homo sapien
taaagctttgtcttgcatccgcggg

SEQ ID NO: 2031068 - DNA, 25 bp, Homo sapien
acagccttgataaatgtgtagggaa

SEQ ID NO: 2031069 - DNA, 25 bp, Homo sapien
tgataaatgtgtagggaagctttct

SEQ ID NO: 2031070 - DNA, 25 bp, Homo sapien
tgggagtcaggattataacagcctt

SEQ ID NO: 2031071 - DNA, 25 bp, Homo sapien
ttgggagtcaggattataacagcct

SEQ ID NO: 2031072 - DNA, 25 bp, Homo sapien
accctcacaatttagttctgggctc

SEQ ID NO: 2031073 - DNA, 25 bp, Homo sapien
atccccatgcccactgtgacagagc

SEQ ID NO: 2031074 - DNA, 25 bp, Homo sapien
aatccccatgcccactgtgacagag

SEQ ID NO: 2031075 - DNA, 25 bp, Homo sapien
aaccctcacaatttagttctgggct

SEQ ID NO: 2031076 - DNA, 25 bp, Homo sapien
gtaaaacatagatgagacagctcag

SEQ ID NO: 2031077 - DNA, 25 bp, Homo sapien
agtaaaacatagatgagacagctca

SEQ ID NO: 2031078 - DNA, 25 bp, Homo sapien
agacacacaactccctcccagataa

SEQ ID NO: 2031079 - DNA, 25 bp, Homo sapien
tcccagataagcacacctaaagaga

SEQ ID NO: 2031080 - DNA, 25 bp, Homo sapien
tctgatctaactcagccagaagcca

SEQ ID NO: 2031081 - DNA, 25 bp, Homo sapien
ttaattcttacacactggagcctag

SEQ ID NO: 2031082 - DNA, 25 bp, Homo sapien
gagcctagggaaaggatcattctct

SEQ ID NO: 2031083 - DNA, 25 bp, Homo sapien
ctggagcctagggaaaggatcattc

SEQ ID NO: 2031084 - DNA, 25 bp, Homo sapien
agaacgccagaaaaagaagccatgg

SEQ ID NO: 2031085 - DNA, 25 bp, Homo sapien
aaacattaagatttgtagccaggca

SEQ ID NO: 2031086 - DNA, 25 bp, Homo sapien
agcacttaggggggttgaggtagag

SEQ ID NO: 2031087 - DNA, 25 bp, Homo sapien
gaagccatggggaaaacattaagat

SEQ ID NO: 2031088 - DNA, 25 bp, Homo sapien
ggaagatccctcgagctcagtacag

SEQ ID NO: 2031089 - DNA, 25 bp, Homo sapien
atccctcgagctcagtacagctcag

SEQ ID NO: 2031090 - DNA, 25 bp, Homo sapien
cggagacgggaagatccctcgagct

SEQ ID NO: 2031091 - DNA, 25 bp, Homo sapien
cttaggaggcggagacgggaagatc

SEQ ID NO: 2031092 - DNA, 25 bp, Homo sapien
ttgtagactgtcaagagggacatca

SEQ ID NO: 2031093 - DNA, 25 bp, Homo sapien
agacttttgtagactgtcaagaggg

SEQ ID NO: 2031094 - DNA, 25 bp, Homo sapien
ttgtagacttttgtagactgtcaag

SEQ ID NO: 2031095 - DNA, 25 bp, Homo sapien
tagacttttgtagactgtcaagagg

SEQ ID NO: 2031096 - DNA, 25 bp, Homo sapien
tgacttcacagttggtaacagcgag

SEQ ID NO: 2031097 - DNA, 25 bp, Homo sapien
gaggcttgcagatcccttggaccca

SEQ ID NO: 2031098 - DNA, 25 bp, Homo sapien
tatctcagatttcagaccgcccaag

SEQ ID NO: 2031099 - DNA, 25 bp, Homo sapien
taagaaggaaccatggaagccaacc

SEQ ID NO: 2031100 - DNA, 25 bp, Homo sapien
agctcggtggaccatgcagacctat

SEQ ID NO: 2031101 - DNA, 25 bp, Homo sapien
gtatgcagctcggtggaccatgcag

SEQ ID NO: 2031102 - DNA, 25 bp, Homo sapien
cgctggccccgtgggtatgcagctc

SEQ ID NO: 2031103 - DNA, 25 bp, Homo sapien
ccgctggccccgtgggtatgcagct

SEQ ID NO: 2031104 - DNA, 25 bp, Homo sapien
agcttgcataggctaatactggtgg

SEQ ID NO: 2031105 - DNA, 25 bp, Homo sapien
ggctaatactggtggttgtgccaac

SEQ ID NO: 2031106 - DNA, 25 bp, Homo sapien
cataggctaatactggtggttgtgc

SEQ ID NO: 2031107 - DNA, 25 bp, Homo sapien
taatactggtggttgtgccaacaga

SEQ ID NO: 2031108 - DNA, 25 bp, Homo sapien
gcctgcctatcaagtctgctgtggt

SEQ ID NO: 2031109 - DNA, 25 bp, Homo sapien
tagacacgttcaaaacggtggctcc

SEQ ID NO: 2031110 - DNA, 25 bp, Homo sapien
ttccccgagcgctatgtaaacgtca

SEQ ID NO: 2031111 - DNA, 25 bp, Homo sapien
tgccacccgcgtgtatagtaaggag

SEQ ID NO: 2031112 - DNA, 25 bp, Homo sapien
tcagctggacggctcttgaatgcct

SEQ ID NO: 2031113 - DNA, 25 bp, Homo sapien
gcctccatagaggagacgtggtcgc

SEQ ID NO: 2031114 - DNA, 25 bp, Homo sapien
catagaggagacgtggtcgctgcct

SEQ ID NO: 2031115 - DNA, 25 bp, Homo sapien
tcagacagtgatgctgcttcagctg

SEQ ID NO: 2031116 - DNA, 25 bp, Homo sapien
ctgcgctcgctggttgacagcacag

SEQ ID NO: 2031117 - DNA, 25 bp, Homo sapien
ttccggctagcttgacggcctccgc

SEQ ID NO: 2031118 - DNA, 25 bp, Homo sapien
gcgctcgctggttgacagcacagcc

SEQ ID NO: 2031119 - DNA, 25 bp, Homo sapien
agcacagccccttccggctagcttg

SEQ ID NO: 2031120 - DNA, 25 bp, Homo sapien
ctgccacgtgggtccagccacactg

SEQ ID NO: 2031121 - DNA, 25 bp, Homo sapien
tgccacgtgggtccagccacactgt

SEQ ID NO: 2031122 - DNA, 25 bp, Homo sapien
acactgtcccggcagacgctctcac

SEQ ID NO: 2031123 - DNA, 25 bp, Homo sapien
gccacactgtcccggcagacgctct

SEQ ID NO: 2031124 - DNA, 25 bp, Homo sapien
ttagcctcgggctggacttactgct

SEQ ID NO: 2031125 - DNA, 25 bp, Homo sapien
agcgctgggcacagccttatatgac

SEQ ID NO: 2031126 - DNA, 25 bp, Homo sapien
acagccttatatgactgaccccgcc

SEQ ID NO: 2031127 - DNA, 25 bp, Homo sapien
gacttactgcttccaaaagcgctgg

SEQ ID NO: 2031128 - DNA, 25 bp, Homo sapien
actgctccaggccacgggctgcctc

SEQ ID NO: 2031129 - DNA, 25 bp, Homo sapien
ccaggccacgggctgcctctcccca

SEQ ID NO: 2031130 - DNA, 25 bp, Homo sapien
cactgctccaggccacgggctgcct

SEQ ID NO: 2031131 - DNA, 25 bp, Homo sapien
gctccaggccacgggctgcctctcc

SEQ ID NO: 2031132 - DNA, 25 bp, Homo sapien
gcacactagctccaaaatacccaag

SEQ ID NO: 2031133 - DNA, 25 bp, Homo sapien
gaattgcaatgacaggtgctgcgag

SEQ ID NO: 2031134 - DNA, 25 bp, Homo sapien
cattgtattagcagccaaaaagcac

SEQ ID NO: 2031135 - DNA, 25 bp, Homo sapien
cccagagcagttgataggaattgca

SEQ ID NO: 2031136 - DNA, 25 bp, Homo sapien
tcattatgttcccctccaagccttt

SEQ ID NO: 2031137 - DNA, 25 bp, Homo sapien
gctggtatggctcccattgtcggac

SEQ ID NO: 2031138 - DNA, 25 bp, Homo sapien
ctggtatggctcccattgtcggaca

SEQ ID NO: 2031139 - DNA, 25 bp, Homo sapien
cagctggtatggctcccattgtcgg

SEQ ID NO: 2031140 - DNA, 25 bp, Homo sapien
agctggtatggctcccattgtcgga

SEQ ID NO: 2031141 - DNA, 25 bp, Homo sapien
gaaaggaacatgagcgctgccattg

SEQ ID NO: 2031142 - DNA, 25 bp, Homo sapien
tgaaaggaacatgagcgctgccatt

SEQ ID NO: 2031143 - DNA, 25 bp, Homo sapien
aaaggaacatgagcgctgccattgt

SEQ ID NO: 2031144 - DNA, 25 bp, Homo sapien
aaggaacatgagcgctgccattgtc

SEQ ID NO: 2031145 - DNA, 25 bp, Homo sapien
taacctctggatcgctccactttta

SEQ ID NO: 2031146 - DNA, 25 bp, Homo sapien
ggatcgctccacttttagtataata

SEQ ID NO: 2031147 - DNA, 25 bp, Homo sapien
tgctaacctctggatcgctccactt

SEQ ID NO: 2031148 - DNA, 25 bp, Homo sapien
agggcccatgctaacctctggatcg

SEQ ID NO: 2031149 - DNA, 25 bp, Homo sapien
gcaccagaaggcgaagatgttgcct

SEQ ID NO: 2031150 - DNA, 25 bp, Homo sapien
aaggcgaagatgttgcctgcacacc

SEQ ID NO: 2031151 - DNA, 25 bp, Homo sapien
caagggcaccagaaggcgaagatgt

SEQ ID NO: 2031152 - DNA, 25 bp, Homo sapien
cagaaggcgaagatgttgcctgcac

SEQ ID NO: 2031153 - DNA, 25 bp, Homo sapien
tgatgggagatgtgtccagatccgt

SEQ ID NO: 2031154 - DNA, 25 bp, Homo sapien
aattgacccgatgcttcccgttgac

SEQ ID NO: 2031155 - DNA, 25 bp, Homo sapien
tccagatccgttttgcagtctgagg

SEQ ID NO: 2031156 - DNA, 25 bp, Homo sapien
caaatgggtatcacaaagtgatggg

SEQ ID NO: 2031157 - DNA, 25 bp, Homo sapien
aaactgtgctagagactgactgtcc

SEQ ID NO: 2031158 - DNA, 25 bp, Homo sapien
gtgctagagactgactgtcccatga

SEQ ID NO: 2031159 - DNA, 25 bp, Homo sapien
tgtgctagagactgactgtcccatg

SEQ ID NO: 2031160 - DNA, 25 bp, Homo sapien
cagaaactgtgctagagactgactg

SEQ ID NO: 2031161 - DNA, 25 bp, Homo sapien
gcaggacgcagggcagaacatcacg

SEQ ID NO: 2031162 - DNA, 25 bp, Homo sapien
ggtactggagaattatcttcagcca

SEQ ID NO: 2031163 - DNA, 25 bp, Homo sapien
taagtaacaacatagcttgcagctg

SEQ ID NO: 2031164 - DNA, 25 bp, Homo sapien
gaacatcacggaggcaggtactgga

SEQ ID NO: 2031165 - DNA, 25 bp, Homo sapien
gtcagagccttcatatcccactgta

SEQ ID NO: 2031166 - DNA, 25 bp, Homo sapien
caaagaggttctcggtgcacgtgca

SEQ ID NO: 2031167 - DNA, 25 bp, Homo sapien
aacacggtgggccaggatctagaat

SEQ ID NO: 2031168 - DNA, 25 bp, Homo sapien
tgtagctggtttccgcagaaacatg

SEQ ID NO: 2031169 - DNA, 25 bp, Homo sapien
tgagacgggcaggtgcctcttctga

SEQ ID NO: 2031170 - DNA, 25 bp, Homo sapien
ctgagacgggcaggtgcctcttctg

SEQ ID NO: 2031171 - DNA, 25 bp, Homo sapien
aagtaatcaacagaacattcaatgt

SEQ ID NO: 2031172 - DNA, 25 bp, Homo sapien
caagtaatcaacagaacattcaatg

SEQ ID NO: 2031173 - DNA, 25 bp, Homo sapien
tcaagtaatcaacagaacattcaat

SEQ ID NO: 2031174 - DNA, 25 bp, Homo sapien
tgtaacgtaaacacaacatctctcc

SEQ ID NO: 2031175 - DNA, 25 bp, Homo sapien
tattagcaatgattccaactgagga

SEQ ID NO: 2031176 - DNA, 25 bp, Homo sapien
cagaaacacttaacctgagttggaa

SEQ ID NO: 2031177 - DNA, 25 bp, Homo sapien
cacatgtggttttagtgtaacgtaa

SEQ ID NO: 2031178 - DNA, 25 bp, Homo sapien
gaatgaaggaaaactccgtgcagtt

SEQ ID NO: 2031179 - DNA, 25 bp, Homo sapien
gacaggaatgaaggaaaactccgtg

SEQ ID NO: 2031180 - DNA, 25 bp, Homo sapien
ggaatgaaggaaaactccgtgcagt

SEQ ID NO: 2031181 - DNA, 25 bp, Homo sapien
caggaatgaaggaaaactccgtgca

SEQ ID NO: 2031182 - DNA, 25 bp, Homo sapien
tgctgaagtcaaaggactgcacctg

SEQ ID NO: 2031183 - DNA, 25 bp, Homo sapien
tcaaacacccgcggaacgaggtctg

SEQ ID NO: 2031184 - DNA, 25 bp, Homo sapien
tgcacctgcgggctcttaatcagag

SEQ ID NO: 2031185 - DNA, 25 bp, Homo sapien
gctagcttcctcaaacacccgcgga

SEQ ID NO: 2031186 - DNA, 25 bp, Homo sapien
gggacagtgccccttttgagtggaa

SEQ ID NO: 2031187 - DNA, 25 bp, Homo sapien
gacagtgccccttttgagtggaaga

SEQ ID NO: 2031188 - DNA, 25 bp, Homo sapien
ccagggacagtgccccttttgagtg

SEQ ID NO: 2031189 - DNA, 25 bp, Homo sapien
cagtgccccttttgagtggaagagc

SEQ ID NO: 2031190 - DNA, 25 bp, Homo sapien
tgtggactttcagcgccaactgcgt

SEQ ID NO: 2031191 - DNA, 25 bp, Homo sapien
taaatgggattgttggtgtccactg

SEQ ID NO: 2031192 - DNA, 25 bp, Homo sapien
cttttgttagcttgaagagtgtgcc

SEQ ID NO: 2031193 - DNA, 25 bp, Homo sapien
gcacagtggcggttttgggctcata

SEQ ID NO: 2031194 - DNA, 25 bp, Homo sapien
actttggcagtgctgatccccagga

SEQ ID NO: 2031195 - DNA, 25 bp, Homo sapien
gatgttcacatctgactggactttg

SEQ ID NO: 2031196 - DNA, 25 bp, Homo sapien
gccgtccacaagctctagtccaatg

SEQ ID NO: 2031197 - DNA, 25 bp, Homo sapien
cgccattctgcgaggaggttcgaaa

SEQ ID NO: 2031198 - DNA, 25 bp, Homo sapien
tgggccactgcgtagcacctgttca

SEQ ID NO: 2031199 - DNA, 25 bp, Homo sapien
agagctgcatatccgcttccgtcaa

SEQ ID NO: 2031200 - DNA, 25 bp, Homo sapien
ctgttcaccgtgaaggcagacaccg

SEQ ID NO: 2031201 - DNA, 25 bp, Homo sapien
gttaaccgtcacatccccaatgcag

SEQ ID NO: 2031202 - DNA, 25 bp, Homo sapien
ggcaggcctcctaggtagaacaaac

SEQ ID NO: 2031203 - DNA, 25 bp, Homo sapien
tcggccgtcgacagttatgaagcct

SEQ ID NO: 2031204 - DNA, 25 bp, Homo sapien
cctaggtagaacaaaccctccacat

SEQ ID NO: 2031205 - DNA, 25 bp, Homo sapien
accatgggagactctcggccgtcga

SEQ ID NO: 2031206 - DNA, 25 bp, Homo sapien
gatgagccatgtagtaaatcaggcc

SEQ ID NO: 2031207 - DNA, 25 bp, Homo sapien
tttgccaaggtcaaacatgaagtgg

SEQ ID NO: 2031208 - DNA, 25 bp, Homo sapien
aaatcaggccgctggaggcgaacgt

SEQ ID NO: 2031209 - DNA, 25 bp, Homo sapien
tgcggatgcttagctcaaccgagag

SEQ ID NO: 2031210 - DNA, 25 bp, Homo sapien
cttaagcattcaacgcgggtaactc

SEQ ID NO: 2031211 - DNA, 25 bp, Homo sapien
cgggtaactctgcaaagctgatatc

SEQ ID NO: 2031212 - DNA, 25 bp, Homo sapien
cattcaacgcgggtaactctgcaaa

SEQ ID NO: 2031213 - DNA, 25 bp, Homo sapien
tcaacgcgggtaactctgcaaagct

SEQ ID NO: 2031214 - DNA, 25 bp, Homo sapien
ggtctcgagtaactctctcaagagc

SEQ ID NO: 2031215 - DNA, 25 bp, Homo sapien
gggtctcgagtaactctctcaagag

SEQ ID NO: 2031216 - DNA, 25 bp, Homo sapien
gctgaccggatggttaaacgaggaa

SEQ ID NO: 2031217 - DNA, 25 bp, Homo sapien
catgtctgcctgtgtccagcggatc

SEQ ID NO: 2031218 - DNA, 25 bp, Homo sapien
gatccacgccataggagccatgtct

SEQ ID NO: 2031219 - DNA, 25 bp, Homo sapien
gccatgtctgcctgtgtccagcgga

SEQ ID NO: 2031220 - DNA, 25 bp, Homo sapien
gccatgtctgcctgtgtccggcgga

SEQ ID NO: 2031221 - DNA, 25 bp, Homo sapien
ggcactcgggattttggccaccaca

SEQ ID NO: 2031222 - DNA, 25 bp, Homo sapien
cacagtttgagcacagaaaggtcag

SEQ ID NO: 2031223 - DNA, 25 bp, Homo sapien
catgaaagcgttgtgatttgcacca

SEQ ID NO: 2031224 - DNA, 25 bp, Homo sapien
tctagcaatgagacgccgcataagg

SEQ ID NO: 2031225 - DNA, 25 bp, Homo sapien
tctgacagccgactgattaaaaggc

SEQ ID NO: 2031226 - DNA, 25 bp, Homo sapien
gaacgtactccagagctgcatccac

SEQ ID NO: 2031227 - DNA, 25 bp, Homo sapien
agaccaaactggtgagcgccgggaa

SEQ ID NO: 2031228 - DNA, 25 bp, Homo sapien
gacagccgactgattaaaaggcaag

SEQ ID NO: 2031229 - DNA, 25 bp, Homo sapien
gatgctaccatgaaaactgccccga

SEQ ID NO: 2031230 - DNA, 25 bp, Homo sapien
tattatacatcagcccaatgcgcgg

SEQ ID NO: 2031231 - DNA, 25 bp, Homo sapien
tgaagggccatctacgaagcaatcc

SEQ ID NO: 2031232 - DNA, 25 bp, Homo sapien
ggtttaaatgatgcactcgccagcg

SEQ ID NO: 2031233 - DNA, 25 bp, Homo sapien
ctgtcctaggccctcctttgctgac

SEQ ID NO: 2031234 - DNA, 25 bp, Homo sapien
cattttaactccctctgtcctaggc

SEQ ID NO: 2031235 - DNA, 25 bp, Homo sapien
caaggccccattttaactccctctg

SEQ ID NO: 2031236 - DNA, 25 bp, Homo sapien
ttacagcaaggccccattttaactc

SEQ ID NO: 2031237 - DNA, 25 bp, Homo sapien
ctgactgatagtaaaggaagccgct

SEQ ID NO: 2031238 - DNA, 25 bp, Homo sapien
actgatagtaaaggaagccgctcct

SEQ ID NO: 2031239 - DNA, 25 bp, Homo sapien
tgatagtaaaggaagccgctcctac

SEQ ID NO: 2031240 - DNA, 25 bp, Homo sapien
gactgatagtaaaggaagccgctcc

SEQ ID NO: 2031241 - DNA, 25 bp, Homo sapien
gcatcgggagccagcttaggccttt

SEQ ID NO: 2031242 - DNA, 25 bp, Homo sapien
tctgcatcgggagccagcttaggcc

SEQ ID NO: 2031243 - DNA, 25 bp, Homo sapien
ctctgcatcgggagccagcttaggc

SEQ ID NO: 2031244 - DNA, 25 bp, Homo sapien
tgcatcgggagccagcttaggcctt

SEQ ID NO: 2031245 - DNA, 25 bp, Homo sapien
tgtccaggtcgacttgctcatggcc

SEQ ID NO: 2031246 - DNA, 25 bp, Homo sapien
ccaggtcgacttgctcatggccaac

SEQ ID NO: 2031247 - DNA, 25 bp, Homo sapien
caactgcactgttgaaatccaaaag

SEQ ID NO: 2031248 - DNA, 25 bp, Homo sapien
aggtgtccaggtcgacttgctcatg

SEQ ID NO: 2031249 - DNA, 25 bp, Homo sapien
tcctgctttctactaatgtgcccaa

SEQ ID NO: 2031250 - DNA, 25 bp, Homo sapien
cattgtgagcagtgacgtcccctct

SEQ ID NO: 2031251 - DNA, 25 bp, Homo sapien
catggaacgatcttctcattgtgag

SEQ ID NO: 2031252 - DNA, 25 bp, Homo sapien
ggtttttgatacagccatggaacga

SEQ ID NO: 2031253 - DNA, 25 bp, Homo sapien
cagtaaagggcagagctaaagttgt

SEQ ID NO: 2031254 - DNA, 25 bp, Homo sapien
agacaatttatgctgggccccagta

SEQ ID NO: 2031255 - DNA, 25 bp, Homo sapien
aaatgcccagtgtgcttttaaagca

SEQ ID NO: 2031256 - DNA, 25 bp, Homo sapien
aatcgtctggatgccgatgacccca

SEQ ID NO: 2031257 - DNA, 25 bp, Homo sapien
acaccttcattacacactgcctggc

SEQ ID NO: 2031258 - DNA, 25 bp, Homo sapien
cacaccttcattacacactgcctgg

SEQ ID NO: 2031259 - DNA, 25 bp, Homo sapien
accttcattacacactgcctggccg

SEQ ID NO: 2031260 - DNA, 25 bp, Homo sapien
cttcattacacactgcctggccgcg

SEQ ID NO: 2031261 - DNA, 25 bp, Homo sapien
tacctcaatgttgcctccgatcagc

SEQ ID NO: 2031262 - DNA, 25 bp, Homo sapien
gtcccatccccaggattgacatgta

SEQ ID NO: 2031263 - DNA, 25 bp, Homo sapien
ccaaggagatggaatgcgcttgtcc

SEQ ID NO: 2031264 - DNA, 25 bp, Homo sapien
cgatcagcatgacggaaaagaaggg

SEQ ID NO: 2031265 - DNA, 25 bp, Homo sapien
tgtgaatgcactaaacgctgctgaa

SEQ ID NO: 2031266 - DNA, 25 bp, Homo sapien
gaggttgcatagagaatttcccaga

SEQ ID NO: 2031267 - DNA, 25 bp, Homo sapien
tctatacagccggaaagcaaattgg

SEQ ID NO: 2031268 - DNA, 25 bp, Homo sapien
gaaaggtggcctcgtaacattgtga

SEQ ID NO: 2031269 - DNA, 25 bp, Homo sapien
tcgtggtggcaaatgttaccagcca

SEQ ID NO: 2031270 - DNA, 25 bp, Homo sapien
cgtgtgcttcctcacgatcaccccg

SEQ ID NO: 2031271 - DNA, 25 bp, Homo sapien
atgccactgctgttcgtggtggcaa

SEQ ID NO: 2031272 - DNA, 25 bp, Homo sapien
gcaaatgttaccagccattctgatt

SEQ ID NO: 2031273 - DNA, 25 bp, Homo sapien
ggcaattcaatgtagccgcctttca

SEQ ID NO: 2031274 - DNA, 25 bp, Homo sapien
tgggtggcaattcaatgtagccgcc

SEQ ID NO: 2031275 - DNA, 25 bp, Homo sapien
tggcaattcaatgtagccgcctttc

SEQ ID NO: 2031276 - DNA, 25 bp, Homo sapien
ggtggcaattcaatgtagccgcctt

SEQ ID NO: 2031277 - DNA, 25 bp, Homo sapien
tttccaggttcttgatgcagcccac

SEQ ID NO: 2031278 - DNA, 25 bp, Homo sapien
cactccataggaatttctgagtaag

SEQ ID NO: 2031279 - DNA, 25 bp, Homo sapien
ccacaaagcttttggtggtgacacc

SEQ ID NO: 2031280 - DNA, 25 bp, Homo sapien
aaaggttgatctggatatttccagg

SEQ ID NO: 2031281 - DNA, 25 bp, Homo sapien
aaagaaggaatacaaagccactggg

SEQ ID NO: 2031282 - DNA, 25 bp, Homo sapien
gaaggaatacaaagccactgggcaa

SEQ ID NO: 2031283 - DNA, 25 bp, Homo sapien
aagaaggaatacaaagccactgggc

SEQ ID NO: 2031284 - DNA, 25 bp, Homo sapien
aggaatacaaagccactgggcaagg

SEQ ID NO: 2031285 - DNA, 25 bp, Homo sapien
tacactgggccgtctgggcaaagtc

SEQ ID NO: 2031286 - DNA, 25 bp, Homo sapien
tcatagcaactgaatggctgcagct

SEQ ID NO: 2031287 - DNA, 25 bp, Homo sapien
tttccatgtaaacgaggaggctggc

SEQ ID NO: 2031288 - DNA, 25 bp, Homo sapien
tgtactaggacatagccgaggctac

SEQ ID NO: 2031289 - DNA, 25 bp, Homo sapien
tcctccttatgtgtgaatgtggcct

SEQ ID NO: 2031290 - DNA, 25 bp, Homo sapien
gggaagtccttatgcaacatgacag

SEQ ID NO: 2031291 - DNA, 25 bp, Homo sapien
agtagggtctccaaatattgcacgg

SEQ ID NO: 2031292 - DNA, 25 bp, Homo sapien
tattgcacggtaacaggatttagac

SEQ ID NO: 2031293 - DNA, 25 bp, Homo sapien
gcggttgaggtcagaagatgctccc

SEQ ID NO: 2031294 - DNA, 25 bp, Homo sapien
cataaatcgggtccttgtctaggcg

SEQ ID NO: 2031295 - DNA, 25 bp, Homo sapien
taggcatcgataactgctagcactc

SEQ ID NO: 2031296 - DNA, 25 bp, Homo sapien
aagatgctcccggagtctcgccctg

SEQ ID NO: 2031297 - DNA, 25 bp, Homo sapien
gaaacagctcgatggataaaaagtc

SEQ ID NO: 2031298 - DNA, 25 bp, Homo sapien
tgtcaaaagggtaatgggtcctgaa

SEQ ID NO: 2031299 - DNA, 25 bp, Homo sapien
ccggtttcgctggaaggcaattttg

SEQ ID NO: 2031300 - DNA, 25 bp, Homo sapien
taaccttcactctgccacgaaacag

SEQ ID NO: 2031301 - DNA, 25 bp, Homo sapien
cagggatggctgaaaccttctaaag

SEQ ID NO: 2031302 - DNA, 25 bp, Homo sapien
tgagaaaactggatctggccccaca

SEQ ID NO: 2031303 - DNA, 25 bp, Homo sapien
ttcaaacaatgtcacggtggtcaca

SEQ ID NO: 2031304 - DNA, 25 bp, Homo sapien
gaggtctatcggctacgaaaccaaa

SEQ ID NO: 2031305 - DNA, 25 bp, Homo sapien
gaagtgacttctccacgacagagta

SEQ ID NO: 2031306 - DNA, 25 bp, Homo sapien
gcatgattatctgggtcacggtagc

SEQ ID NO: 2031307 - DNA, 25 bp, Homo sapien
gaacccaggtagagaagaagtccat

SEQ ID NO: 2031308 - DNA, 25 bp, Homo sapien
agagtacccactcccgtcaaaatgg

SEQ ID NO: 2031309 - DNA, 25 bp, Homo sapien
gctttaactgatcttgtcactggat

SEQ ID NO: 2031310 - DNA, 25 bp, Homo sapien
gacagagcagcccattagacaagag

SEQ ID NO: 2031311 - DNA, 25 bp, Homo sapien
taattgcagatatccatctggacag

SEQ ID NO: 2031312 - DNA, 25 bp, Homo sapien
gagaaggcttaaactacagacctga

SEQ ID NO: 2031313 - DNA, 25 bp, Homo sapien
ttccgaagcacccacggcacttgcc

SEQ ID NO: 2031314 - DNA, 25 bp, Homo sapien
ttcaatatagttccataggcctatg

SEQ ID NO: 2031315 - DNA, 25 bp, Homo sapien
taaaatgagtaaccttcacagcagg

SEQ ID NO: 2031316 - DNA, 25 bp, Homo sapien
ttccataggcctatggattttccat

SEQ ID NO: 2031317 - DNA, 25 bp, Homo sapien
tcagttatgaagtggaatcctagaa

SEQ ID NO: 2031318 - DNA, 25 bp, Homo sapien
gtgcacaaaacttctctctgggagc

SEQ ID NO: 2031319 - DNA, 25 bp, Homo sapien
tgggagcttcaatctaacagatcca

SEQ ID NO: 2031320 - DNA, 25 bp, Homo sapien
gatccaaattttgagagagccacat

SEQ ID NO: 2031321 - DNA, 25 bp, Homo sapien
caaacatgagtgttgaattgtttac

SEQ ID NO: 2031322 - DNA, 25 bp, Homo sapien
cattagctgtcccaggggatttact

SEQ ID NO: 2031323 - DNA, 25 bp, Homo sapien
ctccaagacctccaacaaacatgag

SEQ ID NO: 2031324 - DNA, 25 bp, Homo sapien
tgttggtgacttttgatttgagctc

SEQ ID NO: 2031325 - DNA, 25 bp, Homo sapien
aaagtctggaaactccaagcgtgtg

SEQ ID NO: 2031326 - DNA, 25 bp, Homo sapien
tccaagcgtgtggacccggagccca

SEQ ID NO: 2031327 - DNA, 25 bp, Homo sapien
tgtcatcaatgggaaagtctggaaa

SEQ ID NO: 2031328 - DNA, 25 bp, Homo sapien
ggaaggccactctccctcgccgcat

SEQ ID NO: 2031329 - DNA, 25 bp, Homo sapien
taccgaggtagaagagaagattatc

SEQ ID NO: 2031330 - DNA, 25 bp, Homo sapien
tctgtctgcagacacggcgacttta

SEQ ID NO: 2031331 - DNA, 25 bp, Homo sapien
gaagattatcgggttcctgtgtctt

SEQ ID NO: 2031332 - DNA, 25 bp, Homo sapien
tggtaggcccggatgcaatctctgt

SEQ ID NO: 2031333 - DNA, 25 bp, Homo sapien
tcctctcttgataacatacaatggt

SEQ ID NO: 2031334 - DNA, 25 bp, Homo sapien
ttcactgaggcaggtttcctctctt

SEQ ID NO: 2031335 - DNA, 25 bp, Homo sapien
ctctcttgataacatacaatggttc

SEQ ID NO: 2031336 - DNA, 25 bp, Homo sapien
tttcctctcttgataacatacaatg

SEQ ID NO: 2031337 - DNA, 25 bp, Homo sapien
ttggaagccctaaggggcgcagtgt

SEQ ID NO: 2031338 - DNA, 25 bp, Homo sapien
gggcgcagtgtgactgagggccatg

SEQ ID NO: 2031339 - DNA, 25 bp, Homo sapien
ggccatgtctgcatgaattccctgg

SEQ ID NO: 2031340 - DNA, 25 bp, Homo sapien
tgagggccatgtctgcatgaattcc

SEQ ID NO: 2031341 - DNA, 25 bp, Homo sapien
ctgagagcccagttacgaaagccac

SEQ ID NO: 2031342 - DNA, 25 bp, Homo sapien
agagcccagttacgaaagccacggg

SEQ ID NO: 2031343 - DNA, 25 bp, Homo sapien
tgactgagagcccagttacgaaagc

SEQ ID NO: 2031344 - DNA, 25 bp, Homo sapien
tgagagcccagttacgaaagccacg

SEQ ID NO: 2031345 - DNA, 25 bp, Homo sapien
ggcttgaatttccacgtctttgact

SEQ ID NO: 2031346 - DNA, 25 bp, Homo sapien
tgcgggcctggctgatcaacagttt

SEQ ID NO: 2031347 - DNA, 25 bp, Homo sapien
accgatcaaacaaaaggttggcttg

SEQ ID NO: 2031348 - DNA, 25 bp, Homo sapien
ctgataggtttctgctcagattctc

SEQ ID NO: 2031349 - DNA, 25 bp, Homo sapien
ctctggcttgcagacgtggccagct

SEQ ID NO: 2031350 - DNA, 25 bp, Homo sapien
gtgctcaccgcgctctggcttgcag

SEQ ID NO: 2031351 - DNA, 25 bp, Homo sapien
tctcgtaatgtggtgttgaccctgg

SEQ ID NO: 2031352 - DNA, 25 bp, Homo sapien
tggtgtgtctctcgtaatgtggtgt

SEQ ID NO: 2031353 - DNA, 25 bp, Homo sapien
ttggttttggctcccttgtctctta

SEQ ID NO: 2031354 - DNA, 25 bp, Homo sapien
ggttttggctcccttgtctcttata

SEQ ID NO: 2031355 - DNA, 25 bp, Homo sapien
gttttggctcccttgtctcttatac

SEQ ID NO: 2031356 - DNA, 25 bp, Homo sapien
ctttggttttggctcccttgtctct

SEQ ID NO: 2031357 - DNA, 25 bp, Homo sapien
tgctctaagtatcaagagtgattca

SEQ ID NO: 2031358 - DNA, 25 bp, Homo sapien
tcaagagtgattcattggtttgcct

SEQ ID NO: 2031359 - DNA, 25 bp, Homo sapien
aggaattgctctaagtatcaagagt

SEQ ID NO: 2031360 - DNA, 25 bp, Homo sapien
gaattgctctaagtatcaagagtga

SEQ ID NO: 2031361 - DNA, 25 bp, Homo sapien
ctgtttgtcttatttctcaattcac

SEQ ID NO: 2031362 - DNA, 25 bp, Homo sapien
aattcactcagttccaatgcaatac

SEQ ID NO: 2031363 - DNA, 25 bp, Homo sapien
ttatttctcaattcactcagttcca

SEQ ID NO: 2031364 - DNA, 25 bp, Homo sapien
tttctcaattcactcagttccaatg

SEQ ID NO: 2031365 - DNA, 25 bp, Homo sapien
gctgcacggccgctttcccgttaga

SEQ ID NO: 2031366 - DNA, 25 bp, Homo sapien
tgcacggccgctttcccgttagaaa

SEQ ID NO: 2031367 - DNA, 25 bp, Homo sapien
ggaagcttcctgctgaggttgttgc

SEQ ID NO: 2031368 - DNA, 25 bp, Homo sapien
aagcttcctgctgaggttgttgcct

SEQ ID NO: 2031369 - DNA, 25 bp, Homo sapien
tcaggctctggatgttgtaatggac

SEQ ID NO: 2031370 - DNA, 25 bp, Homo sapien
cagttcctccgattcttcaatcagg

SEQ ID NO: 2031371 - DNA, 25 bp, Homo sapien
tggccagttcctccgattcttcaat

SEQ ID NO: 2031372 - DNA, 25 bp, Homo sapien
tgtaatggacataggctgcactggt

SEQ ID NO: 2031373 - DNA, 25 bp, Homo sapien
aaagtagcttatcctggtgatcctc

SEQ ID NO: 2031374 - DNA, 25 bp, Homo sapien
catgaccaggtcatctatgtggtgc

SEQ ID NO: 2031375 - DNA, 25 bp, Homo sapien
tgtagaccaggtcgactgcgttcct

SEQ ID NO: 2031376 - DNA, 25 bp, Homo sapien
gaactcagcggcatggtcctcagct

SEQ ID NO: 2031377 - DNA, 25 bp, Homo sapien
cttggacaatgagctctgaggtcag

SEQ ID NO: 2031378 - DNA, 25 bp, Homo sapien
tccttggacaatgagctctgaggtc

SEQ ID NO: 2031379 - DNA, 25 bp, Homo sapien
cttccttggacaatgagctctgagg

SEQ ID NO: 2031380 - DNA, 25 bp, Homo sapien
ccttggacaatgagctctgaggtca

SEQ ID NO: 2031381 - DNA, 25 bp, Homo sapien
ctctcagattagcattgaccatgag

SEQ ID NO: 2031382 - DNA, 25 bp, Homo sapien
ttctctcagattagcattgaccatg

SEQ ID NO: 2031383 - DNA, 25 bp, Homo sapien
actgaattctctcagattagcattg

SEQ ID NO: 2031384 - DNA, 25 bp, Homo sapien
aattctctcagattagcattgacca

SEQ ID NO: 2031385 - DNA, 25 bp, Homo sapien
ttgtgacaataaatcttcagcagcc

SEQ ID NO: 2031386 - DNA, 25 bp, Homo sapien
tccagcggcttctggtaattttcct

SEQ ID NO: 2031387 - DNA, 25 bp, Homo sapien
tgctgcttctttcaatacctccaat

SEQ ID NO: 2031388 - DNA, 25 bp, Homo sapien
tgttgtgctttgaaaggacgtggct

SEQ ID NO: 2031389 - DNA, 25 bp, Homo sapien
ttgagttcaagggtggcattttggt

SEQ ID NO: 2031390 - DNA, 25 bp, Homo sapien
tctgcatgatttctagcaaagatgt

SEQ ID NO: 2031391 - DNA, 25 bp, Homo sapien
caaagatgtaccattctgttgcatg

SEQ ID NO: 2031392 - DNA, 25 bp, Homo sapien
gtgtgaagtctcttatctgcatgat

SEQ ID NO: 2031393 - DNA, 25 bp, Homo sapien
aaatcttcatccaaagtctgattta

SEQ ID NO: 2031394 - DNA, 25 bp, Homo sapien
agtagaattgggtagtaggaaatct

SEQ ID NO: 2031395 - DNA, 25 bp, Homo sapien
aatcttcatccaaagtctgatttaa

SEQ ID NO: 2031396 - DNA, 25 bp, Homo sapien
ctgaagagtagaattgggtagtagg

SEQ ID NO: 2031397 - DNA, 25 bp, Homo sapien
tttgggtactcgctaacatcctagt

SEQ ID NO: 2031398 - DNA, 25 bp, Homo sapien
tctcaatggctatggccaggtcttg

SEQ ID NO: 2031399 - DNA, 25 bp, Homo sapien
tcagttgccctattcaccttttggg

SEQ ID NO: 2031400 - DNA, 25 bp, Homo sapien
gactctccttgaagattctctcagt

SEQ ID NO: 2031401 - DNA, 25 bp, Homo sapien
caggttgtccgtttcttctgcaaca

SEQ ID NO: 2031402 - DNA, 25 bp, Homo sapien
gcaggttgtccgtttcttctgcaac

SEQ ID NO: 2031403 - DNA, 25 bp, Homo sapien
gcatattttcttttaataaagattc

SEQ ID NO: 2031404 - DNA, 25 bp, Homo sapien
tcccaggtccttttgcatattttct

SEQ ID NO: 2031405 - DNA, 25 bp, Homo sapien
ttcccaggtccttttgcatattttc

SEQ ID NO: 2031406 - DNA, 25 bp, Homo sapien
tcagagaaagaacggcatcaccaat

SEQ ID NO: 2031407 - DNA, 25 bp, Homo sapien
ggttcagagaaagaacggcatcacc

SEQ ID NO: 2031408 - DNA, 25 bp, Homo sapien
tcattcagcagcacacctacacact

SEQ ID NO: 2031409 - DNA, 25 bp, Homo sapien
gaaagaacggcatcaccaatctcat

SEQ ID NO: 2031410 - DNA, 25 bp, Homo sapien
tgcaaacgcactgcccagatgtgcg

SEQ ID NO: 2031411 - DNA, 25 bp, Homo sapien
cactgcccagatgtgcggtcacagt

SEQ ID NO: 2031412 - DNA, 25 bp, Homo sapien
gtttccatcagaatgtgcctcggtt

SEQ ID NO: 2031413 - DNA, 25 bp, Homo sapien
tcggttcacactcatcgcaccggag

SEQ ID NO: 2031414 - DNA, 25 bp, Homo sapien
gcgggttgcagtcacacttctggca

SEQ ID NO: 2031415 - DNA, 25 bp, Homo sapien
ggcaactgccacctggtgtttgagg

SEQ ID NO: 2031416 - DNA, 25 bp, Homo sapien
agagccgtgcgggttgcagtcacac

SEQ ID NO: 2031417 - DNA, 25 bp, Homo sapien
tttgagggttcccataatagcttga

SEQ ID NO: 2031418 - DNA, 25 bp, Homo sapien
aagcacagatccattcaccttggga

SEQ ID NO: 2031419 - DNA, 25 bp, Homo sapien
tgcaaagcacagatccattcacctt

SEQ ID NO: 2031420 - DNA, 25 bp, Homo sapien
cagacaggatggtcaataccagctt

SEQ ID NO: 2031421 - DNA, 25 bp, Homo sapien
tctaacttgcgacagtaatcatttc

SEQ ID NO: 2031422 - DNA, 25 bp, Homo sapien
caggagacaggcgtcacaacggaaa

SEQ ID NO: 2031423 - DNA, 25 bp, Homo sapien
gagacaggcgtcacaacggaaatcg

SEQ ID NO: 2031424 - DNA, 25 bp, Homo sapien
aatcgtggtccccttccaagacaca

SEQ ID NO: 2031425 - DNA, 25 bp, Homo sapien
gcgtcacaacggaaatcgtggtccc

SEQ ID NO: 2031426 - DNA, 25 bp, Homo sapien
gtcacctgctgtgttatcgccacag

SEQ ID NO: 2031427 - DNA, 25 bp, Homo sapien
tagtagccagaagtacacacatcac

SEQ ID NO: 2031428 - DNA, 25 bp, Homo sapien
agtcaccttcccgtagtagccagaa

SEQ ID NO: 2031429 - DNA, 25 bp, Homo sapien
tcccgtagtagccagaagtacacac

SEQ ID NO: 2031430 - DNA, 25 bp, Homo sapien
tgggctccctagagaagcaaagaca

SEQ ID NO: 2031431 - DNA, 25 bp, Homo sapien
gaagcaaagacaagctgccccaaga

SEQ ID NO: 2031432 - DNA, 25 bp, Homo sapien
gggctccctagagaagcaaagacaa

SEQ ID NO: 2031433 - DNA, 25 bp, Homo sapien
agcaaagacaagctgccccaagagt

SEQ ID NO: 2031434 - DNA, 25 bp, Homo sapien
acacttcccggtgttggggtcacag

SEQ ID NO: 2031435 - DNA, 25 bp, Homo sapien
gacacttcccggtgttggggtcaca

SEQ ID NO: 2031436 - DNA, 25 bp, Homo sapien
acaggtgtcactgtggttgttgcaa

SEQ ID NO: 2031437 - DNA, 25 bp, Homo sapien
ggtcacaggtgtcactgtggttgtt

SEQ ID NO: 2031438 - DNA, 25 bp, Homo sapien
ctgcagggaacacaaggagcaacca

SEQ ID NO: 2031439 - DNA, 25 bp, Homo sapien
agagggcgtggtcccctgtcactcc

SEQ ID NO: 2031440 - DNA, 25 bp, Homo sapien
caaccagagggcgtggtcccctgtc

SEQ ID NO: 2031441 - DNA, 25 bp, Homo sapien
agggaacacaaggagcaaccagagg

SEQ ID NO: 2031442 - DNA, 25 bp, Homo sapien
ctaaaagagatgcaacctcttcttc

SEQ ID NO: 2031443 - DNA, 25 bp, Homo sapien
agcctttctgccaacctccattgaa

SEQ ID NO: 2031444 - DNA, 25 bp, Homo sapien
gacagacacaattctctaaaagaga

SEQ ID NO: 2031445 - DNA, 25 bp, Homo sapien
caggaggacagacacaattctctaa

SEQ ID NO: 2031446 - DNA, 25 bp, Homo sapien
gatgccttgatgaggatgtactcaa

SEQ ID NO: 2031447 - DNA, 25 bp, Homo sapien
gacataaaatcctctcgcgtgacag

SEQ ID NO: 2031448 - DNA, 25 bp, Homo sapien
tactcaatatcgctgaggacagaca

SEQ ID NO: 2031449 - DNA, 25 bp, Homo sapien
tctgctgtaatccttgaccatacga

SEQ ID NO: 2031450 - DNA, 25 bp, Homo sapien
ggtgccgacgccatccaaagaatag

SEQ ID NO: 2031451 - DNA, 25 bp, Homo sapien
caaagaatagaaggccacgctgtac

SEQ ID NO: 2031452 - DNA, 25 bp, Homo sapien
tcagtttgccaccataggccatgag

SEQ ID NO: 2031453 - DNA, 25 bp, Homo sapien
aaatgacttgctttctgatccgacc

SEQ ID NO: 2031454 - DNA, 25 bp, Homo sapien
ggtcgtgcccctcaagttactctga

SEQ ID NO: 2031455 - DNA, 25 bp, Homo sapien
ctctgcacggatgtgctgccggacg

SEQ ID NO: 2031456 - DNA, 25 bp, Homo sapien
tctgagaaaccacacgcagaagagg

SEQ ID NO: 2031457 - DNA, 25 bp, Homo sapien
tgcggcagccgccagtaaaacggct

SEQ ID NO: 2031458 - DNA, 25 bp, Homo sapien
gacagcccggagcagaagcacgggc

SEQ ID NO: 2031459 - DNA, 25 bp, Homo sapien
agcgaaggtgccctctcgacattcg

SEQ ID NO: 2031460 - DNA, 25 bp, Homo sapien
ccagggggttgtctgcgcggagagc

SEQ ID NO: 2031461 - DNA, 25 bp, Homo sapien
tgtctgcgcggagagcgaaggtgcc

SEQ ID NO: 2031462 - DNA, 25 bp, Homo sapien
acccaaggaacactgatcgcaggcc

SEQ ID NO: 2031463 - DNA, 25 bp, Homo sapien
cacagtcgggaaagtctctgtaacc

SEQ ID NO: 2031464 - DNA, 25 bp, Homo sapien
gatgatgagtcgaccccacgagact

SEQ ID NO: 2031465 - DNA, 25 bp, Homo sapien
gagaccctgctccaggttgcaggcg

SEQ ID NO: 2031466 - DNA, 25 bp, Homo sapien
tccagtttctgggtcgcaggtattc

SEQ ID NO: 2031467 - DNA, 25 bp, Homo sapien
cgcaggtattctgagtgtgtgggca

SEQ ID NO: 2031468 - DNA, 25 bp, Homo sapien
tctgggtcgcaggtattctgagtgt

SEQ ID NO: 2031469 - DNA, 25 bp, Homo sapien
gtttctgggtcgcaggtattctgag

SEQ ID NO: 2031470 - DNA, 25 bp, Homo sapien
gaagccatgggcacacctgtcacac

SEQ ID NO: 2031471 - DNA, 25 bp, Homo sapien
tacagctaccatcctggtaggcgta

SEQ ID NO: 2031472 - DNA, 25 bp, Homo sapien
catgggcacacctgtcacacctttt

SEQ ID NO: 2031473 - DNA, 25 bp, Homo sapien
atcctggtaggcgtagaagccatgg

SEQ ID NO: 2031474 - DNA, 25 bp, Homo sapien
cgtgcagccatctgacacggagcct

SEQ ID NO: 2031475 - DNA, 25 bp, Homo sapien
atccgtgcagccatctgacacggag

SEQ ID NO: 2031476 - DNA, 25 bp, Homo sapien
ctgacacggagcctgccacgctgca

SEQ ID NO: 2031477 - DNA, 25 bp, Homo sapien
tgacactggccttcatccgtgcagc

SEQ ID NO: 2031478 - DNA, 25 bp, Homo sapien
gagcccggtctcaagatggcacacg

SEQ ID NO: 2031479 - DNA, 25 bp, Homo sapien
tggtttgcagtcacagagcccggtc

SEQ ID NO: 2031480 - DNA, 25 bp, Homo sapien
ccagtcacgtttggtttgcagtcac

SEQ ID NO: 2031481 - DNA, 25 bp, Homo sapien
acactgctgtccagtcacgtttggt

SEQ ID NO: 2031482 - DNA, 25 bp, Homo sapien
aagtttcgcatagtgtcctcctggc

SEQ ID NO: 2031483 - DNA, 25 bp, Homo sapien
gctgcaactgttctccctaaagtct

SEQ ID NO: 2031484 - DNA, 25 bp, Homo sapien
tggcacgtccgtccaatccaagttt

SEQ ID NO: 2031485 - DNA, 25 bp, Homo sapien
cccaggcaccaaattcagggagcag

SEQ ID NO: 2031486 - DNA, 25 bp, Homo sapien
gtgtttcatttcaagccgcctcttt

SEQ ID NO: 2031487 - DNA, 25 bp, Homo sapien
gtgtgtctcccctccgtgtttcatt

SEQ ID NO: 2031488 - DNA, 25 bp, Homo sapien
tttgcatcgccctcttcctgtggta

SEQ ID NO: 2031489 - DNA, 25 bp, Homo sapien
tcctgtggtatttgggacgcccact

SEQ ID NO: 2031490 - DNA, 25 bp, Homo sapien
gacggcctgtccacacctccggctg

SEQ ID NO: 2031491 - DNA, 25 bp, Homo sapien
ctggacggcctgtccacacctccgg

SEQ ID NO: 2031492 - DNA, 25 bp, Homo sapien
tggacggcctgtccacacctccggc

SEQ ID NO: 2031493 - DNA, 25 bp, Homo sapien
ggcctgtccacacctccggctgcag

SEQ ID NO: 2031494 - DNA, 25 bp, Homo sapien
gaggtgaacctgacgatcagtttct

SEQ ID NO: 2031495 - DNA, 25 bp, Homo sapien
caggaggtgaacctgacgatcagtt

SEQ ID NO: 2031496 - DNA, 25 bp, Homo sapien
ggtgaacctgacgatcagtttctcc

SEQ ID NO: 2031497 - DNA, 25 bp, Homo sapien
gaacctgacgatcagtttctcctcc

SEQ ID NO: 2031498 - DNA, 25 bp, Homo sapien
acgctggcagcagggcgatattcaa

SEQ ID NO: 2031499 - DNA, 25 bp, Homo sapien
gattcatttcgggtcttgtctccta

SEQ ID NO: 2031500 - DNA, 25 bp, Homo sapien
ggagacccttccgacgtggctgctt

SEQ ID NO: 2031501 - DNA, 25 bp, Homo sapien
tctgcacaagttgctggtgagtccc

SEQ ID NO: 2031502 - DNA, 25 bp, Homo sapien
ttggctgtcacagcgtccccataga

SEQ ID NO: 2031503 - DNA, 25 bp, Homo sapien
caagattcgccaggcactgttgggt

SEQ ID NO: 2031504 - DNA, 25 bp, Homo sapien
aggcactccccggtgactgagtcac

SEQ ID NO: 2031505 - DNA, 25 bp, Homo sapien
catagaacccgtcagcacacctttc

SEQ ID NO: 2031506 - DNA, 25 bp, Homo sapien
gaggcataaatccaggggacatgca

SEQ ID NO: 2031507 - DNA, 25 bp, Homo sapien
gaccactccggatgccgcacagcct

SEQ ID NO: 2031508 - DNA, 25 bp, Homo sapien
tgtcgcggtgaagggggagagcatc

SEQ ID NO: 2031509 - DNA, 25 bp, Homo sapien
acccctgaccactccggatgccgca

SEQ ID NO: 2031510 - DNA, 25 bp, Homo sapien
ctgagacgcacacataggaaagaca

SEQ ID NO: 2031511 - DNA, 25 bp, Homo sapien
cgcacacataggaaagacagcactg

SEQ ID NO: 2031512 - DNA, 25 bp, Homo sapien
gacgcacacataggaaagacagcac

SEQ ID NO: 2031513 - DNA, 25 bp, Homo sapien
cacacataggaaagacagcactggc

SEQ ID NO: 2031514 - DNA, 25 bp, Homo sapien
tgtcatctccagaacagcccggagc

SEQ ID NO: 2031515 - DNA, 25 bp, Homo sapien
aatgtgtgaaccacagataccgact

SEQ ID NO: 2031516 - DNA, 25 bp, Homo sapien
cacagataccgactccttgctgctt

SEQ ID NO: 2031517 - DNA, 25 bp, Homo sapien
gcaatggaatattcaaatgtgtgaa

SEQ ID NO: 2031518 - DNA, 25 bp, Homo sapien
tagcccggggcacaccagtcacaga

SEQ ID NO: 2031519 - DNA, 25 bp, Homo sapien
tctccatcattgaggtggcaggtgg

SEQ ID NO: 2031520 - DNA, 25 bp, Homo sapien
ttcatctccatcattgaggtggcag

SEQ ID NO: 2031521 - DNA, 25 bp, Homo sapien
acaccaagctcctgagtagcccggg

SEQ ID NO: 2031522 - DNA, 25 bp, Homo sapien
catgagtaaccctgactgcatcctt

SEQ ID NO: 2031523 - DNA, 25 bp, Homo sapien
tttcatcatgagtaaccctgactgc

SEQ ID NO: 2031524 - DNA, 25 bp, Homo sapien
aattctttgagagtgggtgaaggaa

SEQ ID NO: 2031525 - DNA, 25 bp, Homo sapien
cccaatttcatcatgagtaaccctg

SEQ ID NO: 2031526 - DNA, 25 bp, Homo sapien
cccgtagaagccgggcaagcactgc

SEQ ID NO: 2031527 - DNA, 25 bp, Homo sapien
cactgctcacagtggacgccggtgg

SEQ ID NO: 2031528 - DNA, 25 bp, Homo sapien
gaaggctccccgtagaagccgggca

SEQ ID NO: 2031529 - DNA, 25 bp, Homo sapien
ctccccgtagaagccgggcaagcac

SEQ ID NO: 2031530 - DNA, 25 bp, Homo sapien
gggcttgttctgcacacgtgtgtcg

SEQ ID NO: 2031531 - DNA, 25 bp, Homo sapien
ttctgcacacgtgtgtcgctgctcc

SEQ ID NO: 2031532 - DNA, 25 bp, Homo sapien
ggcagctacgggctcgaagggagcg

SEQ ID NO: 2031533 - DNA, 25 bp, Homo sapien
ccccgggcagctacgggctcgaagg

SEQ ID NO: 2031534 - DNA, 25 bp, Homo sapien
gtccccttctcctacggccactcat

SEQ ID NO: 2031535 - DNA, 25 bp, Homo sapien
gagggcacctgaactacagtgagag

SEQ ID NO: 2031536 - DNA, 25 bp, Homo sapien
tgtacacagcaaatggctctgaatt

SEQ ID NO: 2031537 - DNA, 25 bp, Homo sapien
aatcacttgtacacagcaaatggct

SEQ ID NO: 2031538 - DNA, 25 bp, Homo sapien
gggcacctgaactacagtgagagac

SEQ ID NO: 2031539 - DNA, 25 bp, Homo sapien
cattacactcagctgcatggccgtg

SEQ ID NO: 2031540 - DNA, 25 bp, Homo sapien
tgcaaacgccgtgaacattacactc

SEQ ID NO: 2031541 - DNA, 25 bp, Homo sapien
caaagagtattccatccacgcggta

SEQ ID NO: 2031542 - DNA, 25 bp, Homo sapien
cattcacagggttgacaaattcctc

SEQ ID NO: 2031543 - DNA, 25 bp, Homo sapien
agaagggaaagtcatcctctttcca

SEQ ID NO: 2031544 - DNA, 25 bp, Homo sapien
ctgcaagagaagggaaagtcatcct

SEQ ID NO: 2031545 - DNA, 25 bp, Homo sapien
caagagaagggaaagtcatcctctt

SEQ ID NO: 2031546 - DNA, 25 bp, Homo sapien
gagaagggaaagtcatcctctttcc

SEQ ID NO: 2031547 - DNA, 25 bp, Homo sapien
caggtcgatggcattagagctggct

SEQ ID NO: 2031548 - DNA, 25 bp, Homo sapien
cattcacagtgctccacatcagcgg

SEQ ID NO: 2031549 - DNA, 25 bp, Homo sapien
tccctgtgtagccttgcggacattc

SEQ ID NO: 2031550 - DNA, 25 bp, Homo sapien
tatgtccagagagacggactccaac

SEQ ID NO: 2031551 - DNA, 25 bp, Homo sapien
caggcacaagtctaaccacgtttag

SEQ ID NO: 2031552 - DNA, 25 bp, Homo sapien
tcatcagctggtcacgatcaatctg

SEQ ID NO: 2031553 - DNA, 25 bp, Homo sapien
tcacattggcaaggacagtcatcag

SEQ ID NO: 2031554 - DNA, 25 bp, Homo sapien
ccacgtttaggtactcttcataagg

SEQ ID NO: 2031555 - DNA, 25 bp, Homo sapien
tgtgtgcttaaagtgagtccgtttc

SEQ ID NO: 2031556 - DNA, 25 bp, Homo sapien
gcctgtgtgcttaaagtgagtccgt

SEQ ID NO: 2031557 - DNA, 25 bp, Homo sapien
gtgtgcttaaagtgagtccgtttcc

SEQ ID NO: 2031558 - DNA, 25 bp, Homo sapien
cctgtgtgcttaaagtgagtccgtt

SEQ ID NO: 2031559 - DNA, 25 bp, Homo sapien
tatttcaggaatccgccaaacgcag

SEQ ID NO: 2031560 - DNA, 25 bp, Homo sapien
cttaatgatgacgtcagcatgcgac

SEQ ID NO: 2031561 - DNA, 25 bp, Homo sapien
catgcgacatgaggttactgtctac

SEQ ID NO: 2031562 - DNA, 25 bp, Homo sapien
tctaccggaatatcgtaggacaccg

SEQ ID NO: 2031563 - DNA, 25 bp, Homo sapien
cagtctctgcatgaccgcggtgttg

SEQ ID NO: 2031564 - DNA, 25 bp, Homo sapien
catcttgctgagacgggatcttcct

SEQ ID NO: 2031565 - DNA, 25 bp, Homo sapien
accagccacccggacatactgttta

SEQ ID NO: 2031566 - DNA, 25 bp, Homo sapien
gactgatcaagtcggtgaccagcca

SEQ ID NO: 2031567 - DNA, 25 bp, Homo sapien
gatttcacccagtgcagcagtaata

SEQ ID NO: 2031568 - DNA, 25 bp, Homo sapien
tttcacccagtgcagcagtaatatt

SEQ ID NO: 2031569 - DNA, 25 bp, Homo sapien
atttcacccagtgcagcagtaatat

SEQ ID NO: 2031570 - DNA, 25 bp, Homo sapien
ttcacccagtgcagcagtaatattt

SEQ ID NO: 2031571 - DNA, 25 bp, Homo sapien
gacgtgttctctagtgccacatcat

SEQ ID NO: 2031572 - DNA, 25 bp, Homo sapien
cacagctcgtgccaagcttgtgcaa

SEQ ID NO: 2031573 - DNA, 25 bp, Homo sapien
aatcttgagaggcagacggctgcct

SEQ ID NO: 2031574 - DNA, 25 bp, Homo sapien
gcttgtgcaatacgacctgctcatt

SEQ ID NO: 2031575 - DNA, 25 bp, Homo sapien
ctgaccaacaggccaagagaggctg

SEQ ID NO: 2031576 - DNA, 25 bp, Homo sapien
gaatcctggcttgcagcgatcacag

SEQ ID NO: 2031577 - DNA, 25 bp, Homo sapien
aacgccaaagcagaagcactcggag

SEQ ID NO: 2031578 - DNA, 25 bp, Homo sapien
tgcagacatcagaaacgccaaagca

SEQ ID NO: 2031579 - DNA, 25 bp, Homo sapien
aaagattagcttttgaaaccaatgt

SEQ ID NO: 2031580 - DNA, 25 bp, Homo sapien
agattagcttttgaaaccaatgtgt

SEQ ID NO: 2031581 - DNA, 25 bp, Homo sapien
aagattagcttttgaaaccaatgtg

SEQ ID NO: 2031582 - DNA, 25 bp, Homo sapien
aaaagattagcttttgaaaccaatg

SEQ ID NO: 2031583 - DNA, 25 bp, Homo sapien
taaccttccttacatgggcactgac

SEQ ID NO: 2031584 - DNA, 25 bp, Homo sapien
ttggcagcgatcacatttttctcct

SEQ ID NO: 2031585 - DNA, 25 bp, Homo sapien
gacacaggtcgggtaatccttatag

SEQ ID NO: 2031586 - DNA, 25 bp, Homo sapien
ggtaatccttatagccaagttggca

SEQ ID NO: 2031587 - DNA, 25 bp, Homo sapien
tacacccacaaaagtccctagtagc

SEQ ID NO: 2031588 - DNA, 25 bp, Homo sapien
tatagagttgccataagatccagca

SEQ ID NO: 2031589 - DNA, 25 bp, Homo sapien
catagtttgccaattccttgtttaa

SEQ ID NO: 2031590 - DNA, 25 bp, Homo sapien
tattcataagaacagacagtgtgct

SEQ ID NO: 2031591 - DNA, 25 bp, Homo sapien
gggcggcaaggctcatcctcataag

SEQ ID NO: 2031592 - DNA, 25 bp, Homo sapien
gaccccacagggtcacaattacagg

SEQ ID NO: 2031593 - DNA, 25 bp, Homo sapien
catccttaatacagacagaactgag

SEQ ID NO: 2031594 - DNA, 25 bp, Homo sapien
cagaatggaggtcatccttaataca

SEQ ID NO: 2031595 - DNA, 25 bp, Homo sapien
gcagaggttgccctggattctctta

SEQ ID NO: 2031596 - DNA, 25 bp, Homo sapien
aaggcagaggttgccctggattctc

SEQ ID NO: 2031597 - DNA, 25 bp, Homo sapien
gaaaggcagaggttgccctggattc

SEQ ID NO: 2031598 - DNA, 25 bp, Homo sapien
ctgaaaggcagaggttgccctggat

SEQ ID NO: 2031599 - DNA, 25 bp, Homo sapien
taatatccatcaatacaggtttcac

SEQ ID NO: 2031600 - DNA, 25 bp, Homo sapien
tgcaacactttcatcatagtaacag

SEQ ID NO: 2031601 - DNA, 25 bp, Homo sapien
tcccatggtgttctgcaagcaattt

SEQ ID NO: 2031602 - DNA, 25 bp, Homo sapien
ttcacagttgattcccatggtgttc

SEQ ID NO: 2031603 - DNA, 25 bp, Homo sapien
tgtattgccggaggacacggttccc

SEQ ID NO: 2031604 - DNA, 25 bp, Homo sapien
gctctccccgcaagtattatgctca

SEQ ID NO: 2031605 - DNA, 25 bp, Homo sapien
cttcacatgtattgccggaggacac

SEQ ID NO: 2031606 - DNA, 25 bp, Homo sapien
gctgctgatggtacccaggacagca

SEQ ID NO: 2031607 - DNA, 25 bp, Homo sapien
ggccatagcagatacacatgcctcc

SEQ ID NO: 2031608 - DNA, 25 bp, Homo sapien
gccatagcagatacacatgcctcca

SEQ ID NO: 2031609 - DNA, 25 bp, Homo sapien
atggccatagcagatacacatgcct

SEQ ID NO: 2031610 - DNA, 25 bp, Homo sapien
tggccatagcagatacacatgcctc

SEQ ID NO: 2031611 - DNA, 25 bp, Homo sapien
gtaaagcattctcaacaaatggtgc

SEQ ID NO: 2031612 - DNA, 25 bp, Homo sapien
tgaatagttttcaacaacggcccca

SEQ ID NO: 2031613 - DNA, 25 bp, Homo sapien
tgacctctcaagacctactgtaaag

SEQ ID NO: 2031614 - DNA, 25 bp, Homo sapien
tctatagaacagtagagagtccaga

SEQ ID NO: 2031615 - DNA, 25 bp, Homo sapien
atttggcaggactgccgtcccatac

SEQ ID NO: 2031616 - DNA, 25 bp, Homo sapien
tatttggcaggactgccgtcccata

SEQ ID NO: 2031617 - DNA, 25 bp, Homo sapien
tgagcgttctaatgcgttgcaagcg

SEQ ID NO: 2031618 - DNA, 25 bp, Homo sapien
cagcgcttggtctgccattgatgag

SEQ ID NO: 2031619 - DNA, 25 bp, Homo sapien
aacttgggtgaaagatcgtcagcgc

SEQ ID NO: 2031620 - DNA, 25 bp, Homo sapien
caagcgaaggcgaatatatcgtgca

SEQ ID NO: 2031621 - DNA, 25 bp, Homo sapien
cacctaccgaggagaacactgagaa

SEQ ID NO: 2031622 - DNA, 25 bp, Homo sapien
tagtttcatctcatcaagccaggtg

SEQ ID NO: 2031623 - DNA, 25 bp, Homo sapien
gcagagttcccgctgtgaagagcac

SEQ ID NO: 2031624 - DNA, 25 bp, Homo sapien
catgttgggcactaagctgcaagac

SEQ ID NO: 2031625 - DNA, 25 bp, Homo sapien
tccagagaacgctccaaaatccagt

SEQ ID NO: 2031626 - DNA, 25 bp, Homo sapien
gagtcgctgactgcataatactgcc

SEQ ID NO: 2031627 - DNA, 25 bp, Homo sapien
taacgagacaaacactctgagtcgc

SEQ ID NO: 2031628 - DNA, 25 bp, Homo sapien
ccaatctggaataataggaggtgca

SEQ ID NO: 2031629 - DNA, 25 bp, Homo sapien
actttcatcacgattttccaccaag

SEQ ID NO: 2031630 - DNA, 25 bp, Homo sapien
gactcagagtcaatgtagtcttgct

SEQ ID NO: 2031631 - DNA, 25 bp, Homo sapien
accaagtagcctttgttaatgatca

SEQ ID NO: 2031632 - DNA, 25 bp, Homo sapien
tgctaaacctgcagctgatacagcc

SEQ ID NO: 2031633 - DNA, 25 bp, Homo sapien
aatgcacataaacagtgtcacataa

SEQ ID NO: 2031634 - DNA, 25 bp, Homo sapien
gtaggcacacatcaaacgccacttt

SEQ ID NO: 2031635 - DNA, 25 bp, Homo sapien
gaatgcacataaacagtgtcacata

SEQ ID NO: 2031636 - DNA, 25 bp, Homo sapien
aagtaggcacacatcaaacgccact

SEQ ID NO: 2031637 - DNA, 25 bp, Homo sapien
tggaagctctgtcctgtgggccagt

SEQ ID NO: 2031638 - DNA, 25 bp, Homo sapien
gaagctctgtcctgtgggccagtac

SEQ ID NO: 2031639 - DNA, 25 bp, Homo sapien
cctggaagctctgtcctgtgggcca

SEQ ID NO: 2031640 - DNA, 25 bp, Homo sapien
ggaagctctgtcctgtgggccagta

SEQ ID NO: 2031641 - DNA, 25 bp, Homo sapien
cacgggaaaagaagagcacactgtg

SEQ ID NO: 2031642 - DNA, 25 bp, Homo sapien
agagtcagctgtccccgagttaggc

SEQ ID NO: 2031643 - DNA, 25 bp, Homo sapien
tgagaacagcctgcacgggaaaaga

SEQ ID NO: 2031644 - DNA, 25 bp, Homo sapien
ccccgagttaggcaatgactgctcc

SEQ ID NO: 2031645 - DNA, 25 bp, Homo sapien
gtttttgctccagttgatggagcga

SEQ ID NO: 2031646 - DNA, 25 bp, Homo sapien
gaagagcttacagcttgcatccctt

SEQ ID NO: 2031647 - DNA, 25 bp, Homo sapien
agcgatggtgaagagcttacagctt

SEQ ID NO: 2031648 - DNA, 25 bp, Homo sapien
ctccagttgatggagcgatggtgaa

SEQ ID NO: 2031649 - DNA, 25 bp, Homo sapien
tgcactaagggcttaatgtgaatcc

SEQ ID NO: 2031650 - DNA, 25 bp, Homo sapien
gaatccgatcgttgtcttgttcatc

SEQ ID NO: 2031651 - DNA, 25 bp, Homo sapien
catgtgttgtccactttctttgcac

SEQ ID NO: 2031652 - DNA, 25 bp, Homo sapien
gaaggaaccgcccatgtgttgtcca

SEQ ID NO: 2031653 - DNA, 25 bp, Homo sapien
gacagagattccctgatttcttaaa

SEQ ID NO: 2031654 - DNA, 25 bp, Homo sapien
tgagatcccagtatgcacaagacag

SEQ ID NO: 2031655 - DNA, 25 bp, Homo sapien
cagtatgcacaagacagagattccc

SEQ ID NO: 2031656 - DNA, 25 bp, Homo sapien
tatgcacaagacagagattccctga

SEQ ID NO: 2031657 - DNA, 25 bp, Homo sapien
tttgatgccaaaacagttggggata

SEQ ID NO: 2031658 - DNA, 25 bp, Homo sapien
tgccaaaacagttggggatatgaaa

SEQ ID NO: 2031659 - DNA, 25 bp, Homo sapien
aaaacagttggggatatgaaaagca

SEQ ID NO: 2031660 - DNA, 25 bp, Homo sapien
aaacagttggggatatgaaaagcat

SEQ ID NO: 2031661 - DNA, 25 bp, Homo sapien
tgtgacccagtgatattctctccca

SEQ ID NO: 2031662 - DNA, 25 bp, Homo sapien
tcttaagtccagagtgattgtgacc

SEQ ID NO: 2031663 - DNA, 25 bp, Homo sapien
cattctgaatgctgggactttgcca

SEQ ID NO: 2031664 - DNA, 25 bp, Homo sapien
ccagttattggtgccatctatggca

SEQ ID NO: 2031665 - DNA, 25 bp, Homo sapien
cacagatccggcactgtgggtttcg

SEQ ID NO: 2031666 - DNA, 25 bp, Homo sapien
gcactgtgggtttcggacgggccga

SEQ ID NO: 2031667 - DNA, 25 bp, Homo sapien
tgttgccatcacagatccggcactg

SEQ ID NO: 2031668 - DNA, 25 bp, Homo sapien
ggggtttgcgctgttgccatcacag

SEQ ID NO: 2031669 - DNA, 25 bp, Homo sapien
ttctcgccacaggtggcattggtgc

SEQ ID NO: 2031670 - DNA, 25 bp, Homo sapien
gcattggtgctgatgtgagcattgc

SEQ ID NO: 2031671 - DNA, 25 bp, Homo sapien
aagtttgcagaacatctccggcccc

SEQ ID NO: 2031672 - DNA, 25 bp, Homo sapien
caagattgagaatggcaggaaacag

SEQ ID NO: 2031673 - DNA, 25 bp, Homo sapien
gcgggtcgggaaggcgcatcagtgc

SEQ ID NO: 2031674 - DNA, 25 bp, Homo sapien
tattgcacaaaaagcgcgggtcggg

SEQ ID NO: 2031675 - DNA, 25 bp, Homo sapien
gggcgcccttctcgccgcgtctctc

SEQ ID NO: 2031676 - DNA, 25 bp, Homo sapien
atcagtgccctggacgccgcctgcg

SEQ ID NO: 2031677 - DNA, 25 bp, Homo sapien
ccgccgcgacccagcttgcgcagcc

SEQ ID NO: 2031678 - DNA, 25 bp, Homo sapien
cgccgcgacccagcttgcgcagccg

SEQ ID NO: 2031679 - DNA, 25 bp, Homo sapien
ccgcgacccagcttgcgcagccgga

SEQ ID NO: 2031680 - DNA, 25 bp, Homo sapien
gccgcgacccagcttgcgcagccgg

SEQ ID NO: 2031681 - DNA, 25 bp, Homo sapien
gcggcgacacacagcagcaagacca

SEQ ID NO: 2031682 - DNA, 25 bp, Homo sapien
agcagcaagaccaggagcacgcccc

SEQ ID NO: 2031683 - DNA, 25 bp, Homo sapien
ggcactgcgcggcgacacacagcag

SEQ ID NO: 2031684 - DNA, 25 bp, Homo sapien
tgcgcggcgacacacagcagcaaga

SEQ ID NO: 2031685 - DNA, 25 bp, Homo sapien
gcgcccgcctggaacgctccacggg

SEQ ID NO: 2031686 - DNA, 25 bp, Homo sapien
gcctggaacgctccacgggacgcga

SEQ ID NO: 2031687 - DNA, 25 bp, Homo sapien
tggaacgctccacgggacgcgagtc

SEQ ID NO: 2031688 - DNA, 25 bp, Homo sapien
tccacgggacgcgagtccgcgctgc

SEQ ID NO: 2031689 - DNA, 25 bp, Homo sapien
tagatacccttactgctggagagag

SEQ ID NO: 2031690 - DNA, 25 bp, Homo sapien
gaaggcaaggtcacttggacttaat

SEQ ID NO: 2031691 - DNA, 25 bp, Homo sapien
ggattccgagaaactatgtgcccag

SEQ ID NO: 2031692 - DNA, 25 bp, Homo sapien
tcctgacacgcaacttcaactgctg

SEQ ID NO: 2031693 - DNA, 25 bp, Homo sapien
tccaggccttaggaatggagatcgg

SEQ ID NO: 2031694 - DNA, 25 bp, Homo sapien
gctcttagcaaggtcagttcatcca

SEQ ID NO: 2031695 - DNA, 25 bp, Homo sapien
tcacagggaaagcttaagtacatct

SEQ ID NO: 2031696 - DNA, 25 bp, Homo sapien
catattacgtgttctcctgctgact

SEQ ID NO: 2031697 - DNA, 25 bp, Homo sapien
cggatatatgagcttcccgaatctc

SEQ ID NO: 2031698 - DNA, 25 bp, Homo sapien
tcagcctcattaataccgggtacct

SEQ ID NO: 2031699 - DNA, 25 bp, Homo sapien
ggccacggaggcagaatgcgtctcc

SEQ ID NO: 2031700 - DNA, 25 bp, Homo sapien
gaatgcgtctccccactagatgcag

SEQ ID NO: 2031701 - DNA, 25 bp, Homo sapien
ttagggatgccgttcatagcagagg

SEQ ID NO: 2031702 - DNA, 25 bp, Homo sapien
aattgagcgttgtgattttgcatgc

SEQ ID NO: 2031703 - DNA, 25 bp, Homo sapien
agggctccagaattgagcgttgtga

SEQ ID NO: 2031704 - DNA, 25 bp, Homo sapien
tttgcatgcgctctccatgacagcc

SEQ ID NO: 2031705 - DNA, 25 bp, Homo sapien
catcctcccgcatgtgaatggcctt

SEQ ID NO: 2031706 - DNA, 25 bp, Homo sapien
tgccgattccgaggaaagctacagt

SEQ ID NO: 2031707 - DNA, 25 bp, Homo sapien
cctgtgccccgaagggaatgttgca

SEQ ID NO: 2031708 - DNA, 25 bp, Homo sapien
tttagcagaagtggcggctggccct

SEQ ID NO: 2031709 - DNA, 25 bp, Homo sapien
gctgcaacagtttccaagttgttca

SEQ ID NO: 2031710 - DNA, 25 bp, Homo sapien
atcttgtcatattccccatagagct

SEQ ID NO: 2031711 - DNA, 25 bp, Homo sapien
tgcaacagtttccaagttgttcagg

SEQ ID NO: 2031712 - DNA, 25 bp, Homo sapien
tcatcttgtcatattccccatagag

SEQ ID NO: 2031713 - DNA, 25 bp, Homo sapien
aggtaaaggctttccaggtggctgg

SEQ ID NO: 2031714 - DNA, 25 bp, Homo sapien
gttcatgagcattaccagggcagag

SEQ ID NO: 2031715 - DNA, 25 bp, Homo sapien
ttaaggggggcaagctcactggcag

SEQ ID NO: 2031716 - DNA, 25 bp, Homo sapien
tggaggtaaaggctttccaggtggc

SEQ ID NO: 2031717 - DNA, 25 bp, Homo sapien
gaagagcagaaacctcggggaaatg

SEQ ID NO: 2031718 - DNA, 25 bp, Homo sapien
gagcagaaacctcggggaaatgcag

SEQ ID NO: 2031719 - DNA, 25 bp, Homo sapien
aacctcggggaaatgcagggaccag

SEQ ID NO: 2031720 - DNA, 25 bp, Homo sapien
ctggaagagcagaaacctcggggaa

SEQ ID NO: 2031721 - DNA, 25 bp, Homo sapien
ctggctgctgcttcggggcagagct

SEQ ID NO: 2031722 - DNA, 25 bp, Homo sapien
tgcttcggggcagagctcagaactt

SEQ ID NO: 2031723 - DNA, 25 bp, Homo sapien
ttcggggcagagctcagaacttggc

SEQ ID NO: 2031724 - DNA, 25 bp, Homo sapien
cggggcagagctcagaacttggcat

SEQ ID NO: 2031725 - DNA, 25 bp, Homo sapien
cctcccatttgcagagagcaaacca

SEQ ID NO: 2031726 - DNA, 25 bp, Homo sapien
cctcttgaaacttaagttgagcaga

SEQ ID NO: 2031727 - DNA, 25 bp, Homo sapien
gcagaatcaccgttacatgaagcca

SEQ ID NO: 2031728 - DNA, 25 bp, Homo sapien
gattattccgagaacagcgacacgg

SEQ ID NO: 2031729 - DNA, 25 bp, Homo sapien
caggctcttgcagtctccagtgctc

SEQ ID NO: 2031730 - DNA, 25 bp, Homo sapien
gttagcccagtaaatggatttcctg

SEQ ID NO: 2031731 - DNA, 25 bp, Homo sapien
ggattaggactgaacgaacaggact

SEQ ID NO: 2031732 - DNA, 25 bp, Homo sapien
ggttacccagctccattgaagacaa

SEQ ID NO: 2031733 - DNA, 25 bp, Homo sapien
tacctgaaggctagggttagcccag

SEQ ID NO: 2031734 - DNA, 25 bp, Homo sapien
ctctgtacagagtcatttaattccc

SEQ ID NO: 2031735 - DNA, 25 bp, Homo sapien
ccagaggtggccgtggaattgacat

SEQ ID NO: 2031736 - DNA, 25 bp, Homo sapien
cacagcaaccttatatgatgggtat

SEQ ID NO: 2031737 - DNA, 25 bp, Homo sapien
tatgtatgaaaccatgcactatgtg

SEQ ID NO: 2031738 - DNA, 25 bp, Homo sapien
ccacttgggctcacgctgaatttcc

SEQ ID NO: 2031739 - DNA, 25 bp, Homo sapien
gaagaaccacttgggctcacgctga

SEQ ID NO: 2031740 - DNA, 25 bp, Homo sapien
aaccacttgggctcacgctgaattt

SEQ ID NO: 2031741 - DNA, 25 bp, Homo sapien
agaaccacttgggctcacgctgaat

SEQ ID NO: 2031742 - DNA, 25 bp, Homo sapien
gttcctcagaagtcagtgtgcccgg

SEQ ID NO: 2031743 - DNA, 25 bp, Homo sapien
gttctttggtcttgagtgacttggg

SEQ ID NO: 2031744 - DNA, 25 bp, Homo sapien
tatcttcccgtctcctaaaggtcat

SEQ ID NO: 2031745 - DNA, 25 bp, Homo sapien
cagtgtgcccggacatggcactgtg

SEQ ID NO: 2031746 - DNA, 25 bp, Homo sapien
gaagtggcaccaagagtgtgcccac

SEQ ID NO: 2031747 - DNA, 25 bp, Homo sapien
agggaagtggcaccaagagtgtgcc

SEQ ID NO: 2031748 - DNA, 25 bp, Homo sapien
caaccctgttaattggtcatcattt

SEQ ID NO: 2031749 - DNA, 25 bp, Homo sapien
gacaaccctgttaattggtcatcat

SEQ ID NO: 2031750 - DNA, 25 bp, Homo sapien
ccatgtgcggagagtcgcaaatcag

SEQ ID NO: 2031751 - DNA, 25 bp, Homo sapien
tgtgcggagagtcgcaaatcagtgt

SEQ ID NO: 2031752 - DNA, 25 bp, Homo sapien
cggagagtcgcaaatcagtgtggaa

SEQ ID NO: 2031753 - DNA, 25 bp, Homo sapien
agagtcgcaaatcagtgtggaatca

SEQ ID NO: 2031754 - DNA, 25 bp, Homo sapien
caggcttccatgagtggtcaaatcc

SEQ ID NO: 2031755 - DNA, 25 bp, Homo sapien
acaggcttccatgagtggtcaaatc

SEQ ID NO: 2031756 - DNA, 25 bp, Homo sapien
ctcggactctaggactctccatggg

SEQ ID NO: 2031757 - DNA, 25 bp, Homo sapien
ctcttctgcgtgacacatttcctgg

SEQ ID NO: 2031758 - DNA, 25 bp, Homo sapien
tcactcttctgcgtgacacatttcc

SEQ ID NO: 2031759 - DNA, 25 bp, Homo sapien
cctggagaggtccatgtcaacccct

SEQ ID NO: 2031760 - DNA, 25 bp, Homo sapien
ggcagtcacgcctagaatcctttgt

SEQ ID NO: 2031761 - DNA, 25 bp, Homo sapien
agcaggtggcactctcgttttagga

SEQ ID NO: 2031762 - DNA, 25 bp, Homo sapien
gatcggagtctgacgatggtcagca

SEQ ID NO: 2031763 - DNA, 25 bp, Homo sapien
gggcacctgccttgaaatacccgcg

SEQ ID NO: 2031764 - DNA, 25 bp, Homo sapien
ggcacagacaaaaggccaagctgaa

SEQ ID NO: 2031765 - DNA, 25 bp, Homo sapien
agaggaataatgaagtggatgggct

SEQ ID NO: 2031766 - DNA, 25 bp, Homo sapien
gaggtgtgggcagcctctgaaggca

SEQ ID NO: 2031767 - DNA, 25 bp, Homo sapien
caggagcccgtgcatttgctgtggc

SEQ ID NO: 2031768 - DNA, 25 bp, Homo sapien
ggatgttcttgtcaaaagaggaata

SEQ ID NO: 2031769 - DNA, 25 bp, Homo sapien
aaaacagtaacgtcctcacagcagc

SEQ ID NO: 2031770 - DNA, 25 bp, Homo sapien
tgttcctgccagcaagggctctacg

SEQ ID NO: 2031771 - DNA, 25 bp, Homo sapien
tacggcagtctcgagaatcttctga

SEQ ID NO: 2031772 - DNA, 25 bp, Homo sapien
taggccctgcgctggtttgatggaa

SEQ ID NO: 2031773 - DNA, 25 bp, Homo sapien
aactatagtgctgtcaccctccaag

SEQ ID NO: 2031774 - DNA, 25 bp, Homo sapien
gactgggtgatttgttacccgagaa

SEQ ID NO: 2031775 - DNA, 25 bp, Homo sapien
tctcaggctatgttggttccccaag

SEQ ID NO: 2031776 - DNA, 25 bp, Homo sapien
catttatatgggctagaagactgca

SEQ ID NO: 2031777 - DNA, 25 bp, Homo sapien
gaaggacagggatggacaacctaca

SEQ ID NO: 2031778 - DNA, 25 bp, Homo sapien
aaacctccaagctccatgaatgctg

SEQ ID NO: 2031779 - DNA, 25 bp, Homo sapien
accatctgtgtgttcgtctccctga

SEQ ID NO: 2031780 - DNA, 25 bp, Homo sapien
agcacactgccgtaaccatctgtgt

SEQ ID NO: 2031781 - DNA, 25 bp, Homo sapien
tgtcctattgcctataatgtgtcca

SEQ ID NO: 2031782 - DNA, 25 bp, Homo sapien
gtcctattgcctataatgtgtccag

SEQ ID NO: 2031783 - DNA, 25 bp, Homo sapien
tattgcctataatgtgtccagttcc

SEQ ID NO: 2031784 - DNA, 25 bp, Homo sapien
cctattgcctataatgtgtccagtt

SEQ ID NO: 2031785 - DNA, 25 bp, Homo sapien
caccagtgtgggtcgagggaccagg

SEQ ID NO: 2031786 - DNA, 25 bp, Homo sapien
tgacaccagtgtgggtcgagggacc

SEQ ID NO: 2031787 - DNA, 25 bp, Homo sapien
ctttgacaccagtgtgggtcgaggg

SEQ ID NO: 2031788 - DNA, 25 bp, Homo sapien
acaccagtgtgggtcgagggaccag

SEQ ID NO: 2031789 - DNA, 25 bp, Homo sapien
tgtagccaaaccataccagacagca

SEQ ID NO: 2031790 - DNA, 25 bp, Homo sapien
ccctattgcatgtctctgtagccaa

SEQ ID NO: 2031791 - DNA, 25 bp, Homo sapien
ccagctcatggctgcactgaggagt

SEQ ID NO: 2031792 - DNA, 25 bp, Homo sapien
gagcagaggcgttttgcacctgagc

SEQ ID NO: 2031793 - DNA, 25 bp, Homo sapien
tactgttggttaaattgagtcaccc

SEQ ID NO: 2031794 - DNA, 25 bp, Homo sapien
tggagcgctggattaggaagcccca

SEQ ID NO: 2031795 - DNA, 25 bp, Homo sapien
ggcagattgtctaaccaagctactg

SEQ ID NO: 2031796 - DNA, 25 bp, Homo sapien
caagtcagttacatctctgggtcac

SEQ ID NO: 2031797 - DNA, 25 bp, Homo sapien
ggtctaatgcgagtttgaacctcca

SEQ ID NO: 2031798 - DNA, 25 bp, Homo sapien
tgatcaatcagcaggatagaattgc

SEQ ID NO: 2031799 - DNA, 25 bp, Homo sapien
tattaatagattacgggagagagtc

SEQ ID NO: 2031800 - DNA, 25 bp, Homo sapien
cccacctcttgcattgagatgagag

SEQ ID NO: 2031801 - DNA, 25 bp, Homo sapien
tgcgcttagccaactcagtgtcacc

SEQ ID NO: 2031802 - DNA, 25 bp, Homo sapien
actgctgctcccttgcgcttagcca

SEQ ID NO: 2031803 - DNA, 25 bp, Homo sapien
tatagccacaaccagactgtttttc

SEQ ID NO: 2031804 - DNA, 25 bp, Homo sapien
taatatagccacaaccagactgttt

SEQ ID NO: 2031805 - DNA, 25 bp, Homo sapien
aggcacggcacgcttcttccggaag

SEQ ID NO: 2031806 - DNA, 25 bp, Homo sapien
cacatgtggtacaaaggtagaggag

SEQ ID NO: 2031807 - DNA, 25 bp, Homo sapien
catagttcccgctgaggtgcactga

SEQ ID NO: 2031808 - DNA, 25 bp, Homo sapien
tagctgggtaacgtggccgcatagt

SEQ ID NO: 2031809 - DNA, 25 bp, Homo sapien
ctttcaataacatctcgttctgacc

SEQ ID NO: 2031810 - DNA, 25 bp, Homo sapien
ataacatctcgttctgacccatgcc

SEQ ID NO: 2031811 - DNA, 25 bp, Homo sapien
agatgccagcaagatgtaaaactgt

SEQ ID NO: 2031812 - DNA, 25 bp, Homo sapien
taaaactgtaacacccccgacatca

SEQ ID NO: 2031813 - DNA, 25 bp, Homo sapien
cagaacccagtggcagaaaatgaca

SEQ ID NO: 2031814 - DNA, 25 bp, Homo sapien
ccagaacccagtggcagaaaatgac

SEQ ID NO: 2031815 - DNA, 25 bp, Homo sapien
gcgcttgtgaggacaggcctctgac

SEQ ID NO: 2031816 - DNA, 25 bp, Homo sapien
tcaggcgcttgtgaggacaggcctc

SEQ ID NO: 2031817 - DNA, 25 bp, Homo sapien
caggcgcttgtgaggacaggcctct

SEQ ID NO: 2031818 - DNA, 25 bp, Homo sapien
ggcgcttgtgaggacaggcctctga

SEQ ID NO: 2031819 - DNA, 25 bp, Homo sapien
tgcccactcgggcaatgttgtccca

SEQ ID NO: 2031820 - DNA, 25 bp, Homo sapien
atgctgtactcttgcccactcgggc

SEQ ID NO: 2031821 - DNA, 25 bp, Homo sapien
tgcatgctgtactcttgcccactcg

SEQ ID NO: 2031822 - DNA, 25 bp, Homo sapien
gggcaatgttgtcccagttgaggaa

SEQ ID NO: 2031823 - DNA, 25 bp, Homo sapien
tccactcattatagctcagcagctg

SEQ ID NO: 2031824 - DNA, 25 bp, Homo sapien
agctgccccagttggttctcaggtt

SEQ ID NO: 2031825 - DNA, 25 bp, Homo sapien
catgtttcttctcaaagctccactc

SEQ ID NO: 2031826 - DNA, 25 bp, Homo sapien
tctcaaagctccactcattatagct

SEQ ID NO: 2031827 - DNA, 25 bp, Homo sapien
caggccatccttgccatggacctgt

SEQ ID NO: 2031828 - DNA, 25 bp, Homo sapien
agttcttgtcaaggggatgatcgcc

SEQ ID NO: 2031829 - DNA, 25 bp, Homo sapien
ggacctgtaatgcactgctgttctc

SEQ ID NO: 2031830 - DNA, 25 bp, Homo sapien
tcaaggggatgatcgcctggtacat

SEQ ID NO: 2031831 - DNA, 25 bp, Homo sapien
tgctcctctggtctgcgccctgagg

SEQ ID NO: 2031832 - DNA, 25 bp, Homo sapien
tgagggctgtgagactctctgctcc

SEQ ID NO: 2031833 - DNA, 25 bp, Homo sapien
taagatggagaatcttcacaaacca

SEQ ID NO: 2031834 - DNA, 25 bp, Homo sapien
gggctgtgagactctctgctcctgg

SEQ ID NO: 2031835 - DNA, 25 bp, Homo sapien
aacaataataatgaacggtattgaa

SEQ ID NO: 2031836 - DNA, 25 bp, Homo sapien
caataataatgaacggtattgaaat

SEQ ID NO: 2031837 - DNA, 25 bp, Homo sapien
aataatgaacggtattgaaataata

SEQ ID NO: 2031838 - DNA, 25 bp, Homo sapien
taatgaacggtattgaaataatagt

SEQ ID NO: 2031839 - DNA, 25 bp, Homo sapien
cctttggaacaaaactatagtagag

SEQ ID NO: 2031840 - DNA, 25 bp, Homo sapien
tcaaaggcaggaaggtcctttggaa

SEQ ID NO: 2031841 - DNA, 25 bp, Homo sapien
gggagtcacattcaaaggcaggaag

SEQ ID NO: 2031842 - DNA, 25 bp, Homo sapien
tctaagcaactctcccaactctggg

SEQ ID NO: 2031843 - DNA, 25 bp, Homo sapien
caccgctgtattgtgatcagggcgc

SEQ ID NO: 2031844 - DNA, 25 bp, Homo sapien
tgcgtattcctgctgcaccgctgta

SEQ ID NO: 2031845 - DNA, 25 bp, Homo sapien
gatgtgtgtatggagccaagcaccc

SEQ ID NO: 2031846 - DNA, 25 bp, Homo sapien
gctcgctgaacggagcgtgcgtatt

SEQ ID NO: 2031847 - DNA, 25 bp, Homo sapien
ctccctggaaagcaactcccagaaa

SEQ ID NO: 2031848 - DNA, 25 bp, Homo sapien
cctggaaagcaactcccagaaaaga

SEQ ID NO: 2031849 - DNA, 25 bp, Homo sapien
tggaaagcaactcccagaaaagact

SEQ ID NO: 2031850 - DNA, 25 bp, Homo sapien
aagcaactcccagaaaagacttcac

SEQ ID NO: 2031851 - DNA, 25 bp, Homo sapien
gaagatgcgactatcaacaaggccg

SEQ ID NO: 2031852 - DNA, 25 bp, Homo sapien
gaccgtacacgcaggtgctgaggaa

SEQ ID NO: 2031853 - DNA, 25 bp, Homo sapien
tctcagatggattgtgcagacagtg

SEQ ID NO: 2031854 - DNA, 25 bp, Homo sapien
acaaggccgctaccctcaaagtgag

SEQ ID NO: 2031855 - DNA, 25 bp, Homo sapien
cacaaatgcaggttgccttcttctt

SEQ ID NO: 2031856 - DNA, 25 bp, Homo sapien
gcatgagggccgcaggcaaacacag

SEQ ID NO: 2031857 - DNA, 25 bp, Homo sapien
acacaaatgcaggttgccttcttct

SEQ ID NO: 2031858 - DNA, 25 bp, Homo sapien
gggccgcaggcaaacacaggcttgc

SEQ ID NO: 2031859 - DNA, 25 bp, Homo sapien
tggccccagtccacactctgccctg

SEQ ID NO: 2031860 - DNA, 25 bp, Homo sapien
gccccagtccacactctgccctgag

SEQ ID NO: 2031861 - DNA, 25 bp, Homo sapien
ctggccccagtccacactctgccct

SEQ ID NO: 2031862 - DNA, 25 bp, Homo sapien
cccagtccacactctgccctgagct

SEQ ID NO: 2031863 - DNA, 25 bp, Homo sapien
ggctatgaagagaacctttttgctc

SEQ ID NO: 2031864 - DNA, 25 bp, Homo sapien
agagaacctttttgctcccacccag

SEQ ID NO: 2031865 - DNA, 25 bp, Homo sapien
gcagggctatgaagagaaccttttt

SEQ ID NO: 2031866 - DNA, 25 bp, Homo sapien
agcagcagggctatgaagagaacct

SEQ ID NO: 2031867 - DNA, 25 bp, Homo sapien
tgagctgccagtccagtcctaagac

SEQ ID NO: 2031868 - DNA, 25 bp, Homo sapien
tgttcgtaacaatcctctaggtggg

SEQ ID NO: 2031869 - DNA, 25 bp, Homo sapien
tctctgacattcagtcgggctggac

SEQ ID NO: 2031870 - DNA, 25 bp, Homo sapien
taccccgtccaaggagctgtatgct

SEQ ID NO: 2031871 - DNA, 25 bp, Homo sapien
ttcccaggttcttttcagcagccat

SEQ ID NO: 2031872 - DNA, 25 bp, Homo sapien
cttcccaggttcttttcagcagcca

SEQ ID NO: 2031873 - DNA, 25 bp, Homo sapien
tgtctgaggaaggtcacggcacgtt

SEQ ID NO: 2031874 - DNA, 25 bp, Homo sapien
actcctacatttggcgtctccctta

SEQ ID NO: 2031875 - DNA, 25 bp, Homo sapien
cactggagagtggagtcacttgctc

SEQ ID NO: 2031876 - DNA, 25 bp, Homo sapien
catacgtaatcgttatcaccatggt

SEQ ID NO: 2031877 - DNA, 25 bp, Homo sapien
gcgaatcagacaagcacaagcacca

SEQ ID NO: 2031878 - DNA, 25 bp, Homo sapien
atcagccaggctgcagcgaatcaga

SEQ ID NO: 2031879 - DNA, 25 bp, Homo sapien
caaaagggactgtggctatcaagac

SEQ ID NO: 2031880 - DNA, 25 bp, Homo sapien
ttgctgcttccggacctaagtaggg

SEQ ID NO: 2031881 - DNA, 25 bp, Homo sapien
tatggctggtcaattcgggtctcca

SEQ ID NO: 2031882 - DNA, 25 bp, Homo sapien
tggctggtcaattcgggtctccagt

SEQ ID NO: 2031883 - DNA, 25 bp, Homo sapien
ggctggtcaattcgggtctccagtt

SEQ ID NO: 2031884 - DNA, 25 bp, Homo sapien
tggtcaattcgggtctccagttcct

SEQ ID NO: 2031885 - DNA, 25 bp, Homo sapien
gtcactgtcagcgatactcccaagc

SEQ ID NO: 2031886 - DNA, 25 bp, Homo sapien
actgtcagcgatactcccaagcctc

SEQ ID NO: 2031887 - DNA, 25 bp, Homo sapien
taggtcactgtcagcgatactccca

SEQ ID NO: 2031888 - DNA, 25 bp, Homo sapien
aggtcactgtcagcgatactcccaa

SEQ ID NO: 2031889 - DNA, 25 bp, Homo sapien
cctgagagattagacgcctgggagt

SEQ ID NO: 2031890 - DNA, 25 bp, Homo sapien
cttggaatcctgagagattagacgc

SEQ ID NO: 2031891 - DNA, 25 bp, Homo sapien
gagattagacgcctgggagtcgcca

SEQ ID NO: 2031892 - DNA, 25 bp, Homo sapien
ttagacgcctgggagtcgccagctg

SEQ ID NO: 2031893 - DNA, 25 bp, Homo sapien
ggagcagcagctgcaaaatgcccac

SEQ ID NO: 2031894 - DNA, 25 bp, Homo sapien
agcagctgcaaaatgcccacctgcc

SEQ ID NO: 2031895 - DNA, 25 bp, Homo sapien
agcagcagctgcaaaatgcccacct

SEQ ID NO: 2031896 - DNA, 25 bp, Homo sapien
gcagcagctgcaaaatgcccacctg

SEQ ID NO: 2031897 - DNA, 25 bp, Homo sapien
tcagctgatgcccgggatcatgcag

SEQ ID NO: 2031898 - DNA, 25 bp, Homo sapien
gcggctcctgggaacgctggcaggg

SEQ ID NO: 2031899 - DNA, 25 bp, Homo sapien
cggctcctgggaacgctggcagggt

SEQ ID NO: 2031900 - DNA, 25 bp, Homo sapien
tctatcactggaaatggcacaaacc

SEQ ID NO: 2031901 - DNA, 25 bp, Homo sapien
ctctcgtcgttaggaggagtatcta

SEQ ID NO: 2031902 - DNA, 25 bp, Homo sapien
tcggcccccatgtgaaggattctgc

SEQ ID NO: 2031903 - DNA, 25 bp, Homo sapien
tcagagtgcctctagaaagtcggcc

SEQ ID NO: 2031904 - DNA, 25 bp, Homo sapien
tctctggtagtctttctgatattct

SEQ ID NO: 2031905 - DNA, 25 bp, Homo sapien
gatccttgaattgcaacctcgtggg

SEQ ID NO: 2031906 - DNA, 25 bp, Homo sapien
tcgtgggaagcaagattcctggtcc

SEQ ID NO: 2031907 - DNA, 25 bp, Homo sapien
ttttcagtcataatggatccttgaa

SEQ ID NO: 2031908 - DNA, 25 bp, Homo sapien
acgggtaatttggcacgtgctgctc

SEQ ID NO: 2031909 - DNA, 25 bp, Homo sapien
ggtaatttggcacgtgctgctctat

SEQ ID NO: 2031910 - DNA, 25 bp, Homo sapien
aatttggcacgtgctgctctattgt

SEQ ID NO: 2031911 - DNA, 25 bp, Homo sapien
cgggtaatttggcacgtgctgctct

SEQ ID NO: 2031912 - DNA, 25 bp, Homo sapien
ccactctccaccttctcactaactc

SEQ ID NO: 2031913 - DNA, 25 bp, Homo sapien
taactcctccccttgagaggaagaa

SEQ ID NO: 2031914 - DNA, 25 bp, Homo sapien
taaaggaggattcatcccatgctct

SEQ ID NO: 2031915 - DNA, 25 bp, Homo sapien
gaagaaacgtggctgcctgctaggg

SEQ ID NO: 2031916 - DNA, 25 bp, Homo sapien
ccatccccgagaatagcacagttgt

SEQ ID NO: 2031917 - DNA, 25 bp, Homo sapien
cctgatggtccagcagcagtagaga

SEQ ID NO: 2031918 - DNA, 25 bp, Homo sapien
tccagagcaacacgatcagcctgtc

SEQ ID NO: 2031919 - DNA, 25 bp, Homo sapien
gcagtagagagcacgatttccccat

SEQ ID NO: 2031920 - DNA, 25 bp, Homo sapien
gcttgtcacgaaaggtgacagtgta

SEQ ID NO: 2031921 - DNA, 25 bp, Homo sapien
tgtatgttggtggaaatttagaaaa

SEQ ID NO: 2031922 - DNA, 25 bp, Homo sapien
ttggaccagctagaagcttgtcacg

SEQ ID NO: 2031923 - DNA, 25 bp, Homo sapien
acactgtggcctttggaccagctag

SEQ ID NO: 2031924 - DNA, 25 bp, Homo sapien
ttcaatgggtggctagagaatccct

SEQ ID NO: 2031925 - DNA, 25 bp, Homo sapien
tctggaatgccgaaggaggtactta

SEQ ID NO: 2031926 - DNA, 25 bp, Homo sapien
gatgtggctgcaccacctggactgc

SEQ ID NO: 2031927 - DNA, 25 bp, Homo sapien
gctaatgagctgtaggaaaaaccct

SEQ ID NO: 2031928 - DNA, 25 bp, Homo sapien
gatcaaggaagtcaccaggagacct

SEQ ID NO: 2031929 - DNA, 25 bp, Homo sapien
tgcaaggagagggtacagcgtgacc

SEQ ID NO: 2031930 - DNA, 25 bp, Homo sapien
gttctgcccgcacttggatcaagga

SEQ ID NO: 2031931 - DNA, 25 bp, Homo sapien
ctagttcaggatgcaggagtgcaag

SEQ ID NO: 2031932 - DNA, 25 bp, Homo sapien
agccacaaaaaagggcacctgctcc

SEQ ID NO: 2031933 - DNA, 25 bp, Homo sapien
gaaacagggcttcgctggtgacagt

SEQ ID NO: 2031934 - DNA, 25 bp, Homo sapien
cttaggtaggatacgaacagccaca

SEQ ID NO: 2031935 - DNA, 25 bp, Homo sapien
tgtcatttgttcaggtgaaacaggg

SEQ ID NO: 2031936 - DNA, 25 bp, Homo sapien
gatctgcatatcacgtggccgaggc

SEQ ID NO: 2031937 - DNA, 25 bp, Homo sapien
caaatcgtgcgtgtgcacaaggaca

SEQ ID NO: 2031938 - DNA, 25 bp, Homo sapien
ctgaagctaagtaaagtcgacacaa

SEQ ID NO: 2031939 - DNA, 25 bp, Homo sapien
tacacattcaaaaggtgagggaagc

SEQ ID NO: 2031940 - DNA, 25 bp, Homo sapien
tcccctgtttctcagcactttgcac

SEQ ID NO: 2031941 - DNA, 25 bp, Homo sapien
tctttctcccctgtttctcagcact

SEQ ID NO: 2031942 - DNA, 25 bp, Homo sapien
ttctcccctgtttctcagcactttg

SEQ ID NO: 2031943 - DNA, 25 bp, Homo sapien
tctcccctgtttctcagcactttgc

SEQ ID NO: 2031944 - DNA, 25 bp, Homo sapien
acacgggacaccgaggcatgatgag

SEQ ID NO: 2031945 - DNA, 25 bp, Homo sapien
agaacagcagaagcgcgccctgctt

SEQ ID NO: 2031946 - DNA, 25 bp, Homo sapien
tccgtgtactgcctgcggctcgctt

SEQ ID NO: 2031947 - DNA, 25 bp, Homo sapien
gatacagaaaccacgggttatgtcc

SEQ ID NO: 2031948 - DNA, 25 bp, Homo sapien
tgacacaggtggatagacggcaaat

SEQ ID NO: 2031949 - DNA, 25 bp, Homo sapien
caggatgacctttattacctgggtg

SEQ ID NO: 2031950 - DNA, 25 bp, Homo sapien
agtttcattaaggtccacatgcagt

SEQ ID NO: 2031951 - DNA, 25 bp, Homo sapien
cagaggaacccctcacggagaggat

SEQ ID NO: 2031952 - DNA, 25 bp, Homo sapien
gattgatcctgagcgctttgtagcc

SEQ ID NO: 2031953 - DNA, 25 bp, Homo sapien
agtgcttccctgctgccggttgctc

SEQ ID NO: 2031954 - DNA, 25 bp, Homo sapien
gatcactaggtgtagctgcgtccct

SEQ ID NO: 2031955 - DNA, 25 bp, Homo sapien
gccggcctttctgagaaacagctga

SEQ ID NO: 2031956 - DNA, 25 bp, Homo sapien
gcatcatgataacatcaggctcatc

SEQ ID NO: 2031957 - DNA, 25 bp, Homo sapien
cagcaggcatgttctcgttcctttt

SEQ ID NO: 2031958 - DNA, 25 bp, Homo sapien
caggcatgttctcgttcctttttca

SEQ ID NO: 2031959 - DNA, 25 bp, Homo sapien
acagcatcatgataacatcaggctc

SEQ ID NO: 2031960 - DNA, 25 bp, Homo sapien
gacacagtgagcaatataacccatc

SEQ ID NO: 2031961 - DNA, 25 bp, Homo sapien
taaaatccgtatgatgaccttctgg

SEQ ID NO: 2031962 - DNA, 25 bp, Homo sapien
gagagatttctttccggttcaggga

SEQ ID NO: 2031963 - DNA, 25 bp, Homo sapien
agtcagattcttctcgtggacacag

SEQ ID NO: 2031964 - DNA, 25 bp, Homo sapien
tacaaatcccgtagatagaactgtg

SEQ ID NO: 2031965 - DNA, 25 bp, Homo sapien
aaatcctttgtaaatctctagtctg

SEQ ID NO: 2031966 - DNA, 25 bp, Homo sapien
tgtttaacgtgaaaggtgcaaaatc

SEQ ID NO: 2031967 - DNA, 25 bp, Homo sapien
tttccatccgaatatctgtttaacg

SEQ ID NO: 2031968 - DNA, 25 bp, Homo sapien
acgctgcatacatcgtgggcttaac

SEQ ID NO: 2031969 - DNA, 25 bp, Homo sapien
cacgctgcatacatcgtgggcttaa

SEQ ID NO: 2031970 - DNA, 25 bp, Homo sapien
tcacgctgcatacatcgtgggctta

SEQ ID NO: 2031971 - DNA, 25 bp, Homo sapien
tctctgttggttggttagtcaggag

SEQ ID NO: 2031972 - DNA, 25 bp, Homo sapien
gcttctgtttcaatatccgggatct

SEQ ID NO: 2031973 - DNA, 25 bp, Homo sapien
cactacgggtggatgaatggttcag

SEQ ID NO: 2031974 - DNA, 25 bp, Homo sapien
aatggttcaggtattgtaagtgcac

SEQ ID NO: 2031975 - DNA, 25 bp, Homo sapien
gagctgatactgctcagttccaagg

SEQ ID NO: 2031976 - DNA, 25 bp, Homo sapien
tgcgtgatgaaaccttgccagtgaa

SEQ ID NO: 2031977 - DNA, 25 bp, Homo sapien
tgggagcaaaaccagggctagatac

SEQ ID NO: 2031978 - DNA, 25 bp, Homo sapien
cagccaaactgttagggttgggagc

SEQ ID NO: 2031979 - DNA, 25 bp, Homo sapien
agcatgcctggagtattttggaaca

SEQ ID NO: 2031980 - DNA, 25 bp, Homo sapien
catgagaagcatgcctggagtattt

SEQ ID NO: 2031981 - DNA, 25 bp, Homo sapien
cttgaagccagcatgagaagcatgc

SEQ ID NO: 2031982 - DNA, 25 bp, Homo sapien
tattttggaacaggtattgtgtggg

SEQ ID NO: 2031983 - DNA, 25 bp, Homo sapien
ctagctgcaggagggagtaacctgc

SEQ ID NO: 2031984 - DNA, 25 bp, Homo sapien
gcctgcaccggtaagcttgcttgat

SEQ ID NO: 2031985 - DNA, 25 bp, Homo sapien
gtaagcttgcttgatgcacaccagg

SEQ ID NO: 2031986 - DNA, 25 bp, Homo sapien
gccattgtgtgctcttgctgcctgc

SEQ ID NO: 2031987 - DNA, 25 bp, Homo sapien
cccaagaggtgcctagaggaagacg

SEQ ID NO: 2031988 - DNA, 25 bp, Homo sapien
tgggcctctaggtgctgtcagggtt

SEQ ID NO: 2031989 - DNA, 25 bp, Homo sapien
gaggaagacgctgcgcccctcagtt

SEQ ID NO: 2031990 - DNA, 25 bp, Homo sapien
tctgctggactgagaacaggctcac

SEQ ID NO: 2031991 - DNA, 25 bp, Homo sapien
aagacaacaattctccaaaggctga

SEQ ID NO: 2031992 - DNA, 25 bp, Homo sapien
cagaacctgaattcatgcttggaga

SEQ ID NO: 2031993 - DNA, 25 bp, Homo sapien
gaacctgaattcatgcttggagaag

SEQ ID NO: 2031994 - DNA, 25 bp, Homo sapien
acagaacctgaattcatgcttggag

SEQ ID NO: 2031995 - DNA, 25 bp, Homo sapien
ctgcagaagcggctggcccagtggc

SEQ ID NO: 2031996 - DNA, 25 bp, Homo sapien
gcccctctgttggttcaagatcctg

SEQ ID NO: 2031997 - DNA, 25 bp, Homo sapien
caagatcctgcattggggctgcaga

SEQ ID NO: 2031998 - DNA, 25 bp, Homo sapien
cctctgttggttcaagatcctgcat

SEQ ID NO: 2031999 - DNA, 25 bp, Homo sapien
tttggccttgactcttcttcctaac

SEQ ID NO: 2032000 - DNA, 25 bp, Homo sapien
gcctgtttggccttgactcttcttc

SEQ ID NO: 2032001 - DNA, 25 bp, Homo sapien
gggctttgcctgtttggccttgact

SEQ ID NO: 2032002 - DNA, 25 bp, Homo sapien
ctgggctttgcctgtttggccttga

SEQ ID NO: 2032003 - DNA, 25 bp, Homo sapien
gcaggatccatgtgaggccagatgt

SEQ ID NO: 2032004 - DNA, 25 bp, Homo sapien
tgctgtcaggagtatctgtttgtct

SEQ ID NO: 2032005 - DNA, 25 bp, Homo sapien
ggtctgcaggatccatgtgaggcca

SEQ ID NO: 2032006 - DNA, 25 bp, Homo sapien
gatcctgagtgatggacttcccatt

SEQ ID NO: 2032007 - DNA, 25 bp, Homo sapien
cacaaacatcaacaacgaaaacttg

SEQ ID NO: 2032008 - DNA, 25 bp, Homo sapien
aacttgattcctgtggaatatgtgc

SEQ ID NO: 2032009 - DNA, 25 bp, Homo sapien
tctggagggttaagagtgagacaca

SEQ ID NO: 2032010 - DNA, 25 bp, Homo sapien
gaggttcgtgaccagtttggacata

SEQ ID NO: 2032011 - DNA, 25 bp, Homo sapien
cttatcccagttagcagagaaggta

SEQ ID NO: 2032012 - DNA, 25 bp, Homo sapien
gcttcttatcccagttagcagagaa

SEQ ID NO: 2032013 - DNA, 25 bp, Homo sapien
ttggagagcttcttatcccagttag

SEQ ID NO: 2032014 - DNA, 25 bp, Homo sapien
gagagcttcttatcccagttagcag

SEQ ID NO: 2032015 - DNA, 25 bp, Homo sapien
aaactgctctattggaagttgcctg

SEQ ID NO: 2032016 - DNA, 25 bp, Homo sapien
tgtaacccatcagatttgctcttct

SEQ ID NO: 2032017 - DNA, 25 bp, Homo sapien
cagaattttacttgtaacccatcag

SEQ ID NO: 2032018 - DNA, 25 bp, Homo sapien
cttgttttggtggaaactgctctat

SEQ ID NO: 2032019 - DNA, 25 bp, Homo sapien
tgagtgaaaccctaaagcctttcac

SEQ ID NO: 2032020 - DNA, 25 bp, Homo sapien
tgcagtaatgagtgaaaccctaaag

SEQ ID NO: 2032021 - DNA, 25 bp, Homo sapien
taaagcctttcactccccggtcaga

SEQ ID NO: 2032022 - DNA, 25 bp, Homo sapien
tttcactccccggtcagacaagatg

SEQ ID NO: 2032023 - DNA, 25 bp, Homo sapien
tcttcagaagattgtagcacaacgc

SEQ ID NO: 2032024 - DNA, 25 bp, Homo sapien
ttgagaaatacagactaggagacag

SEQ ID NO: 2032025 - DNA, 25 bp, Homo sapien
gaaaacttcctattgcccaatgaca

SEQ ID NO: 2032026 - DNA, 25 bp, Homo sapien
tccagaaccctttaagaagacattg

SEQ ID NO: 2032027 - DNA, 25 bp, Homo sapien
acagtgatgtggatggtcctgaccc

SEQ ID NO: 2032028 - DNA, 25 bp, Homo sapien
gtgcctgtgtattagtttttaacaa

SEQ ID NO: 2032029 - DNA, 25 bp, Homo sapien
atgtggatggtcctgaccctgtgta

SEQ ID NO: 2032030 - DNA, 25 bp, Homo sapien
agtgatgtggatggtcctgaccctg

SEQ ID NO: 2032031 - DNA, 25 bp, Homo sapien
ttttgtgtgaattggctctgaggaa

SEQ ID NO: 2032032 - DNA, 25 bp, Homo sapien
aatctgacttgttgatgacagaccc

SEQ ID NO: 2032033 - DNA, 25 bp, Homo sapien
gaatgctgccctggactttcggttt

SEQ ID NO: 2032034 - DNA, 25 bp, Homo sapien
cttgagaagcgagtggactggaatc

SEQ ID NO: 2032035 - DNA, 25 bp, Homo sapien
cagcaggtacatggtgctgctaggg

SEQ ID NO: 2032036 - DNA, 25 bp, Homo sapien
tcactaggcccagctttgtgtatgt

SEQ ID NO: 2032037 - DNA, 25 bp, Homo sapien
aaaatgacgtccctgctgaagtcag

SEQ ID NO: 2032038 - DNA, 25 bp, Homo sapien
gagagttgagagtgaaatacttcac

SEQ ID NO: 2032039 - DNA, 25 bp, Homo sapien
gaacaagcatgtgaggtaggtggca

SEQ ID NO: 2032040 - DNA, 25 bp, Homo sapien
ccagaacaagcatgtgaggtaggtg

SEQ ID NO: 2032041 - DNA, 25 bp, Homo sapien
aacaagcatgtgaggtaggtggcat

SEQ ID NO: 2032042 - DNA, 25 bp, Homo sapien
ccccagaacaagcatgtgaggtagg

SEQ ID NO: 2032043 - DNA, 25 bp, Homo sapien
tccttttgggcctccggatatgggc

SEQ ID NO: 2032044 - DNA, 25 bp, Homo sapien
ttggtttagtccagcagccaggcgg

SEQ ID NO: 2032045 - DNA, 25 bp, Homo sapien
tcctttgcagggttatagctgtctc

SEQ ID NO: 2032046 - DNA, 25 bp, Homo sapien
cctgtcattactctgggtgggacaa

SEQ ID NO: 2032047 - DNA, 25 bp, Homo sapien
ttggtgtcgtttccatgaacagagc

SEQ ID NO: 2032048 - DNA, 25 bp, Homo sapien
ctcagacactgtccaagttggggcg

SEQ ID NO: 2032049 - DNA, 25 bp, Homo sapien
cccagtgccttagcacttggtgtcg

SEQ ID NO: 2032050 - DNA, 25 bp, Homo sapien
ggcggctgaaaaaggctccctgagc

SEQ ID NO: 2032051 - DNA, 25 bp, Homo sapien
ccttcactcctcttggaatccccat

SEQ ID NO: 2032052 - DNA, 25 bp, Homo sapien
cccttcactcctcttggaatcccca

SEQ ID NO: 2032053 - DNA, 25 bp, Homo sapien
tcccttcactcctcttggaatcccc

SEQ ID NO: 2032054 - DNA, 25 bp, Homo sapien
cttcccttcactcctcttggaatcc

SEQ ID NO: 2032055 - DNA, 25 bp, Homo sapien
gggaccttgtcatctcagcgagtag

SEQ ID NO: 2032056 - DNA, 25 bp, Homo sapien
cattttagagcaccctgaagttggg

SEQ ID NO: 2032057 - DNA, 25 bp, Homo sapien
tgttcaacatgcaggtcttttcagc

SEQ ID NO: 2032058 - DNA, 25 bp, Homo sapien
gagcctttggctacagtcttttgga

SEQ ID NO: 2032059 - DNA, 25 bp, Homo sapien
gtaacgatttcaacaattccaggaa

SEQ ID NO: 2032060 - DNA, 25 bp, Homo sapien
tatgtaacgatttcaacaattccag

SEQ ID NO: 2032061 - DNA, 25 bp, Homo sapien
tgtaacgatttcaacaattccagga

SEQ ID NO: 2032062 - DNA, 25 bp, Homo sapien
taacgatttcaacaattccaggaaa

SEQ ID NO: 2032063 - DNA, 25 bp, Homo sapien
gtcattctttctggcgagctctgtg

SEQ ID NO: 2032064 - DNA, 25 bp, Homo sapien
ctgtggggaacccattaaaatctgg

SEQ ID NO: 2032065 - DNA, 25 bp, Homo sapien
ctttagccagccaggacagtcattc

SEQ ID NO: 2032066 - DNA, 25 bp, Homo sapien
acaagcctggggaaactgtgtgccc

SEQ ID NO: 2032067 - DNA, 25 bp, Homo sapien
catttcattatacccatttctctgc

SEQ ID NO: 2032068 - DNA, 25 bp, Homo sapien
ctgtgctgaaatccgagctttccat

SEQ ID NO: 2032069 - DNA, 25 bp, Homo sapien
tctcctgtgctgaaatccgagcttt

SEQ ID NO: 2032070 - DNA, 25 bp, Homo sapien
tcattatacccatttctctgctcca

SEQ ID NO: 2032071 - DNA, 25 bp, Homo sapien
tggatctgccattgacagcaaccag

SEQ ID NO: 2032072 - DNA, 25 bp, Homo sapien
tgtgctgttgccgtgggcagtccac

SEQ ID NO: 2032073 - DNA, 25 bp, Homo sapien
gagttaggacagtcattcctcccga

SEQ ID NO: 2032074 - DNA, 25 bp, Homo sapien
gcaaccagattacagtgaagcccgt

SEQ ID NO: 2032075 - DNA, 25 bp, Homo sapien
tgcccgagcagttggtgccatttaa

SEQ ID NO: 2032076 - DNA, 25 bp, Homo sapien
cttgcccgagcagttggtgccattt

SEQ ID NO: 2032077 - DNA, 25 bp, Homo sapien
gcccgagcagttggtgccatttaac

SEQ ID NO: 2032078 - DNA, 25 bp, Homo sapien
tggtgccatttaacagtttcttccc

SEQ ID NO: 2032079 - DNA, 25 bp, Homo sapien
gctcaatgaccagtgtgggtttcca

SEQ ID NO: 2032080 - DNA, 25 bp, Homo sapien
ctatgaatgctcaatgaccagtgtg

SEQ ID NO: 2032081 - DNA, 25 bp, Homo sapien
gaatgctcaatgaccagtgtgggtt

SEQ ID NO: 2032082 - DNA, 25 bp, Homo sapien
tatgaatgctcaatgaccagtgtgg

SEQ ID NO: 2032083 - DNA, 25 bp, Homo sapien
taggagtgacaatactacgagagcc

SEQ ID NO: 2032084 - DNA, 25 bp, Homo sapien
ggttttgtgaactcctacaggtgtc

SEQ ID NO: 2032085 - DNA, 25 bp, Homo sapien
tacaggtgtctgtccatttgcatgc

SEQ ID NO: 2032086 - DNA, 25 bp, Homo sapien
gaaagtatgcctctgcctggtagga

SEQ ID NO: 2032087 - DNA, 25 bp, Homo sapien
gagagagacacttttccctgcctct

SEQ ID NO: 2032088 - DNA, 25 bp, Homo sapien
tctgaggggtcacagtccagcagtt

SEQ ID NO: 2032089 - DNA, 25 bp, Homo sapien
gggtcacagtccagcagttattcat

SEQ ID NO: 2032090 - DNA, 25 bp, Homo sapien
tccttttcactatatagctctggct

SEQ ID NO: 2032091 - DNA, 25 bp, Homo sapien
ccctttgcacacagtaacctttgga

SEQ ID NO: 2032092 - DNA, 25 bp, Homo sapien
gttgggttctgctgacgctggttta

SEQ ID NO: 2032093 - DNA, 25 bp, Homo sapien
ctttgcacacagtaacctttggaga

SEQ ID NO: 2032094 - DNA, 25 bp, Homo sapien
gctgacgctggtttactctgcatct

SEQ ID NO: 2032095 - DNA, 25 bp, Homo sapien
cggtcattttgctcggatagggaaa

SEQ ID NO: 2032096 - DNA, 25 bp, Homo sapien
accaggatgtcggtcattttgctcg

SEQ ID NO: 2032097 - DNA, 25 bp, Homo sapien
ctttgctgctttaccaggatgtcgg

SEQ ID NO: 2032098 - DNA, 25 bp, Homo sapien
ttctttgctgctttaccaggatgtc

SEQ ID NO: 2032099 - DNA, 25 bp, Homo sapien
tttctaatccttaaatctgcatagg

SEQ ID NO: 2032100 - DNA, 25 bp, Homo sapien
ctttctaatccttaaatctgcatag

SEQ ID NO: 2032101 - DNA, 25 bp, Homo sapien
tgaacatagtgaaatgtgtcattct

SEQ ID NO: 2032102 - DNA, 25 bp, Homo sapien
gaaatgtgtcattctttctaatcct

SEQ ID NO: 2032103 - DNA, 25 bp, Homo sapien
gtttccaagcaatatgggactgtgt

SEQ ID NO: 2032104 - DNA, 25 bp, Homo sapien
tttccaagcaatatgggactgtgtg

SEQ ID NO: 2032105 - DNA, 25 bp, Homo sapien
gactttgctgatcaaattgttatgt

SEQ ID NO: 2032106 - DNA, 25 bp, Homo sapien
aaattgttatgtgttgccatcttga

SEQ ID NO: 2032107 - DNA, 25 bp, Homo sapien
ctgatcaaattgttatgtgttgcca

SEQ ID NO: 2032108 - DNA, 25 bp, Homo sapien
ttattcatagactttgctgatcaaa

SEQ ID NO: 2032109 - DNA, 25 bp, Homo sapien
aaaggacgacagagatcaagcaccc

SEQ ID NO: 2032110 - DNA, 25 bp, Homo sapien
tcatttcgagtaccacaaaggacga

SEQ ID NO: 2032111 - DNA, 25 bp, Homo sapien
gagtaccacaaaggacgacagagat

SEQ ID NO: 2032112 - DNA, 25 bp, Homo sapien
gcaccccaaatctgtatgtgtcagg

SEQ ID NO: 2032113 - DNA, 25 bp, Homo sapien
cccaagtcacgatgagaatctggca

SEQ ID NO: 2032114 - DNA, 25 bp, Homo sapien
gctgaaaaccaaaacctggattctg

SEQ ID NO: 2032115 - DNA, 25 bp, Homo sapien
gggcaatgagacacgctgaaaacca

SEQ ID NO: 2032116 - DNA, 25 bp, Homo sapien
tttggaccaatgtgggcccaagtca

SEQ ID NO: 2032117 - DNA, 25 bp, Homo sapien
ttgtctcttatccgttgtattgcca

SEQ ID NO: 2032118 - DNA, 25 bp, Homo sapien
cattggattttcctagtttgtctag

SEQ ID NO: 2032119 - DNA, 25 bp, Homo sapien
tgtctcttatccgttgtattgccat

SEQ ID NO: 2032120 - DNA, 25 bp, Homo sapien
tcaaattgaagatcccatgggagga

SEQ ID NO: 2032121 - DNA, 25 bp, Homo sapien
cctgtttatgggaatggctgtgcat

SEQ ID NO: 2032122 - DNA, 25 bp, Homo sapien
cttctgtgaagcactgaaggctgtc

SEQ ID NO: 2032123 - DNA, 25 bp, Homo sapien
taagtgaaaccttagcactggcttc

SEQ ID NO: 2032124 - DNA, 25 bp, Homo sapien
gagggcagaggtaaagcaggtctct

SEQ ID NO: 2032125 - DNA, 25 bp, Homo sapien
taaagcaggtctctgctactccagg

SEQ ID NO: 2032126 - DNA, 25 bp, Homo sapien
ttctcccggtgtgaactcccagggc

SEQ ID NO: 2032127 - DNA, 25 bp, Homo sapien
actctcagtgaaagctttttcctcc

SEQ ID NO: 2032128 - DNA, 25 bp, Homo sapien
tctgcctttttactcatatggcatt

SEQ ID NO: 2032129 - DNA, 25 bp, Homo sapien
ctgcctttttactcatatggcattc

SEQ ID NO: 2032130 - DNA, 25 bp, Homo sapien
ctctgcctttttactcatatggcat

SEQ ID NO: 2032131 - DNA, 25 bp, Homo sapien
ctgtgacatgttcttaagtcttcga

SEQ ID NO: 2032132 - DNA, 25 bp, Homo sapien
tgttcttaagtcttcgagctgctct

SEQ ID NO: 2032133 - DNA, 25 bp, Homo sapien
tcttaagtcttcgagctgctctcat

SEQ ID NO: 2032134 - DNA, 25 bp, Homo sapien
acatgttcttaagtcttcgagctgc

SEQ ID NO: 2032135 - DNA, 25 bp, Homo sapien
cctgaatagtctcatgaagaaccaa

SEQ ID NO: 2032136 - DNA, 25 bp, Homo sapien
aaaacaccctgaatagtctcatgaa

SEQ ID NO: 2032137 - DNA, 25 bp, Homo sapien
aggcctgggaggtagcccactcagt

SEQ ID NO: 2032138 - DNA, 25 bp, Homo sapien
ggcctgggaggtagcccactcagtc

SEQ ID NO: 2032139 - DNA, 25 bp, Homo sapien
cagcactactgcaagttgtgagtta

SEQ ID NO: 2032140 - DNA, 25 bp, Homo sapien
tttcggcacccttttagctggcaga

SEQ ID NO: 2032141 - DNA, 25 bp, Homo sapien
agtaatcactcattaattgcctttc

SEQ ID NO: 2032142 - DNA, 25 bp, Homo sapien
gctggcagaattaccacccactatt

SEQ ID NO: 2032143 - DNA, 25 bp, Homo sapien
aaaactgaactcccaatgcggctat

SEQ ID NO: 2032144 - DNA, 25 bp, Homo sapien
ctgaactcccaatgcggctatgcat

SEQ ID NO: 2032145 - DNA, 25 bp, Homo sapien
aaactgaactcccaatgcggctatg

SEQ ID NO: 2032146 - DNA, 25 bp, Homo sapien
aactgaactcccaatgcggctatgc

SEQ ID NO: 2032147 - DNA, 25 bp, Homo sapien
gcctgtctgccggatgtgtctccag

SEQ ID NO: 2032148 - DNA, 25 bp, Homo sapien
ccacaactttgaggtgaaactgaca

SEQ ID NO: 2032149 - DNA, 25 bp, Homo sapien
gcctcgaagataagcccttgcctaa

SEQ ID NO: 2032150 - DNA, 25 bp, Homo sapien
tgactgggaagcatcagcctcgaag

SEQ ID NO: 2032151 - DNA, 25 bp, Homo sapien
ccacagagagctggatagtccctct

SEQ ID NO: 2032152 - DNA, 25 bp, Homo sapien
gagctggatagtccctctgtctgct

SEQ ID NO: 2032153 - DNA, 25 bp, Homo sapien
cagagagctggatagtccctctgtc

SEQ ID NO: 2032154 - DNA, 25 bp, Homo sapien
gagagctggatagtccctctgtctg

SEQ ID NO: 2032155 - DNA, 25 bp, Homo sapien
gtgctgctcccatccacctttgtag

SEQ ID NO: 2032156 - DNA, 25 bp, Homo sapien
tcattcggatggcttcccttgtgtt

SEQ ID NO: 2032157 - DNA, 25 bp, Homo sapien
gatggcttcccttgtgttgtaaagg

SEQ ID NO: 2032158 - DNA, 25 bp, Homo sapien
ccctgtggaatcatcaatgtggcag

SEQ ID NO: 2032159 - DNA, 25 bp, Homo sapien
aatagagaagggtgctagtacattc

SEQ ID NO: 2032160 - DNA, 25 bp, Homo sapien
gggcacaatctcgtacgtaggagaa

SEQ ID NO: 2032161 - DNA, 25 bp, Homo sapien
ttctgtggcagtgggtcttaatgga

SEQ ID NO: 2032162 - DNA, 25 bp, Homo sapien
tgaaaaatgaataacccaggaatag

SEQ ID NO: 2032163 - DNA, 25 bp, Homo sapien
gttcttgtcagcgataaagagaggg

SEQ ID NO: 2032164 - DNA, 25 bp, Homo sapien
cctgatggccttttggtctttcctg

SEQ ID NO: 2032165 - DNA, 25 bp, Homo sapien
tgcttctgttcttgtcagcgataaa

SEQ ID NO: 2032166 - DNA, 25 bp, Homo sapien
ttcctgccctctcaagaggatccag

SEQ ID NO: 2032167 - DNA, 25 bp, Homo sapien
ctcccttgataaatgaggccaaata

SEQ ID NO: 2032168 - DNA, 25 bp, Homo sapien
caaataaataatttcttgtcaccat

SEQ ID NO: 2032169 - DNA, 25 bp, Homo sapien
ccttgataaatgaggccaaataaat

SEQ ID NO: 2032170 - DNA, 25 bp, Homo sapien
tgataaatgaggccaaataaataat

SEQ ID NO: 2032171 - DNA, 25 bp, Homo sapien
tcctcttccattaatgtgtgcaaat

SEQ ID NO: 2032172 - DNA, 25 bp, Homo sapien
agcatagcggctagagagcctctcc

SEQ ID NO: 2032173 - DNA, 25 bp, Homo sapien
tctgtggcttgtggctctgcatacc

SEQ ID NO: 2032174 - DNA, 25 bp, Homo sapien
tcacggttttctgggatcagcatag

SEQ ID NO: 2032175 - DNA, 25 bp, Homo sapien
tgtggcttgtggctctgcataccca

SEQ ID NO: 2032176 - DNA, 25 bp, Homo sapien
tcagaggactgttcccagtctacat

SEQ ID NO: 2032177 - DNA, 25 bp, Homo sapien
gaggactgttcccagtctacatcct

SEQ ID NO: 2032178 - DNA, 25 bp, Homo sapien
ggactgttcccagtctacatcctgg

SEQ ID NO: 2032179 - DNA, 25 bp, Homo sapien
cagaggactgttcccagtctacatc

SEQ ID NO: 2032180 - DNA, 25 bp, Homo sapien
gatgtactaagagctgattcacggg

SEQ ID NO: 2032181 - DNA, 25 bp, Homo sapien
tactaagagctgattcacgggcttc

SEQ ID NO: 2032182 - DNA, 25 bp, Homo sapien
ctctcgtcaaaagatcaaagttgta

SEQ ID NO: 2032183 - DNA, 25 bp, Homo sapien
caccagatgtactaagagctgattc

SEQ ID NO: 2032184 - DNA, 25 bp, Homo sapien
caggtattgtggatcgtcgttgttc

SEQ ID NO: 2032185 - DNA, 25 bp, Homo sapien
ctggcaggtattgtggatcgtcgtt

SEQ ID NO: 2032186 - DNA, 25 bp, Homo sapien
tgttctccatcgagtgcctctgatt

SEQ ID NO: 2032187 - DNA, 25 bp, Homo sapien
tggatcgtcgttgttctccatcgag

SEQ ID NO: 2032188 - DNA, 25 bp, Homo sapien
taggaattctgtcagtaagctcttc

SEQ ID NO: 2032189 - DNA, 25 bp, Homo sapien
tttaggagcgtctcagagtgggatc

SEQ ID NO: 2032190 - DNA, 25 bp, Homo sapien
tattttggcattagactggtggcca

SEQ ID NO: 2032191 - DNA, 25 bp, Homo sapien
ctgaccgtagcctggttcatcagcc

SEQ ID NO: 2032192 - DNA, 25 bp, Homo sapien
ttgtttcctgaggatcatcaccttg

SEQ ID NO: 2032193 - DNA, 25 bp, Homo sapien
tctgtttgctcagggtcccgctgct

SEQ ID NO: 2032194 - DNA, 25 bp, Homo sapien
tctgactctgtttgctcagggtccc

SEQ ID NO: 2032195 - DNA, 25 bp, Homo sapien
atcaccttgggcagtccactcagcc

SEQ ID NO: 2032196 - DNA, 25 bp, Homo sapien
tggcactcccttggataattagagc

SEQ ID NO: 2032197 - DNA, 25 bp, Homo sapien
taattagagccatgtgatgaagtgg

SEQ ID NO: 2032198 - DNA, 25 bp, Homo sapien
aacaagattgacagcatggaattca

SEQ ID NO: 2032199 - DNA, 25 bp, Homo sapien
tcaaatctgtgaactagaaacaaga

SEQ ID NO: 2032200 - DNA, 25 bp, Homo sapien
gagcccctttcggtgttacagtgat

SEQ ID NO: 2032201 - DNA, 25 bp, Homo sapien
ctgagcccctttcggtgttacagtg

SEQ ID NO: 2032202 - DNA, 25 bp, Homo sapien
ttacagtgatgttttactagatccc

SEQ ID NO: 2032203 - DNA, 25 bp, Homo sapien
tcctgtgatgtttatcttccctttg

SEQ ID NO: 2032204 - DNA, 25 bp, Homo sapien
ccccaccacctttctcgagctctag

SEQ ID NO: 2032205 - DNA, 25 bp, Homo sapien
ccacctttctcgagctctagtcctt

SEQ ID NO: 2032206 - DNA, 25 bp, Homo sapien
cacctttctcgagctctagtccttg

SEQ ID NO: 2032207 - DNA, 25 bp, Homo sapien
caccacctttctcgagctctagtcc

SEQ ID NO: 2032208 - DNA, 25 bp, Homo sapien
caagggccttgaaataggtcgcata

SEQ ID NO: 2032209 - DNA, 25 bp, Homo sapien
ccttgaaataggtcgcataaagccc

SEQ ID NO: 2032210 - DNA, 25 bp, Homo sapien
tcccaagggccttgaaataggtcgc

SEQ ID NO: 2032211 - DNA, 25 bp, Homo sapien
taggtcgcataaagcccactgaagc

SEQ ID NO: 2032212 - DNA, 25 bp, Homo sapien
aagagacagcagccagtggagggca

SEQ ID NO: 2032213 - DNA, 25 bp, Homo sapien
ctaaagagacagcagccagtggagg

SEQ ID NO: 2032214 - DNA, 25 bp, Homo sapien
agacagcagccagtggagggcaaag

SEQ ID NO: 2032215 - DNA, 25 bp, Homo sapien
taaagagacagcagccagtggaggg

SEQ ID NO: 2032216 - DNA, 25 bp, Homo sapien
tggtccaatatatttcccttttgga

SEQ ID NO: 2032217 - DNA, 25 bp, Homo sapien
ctggtccaatatatttcccttttgg

SEQ ID NO: 2032218 - DNA, 25 bp, Homo sapien
tcactgaacagaagagactctgcat

SEQ ID NO: 2032219 - DNA, 25 bp, Homo sapien
tgatttttctgtagtcactgaacag

SEQ ID NO: 2032220 - DNA, 25 bp, Homo sapien
gatatggagtttgtcttgaattgct

SEQ ID NO: 2032221 - DNA, 25 bp, Homo sapien
agtttgtcttgaattgcttatctca

SEQ ID NO: 2032222 - DNA, 25 bp, Homo sapien
tggtgtaggatatggagtttgtctt

SEQ ID NO: 2032223 - DNA, 25 bp, Homo sapien
tgtaggatatggagtttgtcttgaa

SEQ ID NO: 2032224 - DNA, 25 bp, Homo sapien
gaagcacttgtttgctatcatacct

SEQ ID NO: 2032225 - DNA, 25 bp, Homo sapien
tcttagcattctggcagggtctgtg

SEQ ID NO: 2032226 - DNA, 25 bp, Homo sapien
catacctgggtgctatgagaatcac

SEQ ID NO: 2032227 - DNA, 25 bp, Homo sapien
gaatcacttgatagatctgcctcca

SEQ ID NO: 2032228 - DNA, 25 bp, Homo sapien
gtgactgtaggtccagttccttgag

SEQ ID NO: 2032229 - DNA, 25 bp, Homo sapien
gtgtgactgtaggtccagttccttg

SEQ ID NO: 2032230 - DNA, 25 bp, Homo sapien
ttagtatgaaggagtgtgactgtag

SEQ ID NO: 2032231 - DNA, 25 bp, Homo sapien
tgactgtaggtccagttccttgagc

SEQ ID NO: 2032232 - DNA, 25 bp, Homo sapien
ggtgattccatgtgccgtggcctat

SEQ ID NO: 2032233 - DNA, 25 bp, Homo sapien
gaagccgggtcttttctatattcag

SEQ ID NO: 2032234 - DNA, 25 bp, Homo sapien
acctggcttaggcactggtggccca

SEQ ID NO: 2032235 - DNA, 25 bp, Homo sapien
catgcagatgtacgtggtgattcca

SEQ ID NO: 2032236 - DNA, 25 bp, Homo sapien
tctacgtgaaggtcaataacgggcc

SEQ ID NO: 2032237 - DNA, 25 bp, Homo sapien
tgaaggtcaataacgggccactggg

SEQ ID NO: 2032238 - DNA, 25 bp, Homo sapien
ggccactggggaatcctatctggaa

SEQ ID NO: 2032239 - DNA, 25 bp, Homo sapien
ttactcaatgtctacgtgaaggtca

SEQ ID NO: 2032240 - DNA, 25 bp, Homo sapien
ctgtgagggtccgtgcagttctccc

SEQ ID NO: 2032241 - DNA, 25 bp, Homo sapien
tgcccttgggttgtattcagggacc

SEQ ID NO: 2032242 - DNA, 25 bp, Homo sapien
tgcatctcaaggaccaggtgccctt

SEQ ID NO: 2032243 - DNA, 25 bp, Homo sapien
tgtgttgggctcttcagttggctat

SEQ ID NO: 2032244 - DNA, 25 bp, Homo sapien
tcaatctttttcgacccggatgctg

SEQ ID NO: 2032245 - DNA, 25 bp, Homo sapien
aaacattcctatgattcccactggg

SEQ ID NO: 2032246 - DNA, 25 bp, Homo sapien
tacttcactagagcaatacctgtac

SEQ ID NO: 2032247 - DNA, 25 bp, Homo sapien
tgcacacacttggtatacttcacta

SEQ ID NO: 2032248 - DNA, 25 bp, Homo sapien
ggcatctttggccttaggtgcaaag

SEQ ID NO: 2032249 - DNA, 25 bp, Homo sapien
ggaagatgacccttgcctagacatt

SEQ ID NO: 2032250 - DNA, 25 bp, Homo sapien
gccttggcatctttggccttaggtg

SEQ ID NO: 2032251 - DNA, 25 bp, Homo sapien
gacattctgcgctgatttgggcctt

SEQ ID NO: 2032252 - DNA, 25 bp, Homo sapien
ggcaaggcagatgtactgggtgcag

SEQ ID NO: 2032253 - DNA, 25 bp, Homo sapien
ggcagatgtactgggtgcaggtgtg

SEQ ID NO: 2032254 - DNA, 25 bp, Homo sapien
ggtggctgcagtcaaggttgcacat

SEQ ID NO: 2032255 - DNA, 25 bp, Homo sapien
tgtggtggctgcagtcaaggttgca

SEQ ID NO: 2032256 - DNA, 25 bp, Homo sapien
atcttgtatcccgagatcttgatga

SEQ ID NO: 2032257 - DNA, 25 bp, Homo sapien
tatttttcgattgttcatttctcgc

SEQ ID NO: 2032258 - DNA, 25 bp, Homo sapien
gtatcccgagatcttgatgaacttg

SEQ ID NO: 2032259 - DNA, 25 bp, Homo sapien
ttctcgcttgtagaaatgcagttga

SEQ ID NO: 2032260 - DNA, 25 bp, Homo sapien
tccccacacttcactgtttaattcc

SEQ ID NO: 2032261 - DNA, 25 bp, Homo sapien
agcaaaggaattggggctggccatc

SEQ ID NO: 2032262 - DNA, 25 bp, Homo sapien
cagcaaaggaattggggctggccat

SEQ ID NO: 2032263 - DNA, 25 bp, Homo sapien
gtgtagacggcatgttttcctgttt

SEQ ID NO: 2032264 - DNA, 25 bp, Homo sapien
tgtcttcacactgtcattcccccgc

SEQ ID NO: 2032265 - DNA, 25 bp, Homo sapien
ccgctcttctccagtgtagacggca

SEQ ID NO: 2032266 - DNA, 25 bp, Homo sapien
tcttctccagtgtagacggcatgtt

SEQ ID NO: 2032267 - DNA, 25 bp, Homo sapien
gcttgatactaggagtttgaggaca

SEQ ID NO: 2032268 - DNA, 25 bp, Homo sapien
cactccatcatcgacagagtaaaac

SEQ ID NO: 2032269 - DNA, 25 bp, Homo sapien
tatttgccgggcactattccaagcc

SEQ ID NO: 2032270 - DNA, 25 bp, Homo sapien
cctgccagtagagtgacaagatttc

SEQ ID NO: 2032271 - DNA, 25 bp, Homo sapien
cccatttgtgatatgcagttttgtg

SEQ ID NO: 2032272 - DNA, 25 bp, Homo sapien
ttttttgtgatgacagtcgtactgt

SEQ ID NO: 2032273 - DNA, 25 bp, Homo sapien
tgttgcacttgaacagatgtatttg

SEQ ID NO: 2032274 - DNA, 25 bp, Homo sapien
tgtgtagctttcttgtatgcctgcc

SEQ ID NO: 2032275 - DNA, 25 bp, Homo sapien
tgctgcccttaaacacggattcagc

SEQ ID NO: 2032276 - DNA, 25 bp, Homo sapien
aaacacggattcagcactttccctg

SEQ ID NO: 2032277 - DNA, 25 bp, Homo sapien
ccttaaacacggattcagcactttc

SEQ ID NO: 2032278 - DNA, 25 bp, Homo sapien
acggattcagcactttccctgtgct

SEQ ID NO: 2032279 - DNA, 25 bp, Homo sapien
tgcatccagtgtcgctggcctcaga

SEQ ID NO: 2032280 - DNA, 25 bp, Homo sapien
ctggcctcagagcgggcaaagccag

SEQ ID NO: 2032281 - DNA, 25 bp, Homo sapien
agagcgggcaaagccagtcttagcc

SEQ ID NO: 2032282 - DNA, 25 bp, Homo sapien
cctcagagcgggcaaagccagtctt

SEQ ID NO: 2032283 - DNA, 25 bp, Homo sapien
ttaggacttgccaacttcatctgta

SEQ ID NO: 2032284 - DNA, 25 bp, Homo sapien
cagttaggacttgccaacttcatct

SEQ ID NO: 2032285 - DNA, 25 bp, Homo sapien
ggcctccagttaggacttgccaact

SEQ ID NO: 2032286 - DNA, 25 bp, Homo sapien
tccagttaggacttgccaacttcat

SEQ ID NO: 2032287 - DNA, 25 bp, Homo sapien
ggcagcatgtgaccacagggaaacc

SEQ ID NO: 2032288 - DNA, 25 bp, Homo sapien
cagcatgtgaccacagggaaaccag

SEQ ID NO: 2032289 - DNA, 25 bp, Homo sapien
tttgcttgacgtggagcctgagaat

SEQ ID NO: 2032290 - DNA, 25 bp, Homo sapien
ttgcattttgcttgacgtggagcct

SEQ ID NO: 2032291 - DNA, 25 bp, Homo sapien
tgcagtccgctggcagaagtgtgga

SEQ ID NO: 2032292 - DNA, 25 bp, Homo sapien
ttgcagtccgctggcagaagtgtgg

SEQ ID NO: 2032293 - DNA, 25 bp, Homo sapien
cttgcagtccgctggcagaagtgtg

SEQ ID NO: 2032294 - DNA, 25 bp, Homo sapien
gcagtccgctggcagaagtgtggag

SEQ ID NO: 2032295 - DNA, 25 bp, Homo sapien
gaatcagtacttcaagctgcccact

SEQ ID NO: 2032296 - DNA, 25 bp, Homo sapien
aatcagtacttcaagctgcccactc

SEQ ID NO: 2032297 - DNA, 25 bp, Homo sapien
tcagtacttcaagctgcccactcat

SEQ ID NO: 2032298 - DNA, 25 bp, Homo sapien
ctgaatcagtacttcaagctgccca

SEQ ID NO: 2032299 - DNA, 25 bp, Homo sapien
tggctcccatacttgccccggagga

SEQ ID NO: 2032300 - DNA, 25 bp, Homo sapien
ggctcccatacttgccccggaggaa

SEQ ID NO: 2032301 - DNA, 25 bp, Homo sapien
gctcccatacttgccccggaggaat

SEQ ID NO: 2032302 - DNA, 25 bp, Homo sapien
tctcttttctcaggatgatgttttt

SEQ ID NO: 2032303 - DNA, 25 bp, Homo sapien
tcttttgtgaagctcttcaaagctt

SEQ ID NO: 2032304 - DNA, 25 bp, Homo sapien
tctcaggatgatgtttttgcctgac

SEQ ID NO: 2032305 - DNA, 25 bp, Homo sapien
ttttgtgaagctcttcaaagctttc

SEQ ID NO: 2032306 - DNA, 25 bp, Homo sapien
ttgacatgggccagaagttctaagt

SEQ ID NO: 2032307 - DNA, 25 bp, Homo sapien
tcctggtaatcagggataaatttag

SEQ ID NO: 2032308 - DNA, 25 bp, Homo sapien
tatccaaggccatgaatcctttgac

SEQ ID NO: 2032309 - DNA, 25 bp, Homo sapien
ttccatttgcatagacatatccaag

SEQ ID NO: 2032310 - DNA, 25 bp, Homo sapien
ccctggttagttgtctttatgcaca

SEQ ID NO: 2032311 - DNA, 25 bp, Homo sapien
cccatcccttcactgttatctccta

SEQ ID NO: 2032312 - DNA, 25 bp, Homo sapien
actgttatctcctatcactgtcccc

SEQ ID NO: 2032313 - DNA, 25 bp, Homo sapien
cactgtcccctggttagttgtcttt

SEQ ID NO: 2032314 - DNA, 25 bp, Homo sapien
aggccctttgctgacctcatgcaag

SEQ ID NO: 2032315 - DNA, 25 bp, Homo sapien
atacagctcagcacctagttccctt

SEQ ID NO: 2032316 - DNA, 25 bp, Homo sapien
cactgggctcagtaggcataatcct

SEQ ID NO: 2032317 - DNA, 25 bp, Homo sapien
caaccgcctacagctgcttattgtg

SEQ ID NO: 2032318 - DNA, 25 bp, Homo sapien
gaagatctagtttcaggggccagca

SEQ ID NO: 2032319 - DNA, 25 bp, Homo sapien
cccagtattcccagtgtggtcagat

SEQ ID NO: 2032320 - DNA, 25 bp, Homo sapien
cagcattccccagtattcccagtgt

SEQ ID NO: 2032321 - DNA, 25 bp, Homo sapien
ttccccagtattcccagtgtggtca

SEQ ID NO: 2032322 - DNA, 25 bp, Homo sapien
caccaagatagctgaatgtcagaac

SEQ ID NO: 2032323 - DNA, 25 bp, Homo sapien
tataaaactccaccttaccctcatc

SEQ ID NO: 2032324 - DNA, 25 bp, Homo sapien
ctcatccccaatagtgctccccagc

SEQ ID NO: 2032325 - DNA, 25 bp, Homo sapien
ctcccaccaagatagctgaatgtca

SEQ ID NO: 2032326 - DNA, 25 bp, Homo sapien
acacactcttctattgaaactgagt

SEQ ID NO: 2032327 - DNA, 25 bp, Homo sapien
cacactcttctattgaaactgagtt

SEQ ID NO: 2032328 - DNA, 25 bp, Homo sapien
gagccaggttgtgttatgcgttccc

SEQ ID NO: 2032329 - DNA, 25 bp, Homo sapien
tgcacattcgtggaggcgagagcca

SEQ ID NO: 2032330 - DNA, 25 bp, Homo sapien
tccatgaaagctctcgaatgtcctt

SEQ ID NO: 2032331 - DNA, 25 bp, Homo sapien
tatttgagttggaactacagactcc

SEQ ID NO: 2032332 - DNA, 25 bp, Homo sapien
cttgaggacagtgatgacaccccct

SEQ ID NO: 2032333 - DNA, 25 bp, Homo sapien
ggacagtgatgacaccccctcccct

SEQ ID NO: 2032334 - DNA, 25 bp, Homo sapien
gaggacagtgatgacaccccctccc

SEQ ID NO: 2032335 - DNA, 25 bp, Homo sapien
ctcttgaggacagtgatgacacccc

SEQ ID NO: 2032336 - DNA, 25 bp, Homo sapien
gagtcaagactaggaagcctggttt

SEQ ID NO: 2032337 - DNA, 25 bp, Homo sapien
agaccctgccattcttgtgtagctc

SEQ ID NO: 2032338 - DNA, 25 bp, Homo sapien
gacaggaattgaatgaggaagaccc

SEQ ID NO: 2032339 - DNA, 25 bp, Homo sapien
ccttgtgggcgcctagaggagtcaa

SEQ ID NO: 2032340 - DNA, 25 bp, Homo sapien
cctgggcagtatgtgaggtaggacc

SEQ ID NO: 2032341 - DNA, 25 bp, Homo sapien
gcagtatgtgaggtaggacccagct

SEQ ID NO: 2032342 - DNA, 25 bp, Homo sapien
tatgtgaggtaggacccagctcatt

SEQ ID NO: 2032343 - DNA, 25 bp, Homo sapien
tgtgaggtaggacccagctcattgt

SEQ ID NO: 2032344 - DNA, 25 bp, Homo sapien
tgtttcgcagataccacagtgggtc

SEQ ID NO: 2032345 - DNA, 25 bp, Homo sapien
ccttcgcagcataggtctaggtatc

SEQ ID NO: 2032346 - DNA, 25 bp, Homo sapien
cagcatagtctgtcccattaaagaa

SEQ ID NO: 2032347 - DNA, 25 bp, Homo sapien
tacaggaagacagtatagctccaac

SEQ ID NO: 2032348 - DNA, 25 bp, Homo sapien
agaggcacatactcaactctaattc

SEQ ID NO: 2032349 - DNA, 25 bp, Homo sapien
tgagcacaaaacgtactaaataagg

SEQ ID NO: 2032350 - DNA, 25 bp, Homo sapien
tctaattcccctgcagagccttgtt

SEQ ID NO: 2032351 - DNA, 25 bp, Homo sapien
ctaaataaggggctgctaattcgga

SEQ ID NO: 2032352 - DNA, 25 bp, Homo sapien
ccatcaggttatccgagggctgttt

SEQ ID NO: 2032353 - DNA, 25 bp, Homo sapien
tgtgtttacactgatgcttctgcag

SEQ ID NO: 2032354 - DNA, 25 bp, Homo sapien
ccatttagcgtggttgctaccgtca

SEQ ID NO: 2032355 - DNA, 25 bp, Homo sapien
caaacacccgactcaaccggatggc

SEQ ID NO: 2032356 - DNA, 25 bp, Homo sapien
cagacgcagcaaggtgccaagtggt

SEQ ID NO: 2032357 - DNA, 25 bp, Homo sapien
tgttctctgcagataagtaaaccaa

SEQ ID NO: 2032358 - DNA, 25 bp, Homo sapien
agtggagagccggattataggaaaa

SEQ ID NO: 2032359 - DNA, 25 bp, Homo sapien
caaatgcttctgagtgggcatggca

SEQ ID NO: 2032360 - DNA, 25 bp, Homo sapien
ggcaatctgtgcactcttatctgaa

SEQ ID NO: 2032361 - DNA, 25 bp, Homo sapien
tatcactttccattagcatggccag

SEQ ID NO: 2032362 - DNA, 25 bp, Homo sapien
gacactgtttacatgctaatgccct

SEQ ID NO: 2032363 - DNA, 25 bp, Homo sapien
aaattaattgcaacatggtccacgc

SEQ ID NO: 2032364 - DNA, 25 bp, Homo sapien
tctgcttatatgagggaaatagcct

SEQ ID NO: 2032365 - DNA, 25 bp, Homo sapien
taatataatcacaccggcaatctag

SEQ ID NO: 2032366 - DNA, 25 bp, Homo sapien
gaaggtaatttcgttggttgcacat

SEQ ID NO: 2032367 - DNA, 25 bp, Homo sapien
tggcctggcttagtgtgctgagtcc

SEQ ID NO: 2032368 - DNA, 25 bp, Homo sapien
taaaaccaggccatagaaagcgtgg

SEQ ID NO: 2032369 - DNA, 25 bp, Homo sapien
gaggcaacttctgaggagcccactt

SEQ ID NO: 2032370 - DNA, 25 bp, Homo sapien
aaagcgtggcaattgctggaggcaa

SEQ ID NO: 2032371 - DNA, 25 bp, Homo sapien
tactctgagcgatcatcaaggagga

SEQ ID NO: 2032372 - DNA, 25 bp, Homo sapien
gaagtagacgagctatccatcctga

SEQ ID NO: 2032373 - DNA, 25 bp, Homo sapien
tctggaagtagacgagctatccatc

SEQ ID NO: 2032374 - DNA, 25 bp, Homo sapien
agtagacgagctatccatcctgaga

SEQ ID NO: 2032375 - DNA, 25 bp, Homo sapien
ttcctctggaagtagacgagctatc

SEQ ID NO: 2032376 - DNA, 25 bp, Homo sapien
ttctgctacttctgagtggtaaggg

SEQ ID NO: 2032377 - DNA, 25 bp, Homo sapien
tccactctgcatctccatggacagg

SEQ ID NO: 2032378 - DNA, 25 bp, Homo sapien
gggttctgctacttctgagtggtaa

SEQ ID NO: 2032379 - DNA, 25 bp, Homo sapien
tctctgtccactctgcatctccatg

SEQ ID NO: 2032380 - DNA, 25 bp, Homo sapien
ccagggaagacttccatctggaata

SEQ ID NO: 2032381 - DNA, 25 bp, Homo sapien
ccatctggaatacctgagtgactgc

SEQ ID NO: 2032382 - DNA, 25 bp, Homo sapien
cctgagtgactgctgggttacccat

SEQ ID NO: 2032383 - DNA, 25 bp, Homo sapien
cagctggcctggcatatccagggaa

SEQ ID NO: 2032384 - DNA, 25 bp, Homo sapien
acaggggcctctcgcgcagactcag

SEQ ID NO: 2032385 - DNA, 25 bp, Homo sapien
gcctctcgcgcagactcagggagct

SEQ ID NO: 2032386 - DNA, 25 bp, Homo sapien
tcagctgtaatgaacatcaactgtc

SEQ ID NO: 2032387 - DNA, 25 bp, Homo sapien
tgtcctgtagcctgtggccagatgc

SEQ ID NO: 2032388 - DNA, 25 bp, Homo sapien
cagaacacagtagtgagtgcacagc

SEQ ID NO: 2032389 - DNA, 25 bp, Homo sapien
gcagaacacagtagtgagtgcacag

SEQ ID NO: 2032390 - DNA, 25 bp, Homo sapien
gcacagctggcagccttctgctttg

SEQ ID NO: 2032391 - DNA, 25 bp, Homo sapien
agccttctgctttgattaagatgca

SEQ ID NO: 2032392 - DNA, 25 bp, Homo sapien
cattgactgttttatcttcgtgaca

SEQ ID NO: 2032393 - DNA, 25 bp, Homo sapien
ctacaaagatcctccttgtcagaca

SEQ ID NO: 2032394 - DNA, 25 bp, Homo sapien
tattaatctgacatggctgatttgg

SEQ ID NO: 2032395 - DNA, 25 bp, Homo sapien
gctgatttgggttgacattgactgt

SEQ ID NO: 2032396 - DNA, 25 bp, Homo sapien
tattgcggagaggatctaaacagaa

SEQ ID NO: 2032397 - DNA, 25 bp, Homo sapien
cagtgctggttctgtattgcggaga

SEQ ID NO: 2032398 - DNA, 25 bp, Homo sapien
tctttcttaatgacgaaccgacggc

SEQ ID NO: 2032399 - DNA, 25 bp, Homo sapien
gaaagtaatccaaagggctacatct

SEQ ID NO: 2032400 - DNA, 25 bp, Homo sapien
gattgactgctgtcttattgactct

SEQ ID NO: 2032401 - DNA, 25 bp, Homo sapien
acaaccagtgggattgactgctgtc

SEQ ID NO: 2032402 - DNA, 25 bp, Homo sapien
gactgctgtcttattgactctgttt

SEQ ID NO: 2032403 - DNA, 25 bp, Homo sapien
ctacaaccagtgggattgactgctg

SEQ ID NO: 2032404 - DNA, 25 bp, Homo sapien
ttatttctttacagatcaagaccat

SEQ ID NO: 2032405 - DNA, 25 bp, Homo sapien
tttttatttctttacagatcaagac

SEQ ID NO: 2032406 - DNA, 25 bp, Homo sapien
gctttttatttctttacagatcaag

SEQ ID NO: 2032407 - DNA, 25 bp, Homo sapien
tttatttctttacagatcaagacca

SEQ ID NO: 2032408 - DNA, 25 bp, Homo sapien
cagcaagcaactattgggagcagca

SEQ ID NO: 2032409 - DNA, 25 bp, Homo sapien
agtgcccgccttgacatttctcttg

SEQ ID NO: 2032410 - DNA, 25 bp, Homo sapien
tacacgcatacaaaggagcagtgcc

SEQ ID NO: 2032411 - DNA, 25 bp, Homo sapien
agggtcagtgtagcgctcaaaggaa

SEQ ID NO: 2032412 - DNA, 25 bp, Homo sapien
agtataccaatttaatcttgctgca

SEQ ID NO: 2032413 - DNA, 25 bp, Homo sapien
gggacccactatcactaatgtcact

SEQ ID NO: 2032414 - DNA, 25 bp, Homo sapien
ttcatatttcttgcactgtcaccgg

SEQ ID NO: 2032415 - DNA, 25 bp, Homo sapien
tgcttgactatggattgtaccagtt

SEQ ID NO: 2032416 - DNA, 25 bp, Homo sapien
tctttggctcagtgctaataagcat

SEQ ID NO: 2032417 - DNA, 25 bp, Homo sapien
tgatctttggctcagtgctaataag

SEQ ID NO: 2032418 - DNA, 25 bp, Homo sapien
ggctcagtgctaataagcatttccc

SEQ ID NO: 2032419 - DNA, 25 bp, Homo sapien
cttttctgtggccaacagtgatctt

SEQ ID NO: 2032420 - DNA, 25 bp, Homo sapien
tcacttaagcatggcccttctacag

SEQ ID NO: 2032421 - DNA, 25 bp, Homo sapien
tctacagcaacaaaaatctgtgccg

SEQ ID NO: 2032422 - DNA, 25 bp, Homo sapien
tgtgccgtgcagtaggatggccact

SEQ ID NO: 2032423 - DNA, 25 bp, Homo sapien
gcggggattatcttagggactccaa

SEQ ID NO: 2032424 - DNA, 25 bp, Homo sapien
aaactaattgttatcctttcagcag

SEQ ID NO: 2032425 - DNA, 25 bp, Homo sapien
cttaaactaattgttatcctttcag

SEQ ID NO: 2032426 - DNA, 25 bp, Homo sapien
gttatcctttcagcagactgtgatt

SEQ ID NO: 2032427 - DNA, 25 bp, Homo sapien
tggttcacttaaactaattgttatc

SEQ ID NO: 2032428 - DNA, 25 bp, Homo sapien
gatcagcaccacgtggaaacttccg

SEQ ID NO: 2032429 - DNA, 25 bp, Homo sapien
aacttccgccatgctgggatttctg

SEQ ID NO: 2032430 - DNA, 25 bp, Homo sapien
caggattcccaagggtggctggaac

SEQ ID NO: 2032431 - DNA, 25 bp, Homo sapien
gggatttctgctccataccagtgca

SEQ ID NO: 2032432 - DNA, 25 bp, Homo sapien
gtgccaaagaaacaaggactccctg

SEQ ID NO: 2032433 - DNA, 25 bp, Homo sapien
acccagcctcgagaagacattccag

SEQ ID NO: 2032434 - DNA, 25 bp, Homo sapien
catcattggcaacatgacagaggca

SEQ ID NO: 2032435 - DNA, 25 bp, Homo sapien
ttcttgtgatgagcccttgagagcc

SEQ ID NO: 2032436 - DNA, 25 bp, Homo sapien
gatgtgagcatcattccccacaagg

SEQ ID NO: 2032437 - DNA, 25 bp, Homo sapien
cacgtgaaggctcagggaatctagg

SEQ ID NO: 2032438 - DNA, 25 bp, Homo sapien
gctattggcagtcctgtgataacca

SEQ ID NO: 2032439 - DNA, 25 bp, Homo sapien
cagggaccctcatgtggctcgggtc

SEQ ID NO: 2032440 - DNA, 25 bp, Homo sapien
caggaagtatgtgagtaccgtggca

SEQ ID NO: 2032441 - DNA, 25 bp, Homo sapien
tgagtaccgtggcaaaaacaagaaa

SEQ ID NO: 2032442 - DNA, 25 bp, Homo sapien
ttactgaatcctgttcacttccatc

SEQ ID NO: 2032443 - DNA, 25 bp, Homo sapien
catagttgaccacataaaggtaaaa

SEQ ID NO: 2032444 - DNA, 25 bp, Homo sapien
gtctccacttggcccgtgtgggtat

SEQ ID NO: 2032445 - DNA, 25 bp, Homo sapien
ttaaacctccagagatcctgcccat

SEQ ID NO: 2032446 - DNA, 25 bp, Homo sapien
cacttggcccgtgtgggtatttggt

SEQ ID NO: 2032447 - DNA, 25 bp, Homo sapien
tctgttcctgtacccgttgctcgtc

SEQ ID NO: 2032448 - DNA, 25 bp, Homo sapien
aactgtagacaaacataggttggaa

SEQ ID NO: 2032449 - DNA, 25 bp, Homo sapien
caaagagtgccatcattgttcactg

SEQ ID NO: 2032450 - DNA, 25 bp, Homo sapien
tcaaagggagccacttaagtgtgca

SEQ ID NO: 2032451 - DNA, 25 bp, Homo sapien
aggttggaaagacaacagctgcatc

SEQ ID NO: 2032452 - DNA, 25 bp, Homo sapien
ccagctccacgtcttggtgttctga

SEQ ID NO: 2032453 - DNA, 25 bp, Homo sapien
cagccttgatagcagcgccagctcc

SEQ ID NO: 2032454 - DNA, 25 bp, Homo sapien
cttgctgaaattgagcagccttgat

SEQ ID NO: 2032455 - DNA, 25 bp, Homo sapien
cgccagctccacgtcttggtgttct

SEQ ID NO: 2032456 - DNA, 25 bp, Homo sapien
gagcctcattgccacactggggagc

SEQ ID NO: 2032457 - DNA, 25 bp, Homo sapien
tgagcctcattgccacactggggag

SEQ ID NO: 2032458 - DNA, 25 bp, Homo sapien
agcctcattgccacactggggagcc

SEQ ID NO: 2032459 - DNA, 25 bp, Homo sapien
tggtcacacctaaggctgagcccac

SEQ ID NO: 2032460 - DNA, 25 bp, Homo sapien
gatttttcccgagctttgattctaa

SEQ ID NO: 2032461 - DNA, 25 bp, Homo sapien
tcaaacctccttgcagtacaggtgc

SEQ ID NO: 2032462 - DNA, 25 bp, Homo sapien
tagagtccgttccaacaaccaaaca

SEQ ID NO: 2032463 - DNA, 25 bp, Homo sapien
actacaaactgggtaatgattttga

SEQ ID NO: 2032464 - DNA, 25 bp, Homo sapien
ccaacctctgtaaactttattctga

SEQ ID NO: 2032465 - DNA, 25 bp, Homo sapien
ccaggaaacacttaattgactacaa

SEQ ID NO: 2032466 - DNA, 25 bp, Homo sapien
cacatactcgcagactaaagcaagg

SEQ ID NO: 2032467 - DNA, 25 bp, Homo sapien
tgtgtctacatttagcctacccaat

SEQ ID NO: 2032468 - DNA, 25 bp, Homo sapien
gacagaaatgtgtctacatttagcc

SEQ ID NO: 2032469 - DNA, 25 bp, Homo sapien
tatattcactaaggatgtgagtgaa

SEQ ID NO: 2032470 - DNA, 25 bp, Homo sapien
cactacacctgtttgaaatgacaga

SEQ ID NO: 2032471 - DNA, 25 bp, Homo sapien
tcaactggtggcatcatatacttca

SEQ ID NO: 2032472 - DNA, 25 bp, Homo sapien
ccttaggactgcttatgtgatgtgc

SEQ ID NO: 2032473 - DNA, 25 bp, Homo sapien
gcagtcaaggattgggcaggtcata

SEQ ID NO: 2032474 - DNA, 25 bp, Homo sapien
cagtgtacgtgtaggagcttcaatc

SEQ ID NO: 2032475 - DNA, 25 bp, Homo sapien
gtactcatgcgcatgcacataaaca

SEQ ID NO: 2032476 - DNA, 25 bp, Homo sapien
agcaaaatgagtactcatgcgcatg

SEQ ID NO: 2032477 - DNA, 25 bp, Homo sapien
aaatgagtactcatgcgcatgcaca

SEQ ID NO: 2032478 - DNA, 25 bp, Homo sapien
atgagtactcatgcgcatgcacata

SEQ ID NO: 2032479 - DNA, 25 bp, Homo sapien
gtggatggggagagttgctgacaca

SEQ ID NO: 2032480 - DNA, 25 bp, Homo sapien
ctgtggatggggagagttgctgaca

SEQ ID NO: 2032481 - DNA, 25 bp, Homo sapien
ggcagagtagaaacgcagcagcttg

SEQ ID NO: 2032482 - DNA, 25 bp, Homo sapien
aggcagagtagaaacgcagcagctt

SEQ ID NO: 2032483 - DNA, 25 bp, Homo sapien
ttccagagcacgaggaaatacaagg

SEQ ID NO: 2032484 - DNA, 25 bp, Homo sapien
aagactgaggaaagcgtaaagcacc

SEQ ID NO: 2032485 - DNA, 25 bp, Homo sapien
tgtcagaatgcagccatccagtgtg

SEQ ID NO: 2032486 - DNA, 25 bp, Homo sapien
ggaatgaaaaggatcgagaccagcc

SEQ ID NO: 2032487 - DNA, 25 bp, Homo sapien
ttggcctctgaattcctgtagacat

SEQ ID NO: 2032488 - DNA, 25 bp, Homo sapien
cctccttctccgggacaccctgcct

SEQ ID NO: 2032489 - DNA, 25 bp, Homo sapien
tccttggcctctgaattcctgtaga

SEQ ID NO: 2032490 - DNA, 25 bp, Homo sapien
catgggctccttggcctctgaattc

SEQ ID NO: 2032491 - DNA, 25 bp, Homo sapien
ccaggcgcacgatcagagcagggac

SEQ ID NO: 2032492 - DNA, 25 bp, Homo sapien
tgattaggatgcgtgggaggcgccg

SEQ ID NO: 2032493 - DNA, 25 bp, Homo sapien
agcagggacgcctcccgttccttgg

SEQ ID NO: 2032494 - DNA, 25 bp, Homo sapien
gcacctccaaaccaatagttccagc

SEQ ID NO: 2032495 - DNA, 25 bp, Homo sapien
gaagcgcggccaaagttggaagccc

SEQ ID NO: 2032496 - DNA, 25 bp, Homo sapien
gatttcggatggaaccagagctcgc

SEQ ID NO: 2032497 - DNA, 25 bp, Homo sapien
caaagaaaccgagctttcagtgcat

SEQ ID NO: 2032498 - DNA, 25 bp, Homo sapien
tcattgttccctcgcttcgctggga

SEQ ID NO: 2032499 - DNA, 25 bp, Homo sapien
tgtggcccgtgaccctcgttattgt

SEQ ID NO: 2032500 - DNA, 25 bp, Homo sapien
gattcacggacccagagcttttcca

SEQ ID NO: 2032501 - DNA, 25 bp, Homo sapien
gcaaaactcaacgatcagattcacg

SEQ ID NO: 2032502 - DNA, 25 bp, Homo sapien
ccggcttcctagagcagcgtagaca

SEQ ID NO: 2032503 - DNA, 25 bp, Homo sapien
cccagctccgtggtgagcttgcctg

SEQ ID NO: 2032504 - DNA, 25 bp, Homo sapien
cagttgtgacaacataggtggtatg

SEQ ID NO: 2032505 - DNA, 25 bp, Homo sapien
cactcggtgtgcacccagttgtgac

SEQ ID NO: 2032506 - DNA, 25 bp, Homo sapien
ctgcgatagactcatcacagcagca

SEQ ID NO: 2032507 - DNA, 25 bp, Homo sapien
gaacctgttaatggtcttgacctcc

SEQ ID NO: 2032508 - DNA, 25 bp, Homo sapien
cacttacactgggtagccatacaca

SEQ ID NO: 2032509 - DNA, 25 bp, Homo sapien
aatgaggtctttgtcaaaggactcc

SEQ ID NO: 2032510 - DNA, 25 bp, Homo sapien
tcagggctgcccaatgtcaagggcc

SEQ ID NO: 2032511 - DNA, 25 bp, Homo sapien
atctcacaccaagctggatcttcct

SEQ ID NO: 2032512 - DNA, 25 bp, Homo sapien
tggagtgttactgagattattgtca

SEQ ID NO: 2032513 - DNA, 25 bp, Homo sapien
gtgattttgtagacggaagagctgc

SEQ ID NO: 2032514 - DNA, 25 bp, Homo sapien
gctgatgaaggtgaatttagagtga

SEQ ID NO: 2032515 - DNA, 25 bp, Homo sapien
ccaaggcagtgctgttgtaactgct

SEQ ID NO: 2032516 - DNA, 25 bp, Homo sapien
ggtgagtatttgaggagcacttggc

SEQ ID NO: 2032517 - DNA, 25 bp, Homo sapien
ccctgccccatgtgcggtcagcacc

SEQ ID NO: 2032518 - DNA, 25 bp, Homo sapien
ccacatgctatgctcccagcttggg

SEQ ID NO: 2032519 - DNA, 25 bp, Homo sapien
ccccatgtgcggtcagcaccactca

SEQ ID NO: 2032520 - DNA, 25 bp, Homo sapien
accccacatgctatgctcccagctt

SEQ ID NO: 2032521 - DNA, 25 bp, Homo sapien
aggggcctgcattgctcattagtag

SEQ ID NO: 2032522 - DNA, 25 bp, Homo sapien
ggcctgcattgctcattagtagcca

SEQ ID NO: 2032523 - DNA, 25 bp, Homo sapien
gggcctgcattgctcattagtagcc

SEQ ID NO: 2032524 - DNA, 25 bp, Homo sapien
gcctgcattgctcattagtagccat

SEQ ID NO: 2032525 - DNA, 25 bp, Homo sapien
acctgcacagtcatgatatggcagc

SEQ ID NO: 2032526 - DNA, 25 bp, Homo sapien
cacctgcacagtcatgatatggcag

SEQ ID NO: 2032527 - DNA, 25 bp, Homo sapien
gctacagtgactgggccaatgagca

SEQ ID NO: 2032528 - DNA, 25 bp, Homo sapien
aagagatgggctacagtgactgggc

SEQ ID NO: 2032529 - DNA, 25 bp, Homo sapien
tgggccaatgagcagctgggtgggc

SEQ ID NO: 2032530 - DNA, 25 bp, Homo sapien
ctgagattgcagagtcctggggaaa

SEQ ID NO: 2032531 - DNA, 25 bp, Homo sapien
ttccggatgatcagtgggtgtcctc

SEQ ID NO: 2032532 - DNA, 25 bp, Homo sapien
tgcggctgattacctgctgacaggg

SEQ ID NO: 2032533 - DNA, 25 bp, Homo sapien
caaccctcgatcactgggtgaatca

SEQ ID NO: 2032534 - DNA, 25 bp, Homo sapien
gggtgaatcagcactcctcctgagc

SEQ ID NO: 2032535 - DNA, 25 bp, Homo sapien
ggatgttagaactggcggctagacc

SEQ ID NO: 2032536 - DNA, 25 bp, Homo sapien
cacatggttgtctgtacataaactg

SEQ ID NO: 2032537 - DNA, 25 bp, Homo sapien
cactgttttcaatccgaccacatgg

SEQ ID NO: 2032538 - DNA, 25 bp, Homo sapien
gaaaaaagcattcacgctgttctct

SEQ ID NO: 2032539 - DNA, 25 bp, Homo sapien
tgtgtcctccatgcacgccacatcc

SEQ ID NO: 2032540 - DNA, 25 bp, Homo sapien
tcagcctgggatccctgtgtgtcct

SEQ ID NO: 2032541 - DNA, 25 bp, Homo sapien
gcctgggatccctgtgtgtcctcca

SEQ ID NO: 2032542 - DNA, 25 bp, Homo sapien
tccatgcacgccacatccacactgc

SEQ ID NO: 2032543 - DNA, 25 bp, Homo sapien
ggaagacggcctcattggagcatag

SEQ ID NO: 2032544 - DNA, 25 bp, Homo sapien
caaggttggaggctctaatcaggag

SEQ ID NO: 2032545 - DNA, 25 bp, Homo sapien
tcaaagcgttcacttgtatctgcaa

SEQ ID NO: 2032546 - DNA, 25 bp, Homo sapien
tcattggagcatagtggttgtctca

SEQ ID NO: 2032547 - DNA, 25 bp, Homo sapien
actccccgtagttgtctccagaact

SEQ ID NO: 2032548 - DNA, 25 bp, Homo sapien
cttgatgtaccgacttttcccatag

SEQ ID NO: 2032549 - DNA, 25 bp, Homo sapien
ccgtagttgtctccagaactctctc

SEQ ID NO: 2032550 - DNA, 25 bp, Homo sapien
tcccatagctcagaagagttccttc

SEQ ID NO: 2032551 - DNA, 25 bp, Homo sapien
tatttgtaatggtgagtccagcagc

SEQ ID NO: 2032552 - DNA, 25 bp, Homo sapien
atttgtaatggtgagtccagcagca

SEQ ID NO: 2032553 - DNA, 25 bp, Homo sapien
gagcagagccttatgctttattatt

SEQ ID NO: 2032554 - DNA, 25 bp, Homo sapien
agggagcagagccttatgctttatt

SEQ ID NO: 2032555 - DNA, 25 bp, Homo sapien
gaatatttgcatcctcaacgtcaag

SEQ ID NO: 2032556 - DNA, 25 bp, Homo sapien
accaggttgcatcttttgagggaaa

SEQ ID NO: 2032557 - DNA, 25 bp, Homo sapien
gctaagggcgccaggctgcgaatat

SEQ ID NO: 2032558 - DNA, 25 bp, Homo sapien
tcaacgtcaagatcatcatcttgga

SEQ ID NO: 2032559 - DNA, 25 bp, Homo sapien
ttgagtcactctgctccaaatactc

SEQ ID NO: 2032560 - DNA, 25 bp, Homo sapien
tgagtcactctgctccaaatactcc

SEQ ID NO: 2032561 - DNA, 25 bp, Homo sapien
cacttccttctgtccttattgatga

SEQ ID NO: 2032562 - DNA, 25 bp, Homo sapien
tccttctgtccttattgatgagcat

SEQ ID NO: 2032563 - DNA, 25 bp, Homo sapien
ggatggcccgatctgtggtccagcc

SEQ ID NO: 2032564 - DNA, 25 bp, Homo sapien
ctttaggtgagataagacgagccat

SEQ ID NO: 2032565 - DNA, 25 bp, Homo sapien
gagataagacgagccattctcgtgg

SEQ ID NO: 2032566 - DNA, 25 bp, Homo sapien
cgagccattctcgtggtatgctggg

SEQ ID NO: 2032567 - DNA, 25 bp, Homo sapien
cagagcaactggatgtgtgatcctg

SEQ ID NO: 2032568 - DNA, 25 bp, Homo sapien
ttatggagtctggttgaagaggctc

SEQ ID NO: 2032569 - DNA, 25 bp, Homo sapien
ctggcaaggccacttatggagtctg

SEQ ID NO: 2032570 - DNA, 25 bp, Homo sapien
ccacttatggagtctggttgaagag

SEQ ID NO: 2032571 - DNA, 25 bp, Homo sapien
tggccaaggagggctattcgccttc

SEQ ID NO: 2032572 - DNA, 25 bp, Homo sapien
gaaaggctcttcctaggttctggac

SEQ ID NO: 2032573 - DNA, 25 bp, Homo sapien
gagggatagaaaggctcttcctagg

SEQ ID NO: 2032574 - DNA, 25 bp, Homo sapien
atagaaaggctcttcctaggttctg

SEQ ID NO: 2032575 - DNA, 25 bp, Homo sapien
tcctaggttctggacttgaagggta

SEQ ID NO: 2032576 - DNA, 25 bp, Homo sapien
tgcccttgagatcttgaattaagtg

SEQ ID NO: 2032577 - DNA, 25 bp, Homo sapien
gaattaagtgcttttcaattgaatc

SEQ ID NO: 2032578 - DNA, 25 bp, Homo sapien
cccttgagatcttgaattaagtgct

SEQ ID NO: 2032579 - DNA, 25 bp, Homo sapien
aattaagtgcttttcaattgaatca

SEQ ID NO: 2032580 - DNA, 25 bp, Homo sapien
cctgggctctgcaaattcaccatca

SEQ ID NO: 2032581 - DNA, 25 bp, Homo sapien
ctctgccgctttgagcttctgacat

SEQ ID NO: 2032582 - DNA, 25 bp, Homo sapien
agtctgccttccagccacccggggg

SEQ ID NO: 2032583 - DNA, 25 bp, Homo sapien
aaattcaccatcagctctgccgctt

SEQ ID NO: 2032584 - DNA, 25 bp, Homo sapien
tgggttaatcagtcttctcttctgg

SEQ ID NO: 2032585 - DNA, 25 bp, Homo sapien
gggttaatcagtcttctcttctgga

SEQ ID NO: 2032586 - DNA, 25 bp, Homo sapien
agggcttgggttaatcagtcttctc

SEQ ID NO: 2032587 - DNA, 25 bp, Homo sapien
gcttgggttaatcagtcttctcttc

SEQ ID NO: 2032588 - DNA, 25 bp, Homo sapien
tgtcagagagccagatcttgaacag

SEQ ID NO: 2032589 - DNA, 25 bp, Homo sapien
ccattccagatgccctttgcctggt

SEQ ID NO: 2032590 - DNA, 25 bp, Homo sapien
tcttgaacagcctttcctgccgtca

SEQ ID NO: 2032591 - DNA, 25 bp, Homo sapien
gccctttgcctggtgctctcactgc

SEQ ID NO: 2032592 - DNA, 25 bp, Homo sapien
taaatctaaactcaggccacattcc

SEQ ID NO: 2032593 - DNA, 25 bp, Homo sapien
tgtccccaccatatagcccttaaat

SEQ ID NO: 2032594 - DNA, 25 bp, Homo sapien
ccacctcacacccaggatcagcagg

SEQ ID NO: 2032595 - DNA, 25 bp, Homo sapien
ttccagttcagtaaattatgtcccc

SEQ ID NO: 2032596 - DNA, 25 bp, Homo sapien
cccctgagcccactgccagtctgtt

SEQ ID NO: 2032597 - DNA, 25 bp, Homo sapien
ctgagcccactgccagtctgttcat

SEQ ID NO: 2032598 - DNA, 25 bp, Homo sapien
gccccctgagcccactgccagtctg

SEQ ID NO: 2032599 - DNA, 25 bp, Homo sapien
cctgagcccactgccagtctgttca

SEQ ID NO: 2032600 - DNA, 25 bp, Homo sapien
tgctttgcatgcgttgttgactgca

SEQ ID NO: 2032601 - DNA, 25 bp, Homo sapien
gctttgcatgcgttgttgactgcag

SEQ ID NO: 2032602 - DNA, 25 bp, Homo sapien
aggtgctttgcatgcgttgttgact

SEQ ID NO: 2032603 - DNA, 25 bp, Homo sapien
ggtgctttgcatgcgttgttgactg

SEQ ID NO: 2032604 - DNA, 25 bp, Homo sapien
ctctaataggtaacagggaaggcct

SEQ ID NO: 2032605 - DNA, 25 bp, Homo sapien
tgtgcacacagttgccagaaagctg

SEQ ID NO: 2032606 - DNA, 25 bp, Homo sapien
actcatttgactgatggcaagggcc

SEQ ID NO: 2032607 - DNA, 25 bp, Homo sapien
tcaagtaggctctgacactggaacc

SEQ ID NO: 2032608 - DNA, 25 bp, Homo sapien
gacagctccaagaaataggacagaa

SEQ ID NO: 2032609 - DNA, 25 bp, Homo sapien
tcctcccagtccaacaccagtgtgc

SEQ ID NO: 2032610 - DNA, 25 bp, Homo sapien
ggacagctccaagaaataggacaga

SEQ ID NO: 2032611 - DNA, 25 bp, Homo sapien
caacaccagtgtgcggcgcaaacag

SEQ ID NO: 2032612 - DNA, 25 bp, Homo sapien
tctctctgtgagacattgcacattc

SEQ ID NO: 2032613 - DNA, 25 bp, Homo sapien
acattgcacattccaaacaaggagg

SEQ ID NO: 2032614 - DNA, 25 bp, Homo sapien
cattgcacattccaaacaaggaggg

SEQ ID NO: 2032615 - DNA, 25 bp, Homo sapien
tgtggagcatgttctgggttgcctc

SEQ ID NO: 2032616 - DNA, 25 bp, Homo sapien
gaagatcgtcttgaatgtggagcat

SEQ ID NO: 2032617 - DNA, 25 bp, Homo sapien
tcttttcacggatgtagccttcttg

SEQ ID NO: 2032618 - DNA, 25 bp, Homo sapien
atggaggaagatcgtcttgaatgtg

SEQ ID NO: 2032619 - DNA, 25 bp, Homo sapien
ttaacacgtggaagccataaggagg

SEQ ID NO: 2032620 - DNA, 25 bp, Homo sapien
cttaacacgtggaagccataaggag

SEQ ID NO: 2032621 - DNA, 25 bp, Homo sapien
taacacgtggaagccataaggaggc

SEQ ID NO: 2032622 - DNA, 25 bp, Homo sapien
acacgtggaagccataaggaggcat

SEQ ID NO: 2032623 - DNA, 25 bp, Homo sapien
tctctatgaagtggccactgatgtt

SEQ ID NO: 2032624 - DNA, 25 bp, Homo sapien
ctctctatgaagtggccactgatgt

SEQ ID NO: 2032625 - DNA, 25 bp, Homo sapien
catatgacaaatgactaaagtccat

SEQ ID NO: 2032626 - DNA, 25 bp, Homo sapien
attttgacatatgacaaatgactaa

SEQ ID NO: 2032627 - DNA, 25 bp, Homo sapien
atcagtgccacagcgatgccaggaa

SEQ ID NO: 2032628 - DNA, 25 bp, Homo sapien
ggtcacattgtcagtaagttgcaaa

SEQ ID NO: 2032629 - DNA, 25 bp, Homo sapien
tcaggtcacattgtcagtaagttgc

SEQ ID NO: 2032630 - DNA, 25 bp, Homo sapien
gcagatcagtgccacagcgatgcca

SEQ ID NO: 2032631 - DNA, 25 bp, Homo sapien
cagtgccctctgctaattaagctgg

SEQ ID NO: 2032632 - DNA, 25 bp, Homo sapien
catagcatggcttcctttgacctaa

SEQ ID NO: 2032633 - DNA, 25 bp, Homo sapien
tccaatgtatgcttcagtaggctgc

SEQ ID NO: 2032634 - DNA, 25 bp, Homo sapien
taagctggccgtatatgggcctttg

SEQ ID NO: 2032635 - DNA, 25 bp, Homo sapien
cagtaagtttctcgtgctagccgta

SEQ ID NO: 2032636 - DNA, 25 bp, Homo sapien
tttctcgtgctagccgtacgtacgg

SEQ ID NO: 2032637 - DNA, 25 bp, Homo sapien
actacagtaagtttctcgtgctagc

SEQ ID NO: 2032638 - DNA, 25 bp, Homo sapien
taaaactacagtaagtttctcgtgc

SEQ ID NO: 2032639 - DNA, 25 bp, Homo sapien
cagctgtatttatccatgacctcaa

SEQ ID NO: 2032640 - DNA, 25 bp, Homo sapien
tgaagtaagtacaggaacgctccag

SEQ ID NO: 2032641 - DNA, 25 bp, Homo sapien
tgacctcaaacaacccggtgactgg

SEQ ID NO: 2032642 - DNA, 25 bp, Homo sapien
taccgctgttttcggtgagggacag

SEQ ID NO: 2032643 - DNA, 25 bp, Homo sapien
gcattggcacgaaaacagtttggca

SEQ ID NO: 2032644 - DNA, 25 bp, Homo sapien
tcctatgggcacctggaaccaaaag

SEQ ID NO: 2032645 - DNA, 25 bp, Homo sapien
aatggatgctgcgagaccttgaccg

SEQ ID NO: 2032646 - DNA, 25 bp, Homo sapien
catgctaaggagaatggacccgatc

SEQ ID NO: 2032647 - DNA, 25 bp, Homo sapien
tccgagaaacgggtgagtgtgaatc

SEQ ID NO: 2032648 - DNA, 25 bp, Homo sapien
gagtgtgaatcccttgcagaaatgc

SEQ ID NO: 2032649 - DNA, 25 bp, Homo sapien
tagggtagtgcgagtgactccgttt

SEQ ID NO: 2032650 - DNA, 25 bp, Homo sapien
ttctttggacctgcggttgagctgg

SEQ ID NO: 2032651 - DNA, 25 bp, Homo sapien
gaacgacaagttagttgctcaagag

SEQ ID NO: 2032652 - DNA, 25 bp, Homo sapien
ttttagaacgacaagttagttgctc

SEQ ID NO: 2032653 - DNA, 25 bp, Homo sapien
ccttttgttgcagtctgtttcaagt

SEQ ID NO: 2032654 - DNA, 25 bp, Homo sapien
gcagtctgtttcaagtaacttttta

SEQ ID NO: 2032655 - DNA, 25 bp, Homo sapien
cctgcctgggaactggtagaacctc

SEQ ID NO: 2032656 - DNA, 25 bp, Homo sapien
cacacactgtgcttagcgcttgagg

SEQ ID NO: 2032657 - DNA, 25 bp, Homo sapien
ggtcaacagccaagagcattgtggt

SEQ ID NO: 2032658 - DNA, 25 bp, Homo sapien
tgctgtcagtatatggcgatgccca

SEQ ID NO: 2032659 - DNA, 25 bp, Homo sapien
cactgggatgcggttctgtgaagca

SEQ ID NO: 2032660 - DNA, 25 bp, Homo sapien
ggccccacacagaggaaataggtgt

SEQ ID NO: 2032661 - DNA, 25 bp, Homo sapien
ctcatgctcgcacgctggtctgtga

SEQ ID NO: 2032662 - DNA, 25 bp, Homo sapien
tgtgaagcaagtgccaaggataact

SEQ ID NO: 2032663 - DNA, 25 bp, Homo sapien
gagtcactagtgggcagctggttta

SEQ ID NO: 2032664 - DNA, 25 bp, Homo sapien
ctcctggggcttcaaaatggagtca

SEQ ID NO: 2032665 - DNA, 25 bp, Homo sapien
tgagcagctttgtggagaattacag

SEQ ID NO: 2032666 - DNA, 25 bp, Homo sapien
ggagaattacagtggatttcttgta

SEQ ID NO: 2032667 - DNA, 25 bp, Homo sapien
agttgggctggaaagccagacttcc

SEQ ID NO: 2032668 - DNA, 25 bp, Homo sapien
tttcgacaggtaataatgttgccag

SEQ ID NO: 2032669 - DNA, 25 bp, Homo sapien
taagcactgttatttgctgctatgg

SEQ ID NO: 2032670 - DNA, 25 bp, Homo sapien
ggaaccttctgtaaatccatggttc

SEQ ID NO: 2032671 - DNA, 25 bp, Homo sapien
atagattctattttatcccagtggg

SEQ ID NO: 2032672 - DNA, 25 bp, Homo sapien
aaggttgtataagggaattctgcct

SEQ ID NO: 2032673 - DNA, 25 bp, Homo sapien
gattcttagaaccacctggaggctg

SEQ ID NO: 2032674 - DNA, 25 bp, Homo sapien
tgtgcaacaagcttagaatcccagg

SEQ ID NO: 2032675 - DNA, 25 bp, Homo sapien
gccatgtgacacttggacctgtgta

SEQ ID NO: 2032676 - DNA, 25 bp, Homo sapien
cacaccttaggttgggactctctag

SEQ ID NO: 2032677 - DNA, 25 bp, Homo sapien
ggtcatcccgcacagtattggaagg

SEQ ID NO: 2032678 - DNA, 25 bp, Homo sapien
ggaagaacgcacatgacaagccatg

SEQ ID NO: 2032679 - DNA, 25 bp, Homo sapien
caagactggatctgagggcacgcag

SEQ ID NO: 2032680 - DNA, 25 bp, Homo sapien
ggttgcaatgcagggaatcagccac

SEQ ID NO: 2032681 - DNA, 25 bp, Homo sapien
tgaagcaacccggagatctgcaagc

SEQ ID NO: 2032682 - DNA, 25 bp, Homo sapien
cccttgatacgaggcagtggaggac

SEQ ID NO: 2032683 - DNA, 25 bp, Homo sapien
cactttctaaggaatcgcggcgcct

SEQ ID NO: 2032684 - DNA, 25 bp, Homo sapien
aacaggtgatccttcgccagggagc

SEQ ID NO: 2032685 - DNA, 25 bp, Homo sapien
tctgagtattttccggcagggcctg

SEQ ID NO: 2032686 - DNA, 25 bp, Homo sapien
tcaggataatgccactggagggccc

SEQ ID NO: 2032687 - DNA, 25 bp, Homo sapien
tcaattcgggaaggaaacgcaggga

SEQ ID NO: 2032688 - DNA, 25 bp, Homo sapien
ttgcatccgtttactctgcctgagg

SEQ ID NO: 2032689 - DNA, 25 bp, Homo sapien
taatggacttttctacaggtcgtgg

SEQ ID NO: 2032690 - DNA, 25 bp, Homo sapien
tcatttggccactcagaagcttaaa

SEQ ID NO: 2032691 - DNA, 25 bp, Homo sapien
ccccaaatagtgtcctcttgccatg

SEQ ID NO: 2032692 - DNA, 25 bp, Homo sapien
aatagtgtcctcttgccatgctgac

SEQ ID NO: 2032693 - DNA, 25 bp, Homo sapien
ccaaatagtgtcctcttgccatgct

SEQ ID NO: 2032694 - DNA, 25 bp, Homo sapien
aaatagtgtcctcttgccatgctga

SEQ ID NO: 2032695 - DNA, 25 bp, Homo sapien
tgctttctcagttatttcataggaa

SEQ ID NO: 2032696 - DNA, 25 bp, Homo sapien
ttgctttctcagttatttcatagga

SEQ ID NO: 2032697 - DNA, 25 bp, Homo sapien
tttgctttctcagttatttcatagg

SEQ ID NO: 2032698 - DNA, 25 bp, Homo sapien
cctgacctggtttttgacatttggc

SEQ ID NO: 2032699 - DNA, 25 bp, Homo sapien
ccttttgagtttcaggccctgacct

SEQ ID NO: 2032700 - DNA, 25 bp, Homo sapien
cttctcattggagttagccttttga

SEQ ID NO: 2032701 - DNA, 25 bp, Homo sapien
gctgcccagatgccgggtgctcagt

SEQ ID NO: 2032702 - DNA, 25 bp, Homo sapien
cagtgctctgtagctgaggtgtctc

SEQ ID NO: 2032703 - DNA, 25 bp, Homo sapien
aggagcgcaagcagtgctctgtagc

SEQ ID NO: 2032704 - DNA, 25 bp, Homo sapien
gctgaggtgtctcagcgcctccttg

SEQ ID NO: 2032705 - DNA, 25 bp, Homo sapien
gcacttggagaggagcgcaagcagt

SEQ ID NO: 2032706 - DNA, 25 bp, Homo sapien
caaacttgacgttgatttttgaaga

SEQ ID NO: 2032707 - DNA, 25 bp, Homo sapien
tcagaaacaagcattgcggttaggt

SEQ ID NO: 2032708 - DNA, 25 bp, Homo sapien
gagtgacaaccacaaggctcatttt

SEQ ID NO: 2032709 - DNA, 25 bp, Homo sapien
gaactaacttcccactctatcgaaa

SEQ ID NO: 2032710 - DNA, 25 bp, Homo sapien
tgcagaaggttgtcaagcactgtcc

SEQ ID NO: 2032711 - DNA, 25 bp, Homo sapien
cacccattctgtttatgtgtgttca

SEQ ID NO: 2032712 - DNA, 25 bp, Homo sapien
taacttccagttccagcagatcttc

SEQ ID NO: 2032713 - DNA, 25 bp, Homo sapien
tgtgtgttcagctgatcagctccta

SEQ ID NO: 2032714 - DNA, 25 bp, Homo sapien
gtgacactaaggttagcacgttctg

SEQ ID NO: 2032715 - DNA, 25 bp, Homo sapien
tgataatgcaccaccatcagaccag

SEQ ID NO: 2032716 - DNA, 25 bp, Homo sapien
cactaaggttagcacgttctgataa

SEQ ID NO: 2032717 - DNA, 25 bp, Homo sapien
ggttagcacgttctgataatgcacc

SEQ ID NO: 2032718 - DNA, 25 bp, Homo sapien
gcgaagccgcttctgttcatcaact

SEQ ID NO: 2032719 - DNA, 25 bp, Homo sapien
gatggctaccttggacgcagcgatg

SEQ ID NO: 2032720 - DNA, 25 bp, Homo sapien
tttggttagtgataagcgaagccgc

SEQ ID NO: 2032721 - DNA, 25 bp, Homo sapien
cagattatggcacccttgggatggc

SEQ ID NO: 2032722 - DNA, 25 bp, Homo sapien
cactcaacagttgcgggtagaccgt

SEQ ID NO: 2032723 - DNA, 25 bp, Homo sapien
ggttgcccaggcaaagccgtgttca

SEQ ID NO: 2032724 - DNA, 25 bp, Homo sapien
tagaccgttgccagttgttttcgca

SEQ ID NO: 2032725 - DNA, 25 bp, Homo sapien
tgttttcgcatcacacgtggctcat

SEQ ID NO: 2032726 - DNA, 25 bp, Homo sapien
tccccgtgaagtctccagcttggct

SEQ ID NO: 2032727 - DNA, 25 bp, Homo sapien
ctccagcttggctcattatgtattt

SEQ ID NO: 2032728 - DNA, 25 bp, Homo sapien
tgctccggagccatccccgtgaagt

SEQ ID NO: 2032729 - DNA, 25 bp, Homo sapien
ggagccatccccgtgaagtctccag

SEQ ID NO: 2032730 - DNA, 25 bp, Homo sapien
gcatgttcccttctactgtgcagta

SEQ ID NO: 2032731 - DNA, 25 bp, Homo sapien
cagtaaagttctggacgggacattc

SEQ ID NO: 2032732 - DNA, 25 bp, Homo sapien
caggacgctggcatcactcttcact

SEQ ID NO: 2032733 - DNA, 25 bp, Homo sapien
cctatgagctgcactggatattgcc

SEQ ID NO: 2032734 - DNA, 25 bp, Homo sapien
tgcatgcggttagctgccaggtctc

SEQ ID NO: 2032735 - DNA, 25 bp, Homo sapien
gttagctgccaggtctccggtttcc

SEQ ID NO: 2032736 - DNA, 25 bp, Homo sapien
cgctagctaggtgcatgcggttagc

SEQ ID NO: 2032737 - DNA, 25 bp, Homo sapien
agctgccaggtctccggtttcccgg

SEQ ID NO: 2032738 - DNA, 25 bp, Homo sapien
tccacaaatcccatgatctgcaaag

SEQ ID NO: 2032739 - DNA, 25 bp, Homo sapien
gttccctggctctgacgactagagg

SEQ ID NO: 2032740 - DNA, 25 bp, Homo sapien
ctagaggcttatgcagggagtgttt

SEQ ID NO: 2032741 - DNA, 25 bp, Homo sapien
gctgtggccttctgtggtctccaca

SEQ ID NO: 2032742 - DNA, 25 bp, Homo sapien
tttccttcttgcacggaagccttct

SEQ ID NO: 2032743 - DNA, 25 bp, Homo sapien
ttccttcttgcacggaagccttctc

SEQ ID NO: 2032744 - DNA, 25 bp, Homo sapien
ccttcttgcacggaagccttctctc

SEQ ID NO: 2032745 - DNA, 25 bp, Homo sapien
tcttgcacggaagccttctctcgag

SEQ ID NO: 2032746 - DNA, 25 bp, Homo sapien
tggtgcccctggtcttccgtcccca

SEQ ID NO: 2032747 - DNA, 25 bp, Homo sapien
ctggtcttccgtccccagaccatac

SEQ ID NO: 2032748 - DNA, 25 bp, Homo sapien
atgttggtgcccctggtcttccgtc

SEQ ID NO: 2032749 - DNA, 25 bp, Homo sapien
ccctggtcttccgtccccagaccat

SEQ ID NO: 2032750 - DNA, 25 bp, Homo sapien
agacctcacaccaagccggacccct

SEQ ID NO: 2032751 - DNA, 25 bp, Homo sapien
ctctgcacccctgtcagctctctcc

SEQ ID NO: 2032752 - DNA, 25 bp, Homo sapien
gcttgtggccgcctcacttggggct

SEQ ID NO: 2032753 - DNA, 25 bp, Homo sapien
ggtgcccagacctcacaccaagccg

SEQ ID NO: 2032754 - DNA, 25 bp, Homo sapien
cttctggcacttaaatgacaacttt

SEQ ID NO: 2032755 - DNA, 25 bp, Homo sapien
ggctaattaattcgcatccttcaca

SEQ ID NO: 2032756 - DNA, 25 bp, Homo sapien
ccaggacatagtgcccgtggctgaa

SEQ ID NO: 2032757 - DNA, 25 bp, Homo sapien
cgtggctgaacgagaggctaattaa

SEQ ID NO: 2032758 - DNA, 25 bp, Homo sapien
tctagcacgctacactggacgagac

SEQ ID NO: 2032759 - DNA, 25 bp, Homo sapien
acgcaaattgtcctgcacccgtgga

SEQ ID NO: 2032760 - DNA, 25 bp, Homo sapien
cattgaggagcctgcgtggctctgt

SEQ ID NO: 2032761 - DNA, 25 bp, Homo sapien
ggacacttcacccagagtccggtgg

SEQ ID NO: 2032762 - DNA, 25 bp, Homo sapien
tcactcacgatgatagaaggtgcgg

SEQ ID NO: 2032763 - DNA, 25 bp, Homo sapien
acagaagtgcccgtctccctgggtt

SEQ ID NO: 2032764 - DNA, 25 bp, Homo sapien
tttgtaaggccaagttgcaccacca

SEQ ID NO: 2032765 - DNA, 25 bp, Homo sapien
tgggttcatgctaacactgagtgcc

SEQ ID NO: 2032766 - DNA, 25 bp, Homo sapien
tcttatttttaactgcgccgcggct

SEQ ID NO: 2032767 - DNA, 25 bp, Homo sapien
cgcggctcatggtttagaggccctc

SEQ ID NO: 2032768 - DNA, 25 bp, Homo sapien
tgaggaggctaagacaaacgcatgt

SEQ ID NO: 2032769 - DNA, 25 bp, Homo sapien
cccagtggaagcgatagggctcgac

SEQ ID NO: 2032770 - DNA, 25 bp, Homo sapien
tgcctgcggtgaactgctgtgctcg

SEQ ID NO: 2032771 - DNA, 25 bp, Homo sapien
cacggtctcgagtgacactgctggc

SEQ ID NO: 2032772 - DNA, 25 bp, Homo sapien
taggtggaactcacttgacagcaaa

SEQ ID NO: 2032773 - DNA, 25 bp, Homo sapien
ccattttgtggcactgggacaggca

SEQ ID NO: 2032774 - DNA, 25 bp, Homo sapien
caacatctggcactagaatggcagc

SEQ ID NO: 2032775 - DNA, 25 bp, Homo sapien
ggttccggcgtctgaacacagctgc

SEQ ID NO: 2032776 - DNA, 25 bp, Homo sapien
aattctcctctagtacaacatctgg

SEQ ID NO: 2032777 - DNA, 25 bp, Homo sapien
tcttgtcagcccaactcagtgttct

SEQ ID NO: 2032778 - DNA, 25 bp, Homo sapien
tggagtggagtgtctgataacgact

SEQ ID NO: 2032779 - DNA, 25 bp, Homo sapien
tggagtgtctgataacgactcacca

SEQ ID NO: 2032780 - DNA, 25 bp, Homo sapien
tgataacgactcaccacagccgtga

SEQ ID NO: 2032781 - DNA, 25 bp, Homo sapien
agtgtctgataacgactcaccacag

SEQ ID NO: 2032782 - DNA, 25 bp, Homo sapien
cagatttcccaaaccgtgtgtccca

SEQ ID NO: 2032783 - DNA, 25 bp, Homo sapien
tgtgtcccagtcaagcactgtgggc

SEQ ID NO: 2032784 - DNA, 25 bp, Homo sapien
ctataacaaggggagcgcagacaca

SEQ ID NO: 2032785 - DNA, 25 bp, Homo sapien
gaggacacaggagcaccttgggtta

SEQ ID NO: 2032786 - DNA, 25 bp, Homo sapien
cctgtggccgtatgaagttccagcc

SEQ ID NO: 2032787 - DNA, 25 bp, Homo sapien
aatgctttgggaacagaagcttctc

SEQ ID NO: 2032788 - DNA, 25 bp, Homo sapien
tcacggtactgttagcataatgctt

SEQ ID NO: 2032789 - DNA, 25 bp, Homo sapien
gcatgaagcatagtctccagggcca

SEQ ID NO: 2032790 - DNA, 25 bp, Homo sapien
cctgcaccactggctgggctgtcct

SEQ ID NO: 2032791 - DNA, 25 bp, Homo sapien
tccgtgcagccgtctgtccttcccc

SEQ ID NO: 2032792 - DNA, 25 bp, Homo sapien
gcagccgtctgtccttcccccgctg

SEQ ID NO: 2032793 - DNA, 25 bp, Homo sapien
ttcccccgctgctgctcccctgcac

SEQ ID NO: 2032794 - DNA, 25 bp, Homo sapien
cctttctcggctctgaaggaactac

SEQ ID NO: 2032795 - DNA, 25 bp, Homo sapien
tcatccactggtgacactgccggtc

SEQ ID NO: 2032796 - DNA, 25 bp, Homo sapien
ctgtctccctttctcggctctgaag

SEQ ID NO: 2032797 - DNA, 25 bp, Homo sapien
tgacactgccggtctgagtaaccct

SEQ ID NO: 2032798 - DNA, 25 bp, Homo sapien
gccacaccgagatgcaagcttgcat

SEQ ID NO: 2032799 - DNA, 25 bp, Homo sapien
cagcctcagtcacccggagacccga

SEQ ID NO: 2032800 - DNA, 25 bp, Homo sapien
gagacccgacgtccttggaggagca

SEQ ID NO: 2032801 - DNA, 25 bp, Homo sapien
ctccaggcccgagagaccagcaaac

SEQ ID NO: 2032802 - DNA, 25 bp, Homo sapien
ttggcttgcacgtcttcgggtgcat

SEQ ID NO: 2032803 - DNA, 25 bp, Homo sapien
ttcttgcatcgatgatccaacagca

SEQ ID NO: 2032804 - DNA, 25 bp, Homo sapien
tcgggtgcatgtatataccgctact

SEQ ID NO: 2032805 - DNA, 25 bp, Homo sapien
cctaaatgtgactcagtctgttcca

SEQ ID NO: 2032806 - DNA, 25 bp, Homo sapien
tgtatgagaccgtgatgaagtagaa

SEQ ID NO: 2032807 - DNA, 25 bp, Homo sapien
aattattgtgaaaagattaactggc

SEQ ID NO: 2032808 - DNA, 25 bp, Homo sapien
ggcaatgtacagagtttactcaaag

SEQ ID NO: 2032809 - DNA, 25 bp, Homo sapien
aaaaagtcacaaggataccaaatgg

SEQ ID NO: 2032810 - DNA, 25 bp, Homo sapien
ggttattaagagatccccagtgcat

SEQ ID NO: 2032811 - DNA, 25 bp, Homo sapien
tattaagagatccccagtgcatcct

SEQ ID NO: 2032812 - DNA, 25 bp, Homo sapien
ttaagagatccccagtgcatcctcc

SEQ ID NO: 2032813 - DNA, 25 bp, Homo sapien
gttattaagagatccccagtgcatc

SEQ ID NO: 2032814 - DNA, 25 bp, Homo sapien
tcttggtaaaattgttgtcctcctg

SEQ ID NO: 2032815 - DNA, 25 bp, Homo sapien
tcatctctcaaaactgagtgctctg

SEQ ID NO: 2032816 - DNA, 25 bp, Homo sapien
tctctcaaaactgagtgctctgctt

SEQ ID NO: 2032817 - DNA, 25 bp, Homo sapien
gtcagaggtcttggtaaaattgttg

SEQ ID NO: 2032818 - DNA, 25 bp, Homo sapien
cggcagcagggatgctgagccacag

SEQ ID NO: 2032819 - DNA, 25 bp, Homo sapien
gcagcagggatgctgagccacaggc

SEQ ID NO: 2032820 - DNA, 25 bp, Homo sapien
gcagggatgctgagccacaggccat

SEQ ID NO: 2032821 - DNA, 25 bp, Homo sapien
agcagggatgctgagccacaggcca

SEQ ID NO: 2032822 - DNA, 25 bp, Homo sapien
tgacagcaatagcacaaatgagaac

SEQ ID NO: 2032823 - DNA, 25 bp, Homo sapien
gcaatagcacaaatgagaaccacaa

SEQ ID NO: 2032824 - DNA, 25 bp, Homo sapien
gacagcaatagcacaaatgagaacc

SEQ ID NO: 2032825 - DNA, 25 bp, Homo sapien
cagcaatagcacaaatgagaaccac

SEQ ID NO: 2032826 - DNA, 25 bp, Homo sapien
ttgctttatgagaggccaggggcca

SEQ ID NO: 2032827 - DNA, 25 bp, Homo sapien
gagagagttgctttatgagaggcca

SEQ ID NO: 2032828 - DNA, 25 bp, Homo sapien
tttccagagaagacaggtctgcctg

SEQ ID NO: 2032829 - DNA, 25 bp, Homo sapien
gccagagcaggcatgctccaggttc

SEQ ID NO: 2032830 - DNA, 25 bp, Homo sapien
tcagcctttgagtgggaagggccca

SEQ ID NO: 2032831 - DNA, 25 bp, Homo sapien
aacactgggaagcagcttgaaggga

SEQ ID NO: 2032832 - DNA, 25 bp, Homo sapien
cagtcctccgtcactctctggaagg

SEQ ID NO: 2032833 - DNA, 25 bp, Homo sapien
ctctggaaggtgatgtaagatcatc

SEQ ID NO: 2032834 - DNA, 25 bp, Homo sapien
tcaaggacagtctcagcatctaggg

SEQ ID NO: 2032835 - DNA, 25 bp, Homo sapien
aggacagtctcagcatctagggcag

SEQ ID NO: 2032836 - DNA, 25 bp, Homo sapien
tctagggcagcccacctggtgagca

SEQ ID NO: 2032837 - DNA, 25 bp, Homo sapien
tgtcctcaaggacagtctcagcatc

SEQ ID NO: 2032838 - DNA, 25 bp, Homo sapien
tccgcttgcccacattggaaataat

SEQ ID NO: 2032839 - DNA, 25 bp, Homo sapien
taacaatgactgtaccaccatccac

SEQ ID NO: 2032840 - DNA, 25 bp, Homo sapien
tggaaataatcatttcccccatgcc

SEQ ID NO: 2032841 - DNA, 25 bp, Homo sapien
ccactcctgtggtcctcataacaat

SEQ ID NO: 2032842 - DNA, 25 bp, Homo sapien
tagccgtgtcttagatgtgtctcct

SEQ ID NO: 2032843 - DNA, 25 bp, Homo sapien
cagaacagccatgcatactgagagg

SEQ ID NO: 2032844 - DNA, 25 bp, Homo sapien
agggctatggcatggtgaatagcac

SEQ ID NO: 2032845 - DNA, 25 bp, Homo sapien
tctgctgcatgccacgggatagccg

SEQ ID NO: 2032846 - DNA, 25 bp, Homo sapien
cagggagaggcgtgccatttctcca

SEQ ID NO: 2032847 - DNA, 25 bp, Homo sapien
agggagaggcgtgccatttctccac

SEQ ID NO: 2032848 - DNA, 25 bp, Homo sapien
cactgcggttcacaaaggctgtcag

SEQ ID NO: 2032849 - DNA, 25 bp, Homo sapien
ggccactgcggttcacaaaggctgt

SEQ ID NO: 2032850 - DNA, 25 bp, Homo sapien
gccagctttcaaatcaacacaggat

SEQ ID NO: 2032851 - DNA, 25 bp, Homo sapien
gcttagggttaacatatagccagct

SEQ ID NO: 2032852 - DNA, 25 bp, Homo sapien
caacacaggattgaacaggtttgat

SEQ ID NO: 2032853 - DNA, 25 bp, Homo sapien
caggaatcacccaggaaaagcttag

SEQ ID NO: 2032854 - DNA, 25 bp, Homo sapien
gggctgcttttccatcacgatcagc

SEQ ID NO: 2032855 - DNA, 25 bp, Homo sapien
ctgtcagcatagagctcccgggagg

SEQ ID NO: 2032856 - DNA, 25 bp, Homo sapien
cacgatcagctcattggtgctgtca

SEQ ID NO: 2032857 - DNA, 25 bp, Homo sapien
tggtgctgtcagcatagagctcccg

SEQ ID NO: 2032858 - DNA, 25 bp, Homo sapien
cattctgggcaaactatcgcaagga

SEQ ID NO: 2032859 - DNA, 25 bp, Homo sapien
cagaaaaccaaacaccaccatgttc

SEQ ID NO: 2032860 - DNA, 25 bp, Homo sapien
tctcactcataggtgggaattgaac

SEQ ID NO: 2032861 - DNA, 25 bp, Homo sapien
ccatcattctgggcaaactatcgca

SEQ ID NO: 2032862 - DNA, 25 bp, Homo sapien
tttccatgtccccagcgtgcatgtt

SEQ ID NO: 2032863 - DNA, 25 bp, Homo sapien
atgttctgtcgccttctgccccttt

SEQ ID NO: 2032864 - DNA, 25 bp, Homo sapien
taggattggccgaaatcgtgcctgc

SEQ ID NO: 2032865 - DNA, 25 bp, Homo sapien
gcctgcttgcgccttctttctagaa

SEQ ID NO: 2032866 - DNA, 25 bp, Homo sapien
agaaagaaaaatgaagtatcagcat

SEQ ID NO: 2032867 - DNA, 25 bp, Homo sapien
cagagaaagaaaaatgaagtatcag

SEQ ID NO: 2032868 - DNA, 25 bp, Homo sapien
gcagagaaagaaaaatgaagtatca

SEQ ID NO: 2032869 - DNA, 25 bp, Homo sapien
ctagcagagaaagaaaaatgaagta

SEQ ID NO: 2032870 - DNA, 25 bp, Homo sapien
actcctgggaacacattgagattcc

SEQ ID NO: 2032871 - DNA, 25 bp, Homo sapien
agaactcctgggaacacattgagat

SEQ ID NO: 2032872 - DNA, 25 bp, Homo sapien
tgggaacacattgagattcctccat

SEQ ID NO: 2032873 - DNA, 25 bp, Homo sapien
tcctgggaacacattgagattcctc

SEQ ID NO: 2032874 - DNA, 25 bp, Homo sapien
cagtgactgcacactgatgagtcct

SEQ ID NO: 2032875 - DNA, 25 bp, Homo sapien
cctggggagaagactctcatgacca

SEQ ID NO: 2032876 - DNA, 25 bp, Homo sapien
ctttaggtattgtgaacaaaggatc

SEQ ID NO: 2032877 - DNA, 25 bp, Homo sapien
caggagaggaggcatttctttaggt

SEQ ID NO: 2032878 - DNA, 25 bp, Homo sapien
tggctttggccaatttcctttccca

SEQ ID NO: 2032879 - DNA, 25 bp, Homo sapien
gaccaggcaacatccaatcggctga

SEQ ID NO: 2032880 - DNA, 25 bp, Homo sapien
gctctcatccaatatgaccaggcaa

SEQ ID NO: 2032881 - DNA, 25 bp, Homo sapien
cactatggtaaagtcattttaatgg

SEQ ID NO: 2032882 - DNA, 25 bp, Homo sapien
ggctgagggcctagatagaacaaaa

SEQ ID NO: 2032883 - DNA, 25 bp, Homo sapien
tagctgggaccactactcatgagta

SEQ ID NO: 2032884 - DNA, 25 bp, Homo sapien
tgtggcagccagataagtaggaact

SEQ ID NO: 2032885 - DNA, 25 bp, Homo sapien
gaaatttcaaccgtgagtagctggt

SEQ ID NO: 2032886 - DNA, 25 bp, Homo sapien
gcatgcaaagcactcaacagcagtt

SEQ ID NO: 2032887 - DNA, 25 bp, Homo sapien
tgccgtgaattcagtcccactaacg

SEQ ID NO: 2032888 - DNA, 25 bp, Homo sapien
tcagtgcctggctaaactgcatgtg

SEQ ID NO: 2032889 - DNA, 25 bp, Homo sapien
caggtagcaagtggtcaaggagaat

SEQ ID NO: 2032890 - DNA, 25 bp, Homo sapien
tgcatgtgccttgaagagaagtcct

SEQ ID NO: 2032891 - DNA, 25 bp, Homo sapien
cctataaatccaggcgggcgcttcg

SEQ ID NO: 2032892 - DNA, 25 bp, Homo sapien
ggtggctaatcctcacaaggctctc

SEQ ID NO: 2032893 - DNA, 25 bp, Homo sapien
taagatttatagtgggttgcaaccc

SEQ ID NO: 2032894 - DNA, 25 bp, Homo sapien
gacatttggtgtctatggctagcac

SEQ ID NO: 2032895 - DNA, 25 bp, Homo sapien
tacttgactccaacgaaaaggcagt

SEQ ID NO: 2032896 - DNA, 25 bp, Homo sapien
gagcttaacacagaggcactcaagt

SEQ ID NO: 2032897 - DNA, 25 bp, Homo sapien
tccaggtctgtcactaattgtgcgg

SEQ ID NO: 2032898 - DNA, 25 bp, Homo sapien
cacagggcccttagattgaaagagc

SEQ ID NO: 2032899 - DNA, 25 bp, Homo sapien
caactttgaagaggtcgacttcgga

SEQ ID NO: 2032900 - DNA, 25 bp, Homo sapien
gccacctgtaacttgatagggatga

SEQ ID NO: 2032901 - DNA, 25 bp, Homo sapien
taacaggagcattgtaagccaagga

SEQ ID NO: 2032902 - DNA, 25 bp, Homo sapien
cacgctgatatcaaacccctggctt

SEQ ID NO: 2032903 - DNA, 25 bp, Homo sapien
aaccctatgaagtacatgccgttat

SEQ ID NO: 2032904 - DNA, 25 bp, Homo sapien
gaaccctatgaagtacatgccgtta

SEQ ID NO: 2032905 - DNA, 25 bp, Homo sapien
ggtgatagtaagacagggaaagaac

SEQ ID NO: 2032906 - DNA, 25 bp, Homo sapien
gatagtaagacagggaaagaactaa

SEQ ID NO: 2032907 - DNA, 25 bp, Homo sapien
tagtggtgatagtaagacagggaaa

SEQ ID NO: 2032908 - DNA, 25 bp, Homo sapien
aatagtggtgatagtaagacaggga

SEQ ID NO: 2032909 - DNA, 25 bp, Homo sapien
tgtaagctaacaagttaacctgcct

SEQ ID NO: 2032910 - DNA, 25 bp, Homo sapien
tcttaagaactttgacagatctgaa

SEQ ID NO: 2032911 - DNA, 25 bp, Homo sapien
acttcataggtacataggtacttga

SEQ ID NO: 2032912 - DNA, 25 bp, Homo sapien
tgacattcatatctcacggtaaggg

SEQ ID NO: 2032913 - DNA, 25 bp, Homo sapien
gcctgtaatctcagctacttgggag

SEQ ID NO: 2032914 - DNA, 25 bp, Homo sapien
aaattatccagacgtagtggcacat

SEQ ID NO: 2032915 - DNA, 25 bp, Homo sapien
gctgaggtaggagaatcgcttgaac

SEQ ID NO: 2032916 - DNA, 25 bp, Homo sapien
acaaaaaattatccagacgtagtgg

SEQ ID NO: 2032917 - DNA, 25 bp, Homo sapien
gaactcagaaattggaggaatccag

SEQ ID NO: 2032918 - DNA, 25 bp, Homo sapien
tgccgtctgtggttagtagaactca

SEQ ID NO: 2032919 - DNA, 25 bp, Homo sapien
gtttaacccagccagtgttctgccg

SEQ ID NO: 2032920 - DNA, 25 bp, Homo sapien
gaacattgtcagtccgcatagcatc

SEQ ID NO: 2032921 - DNA, 25 bp, Homo sapien
ttattcctttggtagggttccagca

SEQ ID NO: 2032922 - DNA, 25 bp, Homo sapien
taaccgtcactaaggtgtagggaga

SEQ ID NO: 2032923 - DNA, 25 bp, Homo sapien
tcagggatacgtccttgattcagaa

SEQ ID NO: 2032924 - DNA, 25 bp, Homo sapien
tattttgatagagagctccccagat

SEQ ID NO: 2032925 - DNA, 25 bp, Homo sapien
cctggcaaacagctagaaatcctcg

SEQ ID NO: 2032926 - DNA, 25 bp, Homo sapien
tacttgtctgaaatgcccgctcttc

SEQ ID NO: 2032927 - DNA, 25 bp, Homo sapien
taaatcacgatagacaaggaccagc

SEQ ID NO: 2032928 - DNA, 25 bp, Homo sapien
aaaagatgctgagttagtgatcccc

SEQ ID NO: 2032929 - DNA, 25 bp, Homo sapien
aactatcttgtgagctgagacagac

SEQ ID NO: 2032930 - DNA, 25 bp, Homo sapien
gaaagtaattttgtgccatgcgtgg

SEQ ID NO: 2032931 - DNA, 25 bp, Homo sapien
tataggaagttttagtggctcacct

SEQ ID NO: 2032932 - DNA, 25 bp, Homo sapien
caaaaccagggccaaggtatgcttt

SEQ ID NO: 2032933 - DNA, 25 bp, Homo sapien
tcctttatgttgataaacagtgtcg

SEQ ID NO: 2032934 - DNA, 25 bp, Homo sapien
gaagatccatatctatccaaactgg

SEQ ID NO: 2032935 - DNA, 25 bp, Homo sapien
aacagtgtcgatattaaggagctca

SEQ ID NO: 2032936 - DNA, 25 bp, Homo sapien
ccatttattgttccggaaacttcag

SEQ ID NO: 2032937 - DNA, 25 bp, Homo sapien
gaggtagctgagcttaaaccgtaag

SEQ ID NO: 2032938 - DNA, 25 bp, Homo sapien
cctatcaataggcaacataaaaaat

SEQ ID NO: 2032939 - DNA, 25 bp, Homo sapien
ctgatatttgatcaagagaaaagtt

SEQ ID NO: 2032940 - DNA, 25 bp, Homo sapien
gcagcagtggtgcctatcaataggc

SEQ ID NO: 2032941 - DNA, 25 bp, Homo sapien
ccatcaggacttgttcttgtttgct

SEQ ID NO: 2032942 - DNA, 25 bp, Homo sapien
gggaaagcgtgtgtggggttgacag

SEQ ID NO: 2032943 - DNA, 25 bp, Homo sapien
tgtcttcataaattgctccatcagg

SEQ ID NO: 2032944 - DNA, 25 bp, Homo sapien
tgtggggttgacagacaggttcttc

SEQ ID NO: 2032945 - DNA, 25 bp, Homo sapien
gatatggtagttgtctctagaagcc

SEQ ID NO: 2032946 - DNA, 25 bp, Homo sapien
tgtacatcctcatgctaaccgtagc

SEQ ID NO: 2032947 - DNA, 25 bp, Homo sapien
tggtaagacctcaagcacactgtag

SEQ ID NO: 2032948 - DNA, 25 bp, Homo sapien
cacactgtaggtttaaggaggatat

SEQ ID NO: 2032949 - DNA, 25 bp, Homo sapien
cagacgctgttgttgcagattaacc

SEQ ID NO: 2032950 - DNA, 25 bp, Homo sapien
tagtaatttgatgggacctcgccgt

SEQ ID NO: 2032951 - DNA, 25 bp, Homo sapien
ttttgcctgagttggatcacgctcg

SEQ ID NO: 2032952 - DNA, 25 bp, Homo sapien
caacactacgtgtgggagggtgcac

SEQ ID NO: 2032953 - DNA, 25 bp, Homo sapien
cctttgtcggatagtgtctgcggcg

SEQ ID NO: 2032954 - DNA, 25 bp, Homo sapien
ctgacagtgacaggccgttagtgcc

SEQ ID NO: 2032955 - DNA, 25 bp, Homo sapien
cgagaccggagatgttttcaagccc

SEQ ID NO: 2032956 - DNA, 25 bp, Homo sapien
gtagtcacgtgtccgcgggtgtcac

SEQ ID NO: 2032957 - DNA, 25 bp, Homo sapien
catttaaagcagtgtagtcaccggg

SEQ ID NO: 2032958 - DNA, 25 bp, Homo sapien
gagtgacgcatccttacagatccca

SEQ ID NO: 2032959 - DNA, 25 bp, Homo sapien
tgtaaaataaccttgccgcattgga

SEQ ID NO: 2032960 - DNA, 25 bp, Homo sapien
tacaaagaggtatgcgaagcttagc

SEQ ID NO: 2032961 - DNA, 25 bp, Homo sapien
acttgcattccttgctcagagttct

SEQ ID NO: 2032962 - DNA, 25 bp, Homo sapien
gaaataaagttaggaacttgcattc

SEQ ID NO: 2032963 - DNA, 25 bp, Homo sapien
ctcagtggaagctggaactgaaata

SEQ ID NO: 2032964 - DNA, 25 bp, Homo sapien
tctcaaatcaatttcgaagaaagcg

SEQ ID NO: 2032965 - DNA, 25 bp, Homo sapien
gacttctggacaaaagggtagactg

SEQ ID NO: 2032966 - DNA, 25 bp, Homo sapien
acttctggacaaaagggtagactgg

SEQ ID NO: 2032967 - DNA, 25 bp, Homo sapien
gatctttggctagagaagctttata

SEQ ID NO: 2032968 - DNA, 25 bp, Homo sapien
aaagtagttgaaataagattgaatg

SEQ ID NO: 2032969 - DNA, 25 bp, Homo sapien
tattctgatctttggctagagaagc

SEQ ID NO: 2032970 - DNA, 25 bp, Homo sapien
gaatgtattctgatctttggctaga

SEQ ID NO: 2032971 - DNA, 25 bp, Homo sapien
cagtcagagggaagctatccttctc

SEQ ID NO: 2032972 - DNA, 25 bp, Homo sapien
tcagtcagagggaagctatccttct

SEQ ID NO: 2032973 - DNA, 25 bp, Homo sapien
gacccattttaagtgctcctagtga

SEQ ID NO: 2032974 - DNA, 25 bp, Homo sapien
tagtagaatactgtaagccttgaat

SEQ ID NO: 2032975 - DNA, 25 bp, Homo sapien
taatgtactataaattgaggtctgc

SEQ ID NO: 2032976 - DNA, 25 bp, Homo sapien
tactagaagtgctcctaagaaacag

SEQ ID NO: 2032977 - DNA, 25 bp, Homo sapien
attgcttggtcaaagtccctcaagg

SEQ ID NO: 2032978 - DNA, 25 bp, Homo sapien
catcagtaagtatcatataaagatt

SEQ ID NO: 2032979 - DNA, 25 bp, Homo sapien
ttacttaatttacatgaggtccttg

SEQ ID NO: 2032980 - DNA, 25 bp, Homo sapien
ttattgcttggtcaaagtccctcaa

SEQ ID NO: 2032981 - DNA, 25 bp, Homo sapien
taagaaatcacttttagcagtgtct

SEQ ID NO: 2032982 - DNA, 25 bp, Homo sapien
gaatacctaaattaacatacactgt

SEQ ID NO: 2032983 - DNA, 25 bp, Homo sapien
catgtcaatgttacctagaggaaaa

SEQ ID NO: 2032984 - DNA, 25 bp, Homo sapien
gcagtgtctataagtcaaaatatct

SEQ ID NO: 2032985 - DNA, 25 bp, Homo sapien
gcagtgagagtaggaaaagaataaa

SEQ ID NO: 2032986 - DNA, 25 bp, Homo sapien
tgaagcagtgagagtaggaaaagaa

SEQ ID NO: 2032987 - DNA, 25 bp, Homo sapien
aagcagtgagagtaggaaaagaata

SEQ ID NO: 2032988 - DNA, 25 bp, Homo sapien
aatgaagcagtgagagtaggaaaag

SEQ ID NO: 2032989 - DNA, 25 bp, Homo sapien
gtatagtagacggtaataaagcaca

SEQ ID NO: 2032990 - DNA, 25 bp, Homo sapien
gcagataagcctaaacctaagtcat

SEQ ID NO: 2032991 - DNA, 25 bp, Homo sapien
caagttttgaacgaatgctaagcct

SEQ ID NO: 2032992 - DNA, 25 bp, Homo sapien
tatagatagatacaaagaacgagac

SEQ ID NO: 2032993 - DNA, 25 bp, Homo sapien
tgcagacagacctcactatatagat

SEQ ID NO: 2032994 - DNA, 25 bp, Homo sapien
gcccggccagtgtatcttattgtaa

SEQ ID NO: 2032995 - DNA, 25 bp, Homo sapien
gcatctaccggaaaacacctctctt

SEQ ID NO: 2032996 - DNA, 25 bp, Homo sapien
gttacacgcatagattgaatcagct

SEQ ID NO: 2032997 - DNA, 25 bp, Homo sapien
gaagcaatacattggcacacccata

SEQ ID NO: 2032998 - DNA, 25 bp, Homo sapien
gtttacagccagaatccctgcccat

SEQ ID NO: 2032999 - DNA, 25 bp, Homo sapien
caacgctgttcaagggtcattttcc

SEQ ID NO: 2033000 - DNA, 25 bp, Homo sapien
ggacctcaaattaagagcaacgctg

SEQ ID NO: 2033001 - DNA, 25 bp, Homo sapien
ttttttttaagcagagtctggctct

SEQ ID NO: 2033002 - DNA, 25 bp, Homo sapien
tgcctccctggttcatgccattctc

SEQ ID NO: 2033003 - DNA, 25 bp, Homo sapien
tttttttaagcagagtctggctctg

SEQ ID NO: 2033004 - DNA, 25 bp, Homo sapien
ctgcctccctggttcatgccattct

SEQ ID NO: 2033005 - DNA, 25 bp, Homo sapien
gcttgatgagataccaaaatgtgag

SEQ ID NO: 2033006 - DNA, 25 bp, Homo sapien
ttttcttaatgatccagaccacctg

SEQ ID NO: 2033007 - DNA, 25 bp, Homo sapien
cattgtgcacacattacctgtctga

SEQ ID NO: 2033008 - DNA, 25 bp, Homo sapien
tcacactgtgtgagacaggcctctc

SEQ ID NO: 2033009 - DNA, 25 bp, Homo sapien
aatcaaagatatttggtagtcaaaa

SEQ ID NO: 2033010 - DNA, 25 bp, Homo sapien
aatctgctgctgaacttgttagaca

SEQ ID NO: 2033011 - DNA, 25 bp, Homo sapien
taggttagcgtacaatttatcataa

SEQ ID NO: 2033012 - DNA, 25 bp, Homo sapien
tataggaatattccagtcaatctct

SEQ ID NO: 2033013 - DNA, 25 bp, Homo sapien
cctgattgtgtttgtggttacacca

SEQ ID NO: 2033014 - DNA, 25 bp, Homo sapien
tagaacaggcaatattacagtgaca

SEQ ID NO: 2033015 - DNA, 25 bp, Homo sapien
cctgtggacttcaataacatttata

SEQ ID NO: 2033016 - DNA, 25 bp, Homo sapien
tacagtgacagacagcagataatta

SEQ ID NO: 2033017 - DNA, 25 bp, Homo sapien
gcaatgcagcaatgtcagatatctg

SEQ ID NO: 2033018 - DNA, 25 bp, Homo sapien
agcaatgcagcaatgtcagatatct

SEQ ID NO: 2033019 - DNA, 25 bp, Homo sapien
aatgcagcaatgtcagatatctgga

SEQ ID NO: 2033020 - DNA, 25 bp, Homo sapien
caatgcagcaatgtcagatatctgg

SEQ ID NO: 2033021 - DNA, 25 bp, Homo sapien
ccaggtccagctaatcacaagttat

SEQ ID NO: 2033022 - DNA, 25 bp, Homo sapien
tactctcaatgttacctcgccaggt

SEQ ID NO: 2033023 - DNA, 25 bp, Homo sapien
ccagtctagagattaactactctca

SEQ ID NO: 2033024 - DNA, 25 bp, Homo sapien
ggtcttccagatggattccagtcta

SEQ ID NO: 2033025 - DNA, 25 bp, Homo sapien
gatcctagagtctgctccatgcatg

SEQ ID NO: 2033026 - DNA, 25 bp, Homo sapien
agatcctagagtctgctccatgcat

SEQ ID NO: 2033027 - DNA, 25 bp, Homo sapien
ctgcagatcctagagtctgctccat

SEQ ID NO: 2033028 - DNA, 25 bp, Homo sapien
ccatgcatggagaatgagggccacc

SEQ ID NO: 2033029 - DNA, 25 bp, Homo sapien
gttgatcttaacactgcaactgagg

SEQ ID NO: 2033030 - DNA, 25 bp, Homo sapien
ctcggcgacgcgctaggctactcag

SEQ ID NO: 2033031 - DNA, 25 bp, Homo sapien
tagtggctagcacatcacaaggctt

SEQ ID NO: 2033032 - DNA, 25 bp, Homo sapien
tttagtacacggcatatcctcagcg

SEQ ID NO: 2033033 - DNA, 25 bp, Homo sapien
gccgctttggtccagaccatctctg

SEQ ID NO: 2033034 - DNA, 25 bp, Homo sapien
cctggcaccgctctacagaggctcg

SEQ ID NO: 2033035 - DNA, 25 bp, Homo sapien
agcagcatctctgcgccgctttggt

SEQ ID NO: 2033036 - DNA, 25 bp, Homo sapien
gctctgccctggtcgctgtcagtgc

SEQ ID NO: 2033037 - DNA, 25 bp, Homo sapien
gggagtaagatgaatttgtggaaca

SEQ ID NO: 2033038 - DNA, 25 bp, Homo sapien
tccagtgaaatttggggagtaagat

SEQ ID NO: 2033039 - DNA, 25 bp, Homo sapien
ctgatttcgacatggtcgtagttac

SEQ ID NO: 2033040 - DNA, 25 bp, Homo sapien
ggaacatttcataagacaaccgtaa

SEQ ID NO: 2033041 - DNA, 25 bp, Homo sapien
tgcaattagtaattaaacagccttt

SEQ ID NO: 2033042 - DNA, 25 bp, Homo sapien
aagaagtgactctgtggactctact

SEQ ID NO: 2033043 - DNA, 25 bp, Homo sapien
tctgtctaaataagcctgaataatt

SEQ ID NO: 2033044 - DNA, 25 bp, Homo sapien
cgtggtgataggctcctgtgatccc

SEQ ID NO: 2033045 - DNA, 25 bp, Homo sapien
tgatctgatagaaacctgaacttga

SEQ ID NO: 2033046 - DNA, 25 bp, Homo sapien
cacagcagttggtgaacctgaaaag

SEQ ID NO: 2033047 - DNA, 25 bp, Homo sapien
ccggattatattcaggagatcccca

SEQ ID NO: 2033048 - DNA, 25 bp, Homo sapien
tattgtgggagtagcctaactgatc

SEQ ID NO: 2033049 - DNA, 25 bp, Homo sapien
gtacagggcacattgacattttaga

SEQ ID NO: 2033050 - DNA, 25 bp, Homo sapien
ctgcgaagtacagggcacattgaca

SEQ ID NO: 2033051 - DNA, 25 bp, Homo sapien
ttagataacgagagctgcttttctc

SEQ ID NO: 2033052 - DNA, 25 bp, Homo sapien
tgacattttagataacgagagctgc

SEQ ID NO: 2033053 - DNA, 25 bp, Homo sapien
acagaaatgaatacaataaggtgga

SEQ ID NO: 2033054 - DNA, 25 bp, Homo sapien
atgaatacaataaggtggaagataa

SEQ ID NO: 2033055 - DNA, 25 bp, Homo sapien
aatacaataaggtggaagataagta

SEQ ID NO: 2033056 - DNA, 25 bp, Homo sapien
tacagaaatgaatacaataaggtgg

SEQ ID NO: 2033057 - DNA, 25 bp, Homo sapien
ctccacagatagagttagtgtttcc

SEQ ID NO: 2033058 - DNA, 25 bp, Homo sapien
tcttaggttctccacagatagagtt

SEQ ID NO: 2033059 - DNA, 25 bp, Homo sapien
tttagctcttaggttctccacagat

SEQ ID NO: 2033060 - DNA, 25 bp, Homo sapien
ggttctccacagatagagttagtgt

SEQ ID NO: 2033061 - DNA, 25 bp, Homo sapien
ctttgagtaagttcataatgtaact

SEQ ID NO: 2033062 - DNA, 25 bp, Homo sapien
ttaaactttgagtaagttcataatg

SEQ ID NO: 2033063 - DNA, 25 bp, Homo sapien
aaactttgagtaagttcataatgta

SEQ ID NO: 2033064 - DNA, 25 bp, Homo sapien
gatgtccagttttaaactttgagta

SEQ ID NO: 2033065 - DNA, 25 bp, Homo sapien
tacagtgatacgtactacctgttcc

SEQ ID NO: 2033066 - DNA, 25 bp, Homo sapien
cactattatccgtgaagtcctttag

SEQ ID NO: 2033067 - DNA, 25 bp, Homo sapien
tgcctaatgtaattaacagcacatc

SEQ ID NO: 2033068 - DNA, 25 bp, Homo sapien
tcattaatacattgccagacttgtt

SEQ ID NO: 2033069 - DNA, 25 bp, Homo sapien
agaaaagttgtagaacaatgatttt

SEQ ID NO: 2033070 - DNA, 25 bp, Homo sapien
tatcattacttctgcagttattagc

SEQ ID NO: 2033071 - DNA, 25 bp, Homo sapien
aaagttgtagaacaatgattttcta

SEQ ID NO: 2033072 - DNA, 25 bp, Homo sapien
atcattacttctgcagttattagct

SEQ ID NO: 2033073 - DNA, 25 bp, Homo sapien
gggatatatcccaagtatgccatac

SEQ ID NO: 2033074 - DNA, 25 bp, Homo sapien
gtatgccatactggttcaacattca

SEQ ID NO: 2033075 - DNA, 25 bp, Homo sapien
aatcaagcaatgtgggctgggtgtg

SEQ ID NO: 2033076 - DNA, 25 bp, Homo sapien
aaattacactttgaccaagtgggat

SEQ ID NO: 2033077 - DNA, 25 bp, Homo sapien
gctctttagtaaacagattggaagg

SEQ ID NO: 2033078 - DNA, 25 bp, Homo sapien
tagtaaacagattggaaggaacacc

SEQ ID NO: 2033079 - DNA, 25 bp, Homo sapien
gtaaacagattggaaggaacaccaa

SEQ ID NO: 2033080 - DNA, 25 bp, Homo sapien
ttgctctttagtaaacagattggaa

SEQ ID NO: 2033081 - DNA, 25 bp, Homo sapien
aagaggctccagttgcagctttatg

SEQ ID NO: 2033082 - DNA, 25 bp, Homo sapien
tatgatttgataaccaattccctcc

SEQ ID NO: 2033083 - DNA, 25 bp, Homo sapien
cctccattcgtcagaaaaagttcca

SEQ ID NO: 2033084 - DNA, 25 bp, Homo sapien
tctgtagaacagctgtatgatttga

SEQ ID NO: 2033085 - DNA, 25 bp, Homo sapien
gaaatctattctgcattcccaagag

SEQ ID NO: 2033086 - DNA, 25 bp, Homo sapien
tccagaaagcaaaattgataagatg

SEQ ID NO: 2033087 - DNA, 25 bp, Homo sapien
taatcagggtagcattaaaatggag

SEQ ID NO: 2033088 - DNA, 25 bp, Homo sapien
tctattctgtgtttatgtagggtgg

SEQ ID NO: 2033089 - DNA, 25 bp, Homo sapien
cacagcagctagtcatgtggacagt

SEQ ID NO: 2033090 - DNA, 25 bp, Homo sapien
caggagacattgcagacaacatggc

SEQ ID NO: 2033091 - DNA, 25 bp, Homo sapien
cagatacaacgtttgaccaggaaag

SEQ ID NO: 2033092 - DNA, 25 bp, Homo sapien
aacatggcgcatccggccccatggg

SEQ ID NO: 2033093 - DNA, 25 bp, Homo sapien
gtcagggagacaggacttccctcac

SEQ ID NO: 2033094 - DNA, 25 bp, Homo sapien
aggcgccccgccagtcagggagaca

SEQ ID NO: 2033095 - DNA, 25 bp, Homo sapien
cgaatgacgcctggagagtgcaggc

SEQ ID NO: 2033096 - DNA, 25 bp, Homo sapien
gcaggcgccccgccagtcagggaga

SEQ ID NO: 2033097 - DNA, 25 bp, Homo sapien
ccactaggaagtcgagcaagggcag

SEQ ID NO: 2033098 - DNA, 25 bp, Homo sapien
tctttctagaacacgtgtaccggta

SEQ ID NO: 2033099 - DNA, 25 bp, Homo sapien
tctgcctcggaaaggtatgagttac

SEQ ID NO: 2033100 - DNA, 25 bp, Homo sapien
ttctaggcaaagagcaaggccgttg

SEQ ID NO: 2033101 - DNA, 25 bp, Homo sapien
gggagagaatgaggcctttgagggc

SEQ ID NO: 2033102 - DNA, 25 bp, Homo sapien
gggaagggagagaatgaggcctttg

SEQ ID NO: 2033103 - DNA, 25 bp, Homo sapien
gaagggagagaatgaggcctttgag

SEQ ID NO: 2033104 - DNA, 25 bp, Homo sapien
aagggagagaatgaggcctttgagg

SEQ ID NO: 2033105 - DNA, 25 bp, Homo sapien
ctgtctcatgtcttatccccactcc

SEQ ID NO: 2033106 - DNA, 25 bp, Homo sapien
tgtctcatgtcttatccccactccc

SEQ ID NO: 2033107 - DNA, 25 bp, Homo sapien
cctgtctcatgtcttatccccactc

SEQ ID NO: 2033108 - DNA, 25 bp, Homo sapien
caagacgaagagtatgcccagtttt

SEQ ID NO: 2033109 - DNA, 25 bp, Homo sapien
gataatttactaccaagacgaagag

SEQ ID NO: 2033110 - DNA, 25 bp, Homo sapien
cctggacaagcagggcaaaatacgt

SEQ ID NO: 2033111 - DNA, 25 bp, Homo sapien
tacgtgctctttacagataatttac

SEQ ID NO: 2033112 - DNA, 25 bp, Homo sapien
caggcacagacagcctcgggctgca

SEQ ID NO: 2033113 - DNA, 25 bp, Homo sapien
tggcaaatccagatatttctgctgg

SEQ ID NO: 2033114 - DNA, 25 bp, Homo sapien
ttctgctgggaaccaggagcagtga

SEQ ID NO: 2033115 - DNA, 25 bp, Homo sapien
ctcgggctgcacaaggtggggcgcc

SEQ ID NO: 2033116 - DNA, 25 bp, Homo sapien
tcttctaccattcaggttttcgttg

SEQ ID NO: 2033117 - DNA, 25 bp, Homo sapien
cacaggtgggccatggatattccct

SEQ ID NO: 2033118 - DNA, 25 bp, Homo sapien
tgccaggctaacaccaagtaaccca

SEQ ID NO: 2033119 - DNA, 25 bp, Homo sapien
ccatagcctgggctgttcatgaggc

SEQ ID NO: 2033120 - DNA, 25 bp, Homo sapien
tgcttcctaaagcagtgatcctcag

SEQ ID NO: 2033121 - DNA, 25 bp, Homo sapien
gcaagattgcctggacacgttaatt

SEQ ID NO: 2033122 - DNA, 25 bp, Homo sapien
tttgaggcgatgaactacgtgcacc

SEQ ID NO: 2033123 - DNA, 25 bp, Homo sapien
tacagatcgtaccatgacagcatga

SEQ ID NO: 2033124 - DNA, 25 bp, Homo sapien
ggttgtcagaggtagccaaaaatat

SEQ ID NO: 2033125 - DNA, 25 bp, Homo sapien
tcagaggtagccaaaaatatccaaa

SEQ ID NO: 2033126 - DNA, 25 bp, Homo sapien
ctggttgtcagaggtagccaaaaat

SEQ ID NO: 2033127 - DNA, 25 bp, Homo sapien
ttgtcagaggtagccaaaaatatcc

SEQ ID NO: 2033128 - DNA, 25 bp, Homo sapien
ttgggcaaagtctgatacaatagtg

SEQ ID NO: 2033129 - DNA, 25 bp, Homo sapien
ttttttgggcaaagtctgatacaat

SEQ ID NO: 2033130 - DNA, 25 bp, Homo sapien
gggcaaagtctgatacaatagtgaa

SEQ ID NO: 2033131 - DNA, 25 bp, Homo sapien
ttttgggcaaagtctgatacaatag

SEQ ID NO: 2033132 - DNA, 25 bp, Homo sapien
gaataaatgctcaagtggcagccaa

SEQ ID NO: 2033133 - DNA, 25 bp, Homo sapien
tcaatgaatgagtgggctcacccac

SEQ ID NO: 2033134 - DNA, 25 bp, Homo sapien
tatacttacaccatgctagaggagc

SEQ ID NO: 2033135 - DNA, 25 bp, Homo sapien
gaaaacggttgccacatttccaggc

SEQ ID NO: 2033136 - DNA, 25 bp, Homo sapien
ttggaacgactaaagcacgctggcg

SEQ ID NO: 2033137 - DNA, 25 bp, Homo sapien
gaaaacacgaagactgctgaagccg

SEQ ID NO: 2033138 - DNA, 25 bp, Homo sapien
gatagcagcggccaatctaaacggg

SEQ ID NO: 2033139 - DNA, 25 bp, Homo sapien
tcaaggccgttgcaggagatgcccg

SEQ ID NO: 2033140 - DNA, 25 bp, Homo sapien
tctcacggtatagaagaagggtaca

SEQ ID NO: 2033141 - DNA, 25 bp, Homo sapien
taatgggtcccggtcataaacctca

SEQ ID NO: 2033142 - DNA, 25 bp, Homo sapien
cttgtctgaagcatgtgagtagggc

SEQ ID NO: 2033143 - DNA, 25 bp, Homo sapien
gctggtagaccacacttcacacatg

SEQ ID NO: 2033144 - DNA, 25 bp, Homo sapien
gccactatgcctgtcctagatatat

SEQ ID NO: 2033145 - DNA, 25 bp, Homo sapien
cactctaattacatgtaccagctgt

SEQ ID NO: 2033146 - DNA, 25 bp, Homo sapien
tgtctagaaagatattaagctggcc

SEQ ID NO: 2033147 - DNA, 25 bp, Homo sapien
ctagcggatatttcctgaagtaata

SEQ ID NO: 2033148 - DNA, 25 bp, Homo sapien
gcttcagtagatccctgcaaaacag

SEQ ID NO: 2033149 - DNA, 25 bp, Homo sapien
tctgttatgtttatgcctgggagtg

SEQ ID NO: 2033150 - DNA, 25 bp, Homo sapien
aacagtcttccagaatgcttgtacc

SEQ ID NO: 2033151 - DNA, 25 bp, Homo sapien
gaatattccacttgctaaagcatca

SEQ ID NO: 2033152 - DNA, 25 bp, Homo sapien
ttcttggccaagagacacgtttatg

SEQ ID NO: 2033153 - DNA, 25 bp, Homo sapien
tcagctaagaggcatgacatggttt

SEQ ID NO: 2033154 - DNA, 25 bp, Homo sapien
gagacacgtttatggacacagtcat

SEQ ID NO: 2033155 - DNA, 25 bp, Homo sapien
gacacagtcatataatgcatttcct

SEQ ID NO: 2033156 - DNA, 25 bp, Homo sapien
gttcttagagttagtgcagtacccg

SEQ ID NO: 2033157 - DNA, 25 bp, Homo sapien
gcagtacccggtcaatacatggagt

SEQ ID NO: 2033158 - DNA, 25 bp, Homo sapien
cccggtcaatacatggagtggtcca

SEQ ID NO: 2033159 - DNA, 25 bp, Homo sapien
gagtggtccaagcaagcttctgttc

SEQ ID NO: 2033160 - DNA, 25 bp, Homo sapien
ggtcagctacatgcaactattacgt

SEQ ID NO: 2033161 - DNA, 25 bp, Homo sapien
actattacgtatattagcaaaatgg

SEQ ID NO: 2033162 - DNA, 25 bp, Homo sapien
caaaagaccaagaagcagtaaatgt

SEQ ID NO: 2033163 - DNA, 25 bp, Homo sapien
tgtttaggccccacatgtgaatgct

SEQ ID NO: 2033164 - DNA, 25 bp, Homo sapien
gacccgtgcatcttactgtaacccg

SEQ ID NO: 2033165 - DNA, 25 bp, Homo sapien
gaaggagacgtccatctgagcagcc

SEQ ID NO: 2033166 - DNA, 25 bp, Homo sapien
gactccttcacgtcaggctcaggtt

SEQ ID NO: 2033167 - DNA, 25 bp, Homo sapien
tccgtgagactgaaaggacccgtgc

SEQ ID NO: 2033168 - DNA, 25 bp, Homo sapien
tctgactggtcagagcagcgcctgg

SEQ ID NO: 2033169 - DNA, 25 bp, Homo sapien
tctgggatctctggtaccgtcactc

SEQ ID NO: 2033170 - DNA, 25 bp, Homo sapien
tccacagaggatgttgttcaaacca

SEQ ID NO: 2033171 - DNA, 25 bp, Homo sapien
gagctgcctcacgttctctgactgg

SEQ ID NO: 2033172 - DNA, 25 bp, Homo sapien
gaatgactccgattgcttgcttggg

SEQ ID NO: 2033173 - DNA, 25 bp, Homo sapien
cagaatgactccgattgcttgcttg

SEQ ID NO: 2033174 - DNA, 25 bp, Homo sapien
aaacagaatgactccgattgcttgc

SEQ ID NO: 2033175 - DNA, 25 bp, Homo sapien
aacagaatgactccgattgcttgct

SEQ ID NO: 2033176 - DNA, 25 bp, Homo sapien
cactgttgtgactcgttggccatta

SEQ ID NO: 2033177 - DNA, 25 bp, Homo sapien
tgtcagagtgaacagcaccgcgaga

SEQ ID NO: 2033178 - DNA, 25 bp, Homo sapien
gaatgatagctgtgattcaccccac

SEQ ID NO: 2033179 - DNA, 25 bp, Homo sapien
aggctcgtggctcggaagacaaacc

SEQ ID NO: 2033180 - DNA, 25 bp, Homo sapien
ggcatgcatgctggcggcggcatgc

SEQ ID NO: 2033181 - DNA, 25 bp, Homo sapien
aaacccagtggactgggctgggtct

SEQ ID NO: 2033182 - DNA, 25 bp, Homo sapien
atgctggcggcggcatgcctccctt

SEQ ID NO: 2033183 - DNA, 25 bp, Homo sapien
ctcccttccacaagcccatgctgct

SEQ ID NO: 2033184 - DNA, 25 bp, Homo sapien
caagccatgacgaccactagtggtc

SEQ ID NO: 2033185 - DNA, 25 bp, Homo sapien
gctagtaaaagactgagccaagcgg

SEQ ID NO: 2033186 - DNA, 25 bp, Homo sapien
accacaagccatgacgaccactagt

SEQ ID NO: 2033187 - DNA, 25 bp, Homo sapien
cactcgcaaagggacacggcttgct

SEQ ID NO: 2033188 - DNA, 25 bp, Homo sapien
atctagtttccccactttaaatcat

SEQ ID NO: 2033189 - DNA, 25 bp, Homo sapien
ggtagacatctagaaaacaatcaaa

SEQ ID NO: 2033190 - DNA, 25 bp, Homo sapien
gcatttattggtagacatctagaaa

SEQ ID NO: 2033191 - DNA, 25 bp, Homo sapien
attgcatttattggtagacatctag

SEQ ID NO: 2033192 - DNA, 25 bp, Homo sapien
tggtagacatctagaaaacaatcaa

SEQ ID NO: 2033193 - DNA, 25 bp, Homo sapien
cactcccaagagtggtcacaggtat

SEQ ID NO: 2033194 - DNA, 25 bp, Homo sapien
caagagaacttgtgccacaacagtt

SEQ ID NO: 2033195 - DNA, 25 bp, Homo sapien
cagtatgtgaagaagttgcacctca

SEQ ID NO: 2033196 - DNA, 25 bp, Homo sapien
gattaaagactgcagcactcccaag

SEQ ID NO: 2033197 - DNA, 25 bp, Homo sapien
caggtcacatgcgtggcgaatgccc

SEQ ID NO: 2033198 - DNA, 25 bp, Homo sapien
tcacaaacgattcacacacagggct

SEQ ID NO: 2033199 - DNA, 25 bp, Homo sapien
ggaaagacaccgagattcaagcctt

SEQ ID NO: 2033200 - DNA, 25 bp, Homo sapien
gactcttgaaatccctggtattggg

SEQ ID NO: 2033201 - DNA, 25 bp, Homo sapien
ctcatggcatcttcggagattttgg

SEQ ID NO: 2033202 - DNA, 25 bp, Homo sapien
gctcatggcatcttcggagattttg

SEQ ID NO: 2033203 - DNA, 25 bp, Homo sapien
tcatggcatcttcggagattttggt

SEQ ID NO: 2033204 - DNA, 25 bp, Homo sapien
atggcatcttcggagattttggtac

SEQ ID NO: 2033205 - DNA, 25 bp, Homo sapien
gacatcgctgtcacggtccatctga

SEQ ID NO: 2033206 - DNA, 25 bp, Homo sapien
tccatctgaagagccatgatggtct

SEQ ID NO: 2033207 - DNA, 25 bp, Homo sapien
gcttgcaaaatacttgacatcgctg

SEQ ID NO: 2033208 - DNA, 25 bp, Homo sapien
gccatgatggtctgctccacagcct

SEQ ID NO: 2033209 - DNA, 25 bp, Homo sapien
ccgtcaagtacgagtgtaaacagtt

SEQ ID NO: 2033210 - DNA, 25 bp, Homo sapien
gaacacttcagagttccgtcaagta

SEQ ID NO: 2033211 - DNA, 25 bp, Homo sapien
tttctacaagtacaaacaagccaca

SEQ ID NO: 2033212 - DNA, 25 bp, Homo sapien
gatgaaaccagtccaacggaacact

SEQ ID NO: 2033213 - DNA, 25 bp, Homo sapien
tccgtgcaactatatttatgaggtg

SEQ ID NO: 2033214 - DNA, 25 bp, Homo sapien
tcattcatccgtgcaactatattta

SEQ ID NO: 2033215 - DNA, 25 bp, Homo sapien
tatatttatgaggtgttttgggcgg

SEQ ID NO: 2033216 - DNA, 25 bp, Homo sapien
ctgtgcttcattcatccgtgcaact

SEQ ID NO: 2033217 - DNA, 25 bp, Homo sapien
gctaaggttagcagatgcggcatga

SEQ ID NO: 2033218 - DNA, 25 bp, Homo sapien
catgagatgcacagcaaactggtcc

SEQ ID NO: 2033219 - DNA, 25 bp, Homo sapien
gcaagcagcactcgcacgttaggaa

SEQ ID NO: 2033220 - DNA, 25 bp, Homo sapien
taggaaccctgtcatttgctaaggt

SEQ ID NO: 2033221 - DNA, 25 bp, Homo sapien
tgggaactcaaatcaaaaattacat

SEQ ID NO: 2033222 - DNA, 25 bp, Homo sapien
aagagaaacagctgctctaggcttc

SEQ ID NO: 2033223 - DNA, 25 bp, Homo sapien
tctgtcaatgtagccaaaaactcga

SEQ ID NO: 2033224 - DNA, 25 bp, Homo sapien
actactggctaacaaaatctctgag

SEQ ID NO: 2033225 - DNA, 25 bp, Homo sapien
tgatgaggtccactccgaacgttgg

SEQ ID NO: 2033226 - DNA, 25 bp, Homo sapien
ggtgttgccgcgtgcagcttcttca

SEQ ID NO: 2033227 - DNA, 25 bp, Homo sapien
aagacaaaggcttgccgaccagacc

SEQ ID NO: 2033228 - DNA, 25 bp, Homo sapien
gaccagaccacttgggacatctgcc

SEQ ID NO: 2033229 - DNA, 25 bp, Homo sapien
acagcttccattctaggatcttaga

SEQ ID NO: 2033230 - DNA, 25 bp, Homo sapien
gcttccattctaggatcttagagtt

SEQ ID NO: 2033231 - DNA, 25 bp, Homo sapien
cttccattctaggatcttagagttt

SEQ ID NO: 2033232 - DNA, 25 bp, Homo sapien
cagcttccattctaggatcttagag

SEQ ID NO: 2033233 - DNA, 25 bp, Homo sapien
acttgtaggaaatccaacgaacaga

SEQ ID NO: 2033234 - DNA, 25 bp, Homo sapien
caacttgtaggaaatccaacgaaca

SEQ ID NO: 2033235 - DNA, 25 bp, Homo sapien
ttgtaggaaatccaacgaacagaag

SEQ ID NO: 2033236 - DNA, 25 bp, Homo sapien
tgtaggaaatccaacgaacagaaga

SEQ ID NO: 2033237 - DNA, 25 bp, Homo sapien
acgtaaatagtcataaacatctctg

SEQ ID NO: 2033238 - DNA, 25 bp, Homo sapien
ctgcacacagattcagagcaatggg

SEQ ID NO: 2033239 - DNA, 25 bp, Homo sapien
tcagagcaatgggacgtaaatagtc

SEQ ID NO: 2033240 - DNA, 25 bp, Homo sapien
catctctgggactatataactctag

SEQ ID NO: 2033241 - DNA, 25 bp, Homo sapien
tgtctcaaacatacgcaaagaggag

SEQ ID NO: 2033242 - DNA, 25 bp, Homo sapien
ggactgagacagagcaaagcacttc

SEQ ID NO: 2033243 - DNA, 25 bp, Homo sapien
gattaagcagacctctcctgtacag

SEQ ID NO: 2033244 - DNA, 25 bp, Homo sapien
gtttctcagtaagaagtccccgcag

SEQ ID NO: 2033245 - DNA, 25 bp, Homo sapien
cctcccatgggtgcttcaagaaaga

SEQ ID NO: 2033246 - DNA, 25 bp, Homo sapien
taaacgccgggtggaatactcacac

SEQ ID NO: 2033247 - DNA, 25 bp, Homo sapien
cctgtgggcccagcaaaaatactgc

SEQ ID NO: 2033248 - DNA, 25 bp, Homo sapien
caaacgacaatggtagtggcagccc

SEQ ID NO: 2033249 - DNA, 25 bp, Homo sapien
tctactattatctgtcaccaaaaac

SEQ ID NO: 2033250 - DNA, 25 bp, Homo sapien
ctattatctgtcaccaaaaactcct

SEQ ID NO: 2033251 - DNA, 25 bp, Homo sapien
gaaaccgccaatttctactattatc

SEQ ID NO: 2033252 - DNA, 25 bp, Homo sapien
agccagttcagctcgaaaccgccaa

SEQ ID NO: 2033253 - DNA, 25 bp, Homo sapien
tggagaatgctagagttcgtcgaac

SEQ ID NO: 2033254 - DNA, 25 bp, Homo sapien
gaataactgcaagctcgtggatgga

SEQ ID NO: 2033255 - DNA, 25 bp, Homo sapien
tgcagctgtcaattgatctccaaga

SEQ ID NO: 2033256 - DNA, 25 bp, Homo sapien
gaacacctatcctgacttcatcgag

SEQ ID NO: 2033257 - DNA, 25 bp, Homo sapien
aatgacgtgaagcaagggtttacct

SEQ ID NO: 2033258 - DNA, 25 bp, Homo sapien
gatgtccagacaaaatgacgtgaag

SEQ ID NO: 2033259 - DNA, 25 bp, Homo sapien
gggaggtcaggtcatcaagcctggg

SEQ ID NO: 2033260 - DNA, 25 bp, Homo sapien
cctgggaagaggtcacacaaaagtc

SEQ ID NO: 2033261 - DNA, 25 bp, Homo sapien
tgtcaaccgtctgtgcacgagaagg

SEQ ID NO: 2033262 - DNA, 25 bp, Homo sapien
accagggaggctatatgcacagtgc

SEQ ID NO: 2033263 - DNA, 25 bp, Homo sapien
cacgagaagggtcagtcatagataa

SEQ ID NO: 2033264 - DNA, 25 bp, Homo sapien
aatactgatctaacaacgcctgagg

SEQ ID NO: 2033265 - DNA, 25 bp, Homo sapien
ctagaaaattgaagtgcacatgtct

SEQ ID NO: 2033266 - DNA, 25 bp, Homo sapien
attattagtatatatgtgaggaaaa

SEQ ID NO: 2033267 - DNA, 25 bp, Homo sapien
aaaattgaagtgcacatgtctaatt

SEQ ID NO: 2033268 - DNA, 25 bp, Homo sapien
agaaaattgaagtgcacatgtctaa

SEQ ID NO: 2033269 - DNA, 25 bp, Homo sapien
ctttagttctcctttcctcatcagg

SEQ ID NO: 2033270 - DNA, 25 bp, Homo sapien
tactttagttctcctttcctcatca

SEQ ID NO: 2033271 - DNA, 25 bp, Homo sapien
ttgtactttagttctcctttcctca

SEQ ID NO: 2033272 - DNA, 25 bp, Homo sapien
tgtactttagttctcctttcctcat

SEQ ID NO: 2033273 - DNA, 25 bp, Homo sapien
gtctgaatcgctgtgaatatagtga

SEQ ID NO: 2033274 - DNA, 25 bp, Homo sapien
tgttgctcaagtctgaatcgctgtg

SEQ ID NO: 2033275 - DNA, 25 bp, Homo sapien
gaatatagtgaagagtggagtccat

SEQ ID NO: 2033276 - DNA, 25 bp, Homo sapien
tgctattgttgctcaagtctgaatc

SEQ ID NO: 2033277 - DNA, 25 bp, Homo sapien
cactccagagtccagataatgtcac

SEQ ID NO: 2033278 - DNA, 25 bp, Homo sapien
caagtcccgatcttctgctcagaat

SEQ ID NO: 2033279 - DNA, 25 bp, Homo sapien
gaaatggtccgatcagaaacaaagc

SEQ ID NO: 2033280 - DNA, 25 bp, Homo sapien
cagaatactgtgttgcttgctgcag

SEQ ID NO: 2033281 - DNA, 25 bp, Homo sapien
ctgattaaaggcacagaatcttctt

SEQ ID NO: 2033282 - DNA, 25 bp, Homo sapien
tcaacagcatcgctgattaaaggca

SEQ ID NO: 2033283 - DNA, 25 bp, Homo sapien
catttatatccagttcatcttgcaa

SEQ ID NO: 2033284 - DNA, 25 bp, Homo sapien
tattttacaatttggtagctcattt

SEQ ID NO: 2033285 - DNA, 25 bp, Homo sapien
tagtgcagcggacagcacttccact

SEQ ID NO: 2033286 - DNA, 25 bp, Homo sapien
gcacgtagtgcagcggacagcactt

SEQ ID NO: 2033287 - DNA, 25 bp, Homo sapien
ctggaagcacgtagtgcagcggaca

SEQ ID NO: 2033288 - DNA, 25 bp, Homo sapien
tccaggctggaagcacgtagtgcag

SEQ ID NO: 2033289 - DNA, 25 bp, Homo sapien
gatagacactaatatttttaatcaa

SEQ ID NO: 2033290 - DNA, 25 bp, Homo sapien
taagatagacactaatatttttaat

SEQ ID NO: 2033291 - DNA, 25 bp, Homo sapien
agatagacactaatatttttaatca

SEQ ID NO: 2033292 - DNA, 25 bp, Homo sapien
tttaagatagacactaatattttta

SEQ ID NO: 2033293 - DNA, 25 bp, Homo sapien
gtgccaacctctggtcgtaacatag

SEQ ID NO: 2033294 - DNA, 25 bp, Homo sapien
cattctcattactagctgcttcctg

SEQ ID NO: 2033295 - DNA, 25 bp, Homo sapien
tgaatcttgtgaagtggtgccaacc

SEQ ID NO: 2033296 - DNA, 25 bp, Homo sapien
caattcctgatctaagagagctgaa

SEQ ID NO: 2033297 - DNA, 25 bp, Homo sapien
ctgtccagtggaacactaatttcac

SEQ ID NO: 2033298 - DNA, 25 bp, Homo sapien
cggatgcctcagcagcatggtcttc

SEQ ID NO: 2033299 - DNA, 25 bp, Homo sapien
atgcctcagcagcatggtcttccat

SEQ ID NO: 2033300 - DNA, 25 bp, Homo sapien
ccggatgcctcagcagcatggtctt

SEQ ID NO: 2033301 - DNA, 25 bp, Homo sapien
gatgcctcagcagcatggtcttcca

SEQ ID NO: 2033302 - DNA, 25 bp, Homo sapien
gtgttttccagtatgacactggaat

SEQ ID NO: 2033303 - DNA, 25 bp, Homo sapien
ggaattactaacactgagatctgaa

SEQ ID NO: 2033304 - DNA, 25 bp, Homo sapien
cactgagatctgaaggagtatcctc

SEQ ID NO: 2033305 - DNA, 25 bp, Homo sapien
ctggcctgacttgtacatcctctgg

SEQ ID NO: 2033306 - DNA, 25 bp, Homo sapien
gaagttccctctcatcataatgctg

SEQ ID NO: 2033307 - DNA, 25 bp, Homo sapien
gacttaaaaggactgtgcaaaagga

SEQ ID NO: 2033308 - DNA, 25 bp, Homo sapien
gatgttaatgcctatgtgagctccc

SEQ ID NO: 2033309 - DNA, 25 bp, Homo sapien
aagcatctgtgtgcctttaaataca

SEQ ID NO: 2033310 - DNA, 25 bp, Homo sapien
aaatactggcctgagctagatggat

SEQ ID NO: 2033311 - DNA, 25 bp, Homo sapien
gctagatggattagcaaaagtagat

SEQ ID NO: 2033312 - DNA, 25 bp, Homo sapien
caaaagtagatatgaaaggtcccag

SEQ ID NO: 2033313 - DNA, 25 bp, Homo sapien
agtagatatgaaaggtcccagagac

SEQ ID NO: 2033314 - DNA, 25 bp, Homo sapien
aaaggcactggtctacctcacaggg

SEQ ID NO: 2033315 - DNA, 25 bp, Homo sapien
gacagcagtgtgctgtagccaagca

SEQ ID NO: 2033316 - DNA, 25 bp, Homo sapien
accctcctttgggtgtggcacactg

SEQ ID NO: 2033317 - DNA, 25 bp, Homo sapien
gatgctgaggtccagtcctgagtga

SEQ ID NO: 2033318 - DNA, 25 bp, Homo sapien
cacacaaactgttaatatagtagtc

SEQ ID NO: 2033319 - DNA, 25 bp, Homo sapien
tagtctttctactgtctattcctaa

SEQ ID NO: 2033320 - DNA, 25 bp, Homo sapien
agtgggacttattccaaagatgcaa

SEQ ID NO: 2033321 - DNA, 25 bp, Homo sapien
tcatgatatggacacaaaaaccctc

SEQ ID NO: 2033322 - DNA, 25 bp, Homo sapien
catgttgcacatgaaaccgccatga

SEQ ID NO: 2033323 - DNA, 25 bp, Homo sapien
ccaacgtgaaggatcactgatcaaa

SEQ ID NO: 2033324 - DNA, 25 bp, Homo sapien
gaagcattcagcacaagcctttcgg

SEQ ID NO: 2033325 - DNA, 25 bp, Homo sapien
aaagtgctgataatttggtccgtcg

SEQ ID NO: 2033326 - DNA, 25 bp, Homo sapien
aatatctccaaaattggcagcacag

SEQ ID NO: 2033327 - DNA, 25 bp, Homo sapien
gcttgctggccaactacactgcaaa

SEQ ID NO: 2033328 - DNA, 25 bp, Homo sapien
caacatttcttcagtagcttgctgg

SEQ ID NO: 2033329 - DNA, 25 bp, Homo sapien
tatctccaaaattggcagcacagac

SEQ ID NO: 2033330 - DNA, 25 bp, Homo sapien
gaaacattctgcaatcgcagcacat

SEQ ID NO: 2033331 - DNA, 25 bp, Homo sapien
tgtaatatccttcccaaccatggga

SEQ ID NO: 2033332 - DNA, 25 bp, Homo sapien
cacatctcacaaaacctagggagga

SEQ ID NO: 2033333 - DNA, 25 bp, Homo sapien
gataagacgctctgtaatatccttc

SEQ ID NO: 2033334 - DNA, 25 bp, Homo sapien
ggtctccacatcaaatcgttcaatg

SEQ ID NO: 2033335 - DNA, 25 bp, Homo sapien
actttggtctccacatcaaatcgtt

SEQ ID NO: 2033336 - DNA, 25 bp, Homo sapien
catcaaatcgttcaatgagctcctg

SEQ ID NO: 2033337 - DNA, 25 bp, Homo sapien
ctctatgaggacagggcacactttg

SEQ ID NO: 2033338 - DNA, 25 bp, Homo sapien
gatctgcaaggtatctaaccacaat

SEQ ID NO: 2033339 - DNA, 25 bp, Homo sapien
aaaagcatatggtattgaaggccgg

SEQ ID NO: 2033340 - DNA, 25 bp, Homo sapien
catcagctccgctctcacagttggt

SEQ ID NO: 2033341 - DNA, 25 bp, Homo sapien
tttcttgacaaaacagtgcgatgtg

SEQ ID NO: 2033342 - DNA, 25 bp, Homo sapien
tgaaataacggcaatgtgagcaaac

SEQ ID NO: 2033343 - DNA, 25 bp, Homo sapien
tatctgttcttgagggtacttagga

SEQ ID NO: 2033344 - DNA, 25 bp, Homo sapien
acagatcaatcccatgagtgaaagg

SEQ ID NO: 2033345 - DNA, 25 bp, Homo sapien
taggaaggctatggactttcatctt

SEQ ID NO: 2033346 - DNA, 25 bp, Homo sapien
actctggagctggtaaacaggtaaa

SEQ ID NO: 2033347 - DNA, 25 bp, Homo sapien
caggtaaaggaaaacacaaatctat

SEQ ID NO: 2033348 - DNA, 25 bp, Homo sapien
tggagctggtaaacaggtaaaggaa

SEQ ID NO: 2033349 - DNA, 25 bp, Homo sapien
tctggagctggtaaacaggtaaagg

SEQ ID NO: 2033350 - DNA, 25 bp, Homo sapien
tagaatagagtaaattcactttctc

SEQ ID NO: 2033351 - DNA, 25 bp, Homo sapien
ctagaatagagtaaattcactttct

SEQ ID NO: 2033352 - DNA, 25 bp, Homo sapien
agagtaaattcactttctccacata

SEQ ID NO: 2033353 - DNA, 25 bp, Homo sapien
gtaaattcactttctccacatatac

SEQ ID NO: 2033354 - DNA, 25 bp, Homo sapien
atcgagcaaactccgggccaccatt

SEQ ID NO: 2033355 - DNA, 25 bp, Homo sapien
cagacttccctcaaggtatcgagca

SEQ ID NO: 2033356 - DNA, 25 bp, Homo sapien
atctctttcatcatcgcagacttcc

SEQ ID NO: 2033357 - DNA, 25 bp, Homo sapien
tgaatcatcggccaatctgctaatt

SEQ ID NO: 2033358 - DNA, 25 bp, Homo sapien
aaaattatgtatgttcaatggcatc

SEQ ID NO: 2033359 - DNA, 25 bp, Homo sapien
cacctggccgatatctagaatttta

SEQ ID NO: 2033360 - DNA, 25 bp, Homo sapien
aacaaaattatgtatgttcaatggc

SEQ ID NO: 2033361 - DNA, 25 bp, Homo sapien
gcacctggccgatatctagaatttt

SEQ ID NO: 2033362 - DNA, 25 bp, Homo sapien
tggctggacaaacacaatgcagtag

SEQ ID NO: 2033363 - DNA, 25 bp, Homo sapien
cactgctgtgtgacccaatgatctt

SEQ ID NO: 2033364 - DNA, 25 bp, Homo sapien
tgcatagctatacccaaaaaatctg

SEQ ID NO: 2033365 - DNA, 25 bp, Homo sapien
tgagcatcacccgtcatacagcagg

SEQ ID NO: 2033366 - DNA, 25 bp, Homo sapien
ctccccaggggcgtcaacatttcat

SEQ ID NO: 2033367 - DNA, 25 bp, Homo sapien
aatatgttctcacttgcagcatact

SEQ ID NO: 2033368 - DNA, 25 bp, Homo sapien
ccccaggggcgtcaacatttcatct

SEQ ID NO: 2033369 - DNA, 25 bp, Homo sapien
ttaaatatgttctcacttgcagcat

SEQ ID NO: 2033370 - DNA, 25 bp, Homo sapien
agactctgagctgtagtcatccaca

SEQ ID NO: 2033371 - DNA, 25 bp, Homo sapien
gactctgagctgtagtcatccacac

SEQ ID NO: 2033372 - DNA, 25 bp, Homo sapien
tactccttataacactttgaaacta

SEQ ID NO: 2033373 - DNA, 25 bp, Homo sapien
gaaatactccttataacactttgaa

SEQ ID NO: 2033374 - DNA, 25 bp, Homo sapien
cttataacactttgaaactaaaatg

SEQ ID NO: 2033375 - DNA, 25 bp, Homo sapien
cagaaatactccttataacactttg

SEQ ID NO: 2033376 - DNA, 25 bp, Homo sapien
agagagagtctcatgtgatcatgga

SEQ ID NO: 2033377 - DNA, 25 bp, Homo sapien
caacaaatgaatagggaggaagatc

SEQ ID NO: 2033378 - DNA, 25 bp, Homo sapien
tactgctcaggccacaataaatcgg

SEQ ID NO: 2033379 - DNA, 25 bp, Homo sapien
agagtccaatgcttctcatggaggc

SEQ ID NO: 2033380 - DNA, 25 bp, Homo sapien
aagatcaggctcttctataaagcag

SEQ ID NO: 2033381 - DNA, 25 bp, Homo sapien
gccagaaagtaagttaagtttgctc

SEQ ID NO: 2033382 - DNA, 25 bp, Homo sapien
cagaaagtaagttaagtttgctcct

SEQ ID NO: 2033383 - DNA, 25 bp, Homo sapien
gatgatgtcaccagctcaaagatct

SEQ ID NO: 2033384 - DNA, 25 bp, Homo sapien
gctcaaagatctgtgctaaaagcag

SEQ ID NO: 2033385 - DNA, 25 bp, Homo sapien
aagcagcattgatgatgtcaccagc

SEQ ID NO: 2033386 - DNA, 25 bp, Homo sapien
aagttaggagagttaagaaatgaat

SEQ ID NO: 2033387 - DNA, 25 bp, Homo sapien
cagatacagccccaatattttgctc

SEQ ID NO: 2033388 - DNA, 25 bp, Homo sapien
ggtttctgaatgattccctggccac

SEQ ID NO: 2033389 - DNA, 25 bp, Homo sapien
taaatatgattcacgttcaagggca

SEQ ID NO: 2033390 - DNA, 25 bp, Homo sapien
tcccaccggaagcaaggactctaag

SEQ ID NO: 2033391 - DNA, 25 bp, Homo sapien
tggttttgaaacatggtaggaaggc

SEQ ID NO: 2033392 - DNA, 25 bp, Homo sapien
aaacatggtaggaaggcctgaagat

SEQ ID NO: 2033393 - DNA, 25 bp, Homo sapien
ctggttttgaaacatggtaggaagg

SEQ ID NO: 2033394 - DNA, 25 bp, Homo sapien
ttgaaacatggtaggaaggcctgaa

SEQ ID NO: 2033395 - DNA, 25 bp, Homo sapien
gcggttaccctcagttagttctgga

SEQ ID NO: 2033396 - DNA, 25 bp, Homo sapien
aggcggttaccctcagttagttctg

SEQ ID NO: 2033397 - DNA, 25 bp, Homo sapien
gagtgcggtctaggcggttaccctc

SEQ ID NO: 2033398 - DNA, 25 bp, Homo sapien
cacagagtgcggtctaggcggttac

SEQ ID NO: 2033399 - DNA, 25 bp, Homo sapien
gctgtctcagtcctttaccaaccat

SEQ ID NO: 2033400 - DNA, 25 bp, Homo sapien
cagctgtctcagtcctttaccaacc

SEQ ID NO: 2033401 - DNA, 25 bp, Homo sapien
agctgtctcagtcctttaccaacca

SEQ ID NO: 2033402 - DNA, 25 bp, Homo sapien
acagctgtctcagtcctttaccaac

SEQ ID NO: 2033403 - DNA, 25 bp, Homo sapien
tcagaggcactaactcatgtacagc

SEQ ID NO: 2033404 - DNA, 25 bp, Homo sapien
gagttgcccaagtctgcccaaaaag

SEQ ID NO: 2033405 - DNA, 25 bp, Homo sapien
aactgcttgtaaaccactagagggc

SEQ ID NO: 2033406 - DNA, 25 bp, Homo sapien
tgtactgtacacctagattcaaaac

SEQ ID NO: 2033407 - DNA, 25 bp, Homo sapien
gaaagctgcactgttaacactgaag

SEQ ID NO: 2033408 - DNA, 25 bp, Homo sapien
cactaatcaaatcgggagcatctga

SEQ ID NO: 2033409 - DNA, 25 bp, Homo sapien
tggaagagcgactctaaggaaacac

SEQ ID NO: 2033410 - DNA, 25 bp, Homo sapien
caaacctagtaattcctgcggaggc

SEQ ID NO: 2033411 - DNA, 25 bp, Homo sapien
gccgggagaagagagcgaagggcgg

SEQ ID NO: 2033412 - DNA, 25 bp, Homo sapien
ctgccccaccgcttctccttccaaa

SEQ ID NO: 2033413 - DNA, 25 bp, Homo sapien
gcccgcaggcgattcgggggcgccg

SEQ ID NO: 2033414 - DNA, 25 bp, Homo sapien
tccttccaaaacagccgcgccactg

SEQ ID NO: 2033415 - DNA, 25 bp, Homo sapien
tcctcctgcaggtcctcctgaagca

SEQ ID NO: 2033416 - DNA, 25 bp, Homo sapien
ccgtctgcgtcctcctgcaggtcct

SEQ ID NO: 2033417 - DNA, 25 bp, Homo sapien
atccgtctgcgtcctcctgcaggtc

SEQ ID NO: 2033418 - DNA, 25 bp, Homo sapien
aggtcctcctgaagcagcgagaggt

SEQ ID NO: 2033419 - DNA, 25 bp, Homo sapien
gcgcgagccggggagccggtggacg

SEQ ID NO: 2033420 - DNA, 25 bp, Homo sapien
ggagccggtggacgcgcgcgggagg

SEQ ID NO: 2033421 - DNA, 25 bp, Homo sapien
gggctacatggagcggcgcgagccg

SEQ ID NO: 2033422 - DNA, 25 bp, Homo sapien
gccggggctacatggagcggcgcga

SEQ ID NO: 2033423 - DNA, 25 bp, Homo sapien
ccctcacgccgagcgctgcggacgg

SEQ ID NO: 2033424 - DNA, 25 bp, Homo sapien
caacctgccgccggccgggaccctg

SEQ ID NO: 2033425 - DNA, 25 bp, Homo sapien
gagcgctgcggacgggggcgcgcaa

SEQ ID NO: 2033426 - DNA, 25 bp, Homo sapien
accctcctcccgagccgccctcacg

SEQ ID NO: 2033427 - DNA, 25 bp, Homo sapien
catctcggcgggcgcgccgctcgca

SEQ ID NO: 2033428 - DNA, 25 bp, Homo sapien
agccatctcggcgggcgcgccgctc

SEQ ID NO: 2033429 - DNA, 25 bp, Homo sapien
cagccgcagccatctcggcgggcgc

SEQ ID NO: 2033430 - DNA, 25 bp, Homo sapien
tgccagccgcagccatctcggcggg

SEQ ID NO: 2033431 - DNA, 25 bp, Homo sapien
gtgcatgtgctgctgaaacgagcac

SEQ ID NO: 2033432 - DNA, 25 bp, Homo sapien
ctgtatcagtctaattttagtgcat

SEQ ID NO: 2033433 - DNA, 25 bp, Homo sapien
tagtgcatgtgctgctgaaacgagc

SEQ ID NO: 2033434 - DNA, 25 bp, Homo sapien
gtatcagtctaattttagtgcatgt

SEQ ID NO: 2033435 - DNA, 25 bp, Homo sapien
ttctctctgacgtagccctgggtgt

SEQ ID NO: 2033436 - DNA, 25 bp, Homo sapien
gggtgtttctctctgacgtagccct

SEQ ID NO: 2033437 - DNA, 25 bp, Homo sapien
agtcttcaccccgtagcctgtgcct

SEQ ID NO: 2033438 - DNA, 25 bp, Homo sapien
gggtgtctgacccattggtcaatct

SEQ ID NO: 2033439 - DNA, 25 bp, Homo sapien
ctgtaaaccaatcctgtccggcgag

SEQ ID NO: 2033440 - DNA, 25 bp, Homo sapien
cattgtgaagtctgctgaaacggca

SEQ ID NO: 2033441 - DNA, 25 bp, Homo sapien
ctcattgtgaagtctgctgaaacgg

SEQ ID NO: 2033442 - DNA, 25 bp, Homo sapien
tgtgaagtctgctgaaacggcacac

SEQ ID NO: 2033443 - DNA, 25 bp, Homo sapien
attgtgaagtctgctgaaacggcac

SEQ ID NO: 2033444 - DNA, 25 bp, Homo sapien
gagctcgtcggtgtgtttttccctg

SEQ ID NO: 2033445 - DNA, 25 bp, Homo sapien
gcaactaatgagcatggattggagc

SEQ ID NO: 2033446 - DNA, 25 bp, Homo sapien
gattggagctcgtcggtgtgttttt

SEQ ID NO: 2033447 - DNA, 25 bp, Homo sapien
gcaggtctgttcttgcaactaatga

SEQ ID NO: 2033448 - DNA, 25 bp, Homo sapien
tatgtttatacacttctgtaaaaac

SEQ ID NO: 2033449 - DNA, 25 bp, Homo sapien
catatgtttatacacttctgtaaaa

SEQ ID NO: 2033450 - DNA, 25 bp, Homo sapien
ccatatgtttatacacttctgtaaa

SEQ ID NO: 2033451 - DNA, 25 bp, Homo sapien
tgtttatacacttctgtaaaaacga

SEQ ID NO: 2033452 - DNA, 25 bp, Homo sapien
gattccatcctctggacatgagctg

SEQ ID NO: 2033453 - DNA, 25 bp, Homo sapien
tgtttcagaccagtttgaagcagaa

SEQ ID NO: 2033454 - DNA, 25 bp, Homo sapien
cgaactgtcggaggatggacctgct

SEQ ID NO: 2033455 - DNA, 25 bp, Homo sapien
aatgtcctgataatggcatagagcc

SEQ ID NO: 2033456 - DNA, 25 bp, Homo sapien
aggttccgacagccaactcctttgc

SEQ ID NO: 2033457 - DNA, 25 bp, Homo sapien
ttccgacagccaactcctttgccgt

SEQ ID NO: 2033458 - DNA, 25 bp, Homo sapien
ctaggttccgacagccaactccttt

SEQ ID NO: 2033459 - DNA, 25 bp, Homo sapien
gttccgacagccaactcctttgccg

SEQ ID NO: 2033460 - DNA, 25 bp, Homo sapien
gcattccttaatccctctgatgcag

SEQ ID NO: 2033461 - DNA, 25 bp, Homo sapien
tcactggcattccttaatccctctg

SEQ ID NO: 2033462 - DNA, 25 bp, Homo sapien
tgccaaactaacctcactggcattc

SEQ ID NO: 2033463 - DNA, 25 bp, Homo sapien
cttaatccctctgatgcagtcctgc

SEQ ID NO: 2033464 - DNA, 25 bp, Homo sapien
tgtgatgctgcctctcgggtaacag

SEQ ID NO: 2033465 - DNA, 25 bp, Homo sapien
tacagcttagcttttccacaggctc

SEQ ID NO: 2033466 - DNA, 25 bp, Homo sapien
tggctacccaggaagctcccttgtt

SEQ ID NO: 2033467 - DNA, 25 bp, Homo sapien
cacaagaccatgtgtccaagggatg

SEQ ID NO: 2033468 - DNA, 25 bp, Homo sapien
tggtcatccatgaacgagcttttcc

SEQ ID NO: 2033469 - DNA, 25 bp, Homo sapien
ttctctgaccgggtatagcagctac

SEQ ID NO: 2033470 - DNA, 25 bp, Homo sapien
tagtgtttcaacaaggcctctttgg

SEQ ID NO: 2033471 - DNA, 25 bp, Homo sapien
tctttaacacgactgccaatatggt

SEQ ID NO: 2033472 - DNA, 25 bp, Homo sapien
ggccacagagacagtgctccaattt

SEQ ID NO: 2033473 - DNA, 25 bp, Homo sapien
gtaggccacagagacagtgctccaa

SEQ ID NO: 2033474 - DNA, 25 bp, Homo sapien
cacagagacagtgctccaatttctc

SEQ ID NO: 2033475 - DNA, 25 bp, Homo sapien
taggccacagagacagtgctccaat

SEQ ID NO: 2033476 - DNA, 25 bp, Homo sapien
tgggaagaagtgataacgtgtctcc

SEQ ID NO: 2033477 - DNA, 25 bp, Homo sapien
gaagggagcaagtgatgaggtggga

SEQ ID NO: 2033478 - DNA, 25 bp, Homo sapien
gaagtgataacgtgtctcccagtag

SEQ ID NO: 2033479 - DNA, 25 bp, Homo sapien
tctcccagtagaattatgtagatgg

SEQ ID NO: 2033480 - DNA, 25 bp, Homo sapien
ccttgcttggttacgcgggctgttc

SEQ ID NO: 2033481 - DNA, 25 bp, Homo sapien
gagacactgtaaagacgagacccca

SEQ ID NO: 2033482 - DNA, 25 bp, Homo sapien
gcgtgcacggctcctagagcatgga

SEQ ID NO: 2033483 - DNA, 25 bp, Homo sapien
gcatggaggagctttgcggacacca

SEQ ID NO: 2033484 - DNA, 25 bp, Homo sapien
taaaacataacagggagtcctagag

SEQ ID NO: 2033485 - DNA, 25 bp, Homo sapien
actgttgggcattgtgtatcacacc

SEQ ID NO: 2033486 - DNA, 25 bp, Homo sapien
ggtgagagccctctttcaggaggca

SEQ ID NO: 2033487 - DNA, 25 bp, Homo sapien
tgcccaacgtcactagtaatgaaag

SEQ ID NO: 2033488 - DNA, 25 bp, Homo sapien
gctggggtgctcagagctgccctca

SEQ ID NO: 2033489 - DNA, 25 bp, Homo sapien
ggagaagcccacaaagcctgctgct

SEQ ID NO: 2033490 - DNA, 25 bp, Homo sapien
agagggcgactctctatggagaagc

SEQ ID NO: 2033491 - DNA, 25 bp, Homo sapien
gcgactctctatggagaagcccaca

SEQ ID NO: 2033492 - DNA, 25 bp, Homo sapien
gaatcttcaacacttcaatagtcat

SEQ ID NO: 2033493 - DNA, 25 bp, Homo sapien
aacgtttcatctggaatcttcaaca

SEQ ID NO: 2033494 - DNA, 25 bp, Homo sapien
ggaatcttcaacacttcaatagtca

SEQ ID NO: 2033495 - DNA, 25 bp, Homo sapien
aaaaacgtttcatctggaatcttca

SEQ ID NO: 2033496 - DNA, 25 bp, Homo sapien
ctcctgctccccaaagggtaccctg

SEQ ID NO: 2033497 - DNA, 25 bp, Homo sapien
gctccccaaagggtaccctgctgct

SEQ ID NO: 2033498 - DNA, 25 bp, Homo sapien
ctgctccccaaagggtaccctgctg

SEQ ID NO: 2033499 - DNA, 25 bp, Homo sapien
ctccccaaagggtaccctgctgctg

SEQ ID NO: 2033500 - DNA, 25 bp, Homo sapien
cactatctggcggttggtggtcttt

SEQ ID NO: 2033501 - DNA, 25 bp, Homo sapien
tgccatccactatctggcggttggt

SEQ ID NO: 2033502 - DNA, 25 bp, Homo sapien
catcaccaagactgaagtccttacc

SEQ ID NO: 2033503 - DNA, 25 bp, Homo sapien
atccactatctggcggttggtggtc

SEQ ID NO: 2033504 - DNA, 25 bp, Homo sapien
tgagctgtttcatctgtagggtgta

SEQ ID NO: 2033505 - DNA, 25 bp, Homo sapien
tcatctgtagggtgtaacgggcctc

SEQ ID NO: 2033506 - DNA, 25 bp, Homo sapien
gtgtcgtgtcgcctcaaaagctcca

SEQ ID NO: 2033507 - DNA, 25 bp, Homo sapien
cgtgagtgtcgtgtcgcctcaaaag

SEQ ID NO: 2033508 - DNA, 25 bp, Homo sapien
ctcctttcggttcttccgagcttgt

SEQ ID NO: 2033509 - DNA, 25 bp, Homo sapien
tccacggtcaatccagatctggcag

SEQ ID NO: 2033510 - DNA, 25 bp, Homo sapien
cggtcaatccagatctggcagtctg

SEQ ID NO: 2033511 - DNA, 25 bp, Homo sapien
ggtatcattgatgaccttgcggagc

SEQ ID NO: 2033512 - DNA, 25 bp, Homo sapien
cattggtatcattgatgaccttgcg

SEQ ID NO: 2033513 - DNA, 25 bp, Homo sapien
attgtcaatctgcagcacgatgcag

SEQ ID NO: 2033514 - DNA, 25 bp, Homo sapien
tgtcaatctgcagcacgatgcaggc

SEQ ID NO: 2033515 - DNA, 25 bp, Homo sapien
tcaatctgcagcacgatgcaggcat

SEQ ID NO: 2033516 - DNA, 25 bp, Homo sapien
cacgatgcaggcattgtccacggta

SEQ ID NO: 2033517 - DNA, 25 bp, Homo sapien
gaagtaacggctccagtctcttgac

SEQ ID NO: 2033518 - DNA, 25 bp, Homo sapien
tgaagtaacggctccagtctcttga

SEQ ID NO: 2033519 - DNA, 25 bp, Homo sapien
cttgaagtaacggctccagtctctt

SEQ ID NO: 2033520 - DNA, 25 bp, Homo sapien
ttgaagtaacggctccagtctcttg

SEQ ID NO: 2033521 - DNA, 25 bp, Homo sapien
tcccttctccaagtgctccccgatt

SEQ ID NO: 2033522 - DNA, 25 bp, Homo sapien
ccttctccaagtgctccccgatttt

SEQ ID NO: 2033523 - DNA, 25 bp, Homo sapien
ggtcccttctccaagtgctccccga

SEQ ID NO: 2033524 - DNA, 25 bp, Homo sapien
tccagcctccggttcttggtctcca

SEQ ID NO: 2033525 - DNA, 25 bp, Homo sapien
tggaggagtgggacatagagatccg

SEQ ID NO: 2033526 - DNA, 25 bp, Homo sapien
cccggccattcccacagccaggccc

SEQ ID NO: 2033527 - DNA, 25 bp, Homo sapien
gaagctggaggagtgggacatagag

SEQ ID NO: 2033528 - DNA, 25 bp, Homo sapien
aggcccccggccattcccacagcca

SEQ ID NO: 2033529 - DNA, 25 bp, Homo sapien
gagaccagtagttggtggagcgagt

SEQ ID NO: 2033530 - DNA, 25 bp, Homo sapien
ggagcccagagaccagtagttggtg

SEQ ID NO: 2033531 - DNA, 25 bp, Homo sapien
cccagagaccagtagttggtggagc

SEQ ID NO: 2033532 - DNA, 25 bp, Homo sapien
accagtagttggtggagcgagtggt

SEQ ID NO: 2033533 - DNA, 25 bp, Homo sapien
ttacttcaagatgtcaaaaaccaag

SEQ ID NO: 2033534 - DNA, 25 bp, Homo sapien
gcattttctggaaagatcgccccag

SEQ ID NO: 2033535 - DNA, 25 bp, Homo sapien
caaaaaccaagtgcaaatagctgct

SEQ ID NO: 2033536 - DNA, 25 bp, Homo sapien
aaaccaagtgcaaatagctgctctg

SEQ ID NO: 2033537 - DNA, 25 bp, Homo sapien
ctctcttcggaggtagcgaaggcca

SEQ ID NO: 2033538 - DNA, 25 bp, Homo sapien
tagcgaaggccaggtgttagacaca

SEQ ID NO: 2033539 - DNA, 25 bp, Homo sapien
gtagcgaaggccaggtgttagacac

SEQ ID NO: 2033540 - DNA, 25 bp, Homo sapien
tgtctctcttcggaggtagcgaagg

SEQ ID NO: 2033541 - DNA, 25 bp, Homo sapien
ctctaccagagctactgagggttgg

SEQ ID NO: 2033542 - DNA, 25 bp, Homo sapien
gctatgcatgaagtagttacgctgt

SEQ ID NO: 2033543 - DNA, 25 bp, Homo sapien
gcatatttaagcctcccacgtgaac

SEQ ID NO: 2033544 - DNA, 25 bp, Homo sapien
tcttagggtaaggttcagttcagta

SEQ ID NO: 2033545 - DNA, 25 bp, Homo sapien
tgggaaagcccatgaatagcaagga

SEQ ID NO: 2033546 - DNA, 25 bp, Homo sapien
cagaatgcgggacaatcagggctaa

SEQ ID NO: 2033547 - DNA, 25 bp, Homo sapien
tctttgacagaggatggaactacag

SEQ ID NO: 2033548 - DNA, 25 bp, Homo sapien
gagcctgcatgtaaacttggttccg

SEQ ID NO: 2033549 - DNA, 25 bp, Homo sapien
tctgtcttgggtacctgctgtcgca

SEQ ID NO: 2033550 - DNA, 25 bp, Homo sapien
gcttagtagacttgacggcatggga

SEQ ID NO: 2033551 - DNA, 25 bp, Homo sapien
actgactgtcatcccgcttagtaga

SEQ ID NO: 2033552 - DNA, 25 bp, Homo sapien
gcccaccatgcggaacagaagtagt

SEQ ID NO: 2033553 - DNA, 25 bp, Homo sapien
acacggcccttgctgatgggtgtga

SEQ ID NO: 2033554 - DNA, 25 bp, Homo sapien
aggtgttgcatgtatagtgggatat

SEQ ID NO: 2033555 - DNA, 25 bp, Homo sapien
gatatggtgggagtcaaatacagcg

SEQ ID NO: 2033556 - DNA, 25 bp, Homo sapien
tgtgccacacgcacaggaacacggc

SEQ ID NO: 2033557 - DNA, 25 bp, Homo sapien
ccggggattgacgctggtcctacag

SEQ ID NO: 2033558 - DNA, 25 bp, Homo sapien
cggggattgacgctggtcctacagc

SEQ ID NO: 2033559 - DNA, 25 bp, Homo sapien
ggggattgacgctggtcctacagct

SEQ ID NO: 2033560 - DNA, 25 bp, Homo sapien
ttaggtaacagtaccagacatccca

SEQ ID NO: 2033561 - DNA, 25 bp, Homo sapien
tcccagtgggatatcgccagatgct

SEQ ID NO: 2033562 - DNA, 25 bp, Homo sapien
taacagtaccagacatcccagtggg

SEQ ID NO: 2033563 - DNA, 25 bp, Homo sapien
tatcgccagatgcttagttgccaga

SEQ ID NO: 2033564 - DNA, 25 bp, Homo sapien
cttttggggaatggtgacctcttca

SEQ ID NO: 2033565 - DNA, 25 bp, Homo sapien
ttttggggaatggtgacctcttcat

SEQ ID NO: 2033566 - DNA, 25 bp, Homo sapien
ggtgatatttgggctttttcaccat

SEQ ID NO: 2033567 - DNA, 25 bp, Homo sapien
gggtgatatttgggctttttcacca

SEQ ID NO: 2033568 - DNA, 25 bp, Homo sapien
gacgtggagtcacacgcatgcaggc

SEQ ID NO: 2033569 - DNA, 25 bp, Homo sapien
tctgcctatgcaggtaccagaccat

SEQ ID NO: 2033570 - DNA, 25 bp, Homo sapien
ggcaccagtcactagtaatgccctc

SEQ ID NO: 2033571 - DNA, 25 bp, Homo sapien
agctcttgggttcatccagcatggg

SEQ ID NO: 2033572 - DNA, 25 bp, Homo sapien
tgttctgagggacaaaatgacgacc

SEQ ID NO: 2033573 - DNA, 25 bp, Homo sapien
caggttagaaccatccgacgtgtgc

SEQ ID NO: 2033574 - DNA, 25 bp, Homo sapien
aatgacgacccctgactgcagtgtg

SEQ ID NO: 2033575 - DNA, 25 bp, Homo sapien
cattcgtattctgtgcctggagacc

SEQ ID NO: 2033576 - DNA, 25 bp, Homo sapien
aagttgacagttgggctgaagctct

SEQ ID NO: 2033577 - DNA, 25 bp, Homo sapien
ttcctctttaagtggtaatgcctca

SEQ ID NO: 2033578 - DNA, 25 bp, Homo sapien
tcaaagttgacagttgggctgaagc

SEQ ID NO: 2033579 - DNA, 25 bp, Homo sapien
tgaagctctgtttcctctttaagtg

SEQ ID NO: 2033580 - DNA, 25 bp, Homo sapien
tccacggtgcttccgcactcggtga

SEQ ID NO: 2033581 - DNA, 25 bp, Homo sapien
ggccatggccgtggctcgtgtggcc

SEQ ID NO: 2033582 - DNA, 25 bp, Homo sapien
tccgcactcggtgatgtggccatgg

SEQ ID NO: 2033583 - DNA, 25 bp, Homo sapien
ccagctttcccacataacctgggtg

SEQ ID NO: 2033584 - DNA, 25 bp, Homo sapien
ggccggcatttaaatgatgcttgct

SEQ ID NO: 2033585 - DNA, 25 bp, Homo sapien
agccggccggcatttaaatgatgct

SEQ ID NO: 2033586 - DNA, 25 bp, Homo sapien
ccggccggcatttaaatgatgcttg

SEQ ID NO: 2033587 - DNA, 25 bp, Homo sapien
gccggccggcatttaaatgatgctt

SEQ ID NO: 2033588 - DNA, 25 bp, Homo sapien
gttgaccctggcgttcttggccgct

SEQ ID NO: 2033589 - DNA, 25 bp, Homo sapien
tcagcaaaacagcaggatactgctg

SEQ ID NO: 2033590 - DNA, 25 bp, Homo sapien
gccaatacagtttgccatttagatc

SEQ ID NO: 2033591 - DNA, 25 bp, Homo sapien
gatactgctgtctgcgtcccggttg

SEQ ID NO: 2033592 - DNA, 25 bp, Homo sapien
aaatgcaggcttggcatgcactggg

SEQ ID NO: 2033593 - DNA, 25 bp, Homo sapien
aatgcaggcttggcatgcactgggg

SEQ ID NO: 2033594 - DNA, 25 bp, Homo sapien
tgctctggcggattggccagtgcat

SEQ ID NO: 2033595 - DNA, 25 bp, Homo sapien
ggtgccggcagttgcatgcaaaact

SEQ ID NO: 2033596 - DNA, 25 bp, Homo sapien
gaatccttttctgggggagaggtgc

SEQ ID NO: 2033597 - DNA, 25 bp, Homo sapien
ggcggattggccagtgcattcttac

SEQ ID NO: 2033598 - DNA, 25 bp, Homo sapien
actgtggaaaggcgcctttgtgcca

SEQ ID NO: 2033599 - DNA, 25 bp, Homo sapien
gggcactgtggaaaggcgcctttgt

SEQ ID NO: 2033600 - DNA, 25 bp, Homo sapien
ccagtttggataagacaacagattc

SEQ ID NO: 2033601 - DNA, 25 bp, Homo sapien
cagtttggataagacaacagattca

SEQ ID NO: 2033602 - DNA, 25 bp, Homo sapien
agtgcatgtgcaacagtgcctttaa

SEQ ID NO: 2033603 - DNA, 25 bp, Homo sapien
tgtaactgaaatgctgagtgcatgt

SEQ ID NO: 2033604 - DNA, 25 bp, Homo sapien
actgaaatgctgagtgcatgtgcaa

SEQ ID NO: 2033605 - DNA, 25 bp, Homo sapien
ttctgtaactgaaatgctgagtgca

SEQ ID NO: 2033606 - DNA, 25 bp, Homo sapien
gggccacagcaatctttcccagact

SEQ ID NO: 2033607 - DNA, 25 bp, Homo sapien
gatttgatacactgagcataactgg

SEQ ID NO: 2033608 - DNA, 25 bp, Homo sapien
gcataactggctgaatgagtgctcc

SEQ ID NO: 2033609 - DNA, 25 bp, Homo sapien
ggcaaggcccttacatcgggccaca

SEQ ID NO: 2033610 - DNA, 25 bp, Homo sapien
aagtcgtcttccttctttaactgat

SEQ ID NO: 2033611 - DNA, 25 bp, Homo sapien
ggaacttgctcttcttccccattta

SEQ ID NO: 2033612 - DNA, 25 bp, Homo sapien
tgctcttcttccccatttaaaagtc

SEQ ID NO: 2033613 - DNA, 25 bp, Homo sapien
ttatggaacttgctcttcttcccca

SEQ ID NO: 2033614 - DNA, 25 bp, Homo sapien
tgggaatccaccagataggccagct

SEQ ID NO: 2033615 - DNA, 25 bp, Homo sapien
tgaacttgggaatccaccagatagg

SEQ ID NO: 2033616 - DNA, 25 bp, Homo sapien
ttgaggccagaatgctcagtggctg

SEQ ID NO: 2033617 - DNA, 25 bp, Homo sapien
tggctgaaagattgctgaacttggg

SEQ ID NO: 2033618 - DNA, 25 bp, Homo sapien
agcttctgcttctactaaaggcctg

SEQ ID NO: 2033619 - DNA, 25 bp, Homo sapien
tgcttctactaaaggcctggagttg

SEQ ID NO: 2033620 - DNA, 25 bp, Homo sapien
gcttctactaaaggcctggagttgg

SEQ ID NO: 2033621 - DNA, 25 bp, Homo sapien
ttctgcttctactaaaggcctggag

SEQ ID NO: 2033622 - DNA, 25 bp, Homo sapien
tgcatgcatttgtgcgtgcctcctg

SEQ ID NO: 2033623 - DNA, 25 bp, Homo sapien
tttggctggtgaacagtgcactgga

SEQ ID NO: 2033624 - DNA, 25 bp, Homo sapien
tgactctgcccttactagttacagg

SEQ ID NO: 2033625 - DNA, 25 bp, Homo sapien
ttacaggcccactgggagaatccat

SEQ ID NO: 2033626 - DNA, 25 bp, Homo sapien
tgagtaaagctgaacattgagcatt

SEQ ID NO: 2033627 - DNA, 25 bp, Homo sapien
tgcaggattgatttgttggctgctt

SEQ ID NO: 2033628 - DNA, 25 bp, Homo sapien
caagttggcgttgacgcttgagccc

SEQ ID NO: 2033629 - DNA, 25 bp, Homo sapien
tggctgctttgagacttgtgtccat

SEQ ID NO: 2033630 - DNA, 25 bp, Homo sapien
gcaacagggcgaaacttggtctcta

SEQ ID NO: 2033631 - DNA, 25 bp, Homo sapien
tgggcaacagggcgaaacttggtct

SEQ ID NO: 2033632 - DNA, 25 bp, Homo sapien
gatcacctgagacctggaggttgag

SEQ ID NO: 2033633 - DNA, 25 bp, Homo sapien
tgtagtggcatgtgcctggagtcct

SEQ ID NO: 2033634 - DNA, 25 bp, Homo sapien
tgggctggagtaccatggtgccatc

SEQ ID NO: 2033635 - DNA, 25 bp, Homo sapien
tgaagtctcatactgtcacctgggc

SEQ ID NO: 2033636 - DNA, 25 bp, Homo sapien
ctgccaccacgccgccaccaggcct

SEQ ID NO: 2033637 - DNA, 25 bp, Homo sapien
cctgggctggagtaccatggtgcca

SEQ ID NO: 2033638 - DNA, 25 bp, Homo sapien
tctgaatgggtccttgagaaagcaa

SEQ ID NO: 2033639 - DNA, 25 bp, Homo sapien
caaagctgtgcggaatcgctgggtc

SEQ ID NO: 2033640 - DNA, 25 bp, Homo sapien
cattggaaatacagtcccagctggc

SEQ ID NO: 2033641 - DNA, 25 bp, Homo sapien
gaatggagcctcttacaagctcaga

SEQ ID NO: 2033642 - DNA, 25 bp, Homo sapien
gcaggtacatgagctgacgttcact

SEQ ID NO: 2033643 - DNA, 25 bp, Homo sapien
ggtacatgagctgacgttcactgcc

SEQ ID NO: 2033644 - DNA, 25 bp, Homo sapien
gggcatagttctggagttttaggaa

SEQ ID NO: 2033645 - DNA, 25 bp, Homo sapien
cacttgtttgccaacatgcaggtac

SEQ ID NO: 2033646 - DNA, 25 bp, Homo sapien
tcagtgagtacggaaaggcatgcat

SEQ ID NO: 2033647 - DNA, 25 bp, Homo sapien
ttcggccaccgcacagttcagctgt

SEQ ID NO: 2033648 - DNA, 25 bp, Homo sapien
catggcaaatgtcgctgtccccaag

SEQ ID NO: 2033649 - DNA, 25 bp, Homo sapien
tggttcaccctgagcttcgtccaac

SEQ ID NO: 2033650 - DNA, 25 bp, Homo sapien
gctgactggtcctcattaatggctc

SEQ ID NO: 2033651 - DNA, 25 bp, Homo sapien
taatggctcagcaagggtcctgtga

SEQ ID NO: 2033652 - DNA, 25 bp, Homo sapien
gccaaggttgcccttgctgactggt

SEQ ID NO: 2033653 - DNA, 25 bp, Homo sapien
gatgaacgatgctagtgaccagcag

SEQ ID NO: 2033654 - DNA, 25 bp, Homo sapien
gaaacaagtgcgacctctcagatat

SEQ ID NO: 2033655 - DNA, 25 bp, Homo sapien
ccctgagtgtcatccgtgtagatac

SEQ ID NO: 2033656 - DNA, 25 bp, Homo sapien
taatggccatcgctggaaacaagtg

SEQ ID NO: 2033657 - DNA, 25 bp, Homo sapien
ccctgagtgtcatccgtgtagatgc

SEQ ID NO: 2033658 - DNA, 25 bp, Homo sapien
gaagactgtcctggacttgcacaga

SEQ ID NO: 2033659 - DNA, 25 bp, Homo sapien
catttaagggattgtcagagttgca

SEQ ID NO: 2033660 - DNA, 25 bp, Homo sapien
catgaatgttctggtcacagctccc

SEQ ID NO: 2033661 - DNA, 25 bp, Homo sapien
ctgaagtaatgtatggtccctctga

SEQ ID NO: 2033662 - DNA, 25 bp, Homo sapien
cctgcaggtatttcaggaaccattt

SEQ ID NO: 2033663 - DNA, 25 bp, Homo sapien
caggtatttcaggaaccatttgctt

SEQ ID NO: 2033664 - DNA, 25 bp, Homo sapien
tatttcaggaaccatttgctttagg

SEQ ID NO: 2033665 - DNA, 25 bp, Homo sapien
tcaggaaccatttgctttagggcca

SEQ ID NO: 2033666 - DNA, 25 bp, Homo sapien
tcgcaggcctaatcccaccactgat

SEQ ID NO: 2033667 - DNA, 25 bp, Homo sapien
gcaacctgattgtccgtcacccctt

SEQ ID NO: 2033668 - DNA, 25 bp, Homo sapien
ctattcgcaggcctaatcccaccac

SEQ ID NO: 2033669 - DNA, 25 bp, Homo sapien
caacctgattgtccgtcaccccttg

SEQ ID NO: 2033670 - DNA, 25 bp, Homo sapien
ccaggaaaggcaattgcgggtgtcc

SEQ ID NO: 2033671 - DNA, 25 bp, Homo sapien
tacttggtagattcgcagtttgaag

SEQ ID NO: 2033672 - DNA, 25 bp, Homo sapien
tcgcagtttgaagagtccccaccat

SEQ ID NO: 2033673 - DNA, 25 bp, Homo sapien
caccatgggcacatggattgcagga

SEQ ID NO: 2033674 - DNA, 25 bp, Homo sapien
ttccaagatcagatgaaatcaggtg

SEQ ID NO: 2033675 - DNA, 25 bp, Homo sapien
caagatcagatgaaatcaggtgcgt

SEQ ID NO: 2033676 - DNA, 25 bp, Homo sapien
gcttccaagatcagatgaaatcagg

SEQ ID NO: 2033677 - DNA, 25 bp, Homo sapien
tccaagatcagatgaaatcaggtgc

SEQ ID NO: 2033678 - DNA, 25 bp, Homo sapien
tacagagcagttcatataatatcct

SEQ ID NO: 2033679 - DNA, 25 bp, Homo sapien
tactcaaaaccaagcttgtgccatc

SEQ ID NO: 2033680 - DNA, 25 bp, Homo sapien
taaacagtcagtggtcaaatttcca

SEQ ID NO: 2033681 - DNA, 25 bp, Homo sapien
cagtggttgtttcatgatggtcaga

SEQ ID NO: 2033682 - DNA, 25 bp, Homo sapien
ttgtagatgagatgggtcccggtcc

SEQ ID NO: 2033683 - DNA, 25 bp, Homo sapien
tcaccttggtacagaaagccatggc

SEQ ID NO: 2033684 - DNA, 25 bp, Homo sapien
tatcccaggctgagagttttgtaga

SEQ ID NO: 2033685 - DNA, 25 bp, Homo sapien
gaaccctgagaattgaccgtgacca

SEQ ID NO: 2033686 - DNA, 25 bp, Homo sapien
agccgccggtgctgttgacccaagg

SEQ ID NO: 2033687 - DNA, 25 bp, Homo sapien
tccacggtacttgaagaagccagag

SEQ ID NO: 2033688 - DNA, 25 bp, Homo sapien
aaggaccctacgctcggtggcctgg

SEQ ID NO: 2033689 - DNA, 25 bp, Homo sapien
cctttttgttgcaggccgccagatc

SEQ ID NO: 2033690 - DNA, 25 bp, Homo sapien
tgcagactaaaaggttgaaggcccg

SEQ ID NO: 2033691 - DNA, 25 bp, Homo sapien
gaggtctgaccctagaatgccaagg

SEQ ID NO: 2033692 - DNA, 25 bp, Homo sapien
taaagtaggcatggcttcccaatgg

SEQ ID NO: 2033693 - DNA, 25 bp, Homo sapien
tagctaacaataagggctgtgcccc

SEQ ID NO: 2033694 - DNA, 25 bp, Homo sapien
gacatctagatgactgggaaagtgg

SEQ ID NO: 2033695 - DNA, 25 bp, Homo sapien
tctctgcagagcttcatttgacatc

SEQ ID NO: 2033696 - DNA, 25 bp, Homo sapien
cattggagacactgtcagaggcccc

SEQ ID NO: 2033697 - DNA, 25 bp, Homo sapien
tgaggtatactcactcccatcccgt

SEQ ID NO: 2033698 - DNA, 25 bp, Homo sapien
tgtgcagcccagacttctatgtcaa

SEQ ID NO: 2033699 - DNA, 25 bp, Homo sapien
ctgtgtatagcaactttgggagatg

SEQ ID NO: 2033700 - DNA, 25 bp, Homo sapien
tcaatagcactctgcacagggtttc

SEQ ID NO: 2033701 - DNA, 25 bp, Homo sapien
cccgtgattggattcagatggcaga

SEQ ID NO: 2033702 - DNA, 25 bp, Homo sapien
ttagcactggcctctattctcagat

SEQ ID NO: 2033703 - DNA, 25 bp, Homo sapien
atagacattgcaggtaccctctcca

SEQ ID NO: 2033704 - DNA, 25 bp, Homo sapien
caaacacctgtgatgctttcagggt

SEQ ID NO: 2033705 - DNA, 25 bp, Homo sapien
caggtaccctctccaagcacaattt

SEQ ID NO: 2033706 - DNA, 25 bp, Homo sapien
tttgtgtatgatcgccttcccctgc

SEQ ID NO: 2033707 - DNA, 25 bp, Homo sapien
ttgtcccatttgtgtatgatcgcct

SEQ ID NO: 2033708 - DNA, 25 bp, Homo sapien
tggcaaacaagtcatttagagggag

SEQ ID NO: 2033709 - DNA, 25 bp, Homo sapien
tggcactggcaaacaagtcatttag

SEQ ID NO: 2033710 - DNA, 25 bp, Homo sapien
taggcaatgtgtgagttttccaagg

SEQ ID NO: 2033711 - DNA, 25 bp, Homo sapien
aatacagtaaggcaaccctggagga

SEQ ID NO: 2033712 - DNA, 25 bp, Homo sapien
caaaggagtggcttccgcaatacag

SEQ ID NO: 2033713 - DNA, 25 bp, Homo sapien
gatacattaagtctccagggttttc

SEQ ID NO: 2033714 - DNA, 25 bp, Homo sapien
tgaaaacacattcctcgtgggtggc

SEQ ID NO: 2033715 - DNA, 25 bp, Homo sapien
ggactaccctggcaatcggctaaag

SEQ ID NO: 2033716 - DNA, 25 bp, Homo sapien
cctggatcgcacatgaaaacttgga

SEQ ID NO: 2033717 - DNA, 25 bp, Homo sapien
tggatggaccctaatacctggatcg

SEQ ID NO: 2033718 - DNA, 25 bp, Homo sapien
agttgtagtgagtgggcgcttccct

SEQ ID NO: 2033719 - DNA, 25 bp, Homo sapien
aaacagccgttactacagttcccag

SEQ ID NO: 2033720 - DNA, 25 bp, Homo sapien
tagcgcaaactagacgcgctctgag

SEQ ID NO: 2033721 - DNA, 25 bp, Homo sapien
agagccaaaattagcgtccgcgaac

SEQ ID NO: 2033722 - DNA, 25 bp, Homo sapien
ttccgtactcggagctcaaggtgac

SEQ ID NO: 2033723 - DNA, 25 bp, Homo sapien
agtgtgatgcgctgccagagcagtt

SEQ ID NO: 2033724 - DNA, 25 bp, Homo sapien
aaggtgacagaggactgcgcttcca

SEQ ID NO: 2033725 - DNA, 25 bp, Homo sapien
atcgcgtcggtcccgcggacctttg

SEQ ID NO: 2033726 - DNA, 25 bp, Homo sapien
cttcagtgcgtgtgacttttttgct

SEQ ID NO: 2033727 - DNA, 25 bp, Homo sapien
ttcagtgcgtgtgacttttttgctt

SEQ ID NO: 2033728 - DNA, 25 bp, Homo sapien
atcctgagaaggctgataaggtgtc

SEQ ID NO: 2033729 - DNA, 25 bp, Homo sapien
tttgcggtttccgacagatcctgag

SEQ ID NO: 2033730 - DNA, 25 bp, Homo sapien
ggtttttgtagtactgcctgtgata

SEQ ID NO: 2033731 - DNA, 25 bp, Homo sapien
tagtactgcctgtgataagtttttt

SEQ ID NO: 2033732 - DNA, 25 bp, Homo sapien
tatcctctcactacttattgctaac

SEQ ID NO: 2033733 - DNA, 25 bp, Homo sapien
ccacggtacttttatcctctcacta

SEQ ID NO: 2033734 - DNA, 25 bp, Homo sapien
tagtccacggtacttttatcctctc

SEQ ID NO: 2033735 - DNA, 25 bp, Homo sapien
tcactacttattgctaacttaatca

SEQ ID NO: 2033736 - DNA, 25 bp, Homo sapien
acactgctgctggaactacgctttg

SEQ ID NO: 2033737 - DNA, 25 bp, Homo sapien
gctgctggaactacgctttggaaaa

SEQ ID NO: 2033738 - DNA, 25 bp, Homo sapien
agtcccttgattgaagaactctaaa

SEQ ID NO: 2033739 - DNA, 25 bp, Homo sapien
gaggctgttactgttagtcccttga

SEQ ID NO: 2033740 - DNA, 25 bp, Homo sapien
ctggagtgcatggcacaatttcagc

SEQ ID NO: 2033741 - DNA, 25 bp, Homo sapien
agtgcatggcacaatttcagctcac

SEQ ID NO: 2033742 - DNA, 25 bp, Homo sapien
agctcactgcaacctctgcctcccc

SEQ ID NO: 2033743 - DNA, 25 bp, Homo sapien
ggttcaagggattctcccacctcag

SEQ ID NO: 2033744 - DNA, 25 bp, Homo sapien
gaaatggtgcctcttacagtgtaaa

SEQ ID NO: 2033745 - DNA, 25 bp, Homo sapien
caaactgttcggctactggacaggt

SEQ ID NO: 2033746 - DNA, 25 bp, Homo sapien
tagattgctaatcccactcattcag

SEQ ID NO: 2033747 - DNA, 25 bp, Homo sapien
cagatgtcagttgcacattgagtcc

SEQ ID NO: 2033748 - DNA, 25 bp, Homo sapien
tcaaggaagatttaactctctttgg

SEQ ID NO: 2033749 - DNA, 25 bp, Homo sapien
tcgtgctcaatttggcactcaaaat

SEQ ID NO: 2033750 - DNA, 25 bp, Homo sapien
gatgtgtacagcatggctgtgctcc

SEQ ID NO: 2033751 - DNA, 25 bp, Homo sapien
tagaaaataaggtccatgagaatag

SEQ ID NO: 2033752 - DNA, 25 bp, Homo sapien
tgagaaatctgaggccttacgaagg

SEQ ID NO: 2033753 - DNA, 25 bp, Homo sapien
tcttattgtaagactactaccggct

SEQ ID NO: 2033754 - DNA, 25 bp, Homo sapien
gaactttccccgtgtctcacaggta

SEQ ID NO: 2033755 - DNA, 25 bp, Homo sapien
gactctagctcagtgtcttctggta

SEQ ID NO: 2033756 - DNA, 25 bp, Homo sapien
ctagatatgattaaagccaccttta

SEQ ID NO: 2033757 - DNA, 25 bp, Homo sapien
tctgtcaaaccacgaacctgaaatt

SEQ ID NO: 2033758 - DNA, 25 bp, Homo sapien
tccctgtccacattttcgtctgtca

SEQ ID NO: 2033759 - DNA, 25 bp, Homo sapien
gatatgattaaagccacctttatgc

SEQ ID NO: 2033760 - DNA, 25 bp, Homo sapien
cgcttgtctgaaagatttggatttc

SEQ ID NO: 2033761 - DNA, 25 bp, Homo sapien
tcactggtgcttctggtcctctggg

SEQ ID NO: 2033762 - DNA, 25 bp, Homo sapien
atcgacactgcgcttgtctgaaaga

SEQ ID NO: 2033763 - DNA, 25 bp, Homo sapien
actgcgcttgtctgaaagatttgga

SEQ ID NO: 2033764 - DNA, 25 bp, Homo sapien
gggacagccttttgccgccaggctc

SEQ ID NO: 2033765 - DNA, 25 bp, Homo sapien
gccttttgccgccaggctccaacag

SEQ ID NO: 2033766 - DNA, 25 bp, Homo sapien
caggctccaacagaagctgagatgt

SEQ ID NO: 2033767 - DNA, 25 bp, Homo sapien
tttctgcgcagagctccagacttcc

SEQ ID NO: 2033768 - DNA, 25 bp, Homo sapien
gaagtcaccactttcttactaagag

SEQ ID NO: 2033769 - DNA, 25 bp, Homo sapien
aagtcaccactttcttactaagagt

SEQ ID NO: 2033770 - DNA, 25 bp, Homo sapien
ggcattcgatgccagtgctgccaac

SEQ ID NO: 2033771 - DNA, 25 bp, Homo sapien
tggcattcgatgccagtgctgccaa

SEQ ID NO: 2033772 - DNA, 25 bp, Homo sapien
tcggggtttgctggctcggggcgtc

SEQ ID NO: 2033773 - DNA, 25 bp, Homo sapien
cctcggggtttgctggctcggggcg

SEQ ID NO: 2033774 - DNA, 25 bp, Homo sapien
ctcggggtttgctggctcggggcgt

SEQ ID NO: 2033775 - DNA, 25 bp, Homo sapien
gccgatgctggccttagactgcagg

SEQ ID NO: 2033776 - DNA, 25 bp, Homo sapien
tggaaacatataggtgtgcctgcat

SEQ ID NO: 2033777 - DNA, 25 bp, Homo sapien
gactgcagggactgcgttgagactt

SEQ ID NO: 2033778 - DNA, 25 bp, Homo sapien
tttctggaaacatataggtgtgcct

SEQ ID NO: 2033779 - DNA, 25 bp, Homo sapien
tggctcctgcaatccctccaacagg

SEQ ID NO: 2033780 - DNA, 25 bp, Homo sapien
ggctcctgcaatccctccaacaggc

SEQ ID NO: 2033781 - DNA, 25 bp, Homo sapien
attggctcctgcaatccctccaaca

SEQ ID NO: 2033782 - DNA, 25 bp, Homo sapien
tcctgcaatccctccaacaggccca

SEQ ID NO: 2033783 - DNA, 25 bp, Homo sapien
aaatgcttcagctgccacatgccca

SEQ ID NO: 2033784 - DNA, 25 bp, Homo sapien
aatgcttcagctgccacatgcccat

SEQ ID NO: 2033785 - DNA, 25 bp, Homo sapien
aaaatgcttcagctgccacatgccc

SEQ ID NO: 2033786 - DNA, 25 bp, Homo sapien
taaaatgcttcagctgccacatgcc

SEQ ID NO: 2033787 - DNA, 25 bp, Homo sapien
gcatcatcgcctttccgacattctg

SEQ ID NO: 2033788 - DNA, 25 bp, Homo sapien
gtccttaggtgctgttatagcttca

SEQ ID NO: 2033789 - DNA, 25 bp, Homo sapien
gtttgcacgtccttaggtgctgtta

SEQ ID NO: 2033790 - DNA, 25 bp, Homo sapien
tcgcctttccgacattctgaatgac

SEQ ID NO: 2033791 - DNA, 25 bp, Homo sapien
gcatagttatgggagaaatcaggct

SEQ ID NO: 2033792 - DNA, 25 bp, Homo sapien
tcaaagaatcgaaagtctgtttggg

SEQ ID NO: 2033793 - DNA, 25 bp, Homo sapien
gtgaacactcagggcatagttatgg

SEQ ID NO: 2033794 - DNA, 25 bp, Homo sapien
cttcaaagaatcgaaagtctgtttg

SEQ ID NO: 2033795 - DNA, 25 bp, Homo sapien
ggcaagagtcgttttgtgagctggt

SEQ ID NO: 2033796 - DNA, 25 bp, Homo sapien
tggcaagagtcgttttgtgagctgg

SEQ ID NO: 2033797 - DNA, 25 bp, Homo sapien
actccaggggcaaagggggcggctg

SEQ ID NO: 2033798 - DNA, 25 bp, Homo sapien
gcaaagggggcggctggggctcctc

SEQ ID NO: 2033799 - DNA, 25 bp, Homo sapien
ctccaggggcaaagggggcggctgg

SEQ ID NO: 2033800 - DNA, 25 bp, Homo sapien
ctgaactccaggggcaaagggggcg

SEQ ID NO: 2033801 - DNA, 25 bp, Homo sapien
ggccatctaagtctcctctgtgtga

SEQ ID NO: 2033802 - DNA, 25 bp, Homo sapien
gtgtgacttggctagccacacacac

SEQ ID NO: 2033803 - DNA, 25 bp, Homo sapien
tgtggggccatctaagtctcctctg

SEQ ID NO: 2033804 - DNA, 25 bp, Homo sapien
aaaatgtggggccatctaagtctcc

SEQ ID NO: 2033805 - DNA, 25 bp, Homo sapien
ccagtggtagtctgggaatgtcacc

SEQ ID NO: 2033806 - DNA, 25 bp, Homo sapien
tgagctgagtttttggcagctccca

SEQ ID NO: 2033807 - DNA, 25 bp, Homo sapien
tctgaggtgtcaccctgaggcttag

SEQ ID NO: 2033808 - DNA, 25 bp, Homo sapien
cctcttggaaagtccgtggtgagtt

SEQ ID NO: 2033809 - DNA, 25 bp, Homo sapien
gctcagggtgtctgattcctggcca

SEQ ID NO: 2033810 - DNA, 25 bp, Homo sapien
gggagagttgattccctctcccaag

SEQ ID NO: 2033811 - DNA, 25 bp, Homo sapien
gaggtccgtcggcatgggctctttc

SEQ ID NO: 2033812 - DNA, 25 bp, Homo sapien
cacgtacgccagtgcatgttggaag

SEQ ID NO: 2033813 - DNA, 25 bp, Homo sapien
gtgtagagactctcaaaatcaagag

SEQ ID NO: 2033814 - DNA, 25 bp, Homo sapien
ttctcacttcctaccatggcggtgt

SEQ ID NO: 2033815 - DNA, 25 bp, Homo sapien
ttcttgcggcgagagaagccagtgc

SEQ ID NO: 2033816 - DNA, 25 bp, Homo sapien
gccagtgccggtgcggacactcttg

SEQ ID NO: 2033817 - DNA, 25 bp, Homo sapien
gcccccaccgtgtgtgccgtggccc

SEQ ID NO: 2033818 - DNA, 25 bp, Homo sapien
gatgcattgggtggtgtgaggagat

SEQ ID NO: 2033819 - DNA, 25 bp, Homo sapien
cagggagcttacagatgcattgggt

SEQ ID NO: 2033820 - DNA, 25 bp, Homo sapien
tcacagatgtacttggcctctgtct

SEQ ID NO: 2033821 - DNA, 25 bp, Homo sapien
ctaattgtccagttcttaacttctt

SEQ ID NO: 2033822 - DNA, 25 bp, Homo sapien
ctctaattgtccagttcttaacttc

SEQ ID NO: 2033823 - DNA, 25 bp, Homo sapien
tctaattgtccagttcttaacttct

SEQ ID NO: 2033824 - DNA, 25 bp, Homo sapien
tccttctgtatgttggctgccatct

SEQ ID NO: 2033825 - DNA, 25 bp, Homo sapien
tcagtcgtcatggtttgctctgcat

SEQ ID NO: 2033826 - DNA, 25 bp, Homo sapien
cctctctcagcacccgctctcctgt

SEQ ID NO: 2033827 - DNA, 25 bp, Homo sapien
cttttccagatggtggagggtgcat

SEQ ID NO: 2033828 - DNA, 25 bp, Homo sapien
gctacctatgtctgctaaagctggg

SEQ ID NO: 2033829 - DNA, 25 bp, Homo sapien
tctttgaaggtcctagctggctgcc

SEQ ID NO: 2033830 - DNA, 25 bp, Homo sapien
cttgccagttgacagagagcttcca

SEQ ID NO: 2033831 - DNA, 25 bp, Homo sapien
taacttagctgatgccctgtgtctc

SEQ ID NO: 2033832 - DNA, 25 bp, Homo sapien
caagagcagggaggatttatcccca

SEQ ID NO: 2033833 - DNA, 25 bp, Homo sapien
cactgttctcattctggccgggaga

SEQ ID NO: 2033834 - DNA, 25 bp, Homo sapien
gggagattccttggcacaacttgtc

SEQ ID NO: 2033835 - DNA, 25 bp, Homo sapien
ccaagctcagatgcccagtggaaaa

SEQ ID NO: 2033836 - DNA, 25 bp, Homo sapien
cccgggttgagttcagctattctgg

SEQ ID NO: 2033837 - DNA, 25 bp, Homo sapien
ttgcagctagttccgcctctgggcc

SEQ ID NO: 2033838 - DNA, 25 bp, Homo sapien
atctctcgtaacctaagtactcccg

SEQ ID NO: 2033839 - DNA, 25 bp, Homo sapien
tcaaacttcttgcagctagttccgc

SEQ ID NO: 2033840 - DNA, 25 bp, Homo sapien
ggaaaacagtcactgtgaagtacag

SEQ ID NO: 2033841 - DNA, 25 bp, Homo sapien
ggcaaactctttcctgactggcagg

SEQ ID NO: 2033842 - DNA, 25 bp, Homo sapien
ggatgaatgcatgagcagtcaaggc

SEQ ID NO: 2033843 - DNA, 25 bp, Homo sapien
tagcactccagacatgcttgtggat

SEQ ID NO: 2033844 - DNA, 25 bp, Homo sapien
tgaaggagagctagcaacgagagca

SEQ ID NO: 2033845 - DNA, 25 bp, Homo sapien
cagaagtgaggtaggtcaaggtaga

SEQ ID NO: 2033846 - DNA, 25 bp, Homo sapien
ctagcaacgagagcagaagccacgg

SEQ ID NO: 2033847 - DNA, 25 bp, Homo sapien
cagccttttaggaaggatctccagg

SEQ ID NO: 2033848 - DNA, 25 bp, Homo sapien
aaaggccatggtgtgattgtgaagg

SEQ ID NO: 2033849 - DNA, 25 bp, Homo sapien
tgatcagggaagtctgcagccaggg

SEQ ID NO: 2033850 - DNA, 25 bp, Homo sapien
gggaagtctgcagccagggaatcct

SEQ ID NO: 2033851 - DNA, 25 bp, Homo sapien
ccatggtgtgattgtgaagggatgc

SEQ ID NO: 2033852 - DNA, 25 bp, Homo sapien
gggtattttgcaaaagcatagtgga

SEQ ID NO: 2033853 - DNA, 25 bp, Homo sapien
tactcgaagtccttttcacaataac

SEQ ID NO: 2033854 - DNA, 25 bp, Homo sapien
tttgcaaaagcatagtggaagactt

SEQ ID NO: 2033855 - DNA, 25 bp, Homo sapien
ttatccatcatattactcgaagtcc

SEQ ID NO: 2033856 - DNA, 25 bp, Homo sapien
tttatccgatcctggtgcttggtgg

SEQ ID NO: 2033857 - DNA, 25 bp, Homo sapien
tgtcaccagggacttaggactgggt

SEQ ID NO: 2033858 - DNA, 25 bp, Homo sapien
cttaggactgggttttgccccagtg

SEQ ID NO: 2033859 - DNA, 25 bp, Homo sapien
ccccagtggtggcatttatccgatc

SEQ ID NO: 2033860 - DNA, 25 bp, Homo sapien
cttctgctgccggtcctgaactcag

SEQ ID NO: 2033861 - DNA, 25 bp, Homo sapien
tctgctgccggtcctgaactcagag

SEQ ID NO: 2033862 - DNA, 25 bp, Homo sapien
aggccttctgctgccggtcctgaac

SEQ ID NO: 2033863 - DNA, 25 bp, Homo sapien
tgctgccggtcctgaactcagagcc

SEQ ID NO: 2033864 - DNA, 25 bp, Homo sapien
ctgctgtccgtgctgaactcagagc

SEQ ID NO: 2033865 - DNA, 25 bp, Homo sapien
tctgctgtccgtgctgaactcagag

SEQ ID NO: 2033866 - DNA, 25 bp, Homo sapien
cttctgctgtccgtgctgaactcag

SEQ ID NO: 2033867 - DNA, 25 bp, Homo sapien
ggccttctgctgtccgtgctgaact

SEQ ID NO: 2033868 - DNA, 25 bp, Homo sapien
cagaggcctaatgaaggcttgtggc

SEQ ID NO: 2033869 - DNA, 25 bp, Homo sapien
gcctaatgaaggcttgtggctaagc

SEQ ID NO: 2033870 - DNA, 25 bp, Homo sapien
gaaggcttgtggctaagcgccagca

SEQ ID NO: 2033871 - DNA, 25 bp, Homo sapien
taatgaaggcttgtggctaagcgcc

SEQ ID NO: 2033872 - DNA, 25 bp, Homo sapien
gacgagcaactcatcccagtacgat

SEQ ID NO: 2033873 - DNA, 25 bp, Homo sapien
cattctctgataggacgagcaactc

SEQ ID NO: 2033874 - DNA, 25 bp, Homo sapien
ggcagagagaactcgcattctctga

SEQ ID NO: 2033875 - DNA, 25 bp, Homo sapien
ccagtacgatgggactcccagggtc

SEQ ID NO: 2033876 - DNA, 25 bp, Homo sapien
gatgggggtgcggatcaacacccca

SEQ ID NO: 2033877 - DNA, 25 bp, Homo sapien
gggtgcggatcaacaccccagcgga

SEQ ID NO: 2033878 - DNA, 25 bp, Homo sapien
cagggcctcgctggcggccacttgg

SEQ ID NO: 2033879 - DNA, 25 bp, Homo sapien
ggatcaacaccccagcggaaggccg

SEQ ID NO: 2033880 - DNA, 25 bp, Homo sapien
ggaccgctctaggagcccggaaggc

SEQ ID NO: 2033881 - DNA, 25 bp, Homo sapien
cagaggttgtcacagtgcacgcgag

SEQ ID NO: 2033882 - DNA, 25 bp, Homo sapien
ttgtcacagtgcacgcgagtgcctc

SEQ ID NO: 2033883 - DNA, 25 bp, Homo sapien
tggcctgactgcagttccggcagct

SEQ ID NO: 2033884 - DNA, 25 bp, Homo sapien
cgagtgcctccccactcgacccttc

SEQ ID NO: 2033885 - DNA, 25 bp, Homo sapien
tgggccccagcttttggaactcagg

SEQ ID NO: 2033886 - DNA, 25 bp, Homo sapien
gcctgcgtggttttgggtgaatcca

SEQ ID NO: 2033887 - DNA, 25 bp, Homo sapien
ctgtgcttggtaaaaggcctgcgtg

SEQ ID NO: 2033888 - DNA, 25 bp, Homo sapien
gcttgggccagtccatacatggtgt

SEQ ID NO: 2033889 - DNA, 25 bp, Homo sapien
tagggtcctgaatggttcagccaca

SEQ ID NO: 2033890 - DNA, 25 bp, Homo sapien
atcctgatgtagctgaggggccgca

SEQ ID NO: 2033891 - DNA, 25 bp, Homo sapien
ggtagctgttgctgaaatagggtcc

SEQ ID NO: 2033892 - DNA, 25 bp, Homo sapien
cacaggaccaattggtttggataaa

SEQ ID NO: 2033893 - DNA, 25 bp, Homo sapien
gaaatcaccataaagagagccctgc

SEQ ID NO: 2033894 - DNA, 25 bp, Homo sapien
cagacatcaagctggccatgagaga

SEQ ID NO: 2033895 - DNA, 25 bp, Homo sapien
tctgtaccaacgaagcccaaagctt

SEQ ID NO: 2033896 - DNA, 25 bp, Homo sapien
gtaggttgcctctccacgcatcaag

SEQ ID NO: 2033897 - DNA, 25 bp, Homo sapien
agttcaagttgaatagatattttgg

SEQ ID NO: 2033898 - DNA, 25 bp, Homo sapien
gccaaaaggcacttcgggcacgact

SEQ ID NO: 2033899 - DNA, 25 bp, Homo sapien
gcacttcgggcacgacttttgtaaa

SEQ ID NO: 2033900 - DNA, 25 bp, Homo sapien
tgtctgcagcgcctgtgaatgccaa

SEQ ID NO: 2033901 - DNA, 25 bp, Homo sapien
agattgtgcatccagctctggctgt

SEQ ID NO: 2033902 - DNA, 25 bp, Homo sapien
tggagtgtccattcactttcctcct

SEQ ID NO: 2033903 - DNA, 25 bp, Homo sapien
gctgtggacctgtggtgtcgtgatg

SEQ ID NO: 2033904 - DNA, 25 bp, Homo sapien
gcacacagattgtgcatccagctct

SEQ ID NO: 2033905 - DNA, 25 bp, Homo sapien
ttttgtaagaggacagcctgttcca

SEQ ID NO: 2033906 - DNA, 25 bp, Homo sapien
gtctttggggttgtccataatctct

SEQ ID NO: 2033907 - DNA, 25 bp, Homo sapien
gagatgccattcgtttgcagggagc

SEQ ID NO: 2033908 - DNA, 25 bp, Homo sapien
gggttgtccataatctcttctggtt

SEQ ID NO: 2033909 - DNA, 25 bp, Homo sapien
tcagatgccagatgcaggggcaaac

SEQ ID NO: 2033910 - DNA, 25 bp, Homo sapien
gggcactgctccagagtctagcacc

SEQ ID NO: 2033911 - DNA, 25 bp, Homo sapien
gggctgcacttctgcatcatgggca

SEQ ID NO: 2033912 - DNA, 25 bp, Homo sapien
atgccagatgcaggggcaaacacct

SEQ ID NO: 2033913 - DNA, 25 bp, Homo sapien
tgtccgtgtagtctaaagtcacaca

SEQ ID NO: 2033914 - DNA, 25 bp, Homo sapien
gatgtccagatgatcaaaaagacgg

SEQ ID NO: 2033915 - DNA, 25 bp, Homo sapien
caaaaagacggcatctgtccgtgta

SEQ ID NO: 2033916 - DNA, 25 bp, Homo sapien
caagtttgtctaaatggatgtccag

SEQ ID NO: 2033917 - DNA, 25 bp, Homo sapien
aagggagcacacaggcggccccctt

SEQ ID NO: 2033918 - DNA, 25 bp, Homo sapien
acaggcggcccccttcagagcctgg

SEQ ID NO: 2033919 - DNA, 25 bp, Homo sapien
ctggagtccctgaggaagggagcac

SEQ ID NO: 2033920 - DNA, 25 bp, Homo sapien
gcggcccccttcagagcctggatgt

SEQ ID NO: 2033921 - DNA, 25 bp, Homo sapien
ctcctccaacccatatcacacccac

SEQ ID NO: 2033922 - DNA, 25 bp, Homo sapien
caggccacggacatgaggcagagca

SEQ ID NO: 2033923 - DNA, 25 bp, Homo sapien
cctagcacaggccacagaaatagct

SEQ ID NO: 2033924 - DNA, 25 bp, Homo sapien
agcaggtggagacaggagagaacag

SEQ ID NO: 2033925 - DNA, 25 bp, Homo sapien
ggccacagaaatagctgtccccagg

SEQ ID NO: 2033926 - DNA, 25 bp, Homo sapien
cgtcacattgcacagggaaacctcg

SEQ ID NO: 2033927 - DNA, 25 bp, Homo sapien
tatgctcagagctacaccgtcacat

SEQ ID NO: 2033928 - DNA, 25 bp, Homo sapien
aacgaaggcctaagcatgcccgagc

SEQ ID NO: 2033929 - DNA, 25 bp, Homo sapien
cactaggcgggcacaggagtgtctc

SEQ ID NO: 2033930 - DNA, 25 bp, Homo sapien
tgggaagcggcgtttcctcacctgc

SEQ ID NO: 2033931 - DNA, 25 bp, Homo sapien
tcacctgccagtgctcctgtactcc

SEQ ID NO: 2033932 - DNA, 25 bp, Homo sapien
gagattgggaagcggcgtttcctca

SEQ ID NO: 2033933 - DNA, 25 bp, Homo sapien
cacagcgagcctccggagattggga

SEQ ID NO: 2033934 - DNA, 25 bp, Homo sapien
gctcttcagttttccgaagctcagg

SEQ ID NO: 2033935 - DNA, 25 bp, Homo sapien
tcagttttccgaagctcaggtttag

SEQ ID NO: 2033936 - DNA, 25 bp, Homo sapien
tcatcattctttgcgacggaccctg

SEQ ID NO: 2033937 - DNA, 25 bp, Homo sapien
gaaagctgactgatccaaagagaag

SEQ ID NO: 2033938 - DNA, 25 bp, Homo sapien
cttgctcctgtatcagaagctgcat

SEQ ID NO: 2033939 - DNA, 25 bp, Homo sapien
gaatgccccccagagggtatgattc

SEQ ID NO: 2033940 - DNA, 25 bp, Homo sapien
gattccaccattcctcctgtgtgct

SEQ ID NO: 2033941 - DNA, 25 bp, Homo sapien
tatcagctatgcacatgataaatcg

SEQ ID NO: 2033942 - DNA, 25 bp, Homo sapien
accaacttctaacgtctgcctgaac

SEQ ID NO: 2033943 - DNA, 25 bp, Homo sapien
tttgcttgtgcaccaacttctaacg

SEQ ID NO: 2033944 - DNA, 25 bp, Homo sapien
tgtcatatggtacatcttgctgtga

SEQ ID NO: 2033945 - DNA, 25 bp, Homo sapien
tatggtacatcttgctgtgagactc

SEQ ID NO: 2033946 - DNA, 25 bp, Homo sapien
aaactcaacacgctccaggtcattc

SEQ ID NO: 2033947 - DNA, 25 bp, Homo sapien
caggtcattccatccccttcctgca

SEQ ID NO: 2033948 - DNA, 25 bp, Homo sapien
tgcagacagttgcagcacaatcctc

SEQ ID NO: 2033949 - DNA, 25 bp, Homo sapien
tgacaccaaactcaacacgctccag

SEQ ID NO: 2033950 - DNA, 25 bp, Homo sapien
gggcagcctagagtcctcccttact

SEQ ID NO: 2033951 - DNA, 25 bp, Homo sapien
aaactgggggcagcctagagtcctc

SEQ ID NO: 2033952 - DNA, 25 bp, Homo sapien
tcccttactctcatgtccagcatct

SEQ ID NO: 2033953 - DNA, 25 bp, Homo sapien
atctcaacagatacggatcccacag

SEQ ID NO: 2033954 - DNA, 25 bp, Homo sapien
atgagccacgtccccatgaccccct

SEQ ID NO: 2033955 - DNA, 25 bp, Homo sapien
ccatgaccccctgtcctcatggcct

SEQ ID NO: 2033956 - DNA, 25 bp, Homo sapien
agccacgtccccatgaccccctgtc

SEQ ID NO: 2033957 - DNA, 25 bp, Homo sapien
cccatgaccccctgtcctcatggcc

SEQ ID NO: 2033958 - DNA, 25 bp, Homo sapien
catggcccctggtcactatggcctc

SEQ ID NO: 2033959 - DNA, 25 bp, Homo sapien
gcccctggtcactatggcctcctgt

SEQ ID NO: 2033960 - DNA, 25 bp, Homo sapien
cctggtcactatggcctcctgtccc

SEQ ID NO: 2033961 - DNA, 25 bp, Homo sapien
cccatggcccctggtcactatggcc

SEQ ID NO: 2033962 - DNA, 25 bp, Homo sapien
gatatgttaggcatcctgcttgaaa

SEQ ID NO: 2033963 - DNA, 25 bp, Homo sapien
tcttcagtggtgtgcatttattagg

SEQ ID NO: 2033964 - DNA, 25 bp, Homo sapien
tattaggaagattgctaaatgcttc

SEQ ID NO: 2033965 - DNA, 25 bp, Homo sapien
tgctaaatgcttcttgatatgttag

SEQ ID NO: 2033966 - DNA, 25 bp, Homo sapien
cgaaggtcgtccttcagcttcggca

SEQ ID NO: 2033967 - DNA, 25 bp, Homo sapien
tcccgaaggtcgtccttcagcttcg

SEQ ID NO: 2033968 - DNA, 25 bp, Homo sapien
cagcttcccgaaggtcgtccttcag

SEQ ID NO: 2033969 - DNA, 25 bp, Homo sapien
ggtcgtccttcagcttcggcaaatc

SEQ ID NO: 2033970 - DNA, 25 bp, Homo sapien
tgcatgcaccaccaccgaatagtag

SEQ ID NO: 2033971 - DNA, 25 bp, Homo sapien
tcacagtttcatccaggcatgggct

SEQ ID NO: 2033972 - DNA, 25 bp, Homo sapien
accaccaccgaatagtagaagacaa

SEQ ID NO: 2033973 - DNA, 25 bp, Homo sapien
gtcacagtttcatccaggcatgggc

SEQ ID NO: 2033974 - DNA, 25 bp, Homo sapien
gacttgaacaatatgagcgaacagg

SEQ ID NO: 2033975 - DNA, 25 bp, Homo sapien
agtctcctggtctaggtcgctcaga

SEQ ID NO: 2033976 - DNA, 25 bp, Homo sapien
tcttgtttggaaggcgtggctttaa

SEQ ID NO: 2033977 - DNA, 25 bp, Homo sapien
tttaagactacccaaggcttgtggc

SEQ ID NO: 2033978 - DNA, 25 bp, Homo sapien
ttgaagtggctttgccatcaggttc

SEQ ID NO: 2033979 - DNA, 25 bp, Homo sapien
tttgaagtggctttgccatcaggtt

SEQ ID NO: 2033980 - DNA, 25 bp, Homo sapien
gatctgctgtgacatctggcagtgc

SEQ ID NO: 2033981 - DNA, 25 bp, Homo sapien
gatgtgatctgctgtgacatctggc

SEQ ID NO: 2033982 - DNA, 25 bp, Homo sapien
cgtgtgatgtgatctgctgtgacat

SEQ ID NO: 2033983 - DNA, 25 bp, Homo sapien
tgtgatctgctgtgacatctggcag

SEQ ID NO: 2033984 - DNA, 25 bp, Homo sapien
gcagtaaaagaaacagctgggaatg

SEQ ID NO: 2033985 - DNA, 25 bp, Homo sapien
aaaagaaacagctgggaatggtcat

SEQ ID NO: 2033986 - DNA, 25 bp, Homo sapien
agtaaaagaaacagctgggaatggt

SEQ ID NO: 2033987 - DNA, 25 bp, Homo sapien
ctgcagtaaaagaaacagctgggaa

SEQ ID NO: 2033988 - DNA, 25 bp, Homo sapien
taagaaaccaacaaggcccaagctg

SEQ ID NO: 2033989 - DNA, 25 bp, Homo sapien
tgcaggcctgcataaaccccaggag

SEQ ID NO: 2033990 - DNA, 25 bp, Homo sapien
tattacgggactttggactgcagat

SEQ ID NO: 2033991 - DNA, 25 bp, Homo sapien
caaaggcaatgcttatccctgtggg

SEQ ID NO: 2033992 - DNA, 25 bp, Homo sapien
tcctggcccgtgatttctgtgtact

SEQ ID NO: 2033993 - DNA, 25 bp, Homo sapien
tggcccgtgatttctgtgtactctt

SEQ ID NO: 2033994 - DNA, 25 bp, Homo sapien
tcagcttgcctgggtctctcttttc

SEQ ID NO: 2033995 - DNA, 25 bp, Homo sapien
cgtgatttctgtgtactcttttctc

SEQ ID NO: 2033996 - DNA, 25 bp, Homo sapien
agagggcagtctcaggccctgtcac

SEQ ID NO: 2033997 - DNA, 25 bp, Homo sapien
tcttcccgcctgtgggcaggtcctt

SEQ ID NO: 2033998 - DNA, 25 bp, Homo sapien
caggccctgtcacttctttgtaact

SEQ ID NO: 2033999 - DNA, 25 bp, Homo sapien
ggtccttccgcagccagccggagag

SEQ ID NO: 2034000 - DNA, 25 bp, Homo sapien
cagtggctgacccatgcacccagaa

SEQ ID NO: 2034001 - DNA, 25 bp, Homo sapien
tttctcttctcatgcgactgaactc

SEQ ID NO: 2034002 - DNA, 25 bp, Homo sapien
ggagacagtggctgacccatgcacc

SEQ ID NO: 2034003 - DNA, 25 bp, Homo sapien
ttctcatgcgactgaactcttcctg

SEQ ID NO: 2034004 - DNA, 25 bp, Homo sapien
ccctcggggattgtaattatgttga

SEQ ID NO: 2034005 - DNA, 25 bp, Homo sapien
cggggattgtaattatgttgatcag

SEQ ID NO: 2034006 - DNA, 25 bp, Homo sapien
gctgcccctcggggattgtaattat

SEQ ID NO: 2034007 - DNA, 25 bp, Homo sapien
tgcccctcggggattgtaattatgt

SEQ ID NO: 2034008 - DNA, 25 bp, Homo sapien
attgcaggctctgccaacaggtaca

SEQ ID NO: 2034009 - DNA, 25 bp, Homo sapien
gtggtgtaagaataccaatgccatt

SEQ ID NO: 2034010 - DNA, 25 bp, Homo sapien
gcaagtggtgtaagaataccaatgc

SEQ ID NO: 2034011 - DNA, 25 bp, Homo sapien
caggctctgccaacaggtacaatca

SEQ ID NO: 2034012 - DNA, 25 bp, Homo sapien
ggagccttcaggattctcatgagaa

SEQ ID NO: 2034013 - DNA, 25 bp, Homo sapien
ccgttgtgagtctgcagaaagctcc

SEQ ID NO: 2034014 - DNA, 25 bp, Homo sapien
tatttggactatttgtcagggcctc

SEQ ID NO: 2034015 - DNA, 25 bp, Homo sapien
aatcttgccccgctaccgttgtgag

SEQ ID NO: 2034016 - DNA, 25 bp, Homo sapien
ggttcctcattgttggcttccctct

SEQ ID NO: 2034017 - DNA, 25 bp, Homo sapien
ccagggttcctcattgttggcttcc

SEQ ID NO: 2034018 - DNA, 25 bp, Homo sapien
tccctcttcttctggacaggtaaat

SEQ ID NO: 2034019 - DNA, 25 bp, Homo sapien
cctcttcttctggacaggtaaatcc

SEQ ID NO: 2034020 - DNA, 25 bp, Homo sapien
ctcttgcagtcactggaagccttat

SEQ ID NO: 2034021 - DNA, 25 bp, Homo sapien
ctcttgagatggagggaaactgttg

SEQ ID NO: 2034022 - DNA, 25 bp, Homo sapien
tgatatctcagccaaattgtatccg

SEQ ID NO: 2034023 - DNA, 25 bp, Homo sapien
ctcttcgtctgactggagctcttga

SEQ ID NO: 2034024 - DNA, 25 bp, Homo sapien
aaatttttactatctgcatttgata

SEQ ID NO: 2034025 - DNA, 25 bp, Homo sapien
gctccccgcactcgcgcaagggcgg

SEQ ID NO: 2034026 - DNA, 25 bp, Homo sapien
tgtccaggcagatttcgagcagccc

SEQ ID NO: 2034027 - DNA, 25 bp, Homo sapien
aggcagatttcgagcagccccggct

SEQ ID NO: 2034028 - DNA, 25 bp, Homo sapien
cccacgctgcccctcaataacagcc

SEQ ID NO: 2034029 - DNA, 25 bp, Homo sapien
ctccttggtaggctcttgcctgatg

SEQ ID NO: 2034030 - DNA, 25 bp, Homo sapien
aaactccttggtaggctcttgcctg

SEQ ID NO: 2034031 - DNA, 25 bp, Homo sapien
tccttggtaggctcttgcctgatgc

SEQ ID NO: 2034032 - DNA, 25 bp, Homo sapien
aactccttggtaggctcttgcctga

SEQ ID NO: 2034033 - DNA, 25 bp, Homo sapien
ttccgtagatctgagaagtggccca

SEQ ID NO: 2034034 - DNA, 25 bp, Homo sapien
gaaccagaaagtgtggcttccgtag

SEQ ID NO: 2034035 - DNA, 25 bp, Homo sapien
gaggaggcgtaagtcctacaaagct

SEQ ID NO: 2034036 - DNA, 25 bp, Homo sapien
aaggaggatggatgctctaaggccc

SEQ ID NO: 2034037 - DNA, 25 bp, Homo sapien
agtcagcattctcgttctgcgcaga

SEQ ID NO: 2034038 - DNA, 25 bp, Homo sapien
agccccaagtcagcattctcgttct

SEQ ID NO: 2034039 - DNA, 25 bp, Homo sapien
tcgttctgcgcagaccgtcttgtga

SEQ ID NO: 2034040 - DNA, 25 bp, Homo sapien
tgcgcagaccgtcttgtgaaagcag

SEQ ID NO: 2034041 - DNA, 25 bp, Homo sapien
tcagaccctcattcctgaagtcctg

SEQ ID NO: 2034042 - DNA, 25 bp, Homo sapien
aagtcctggtcgctgtgatctcctt

SEQ ID NO: 2034043 - DNA, 25 bp, Homo sapien
tcgctgtgatctccttgagctgggt

SEQ ID NO: 2034044 - DNA, 25 bp, Homo sapien
accctcattcctgaagtcctggtcg

SEQ ID NO: 2034045 - DNA, 25 bp, Homo sapien
tggatcgaccgactttccaagaagg

SEQ ID NO: 2034046 - DNA, 25 bp, Homo sapien
aaatgttccatatacatatcctgag

SEQ ID NO: 2034047 - DNA, 25 bp, Homo sapien
gtggtttggatcgaccgactttcca

SEQ ID NO: 2034048 - DNA, 25 bp, Homo sapien
tgttccatatacatatcctgagaaa

SEQ ID NO: 2034049 - DNA, 25 bp, Homo sapien
cttttctgcgagtccccagtcagca

SEQ ID NO: 2034050 - DNA, 25 bp, Homo sapien
gccttttctgcgagtccccagtcag

SEQ ID NO: 2034051 - DNA, 25 bp, Homo sapien
ccttttctgcgagtccccagtcagc

SEQ ID NO: 2034052 - DNA, 25 bp, Homo sapien
ttttctgcgagtccccagtcagcag

SEQ ID NO: 2034053 - DNA, 25 bp, Homo sapien
tgtctccgactacgtgcttttccag

SEQ ID NO: 2034054 - DNA, 25 bp, Homo sapien
tgggtccttcaagaacatcttggac

SEQ ID NO: 2034055 - DNA, 25 bp, Homo sapien
atcttggacaccaccattagccctg

SEQ ID NO: 2034056 - DNA, 25 bp, Homo sapien
gcctttattctcttgcgttctctga

SEQ ID NO: 2034057 - DNA, 25 bp, Homo sapien
taggcagcaaggagacttccctgga

SEQ ID NO: 2034058 - DNA, 25 bp, Homo sapien
tgtagccatgtgtggtgcatccacg

SEQ ID NO: 2034059 - DNA, 25 bp, Homo sapien
cgtgctctgagtctgtttgtagcca

SEQ ID NO: 2034060 - DNA, 25 bp, Homo sapien
ggacatctgaactgtaataggcagc

SEQ ID NO: 2034061 - DNA, 25 bp, Homo sapien
tgtgctgcatccacgtggaagcatg

SEQ ID NO: 2034062 - DNA, 25 bp, Homo sapien
tgtgctgcatccacgtggaagcgtg

SEQ ID NO: 2034063 - DNA, 25 bp, Homo sapien
tgtgtgctgcatccacgtggaagcg

SEQ ID NO: 2034064 - DNA, 25 bp, Homo sapien
tgtgtgctgcatccacgtggaagca

SEQ ID NO: 2034065 - DNA, 25 bp, Homo sapien
tgtgctgaactgctcctttcattac

SEQ ID NO: 2034066 - DNA, 25 bp, Homo sapien
ctgtgctgaactgctcctttcatta

SEQ ID NO: 2034067 - DNA, 25 bp, Homo sapien
tattgcccaggtctcttggaaaagc

SEQ ID NO: 2034068 - DNA, 25 bp, Homo sapien
ttattgcccaggtctcttggaaaag

SEQ ID NO: 2034069 - DNA, 25 bp, Homo sapien
ttgcccaggtctcttggaaaagcct

SEQ ID NO: 2034070 - DNA, 25 bp, Homo sapien
cccaggtctcttggaaaagcctgct

SEQ ID NO: 2034071 - DNA, 25 bp, Homo sapien
accggatgcctccagttctcgtgga

SEQ ID NO: 2034072 - DNA, 25 bp, Homo sapien
taggacagtatcacaccggatgcct

SEQ ID NO: 2034073 - DNA, 25 bp, Homo sapien
gggataggacagtatcacaccggat

SEQ ID NO: 2034074 - DNA, 25 bp, Homo sapien
agtatcacaccggatgcctccagtt

SEQ ID NO: 2034075 - DNA, 25 bp, Homo sapien
ggccatagagtcaatgaggaaaaac

SEQ ID NO: 2034076 - DNA, 25 bp, Homo sapien
cggccatagagtcaatgaggaaaaa

SEQ ID NO: 2034077 - DNA, 25 bp, Homo sapien
acggccatagagtcaatgaggaaaa

SEQ ID NO: 2034078 - DNA, 25 bp, Homo sapien
gacggccatagagtcaatgaggaaa

SEQ ID NO: 2034079 - DNA, 25 bp, Homo sapien
tcaggttgtgactgtcccaggcttc

SEQ ID NO: 2034080 - DNA, 25 bp, Homo sapien
tgatgtcaacgcttcaccctctgga

SEQ ID NO: 2034081 - DNA, 25 bp, Homo sapien
gcatttctcggcactcaggttgtga

SEQ ID NO: 2034082 - DNA, 25 bp, Homo sapien
gcggatggatgctcttggccgcatt

SEQ ID NO: 2034083 - DNA, 25 bp, Homo sapien
agcttcacccacgtgctcagggcag

SEQ ID NO: 2034084 - DNA, 25 bp, Homo sapien
aatagcttcacccacgtgctcaggg

SEQ ID NO: 2034085 - DNA, 25 bp, Homo sapien
gtccgaatagcttcacccacgtgct

SEQ ID NO: 2034086 - DNA, 25 bp, Homo sapien
ctggtccgaatagcttcacccacgt

SEQ ID NO: 2034087 - DNA, 25 bp, Homo sapien
gcctctgggagggatcatcaggtgc

SEQ ID NO: 2034088 - DNA, 25 bp, Homo sapien
ctctgggagggatcatcaggtgcct

SEQ ID NO: 2034089 - DNA, 25 bp, Homo sapien
gggcacacgagctcagatccacctt

SEQ ID NO: 2034090 - DNA, 25 bp, Homo sapien
cacacgagctcagatccaccttctc

SEQ ID NO: 2034091 - DNA, 25 bp, Homo sapien
gagtttaattctgccccgcacatac

SEQ ID NO: 2034092 - DNA, 25 bp, Homo sapien
gatgagtttaattctgccccgcaca

SEQ ID NO: 2034093 - DNA, 25 bp, Homo sapien
tgagtttaattctgccccgcacata

SEQ ID NO: 2034094 - DNA, 25 bp, Homo sapien
atgagtttaattctgccccgcacat

SEQ ID NO: 2034095 - DNA, 25 bp, Homo sapien
ggcccaaggtgaatgcgcgcagggc

SEQ ID NO: 2034096 - DNA, 25 bp, Homo sapien
ggacccatcccgctcaagctctctg

SEQ ID NO: 2034097 - DNA, 25 bp, Homo sapien
cggcgaggacccatcccgctcaagc

SEQ ID NO: 2034098 - DNA, 25 bp, Homo sapien
ccatcccgctcaagctctctgctgg

SEQ ID NO: 2034099 - DNA, 25 bp, Homo sapien
ttggcgtgcaagcatggagtccgca

SEQ ID NO: 2034100 - DNA, 25 bp, Homo sapien
tttggcgtgcaagcatggagtccgc

SEQ ID NO: 2034101 - DNA, 25 bp, Homo sapien
gatgtgcccgccgaagggaatggag

SEQ ID NO: 2034102 - DNA, 25 bp, Homo sapien
gaagggaatggagtttggcgtgcaa

SEQ ID NO: 2034103 - DNA, 25 bp, Homo sapien
agcaggacttcaccgagaacccttg

SEQ ID NO: 2034104 - DNA, 25 bp, Homo sapien
caggatggagcaaggatgcaggaga

SEQ ID NO: 2034105 - DNA, 25 bp, Homo sapien
tcaccgagaacccttgccccagggc

SEQ ID NO: 2034106 - DNA, 25 bp, Homo sapien
agagaaggagcaggacttcaccgag

SEQ ID NO: 2034107 - DNA, 25 bp, Homo sapien
gcctagagttctccacgtgctcttc

SEQ ID NO: 2034108 - DNA, 25 bp, Homo sapien
tcaccacggtacaaggtgcctagag

SEQ ID NO: 2034109 - DNA, 25 bp, Homo sapien
acggtacaaggtgcctagagttctc

SEQ ID NO: 2034110 - DNA, 25 bp, Homo sapien
gtattgcctcaccacggtacaaggt

SEQ ID NO: 2034111 - DNA, 25 bp, Homo sapien
aacaggctggctctcgcatcaaagc

SEQ ID NO: 2034112 - DNA, 25 bp, Homo sapien
tcaagtgaatccacacagtagctgc

SEQ ID NO: 2034113 - DNA, 25 bp, Homo sapien
tagagagctcagcagttgacccagt

SEQ ID NO: 2034114 - DNA, 25 bp, Homo sapien
tcaaagctcttggactcctaccaga

SEQ ID NO: 2034115 - DNA, 25 bp, Homo sapien
gctgtggacttattcacacgtgcac

SEQ ID NO: 2034116 - DNA, 25 bp, Homo sapien
cactgatgtgtaagccaggcctgct

SEQ ID NO: 2034117 - DNA, 25 bp, Homo sapien
ccagcgtccagagggctagtgctgt

SEQ ID NO: 2034118 - DNA, 25 bp, Homo sapien
tcacacgtgcacttcttgacactga

SEQ ID NO: 2034119 - DNA, 25 bp, Homo sapien
ggaccagggctatggatgtccgctt

SEQ ID NO: 2034120 - DNA, 25 bp, Homo sapien
tatggatgtccgcttgtgggctcag

SEQ ID NO: 2034121 - DNA, 25 bp, Homo sapien
gactgtgggaccagggctatggatg

SEQ ID NO: 2034122 - DNA, 25 bp, Homo sapien
caaggttgccaaccctgtctccatc

SEQ ID NO: 2034123 - DNA, 25 bp, Homo sapien
gattccgcaaatgaccctttcccag

SEQ ID NO: 2034124 - DNA, 25 bp, Homo sapien
tagctcctcttgattccgcaaatga

SEQ ID NO: 2034125 - DNA, 25 bp, Homo sapien
tcttgattccgcaaatgaccctttc

SEQ ID NO: 2034126 - DNA, 25 bp, Homo sapien
ctggaatagctcctcttgattccgc

SEQ ID NO: 2034127 - DNA, 25 bp, Homo sapien
agctccttgttaacccatgctctga

SEQ ID NO: 2034128 - DNA, 25 bp, Homo sapien
gactccaggttgagtccaaacaggg

SEQ ID NO: 2034129 - DNA, 25 bp, Homo sapien
ctcaagtgaagatgtggtctttcct

SEQ ID NO: 2034130 - DNA, 25 bp, Homo sapien
gctattacgcagatgtcagtgctgt

SEQ ID NO: 2034131 - DNA, 25 bp, Homo sapien
aggtcattgttccactgagcagtct

SEQ ID NO: 2034132 - DNA, 25 bp, Homo sapien
caggtcattgttccactgagcagtc

SEQ ID NO: 2034133 - DNA, 25 bp, Homo sapien
tgcccttgcacaggatgggtctctc

SEQ ID NO: 2034134 - DNA, 25 bp, Homo sapien
ctgccagtctgcaaggtgactcgat

SEQ ID NO: 2034135 - DNA, 25 bp, Homo sapien
ttgaccagacaaatcatcatgagcc

SEQ ID NO: 2034136 - DNA, 25 bp, Homo sapien
tccctgaaggttcttgaccgagctt

SEQ ID NO: 2034137 - DNA, 25 bp, Homo sapien
tacacattcagaccttcagagccag

SEQ ID NO: 2034138 - DNA, 25 bp, Homo sapien
cgagggtcgttcttgagttcactta

SEQ ID NO: 2034139 - DNA, 25 bp, Homo sapien
gagtggacggttaatgcacactcca

SEQ ID NO: 2034140 - DNA, 25 bp, Homo sapien
tggaagggcgtttccacggtccaca

SEQ ID NO: 2034141 - DNA, 25 bp, Homo sapien
ttttcttgaccctcagtgctgattt

SEQ ID NO: 2034142 - DNA, 25 bp, Homo sapien
tctgcgattctattctcctccactt

SEQ ID NO: 2034143 - DNA, 25 bp, Homo sapien
cagtggcacctgttgctggcacatt

SEQ ID NO: 2034144 - DNA, 25 bp, Homo sapien
cactttggtagctgaaatgatctct

SEQ ID NO: 2034145 - DNA, 25 bp, Homo sapien
tttattgccatgtagatttctgaat

SEQ ID NO: 2034146 - DNA, 25 bp, Homo sapien
tctgggttctctccaagaatccttg

SEQ ID NO: 2034147 - DNA, 25 bp, Homo sapien
aggggacaatgccttggaagttcca

SEQ ID NO: 2034148 - DNA, 25 bp, Homo sapien
tagatttctgaatgagtcctgcctc

SEQ ID NO: 2034149 - DNA, 25 bp, Homo sapien
tagcaagggatgaacccactcagtg

SEQ ID NO: 2034150 - DNA, 25 bp, Homo sapien
tctgcgctttgccagctcggaatag

SEQ ID NO: 2034151 - DNA, 25 bp, Homo sapien
cactcagtgagggtatcagctccac

SEQ ID NO: 2034152 - DNA, 25 bp, Homo sapien
tttcacagtacagagtccagcgttg

SEQ ID NO: 2034153 - DNA, 25 bp, Homo sapien
agggggtgcggaggtgatggttttg

SEQ ID NO: 2034154 - DNA, 25 bp, Homo sapien
agactgaagttacttgcaggacatc

SEQ ID NO: 2034155 - DNA, 25 bp, Homo sapien
caagactgaagttacttgcaggaca

SEQ ID NO: 2034156 - DNA, 25 bp, Homo sapien
aagactgaagttacttgcaggacat

SEQ ID NO: 2034157 - DNA, 25 bp, Homo sapien
tcacaggtgcagaatacaggggtaa

SEQ ID NO: 2034158 - DNA, 25 bp, Homo sapien
cagggaagtcaccacgtggcttcac

SEQ ID NO: 2034159 - DNA, 25 bp, Homo sapien
ttagggagttaatgaaggtatatgt

SEQ ID NO: 2034160 - DNA, 25 bp, Homo sapien
ggtttttaggattgataggatggta

SEQ ID NO: 2034161 - DNA, 25 bp, Homo sapien
ggtggacgatgggtgtcccatttcc

SEQ ID NO: 2034162 - DNA, 25 bp, Homo sapien
gggaatatgtcttgggctcttggaa

SEQ ID NO: 2034163 - DNA, 25 bp, Homo sapien
tatccagggatgagggtcatttgca

SEQ ID NO: 2034164 - DNA, 25 bp, Homo sapien
tcttagaaccccgatgtgcagatat

SEQ ID NO: 2034165 - DNA, 25 bp, Homo sapien
cacgcctggttgctgcccctctggc

SEQ ID NO: 2034166 - DNA, 25 bp, Homo sapien
ttatcctgtgctgtcaccacgcctg

SEQ ID NO: 2034167 - DNA, 25 bp, Homo sapien
accacgcctggttgctgcccctctg

SEQ ID NO: 2034168 - DNA, 25 bp, Homo sapien
cttatcctgtgctgtcaccacgcct

SEQ ID NO: 2034169 - DNA, 25 bp, Homo sapien
tctcaggtggaaacacagggataga

SEQ ID NO: 2034170 - DNA, 25 bp, Homo sapien
atctctgatctgcttagggaccagc

SEQ ID NO: 2034171 - DNA, 25 bp, Homo sapien
gctgttctcagcctggttaaatgca

SEQ ID NO: 2034172 - DNA, 25 bp, Homo sapien
tctgatctgcttagggaccagctgt

SEQ ID NO: 2034173 - DNA, 25 bp, Homo sapien
ttctcaggtggagatagagctcttc

SEQ ID NO: 2034174 - DNA, 25 bp, Homo sapien
ctggttaaatgcacttgcctgctcc

SEQ ID NO: 2034175 - DNA, 25 bp, Homo sapien
ttaaatgcacttgcctgctccacct

SEQ ID NO: 2034176 - DNA, 25 bp, Homo sapien
ggttaaatgcacttgcctgctccac

SEQ ID NO: 2034177 - DNA, 25 bp, Homo sapien
gctctgctcgccttctagcagacat

SEQ ID NO: 2034178 - DNA, 25 bp, Homo sapien
cagtacatcgtccacgctgcagggg

SEQ ID NO: 2034179 - DNA, 25 bp, Homo sapien
ccaaggcccagtttcaactgtgtgg

SEQ ID NO: 2034180 - DNA, 25 bp, Homo sapien
tggggaggcgacatcttcacacatg

SEQ ID NO: 2034181 - DNA, 25 bp, Homo sapien
gagaaggagaactggattatcagtg

SEQ ID NO: 2034182 - DNA, 25 bp, Homo sapien
ggcgggagaaggagaactggattat

SEQ ID NO: 2034183 - DNA, 25 bp, Homo sapien
cgggagaaggagaactggattatca

SEQ ID NO: 2034184 - DNA, 25 bp, Homo sapien
ctggcgggagaaggagaactggatt

SEQ ID NO: 2034185 - DNA, 25 bp, Homo sapien
tgtggccacttgttctgtattaggt

SEQ ID NO: 2034186 - DNA, 25 bp, Homo sapien
ttgtggccacttgttctgtattagg

SEQ ID NO: 2034187 - DNA, 25 bp, Homo sapien
ggccacttgttctgtattaggtaaa

SEQ ID NO: 2034188 - DNA, 25 bp, Homo sapien
acttgttctgtattaggtaaatctg

SEQ ID NO: 2034189 - DNA, 25 bp, Homo sapien
gggccctgcagaggctctttcccat

SEQ ID NO: 2034190 - DNA, 25 bp, Homo sapien
gatggctacttccagctggaggaca

SEQ ID NO: 2034191 - DNA, 25 bp, Homo sapien
tctttcccatgtattggtggcacat

SEQ ID NO: 2034192 - DNA, 25 bp, Homo sapien
tcccatgtattggtggcacattctg

SEQ ID NO: 2034193 - DNA, 25 bp, Homo sapien
cacgataaaagatgacttctgatga

SEQ ID NO: 2034194 - DNA, 25 bp, Homo sapien
gagtaactttccacgataaaagatg

SEQ ID NO: 2034195 - DNA, 25 bp, Homo sapien
ggagaagagtaactttccacgataa

SEQ ID NO: 2034196 - DNA, 25 bp, Homo sapien
tatcagctcccatcgtgctgagctc

SEQ ID NO: 2034197 - DNA, 25 bp, Homo sapien
tcatggagaccctgaatcggggaac

SEQ ID NO: 2034198 - DNA, 25 bp, Homo sapien
cctgaatcggggaactgagagccca

SEQ ID NO: 2034199 - DNA, 25 bp, Homo sapien
gctattaggccctgacacttctggg

SEQ ID NO: 2034200 - DNA, 25 bp, Homo sapien
agtcccgaaagccatgccagagcag

SEQ ID NO: 2034201 - DNA, 25 bp, Homo sapien
tgttctcttagcaatagggcctcct

SEQ ID NO: 2034202 - DNA, 25 bp, Homo sapien
gagtaagtgtggcatacatggccaa

SEQ ID NO: 2034203 - DNA, 25 bp, Homo sapien
cccagcatccatggagctgggtgtg

SEQ ID NO: 2034204 - DNA, 25 bp, Homo sapien
tggttgcccagatagaaactacgtt

SEQ ID NO: 2034205 - DNA, 25 bp, Homo sapien
ggcaaatcctattccacaggtgagg

SEQ ID NO: 2034206 - DNA, 25 bp, Homo sapien
taatgagcgcacctgataaagagag

SEQ ID NO: 2034207 - DNA, 25 bp, Homo sapien
gttcagaacgagtcccatagccagg

SEQ ID NO: 2034208 - DNA, 25 bp, Homo sapien
gctttactggtacatgcccctggat

SEQ ID NO: 2034209 - DNA, 25 bp, Homo sapien
aaggcctggcgcctgcatattgccg

SEQ ID NO: 2034210 - DNA, 25 bp, Homo sapien
tctgtaatcagctttgccgagactg

SEQ ID NO: 2034211 - DNA, 25 bp, Homo sapien
gaacttcgctgacactcctctgtaa

SEQ ID NO: 2034212 - DNA, 25 bp, Homo sapien
tggctcaaggtaactctgtgcaaag

SEQ ID NO: 2034213 - DNA, 25 bp, Homo sapien
acctcaggggatgcgtggagtgcac

SEQ ID NO: 2034214 - DNA, 25 bp, Homo sapien
ctcatttagtaagcactctgtgtgc

SEQ ID NO: 2034215 - DNA, 25 bp, Homo sapien
ctgtgtgcagagaacataggtgacc

SEQ ID NO: 2034216 - DNA, 25 bp, Homo sapien
gcagattggcctggccgagacatca

SEQ ID NO: 2034217 - DNA, 25 bp, Homo sapien
cagctgcaacgagaggcagggccca

SEQ ID NO: 2034218 - DNA, 25 bp, Homo sapien
cagaaaataactcaggcaagccagc

SEQ ID NO: 2034219 - DNA, 25 bp, Homo sapien
ggcccagcgacagcgcctgggtggg

SEQ ID NO: 2034220 - DNA, 25 bp, Homo sapien
gacaataggatcattacagatggaa

SEQ ID NO: 2034221 - DNA, 25 bp, Homo sapien
cccctcccagctttaatggtctgta

SEQ ID NO: 2034222 - DNA, 25 bp, Homo sapien
ttgtcccctaggtcagactgcggtt

SEQ ID NO: 2034223 - DNA, 25 bp, Homo sapien
ctaggtcagactgcggtttcttgtc

SEQ ID NO: 2034224 - DNA, 25 bp, Homo sapien
cctcccagctttaatggtctgtaat

SEQ ID NO: 2034225 - DNA, 25 bp, Homo sapien
tgctcggggctcctcttatcactgc

SEQ ID NO: 2034226 - DNA, 25 bp, Homo sapien
attcctccgcccatgggactcagct

SEQ ID NO: 2034227 - DNA, 25 bp, Homo sapien
tgcacttcacagctgcgtgaaactg

SEQ ID NO: 2034228 - DNA, 25 bp, Homo sapien
cagcactttacagactccatccggt

SEQ ID NO: 2034229 - DNA, 25 bp, Homo sapien
ctggcccagtgagattccctcaagg

SEQ ID NO: 2034230 - DNA, 25 bp, Homo sapien
cagtttttgggtccctccaagctgg

SEQ ID NO: 2034231 - DNA, 25 bp, Homo sapien
tgtgctcctgcgctcggcagtctgc

SEQ ID NO: 2034232 - DNA, 25 bp, Homo sapien
tctgctcctcggtccgtttggaggt

SEQ ID NO: 2034233 - DNA, 25 bp, Homo sapien
gggtggttagagcctcaccaatccc

SEQ ID NO: 2034234 - DNA, 25 bp, Homo sapien
tgggggtggttagagcctcaccaat

SEQ ID NO: 2034235 - DNA, 25 bp, Homo sapien
gtggttagagcctcaccaatcccac

SEQ ID NO: 2034236 - DNA, 25 bp, Homo sapien
ctgtgggggtggttagagcctcacc

SEQ ID NO: 2034237 - DNA, 25 bp, Homo sapien
tctattatcccgagcgccttatttt

SEQ ID NO: 2034238 - DNA, 25 bp, Homo sapien
gcgtggcctcactccaagacaatgg

SEQ ID NO: 2034239 - DNA, 25 bp, Homo sapien
tgcagcgtgatacacagggcttcct

SEQ ID NO: 2034240 - DNA, 25 bp, Homo sapien
caaacactgtttatcagtcatagga

SEQ ID NO: 2034241 - DNA, 25 bp, Homo sapien
gatcggacctttctcagggaggacc

SEQ ID NO: 2034242 - DNA, 25 bp, Homo sapien
ttgatagggtcgcatccactctcgc

SEQ ID NO: 2034243 - DNA, 25 bp, Homo sapien
cctggtttgcattgagggcggctca

SEQ ID NO: 2034244 - DNA, 25 bp, Homo sapien
tgtacttctaaagctactctgagcc

SEQ ID NO: 2034245 - DNA, 25 bp, Homo sapien
gcaattaaaagggctccaactagaa

SEQ ID NO: 2034246 - DNA, 25 bp, Homo sapien
aaagggctccaactagaacagacat

SEQ ID NO: 2034247 - DNA, 25 bp, Homo sapien
attaaaagggctccaactagaacag

SEQ ID NO: 2034248 - DNA, 25 bp, Homo sapien
taaaagggctccaactagaacagac

SEQ ID NO: 2034249 - DNA, 25 bp, Homo sapien
tgggagttcacaaagttttaggcca

SEQ ID NO: 2034250 - DNA, 25 bp, Homo sapien
ctttatctttgggagttcacaaagt

SEQ ID NO: 2034251 - DNA, 25 bp, Homo sapien
gatgacgagggtagtgatgagtagc

SEQ ID NO: 2034252 - DNA, 25 bp, Homo sapien
ggtagtgatgagtagctttatcttt

SEQ ID NO: 2034253 - DNA, 25 bp, Homo sapien
agagcatagcaccagagatttgaag

SEQ ID NO: 2034254 - DNA, 25 bp, Homo sapien
gagcatagcaccagagatttgaagg

SEQ ID NO: 2034255 - DNA, 25 bp, Homo sapien
ctgagcgtggctagcagaggccttt

SEQ ID NO: 2034256 - DNA, 25 bp, Homo sapien
catcatgtctaatttgggctaaatc

SEQ ID NO: 2034257 - DNA, 25 bp, Homo sapien
ttgggctaaatctgtgtcagggctg

SEQ ID NO: 2034258 - DNA, 25 bp, Homo sapien
gttgcactgagcgtggctagcagag

SEQ ID NO: 2034259 - DNA, 25 bp, Homo sapien
tcccactcagaagctgaacacggca

SEQ ID NO: 2034260 - DNA, 25 bp, Homo sapien
ctcagaagctgaacacggcagatcc

SEQ ID NO: 2034261 - DNA, 25 bp, Homo sapien
ccactcagaagctgaacacggcaga

SEQ ID NO: 2034262 - DNA, 25 bp, Homo sapien
cactcagaagctgaacacggcagat

SEQ ID NO: 2034263 - DNA, 25 bp, Homo sapien
tgtcccatgcactgtccctgtgcct

SEQ ID NO: 2034264 - DNA, 25 bp, Homo sapien
ctggtgtcccttggacatacaactc

SEQ ID NO: 2034265 - DNA, 25 bp, Homo sapien
tcccatgcactgtccctgtgcctga

SEQ ID NO: 2034266 - DNA, 25 bp, Homo sapien
ttctgctggtgtcccttggacatac

SEQ ID NO: 2034267 - DNA, 25 bp, Homo sapien
gcccagagaccaccggggaccttga

SEQ ID NO: 2034268 - DNA, 25 bp, Homo sapien
agcccagagaccaccggggaccttg

SEQ ID NO: 2034269 - DNA, 25 bp, Homo sapien
caagcccagagaccaccggggacct

SEQ ID NO: 2034270 - DNA, 25 bp, Homo sapien
cagagaccaccggggaccttgaggt

SEQ ID NO: 2034271 - DNA, 25 bp, Homo sapien
ttcaatggacaggccctttacggct

SEQ ID NO: 2034272 - DNA, 25 bp, Homo sapien
tttcaatggacaggccctttacggc

SEQ ID NO: 2034273 - DNA, 25 bp, Homo sapien
atggacaggccctttacggcttcct

SEQ ID NO: 2034274 - DNA, 25 bp, Homo sapien
caatggacaggccctttacggcttc

SEQ ID NO: 2034275 - DNA, 25 bp, Homo sapien
cacctgagggacaatactgggctcc

SEQ ID NO: 2034276 - DNA, 25 bp, Homo sapien
aacacctgagggacaatactgggct

SEQ ID NO: 2034277 - DNA, 25 bp, Homo sapien
cctgagggacaatactgggctccat

SEQ ID NO: 2034278 - DNA, 25 bp, Homo sapien
caacacctgagggacaatactgggc

SEQ ID NO: 2034279 - DNA, 25 bp, Homo sapien
gaattacctggttcagcacagactg

SEQ ID NO: 2034280 - DNA, 25 bp, Homo sapien
ttttgtcccgaaggcactgggtgag

SEQ ID NO: 2034281 - DNA, 25 bp, Homo sapien
gcaatgactttacccggcagctgat

SEQ ID NO: 2034282 - DNA, 25 bp, Homo sapien
tgatgagcccacttctcaaaggagt

SEQ ID NO: 2034283 - DNA, 25 bp, Homo sapien
ctgtcactcggcatcttggccaagg

SEQ ID NO: 2034284 - DNA, 25 bp, Homo sapien
agatgtcatacacgtatccatggag

SEQ ID NO: 2034285 - DNA, 25 bp, Homo sapien
tgtcactcggcatcttggccaaggg

SEQ ID NO: 2034286 - DNA, 25 bp, Homo sapien
tacacgtatccatggagctttcctg

SEQ ID NO: 2034287 - DNA, 25 bp, Homo sapien
ctggagatttggaaattggggcctg

SEQ ID NO: 2034288 - DNA, 25 bp, Homo sapien
ttggggcctgaatcatccccccgat

SEQ ID NO: 2034289 - DNA, 25 bp, Homo sapien
ggcctgaatcatccccccgatcttc

SEQ ID NO: 2034290 - DNA, 25 bp, Homo sapien
gatttggaaattggggcctgaatca

SEQ ID NO: 2034291 - DNA, 25 bp, Homo sapien
gctgttccacacacaataatgccaa

SEQ ID NO: 2034292 - DNA, 25 bp, Homo sapien
aggcgtcttataccatgctcgtcac

SEQ ID NO: 2034293 - DNA, 25 bp, Homo sapien
tccaatcacaagaactgagctgaag

SEQ ID NO: 2034294 - DNA, 25 bp, Homo sapien
tctggaggaaacacaactccaatca

SEQ ID NO: 2034295 - DNA, 25 bp, Homo sapien
agttaataaaaatggataagcaaga

SEQ ID NO: 2034296 - DNA, 25 bp, Homo sapien
gatcctcatactgggtgagcaccga

SEQ ID NO: 2034297 - DNA, 25 bp, Homo sapien
tgcctgaccccacacatctgacagt

SEQ ID NO: 2034298 - DNA, 25 bp, Homo sapien
gagctacaatgagcatccgagaaac

SEQ ID NO: 2034299 - DNA, 25 bp, Homo sapien
gatccaatatcttgcaggccatctg

SEQ ID NO: 2034300 - DNA, 25 bp, Homo sapien
tcttcacctttgttggcctcagtct

SEQ ID NO: 2034301 - DNA, 25 bp, Homo sapien
gctaaaatagtatcgactcaacgct

SEQ ID NO: 2034302 - DNA, 25 bp, Homo sapien
tgttatttaggcaactgtcttcacc

SEQ ID NO: 2034303 - DNA, 25 bp, Homo sapien
agtttccttatctgcgaagtcagct

SEQ ID NO: 2034304 - DNA, 25 bp, Homo sapien
tctgcgaagtcagctttaggctttg

SEQ ID NO: 2034305 - DNA, 25 bp, Homo sapien
cttatctgcgaagtcagctttaggc

SEQ ID NO: 2034306 - DNA, 25 bp, Homo sapien
gcgaagtcagctttaggctttgttc

SEQ ID NO: 2034307 - DNA, 25 bp, Homo sapien
caatgggagggttgggaaaggtgag

SEQ ID NO: 2034308 - DNA, 25 bp, Homo sapien
atgggagggttgggaaaggtgagag

SEQ ID NO: 2034309 - DNA, 25 bp, Homo sapien
ctgacaatgggagggttgggaaagg

SEQ ID NO: 2034310 - DNA, 25 bp, Homo sapien
gcttcccatagtctccggattctca

SEQ ID NO: 2034311 - DNA, 25 bp, Homo sapien
gtcgaaaagcttcccatagtctccg

SEQ ID NO: 2034312 - DNA, 25 bp, Homo sapien
gcaaaccctggacagagtcgaaaag

SEQ ID NO: 2034313 - DNA, 25 bp, Homo sapien
cctggacagagtcgaaaagcttccc

SEQ ID NO: 2034314 - DNA, 25 bp, Homo sapien
ctggacactgccccgcccgccagca

SEQ ID NO: 2034315 - DNA, 25 bp, Homo sapien
aaaccagctcctctcctctgcgatg

SEQ ID NO: 2034316 - DNA, 25 bp, Homo sapien
accagctcctctcctctgcgatgct

SEQ ID NO: 2034317 - DNA, 25 bp, Homo sapien
gccccgcccgccagcaaaaccagct

SEQ ID NO: 2034318 - DNA, 25 bp, Homo sapien
tccacgctgaggaccagagtctaga

SEQ ID NO: 2034319 - DNA, 25 bp, Homo sapien
taatgctttgctggtttgggctgca

SEQ ID NO: 2034320 - DNA, 25 bp, Homo sapien
tctctctcgaggtgggatagtgtga

SEQ ID NO: 2034321 - DNA, 25 bp, Homo sapien
gatagtgtgagtccagcatcggcag

SEQ ID NO: 2034322 - DNA, 25 bp, Homo sapien
gtgataaaataagcagctggagagg

SEQ ID NO: 2034323 - DNA, 25 bp, Homo sapien
agcatcttgttcttcgctgaatttc

SEQ ID NO: 2034324 - DNA, 25 bp, Homo sapien
catcttgttcttcgctgaatttctt

SEQ ID NO: 2034325 - DNA, 25 bp, Homo sapien
ctcctcttgtccggtgcctcctcag

SEQ ID NO: 2034326 - DNA, 25 bp, Homo sapien
tgggctgagtgaccctcactgtgga

SEQ ID NO: 2034327 - DNA, 25 bp, Homo sapien
agctcatgtgatcaaggagctctga

SEQ ID NO: 2034328 - DNA, 25 bp, Homo sapien
gctggagggtaagctcatgtgatca

SEQ ID NO: 2034329 - DNA, 25 bp, Homo sapien
gctgagtgaccctcactgtggacaa

SEQ ID NO: 2034330 - DNA, 25 bp, Homo sapien
ctctgagcatgcacgcattttcctg

SEQ ID NO: 2034331 - DNA, 25 bp, Homo sapien
ttaatggaacccatgccacgggctc

SEQ ID NO: 2034332 - DNA, 25 bp, Homo sapien
ccatgccacgggctctgtaggaatg

SEQ ID NO: 2034333 - DNA, 25 bp, Homo sapien
gcatccttaatggaacccatgccac

SEQ ID NO: 2034334 - DNA, 25 bp, Homo sapien
cacatttgctgcgggaggcctagct

SEQ ID NO: 2034335 - DNA, 25 bp, Homo sapien
tttgctgcgggaggcctagcttctc

SEQ ID NO: 2034336 - DNA, 25 bp, Homo sapien
gggaggcctagcttctctgcaaagc

SEQ ID NO: 2034337 - DNA, 25 bp, Homo sapien
tccaaaccctgtactggcctcgcat

SEQ ID NO: 2034338 - DNA, 25 bp, Homo sapien
ttctgtggatatgctgcacctgatg

SEQ ID NO: 2034339 - DNA, 25 bp, Homo sapien
ctgtggatatgctgcacctgatgcc

SEQ ID NO: 2034340 - DNA, 25 bp, Homo sapien
ttaattctgtggatatgctgcacct

SEQ ID NO: 2034341 - DNA, 25 bp, Homo sapien
aattctgtggatatgctgcacctga

SEQ ID NO: 2034342 - DNA, 25 bp, Homo sapien
aagctcagtgctctgatttcgggcc

SEQ ID NO: 2034343 - DNA, 25 bp, Homo sapien
ggcaacatttgcctgctcccttagg

SEQ ID NO: 2034344 - DNA, 25 bp, Homo sapien
cctttgtgtaagtgcgtgtgagccc

SEQ ID NO: 2034345 - DNA, 25 bp, Homo sapien
caggtaatgaggttgaggacaccaa

SEQ ID NO: 2034346 - DNA, 25 bp, Homo sapien
gggtgggtagcgctatcttcttcct

SEQ ID NO: 2034347 - DNA, 25 bp, Homo sapien
gagaagccccttgctttctgcagcc

SEQ ID NO: 2034348 - DNA, 25 bp, Homo sapien
tcgtgagacaagagacgtgctgccc

SEQ ID NO: 2034349 - DNA, 25 bp, Homo sapien
ccttctgaaagctttgtgggtgggt

SEQ ID NO: 2034350 - DNA, 25 bp, Homo sapien
cagctattacagtcacaggctgagc

SEQ ID NO: 2034351 - DNA, 25 bp, Homo sapien
tcgcccagctcccaagtgggactgg

SEQ ID NO: 2034352 - DNA, 25 bp, Homo sapien
aggatgtccccagctattacagtca

SEQ ID NO: 2034353 - DNA, 25 bp, Homo sapien
gggacagacttatccatactcagga

SEQ ID NO: 2034354 - DNA, 25 bp, Homo sapien
cctttcgatccgagtgagcactggg

SEQ ID NO: 2034355 - DNA, 25 bp, Homo sapien
caggtccagggcttcggtgagctca

SEQ ID NO: 2034356 - DNA, 25 bp, Homo sapien
ggcctcagaggaccatcacataaaa

SEQ ID NO: 2034357 - DNA, 25 bp, Homo sapien
cctccagcttagtgcattgtgtgat

SEQ ID NO: 2034358 - DNA, 25 bp, Homo sapien
gattctgtgcccatagctcttgaga

SEQ ID NO: 2034359 - DNA, 25 bp, Homo sapien
cccatagctcttgagaccccagagg

SEQ ID NO: 2034360 - DNA, 25 bp, Homo sapien
tctgtgcccatagctcttgagaccc

SEQ ID NO: 2034361 - DNA, 25 bp, Homo sapien
aaaagattctgtgcccatagctctt

SEQ ID NO: 2034362 - DNA, 25 bp, Homo sapien
gtgacacgactgatttttgaaacca

SEQ ID NO: 2034363 - DNA, 25 bp, Homo sapien
ggcttttagactctgggctctcgaa

SEQ ID NO: 2034364 - DNA, 25 bp, Homo sapien
tcgaattccaagagtgacagtgaca

SEQ ID NO: 2034365 - DNA, 25 bp, Homo sapien
gaaaccaacgtttccagagctacag

SEQ ID NO: 2034366 - DNA, 25 bp, Homo sapien
gactctcagcaatggaaacatctca

SEQ ID NO: 2034367 - DNA, 25 bp, Homo sapien
catgtggatgttcaatgcacctgtg

SEQ ID NO: 2034368 - DNA, 25 bp, Homo sapien
gactataaccgctcattttatggag

SEQ ID NO: 2034369 - DNA, 25 bp, Homo sapien
acagagactcaggtttctgaatcct

SEQ ID NO: 2034370 - DNA, 25 bp, Homo sapien
agtgccttgactctggcgctggcgc

SEQ ID NO: 2034371 - DNA, 25 bp, Homo sapien
tggcgctggcgccttgacggcaggc

SEQ ID NO: 2034372 - DNA, 25 bp, Homo sapien
ttgtgaacgggaagcaaagagcacc

SEQ ID NO: 2034373 - DNA, 25 bp, Homo sapien
caccagggaggctggttgcaccaga

SEQ ID NO: 2034374 - DNA, 25 bp, Homo sapien
tgaaactgtagccttgcctgagtag

SEQ ID NO: 2034375 - DNA, 25 bp, Homo sapien
tggaatctgaacaggcgatctgccc

SEQ ID NO: 2034376 - DNA, 25 bp, Homo sapien
gcctgagtagacactttgtggaatc

SEQ ID NO: 2034377 - DNA, 25 bp, Homo sapien
tctgaacaggcgatctgccctctgc

SEQ ID NO: 2034378 - DNA, 25 bp, Homo sapien
agaggacttcttttcaggaacccag

SEQ ID NO: 2034379 - DNA, 25 bp, Homo sapien
tccccaaagcgcagagaggtccttg

SEQ ID NO: 2034380 - DNA, 25 bp, Homo sapien
ggaggaccaaatcaggtctgtttcc

SEQ ID NO: 2034381 - DNA, 25 bp, Homo sapien
ctggggctgtaaagaggacttcttt

SEQ ID NO: 2034382 - DNA, 25 bp, Homo sapien
tcatggcatccacttcaggatcttc

SEQ ID NO: 2034383 - DNA, 25 bp, Homo sapien
tttcatggcatccacttcaggatct

SEQ ID NO: 2034384 - DNA, 25 bp, Homo sapien
atggcatccacttcaggatcttcca

SEQ ID NO: 2034385 - DNA, 25 bp, Homo sapien
tttgcgtttttgctttttcatggca

SEQ ID NO: 2034386 - DNA, 25 bp, Homo sapien
gccacatggaacaaaggccactagg

SEQ ID NO: 2034387 - DNA, 25 bp, Homo sapien
gcagggggtgaactgtggccacatg

SEQ ID NO: 2034388 - DNA, 25 bp, Homo sapien
gcccaaacctagggtcctgagcagg

SEQ ID NO: 2034389 - DNA, 25 bp, Homo sapien
tggaacaaaggccactaggctggga

SEQ ID NO: 2034390 - DNA, 25 bp, Homo sapien
ggtaactggagacacaaatatgaac

SEQ ID NO: 2034391 - DNA, 25 bp, Homo sapien
caggtaactggagacacaaatatga

SEQ ID NO: 2034392 - DNA, 25 bp, Homo sapien
gagacacaaatatgaacaggcccca

SEQ ID NO: 2034393 - DNA, 25 bp, Homo sapien
actggagacacaaatatgaacaggc

SEQ ID NO: 2034394 - DNA, 25 bp, Homo sapien
tgaaagcttcacttggtccctgaca

SEQ ID NO: 2034395 - DNA, 25 bp, Homo sapien
gcaggaacttggagtactacatgta

SEQ ID NO: 2034396 - DNA, 25 bp, Homo sapien
ggtcatcactcttggcaaatattga

SEQ ID NO: 2034397 - DNA, 25 bp, Homo sapien
tacatgtaataacatactggtcatc

SEQ ID NO: 2034398 - DNA, 25 bp, Homo sapien
tttcacacgttagtgtgaaaaacca

SEQ ID NO: 2034399 - DNA, 25 bp, Homo sapien
taataaggctttaaggaggcacatt

SEQ ID NO: 2034400 - DNA, 25 bp, Homo sapien
ataataaggctttaaggaggcacat

SEQ ID NO: 2034401 - DNA, 25 bp, Homo sapien
ataaggctttaaggaggcacatttc

SEQ ID NO: 2034402 - DNA, 25 bp, Homo sapien
tgcacttgggtgtcaaagatggatg

SEQ ID NO: 2034403 - DNA, 25 bp, Homo sapien
actggttctgtaaggaggtgagcaa

SEQ ID NO: 2034404 - DNA, 25 bp, Homo sapien
ggatgcagctttgtcttctacatat

SEQ ID NO: 2034405 - DNA, 25 bp, Homo sapien
caaattcatgacactggttctgtaa

SEQ ID NO: 2034406 - DNA, 25 bp, Homo sapien
gagctgctccttcggccgagaaggt

SEQ ID NO: 2034407 - DNA, 25 bp, Homo sapien
ccttcggccgagaaggtcgtttctg

SEQ ID NO: 2034408 - DNA, 25 bp, Homo sapien
ctgagctgctccttcggccgagaag

SEQ ID NO: 2034409 - DNA, 25 bp, Homo sapien
ggccgagaaggtcgtttctgtcttc

SEQ ID NO: 2034410 - DNA, 25 bp, Homo sapien
tcaatgaagacaatacacgggcttt

SEQ ID NO: 2034411 - DNA, 25 bp, Homo sapien
ttcccccaggatgccgtcagattca

SEQ ID NO: 2034412 - DNA, 25 bp, Homo sapien
gatgccgtcagattcaatgaagaca

SEQ ID NO: 2034413 - DNA, 25 bp, Homo sapien
tgaagacaatacacgggctttgttc

SEQ ID NO: 2034414 - DNA, 25 bp, Homo sapien
tccaaccccagggagatggcctcgg

SEQ ID NO: 2034415 - DNA, 25 bp, Homo sapien
tcaagcccacaagtgtgtttctgct

SEQ ID NO: 2034416 - DNA, 25 bp, Homo sapien
tgttggtgctagttctccaacccca

SEQ ID NO: 2034417 - DNA, 25 bp, Homo sapien
tgctttgttggtgctagttctccaa

SEQ ID NO: 2034418 - DNA, 25 bp, Homo sapien
agcctggacccggagaacttgtcgc

SEQ ID NO: 2034419 - DNA, 25 bp, Homo sapien
ggacccggagaacttgtcgcagcag

SEQ ID NO: 2034420 - DNA, 25 bp, Homo sapien
ggtttggatgcagattgtggaaatc

SEQ ID NO: 2034421 - DNA, 25 bp, Homo sapien
tggatgcagattgtggaaatcacag

SEQ ID NO: 2034422 - DNA, 25 bp, Homo sapien
caaagggcttccatccttcactgtg

SEQ ID NO: 2034423 - DNA, 25 bp, Homo sapien
ccaaagggcttccatccttcactgt

SEQ ID NO: 2034424 - DNA, 25 bp, Homo sapien
ctgaatggaagagcgcatgcttcca

SEQ ID NO: 2034425 - DNA, 25 bp, Homo sapien
accctgcaggaggactctccgaggg

SEQ ID NO: 2034426 - DNA, 25 bp, Homo sapien
ccaccctgcaggaggactctccgag

SEQ ID NO: 2034427 - DNA, 25 bp, Homo sapien
atggaagagcgcatgcttccaccct

SEQ ID NO: 2034428 - DNA, 25 bp, Homo sapien
cagcagtctggatggcttagctgga

SEQ ID NO: 2034429 - DNA, 25 bp, Homo sapien
ccccgaaggtgcagtcaggtattag

SEQ ID NO: 2034430 - DNA, 25 bp, Homo sapien
ggtattagtcatgccacggatctca

SEQ ID NO: 2034431 - DNA, 25 bp, Homo sapien
tcttgctaactgttggccggacacc

SEQ ID NO: 2034432 - DNA, 25 bp, Homo sapien
cccaggaggtctttgcggcatgaga

SEQ ID NO: 2034433 - DNA, 25 bp, Homo sapien
ggcatgagaataatgcactggagag

SEQ ID NO: 2034434 - DNA, 25 bp, Homo sapien
cactggagagtgcttccttttggct

SEQ ID NO: 2034435 - DNA, 25 bp, Homo sapien
ggtgctccacaatgggtgttgcatg

SEQ ID NO: 2034436 - DNA, 25 bp, Homo sapien
tcacagaggtggtcagtcacaaacc

SEQ ID NO: 2034437 - DNA, 25 bp, Homo sapien
ttcccacctagaaggcaaactgcag

SEQ ID NO: 2034438 - DNA, 25 bp, Homo sapien
tctctatctcaccaactgacagggt

SEQ ID NO: 2034439 - DNA, 25 bp, Homo sapien
gcagtagtgcctcaataaccatcag

SEQ ID NO: 2034440 - DNA, 25 bp, Homo sapien
tcccatttgtgagcagagtctgcca

SEQ ID NO: 2034441 - DNA, 25 bp, Homo sapien
caaaaagtgttacatgggcagagag

SEQ ID NO: 2034442 - DNA, 25 bp, Homo sapien
aagtcaagacccaacaggcctgtgc

SEQ ID NO: 2034443 - DNA, 25 bp, Homo sapien
ggcggtatcgcattcctggcataat

SEQ ID NO: 2034444 - DNA, 25 bp, Homo sapien
cttctgcagagaatcacacagtggg

SEQ ID NO: 2034445 - DNA, 25 bp, Homo sapien
taggttttgctgatgatgggatccc

SEQ ID NO: 2034446 - DNA, 25 bp, Homo sapien
tcatggaattgtggcctggcagaca

SEQ ID NO: 2034447 - DNA, 25 bp, Homo sapien
cgatgactggccacaacaaagctga

SEQ ID NO: 2034448 - DNA, 25 bp, Homo sapien
gtgcacggatgaataactgctgcag

SEQ ID NO: 2034449 - DNA, 25 bp, Homo sapien
agctgtgcacggatgaataactgct

SEQ ID NO: 2034450 - DNA, 25 bp, Homo sapien
cagcaggtatctcctggtggtagaa

SEQ ID NO: 2034451 - DNA, 25 bp, Homo sapien
caggtatctcctggtggtagaagtg

SEQ ID NO: 2034452 - DNA, 25 bp, Homo sapien
agcagagtgtggactggccagtctc

SEQ ID NO: 2034453 - DNA, 25 bp, Homo sapien
tggactggccagtctcaagcttccc

SEQ ID NO: 2034454 - DNA, 25 bp, Homo sapien
tctcaagcttccctcaaaagttctt

SEQ ID NO: 2034455 - DNA, 25 bp, Homo sapien
caaaagttcttccatcaccagatac

SEQ ID NO: 2034456 - DNA, 25 bp, Homo sapien
tctcctaaggcaagggatgctgact

SEQ ID NO: 2034457 - DNA, 25 bp, Homo sapien
catcacaaaacggagcactgcggaa

SEQ ID NO: 2034458 - DNA, 25 bp, Homo sapien
gcagaatctcaatgatgcccacagg

SEQ ID NO: 2034459 - DNA, 25 bp, Homo sapien
gaaggcgtgtttggctacgacagcc

SEQ ID NO: 2034460 - DNA, 25 bp, Homo sapien
tgacactgagctacgatgttctcaa

SEQ ID NO: 2034461 - DNA, 25 bp, Homo sapien
tgtgacctcttgcagaattcctgac

SEQ ID NO: 2034462 - DNA, 25 bp, Homo sapien
acctcttgcagaattcctgacactg

SEQ ID NO: 2034463 - DNA, 25 bp, Homo sapien
tcctgacactgagctacgatgttct

SEQ ID NO: 2034464 - DNA, 25 bp, Homo sapien
taccttctataaggaggcctgccag

SEQ ID NO: 2034465 - DNA, 25 bp, Homo sapien
caacacgttactttctattcccaat

SEQ ID NO: 2034466 - DNA, 25 bp, Homo sapien
tcatctcaacgtccagcgtcgtcct

SEQ ID NO: 2034467 - DNA, 25 bp, Homo sapien
catcttcacgtctcaacacgttact

SEQ ID NO: 2034468 - DNA, 25 bp, Homo sapien
agcccaggatcagccagtcctcaaa

SEQ ID NO: 2034469 - DNA, 25 bp, Homo sapien
agagcccaggatcagccagtcctca

SEQ ID NO: 2034470 - DNA, 25 bp, Homo sapien
gcagagcccaggatcagccagtcct

SEQ ID NO: 2034471 - DNA, 25 bp, Homo sapien
ctgcagagcccaggatcagccagtc

SEQ ID NO: 2034472 - DNA, 25 bp, Homo sapien
tcgcaggggccggaatccactcagg

SEQ ID NO: 2034473 - DNA, 25 bp, Homo sapien
ggcttcctcttgacacagtcgcagg

SEQ ID NO: 2034474 - DNA, 25 bp, Homo sapien
ccagtgcagaatcaggcagccccat

SEQ ID NO: 2034475 - DNA, 25 bp, Homo sapien
gaatccactcaggagctccagtgca

SEQ ID NO: 2034476 - DNA, 25 bp, Homo sapien
cagggtcttgcagtgtttcccatga

SEQ ID NO: 2034477 - DNA, 25 bp, Homo sapien
cttgcagtgtttcccatgatggtct

SEQ ID NO: 2034478 - DNA, 25 bp, Homo sapien
agagacaagatctctgtctgtcgcc

SEQ ID NO: 2034479 - DNA, 25 bp, Homo sapien
taatttatttttgactctggggcat

SEQ ID NO: 2034480 - DNA, 25 bp, Homo sapien
tacaatgatgtaatcagatggtaga

SEQ ID NO: 2034481 - DNA, 25 bp, Homo sapien
gactagtaatagctgaattatctca

SEQ ID NO: 2034482 - DNA, 25 bp, Homo sapien
gccaccccagatggtcagttgaagt

SEQ ID NO: 2034483 - DNA, 25 bp, Homo sapien
aaatagcaccttactgagagccaga

SEQ ID NO: 2034484 - DNA, 25 bp, Homo sapien
aatgcactgaagaggccaacatgaa

SEQ ID NO: 2034485 - DNA, 25 bp, Homo sapien
gcagcctctgatgccggctccattg

SEQ ID NO: 2034486 - DNA, 25 bp, Homo sapien
ccaacatgaattagggcagagaggg

SEQ ID NO: 2034487 - DNA, 25 bp, Homo sapien
gccggctccattgctgcagctgtca

SEQ ID NO: 2034488 - DNA, 25 bp, Homo sapien
cctcggggcctttgtgaaggtctgc

SEQ ID NO: 2034489 - DNA, 25 bp, Homo sapien
ctgcccactttctagcagagacacc

SEQ ID NO: 2034490 - DNA, 25 bp, Homo sapien
gctgaataggaaaagcctgcccact

SEQ ID NO: 2034491 - DNA, 25 bp, Homo sapien
agcctcaaaacaccaaaaagcacgg

SEQ ID NO: 2034492 - DNA, 25 bp, Homo sapien
tctaccccgttgcactcctgggtgt

SEQ ID NO: 2034493 - DNA, 25 bp, Homo sapien
tgtggctccgcagatggagtctgaa

SEQ ID NO: 2034494 - DNA, 25 bp, Homo sapien
cagcattgttaaggctggcgcccag

SEQ ID NO: 2034495 - DNA, 25 bp, Homo sapien
gggacacttcattcccgtcaatgtc

SEQ ID NO: 2034496 - DNA, 25 bp, Homo sapien
cagtgtgcagcggagtcttcaggaa

SEQ ID NO: 2034497 - DNA, 25 bp, Homo sapien
gtgcagcggagtcttcaggaagttt

SEQ ID NO: 2034498 - DNA, 25 bp, Homo sapien
gtgtgcagcggagtcttcaggaagt

SEQ ID NO: 2034499 - DNA, 25 bp, Homo sapien
tgcagtgtgcagcggagtcttcagg

SEQ ID NO: 2034500 - DNA, 25 bp, Homo sapien
cggggtctgtacactgaggggctgc

SEQ ID NO: 2034501 - DNA, 25 bp, Homo sapien
atcctggcagggatgacgcagctgc

SEQ ID NO: 2034502 - DNA, 25 bp, Homo sapien
cctggcagggatgacgcagctgcac

SEQ ID NO: 2034503 - DNA, 25 bp, Homo sapien
agctgcacggggtctgtacactgag

SEQ ID NO: 2034504 - DNA, 25 bp, Homo sapien
ggtacagaagctctggctttaaata

SEQ ID NO: 2034505 - DNA, 25 bp, Homo sapien
aaggggatgccgtggaagccaagtt

SEQ ID NO: 2034506 - DNA, 25 bp, Homo sapien
tacagaagctctggctttaaatagc

SEQ ID NO: 2034507 - DNA, 25 bp, Homo sapien
gggaaaggggatgccgtggaagcca

SEQ ID NO: 2034508 - DNA, 25 bp, Homo sapien
aatgaaggagttgcaactgatgttt

SEQ ID NO: 2034509 - DNA, 25 bp, Homo sapien
aaaccaagttgtggggaatggcgca

SEQ ID NO: 2034510 - DNA, 25 bp, Homo sapien
ccaaattacagatggcaaaccaagt

SEQ ID NO: 2034511 - DNA, 25 bp, Homo sapien
gaccagaaatgaaggagttgcaact

SEQ ID NO: 2034512 - DNA, 25 bp, Homo sapien
gaagttttcgtgatttgaatccaag

SEQ ID NO: 2034513 - DNA, 25 bp, Homo sapien
gctgtgaagttttcgtgatttgaat

SEQ ID NO: 2034514 - DNA, 25 bp, Homo sapien
tggctgtgaagttttcgtgatttga

SEQ ID NO: 2034515 - DNA, 25 bp, Homo sapien
gatttgaatccaagttcccagccag

SEQ ID NO: 2034516 - DNA, 25 bp, Homo sapien
ctgttccagcagttatgcaggagcc

SEQ ID NO: 2034517 - DNA, 25 bp, Homo sapien
acttccagcatctctgacgtgtgca

SEQ ID NO: 2034518 - DNA, 25 bp, Homo sapien
agacagcgaggcactggcactgtgt

SEQ ID NO: 2034519 - DNA, 25 bp, Homo sapien
tgttcaagcaccctgtgccctgact

SEQ ID NO: 2034520 - DNA, 25 bp, Homo sapien
aagaccttggtcagacagcgaggca

SEQ ID NO: 2034521 - DNA, 25 bp, Homo sapien
gcagatgaggaacgcagaaaccttc

SEQ ID NO: 2034522 - DNA, 25 bp, Homo sapien
gagctgtggccgtcttgcttaaagc

SEQ ID NO: 2034523 - DNA, 25 bp, Homo sapien
cctgctgtgtccgtgttataaaata

SEQ ID NO: 2034524 - DNA, 25 bp, Homo sapien
tgtgcgcgtgtgcttgctgctccgc

SEQ ID NO: 2034525 - DNA, 25 bp, Homo sapien
gcccctgagtcatgaacagcaagga

SEQ ID NO: 2034526 - DNA, 25 bp, Homo sapien
gtttgggactgtgatcaagacacct

SEQ ID NO: 2034527 - DNA, 25 bp, Homo sapien
taattgcactttaagacagcctaga

SEQ ID NO: 2034528 - DNA, 25 bp, Homo sapien
gcctagagttctggacgagcgtgtt

SEQ ID NO: 2034529 - DNA, 25 bp, Homo sapien
cagtttcagggtcagtgtgctgctt

SEQ ID NO: 2034530 - DNA, 25 bp, Homo sapien
agtttcagggtcagtgtgctgcttt

SEQ ID NO: 2034531 - DNA, 25 bp, Homo sapien
ctgatgtggctctgtgctggcagtt

SEQ ID NO: 2034532 - DNA, 25 bp, Homo sapien
tctgtgctggcagtttcagggtcag

SEQ ID NO: 2034533 - DNA, 25 bp, Homo sapien
catcgtcataacagtctgcagcagt

SEQ ID NO: 2034534 - DNA, 25 bp, Homo sapien
tgctagggtaactcagcagcgccac

SEQ ID NO: 2034535 - DNA, 25 bp, Homo sapien
tagtctgatcccgtggtggcatgct

SEQ ID NO: 2034536 - DNA, 25 bp, Homo sapien
gccacctccgggtgacatcgtcata

SEQ ID NO: 2034537 - DNA, 25 bp, Homo sapien
caggctcttgtggtttctgggtgaa

SEQ ID NO: 2034538 - DNA, 25 bp, Homo sapien
gaaggaagagctttactgacaacaa

SEQ ID NO: 2034539 - DNA, 25 bp, Homo sapien
tactgacaacaaaccggccattttc

SEQ ID NO: 2034540 - DNA, 25 bp, Homo sapien
tactccactagctcttaaaatacat

SEQ ID NO: 2034541 - DNA, 25 bp, Homo sapien
agacatctgagctttcatgagtcca

SEQ ID NO: 2034542 - DNA, 25 bp, Homo sapien
gacatctgagctttcatgagtccaa

SEQ ID NO: 2034543 - DNA, 25 bp, Homo sapien
tgagagggtgacgttatgcaacttc

SEQ ID NO: 2034544 - DNA, 25 bp, Homo sapien
gacgttatgcaacttctcatggtgc

SEQ ID NO: 2034545 - DNA, 25 bp, Homo sapien
tcttgtggttttgacgccttcctct

SEQ ID NO: 2034546 - DNA, 25 bp, Homo sapien
tatagagattagaagtgagtgtgcg

SEQ ID NO: 2034547 - DNA, 25 bp, Homo sapien
tccagccgtaactgtgacccaaggg

SEQ ID NO: 2034548 - DNA, 25 bp, Homo sapien
ccacaactgcgtttctgaatccaca

SEQ ID NO: 2034549 - DNA, 25 bp, Homo sapien
ggatgagggcagtcacatgtgaaac

SEQ ID NO: 2034550 - DNA, 25 bp, Homo sapien
aaacggctgcagtgttcatctgtga

SEQ ID NO: 2034551 - DNA, 25 bp, Homo sapien
tacatagctctcgaaaaacctggcc

SEQ ID NO: 2034552 - DNA, 25 bp, Homo sapien
caggtcaccgtgatgttctgaacac

SEQ ID NO: 2034553 - DNA, 25 bp, Homo sapien
agagaaaacccagtgtgcagtggaa

SEQ ID NO: 2034554 - DNA, 25 bp, Homo sapien
gaggtggccatgacacttggtacac

SEQ ID NO: 2034555 - DNA, 25 bp, Homo sapien
taaggctttccactggtaacagtcc

SEQ ID NO: 2034556 - DNA, 25 bp, Homo sapien
tgtggtgaattggaagtcatggcca

SEQ ID NO: 2034557 - DNA, 25 bp, Homo sapien
ttaatcagtcatcccagagttgtgg

SEQ ID NO: 2034558 - DNA, 25 bp, Homo sapien
tggccaaagtattttacactcctct

SEQ ID NO: 2034559 - DNA, 25 bp, Homo sapien
tttatgtctctagactcttgtctgt

SEQ ID NO: 2034560 - DNA, 25 bp, Homo sapien
ggggatctgatctcatctatgctct

SEQ ID NO: 2034561 - DNA, 25 bp, Homo sapien
tgtattccttagtctttctgttctc

SEQ ID NO: 2034562 - DNA, 25 bp, Homo sapien
tatgcttatgatgcctccatttatg

SEQ ID NO: 2034563 - DNA, 25 bp, Homo sapien
gattgtaactccgtcataacttgac

SEQ ID NO: 2034564 - DNA, 25 bp, Homo sapien
gacaatatttaaaacaccgcactgc

SEQ ID NO: 2034565 - DNA, 25 bp, Homo sapien
tgtgtggcttagacccatctcgtaa

SEQ ID NO: 2034566 - DNA, 25 bp, Homo sapien
cacgctgccaaagtaattcctgctc

SEQ ID NO: 2034567 - DNA, 25 bp, Homo sapien
agcagcgcagctatgctttaaacca

SEQ ID NO: 2034568 - DNA, 25 bp, Homo sapien
tgcccacggtgaggattgaataacc

SEQ ID NO: 2034569 - DNA, 25 bp, Homo sapien
tgatgatgaagtgcattctgtagca

SEQ ID NO: 2034570 - DNA, 25 bp, Homo sapien
atcatattacccattaaagtctggg

SEQ ID NO: 2034571 - DNA, 25 bp, Homo sapien
tacatatgcagagtacggtatttct

SEQ ID NO: 2034572 - DNA, 25 bp, Homo sapien
ggaagtttgcatgaatatgctcaga

SEQ ID NO: 2034573 - DNA, 25 bp, Homo sapien
gttacattgtaagtgaagtccagct

SEQ ID NO: 2034574 - DNA, 25 bp, Homo sapien
tcttgagagcatagtccaaagtgca

SEQ ID NO: 2034575 - DNA, 25 bp, Homo sapien
aagtgagacacctgacctacattcg

SEQ ID NO: 2034576 - DNA, 25 bp, Homo sapien
caccaaatcataaaggggccagagc

SEQ ID NO: 2034577 - DNA, 25 bp, Homo sapien
agaagtgagacacctgacctacatt

SEQ ID NO: 2034578 - DNA, 25 bp, Homo sapien
gacctacattcgttcaccaaatcat

SEQ ID NO: 2034579 - DNA, 25 bp, Homo sapien
cacacctcagtccttgttcttgcgg

SEQ ID NO: 2034580 - DNA, 25 bp, Homo sapien
tctccatatggacagagtggcaagc

SEQ ID NO: 2034581 - DNA, 25 bp, Homo sapien
acctctggcccacagggactcactg

SEQ ID NO: 2034582 - DNA, 25 bp, Homo sapien
ttcttgcggtgagcatgggctgaga

SEQ ID NO: 2034583 - DNA, 25 bp, Homo sapien
gacagaagttacttgacaagtggaa

SEQ ID NO: 2034584 - DNA, 25 bp, Homo sapien
gtggaaatcagcgtggcccaggcat

SEQ ID NO: 2034585 - DNA, 25 bp, Homo sapien
gattgctctgatggtcaccagaaat

SEQ ID NO: 2034586 - DNA, 25 bp, Homo sapien
gtagacagctacaggagagacagaa

SEQ ID NO: 2034587 - DNA, 25 bp, Homo sapien
gttccccaagtgagctagaatggta

SEQ ID NO: 2034588 - DNA, 25 bp, Homo sapien
tttccagaagctgctggtaatccat

SEQ ID NO: 2034589 - DNA, 25 bp, Homo sapien
gtttccagaagctgctggtaatcca

SEQ ID NO: 2034590 - DNA, 25 bp, Homo sapien
ccccaagtgagctagaatggtaggg

SEQ ID NO: 2034591 - DNA, 25 bp, Homo sapien
cacgggtcccttgtcacagttgagc

SEQ ID NO: 2034592 - DNA, 25 bp, Homo sapien
tgctgacacgggtcccttgtcacag

SEQ ID NO: 2034593 - DNA, 25 bp, Homo sapien
gaattattaagctcagagattcccc

SEQ ID NO: 2034594 - DNA, 25 bp, Homo sapien
cacagttgagcgtgcttgaattatt

SEQ ID NO: 2034595 - DNA, 25 bp, Homo sapien
gcagccagggtgtgttctttgaagt

SEQ ID NO: 2034596 - DNA, 25 bp, Homo sapien
cttcggtgatcgttcctgcttagca

SEQ ID NO: 2034597 - DNA, 25 bp, Homo sapien
tctatcaagtgtgatccagggtggc

SEQ ID NO: 2034598 - DNA, 25 bp, Homo sapien
ttccaggtgtgatatcagaaaaccc

SEQ ID NO: 2034599 - DNA, 25 bp, Homo sapien
gaaatcttttgcttctaagtccctg

SEQ ID NO: 2034600 - DNA, 25 bp, Homo sapien
cccaaaacatcaggaacactgttca

SEQ ID NO: 2034601 - DNA, 25 bp, Homo sapien
ctcccaaaacatcaggaacactgtt

SEQ ID NO: 2034602 - DNA, 25 bp, Homo sapien
tcccaaaacatcaggaacactgttc

SEQ ID NO: 2034603 - DNA, 25 bp, Homo sapien
acactgttcatgtgtaagtcatgga

SEQ ID NO: 2034604 - DNA, 25 bp, Homo sapien
gcatcccagagaatgagagtcccat

SEQ ID NO: 2034605 - DNA, 25 bp, Homo sapien
acacacgcggggctggtagaattcc

SEQ ID NO: 2034606 - DNA, 25 bp, Homo sapien
gtagaattccctgcatcccagagaa

SEQ ID NO: 2034607 - DNA, 25 bp, Homo sapien
gagagtcccattgggggagcctccc

SEQ ID NO: 2034608 - DNA, 25 bp, Homo sapien
gacccaattttccaggtgcgtctgt

SEQ ID NO: 2034609 - DNA, 25 bp, Homo sapien
cgtcggaaaagctcagtattcgggt

SEQ ID NO: 2034610 - DNA, 25 bp, Homo sapien
ccccttgtgcttcccaagtgaggca

SEQ ID NO: 2034611 - DNA, 25 bp, Homo sapien
cttgtgcttcccaagtgaggcaatg

SEQ ID NO: 2034612 - DNA, 25 bp, Homo sapien
ctcctctccagctataggtgatttc

SEQ ID NO: 2034613 - DNA, 25 bp, Homo sapien
cagctataggtgatttccacatggc

SEQ ID NO: 2034614 - DNA, 25 bp, Homo sapien
catggctgcagttcccttgcaggtg

SEQ ID NO: 2034615 - DNA, 25 bp, Homo sapien
tctccagctataggtgatttccaca

SEQ ID NO: 2034616 - DNA, 25 bp, Homo sapien
gctgtcaaggcttaggcgtgatggc

SEQ ID NO: 2034617 - DNA, 25 bp, Homo sapien
tgtcaaggcttaggcgtgatggccc

SEQ ID NO: 2034618 - DNA, 25 bp, Homo sapien
cttaggcgtgatggcccccagaggt

SEQ ID NO: 2034619 - DNA, 25 bp, Homo sapien
tcagctgtcaaggcttaggcgtgat

SEQ ID NO: 2034620 - DNA, 25 bp, Homo sapien
ggatggcaaagtcctgagcaaatgt

SEQ ID NO: 2034621 - DNA, 25 bp, Homo sapien
ggcagcaccactcctgagtctgtgt

SEQ ID NO: 2034622 - DNA, 25 bp, Homo sapien
agcaccactcctgagtctgtgtgat

SEQ ID NO: 2034623 - DNA, 25 bp, Homo sapien
gaggtggccgtgagggatcacttgc

SEQ ID NO: 2034624 - DNA, 25 bp, Homo sapien
cgcgggaggcttccgcggagactca

SEQ ID NO: 2034625 - DNA, 25 bp, Homo sapien
ccgtccccaggaacggccagcactg

SEQ ID NO: 2034626 - DNA, 25 bp, Homo sapien
gctcctcaagccagcgtgggctcca

SEQ ID NO: 2034627 - DNA, 25 bp, Homo sapien
gcgatggccccgggccaggaggcgt

SEQ ID NO: 2034628 - DNA, 25 bp, Homo sapien
ggggagagctgcacccacggacatc

SEQ ID NO: 2034629 - DNA, 25 bp, Homo sapien
ctgactcccagtgtcgagtgccctg

SEQ ID NO: 2034630 - DNA, 25 bp, Homo sapien
tgactcccagtgtcgagtgccctgg

SEQ ID NO: 2034631 - DNA, 25 bp, Homo sapien
tcagggtgcccactggataggtttg

SEQ ID NO: 2034632 - DNA, 25 bp, Homo sapien
cccatgaaggttttaggatctgtaa

SEQ ID NO: 2034633 - DNA, 25 bp, Homo sapien
ggcttgcaacgctgacagcaaggac

SEQ ID NO: 2034634 - DNA, 25 bp, Homo sapien
ggacagacaggtaacagctcttatt

SEQ ID NO: 2034635 - DNA, 25 bp, Homo sapien
gcaacaaaaaggtggatatacaggg

SEQ ID NO: 2034636 - DNA, 25 bp, Homo sapien
taggtactgataagcaataatcacc

SEQ ID NO: 2034637 - DNA, 25 bp, Homo sapien
cagggatgcccagtacagcattggt

SEQ ID NO: 2034638 - DNA, 25 bp, Homo sapien
caagatcgtgtcacggaaacatatg

SEQ ID NO: 2034639 - DNA, 25 bp, Homo sapien
gcctctccggtgagtccggcagctg

SEQ ID NO: 2034640 - DNA, 25 bp, Homo sapien
tcagtggctcagatatagttcaggc

SEQ ID NO: 2034641 - DNA, 25 bp, Homo sapien
tccacagacagggacatctcactgg

SEQ ID NO: 2034642 - DNA, 25 bp, Homo sapien
aagattacagcagggatttccagat

SEQ ID NO: 2034643 - DNA, 25 bp, Homo sapien
cgtgaagacatccaagatattcctt

SEQ ID NO: 2034644 - DNA, 25 bp, Homo sapien
gaataagtcataagccccgtgaaga

SEQ ID NO: 2034645 - DNA, 25 bp, Homo sapien
taagccccgtgaagacatccaagat

SEQ ID NO: 2034646 - DNA, 25 bp, Homo sapien
gtcataagccccgtgaagacatcca

SEQ ID NO: 2034647 - DNA, 25 bp, Homo sapien
agacagagaattccgatttcagctg

SEQ ID NO: 2034648 - DNA, 25 bp, Homo sapien
acagagaattccgatttcagctgac

SEQ ID NO: 2034649 - DNA, 25 bp, Homo sapien
gagacagagaattccgatttcagct

SEQ ID NO: 2034650 - DNA, 25 bp, Homo sapien
gacagagaattccgatttcagctga

SEQ ID NO: 2034651 - DNA, 25 bp, Homo sapien
ccacaagcccaatgatttgacctca

SEQ ID NO: 2034652 - DNA, 25 bp, Homo sapien
aggtcatctcggacagtcactggaa

SEQ ID NO: 2034653 - DNA, 25 bp, Homo sapien
cacaagcccaatgatttgacctcag

SEQ ID NO: 2034654 - DNA, 25 bp, Homo sapien
tagacaagtcatgataggcgcctcc

SEQ ID NO: 2034655 - DNA, 25 bp, Homo sapien
ggcgcctccatcgtgcttcagtgct

SEQ ID NO: 2034656 - DNA, 25 bp, Homo sapien
tctacctaacggaagagttgcccat

SEQ ID NO: 2034657 - DNA, 25 bp, Homo sapien
gcccattttgtgaaactgtgctaga

SEQ ID NO: 2034658 - DNA, 25 bp, Homo sapien
atgagccagtgttttttccgtgaat

SEQ ID NO: 2034659 - DNA, 25 bp, Homo sapien
tgagccagtgttttttccgtgaata

SEQ ID NO: 2034660 - DNA, 25 bp, Homo sapien
tgaaaaggcggacagcattagggct

SEQ ID NO: 2034661 - DNA, 25 bp, Homo sapien
tgagcttctgaaacctctgcaactt

SEQ ID NO: 2034662 - DNA, 25 bp, Homo sapien
cctgtccagaaaaggtcatcacttc

SEQ ID NO: 2034663 - DNA, 25 bp, Homo sapien
tgttctcctgaaacaggtggtggct

SEQ ID NO: 2034664 - DNA, 25 bp, Homo sapien
tgcggcttgaagtgaatttggcagc

SEQ ID NO: 2034665 - DNA, 25 bp, Homo sapien
tttgcggcttgaagtgaatttggca

SEQ ID NO: 2034666 - DNA, 25 bp, Homo sapien
cttttgcggcttgaagtgaatttgg

SEQ ID NO: 2034667 - DNA, 25 bp, Homo sapien
ttttgcggcttgaagtgaatttggc

SEQ ID NO: 2034668 - DNA, 25 bp, Homo sapien
tgggctatacaatttttttggactc

SEQ ID NO: 2034669 - DNA, 25 bp, Homo sapien
ctgaagtctgggctatacaattttt

SEQ ID NO: 2034670 - DNA, 25 bp, Homo sapien
tactgctgaagtctgggctatacaa

SEQ ID NO: 2034671 - DNA, 25 bp, Homo sapien
ctgctgaagtctgggctatacaatt

SEQ ID NO: 2034672 - DNA, 25 bp, Homo sapien
actattctgtcatcgataggcctca

SEQ ID NO: 2034673 - DNA, 25 bp, Homo sapien
tattctgtcatcgataggcctcatc

SEQ ID NO: 2034674 - DNA, 25 bp, Homo sapien
tactattctgtcatcgataggcctc

SEQ ID NO: 2034675 - DNA, 25 bp, Homo sapien
ttctgtcatcgataggcctcatcac

SEQ ID NO: 2034676 - DNA, 25 bp, Homo sapien
gctcttttactccagtgttggctcc

SEQ ID NO: 2034677 - DNA, 25 bp, Homo sapien
tgttggctccaggaccttgggtaga

SEQ ID NO: 2034678 - DNA, 25 bp, Homo sapien
ggtgctggtgatatgaggtggtcca

SEQ ID NO: 2034679 - DNA, 25 bp, Homo sapien
tcttgtgctcttttactccagtgtt

SEQ ID NO: 2034680 - DNA, 25 bp, Homo sapien
aggcccgtaatgctccttcccaaag

SEQ ID NO: 2034681 - DNA, 25 bp, Homo sapien
ctagatccagcaagtttgttcctca

SEQ ID NO: 2034682 - DNA, 25 bp, Homo sapien
agcaagtttgttcctcaggaagtga

SEQ ID NO: 2034683 - DNA, 25 bp, Homo sapien
cactagatccagcaagtttgttcct

SEQ ID NO: 2034684 - DNA, 25 bp, Homo sapien
agatgtctcctacagcaccctcagg

SEQ ID NO: 2034685 - DNA, 25 bp, Homo sapien
gatgtctcctacagcaccctcagga

SEQ ID NO: 2034686 - DNA, 25 bp, Homo sapien
tcccattggcccttcagattctcca

SEQ ID NO: 2034687 - DNA, 25 bp, Homo sapien
ggccactcccattggcccttcagat

SEQ ID NO: 2034688 - DNA, 25 bp, Homo sapien
aggagctccaaagctggggccactc

SEQ ID NO: 2034689 - DNA, 25 bp, Homo sapien
ttttgactttttcattcaggagctc

SEQ ID NO: 2034690 - DNA, 25 bp, Homo sapien
tcacacctcagaggggccacctgca

SEQ ID NO: 2034691 - DNA, 25 bp, Homo sapien
tggagtcacacctcagaggggccac

SEQ ID NO: 2034692 - DNA, 25 bp, Homo sapien
acctcagaggggccacctgcacgac

SEQ ID NO: 2034693 - DNA, 25 bp, Homo sapien
acacctcagaggggccacctgcacg

SEQ ID NO: 2034694 - DNA, 25 bp, Homo sapien
ctcacgtcgatcggcctctcttcat

SEQ ID NO: 2034695 - DNA, 25 bp, Homo sapien
tcacgtcgatcggcctctcttcatc

SEQ ID NO: 2034696 - DNA, 25 bp, Homo sapien
cacgtcgatcggcctctcttcatct

SEQ ID NO: 2034697 - DNA, 25 bp, Homo sapien
cctcacgtcgatcggcctctcttca

SEQ ID NO: 2034698 - DNA, 25 bp, Homo sapien
caactgtcggtcatagatgcttctg

SEQ ID NO: 2034699 - DNA, 25 bp, Homo sapien
cagagcaactgtcggtcatagatgc

SEQ ID NO: 2034700 - DNA, 25 bp, Homo sapien
aaggacacagagcaactgtcggtca

SEQ ID NO: 2034701 - DNA, 25 bp, Homo sapien
gacacagagcaactgtcggtcatag

SEQ ID NO: 2034702 - DNA, 25 bp, Homo sapien
tcatagctgccaccctctcctctca

SEQ ID NO: 2034703 - DNA, 25 bp, Homo sapien
catagctgccaccctctcctctcac

SEQ ID NO: 2034704 - DNA, 25 bp, Homo sapien
gtgctgaagggacatcttaagctgt

SEQ ID NO: 2034705 - DNA, 25 bp, Homo sapien
cttaagctgttgtgactccatggcc

SEQ ID NO: 2034706 - DNA, 25 bp, Homo sapien
ctgctccttgaggaatgtcttcccc

SEQ ID NO: 2034707 - DNA, 25 bp, Homo sapien
caaagccgcggagctcagagctgct

SEQ ID NO: 2034708 - DNA, 25 bp, Homo sapien
gataaccgctgtcttgtgctagtgg

SEQ ID NO: 2034709 - DNA, 25 bp, Homo sapien
gctatggacatgcaagataaccgct

SEQ ID NO: 2034710 - DNA, 25 bp, Homo sapien
ttcaaactgcaaacacggagaagca

SEQ ID NO: 2034711 - DNA, 25 bp, Homo sapien
tccaaagaacatcctgggacggaag

SEQ ID NO: 2034712 - DNA, 25 bp, Homo sapien
tgaaatgtaatactcaaatttgcaa

SEQ ID NO: 2034713 - DNA, 25 bp, Homo sapien
ctgaaatgtaatactcaaatttgca

SEQ ID NO: 2034714 - DNA, 25 bp, Homo sapien
gaaatgtaatactcaaatttgcaat

SEQ ID NO: 2034715 - DNA, 25 bp, Homo sapien
tcttaatatggaatgaaaactacat

SEQ ID NO: 2034716 - DNA, 25 bp, Homo sapien
tgaacccaaactacacaggatcaat

SEQ ID NO: 2034717 - DNA, 25 bp, Homo sapien
tgacatattctagtccattcaatga

SEQ ID NO: 2034718 - DNA, 25 bp, Homo sapien
tattttaagtcagccctgaacccaa

SEQ ID NO: 2034719 - DNA, 25 bp, Homo sapien
gagcggtcctgacctcagttattaa

SEQ ID NO: 2034720 - DNA, 25 bp, Homo sapien
agaccgcagccctccagaatggttc

SEQ ID NO: 2034721 - DNA, 25 bp, Homo sapien
tggtggaccataacaaagcaggtgt

SEQ ID NO: 2034722 - DNA, 25 bp, Homo sapien
tggttcccctcattgaagctggtca

SEQ ID NO: 2034723 - DNA, 25 bp, Homo sapien
gatccttccactggcgtcttcacgg

SEQ ID NO: 2034724 - DNA, 25 bp, Homo sapien
tattgcattgtagcatctctccagg

SEQ ID NO: 2034725 - DNA, 25 bp, Homo sapien
gatcaatcagaatgcgagacactgt

SEQ ID NO: 2034726 - DNA, 25 bp, Homo sapien
ggctcatctagtctcatcacagcag

SEQ ID NO: 2034727 - DNA, 25 bp, Homo sapien
taacttgcaaggtagcttttactgc

SEQ ID NO: 2034728 - DNA, 25 bp, Homo sapien
tagccctgatttcagagaaatggag

SEQ ID NO: 2034729 - DNA, 25 bp, Homo sapien
tccgtcgaactagaaatgcttagct

SEQ ID NO: 2034730 - DNA, 25 bp, Homo sapien
gatatcagctccttttgtctaccta

SEQ ID NO: 2034731 - DNA, 25 bp, Homo sapien
tattaatttggcatagagatcttct

SEQ ID NO: 2034732 - DNA, 25 bp, Homo sapien
tcttctagctccagttctcctgtct

SEQ ID NO: 2034733 - DNA, 25 bp, Homo sapien
atttgatcattgtctctggtgagcg

SEQ ID NO: 2034734 - DNA, 25 bp, Homo sapien
tctctggtgagcgatataggaatat

SEQ ID NO: 2034735 - DNA, 25 bp, Homo sapien
catgatggagtgagaaatcccactg

SEQ ID NO: 2034736 - DNA, 25 bp, Homo sapien
gacaactgaagcatataatcccata

SEQ ID NO: 2034737 - DNA, 25 bp, Homo sapien
cacggacaaatttcccaatcacaag

SEQ ID NO: 2034738 - DNA, 25 bp, Homo sapien
caaaattcgatccacatttggaagc

SEQ ID NO: 2034739 - DNA, 25 bp, Homo sapien
caggaaccccagacttgggggactg

SEQ ID NO: 2034740 - DNA, 25 bp, Homo sapien
gccagccaggaaccccagacttggg

SEQ ID NO: 2034741 - DNA, 25 bp, Homo sapien
ccatagccagccaggaaccccagac

SEQ ID NO: 2034742 - DNA, 25 bp, Homo sapien
atagccagccaggaaccccagactt

SEQ ID NO: 2034743 - DNA, 25 bp, Homo sapien
tttccagtcaggttgagaacccacc

SEQ ID NO: 2034744 - DNA, 25 bp, Homo sapien
ttgtctctggacaaaatgatggtaa

SEQ ID NO: 2034745 - DNA, 25 bp, Homo sapien
ccagggcctgagagttcggattgta

SEQ ID NO: 2034746 - DNA, 25 bp, Homo sapien
acccaccactcactgttatatttag

SEQ ID NO: 2034747 - DNA, 25 bp, Homo sapien
gttagaatcactaggtgctttcaca

SEQ ID NO: 2034748 - DNA, 25 bp, Homo sapien
gaatcactaggtgctttcacataat

SEQ ID NO: 2034749 - DNA, 25 bp, Homo sapien
agttgctttataggttttgagttag

SEQ ID NO: 2034750 - DNA, 25 bp, Homo sapien
tcactaggtgctttcacataatatg

SEQ ID NO: 2034751 - DNA, 25 bp, Homo sapien
tcttgctaggatcctccaattctta

SEQ ID NO: 2034752 - DNA, 25 bp, Homo sapien
catacctataatcaggctgatatgg

SEQ ID NO: 2034753 - DNA, 25 bp, Homo sapien
ccattaagcacgcttcaaattttaa

SEQ ID NO: 2034754 - DNA, 25 bp, Homo sapien
acaacaagctcggtgatggcttaca

SEQ ID NO: 2034755 - DNA, 25 bp, Homo sapien
tcagcatgatgatttctagtgtgcc

SEQ ID NO: 2034756 - DNA, 25 bp, Homo sapien
ccacacctccaaatcgcatgagaat

SEQ ID NO: 2034757 - DNA, 25 bp, Homo sapien
tgtgccccaaaatgggtcccaatag

SEQ ID NO: 2034758 - DNA, 25 bp, Homo sapien
cctccaaatcgcatgagaatcagca

SEQ ID NO: 2034759 - DNA, 25 bp, Homo sapien
gctgttgcctgctatcattttagcg

SEQ ID NO: 2034760 - DNA, 25 bp, Homo sapien
cgattttgcacccagacttaagttt

SEQ ID NO: 2034761 - DNA, 25 bp, Homo sapien
cattttagcgatattctttcgagta

SEQ ID NO: 2034762 - DNA, 25 bp, Homo sapien
aaagcttatctgttgctatttccga

SEQ ID NO: 2034763 - DNA, 25 bp, Homo sapien
aaatgttagctttggcattgaaggt

SEQ ID NO: 2034764 - DNA, 25 bp, Homo sapien
tagtctggttagtgattcctaggca

SEQ ID NO: 2034765 - DNA, 25 bp, Homo sapien
gattcctaggcaagtcattatttaa

SEQ ID NO: 2034766 - DNA, 25 bp, Homo sapien
actgagaagttcttagtctggttag

SEQ ID NO: 2034767 - DNA, 25 bp, Homo sapien
gataaattatacatggaaatacagt

SEQ ID NO: 2034768 - DNA, 25 bp, Homo sapien
catgtttagactggggaaagggata

SEQ ID NO: 2034769 - DNA, 25 bp, Homo sapien
caactccatgtttagactggggaaa

SEQ ID NO: 2034770 - DNA, 25 bp, Homo sapien
gggaaagggataaattatacatgga

SEQ ID NO: 2034771 - DNA, 25 bp, Homo sapien
ccaggagttcgtgtatcattttctg

SEQ ID NO: 2034772 - DNA, 25 bp, Homo sapien
gtccaggagttcgtgtatcattttc

SEQ ID NO: 2034773 - DNA, 25 bp, Homo sapien
tactattggggtccaggagttcgtg

SEQ ID NO: 2034774 - DNA, 25 bp, Homo sapien
gggtccaggagttcgtgtatcattt

SEQ ID NO: 2034775 - DNA, 25 bp, Homo sapien
aattttccagaaattgcatagcacc

SEQ ID NO: 2034776 - DNA, 25 bp, Homo sapien
tgggtgggctgatggtccacaaaga

SEQ ID NO: 2034777 - DNA, 25 bp, Homo sapien
ccagttctgctactgttatgtcttc

SEQ ID NO: 2034778 - DNA, 25 bp, Homo sapien
ttgttaaagctctgctggtccataa

SEQ ID NO: 2034779 - DNA, 25 bp, Homo sapien
gttgggcactcattgtgaaaatagg

SEQ ID NO: 2034780 - DNA, 25 bp, Homo sapien
actttcaactggctttgttgggcac

SEQ ID NO: 2034781 - DNA, 25 bp, Homo sapien
tgctggtccataactttcaactggc

SEQ ID NO: 2034782 - DNA, 25 bp, Homo sapien
caatgcagatgagcaggacgatgat

SEQ ID NO: 2034783 - DNA, 25 bp, Homo sapien
ccagggtaattgtgacggagacgtc

SEQ ID NO: 2034784 - DNA, 25 bp, Homo sapien
gacgatgatcattcctcccatgcca

SEQ ID NO: 2034785 - DNA, 25 bp, Homo sapien
gctggttgatgaccccagccacaga

SEQ ID NO: 2034786 - DNA, 25 bp, Homo sapien
aacagagagttcagacaaggctcag

SEQ ID NO: 2034787 - DNA, 25 bp, Homo sapien
acagagagttcagacaaggctcagg

SEQ ID NO: 2034788 - DNA, 25 bp, Homo sapien
tgctgggaacatggatttggccctg

SEQ ID NO: 2034789 - DNA, 25 bp, Homo sapien
gggaacatggatttggccctgaatc

SEQ ID NO: 2034790 - DNA, 25 bp, Homo sapien
ggtcttgcatccgtgcagatggtca

SEQ ID NO: 2034791 - DNA, 25 bp, Homo sapien
tcttgcatccgtgcagatggtcaca

SEQ ID NO: 2034792 - DNA, 25 bp, Homo sapien
cacggtcttgcatccgtgcagatgg

SEQ ID NO: 2034793 - DNA, 25 bp, Homo sapien
acaaacacggtcttgcatccgtgca

SEQ ID NO: 2034794 - DNA, 25 bp, Homo sapien
cagctggacaggctcaaagttgtgt

SEQ ID NO: 2034795 - DNA, 25 bp, Homo sapien
ctcagtcaaaaagggcacgaggcga

SEQ ID NO: 2034796 - DNA, 25 bp, Homo sapien
gactcccgccaacacttcaggatga

SEQ ID NO: 2034797 - DNA, 25 bp, Homo sapien
gccaacacttcaggatgaatatgtg

SEQ ID NO: 2034798 - DNA, 25 bp, Homo sapien
aggactcgcgttgggtagccacaac

SEQ ID NO: 2034799 - DNA, 25 bp, Homo sapien
caaagtaccaaagctgggcaaccag

SEQ ID NO: 2034800 - DNA, 25 bp, Homo sapien
tagccacaacggatctggtaagcag

SEQ ID NO: 2034801 - DNA, 25 bp, Homo sapien
tggtaagcagacaacccgaagtaaa

SEQ ID NO: 2034802 - DNA, 25 bp, Homo sapien
tggaagatgacctttcccagtacag

SEQ ID NO: 2034803 - DNA, 25 bp, Homo sapien
cacaccaggtaagatgaagaacatc

SEQ ID NO: 2034804 - DNA, 25 bp, Homo sapien
cttcctgaggtagagggctcggtcc

SEQ ID NO: 2034805 - DNA, 25 bp, Homo sapien
ggttccaaactgaatgaggaccatc

SEQ ID NO: 2034806 - DNA, 25 bp, Homo sapien
acggcgctatactccgggtggatga

SEQ ID NO: 2034807 - DNA, 25 bp, Homo sapien
gatgggcacatagatctccagcgtc

SEQ ID NO: 2034808 - DNA, 25 bp, Homo sapien
gaacatgagtacatacacgtcagtc

SEQ ID NO: 2034809 - DNA, 25 bp, Homo sapien
gaactgtttgatgggcacatagatc

SEQ ID NO: 2034810 - DNA, 25 bp, Homo sapien
attaaatgttcttgaagcttttcca

SEQ ID NO: 2034811 - DNA, 25 bp, Homo sapien
tgattaaatgttcttgaagcttttc

SEQ ID NO: 2034812 - DNA, 25 bp, Homo sapien
ttttgctttgattaaatgttcttga

SEQ ID NO: 2034813 - DNA, 25 bp, Homo sapien
ctttatggtaaaggcttttgctttg

SEQ ID NO: 2034814 - DNA, 25 bp, Homo sapien
ctgctgtttcgggtgcttgtgctgc

SEQ ID NO: 2034815 - DNA, 25 bp, Homo sapien
actgctgtttcgggtgcttgtgctg

SEQ ID NO: 2034816 - DNA, 25 bp, Homo sapien
gactgctgtttcgggtgcttgtgct

SEQ ID NO: 2034817 - DNA, 25 bp, Homo sapien
tgctccgggaaggtcacatgcactg

SEQ ID NO: 2034818 - DNA, 25 bp, Homo sapien
gacttgagagaatcggaggagtccc

SEQ ID NO: 2034819 - DNA, 25 bp, Homo sapien
tgccatgaccgagggagagctcatc

SEQ ID NO: 2034820 - DNA, 25 bp, Homo sapien
ggagcgcttcctccggacagctgtc

SEQ ID NO: 2034821 - DNA, 25 bp, Homo sapien
ctttcagtcatgtcatcttcatccc

SEQ ID NO: 2034822 - DNA, 25 bp, Homo sapien
atgtcatcttcatcccataagccat

SEQ ID NO: 2034823 - DNA, 25 bp, Homo sapien
tgtcatcttcatcccataagccatg

SEQ ID NO: 2034824 - DNA, 25 bp, Homo sapien
catcttcatcccataagccatggca

SEQ ID NO: 2034825 - DNA, 25 bp, Homo sapien
ggttatctaggaagattacggtcca

SEQ ID NO: 2034826 - DNA, 25 bp, Homo sapien
gatgtccaggttatctaggaagatt

SEQ ID NO: 2034827 - DNA, 25 bp, Homo sapien
ctaggaagattacggtccaggttat

SEQ ID NO: 2034828 - DNA, 25 bp, Homo sapien
tcagccccatcaccaatcctgatgt

SEQ ID NO: 2034829 - DNA, 25 bp, Homo sapien
aattgatcgatgaaagaacagagcc

SEQ ID NO: 2034830 - DNA, 25 bp, Homo sapien
gaggtcatagagaacataaccttcc

SEQ ID NO: 2034831 - DNA, 25 bp, Homo sapien
cggtttatctttgttcacctccaca

SEQ ID NO: 2034832 - DNA, 25 bp, Homo sapien
agaaatacttgactacaattgccac

SEQ ID NO: 2034833 - DNA, 25 bp, Homo sapien
gagcgggccaccagggtattgtaca

SEQ ID NO: 2034834 - DNA, 25 bp, Homo sapien
tgaggatgatcacgaagtagcacac

SEQ ID NO: 2034835 - DNA, 25 bp, Homo sapien
ggctgccccacgtagaatttctctg

SEQ ID NO: 2034836 - DNA, 25 bp, Homo sapien
tgtacatggcatagaagagcagcag

SEQ ID NO: 2034837 - DNA, 25 bp, Homo sapien
ctgttaaagcaaaccacatgataat

SEQ ID NO: 2034838 - DNA, 25 bp, Homo sapien
taaagcaaaccacatgataatatgt

SEQ ID NO: 2034839 - DNA, 25 bp, Homo sapien
gttaaagcaaaccacatgataatat

SEQ ID NO: 2034840 - DNA, 25 bp, Homo sapien
tgttaaagcaaaccacatgataata

SEQ ID NO: 2034841 - DNA, 25 bp, Homo sapien
tccttcagagacaacctaatatcag

SEQ ID NO: 2034842 - DNA, 25 bp, Homo sapien
cttcagagacaacctaatatcagac

SEQ ID NO: 2034843 - DNA, 25 bp, Homo sapien
ccttcagagacaacctaatatcaga

SEQ ID NO: 2034844 - DNA, 25 bp, Homo sapien
gactgccatacggttcttgcctgca

SEQ ID NO: 2034845 - DNA, 25 bp, Homo sapien
tcctgcgagccgaaggacagatgct

SEQ ID NO: 2034846 - DNA, 25 bp, Homo sapien
tccaaggtggagaactgtgtcagct

SEQ ID NO: 2034847 - DNA, 25 bp, Homo sapien
gacagatgctcgaagctcacagcct

SEQ ID NO: 2034848 - DNA, 25 bp, Homo sapien
tacagcatggtacactgcgtgggct

SEQ ID NO: 2034849 - DNA, 25 bp, Homo sapien
tgagtacagcatggtacactgcgtg

SEQ ID NO: 2034850 - DNA, 25 bp, Homo sapien
cagcatggtacactgcgtgggctcg

SEQ ID NO: 2034851 - DNA, 25 bp, Homo sapien
ctggcgtgagtacagcatggtacac

SEQ ID NO: 2034852 - DNA, 25 bp, Homo sapien
tgttgggagaaagcgtgggcacaga

SEQ ID NO: 2034853 - DNA, 25 bp, Homo sapien
gggagaaagcgtgggcacagagccc

SEQ ID NO: 2034854 - DNA, 25 bp, Homo sapien
ttgggagaaagcgtgggcacagagc

SEQ ID NO: 2034855 - DNA, 25 bp, Homo sapien
ctgttgggagaaagcgtgggcacag

SEQ ID NO: 2034856 - DNA, 25 bp, Homo sapien
tcaacacagcacagcttacccactg

SEQ ID NO: 2034857 - DNA, 25 bp, Homo sapien
ttccagagtctgttgccatatcaac

SEQ ID NO: 2034858 - DNA, 25 bp, Homo sapien
gtgtggagtatctagattcacagcc

SEQ ID NO: 2034859 - DNA, 25 bp, Homo sapien
ccccgtaacaagtgtggagtatcta

SEQ ID NO: 2034860 - DNA, 25 bp, Homo sapien
ccagttcctctttgagtagtccttt

SEQ ID NO: 2034861 - DNA, 25 bp, Homo sapien
acacatccagccacggacgggagag

SEQ ID NO: 2034862 - DNA, 25 bp, Homo sapien
cattcatggcttgctctacctcaga

SEQ ID NO: 2034863 - DNA, 25 bp, Homo sapien
tgcagacaaggttggccaatgacaa

SEQ ID NO: 2034864 - DNA, 25 bp, Homo sapien
gaaatacgtactcttatctgaatgg

SEQ ID NO: 2034865 - DNA, 25 bp, Homo sapien
gagattctcaaatgcatagactgta

SEQ ID NO: 2034866 - DNA, 25 bp, Homo sapien
atggcacgtgtgaccaccagggttc

SEQ ID NO: 2034867 - DNA, 25 bp, Homo sapien
attctcaaatgcatagactgtaccc

SEQ ID NO: 2034868 - DNA, 25 bp, Homo sapien
aacaaagcatgcacaagttaagcac

SEQ ID NO: 2034869 - DNA, 25 bp, Homo sapien
gaacaaagcatgcacaagttaagca

SEQ ID NO: 2034870 - DNA, 25 bp, Homo sapien
gggtggactgccttgagaacagcat

SEQ ID NO: 2034871 - DNA, 25 bp, Homo sapien
gatgaggaggacatatccatgctga

SEQ ID NO: 2034872 - DNA, 25 bp, Homo sapien
catgctgagcattttacggagccta

SEQ ID NO: 2034873 - DNA, 25 bp, Homo sapien
cgagcacgctcgcttgttttaggaa

SEQ ID NO: 2034874 - DNA, 25 bp, Homo sapien
agaggctcaaatacaggaatgcagc

SEQ ID NO: 2034875 - DNA, 25 bp, Homo sapien
cagggatacacccatgcacagtgtt

SEQ ID NO: 2034876 - DNA, 25 bp, Homo sapien
gaaatcataacgagtttctgtccta

SEQ ID NO: 2034877 - DNA, 25 bp, Homo sapien
taattggcataattagagaggctca

SEQ ID NO: 2034878 - DNA, 25 bp, Homo sapien
tccgggatgctcgtcaatggtgtcc

SEQ ID NO: 2034879 - DNA, 25 bp, Homo sapien
tgctctcccgagttggaacattgcc

SEQ ID NO: 2034880 - DNA, 25 bp, Homo sapien
gaatctaaactatccatcctgtggg

SEQ ID NO: 2034881 - DNA, 25 bp, Homo sapien
cccgactctctggaaaggttcatga

SEQ ID NO: 2034882 - DNA, 25 bp, Homo sapien
taatttctctggtcagcatgcatcg

SEQ ID NO: 2034883 - DNA, 25 bp, Homo sapien
cagcatgcatcgttcaattctcaga

SEQ ID NO: 2034884 - DNA, 25 bp, Homo sapien
tatcaatatgctcccttgaaatgga

SEQ ID NO: 2034885 - DNA, 25 bp, Homo sapien
gccaagtagtgaaactgtccactgt

SEQ ID NO: 2034886 - DNA, 25 bp, Homo sapien
agagaacggccgctgcttgaagctg

SEQ ID NO: 2034887 - DNA, 25 bp, Homo sapien
gagcgggtatcttttgctgagcaag

SEQ ID NO: 2034888 - DNA, 25 bp, Homo sapien
aagcaaggaaaagagcgggtatctt

SEQ ID NO: 2034889 - DNA, 25 bp, Homo sapien
gtcacacctaacagtcttccatgag

SEQ ID NO: 2034890 - DNA, 25 bp, Homo sapien
caattgttttcttagaaatgatgaa

SEQ ID NO: 2034891 - DNA, 25 bp, Homo sapien
ttgttttcttagaaatgatgaaggt

SEQ ID NO: 2034892 - DNA, 25 bp, Homo sapien
ttttcttagaaatgatgaaggtgaa

SEQ ID NO: 2034893 - DNA, 25 bp, Homo sapien
ccacaattgttttcttagaaatgat

SEQ ID NO: 2034894 - DNA, 25 bp, Homo sapien
ctggtccatcggatttctttttgat

SEQ ID NO: 2034895 - DNA, 25 bp, Homo sapien
ggtccatcggatttctttttgattg

SEQ ID NO: 2034896 - DNA, 25 bp, Homo sapien
tggtccatcggatttctttttgatt

SEQ ID NO: 2034897 - DNA, 25 bp, Homo sapien
cctcccggtcttcccattccacagg

SEQ ID NO: 2034898 - DNA, 25 bp, Homo sapien
tcccggtcttcccattccacaggac

SEQ ID NO: 2034899 - DNA, 25 bp, Homo sapien
ctcccggtcttcccattccacagga

SEQ ID NO: 2034900 - DNA, 25 bp, Homo sapien
gggtgattgatggcctgagcttggg

SEQ ID NO: 2034901 - DNA, 25 bp, Homo sapien
ccttctcctggggtgattgatggcc

SEQ ID NO: 2034902 - DNA, 25 bp, Homo sapien
ggggtgattgatggcctgagcttgg

SEQ ID NO: 2034903 - DNA, 25 bp, Homo sapien
tctcctggggtgattgatggcctga

SEQ ID NO: 2034904 - DNA, 25 bp, Homo sapien
cacatggaggagggcaaagtactaa

SEQ ID NO: 2034905 - DNA, 25 bp, Homo sapien
tcacatggaggagggcaaagtacta

SEQ ID NO: 2034906 - DNA, 25 bp, Homo sapien
acatggaggagggcaaagtactaaa

SEQ ID NO: 2034907 - DNA, 25 bp, Homo sapien
catggaggagggcaaagtactaaaa

SEQ ID NO: 2034908 - DNA, 25 bp, Homo sapien
cttcgtttccgttcttctcttgcag

SEQ ID NO: 2034909 - DNA, 25 bp, Homo sapien
gtgtctttgtcggagtgctgtttta

SEQ ID NO: 2034910 - DNA, 25 bp, Homo sapien
tgttttaggatcagtaatccaggct

SEQ ID NO: 2034911 - DNA, 25 bp, Homo sapien
cggagtgctgttttaggatcagtaa

SEQ ID NO: 2034912 - DNA, 25 bp, Homo sapien
aaagccctagcatggatctgtggga

SEQ ID NO: 2034913 - DNA, 25 bp, Homo sapien
ttgacagtgtactcaaaagccctag

SEQ ID NO: 2034914 - DNA, 25 bp, Homo sapien
gaagctggctgtaccgagtgcagaa

SEQ ID NO: 2034915 - DNA, 25 bp, Homo sapien
ttgaggagcccgcagactgcactgg

SEQ ID NO: 2034916 - DNA, 25 bp, Homo sapien
tacacatcagtaaaacatcaaatac

SEQ ID NO: 2034917 - DNA, 25 bp, Homo sapien
cactacacatcagtaaaacatcaaa

SEQ ID NO: 2034918 - DNA, 25 bp, Homo sapien
cacacactacacatcagtaaaacat

SEQ ID NO: 2034919 - DNA, 25 bp, Homo sapien
tcacacactacacatcagtaaaaca

SEQ ID NO: 2034920 - DNA, 25 bp, Homo sapien
tgggaagtttaatgacagactttgg

SEQ ID NO: 2034921 - DNA, 25 bp, Homo sapien
ctgatgcaaacttcccaatagctct

SEQ ID NO: 2034922 - DNA, 25 bp, Homo sapien
taaaatggctgatgcaaacttccca

SEQ ID NO: 2034923 - DNA, 25 bp, Homo sapien
actttggcaaggctaaaatggctga

SEQ ID NO: 2034924 - DNA, 25 bp, Homo sapien
tgaccttcgtggaggttcttcatct

SEQ ID NO: 2034925 - DNA, 25 bp, Homo sapien
ccttcgtggaggttcttcatcttcc

SEQ ID NO: 2034926 - DNA, 25 bp, Homo sapien
caaataataatctccactcctgacc

SEQ ID NO: 2034927 - DNA, 25 bp, Homo sapien
tcttcactatccgtttcaaacaaat

SEQ ID NO: 2034928 - DNA, 25 bp, Homo sapien
gaaaggcaaccacaatgaccgcggt

SEQ ID NO: 2034929 - DNA, 25 bp, Homo sapien
tagggctctcgacctcagaattggg

SEQ ID NO: 2034930 - DNA, 25 bp, Homo sapien
cacataagccgagagatttgcagga

SEQ ID NO: 2034931 - DNA, 25 bp, Homo sapien
taaatcagagtccaaggtggagccc

SEQ ID NO: 2034932 - DNA, 25 bp, Homo sapien
tataagggttagagtcgatgaggtt

SEQ ID NO: 2034933 - DNA, 25 bp, Homo sapien
tggaacacatgggtcacgggaacgc

SEQ ID NO: 2034934 - DNA, 25 bp, Homo sapien
catgggtcacgggaacgcctgaatt

SEQ ID NO: 2034935 - DNA, 25 bp, Homo sapien
ctgaattctggtcaaggatataagg

SEQ ID NO: 2034936 - DNA, 25 bp, Homo sapien
tggaagcatgatcaacccaaggccg

SEQ ID NO: 2034937 - DNA, 25 bp, Homo sapien
ggaagcatgatcaacccaaggccgc

SEQ ID NO: 2034938 - DNA, 25 bp, Homo sapien
gcatgatcaacccaaggccgccacc

SEQ ID NO: 2034939 - DNA, 25 bp, Homo sapien
aagcatgatcaacccaaggccgcca

SEQ ID NO: 2034940 - DNA, 25 bp, Homo sapien
cacgctttaacaactcaattgtcaa

SEQ ID NO: 2034941 - DNA, 25 bp, Homo sapien
cgtccacatattaattcgtataaag

SEQ ID NO: 2034942 - DNA, 25 bp, Homo sapien
ccacatattaattcgtataaagtga

SEQ ID NO: 2034943 - DNA, 25 bp, Homo sapien
ttgaaaaccacgctttaacaactca

SEQ ID NO: 2034944 - DNA, 25 bp, Homo sapien
atttctgttgcctggccttgatgcg

SEQ ID NO: 2034945 - DNA, 25 bp, Homo sapien
ttgcctggccttgatgcgatccatc

SEQ ID NO: 2034946 - DNA, 25 bp, Homo sapien
ctgttgcctggccttgatgcgatcc

SEQ ID NO: 2034947 - DNA, 25 bp, Homo sapien
ctggctcctgggtcaagctcagcat

SEQ ID NO: 2034948 - DNA, 25 bp, Homo sapien
tacaattgtggcctggaaaagttca

SEQ ID NO: 2034949 - DNA, 25 bp, Homo sapien
caattgtggcctggaaaagttcagc

SEQ ID NO: 2034950 - DNA, 25 bp, Homo sapien
tgtggcctggaaaagttcagctcct

SEQ ID NO: 2034951 - DNA, 25 bp, Homo sapien
ttgtggcctggaaaagttcagctcc

SEQ ID NO: 2034952 - DNA, 25 bp, Homo sapien
cttacaagagcaggggcaaaaactg

SEQ ID NO: 2034953 - DNA, 25 bp, Homo sapien
ttcctaaacttacaagagcaggggc

SEQ ID NO: 2034954 - DNA, 25 bp, Homo sapien
cctaaacttacaagagcaggggcaa

SEQ ID NO: 2034955 - DNA, 25 bp, Homo sapien
taaacttacaagagcaggggcaaaa

SEQ ID NO: 2034956 - DNA, 25 bp, Homo sapien
aacatatgctgtcccaaatgattcc

SEQ ID NO: 2034957 - DNA, 25 bp, Homo sapien
ctgggaagcttttatatcagccaca

SEQ ID NO: 2034958 - DNA, 25 bp, Homo sapien
ccactgggaagtgtacagggtgaat

SEQ ID NO: 2034959 - DNA, 25 bp, Homo sapien
tatcagccacaacatgtagaaaata

SEQ ID NO: 2034960 - DNA, 25 bp, Homo sapien
catttgatagcctttgactgtgcag

SEQ ID NO: 2034961 - DNA, 25 bp, Homo sapien
accaacaactattgtgcaccaatgt

SEQ ID NO: 2034962 - DNA, 25 bp, Homo sapien
tgaaagcctggatcaaccaacaact

SEQ ID NO: 2034963 - DNA, 25 bp, Homo sapien
gttccaatgtatccacatgctccta

SEQ ID NO: 2034964 - DNA, 25 bp, Homo sapien
ggtaccccatgcaaaagatgctgat

SEQ ID NO: 2034965 - DNA, 25 bp, Homo sapien
tcccagtagcgcaggatgctcttga

SEQ ID NO: 2034966 - DNA, 25 bp, Homo sapien
caaaaacgttgtatgcgatcagcca

SEQ ID NO: 2034967 - DNA, 25 bp, Homo sapien
tgatgggtttcaacagcaaatcgcc

SEQ ID NO: 2034968 - DNA, 25 bp, Homo sapien
aaacaaatttatgttgaacacaaag

SEQ ID NO: 2034969 - DNA, 25 bp, Homo sapien
acaaatttatgttgaacacaaagct

SEQ ID NO: 2034970 - DNA, 25 bp, Homo sapien
attctgaccaactatccaaagccat

SEQ ID NO: 2034971 - DNA, 25 bp, Homo sapien
aacaaatttatgttgaacacaaagc

SEQ ID NO: 2034972 - DNA, 25 bp, Homo sapien
tcatctgacaggagtcacacctaca

SEQ ID NO: 2034973 - DNA, 25 bp, Homo sapien
cagcgttccggtgtcagtcttgcaa

SEQ ID NO: 2034974 - DNA, 25 bp, Homo sapien
tacaggccaagtcccaactgcattt

SEQ ID NO: 2034975 - DNA, 25 bp, Homo sapien
tagcctgcgggtcaatgtcatctga

SEQ ID NO: 2034976 - DNA, 25 bp, Homo sapien
agagatcccagggtgctgcggagct

SEQ ID NO: 2034977 - DNA, 25 bp, Homo sapien
ctaactatcagggctctggccactt

SEQ ID NO: 2034978 - DNA, 25 bp, Homo sapien
actttccagagatcccagggtgctg

SEQ ID NO: 2034979 - DNA, 25 bp, Homo sapien
tggccactttccagagatcccaggg

SEQ ID NO: 2034980 - DNA, 25 bp, Homo sapien
gaaggaggccgcatcaaggttcatg

SEQ ID NO: 2034981 - DNA, 25 bp, Homo sapien
tctgccgttgtaaggaggcacacag

SEQ ID NO: 2034982 - DNA, 25 bp, Homo sapien
cagtgaataaaatctggcacagggt

SEQ ID NO: 2034983 - DNA, 25 bp, Homo sapien
ggttcatgcagatctcgacattgtc

SEQ ID NO: 2034984 - DNA, 25 bp, Homo sapien
gtacagccactttatgatgttgtca

SEQ ID NO: 2034985 - DNA, 25 bp, Homo sapien
agggttgggccgcacaatgaaatct

SEQ ID NO: 2034986 - DNA, 25 bp, Homo sapien
ggccgcacaatgaaatctgggaagt

SEQ ID NO: 2034987 - DNA, 25 bp, Homo sapien
tgttgtcattgaagctggcaccctt

SEQ ID NO: 2034988 - DNA, 25 bp, Homo sapien
cgctggccaatgacgttaactgaca

SEQ ID NO: 2034989 - DNA, 25 bp, Homo sapien
gcatagaaatccattcgctggccaa

SEQ ID NO: 2034990 - DNA, 25 bp, Homo sapien
cagcaggcgtggatcatggcataga

SEQ ID NO: 2034991 - DNA, 25 bp, Homo sapien
tctatataagacagcgatcagccag

SEQ ID NO: 2034992 - DNA, 25 bp, Homo sapien
tcaaaggccaggatagccagcatca

SEQ ID NO: 2034993 - DNA, 25 bp, Homo sapien
ggccgtcaggttatttcgacctcga

SEQ ID NO: 2034994 - DNA, 25 bp, Homo sapien
gacctcgatagtattcctgatggcg

SEQ ID NO: 2034995 - DNA, 25 bp, Homo sapien
cctgatggcggtaaatggtgacttc

SEQ ID NO: 2034996 - DNA, 25 bp, Homo sapien
ctcaggtagactagcagaggcgaag

SEQ ID NO: 2034997 - DNA, 25 bp, Homo sapien
cctcaggtagactagcagaggcgaa

SEQ ID NO: 2034998 - DNA, 25 bp, Homo sapien
tcaggtagactagcagaggcgaaga

SEQ ID NO: 2034999 - DNA, 25 bp, Homo sapien
tctgtaggatcgataggagcgctgt

SEQ ID NO: 2035000 - DNA, 25 bp, Homo sapien
cgcaggccgacccactctgtaggat

SEQ ID NO: 2035001 - DNA, 25 bp, Homo sapien
gataggagcgctgtagagcagagac

SEQ ID NO: 2035002 - DNA, 25 bp, Homo sapien
gagacttgttcaactcattaaaggg

SEQ ID NO: 2035003 - DNA, 25 bp, Homo sapien
caaggaacagttaacagagaagttc

SEQ ID NO: 2035004 - DNA, 25 bp, Homo sapien
gaagttctcaggcttaatggtttgg

SEQ ID NO: 2035005 - DNA, 25 bp, Homo sapien
gatgatcacacacgtccagactgtg

SEQ ID NO: 2035006 - DNA, 25 bp, Homo sapien
caacattttgcagacgatgatcaca

SEQ ID NO: 2035007 - DNA, 25 bp, Homo sapien
tctggccgcattgtggaatacgtat

SEQ ID NO: 2035008 - DNA, 25 bp, Homo sapien
caaggagaaaggattgggcaaagct

SEQ ID NO: 2035009 - DNA, 25 bp, Homo sapien
tgtgggaagactattctggccgcat

SEQ ID NO: 2035010 - DNA, 25 bp, Homo sapien
caggtagaagtctctcatgatcata

SEQ ID NO: 2035011 - DNA, 25 bp, Homo sapien
ccatgagagtccagaacagaaacac

SEQ ID NO: 2035012 - DNA, 25 bp, Homo sapien
catgagagtccagaacagaaacacg

SEQ ID NO: 2035013 - DNA, 25 bp, Homo sapien
ggaagggcgggatgagtccagcaat

SEQ ID NO: 2035014 - DNA, 25 bp, Homo sapien
gggaagggcgggatgagtccagcaa

SEQ ID NO: 2035015 - DNA, 25 bp, Homo sapien
gtccagcaatgagacaggaagggcc

SEQ ID NO: 2035016 - DNA, 25 bp, Homo sapien
gagtccagcaatgagacaggaaggg

SEQ ID NO: 2035017 - DNA, 25 bp, Homo sapien
tgggccacaaccaacacctgatgaa

SEQ ID NO: 2035018 - DNA, 25 bp, Homo sapien
caatgactatgacaaatacctgggc

SEQ ID NO: 2035019 - DNA, 25 bp, Homo sapien
tccatacaaatatcaagcccagtgc

SEQ ID NO: 2035020 - DNA, 25 bp, Homo sapien
cctgatggtaagaatctcgtggaag

SEQ ID NO: 2035021 - DNA, 25 bp, Homo sapien
cctggcttccctctcccagagaacc

SEQ ID NO: 2035022 - DNA, 25 bp, Homo sapien
ccctggcttccctctcccagagaac

SEQ ID NO: 2035023 - DNA, 25 bp, Homo sapien
ctggcttccctctcccagagaaccc

SEQ ID NO: 2035024 - DNA, 25 bp, Homo sapien
gccttgggtaaggatgtctggaacc

SEQ ID NO: 2035025 - DNA, 25 bp, Homo sapien
ggccttgggtaaggatgtctggaac

SEQ ID NO: 2035026 - DNA, 25 bp, Homo sapien
gtcttggagtcttgatactccgatg

SEQ ID NO: 2035027 - DNA, 25 bp, Homo sapien
agtgtaagtacttagtcttggagtc

SEQ ID NO: 2035028 - DNA, 25 bp, Homo sapien
cgatgtaatgcggatcacattaaaa

SEQ ID NO: 2035029 - DNA, 25 bp, Homo sapien
tgctgaccctcggatttctgtaagt

SEQ ID NO: 2035030 - DNA, 25 bp, Homo sapien
tgttcagcctgatgataggacaaat

SEQ ID NO: 2035031 - DNA, 25 bp, Homo sapien
gcctgatgataggacaaatgttcac

SEQ ID NO: 2035032 - DNA, 25 bp, Homo sapien
cagcctgatgataggacaaatgttc

SEQ ID NO: 2035033 - DNA, 25 bp, Homo sapien
gttctgttcagcctgatgataggac

SEQ ID NO: 2035034 - DNA, 25 bp, Homo sapien
ccagataatgtaagaggaaacgatt

SEQ ID NO: 2035035 - DNA, 25 bp, Homo sapien
tctttcacagaaacccagataatgt

SEQ ID NO: 2035036 - DNA, 25 bp, Homo sapien
tgatgatgtgcaactccaaaatcca

SEQ ID NO: 2035037 - DNA, 25 bp, Homo sapien
gaggaaacgattttgatgatgtgca

SEQ ID NO: 2035038 - DNA, 25 bp, Homo sapien
cacagtgaggcggtcaatcaccagg

SEQ ID NO: 2035039 - DNA, 25 bp, Homo sapien
aagaagagcacagtgaggcggtcaa

SEQ ID NO: 2035040 - DNA, 25 bp, Homo sapien
cagtgaggcggtcaatcaccaggtg

SEQ ID NO: 2035041 - DNA, 25 bp, Homo sapien
agagcacagtgaggcggtcaatcac

SEQ ID NO: 2035042 - DNA, 25 bp, Homo sapien
tgactgaggacgtggtcaacaccat

SEQ ID NO: 2035043 - DNA, 25 bp, Homo sapien
gctctgactgaggacgtggtcaaca

SEQ ID NO: 2035044 - DNA, 25 bp, Homo sapien
tctgactgaggacgtggtcaacacc

SEQ ID NO: 2035045 - DNA, 25 bp, Homo sapien
aggctctgactgaggacgtggtcaa

SEQ ID NO: 2035046 - DNA, 25 bp, Homo sapien
gactcctcgctgtctttcccaagat

SEQ ID NO: 2035047 - DNA, 25 bp, Homo sapien
ctcctctgactcctcgctgtctttc

SEQ ID NO: 2035048 - DNA, 25 bp, Homo sapien
tctgactcctcgctgtctttcccaa

SEQ ID NO: 2035049 - DNA, 25 bp, Homo sapien
tcctctgactcctcgctgtctttcc

SEQ ID NO: 2035050 - DNA, 25 bp, Homo sapien
tttttcagagtagccctcaagcttc

SEQ ID NO: 2035051 - DNA, 25 bp, Homo sapien
ggctttttcagagtagccctcaagc

SEQ ID NO: 2035052 - DNA, 25 bp, Homo sapien
ttctgggctttttcagagtagccct

SEQ ID NO: 2035053 - DNA, 25 bp, Homo sapien
tgggctttttcagagtagccctcaa

SEQ ID NO: 2035054 - DNA, 25 bp, Homo sapien
caggctggcagtcagatgcatcatg

SEQ ID NO: 2035055 - DNA, 25 bp, Homo sapien
ggctggcagtcagatgcatcatggt

SEQ ID NO: 2035056 - DNA, 25 bp, Homo sapien
catcatggtgaggtccgggaggctt

SEQ ID NO: 2035057 - DNA, 25 bp, Homo sapien
gctggcagtcagatgcatcatggtg

SEQ ID NO: 2035058 - DNA, 25 bp, Homo sapien
agaggaaagggtgttgggagagatt

SEQ ID NO: 2035059 - DNA, 25 bp, Homo sapien
ctgagtcagaagaggaaagggtgtt

SEQ ID NO: 2035060 - DNA, 25 bp, Homo sapien
ggaaagggtgttgggagagatttga

SEQ ID NO: 2035061 - DNA, 25 bp, Homo sapien
gaagaggaaagggtgttgggagaga

SEQ ID NO: 2035062 - DNA, 25 bp, Homo sapien
gtggattggtaattttttcttgatg

SEQ ID NO: 2035063 - DNA, 25 bp, Homo sapien
tggtggattggtaattttttcttga

SEQ ID NO: 2035064 - DNA, 25 bp, Homo sapien
tgagagttactgatgcgaactgtcg

SEQ ID NO: 2035065 - DNA, 25 bp, Homo sapien
tgcgaactgtcgattggcaaccgtg

SEQ ID NO: 2035066 - DNA, 25 bp, Homo sapien
tactgatgcgaactgtcgattggca

SEQ ID NO: 2035067 - DNA, 25 bp, Homo sapien
gtcgattggcaaccgtgggaagact

SEQ ID NO: 2035068 - DNA, 25 bp, Homo sapien
tagatatacgcgaccattgactttg

SEQ ID NO: 2035069 - DNA, 25 bp, Homo sapien
tacgcgaccattgactttggcatgg

SEQ ID NO: 2035070 - DNA, 25 bp, Homo sapien
gatatacgcgaccattgactttggc

SEQ ID NO: 2035071 - DNA, 25 bp, Homo sapien
tattattagatatacgcgaccattg

SEQ ID NO: 2035072 - DNA, 25 bp, Homo sapien
cggtacagatcatttagatctttct

SEQ ID NO: 2035073 - DNA, 25 bp, Homo sapien
tcaggactcatatcggtacagatca

SEQ ID NO: 2035074 - DNA, 25 bp, Homo sapien
cagggtaagggctgtgaagcggcag

SEQ ID NO: 2035075 - DNA, 25 bp, Homo sapien
ggtgcagggtaagggctgtgaagcg

SEQ ID NO: 2035076 - DNA, 25 bp, Homo sapien
gaatgcttgtgatctccccgtgatg

SEQ ID NO: 2035077 - DNA, 25 bp, Homo sapien
tacgggcaggaaaagtaatatccca

SEQ ID NO: 2035078 - DNA, 25 bp, Homo sapien
ccccgtgatggaacacagtgaagga

SEQ ID NO: 2035079 - DNA, 25 bp, Homo sapien
tgtggtttgaataaatacgggcagg

SEQ ID NO: 2035080 - DNA, 25 bp, Homo sapien
tagattactggcttctcgcaaggtg

SEQ ID NO: 2035081 - DNA, 25 bp, Homo sapien
ccattgtttcagaacgtgtcacaga

SEQ ID NO: 2035082 - DNA, 25 bp, Homo sapien
gctactctgaatatctcacaagacg

SEQ ID NO: 2035083 - DNA, 25 bp, Homo sapien
ttttctcacaagctgatactcatgg

SEQ ID NO: 2035084 - DNA, 25 bp, Homo sapien
tatgcgagtgaatagttcagccaca

SEQ ID NO: 2035085 - DNA, 25 bp, Homo sapien
ggtgtaaaatgcacaccagcagaaa

SEQ ID NO: 2035086 - DNA, 25 bp, Homo sapien
tcatggaagtagtgcaggtgtaaaa

SEQ ID NO: 2035087 - DNA, 25 bp, Homo sapien
tgaggtctgtgagttcaaggaaccg

SEQ ID NO: 2035088 - DNA, 25 bp, Homo sapien
tccagtcatattttgccacaggcct

SEQ ID NO: 2035089 - DNA, 25 bp, Homo sapien
tataaagataagcaccagcatagtg

SEQ ID NO: 2035090 - DNA, 25 bp, Homo sapien
cagcatagtgtaaataaccactgac

SEQ ID NO: 2035091 - DNA, 25 bp, Homo sapien
cacaggcctgggaagttctcaaact

SEQ ID NO: 2035092 - DNA, 25 bp, Homo sapien
ttttcctccaccattcatagtgcac

SEQ ID NO: 2035093 - DNA, 25 bp, Homo sapien
gaattttcctccaccattcatagtg

SEQ ID NO: 2035094 - DNA, 25 bp, Homo sapien
atattttagaattttcctccaccat

SEQ ID NO: 2035095 - DNA, 25 bp, Homo sapien
ttttagaattttcctccaccattca

SEQ ID NO: 2035096 - DNA, 25 bp, Homo sapien
ggtatagggccacacagaacaggaa

SEQ ID NO: 2035097 - DNA, 25 bp, Homo sapien
ctggtatagggccacacagaacagg

SEQ ID NO: 2035098 - DNA, 25 bp, Homo sapien
tggtatagggccacacagaacagga

SEQ ID NO: 2035099 - DNA, 25 bp, Homo sapien
gtatagggccacacagaacaggaac

SEQ ID NO: 2035100 - DNA, 25 bp, Homo sapien
agaagaacatgcctccgcagacgta

SEQ ID NO: 2035101 - DNA, 25 bp, Homo sapien
agtacttgatgaacatggccaccac

SEQ ID NO: 2035102 - DNA, 25 bp, Homo sapien
cagacgtagatccagtacttgatga

SEQ ID NO: 2035103 - DNA, 25 bp, Homo sapien
caccaccagattgcccaggactttc

SEQ ID NO: 2035104 - DNA, 25 bp, Homo sapien
gcttcctcttgctctaccttctttc

SEQ ID NO: 2035105 - DNA, 25 bp, Homo sapien
agcttcctcttgctctaccttcttt

SEQ ID NO: 2035106 - DNA, 25 bp, Homo sapien
tcagcttcctcttgctctaccttct

SEQ ID NO: 2035107 - DNA, 25 bp, Homo sapien
cttcagcttcctcttgctctacctt

SEQ ID NO: 2035108 - DNA, 25 bp, Homo sapien
ctctttgggctctccttccacttgt

SEQ ID NO: 2035109 - DNA, 25 bp, Homo sapien
tgggctctccttccacttgtatatc

SEQ ID NO: 2035110 - DNA, 25 bp, Homo sapien
ccacttgtatatcttgaagttcctc

SEQ ID NO: 2035111 - DNA, 25 bp, Homo sapien
ctccttccacttgtatatcttgaag

SEQ ID NO: 2035112 - DNA, 25 bp, Homo sapien
cttgtttccagtactcactagaagt

SEQ ID NO: 2035113 - DNA, 25 bp, Homo sapien
actagaagtatgacctgggaggaag

SEQ ID NO: 2035114 - DNA, 25 bp, Homo sapien
tagaagtatgacctgggaggaagca

SEQ ID NO: 2035115 - DNA, 25 bp, Homo sapien
ttccagtactcactagaagtatgac

SEQ ID NO: 2035116 - DNA, 25 bp, Homo sapien
cctgactgccaattttgacttccga

SEQ ID NO: 2035117 - DNA, 25 bp, Homo sapien
tttgacttccgataaaagagcttcc

SEQ ID NO: 2035118 - DNA, 25 bp, Homo sapien
tgacttccgataaaagagcttcctt

SEQ ID NO: 2035119 - DNA, 25 bp, Homo sapien
attttgacttccgataaaagagctt

SEQ ID NO: 2035120 - DNA, 25 bp, Homo sapien
taagtcccttttccgaggatgctcc

SEQ ID NO: 2035121 - DNA, 25 bp, Homo sapien
ttctaacaacttccacctgggcagg

SEQ ID NO: 2035122 - DNA, 25 bp, Homo sapien
catgtttgtgttgggtgccagaagc

SEQ ID NO: 2035123 - DNA, 25 bp, Homo sapien
agaagcaccacgcaagtcctgagga

SEQ ID NO: 2035124 - DNA, 25 bp, Homo sapien
ggcctctaagcaccgcaaactgttt

SEQ ID NO: 2035125 - DNA, 25 bp, Homo sapien
tatctgtgacactaatgcactaagc

SEQ ID NO: 2035126 - DNA, 25 bp, Homo sapien
catgtttaaattatagaggcctcta

SEQ ID NO: 2035127 - DNA, 25 bp, Homo sapien
aaatggcccatgaaagcaaataagt

SEQ ID NO: 2035128 - DNA, 25 bp, Homo sapien
ttggaagcaagttctcctggctctt

SEQ ID NO: 2035129 - DNA, 25 bp, Homo sapien
tggaagcaagttctcctggctcttt

SEQ ID NO: 2035130 - DNA, 25 bp, Homo sapien
tttggaagcaagttctcctggctct

SEQ ID NO: 2035131 - DNA, 25 bp, Homo sapien
ggagagctgatcatggcatattttc

SEQ ID NO: 2035132 - DNA, 25 bp, Homo sapien
cttctgttgcgaatcatccaaagag

SEQ ID NO: 2035133 - DNA, 25 bp, Homo sapien
gaagggagagctgatcatggcatat

SEQ ID NO: 2035134 - DNA, 25 bp, Homo sapien
caataggtttccataaaccaccatg

SEQ ID NO: 2035135 - DNA, 25 bp, Homo sapien
aaggtcagccagctgtgataggtga

SEQ ID NO: 2035136 - DNA, 25 bp, Homo sapien
agctgtgataggtgatgctccaggc

SEQ ID NO: 2035137 - DNA, 25 bp, Homo sapien
agcacgaaggtcagccagctgtgat

SEQ ID NO: 2035138 - DNA, 25 bp, Homo sapien
cgaaggtcagccagctgtgataggt

SEQ ID NO: 2035139 - DNA, 25 bp, Homo sapien
acgaccatggtcaatacaatgctca

SEQ ID NO: 2035140 - DNA, 25 bp, Homo sapien
gaaaaggaaacacgaccatggtcaa

SEQ ID NO: 2035141 - DNA, 25 bp, Homo sapien
ggaaacacgaccatggtcaatacaa

SEQ ID NO: 2035142 - DNA, 25 bp, Homo sapien
cagaaaaggaaacacgaccatggtc

SEQ ID NO: 2035143 - DNA, 25 bp, Homo sapien
gaaactgaagttgagcatacacagg

SEQ ID NO: 2035144 - DNA, 25 bp, Homo sapien
aactgaagttgagcatacacaggtt

SEQ ID NO: 2035145 - DNA, 25 bp, Homo sapien
tggaaactgaagttgagcatacaca

SEQ ID NO: 2035146 - DNA, 25 bp, Homo sapien
tgaagttgagcatacacaggttcat

SEQ ID NO: 2035147 - DNA, 25 bp, Homo sapien
ggaaaccgtgcctaggttctgtgtc

SEQ ID NO: 2035148 - DNA, 25 bp, Homo sapien
ctggggaaaccgtgcctaggttctg

SEQ ID NO: 2035149 - DNA, 25 bp, Homo sapien
gaaaccgtgcctaggttctgtgtcc

SEQ ID NO: 2035150 - DNA, 25 bp, Homo sapien
ccatggcatgaactttgatacttct

SEQ ID NO: 2035151 - DNA, 25 bp, Homo sapien
taaattggaatacggagaccatggc

SEQ ID NO: 2035152 - DNA, 25 bp, Homo sapien
tacggagaccatggcatgaactttg

SEQ ID NO: 2035153 - DNA, 25 bp, Homo sapien
ttggaatacggagaccatggcatga

SEQ ID NO: 2035154 - DNA, 25 bp, Homo sapien
gaaggttgtctaggctgtgacccca

SEQ ID NO: 2035155 - DNA, 25 bp, Homo sapien
tgtccacatgaaagtaatgggtaag

SEQ ID NO: 2035156 - DNA, 25 bp, Homo sapien
tgtgaccccaacagctcaaacgtca

SEQ ID NO: 2035157 - DNA, 25 bp, Homo sapien
cagaagccacagatgctgactcttg

SEQ ID NO: 2035158 - DNA, 25 bp, Homo sapien
cacactggaaagcactgtgtttcct

SEQ ID NO: 2035159 - DNA, 25 bp, Homo sapien
tttccagtttaagcctgagctgcaa

SEQ ID NO: 2035160 - DNA, 25 bp, Homo sapien
ccttgaactttccagtttaagcctg

SEQ ID NO: 2035161 - DNA, 25 bp, Homo sapien
tcatgctctgaagagcacactggaa

SEQ ID NO: 2035162 - DNA, 25 bp, Homo sapien
ctatgcagctctcaggtgtcatcat

SEQ ID NO: 2035163 - DNA, 25 bp, Homo sapien
gcagaaacagggaacgaaacagtag

SEQ ID NO: 2035164 - DNA, 25 bp, Homo sapien
tctcaggtgtcatcatgggttgggt

SEQ ID NO: 2035165 - DNA, 25 bp, Homo sapien
aacgaaacagtagagtttgaagcta

SEQ ID NO: 2035166 - DNA, 25 bp, Homo sapien
agggccgttctccatgggcaggctt

SEQ ID NO: 2035167 - DNA, 25 bp, Homo sapien
ctgaggattcatcagagggctccca

SEQ ID NO: 2035168 - DNA, 25 bp, Homo sapien
tttgccagggccgttctccatgggc

SEQ ID NO: 2035169 - DNA, 25 bp, Homo sapien
tgggtggatggtgtggtaatccacg

SEQ ID NO: 2035170 - DNA, 25 bp, Homo sapien
cagatggtttgtagtcatcctgggt

SEQ ID NO: 2035171 - DNA, 25 bp, Homo sapien
gatggtttgtagtcatcctgggtca

SEQ ID NO: 2035172 - DNA, 25 bp, Homo sapien
ggtttgtagtcatcctgggtcatgg

SEQ ID NO: 2035173 - DNA, 25 bp, Homo sapien
tggtttgtagtcatcctgggtcatg

SEQ ID NO: 2035174 - DNA, 25 bp, Homo sapien
ctcctccccgctgttatttggatgg

SEQ ID NO: 2035175 - DNA, 25 bp, Homo sapien
ttttctctcatcagtggggtaatgg

SEQ ID NO: 2035176 - DNA, 25 bp, Homo sapien
gggtaatgggttgcgtaccacaggc

SEQ ID NO: 2035177 - DNA, 25 bp, Homo sapien
atgggttgcgtaccacaggctccgc

SEQ ID NO: 2035178 - DNA, 25 bp, Homo sapien
tcattgctctatgctggcccctagg

SEQ ID NO: 2035179 - DNA, 25 bp, Homo sapien
ggcccctaggttagtttcagatcca

SEQ ID NO: 2035180 - DNA, 25 bp, Homo sapien
gcctcaggctagaagtgattcggag

SEQ ID NO: 2035181 - DNA, 25 bp, Homo sapien
gcaaccgggctcctgacagtcattt

SEQ ID NO: 2035182 - DNA, 25 bp, Homo sapien
ggcaccaccaagagctgggctatca

SEQ ID NO: 2035183 - DNA, 25 bp, Homo sapien
gaataaacaccctcagttgtgctgg

SEQ ID NO: 2035184 - DNA, 25 bp, Homo sapien
gggatactcaggaggcaacaggcac

SEQ ID NO: 2035185 - DNA, 25 bp, Homo sapien
ggcttcagtcctcccctcagaaatg

SEQ ID NO: 2035186 - DNA, 25 bp, Homo sapien
tcatacccagaacactagagttgtg

SEQ ID NO: 2035187 - DNA, 25 bp, Homo sapien
cagtaagtgatcagcaaaaatgagt

SEQ ID NO: 2035188 - DNA, 25 bp, Homo sapien
gggaagctagtctttgatctgatag

SEQ ID NO: 2035189 - DNA, 25 bp, Homo sapien
gaatctgatttgtaccatccagtaa

SEQ ID NO: 2035190 - DNA, 25 bp, Homo sapien
gagattctaggttactttgcagaca

SEQ ID NO: 2035191 - DNA, 25 bp, Homo sapien
ggagattctaggttactttgcagac

SEQ ID NO: 2035192 - DNA, 25 bp, Homo sapien
tggagattctaggttactttgcaga

SEQ ID NO: 2035193 - DNA, 25 bp, Homo sapien
agattctaggttactttgcagacaa

SEQ ID NO: 2035194 - DNA, 25 bp, Homo sapien
tccgggttcactatgatcttccaag

SEQ ID NO: 2035195 - DNA, 25 bp, Homo sapien
tggtaccacgacaggtccgggttca

SEQ ID NO: 2035196 - DNA, 25 bp, Homo sapien
tagtacatcaccagcaggaggatag

SEQ ID NO: 2035197 - DNA, 25 bp, Homo sapien
ccagatgcggatcagagtggccaga

SEQ ID NO: 2035198 - DNA, 25 bp, Homo sapien
taactgattccaaactgattttgca

SEQ ID NO: 2035199 - DNA, 25 bp, Homo sapien
actgattccaaactgattttgcaca

SEQ ID NO: 2035200 - DNA, 25 bp, Homo sapien
ctgattccaaactgattttgcacat

SEQ ID NO: 2035201 - DNA, 25 bp, Homo sapien
aactgattccaaactgattttgcac

SEQ ID NO: 2035202 - DNA, 25 bp, Homo sapien
cactttggaacctggtctgtctgca

SEQ ID NO: 2035203 - DNA, 25 bp, Homo sapien
tcccactttggaacctggtctgtct

SEQ ID NO: 2035204 - DNA, 25 bp, Homo sapien
actcccactttggaacctggtctgt

SEQ ID NO: 2035205 - DNA, 25 bp, Homo sapien
ccactttggaacctggtctgtctgc

SEQ ID NO: 2035206 - DNA, 25 bp, Homo sapien
cataccacagtgctgatccaggtac

SEQ ID NO: 2035207 - DNA, 25 bp, Homo sapien
agagtgctccatcacgctggactcg

SEQ ID NO: 2035208 - DNA, 25 bp, Homo sapien
tccataccacagtgctgatccaggt

SEQ ID NO: 2035209 - DNA, 25 bp, Homo sapien
gtagagtgctccatcacgctggact

SEQ ID NO: 2035210 - DNA, 25 bp, Homo sapien
taagcagagcttcatattcaataat

SEQ ID NO: 2035211 - DNA, 25 bp, Homo sapien
cctaagcagagcttcatattcaata

SEQ ID NO: 2035212 - DNA, 25 bp, Homo sapien
ttcctaagcagagcttcatattcaa

SEQ ID NO: 2035213 - DNA, 25 bp, Homo sapien
agttcctaagcagagcttcatattc

SEQ ID NO: 2035214 - DNA, 25 bp, Homo sapien
tatgccctaggataaagctatggtt

SEQ ID NO: 2035215 - DNA, 25 bp, Homo sapien
tacaacaaggaactttacatactgc

SEQ ID NO: 2035216 - DNA, 25 bp, Homo sapien
aatgtaatgtcctgttatcggcaag

SEQ ID NO: 2035217 - DNA, 25 bp, Homo sapien
tgataaattatagcccctgcgccaa

SEQ ID NO: 2035218 - DNA, 25 bp, Homo sapien
aagtatctactgtgctcctctgaac

SEQ ID NO: 2035219 - DNA, 25 bp, Homo sapien
tcctctgaactagacagttgctgcc

SEQ ID NO: 2035220 - DNA, 25 bp, Homo sapien
ggataaccctatactgatcacctag

SEQ ID NO: 2035221 - DNA, 25 bp, Homo sapien
tgaaccaggatctgatctacagctg

SEQ ID NO: 2035222 - DNA, 25 bp, Homo sapien
aatttgttctcgtatattaggccca

SEQ ID NO: 2035223 - DNA, 25 bp, Homo sapien
tgtgtcttattcctacacatgacag

SEQ ID NO: 2035224 - DNA, 25 bp, Homo sapien
gaaacgcctttctagctggatgctg

SEQ ID NO: 2035225 - DNA, 25 bp, Homo sapien
tgttcttcggtgtaaaatgttcttc

SEQ ID NO: 2035226 - DNA, 25 bp, Homo sapien
agtagtcattgggtggaactgcctc

SEQ ID NO: 2035227 - DNA, 25 bp, Homo sapien
agtcattgggtggaactgcctcttg

SEQ ID NO: 2035228 - DNA, 25 bp, Homo sapien
catagtagtcattgggtggaactgc

SEQ ID NO: 2035229 - DNA, 25 bp, Homo sapien
ttgcatagtagtcattgggtggaac

SEQ ID NO: 2035230 - DNA, 25 bp, Homo sapien
acagatgatgtcaaagacggcaaca

SEQ ID NO: 2035231 - DNA, 25 bp, Homo sapien
tagccagcagaacacagagacagct

SEQ ID NO: 2035232 - DNA, 25 bp, Homo sapien
agtccaatcaaatgtccagcagtga

SEQ ID NO: 2035233 - DNA, 25 bp, Homo sapien
ctgaacagcaatgggtcgaacgtcc

SEQ ID NO: 2035234 - DNA, 25 bp, Homo sapien
ttgctacgtgcagccagtgtgggag

SEQ ID NO: 2035235 - DNA, 25 bp, Homo sapien
tttgctacgtgcagccagtgtggga

SEQ ID NO: 2035236 - DNA, 25 bp, Homo sapien
ttttgctacgtgcagccagtgtggg

SEQ ID NO: 2035237 - DNA, 25 bp, Homo sapien
ccttttgctacgtgcagccagtgtg

SEQ ID NO: 2035238 - DNA, 25 bp, Homo sapien
gaaatcctcttcatagatcagtgcc

SEQ ID NO: 2035239 - DNA, 25 bp, Homo sapien
gatggtaacaacgactttcccagca

SEQ ID NO: 2035240 - DNA, 25 bp, Homo sapien
cagaggcaagcctgcggaacatttt

SEQ ID NO: 2035241 - DNA, 25 bp, Homo sapien
ccgaggagcccagtaagatggtaac

SEQ ID NO: 2035242 - DNA, 25 bp, Homo sapien
aaaggagtctgtctgagatgcatga

SEQ ID NO: 2035243 - DNA, 25 bp, Homo sapien
cttaaggcaaaaggagtctgtctga

SEQ ID NO: 2035244 - DNA, 25 bp, Homo sapien
ctgagatgcatgaaactttgtgtgc

SEQ ID NO: 2035245 - DNA, 25 bp, Homo sapien
tctgtctgagatgcatgaaactttg

SEQ ID NO: 2035246 - DNA, 25 bp, Homo sapien
ttaggaaggattgggcctttgtgat

SEQ ID NO: 2035247 - DNA, 25 bp, Homo sapien
aggaaggattgggcctttgtgattt

SEQ ID NO: 2035248 - DNA, 25 bp, Homo sapien
ctgtcttaggaaggattgggccttt

SEQ ID NO: 2035249 - DNA, 25 bp, Homo sapien
tcttaggaaggattgggcctttgtg

SEQ ID NO: 2035250 - DNA, 25 bp, Homo sapien
ggaacagaacttcaatctggccttg

SEQ ID NO: 2035251 - DNA, 25 bp, Homo sapien
cagcggaacagaacttcaatctggc

SEQ ID NO: 2035252 - DNA, 25 bp, Homo sapien
cctgcagcggaacagaacttcaatc

SEQ ID NO: 2035253 - DNA, 25 bp, Homo sapien
tccctgcagcggaacagaacttcaa

SEQ ID NO: 2035254 - DNA, 25 bp, Homo sapien
cagagcagagcttttcatgcagctg

SEQ ID NO: 2035255 - DNA, 25 bp, Homo sapien
gagcttttcatgcagctgaatccat

SEQ ID NO: 2035256 - DNA, 25 bp, Homo sapien
tttcatgcagctgaatccatttttt

SEQ ID NO: 2035257 - DNA, 25 bp, Homo sapien
ctcagagcagagcttttcatgcagc

SEQ ID NO: 2035258 - DNA, 25 bp, Homo sapien
ggaagagacatggagttggatttac

SEQ ID NO: 2035259 - DNA, 25 bp, Homo sapien
caaactccgggttactctgtgctgc

SEQ ID NO: 2035260 - DNA, 25 bp, Homo sapien
gaacatcccgatgtcaggtacaaac

SEQ ID NO: 2035261 - DNA, 25 bp, Homo sapien
ggtacaaacactctgatcccattgc

SEQ ID NO: 2035262 - DNA, 25 bp, Homo sapien
ggagccagatggtcagactagcaat

SEQ ID NO: 2035263 - DNA, 25 bp, Homo sapien
ggcagacttctcacaccattcagca

SEQ ID NO: 2035264 - DNA, 25 bp, Homo sapien
ctgcaagacaccagagcttaatagg

SEQ ID NO: 2035265 - DNA, 25 bp, Homo sapien
cagagcttaataggcactggcagac

SEQ ID NO: 2035266 - DNA, 25 bp, Homo sapien
aataggcactggcagacttctcaca

SEQ ID NO: 2035267 - DNA, 25 bp, Homo sapien
gaggcagcaagagacgtgcagtgtg

SEQ ID NO: 2035268 - DNA, 25 bp, Homo sapien
agcaagagacgtgcagtgtgaagtg

SEQ ID NO: 2035269 - DNA, 25 bp, Homo sapien
ggcagcaagagacgtgcagtgtgaa

SEQ ID NO: 2035270 - DNA, 25 bp, Homo sapien
cagcaagagacgtgcagtgtgaagt

SEQ ID NO: 2035271 - DNA, 25 bp, Homo sapien
gaaagtttctaggaagcttctgcag

SEQ ID NO: 2035272 - DNA, 25 bp, Homo sapien
ccaaagtgcagaccctgaacagagg

SEQ ID NO: 2035273 - DNA, 25 bp, Homo sapien
agaatgcattgctcgtgggtcatgg

SEQ ID NO: 2035274 - DNA, 25 bp, Homo sapien
caatgtgcctcgaattgtccaagga

SEQ ID NO: 2035275 - DNA, 25 bp, Homo sapien
tacgacggtcttctatatccctgtg

SEQ ID NO: 2035276 - DNA, 25 bp, Homo sapien
tctcctttcttacgacggtcttcta

SEQ ID NO: 2035277 - DNA, 25 bp, Homo sapien
tcactctcctttcttacgacggtct

SEQ ID NO: 2035278 - DNA, 25 bp, Homo sapien
ttcttacgacggtcttctatatccc

SEQ ID NO: 2035279 - DNA, 25 bp, Homo sapien
tttgaaggcgcttgttgtgatgtgc

SEQ ID NO: 2035280 - DNA, 25 bp, Homo sapien
tgtcctgtatttgaaggcgcttgtt

SEQ ID NO: 2035281 - DNA, 25 bp, Homo sapien
cagaatactgttggcccttaaacga

SEQ ID NO: 2035282 - DNA, 25 bp, Homo sapien
cgcttgttgtgatgtgcagaatact

SEQ ID NO: 2035283 - DNA, 25 bp, Homo sapien
ccgatctgccggaatgtcttttccc

SEQ ID NO: 2035284 - DNA, 25 bp, Homo sapien
ctttcaaagccgatctgccggaatg

SEQ ID NO: 2035285 - DNA, 25 bp, Homo sapien
caaagccgatctgccggaatgtctt

SEQ ID NO: 2035286 - DNA, 25 bp, Homo sapien
gccgatctgccggaatgtcttttcc

SEQ ID NO: 2035287 - DNA, 25 bp, Homo sapien
tggcaccacgaatatttctggcagc

SEQ ID NO: 2035288 - DNA, 25 bp, Homo sapien
ctttcgccaaagcagtccaacacgg

SEQ ID NO: 2035289 - DNA, 25 bp, Homo sapien
tctggcagcccattattcagttgct

SEQ ID NO: 2035290 - DNA, 25 bp, Homo sapien
gacatgtccagatcctttggcacca

SEQ ID NO: 2035291 - DNA, 25 bp, Homo sapien
aatgggtcacgtgtgcagagggaag

SEQ ID NO: 2035292 - DNA, 25 bp, Homo sapien
ttgctgccacatgcaacagcctgtg

SEQ ID NO: 2035293 - DNA, 25 bp, Homo sapien
gctgccacatgcaacagcctgtgtg

SEQ ID NO: 2035294 - DNA, 25 bp, Homo sapien
ggaagaatgggtcacgtgtgcagag

SEQ ID NO: 2035295 - DNA, 25 bp, Homo sapien
ccccatctgcctctgtgcactccat

SEQ ID NO: 2035296 - DNA, 25 bp, Homo sapien
ggcatccccatctgcctctgtgcac

SEQ ID NO: 2035297 - DNA, 25 bp, Homo sapien
gcatccccatctgcctctgtgcact

SEQ ID NO: 2035298 - DNA, 25 bp, Homo sapien
atccccatctgcctctgtgcactcc

SEQ ID NO: 2035299 - DNA, 25 bp, Homo sapien
tgtaaatgaagtacccatgcctgca

SEQ ID NO: 2035300 - DNA, 25 bp, Homo sapien
tcaggaacaaaggtggatctcagca

SEQ ID NO: 2035301 - DNA, 25 bp, Homo sapien
caagaggccacgttagagaatctcc

SEQ ID NO: 2035302 - DNA, 25 bp, Homo sapien
cacctccagggatgtgctttcagga

SEQ ID NO: 2035303 - DNA, 25 bp, Homo sapien
gggcgagctgcacacttcctggatt

SEQ ID NO: 2035304 - DNA, 25 bp, Homo sapien
aggagggggcgagctgcacacttcc

SEQ ID NO: 2035305 - DNA, 25 bp, Homo sapien
ccggagactggcagccacttttcca

SEQ ID NO: 2035306 - DNA, 25 bp, Homo sapien
cggagactggcagccacttttccat

SEQ ID NO: 2035307 - DNA, 25 bp, Homo sapien
ggccgagcatgccacattgttcact

SEQ ID NO: 2035308 - DNA, 25 bp, Homo sapien
accttcctcacgtgcagctttcttg

SEQ ID NO: 2035309 - DNA, 25 bp, Homo sapien
agcagcaacgctccggcagtggctg

SEQ ID NO: 2035310 - DNA, 25 bp, Homo sapien
ctcacgtgcagctttcttgaaccca

SEQ ID NO: 2035311 - DNA, 25 bp, Homo sapien
tgaagcacagagactttaataaccg

SEQ ID NO: 2035312 - DNA, 25 bp, Homo sapien
ctcaccaacgtgatgtggaaaatga

SEQ ID NO: 2035313 - DNA, 25 bp, Homo sapien
ggtgcaatacgatgttgagcttcaa

SEQ ID NO: 2035314 - DNA, 25 bp, Homo sapien
agcttcaaggctcaccaacgtgatg

SEQ ID NO: 2035315 - DNA, 25 bp, Homo sapien
taaaatctactatgccgtgtttgac

SEQ ID NO: 2035316 - DNA, 25 bp, Homo sapien
ccctcccatggctaacatagctaat

SEQ ID NO: 2035317 - DNA, 25 bp, Homo sapien
tatgtaaattgaagccaaaatgcat

SEQ ID NO: 2035318 - DNA, 25 bp, Homo sapien
tccttattacctcatgcagtgttca

SEQ ID NO: 2035319 - DNA, 25 bp, Homo sapien
tgtcttatccctttgcaaaagcgaa

SEQ ID NO: 2035320 - DNA, 25 bp, Homo sapien
gcaacttgtgccctatctttgaaag

SEQ ID NO: 2035321 - DNA, 25 bp, Homo sapien
cgaagaaaggtaggtcaccaatggt

SEQ ID NO: 2035322 - DNA, 25 bp, Homo sapien
tttcaagggtatataagactgcatg

SEQ ID NO: 2035323 - DNA, 25 bp, Homo sapien
gaagcgaagatcatccctgaactgg

SEQ ID NO: 2035324 - DNA, 25 bp, Homo sapien
aactggtagttcagatcaggagcac

SEQ ID NO: 2035325 - DNA, 25 bp, Homo sapien
tcaggagcacgcattgctttgccgg

SEQ ID NO: 2035326 - DNA, 25 bp, Homo sapien
gaacggcgcctttacaaacatgcaa

SEQ ID NO: 2035327 - DNA, 25 bp, Homo sapien
gaagagaccccagaatatgggtaga

SEQ ID NO: 2035328 - DNA, 25 bp, Homo sapien
gggatggaatttgaagagaccccag

SEQ ID NO: 2035329 - DNA, 25 bp, Homo sapien
ttatatgacaaacagcgatttggac

SEQ ID NO: 2035330 - DNA, 25 bp, Homo sapien
caaacagcgatttggacaaactaaa

SEQ ID NO: 2035331 - DNA, 25 bp, Homo sapien
tggtcattgacactgtccttcagct

SEQ ID NO: 2035332 - DNA, 25 bp, Homo sapien
gaggacagtaaaactgtgcagtatt

SEQ ID NO: 2035333 - DNA, 25 bp, Homo sapien
tgcagtattagggatatatgtttcc

SEQ ID NO: 2035334 - DNA, 25 bp, Homo sapien
gtttccttagatagatcctcacata

SEQ ID NO: 2035335 - DNA, 25 bp, Homo sapien
aacgctggtccctcgagatatatga

SEQ ID NO: 2035336 - DNA, 25 bp, Homo sapien
atgtcagcttggctcgtgctccagc

SEQ ID NO: 2035337 - DNA, 25 bp, Homo sapien
gttgctgtcaagttttactctgtcc

SEQ ID NO: 2035338 - DNA, 25 bp, Homo sapien
cagcgaagagttagaaacgctggtc

SEQ ID NO: 2035339 - DNA, 25 bp, Homo sapien
gaactgggacattaaggtatggggc

SEQ ID NO: 2035340 - DNA, 25 bp, Homo sapien
agttgagaactgggacattaaggta

SEQ ID NO: 2035341 - DNA, 25 bp, Homo sapien
ttgagaactgggacattaaggtatg

SEQ ID NO: 2035342 - DNA, 25 bp, Homo sapien
gagaactgggacattaaggtatggg

SEQ ID NO: 2035343 - DNA, 25 bp, Homo sapien
gcacctaagtgcaaagggacctgta

SEQ ID NO: 2035344 - DNA, 25 bp, Homo sapien
aaaacaggcatcttgaggacgtgaa

SEQ ID NO: 2035345 - DNA, 25 bp, Homo sapien
gaccccagggaatgcgaatataatg

SEQ ID NO: 2035346 - DNA, 25 bp, Homo sapien
tgtagacagtcaagagcacagcggc

SEQ ID NO: 2035347 - DNA, 25 bp, Homo sapien
catgtctttacaagttacagatcgc

SEQ ID NO: 2035348 - DNA, 25 bp, Homo sapien
ccaaaaccagatgcaatcagcttta

SEQ ID NO: 2035349 - DNA, 25 bp, Homo sapien
gctttaaatgtctgctactatttcc

SEQ ID NO: 2035350 - DNA, 25 bp, Homo sapien
agatcgcactgcctcttcaaatggg

SEQ ID NO: 2035351 - DNA, 25 bp, Homo sapien
caaaggagagcccattgtatcggaa

SEQ ID NO: 2035352 - DNA, 25 bp, Homo sapien
cttgcatcgtcgtttttgttggttc

SEQ ID NO: 2035353 - DNA, 25 bp, Homo sapien
tgagcaagaggtagataaggtagac

SEQ ID NO: 2035354 - DNA, 25 bp, Homo sapien
gagcccattgtatcggaatgcacat

SEQ ID NO: 2035355 - DNA, 25 bp, Homo sapien
ttgcatgtacttctacgtcagtggg

SEQ ID NO: 2035356 - DNA, 25 bp, Homo sapien
tggggcccttcagtagggtagaatc

SEQ ID NO: 2035357 - DNA, 25 bp, Homo sapien
tcagtagggtagaatctttgttatc

SEQ ID NO: 2035358 - DNA, 25 bp, Homo sapien
ttactgtatctgctccagagtaggg

SEQ ID NO: 2035359 - DNA, 25 bp, Homo sapien
aaacagcgatgctttagagcagcag

SEQ ID NO: 2035360 - DNA, 25 bp, Homo sapien
actggcggtcttgtcccaggtgctt

SEQ ID NO: 2035361 - DNA, 25 bp, Homo sapien
cagcagacagttgagacaagaacat

SEQ ID NO: 2035362 - DNA, 25 bp, Homo sapien
gaaaccgtaaatgtctcaaacagcg

SEQ ID NO: 2035363 - DNA, 25 bp, Homo sapien
gccaggcttggatgcctagcttggg

SEQ ID NO: 2035364 - DNA, 25 bp, Homo sapien
gagttcccagtgctaacccagcatg

SEQ ID NO: 2035365 - DNA, 25 bp, Homo sapien
ctcagccagagggaccgagttccca

SEQ ID NO: 2035366 - DNA, 25 bp, Homo sapien
cccagcatgatctgtgggccaggct

SEQ ID NO: 2035367 - DNA, 25 bp, Homo sapien
ctcccacgggcttcctcctctctca

SEQ ID NO: 2035368 - DNA, 25 bp, Homo sapien
tcccacgggcttcctcctctctcat

SEQ ID NO: 2035369 - DNA, 25 bp, Homo sapien
catttggctctttggttcatctgct

SEQ ID NO: 2035370 - DNA, 25 bp, Homo sapien
gcttcacctccttcacctggaaggt

SEQ ID NO: 2035371 - DNA, 25 bp, Homo sapien
tttggctctttggttcatctgcttc

SEQ ID NO: 2035372 - DNA, 25 bp, Homo sapien
ggctctttggttcatctgcttcacc

SEQ ID NO: 2035373 - DNA, 25 bp, Homo sapien
gcagccctgacctagcctctgataa

SEQ ID NO: 2035374 - DNA, 25 bp, Homo sapien
tctgtccaacgagcatttcctgtct

SEQ ID NO: 2035375 - DNA, 25 bp, Homo sapien
catttcgaggcctatgaagagaacc

SEQ ID NO: 2035376 - DNA, 25 bp, Homo sapien
tgtcttaggcacaaatgctttgcag

SEQ ID NO: 2035377 - DNA, 25 bp, Homo sapien
tgacctttgataggctggctgccaa

SEQ ID NO: 2035378 - DNA, 25 bp, Homo sapien
cagagattctaaagtgggcttcaca

SEQ ID NO: 2035379 - DNA, 25 bp, Homo sapien
tctgtaactgtaacggtgccttttc

SEQ ID NO: 2035380 - DNA, 25 bp, Homo sapien
tcagctcagcgcaaggttcctcttt

SEQ ID NO: 2035381 - DNA, 25 bp, Homo sapien
cagtcgctaattaataagtgcaggc

SEQ ID NO: 2035382 - DNA, 25 bp, Homo sapien
gtaacagcagcaagccagcaactct

SEQ ID NO: 2035383 - DNA, 25 bp, Homo sapien
tctgaagacagatggcaacggcacc

SEQ ID NO: 2035384 - DNA, 25 bp, Homo sapien
gccttcatgggtaaagcaacttagt

SEQ ID NO: 2035385 - DNA, 25 bp, Homo sapien
catttctctcaataaagtgaagaaa

SEQ ID NO: 2035386 - DNA, 25 bp, Homo sapien
cttccatttctctcaataaagtgaa

SEQ ID NO: 2035387 - DNA, 25 bp, Homo sapien
ccatttctctcaataaagtgaagaa

SEQ ID NO: 2035388 - DNA, 25 bp, Homo sapien
tccatttctctcaataaagtgaaga

SEQ ID NO: 2035389 - DNA, 25 bp, Homo sapien
agctccaaaagccacccgctggaag

SEQ ID NO: 2035390 - DNA, 25 bp, Homo sapien
cattagtctgcagatttagaagcac

SEQ ID NO: 2035391 - DNA, 25 bp, Homo sapien
tcagtgtgccattgaaactatgcca

SEQ ID NO: 2035392 - DNA, 25 bp, Homo sapien
acattgcttgggatcattttccagt

SEQ ID NO: 2035393 - DNA, 25 bp, Homo sapien
atgacatccaatccccacttaattg

SEQ ID NO: 2035394 - DNA, 25 bp, Homo sapien
taattgaagtcgacaaggcttcttg

SEQ ID NO: 2035395 - DNA, 25 bp, Homo sapien
ggggaatccgtagccaggcaccagt

SEQ ID NO: 2035396 - DNA, 25 bp, Homo sapien
tgacaccgtcacaccctcggggaat

SEQ ID NO: 2035397 - DNA, 25 bp, Homo sapien
tagtcgtaagtcaacaattgccaga

SEQ ID NO: 2035398 - DNA, 25 bp, Homo sapien
aaataatgcaagtgacacctggtgt

SEQ ID NO: 2035399 - DNA, 25 bp, Homo sapien
tgcagttaggtcaccgacaagagga

SEQ ID NO: 2035400 - DNA, 25 bp, Homo sapien
tctattgagaaatgcataatgccac

SEQ ID NO: 2035401 - DNA, 25 bp, Homo sapien
actggctgattgactcatgaaatcc

SEQ ID NO: 2035402 - DNA, 25 bp, Homo sapien
tgtggacttgaactggctgattgac

SEQ ID NO: 2035403 - DNA, 25 bp, Homo sapien
gtaggccttcaagaactgtggactt

SEQ ID NO: 2035404 - DNA, 25 bp, Homo sapien
tcagtgcccagcacgatgtaggcct

SEQ ID NO: 2035405 - DNA, 25 bp, Homo sapien
tgagtcccacagaggagtatgaagt

SEQ ID NO: 2035406 - DNA, 25 bp, Homo sapien
ggagtatgaagtcagtgccttctgc

SEQ ID NO: 2035407 - DNA, 25 bp, Homo sapien
gcttccaacagactgaattcctcaa

SEQ ID NO: 2035408 - DNA, 25 bp, Homo sapien
cagactgaattcctcaaggacattc

SEQ ID NO: 2035409 - DNA, 25 bp, Homo sapien
cacagctaggtcttgttccacagtg

SEQ ID NO: 2035410 - DNA, 25 bp, Homo sapien
acagtgcatgaccttgacttccaca

SEQ ID NO: 2035411 - DNA, 25 bp, Homo sapien
ccatggtccacagctaggtcttgtt

SEQ ID NO: 2035412 - DNA, 25 bp, Homo sapien
gcctctccaacgctgggacctggag

SEQ ID NO: 2035413 - DNA, 25 bp, Homo sapien
gttcagggcaggacaacattccagc

SEQ ID NO: 2035414 - DNA, 25 bp, Homo sapien
agcaactccggatcctctctctgag

SEQ ID NO: 2035415 - DNA, 25 bp, Homo sapien
aggtccctgccagcattggctttca

SEQ ID NO: 2035416 - DNA, 25 bp, Homo sapien
tcaatttgattgtatgaagtggctg

SEQ ID NO: 2035417 - DNA, 25 bp, Homo sapien
gcagctctagtgcccaacggtagag

SEQ ID NO: 2035418 - DNA, 25 bp, Homo sapien
tagtgcccaacggtagaggaagaat

SEQ ID NO: 2035419 - DNA, 25 bp, Homo sapien
gctctagtgcccaacggtagaggaa

SEQ ID NO: 2035420 - DNA, 25 bp, Homo sapien
tgcccaacggtagaggaagaatggt

SEQ ID NO: 2035421 - DNA, 25 bp, Homo sapien
ctaggcctggtaaagggcactcctc

SEQ ID NO: 2035422 - DNA, 25 bp, Homo sapien
ctgttccatcttactgtcccctagg

SEQ ID NO: 2035423 - DNA, 25 bp, Homo sapien
tggccacagtgatgactgttccatc

SEQ ID NO: 2035424 - DNA, 25 bp, Homo sapien
gtcctcttcccacctttagtgccag

SEQ ID NO: 2035425 - DNA, 25 bp, Homo sapien
cccaacacgtgaggaggtcactagg

SEQ ID NO: 2035426 - DNA, 25 bp, Homo sapien
gaggtcactagggtcaggtctccca

SEQ ID NO: 2035427 - DNA, 25 bp, Homo sapien
taagtatcatgattagaagatgtca

SEQ ID NO: 2035428 - DNA, 25 bp, Homo sapien
gcaggttatcttttctaagcaccca

SEQ ID NO: 2035429 - DNA, 25 bp, Homo sapien
tgcaagagcctatgctcagggcaag

SEQ ID NO: 2035430 - DNA, 25 bp, Homo sapien
ttcattccgccactggtgccaagtc

SEQ ID NO: 2035431 - DNA, 25 bp, Homo sapien
ggcaaggtcgcaggcaatcgctgct

SEQ ID NO: 2035432 - DNA, 25 bp, Homo sapien
gtcgcaggcaatcgctgctggcact

SEQ ID NO: 2035433 - DNA, 25 bp, Homo sapien
gcacccagttgctttgcacgccagg

SEQ ID NO: 2035434 - DNA, 25 bp, Homo sapien
agatcagaaacggtccgactcccag

SEQ ID NO: 2035435 - DNA, 25 bp, Homo sapien
gaggaattcaatgtcacaggcactg

SEQ ID NO: 2035436 - DNA, 25 bp, Homo sapien
cctgtttgaggagaagatcagaaac

SEQ ID NO: 2035437 - DNA, 25 bp, Homo sapien
tccttcacggttgctgggatttggg

SEQ ID NO: 2035438 - DNA, 25 bp, Homo sapien
gaatgaccggagtccttcacttctt

SEQ ID NO: 2035439 - DNA, 25 bp, Homo sapien
agagatggcctctgggccgtctgga

SEQ ID NO: 2035440 - DNA, 25 bp, Homo sapien
cacttcttccttcacggttgctggg

SEQ ID NO: 2035441 - DNA, 25 bp, Homo sapien
cgaggggctcaggtaggagcctgac

SEQ ID NO: 2035442 - DNA, 25 bp, Homo sapien
gggcgaggggctcaggtaggagcct

SEQ ID NO: 2035443 - DNA, 25 bp, Homo sapien
gcgaggggctcaggtaggagcctga

SEQ ID NO: 2035444 - DNA, 25 bp, Homo sapien
ggcgaggggctcaggtaggagcctg

SEQ ID NO: 2035445 - DNA, 25 bp, Homo sapien
agcccgcacaccacttctgaggcca

SEQ ID NO: 2035446 - DNA, 25 bp, Homo sapien
gcccgcacaccacttctgaggccat

SEQ ID NO: 2035447 - DNA, 25 bp, Homo sapien
tgagcccgcacaccacttctgaggc

SEQ ID NO: 2035448 - DNA, 25 bp, Homo sapien
atgagcccgcacaccacttctgagg

SEQ ID NO: 2035449 - DNA, 25 bp, Homo sapien
agctcgcagccacccgagcatcgcc

SEQ ID NO: 2035450 - DNA, 25 bp, Homo sapien
gggccgcgacgctctccgccccgag

SEQ ID NO: 2035451 - DNA, 25 bp, Homo sapien
cggcagctcgcagccacccgagcat

SEQ ID NO: 2035452 - DNA, 25 bp, Homo sapien
agccacccgagcatcgcctcggcgc

SEQ ID NO: 2035453 - DNA, 25 bp, Homo sapien
tatggtggcttaaccgaacgtgaat

SEQ ID NO: 2035454 - DNA, 25 bp, Homo sapien
tgaactttcctcacatgccgggtgt

SEQ ID NO: 2035455 - DNA, 25 bp, Homo sapien
ggtcccttcgtcctttcattgtgag

SEQ ID NO: 2035456 - DNA, 25 bp, Homo sapien
aagatggcagcttcacgtctagtcc

SEQ ID NO: 2035457 - DNA, 25 bp, Homo sapien
tctgaagctctccaagtttgttttg

SEQ ID NO: 2035458 - DNA, 25 bp, Homo sapien
tgttttgtttgcacgtccatgatcc

SEQ ID NO: 2035459 - DNA, 25 bp, Homo sapien
tgcacgtccatgatccattactatc

SEQ ID NO: 2035460 - DNA, 25 bp, Homo sapien
agtttgttttgtttgcacgtccatg

SEQ ID NO: 2035461 - DNA, 25 bp, Homo sapien
gggttcccgggtgcgctccctgctg

SEQ ID NO: 2035462 - DNA, 25 bp, Homo sapien
gaggcagacgcaggcacgccgcggg

SEQ ID NO: 2035463 - DNA, 25 bp, Homo sapien
gcaggggcttgtgcgccgctcccaa

SEQ ID NO: 2035464 - DNA, 25 bp, Homo sapien
agcaggggcttgtgcgccgctccca

SEQ ID NO: 2035465 - DNA, 25 bp, Homo sapien
cagacgcaggcacgccgcgggccca

SEQ ID NO: 2035466 - DNA, 25 bp, Homo sapien
gatacaagtgactgggattgtccca

SEQ ID NO: 2035467 - DNA, 25 bp, Homo sapien
tggaatggaacagatacaagtgact

SEQ ID NO: 2035468 - DNA, 25 bp, Homo sapien
ttccccttccaagttacagctttca

SEQ ID NO: 2035469 - DNA, 25 bp, Homo sapien
ccaagttacagctttcactatttcc

SEQ ID NO: 2035470 - DNA, 25 bp, Homo sapien
catagtaactgagcctaggtgacca

SEQ ID NO: 2035471 - DNA, 25 bp, Homo sapien
ggcctccagccagtaagaatagcgg

SEQ ID NO: 2035472 - DNA, 25 bp, Homo sapien
tgccaagcgatgaaccttccaaaag

SEQ ID NO: 2035473 - DNA, 25 bp, Homo sapien
taggtgaccaatttgtgccaagcga

SEQ ID NO: 2035474 - DNA, 25 bp, Homo sapien
acagtgataaaggtaaaaatgagca

SEQ ID NO: 2035475 - DNA, 25 bp, Homo sapien
ttacagtgataaaggtaaaaatgag

SEQ ID NO: 2035476 - DNA, 25 bp, Homo sapien
atttacagtgataaaggtaaaaatg

SEQ ID NO: 2035477 - DNA, 25 bp, Homo sapien
caagggagaaaaatttacagtgata

SEQ ID NO: 2035478 - DNA, 25 bp, Homo sapien
ttcaaagacgtgatgtctttcttcc

SEQ ID NO: 2035479 - DNA, 25 bp, Homo sapien
cttcaaagacgtgatgtctttcttc

SEQ ID NO: 2035480 - DNA, 25 bp, Homo sapien
tgaccattcgccctcagaccaaatg

SEQ ID NO: 2035481 - DNA, 25 bp, Homo sapien
ttcgccctcagaccaaatgcgctgg

SEQ ID NO: 2035482 - DNA, 25 bp, Homo sapien
gctgtaaaaccacgaacacatggca

SEQ ID NO: 2035483 - DNA, 25 bp, Homo sapien
ggattgctgccctttacagctgtaa

SEQ ID NO: 2035484 - DNA, 25 bp, Homo sapien
tgctttccaggtgacttggttccag

SEQ ID NO: 2035485 - DNA, 25 bp, Homo sapien
taggtagggatgacggtcactaggc

SEQ ID NO: 2035486 - DNA, 25 bp, Homo sapien
ggatgacggtcactaggcctgcttt

SEQ ID NO: 2035487 - DNA, 25 bp, Homo sapien
gctgccagcttaatctctggcagtg

SEQ ID NO: 2035488 - DNA, 25 bp, Homo sapien
aagactgagggctccaaaatcgtcc

SEQ ID NO: 2035489 - DNA, 25 bp, Homo sapien
catctcaggccaagtaacaggactg

SEQ ID NO: 2035490 - DNA, 25 bp, Homo sapien
aacaggactggctcaatccgtaggc

SEQ ID NO: 2035491 - DNA, 25 bp, Homo sapien
tccgtaggcacctttctgctgaaag

SEQ ID NO: 2035492 - DNA, 25 bp, Homo sapien
tatactgaatatttgaagagctctt

SEQ ID NO: 2035493 - DNA, 25 bp, Homo sapien
ctttctgaaattgcaagtcctgcca

SEQ ID NO: 2035494 - DNA, 25 bp, Homo sapien
ttatactgaatatttgaagagctct

SEQ ID NO: 2035495 - DNA, 25 bp, Homo sapien
aacagcgtgccaactgccggcattg

SEQ ID NO: 2035496 - DNA, 25 bp, Homo sapien
cgaacagcgtgccaactgccggcat

SEQ ID NO: 2035497 - DNA, 25 bp, Homo sapien
agcgtgccaactgccggcattgttc

SEQ ID NO: 2035498 - DNA, 25 bp, Homo sapien
tttccgaacagcgtgccaactgccg

SEQ ID NO: 2035499 - DNA, 25 bp, Homo sapien
tataccaggcaagaaataagtggct

SEQ ID NO: 2035500 - DNA, 25 bp, Homo sapien
ctataccaggcaagaaataagtggc

SEQ ID NO: 2035501 - DNA, 25 bp, Homo sapien
gctgcctgggccatagcaggccctg

SEQ ID NO: 2035502 - DNA, 25 bp, Homo sapien
tgggccatagcaggccctgcataca

SEQ ID NO: 2035503 - DNA, 25 bp, Homo sapien
ctgacatcgtggctgcctgggccat

SEQ ID NO: 2035504 - DNA, 25 bp, Homo sapien
tggctgcctgggccatagcaggccc

SEQ ID NO: 2035505 - DNA, 25 bp, Homo sapien
cttttccttcttcggcagtctacac

SEQ ID NO: 2035506 - DNA, 25 bp, Homo sapien
tccaaccagagcacacgaggtgtga

SEQ ID NO: 2035507 - DNA, 25 bp, Homo sapien
tgtggacaggtgaggccgtctggag

SEQ ID NO: 2035508 - DNA, 25 bp, Homo sapien
tcggcagtctacactggcatgtccc

SEQ ID NO: 2035509 - DNA, 25 bp, Homo sapien
cagagtgatccaaggtttcaagtgt

SEQ ID NO: 2035510 - DNA, 25 bp, Homo sapien
tacagagtgatccaaggtttcaagt

SEQ ID NO: 2035511 - DNA, 25 bp, Homo sapien
gagtacagagtgatccaaggtttca

SEQ ID NO: 2035512 - DNA, 25 bp, Homo sapien
caggagagtacagagtgatccaagg

SEQ ID NO: 2035513 - DNA, 25 bp, Homo sapien
attaacatcaagttcaatgccaaat

SEQ ID NO: 2035514 - DNA, 25 bp, Homo sapien
ttaacatcaagttcaatgccaaatt

SEQ ID NO: 2035515 - DNA, 25 bp, Homo sapien
taacatcaagttcaatgccaaattc

SEQ ID NO: 2035516 - DNA, 25 bp, Homo sapien
gggacacacatcgatgaccatcaag

SEQ ID NO: 2035517 - DNA, 25 bp, Homo sapien
cacacatcgatgaccatcaagccgc

SEQ ID NO: 2035518 - DNA, 25 bp, Homo sapien
ggggacacacatcgatgaccatcaa

SEQ ID NO: 2035519 - DNA, 25 bp, Homo sapien
gacacacatcgatgaccatcaagcc

SEQ ID NO: 2035520 - DNA, 25 bp, Homo sapien
tgtcttccgtttatagcatcgtctc

SEQ ID NO: 2035521 - DNA, 25 bp, Homo sapien
tatagcatcgtctctttcctccagg

SEQ ID NO: 2035522 - DNA, 25 bp, Homo sapien
agcactgtgtcttccgtttatagca

SEQ ID NO: 2035523 - DNA, 25 bp, Homo sapien
tcaagtgcgcaatgagaagcactgt

SEQ ID NO: 2035524 - DNA, 25 bp, Homo sapien
atcaaaggcgagtctgtgttccact

SEQ ID NO: 2035525 - DNA, 25 bp, Homo sapien
cttgaagggatcaaaggcgagtctg

SEQ ID NO: 2035526 - DNA, 25 bp, Homo sapien
ttgaagggatcaaaggcgagtctgt

SEQ ID NO: 2035527 - DNA, 25 bp, Homo sapien
agggatcaaaggcgagtctgtgttc

SEQ ID NO: 2035528 - DNA, 25 bp, Homo sapien
ctggaagctcccactgctaccctct

SEQ ID NO: 2035529 - DNA, 25 bp, Homo sapien
tggaagctcccactgctaccctctg

SEQ ID NO: 2035530 - DNA, 25 bp, Homo sapien
gaagctcccactgctaccctctgcc

SEQ ID NO: 2035531 - DNA, 25 bp, Homo sapien
ggaagctcccactgctaccctctgc

SEQ ID NO: 2035532 - DNA, 25 bp, Homo sapien
ctttaatttgagttcttaattgagg

SEQ ID NO: 2035533 - DNA, 25 bp, Homo sapien
cttccttgccaagaaaattgccttt

SEQ ID NO: 2035534 - DNA, 25 bp, Homo sapien
tgctccttttttggcaaatatgctc

SEQ ID NO: 2035535 - DNA, 25 bp, Homo sapien
attgcctttaatttgagttcttaat

SEQ ID NO: 2035536 - DNA, 25 bp, Homo sapien
attaacatcaagttcaatgccaaat

SEQ ID NO: 2035537 - DNA, 25 bp, Homo sapien
ttaacatcaagttcaatgccaaatt

SEQ ID NO: 2035538 - DNA, 25 bp, Homo sapien
taacatcaagttcaatgccaaattc

SEQ ID NO: 2035539 - DNA, 25 bp, Homo sapien
tcttggtgtttacagatccctccat

SEQ ID NO: 2035540 - DNA, 25 bp, Homo sapien
gactcatactcctcttggtgtttac

SEQ ID NO: 2035541 - DNA, 25 bp, Homo sapien
tactcctcttggtgtttacagatcc

SEQ ID NO: 2035542 - DNA, 25 bp, Homo sapien
gttgttctgactcatactcctcttg

SEQ ID NO: 2035543 - DNA, 25 bp, Homo sapien
gtcacaggtgatggccaccatttgg

SEQ ID NO: 2035544 - DNA, 25 bp, Homo sapien
tttctctagggcagttcacaatggc

SEQ ID NO: 2035545 - DNA, 25 bp, Homo sapien
tcaagcacgtttcagtagatcacat

SEQ ID NO: 2035546 - DNA, 25 bp, Homo sapien
tgttacatgctattccccgtttcag

SEQ ID NO: 2035547 - DNA, 25 bp, Homo sapien
ctgattatcgtgagaaactgcaggt

SEQ ID NO: 2035548 - DNA, 25 bp, Homo sapien
gactattgtgagctgattatcgtga

SEQ ID NO: 2035549 - DNA, 25 bp, Homo sapien
cctctttggcataaggactattgtg

SEQ ID NO: 2035550 - DNA, 25 bp, Homo sapien
ggcataaggactattgtgagctgat

SEQ ID NO: 2035551 - DNA, 25 bp, Homo sapien
tacatcccgtgtccagaatgctgcc

SEQ ID NO: 2035552 - DNA, 25 bp, Homo sapien
caggagggcggcgaagtgtggaagg

SEQ ID NO: 2035553 - DNA, 25 bp, Homo sapien
tgtggaaggtgagagcggctccgcc

SEQ ID NO: 2035554 - DNA, 25 bp, Homo sapien
tgtacatcccgtgtccagaatgctg

SEQ ID NO: 2035555 - DNA, 25 bp, Homo sapien
gccttctgccgacaagagtgggaga

SEQ ID NO: 2035556 - DNA, 25 bp, Homo sapien
ggatgctacgccacctggcaggtgc

SEQ ID NO: 2035557 - DNA, 25 bp, Homo sapien
cgttcgtgtgggcaaagatgtgctc

SEQ ID NO: 2035558 - DNA, 25 bp, Homo sapien
tcggacacactcgtagctgcagagg

SEQ ID NO: 2035559 - DNA, 25 bp, Homo sapien
cagcactaggtgagaacagacacag

SEQ ID NO: 2035560 - DNA, 25 bp, Homo sapien
tcacaggctccggaaggtgctgtgg

SEQ ID NO: 2035561 - DNA, 25 bp, Homo sapien
ttagatgtgcacagcactaggtgag

SEQ ID NO: 2035562 - DNA, 25 bp, Homo sapien
agagggaccgggtcacaggctccgg

SEQ ID NO: 2035563 - DNA, 25 bp, Homo sapien
tatgaggtaagacatgccaaaagtg

SEQ ID NO: 2035564 - DNA, 25 bp, Homo sapien
ctgacaactatggaagaaagcactg

SEQ ID NO: 2035565 - DNA, 25 bp, Homo sapien
tctttatgaggtaagacatgccaaa

SEQ ID NO: 2035566 - DNA, 25 bp, Homo sapien
gaggtaagacatgccaaaagtgcaa

SEQ ID NO: 2035567 - DNA, 25 bp, Homo sapien
tcctagctttccaagaccacatcag

SEQ ID NO: 2035568 - DNA, 25 bp, Homo sapien
ctggcatcctagctttccaagacca

SEQ ID NO: 2035569 - DNA, 25 bp, Homo sapien
tcagtgccctggcatcctagctttc

SEQ ID NO: 2035570 - DNA, 25 bp, Homo sapien
agtgccctggcatcctagctttcca

SEQ ID NO: 2035571 - DNA, 25 bp, Homo sapien
cttgagggctcgacgaggacatgta

SEQ ID NO: 2035572 - DNA, 25 bp, Homo sapien
gcacagcccaatttggtgatgtggg

SEQ ID NO: 2035573 - DNA, 25 bp, Homo sapien
cagggccctggtaagatccaaaggc

SEQ ID NO: 2035574 - DNA, 25 bp, Homo sapien
acatgtaagtgtcctcgtggtgcca

SEQ ID NO: 2035575 - DNA, 25 bp, Homo sapien
cagcccattgcagggtgaaggagct

SEQ ID NO: 2035576 - DNA, 25 bp, Homo sapien
gaaggagctctggatagacatatgg

SEQ ID NO: 2035577 - DNA, 25 bp, Homo sapien
caactgctgttcattgcccctgctg

SEQ ID NO: 2035578 - DNA, 25 bp, Homo sapien
cccattgcagggtgaaggagctctg

SEQ ID NO: 2035579 - DNA, 25 bp, Homo sapien
cttttatcaaatacccaatcagtaa

SEQ ID NO: 2035580 - DNA, 25 bp, Homo sapien
ttatcaaatacccaatcagtaacct

SEQ ID NO: 2035581 - DNA, 25 bp, Homo sapien
caaatacccaatcagtaacctgcat

SEQ ID NO: 2035582 - DNA, 25 bp, Homo sapien
tcaaatacccaatcagtaacctgca

SEQ ID NO: 2035583 - DNA, 25 bp, Homo sapien
gtaatacgggtaaatagcaagctga

SEQ ID NO: 2035584 - DNA, 25 bp, Homo sapien
gagcctggagttgcaccaagttctc

SEQ ID NO: 2035585 - DNA, 25 bp, Homo sapien
tgaaagagcatgacggagctagtcc

SEQ ID NO: 2035586 - DNA, 25 bp, Homo sapien
cactatgaattaaaggcagcatggc

SEQ ID NO: 2035587 - DNA, 25 bp, Homo sapien
gtcagtgggcgcaccacctgagcca

SEQ ID NO: 2035588 - DNA, 25 bp, Homo sapien
tactgtgtcagtgggcgcaccacct

SEQ ID NO: 2035589 - DNA, 25 bp, Homo sapien
ttcctttcccgttactgtgtcagtg

SEQ ID NO: 2035590 - DNA, 25 bp, Homo sapien
atttcctttcccgttactgtgtcag

SEQ ID NO: 2035591 - DNA, 25 bp, Homo sapien
tgctgggtcttagtgcaatgacacc

SEQ ID NO: 2035592 - DNA, 25 bp, Homo sapien
aatgacaccaaggatcacacctgaa

SEQ ID NO: 2035593 - DNA, 25 bp, Homo sapien
cacacctgaaattattcgagagaca

SEQ ID NO: 2035594 - DNA, 25 bp, Homo sapien
caccagacccttgctgggtcttagt

SEQ ID NO: 2035595 - DNA, 25 bp, Homo sapien
cccatagagccattggtggaaggac

SEQ ID NO: 2035596 - DNA, 25 bp, Homo sapien
tactgactgcccatagagccattgg

SEQ ID NO: 2035597 - DNA, 25 bp, Homo sapien
agccattggtggaaggactccagag

SEQ ID NO: 2035598 - DNA, 25 bp, Homo sapien
caactctcttactgactgcccatag

SEQ ID NO: 2035599 - DNA, 25 bp, Homo sapien
cctggggcattataattactgtctc

SEQ ID NO: 2035600 - DNA, 25 bp, Homo sapien
gcctggggcattataattactgtct

SEQ ID NO: 2035601 - DNA, 25 bp, Homo sapien
tgcctggggcattataattactgtc

SEQ ID NO: 2035602 - DNA, 25 bp, Homo sapien
gcctgaagattgaagtgcctgctct

SEQ ID NO: 2035603 - DNA, 25 bp, Homo sapien
gaaagtgcctcagcaacaggtgttg

SEQ ID NO: 2035604 - DNA, 25 bp, Homo sapien
caacctggcagtgtggtcatgcaga

SEQ ID NO: 2035605 - DNA, 25 bp, Homo sapien
tcaggatgcatacaaagtcagccaa

SEQ ID NO: 2035606 - DNA, 25 bp, Homo sapien
gagccaggtctagtcagcattaaga

SEQ ID NO: 2035607 - DNA, 25 bp, Homo sapien
tgtaagttgcccaaatccaaaggga

SEQ ID NO: 2035608 - DNA, 25 bp, Homo sapien
aaaacagcggaactcatggcaaact

SEQ ID NO: 2035609 - DNA, 25 bp, Homo sapien
gatttctcaggttctaagcgcccct

SEQ ID NO: 2035610 - DNA, 25 bp, Homo sapien
aggtacactgatcaatcgtaggttt

SEQ ID NO: 2035611 - DNA, 25 bp, Homo sapien
actttcaggtacactgatcaatcgt

SEQ ID NO: 2035612 - DNA, 25 bp, Homo sapien
caggtacactgatcaatcgtaggtt

SEQ ID NO: 2035613 - DNA, 25 bp, Homo sapien
tttcaggtacactgatcaatcgtag

SEQ ID NO: 2035614 - DNA, 25 bp, Homo sapien
tcctggctcaggcatgatgaatcac

SEQ ID NO: 2035615 - DNA, 25 bp, Homo sapien
ggtgctttcgtgcttctaagtggaa

SEQ ID NO: 2035616 - DNA, 25 bp, Homo sapien
ccaggctggagtcccgattcttggg

SEQ ID NO: 2035617 - DNA, 25 bp, Homo sapien
ttccaaaccacagcgttatccgagg

SEQ ID NO: 2035618 - DNA, 25 bp, Homo sapien
cacatatcgttgtgtaccagtgacg

SEQ ID NO: 2035619 - DNA, 25 bp, Homo sapien
tcagtgtgtaccagtgataccttca

SEQ ID NO: 2035620 - DNA, 25 bp, Homo sapien
gacgttcaccttcatggccatcagt

SEQ ID NO: 2035621 - DNA, 25 bp, Homo sapien
gccatcagtgtgtaccagtgaccac

SEQ ID NO: 2035622 - DNA, 25 bp, Homo sapien
ttgcaggaaacaaacccctgcacct

SEQ ID NO: 2035623 - DNA, 25 bp, Homo sapien
gcaggaaacaaacccctgcacctgg

SEQ ID NO: 2035624 - DNA, 25 bp, Homo sapien
tgcaggaaacaaacccctgcacctg

SEQ ID NO: 2035625 - DNA, 25 bp, Homo sapien
ctgtaatttactgggaccatcaagt

SEQ ID NO: 2035626 - DNA, 25 bp, Homo sapien
acagactgccttctgcgtttgacca

SEQ ID NO: 2035627 - DNA, 25 bp, Homo sapien
cacaccttgaccatgctttaattcg

SEQ ID NO: 2035628 - DNA, 25 bp, Homo sapien
gaccatcaagtcattttcacccttt

SEQ ID NO: 2035629 - DNA, 25 bp, Homo sapien
tgtaacaggagtattcaagtgatct

SEQ ID NO: 2035630 - DNA, 25 bp, Homo sapien
tctagagcgtataatgtaacaggag

SEQ ID NO: 2035631 - DNA, 25 bp, Homo sapien
taatgtaacaggagtattcaagtga

SEQ ID NO: 2035632 - DNA, 25 bp, Homo sapien
attttctagagcgtataatgtaaca

SEQ ID NO: 2035633 - DNA, 25 bp, Homo sapien
tcacaaaagcctccttagcctatac

SEQ ID NO: 2035634 - DNA, 25 bp, Homo sapien
ttatagccagtatgggaaccagaat

SEQ ID NO: 2035635 - DNA, 25 bp, Homo sapien
ctttttgtgggacttggcattatag

SEQ ID NO: 2035636 - DNA, 25 bp, Homo sapien
ccaccactcccagcttatcatcttt

SEQ ID NO: 2035637 - DNA, 25 bp, Homo sapien
gggcaaggagacactccttgagatt

SEQ ID NO: 2035638 - DNA, 25 bp, Homo sapien
caaggagacactccttgagattatc

SEQ ID NO: 2035639 - DNA, 25 bp, Homo sapien
aggggcaaggagacactccttgaga

SEQ ID NO: 2035640 - DNA, 25 bp, Homo sapien
ggcaaggagacactccttgagatta

SEQ ID NO: 2035641 - DNA, 25 bp, Homo sapien
gtcagtgtgaccaccctgctccaaa

SEQ ID NO: 2035642 - DNA, 25 bp, Homo sapien
agtgtgaccaccctgctccaaatct

SEQ ID NO: 2035643 - DNA, 25 bp, Homo sapien
tcagtgtgaccaccctgctccaaat

SEQ ID NO: 2035644 - DNA, 25 bp, Homo sapien
ttcactcccaggtaataccaaattg

SEQ ID NO: 2035645 - DNA, 25 bp, Homo sapien
ctcccaggtaataccaaattgtaag

SEQ ID NO: 2035646 - DNA, 25 bp, Homo sapien
tcactcccaggtaataccaaattgt

SEQ ID NO: 2035647 - DNA, 25 bp, Homo sapien
cactcccaggtaataccaaattgta

SEQ ID NO: 2035648 - DNA, 25 bp, Homo sapien
cacacaagaaccagcttagctgagc

SEQ ID NO: 2035649 - DNA, 25 bp, Homo sapien
cacaagaaccagcttagctgagcat

SEQ ID NO: 2035650 - DNA, 25 bp, Homo sapien
acacaagaaccagcttagctgagca

SEQ ID NO: 2035651 - DNA, 25 bp, Homo sapien
ccagttgcaaagaggctttcttgca

SEQ ID NO: 2035652 - DNA, 25 bp, Homo sapien
gaggctttcttgcagaaggggggat

SEQ ID NO: 2035653 - DNA, 25 bp, Homo sapien
caaagaggctttcttgcagaagggg

SEQ ID NO: 2035654 - DNA, 25 bp, Homo sapien
aagaggctttcttgcagaagggggg

SEQ ID NO: 2035655 - DNA, 25 bp, Homo sapien
ccgccgccacaactcttgcacacgt

SEQ ID NO: 2035656 - DNA, 25 bp, Homo sapien
tgcccgccgccacaactcttgcaca

SEQ ID NO: 2035657 - DNA, 25 bp, Homo sapien
tgcgtttgtggtagtcctctgcccg

SEQ ID NO: 2035658 - DNA, 25 bp, Homo sapien
tctgcccgccgccacaactcttgca

SEQ ID NO: 2035659 - DNA, 25 bp, Homo sapien
ttctgcatgctcacattctttcatg

SEQ ID NO: 2035660 - DNA, 25 bp, Homo sapien
tccttttctgcatgctcacattctt

SEQ ID NO: 2035661 - DNA, 25 bp, Homo sapien
ctctccttttctgcatgctcacatt

SEQ ID NO: 2035662 - DNA, 25 bp, Homo sapien
cttttctgcatgctcacattctttc

SEQ ID NO: 2035663 - DNA, 25 bp, Homo sapien
gagtaatgacgtctttcaggccaat

SEQ ID NO: 2035664 - DNA, 25 bp, Homo sapien
tagagtaatgacgtctttcaggcca

SEQ ID NO: 2035665 - DNA, 25 bp, Homo sapien
tgacgtctttcaggccaattttatt

SEQ ID NO: 2035666 - DNA, 25 bp, Homo sapien
gtaatgacgtctttcaggccaattt

SEQ ID NO: 2035667 - DNA, 25 bp, Homo sapien
tctttgtgtgcatacaaatggacct

SEQ ID NO: 2035668 - DNA, 25 bp, Homo sapien
tcttttctttgtgtgcatacaaatg

SEQ ID NO: 2035669 - DNA, 25 bp, Homo sapien
tttgtgtgcatacaaatggacctca

SEQ ID NO: 2035670 - DNA, 25 bp, Homo sapien
tttctttgtgtgcatacaaatggac

SEQ ID NO: 2035671 - DNA, 25 bp, Homo sapien
tatggggactccaacagagccatac

SEQ ID NO: 2035672 - DNA, 25 bp, Homo sapien
tgagggcaagaagctgttctttccc

SEQ ID NO: 2035673 - DNA, 25 bp, Homo sapien
gaaacctgagggcaagaagctgttc

SEQ ID NO: 2035674 - DNA, 25 bp, Homo sapien
aaactcatttccacactatggggac

SEQ ID NO: 2035675 - DNA, 25 bp, Homo sapien
tcgagaccacaagatagtcttcagg

SEQ ID NO: 2035676 - DNA, 25 bp, Homo sapien
tgtccatttcgagaccacaagatag

SEQ ID NO: 2035677 - DNA, 25 bp, Homo sapien
ccatcatgtccatttcgagaccaca

SEQ ID NO: 2035678 - DNA, 25 bp, Homo sapien
catttcgagaccacaagatagtctt

SEQ ID NO: 2035679 - DNA, 25 bp, Homo sapien
tcattgaggctggtttgaacttaac

SEQ ID NO: 2035680 - DNA, 25 bp, Homo sapien
ggagtgtcactctcaaccatgctga

SEQ ID NO: 2035681 - DNA, 25 bp, Homo sapien
cactaatgactgaattcccaccaag

SEQ ID NO: 2035682 - DNA, 25 bp, Homo sapien
tctgtccctgctctactcagagttc

SEQ ID NO: 2035683 - DNA, 25 bp, Homo sapien
aactgtccagaggataatgaaaact

SEQ ID NO: 2035684 - DNA, 25 bp, Homo sapien
aaactgtccagaggataatgaaaac

SEQ ID NO: 2035685 - DNA, 25 bp, Homo sapien
taaactgtccagaggataatgaaaa

SEQ ID NO: 2035686 - DNA, 25 bp, Homo sapien
caaagaggagccaaaagagcatcca

SEQ ID NO: 2035687 - DNA, 25 bp, Homo sapien
taaattccagcaggagcccaaagag

SEQ ID NO: 2035688 - DNA, 25 bp, Homo sapien
agcccaaagaggagccaaaagagca

SEQ ID NO: 2035689 - DNA, 25 bp, Homo sapien
gcactgatggctgataaattccagc

SEQ ID NO: 2035690 - DNA, 25 bp, Homo sapien
agcctccgctcagccattcatatcc

SEQ ID NO: 2035691 - DNA, 25 bp, Homo sapien
cattcatatcctaagcaacaaaaca

SEQ ID NO: 2035692 - DNA, 25 bp, Homo sapien
tccgctcagccattcatatcctaag

SEQ ID NO: 2035693 - DNA, 25 bp, Homo sapien
tcagccattcatatcctaagcaaca

SEQ ID NO: 2035694 - DNA, 25 bp, Homo sapien
acccgtgtacctgagtgtcatcacc

SEQ ID NO: 2035695 - DNA, 25 bp, Homo sapien
gcatgcatgcaaagaccgtctgagg

SEQ ID NO: 2035696 - DNA, 25 bp, Homo sapien
gcacccgtgtacctgagtgtcatca

SEQ ID NO: 2035697 - DNA, 25 bp, Homo sapien
tgagcacccgtgtacctgagtgtca

SEQ ID NO: 2035698 - DNA, 25 bp, Homo sapien
ggatccatcggaggtggcaggtgta

SEQ ID NO: 2035699 - DNA, 25 bp, Homo sapien
gatccatcggaggtggcaggtgtag

SEQ ID NO: 2035700 - DNA, 25 bp, Homo sapien
gtggatccatcggaggtggcaggtg

SEQ ID NO: 2035701 - DNA, 25 bp, Homo sapien
atccatcggaggtggcaggtgtagg

SEQ ID NO: 2035702 - DNA, 25 bp, Homo sapien
ttacatccgaccaaactgctttttc

SEQ ID NO: 2035703 - DNA, 25 bp, Homo sapien
ctactctgtttaatcatgctggtga

SEQ ID NO: 2035704 - DNA, 25 bp, Homo sapien
agtctactctgtttaatcatgctgg

SEQ ID NO: 2035705 - DNA, 25 bp, Homo sapien
tgaagtctactctgtttaatcatgc

SEQ ID NO: 2035706 - DNA, 25 bp, Homo sapien
aggtactcgcatgggcatgtcactg

SEQ ID NO: 2035707 - DNA, 25 bp, Homo sapien
ctcaggtactcgcatgggcatgtca

SEQ ID NO: 2035708 - DNA, 25 bp, Homo sapien
tcctcaggtactcgcatgggcatgt

SEQ ID NO: 2035709 - DNA, 25 bp, Homo sapien
cttcctcaggtactcgcatgggcat

SEQ ID NO: 2035710 - DNA, 25 bp, Homo sapien
ctgatctcgtgatctccgcgcctcg

SEQ ID NO: 2035711 - DNA, 25 bp, Homo sapien
ttgtaatccgcctgcctcggcctcc

SEQ ID NO: 2035712 - DNA, 25 bp, Homo sapien
tgtgcccagcctaatttttgcattt

SEQ ID NO: 2035713 - DNA, 25 bp, Homo sapien
catttttagtagagaggaggtttca

SEQ ID NO: 2035714 - DNA, 25 bp, Homo sapien
caataaacattaaaactcatcaaat

SEQ ID NO: 2035715 - DNA, 25 bp, Homo sapien
atacaataaacattaaaactcatca

SEQ ID NO: 2035716 - DNA, 25 bp, Homo sapien
ataaacattaaaactcatcaaatta

SEQ ID NO: 2035717 - DNA, 25 bp, Homo sapien
tacaataaacattaaaactcatcaa

SEQ ID NO: 2035718 - DNA, 25 bp, Homo sapien
aatgcacagatgatttctcagcaac

SEQ ID NO: 2035719 - DNA, 25 bp, Homo sapien
gagaaagaacatcctacacacagtc

SEQ ID NO: 2035720 - DNA, 25 bp, Homo sapien
cacagtcctgaaggatcgcttctat

SEQ ID NO: 2035721 - DNA, 25 bp, Homo sapien
tccatccatcttcagaggtgacaaa

SEQ ID NO: 2035722 - DNA, 25 bp, Homo sapien
ccataaattcgcttgtttatatatt

SEQ ID NO: 2035723 - DNA, 25 bp, Homo sapien
ccacatcaagggcataaaaagcaag

SEQ ID NO: 2035724 - DNA, 25 bp, Homo sapien
tatatatttcatgtggcaaccaggc

SEQ ID NO: 2035725 - DNA, 25 bp, Homo sapien
ccccgacagtaagtgggataggctg

SEQ ID NO: 2035726 - DNA, 25 bp, Homo sapien
tgcttttacaggatgagactttggg

SEQ ID NO: 2035727 - DNA, 25 bp, Homo sapien
cacttgggcctgattcagatcttga

SEQ ID NO: 2035728 - DNA, 25 bp, Homo sapien
catgcaggaaggacatgagtcactg

SEQ ID NO: 2035729 - DNA, 25 bp, Homo sapien
tggagtatgacttcgcaggctaggt

SEQ ID NO: 2035730 - DNA, 25 bp, Homo sapien
aaaatccacctacactcctaccaca

SEQ ID NO: 2035731 - DNA, 25 bp, Homo sapien
cctaccacagtgatagttggtttta

SEQ ID NO: 2035732 - DNA, 25 bp, Homo sapien
cttaataaataagacgagaggattt

SEQ ID NO: 2035733 - DNA, 25 bp, Homo sapien
acctacactcctaccacagtgatag

SEQ ID NO: 2035734 - DNA, 25 bp, Homo sapien
ttggatattctcatgagcccactcc

SEQ ID NO: 2035735 - DNA, 25 bp, Homo sapien
tattccacagactttacgtgtatca

SEQ ID NO: 2035736 - DNA, 25 bp, Homo sapien
tctttgctcgcttaatggtacatct

SEQ ID NO: 2035737 - DNA, 25 bp, Homo sapien
tccaccgggagtaaggaaggacaca

SEQ ID NO: 2035738 - DNA, 25 bp, Homo sapien
tgcccatgccttcgcagcgctggag

SEQ ID NO: 2035739 - DNA, 25 bp, Homo sapien
gagtggtgcccatgccttcgcagcg

SEQ ID NO: 2035740 - DNA, 25 bp, Homo sapien
ggtgacttctgaggcgggtaaataa

SEQ ID NO: 2035741 - DNA, 25 bp, Homo sapien
cctgggtgcacattggctggttcca

SEQ ID NO: 2035742 - DNA, 25 bp, Homo sapien
cttaagtgagagtgaaatggaatcc

SEQ ID NO: 2035743 - DNA, 25 bp, Homo sapien
ctcatctgcagggcccctccaaccc

SEQ ID NO: 2035744 - DNA, 25 bp, Homo sapien
tggccgctctcatctgcagggcccc

SEQ ID NO: 2035745 - DNA, 25 bp, Homo sapien
atctgcagggcccctccaaccccac

SEQ ID NO: 2035746 - DNA, 25 bp, Homo sapien
ctggccgctctcatctgcagggccc

SEQ ID NO: 2035747 - DNA, 25 bp, Homo sapien
caagtagctcagatctaccctgcat

SEQ ID NO: 2035748 - DNA, 25 bp, Homo sapien
aagctccccagcaagtagctcagat

SEQ ID NO: 2035749 - DNA, 25 bp, Homo sapien
cttggcagacttctagggcaagctc

SEQ ID NO: 2035750 - DNA, 25 bp, Homo sapien
tccccagcaagtagctcagatctac

SEQ ID NO: 2035751 - DNA, 25 bp, Homo sapien
cctcttctgctcccgtggtggcagg

SEQ ID NO: 2035752 - DNA, 25 bp, Homo sapien
tgcctcttctgctcccgtggtggca

SEQ ID NO: 2035753 - DNA, 25 bp, Homo sapien
gcaggatggggagcaaaaccgaaaa

SEQ ID NO: 2035754 - DNA, 25 bp, Homo sapien
cttctgctcccgtggtggcaggatg

SEQ ID NO: 2035755 - DNA, 25 bp, Homo sapien
tccaaaggacacaacaccctgtgcc

SEQ ID NO: 2035756 - DNA, 25 bp, Homo sapien
tgtgccatggggtttccacgaagat

SEQ ID NO: 2035757 - DNA, 25 bp, Homo sapien
gccatggggtttccacgaagataca

SEQ ID NO: 2035758 - DNA, 25 bp, Homo sapien
aaggacacaacaccctgtgccatgg

SEQ ID NO: 2035759 - DNA, 25 bp, Homo sapien
tttgctgagccctagacgacatctg

SEQ ID NO: 2035760 - DNA, 25 bp, Homo sapien
cacttgagagatgccttggtccagc

SEQ ID NO: 2035761 - DNA, 25 bp, Homo sapien
gactttatgcaccagatccctcagg

SEQ ID NO: 2035762 - DNA, 25 bp, Homo sapien
taccaagggtgttgtctgggctctc

SEQ ID NO: 2035763 - DNA, 25 bp, Homo sapien
cttccatgacacgtgggctgtcagt

SEQ ID NO: 2035764 - DNA, 25 bp, Homo sapien
ggctgtcagtgactctgttttcaaa

SEQ ID NO: 2035765 - DNA, 25 bp, Homo sapien
gagctcgtagtcttttccctctagg

SEQ ID NO: 2035766 - DNA, 25 bp, Homo sapien
gttttcaaatcgcagcaagagctcg

SEQ ID NO: 2035767 - DNA, 25 bp, Homo sapien
gggtcaggttggggacagccctcat

SEQ ID NO: 2035768 - DNA, 25 bp, Homo sapien
tgggtcaggttggggacagccctca

SEQ ID NO: 2035769 - DNA, 25 bp, Homo sapien
ttagtgacaccaggaaccaggctgc

SEQ ID NO: 2035770 - DNA, 25 bp, Homo sapien
tccttgctgttcagtgtgggccctt

SEQ ID NO: 2035771 - DNA, 25 bp, Homo sapien
aaggcccttccctaggctcagcagc

SEQ ID NO: 2035772 - DNA, 25 bp, Homo sapien
tcagtagcagcctctgtgtgcgtcc

SEQ ID NO: 2035773 - DNA, 25 bp, Homo sapien
ttgtttctcgaacggccgcctggtg

SEQ ID NO: 2035774 - DNA, 25 bp, Homo sapien
aaggaagtagtgttgtctggtccgc

SEQ ID NO: 2035775 - DNA, 25 bp, Homo sapien
ctggcgagggaaaggctcctgcaat

SEQ ID NO: 2035776 - DNA, 25 bp, Homo sapien
aagagaagactctgatctgtgctca

SEQ ID NO: 2035777 - DNA, 25 bp, Homo sapien
gacaaatattcccagcgcatctcct

SEQ ID NO: 2035778 - DNA, 25 bp, Homo sapien
gcttgagaaggtgtggcctaacccc

SEQ ID NO: 2035779 - DNA, 25 bp, Homo sapien
cgcaggtacaaggataggctcagcc

SEQ ID NO: 2035780 - DNA, 25 bp, Homo sapien
ggagttatctttcgctttcatgacg

SEQ ID NO: 2035781 - DNA, 25 bp, Homo sapien
ccaggcccaggtccttagatgatgg

SEQ ID NO: 2035782 - DNA, 25 bp, Homo sapien
gagagtttatactaaccccaccaga

SEQ ID NO: 2035783 - DNA, 25 bp, Homo sapien
tattatcgcagtgggagcattgtgc

SEQ ID NO: 2035784 - DNA, 25 bp, Homo sapien
tagtaatctaagaccacagcagtgg

SEQ ID NO: 2035785 - DNA, 25 bp, Homo sapien
cccgtcaggaacgtgtgtgggttga

SEQ ID NO: 2035786 - DNA, 25 bp, Homo sapien
tcagcccgtcaggaacgtgtgtggg

SEQ ID NO: 2035787 - DNA, 25 bp, Homo sapien
cccggatgcaccggccagagggaca

SEQ ID NO: 2035788 - DNA, 25 bp, Homo sapien
aacgtgtgtgggttgagaggctgtg

SEQ ID NO: 2035789 - DNA, 25 bp, Homo sapien
tctcagtaacggagggcaggtgcca

SEQ ID NO: 2035790 - DNA, 25 bp, Homo sapien
tacaacgccaagttcgaggccacag

SEQ ID NO: 2035791 - DNA, 25 bp, Homo sapien
gtacaacactgcaaacgccaagctg

SEQ ID NO: 2035792 - DNA, 25 bp, Homo sapien
agctgccggctctggccctattgga

SEQ ID NO: 2035793 - DNA, 25 bp, Homo sapien
ggagggggcgcacgtccgacggctg

SEQ ID NO: 2035794 - DNA, 25 bp, Homo sapien
gctgaggaatagcagggcgcgagcc

SEQ ID NO: 2035795 - DNA, 25 bp, Homo sapien
cacgtccgacggctgaggaatagca

SEQ ID NO: 2035796 - DNA, 25 bp, Homo sapien
tgaggaatagcagggcgcgagccgg

SEQ ID NO: 2035797 - DNA, 25 bp, Homo sapien
gatgaaaaagaacgacgcgaggcca

SEQ ID NO: 2035798 - DNA, 25 bp, Homo sapien
gaagcagttgcagaaagagcgcctg

SEQ ID NO: 2035799 - DNA, 25 bp, Homo sapien
gaagaccagggcgtcgatgaaaaag

SEQ ID NO: 2035800 - DNA, 25 bp, Homo sapien
tgtttgggcggcaacagcaagacga

SEQ ID NO: 2035801 - DNA, 25 bp, Homo sapien
agtcaggaggcaccctgtgtggcta

SEQ ID NO: 2035802 - DNA, 25 bp, Homo sapien
tggctaacgtctgagtgttcggtca

SEQ ID NO: 2035803 - DNA, 25 bp, Homo sapien
agtgttcggtcagtgtgcaggcaaa

SEQ ID NO: 2035804 - DNA, 25 bp, Homo sapien
ccctgtgtggctaacgtctgagtgt

SEQ ID NO: 2035805 - DNA, 25 bp, Homo sapien
caccatttcggcttggcctgtgtcc

SEQ ID NO: 2035806 - DNA, 25 bp, Homo sapien
cacaggttctcatgtgggagtcccc

SEQ ID NO: 2035807 - DNA, 25 bp, Homo sapien
ggctctctggcaggttaccatggac

SEQ ID NO: 2035808 - DNA, 25 bp, Homo sapien
ctgtggctggcctagtctcaggttc

SEQ ID NO: 2035809 - DNA, 25 bp, Homo sapien
gaacgcctgtgtcttaggctcaggg

SEQ ID NO: 2035810 - DNA, 25 bp, Homo sapien
tatagggcctaacagaagtcccact

SEQ ID NO: 2035811 - DNA, 25 bp, Homo sapien
tcagggctgccgtattgattctata

SEQ ID NO: 2035812 - DNA, 25 bp, Homo sapien
gttgctggaagcagtgaacgcctgt

SEQ ID NO: 2035813 - DNA, 25 bp, Homo sapien
gccacatggaggtcccgaagctctt

SEQ ID NO: 2035814 - DNA, 25 bp, Homo sapien
cacagagtagtccataagcaacagt

SEQ ID NO: 2035815 - DNA, 25 bp, Homo sapien
ctgtctttcccgtgaaaggttgaca

SEQ ID NO: 2035816 - DNA, 25 bp, Homo sapien
tagttggcgaagatggaacgtggct

SEQ ID NO: 2035817 - DNA, 25 bp, Homo sapien
catgcagctggcgtcacactgagct

SEQ ID NO: 2035818 - DNA, 25 bp, Homo sapien
tgaatcttccttgaatgggacgggc

SEQ ID NO: 2035819 - DNA, 25 bp, Homo sapien
cagtgcttcagggtgggtggcacct

SEQ ID NO: 2035820 - DNA, 25 bp, Homo sapien
gggcaggtggacatagagaggacag

SEQ ID NO: 2035821 - DNA, 25 bp, Homo sapien
tgcctctgagcacccttatacttgt

SEQ ID NO: 2035822 - DNA, 25 bp, Homo sapien
tgctctctgtgcaccttatgcttgc

SEQ ID NO: 2035823 - DNA, 25 bp, Homo sapien
acttgtacccctgccgctgtgcacc

SEQ ID NO: 2035824 - DNA, 25 bp, Homo sapien
acccctgccgctgtgcacccttttg

SEQ ID NO: 2035825 - DNA, 25 bp, Homo sapien
acatccctgtcctgcgaagacagca

SEQ ID NO: 2035826 - DNA, 25 bp, Homo sapien
cattgccatcgagtggtaggtatcc

SEQ ID NO: 2035827 - DNA, 25 bp, Homo sapien
gacagcattgccatcgagtggtagg

SEQ ID NO: 2035828 - DNA, 25 bp, Homo sapien
ttacatccctgtcctgcgaagacag

SEQ ID NO: 2035829 - DNA, 25 bp, Homo sapien
tcctgcggcagagcctgagtggcca

SEQ ID NO: 2035830 - DNA, 25 bp, Homo sapien
ctgatggacagcacctcttcctgcg

SEQ ID NO: 2035831 - DNA, 25 bp, Homo sapien
ttcctgcggcagagcctgagtggcc

SEQ ID NO: 2035832 - DNA, 25 bp, Homo sapien
atggacagcacctcttcctgcggca

SEQ ID NO: 2035833 - DNA, 25 bp, Homo sapien
gggaatgaaaccaaccacgtggcca

SEQ ID NO: 2035834 - DNA, 25 bp, Homo sapien
gaggtgtccgccctaatgggcctta

SEQ ID NO: 2035835 - DNA, 25 bp, Homo sapien
ggtgttgcggcagccaactgtgttc

SEQ ID NO: 2035836 - DNA, 25 bp, Homo sapien
ctcccagtgctgacaagagcctgtt

SEQ ID NO: 2035837 - DNA, 25 bp, Homo sapien
cagccacaggaatgggaaccgctag

SEQ ID NO: 2035838 - DNA, 25 bp, Homo sapien
caggctcccctgttgagcagtgaag

SEQ ID NO: 2035839 - DNA, 25 bp, Homo sapien
ttccatagccatagcagaacaggct

SEQ ID NO: 2035840 - DNA, 25 bp, Homo sapien
gaaccgctaggtgtttttccatagc

SEQ ID NO: 2035841 - DNA, 25 bp, Homo sapien
caacctgtcctgaaactgagcaacc

SEQ ID NO: 2035842 - DNA, 25 bp, Homo sapien
aactgagcaacctctccctttttgg

SEQ ID NO: 2035843 - DNA, 25 bp, Homo sapien
tcctgaaactgagcaacctctccct

SEQ ID NO: 2035844 - DNA, 25 bp, Homo sapien
gagacctttccaacctgtcctgaaa

SEQ ID NO: 2035845 - DNA, 25 bp, Homo sapien
gattctgtgtgaggcgtcagtctgt

SEQ ID NO: 2035846 - DNA, 25 bp, Homo sapien
aagagctccctgtgttgaaggtctg

SEQ ID NO: 2035847 - DNA, 25 bp, Homo sapien
agcatgattctgtgtgaggcgtcag

SEQ ID NO: 2035848 - DNA, 25 bp, Homo sapien
aggcgtcagtctgtgtgtctggcca

SEQ ID NO: 2035849 - DNA, 25 bp, Homo sapien
ggtgctttctcttccgcaggcttct

SEQ ID NO: 2035850 - DNA, 25 bp, Homo sapien
ttgcggcccattaactgtccttcca

SEQ ID NO: 2035851 - DNA, 25 bp, Homo sapien
acatagacgtcctcctgttgaggga

SEQ ID NO: 2035852 - DNA, 25 bp, Homo sapien
tgtgcccagcattgcggcccattaa

SEQ ID NO: 2035853 - DNA, 25 bp, Homo sapien
ctttgatattcacatagacgtcctc

SEQ ID NO: 2035854 - DNA, 25 bp, Homo sapien
agcgcctctgcccgttttactgctg

SEQ ID NO: 2035855 - DNA, 25 bp, Homo sapien
tctgcccgttttactgctgtccctc

SEQ ID NO: 2035856 - DNA, 25 bp, Homo sapien
tgcccgttttactgctgtccctctt

SEQ ID NO: 2035857 - DNA, 25 bp, Homo sapien
tccaaagcaaaagagcgcctctgcc

SEQ ID NO: 2035858 - DNA, 25 bp, Homo sapien
aagccacaacgccacattcctgggt

SEQ ID NO: 2035859 - DNA, 25 bp, Homo sapien
ggctgatcgccacactcttgactgc

SEQ ID NO: 2035860 - DNA, 25 bp, Homo sapien
cttgactgccccacggctgtgcttg

SEQ ID NO: 2035861 - DNA, 25 bp, Homo sapien
caccattgaaatccgggccttgcca

SEQ ID NO: 2035862 - DNA, 25 bp, Homo sapien
cctttactgggttaatgggagcatc

SEQ ID NO: 2035863 - DNA, 25 bp, Homo sapien
cttggatggctcttcgaaggaaatc

SEQ ID NO: 2035864 - DNA, 25 bp, Homo sapien
tcatggccaacttgataacggcata

SEQ ID NO: 2035865 - DNA, 25 bp, Homo sapien
gcaggattgatctttacacgtgtgt

SEQ ID NO: 2035866 - DNA, 25 bp, Homo sapien
aggatgtcccatgctcagtccgcag

SEQ ID NO: 2035867 - DNA, 25 bp, Homo sapien
tgcaaacaccctcagaggaccgtag

SEQ ID NO: 2035868 - DNA, 25 bp, Homo sapien
tagtaaagcatcgagaatggagcgc

SEQ ID NO: 2035869 - DNA, 25 bp, Homo sapien
cgcgcttggcaaggcaaagtatagt

SEQ ID NO: 2035870 - DNA, 25 bp, Homo sapien
tctggaagctggtattgagccaaag

SEQ ID NO: 2035871 - DNA, 25 bp, Homo sapien
gccttcaggcgtttcaactttgcca

SEQ ID NO: 2035872 - DNA, 25 bp, Homo sapien
gtttactccactcgtaccttgtcca

SEQ ID NO: 2035873 - DNA, 25 bp, Homo sapien
ggtattgagccaaaggccctatggg

SEQ ID NO: 2035874 - DNA, 25 bp, Homo sapien
cttagatgacggttgagtttttcgc

SEQ ID NO: 2035875 - DNA, 25 bp, Homo sapien
tctctatggctatattgataagaac

SEQ ID NO: 2035876 - DNA, 25 bp, Homo sapien
gtttttcgctggactcaacatccag

SEQ ID NO: 2035877 - DNA, 25 bp, Homo sapien
gaattcagtggtcttagatgacggt

SEQ ID NO: 2035878 - DNA, 25 bp, Homo sapien
caaaggagccgtccgactatgtcta

SEQ ID NO: 2035879 - DNA, 25 bp, Homo sapien
catggaagttgcgaggatacacgcc

SEQ ID NO: 2035880 - DNA, 25 bp, Homo sapien
ccaaagaactgagtaggagtgccaa

SEQ ID NO: 2035881 - DNA, 25 bp, Homo sapien
tcaacctgaagttcgcggccaaaga

SEQ ID NO: 2035882 - DNA, 25 bp, Homo sapien
caaggtgaccaagtcgatggctggt

SEQ ID NO: 2035883 - DNA, 25 bp, Homo sapien
tgtggttaagtcgatggatgcgaca

SEQ ID NO: 2035884 - DNA, 25 bp, Homo sapien
cggcggtgacgatgggcaaggtgac

SEQ ID NO: 2035885 - DNA, 25 bp, Homo sapien
cgacattgaagaccatgaatctgga

SEQ ID NO: 2035886 - DNA, 25 bp, Homo sapien
gctgaaatgcccttctacctttggg

SEQ ID NO: 2035887 - DNA, 25 bp, Homo sapien
gatcaagtgtgacggcagaacccgc

SEQ ID NO: 2035888 - DNA, 25 bp, Homo sapien
tgaactgtctcagagactggcccgc

SEQ ID NO: 2035889 - DNA, 25 bp, Homo sapien
tggccatagccaccctttgaaatgc

SEQ ID NO: 2035890 - DNA, 25 bp, Homo sapien
tagtatctagaatggcaggtggtgc

SEQ ID NO: 2035891 - DNA, 25 bp, Homo sapien
tgtattcggtggactgtgctatttc

SEQ ID NO: 2035892 - DNA, 25 bp, Homo sapien
tgtattcagtttcctgcccagaatg

SEQ ID NO: 2035893 - DNA, 25 bp, Homo sapien
tataaacaccatgcagtgtattcgg

SEQ ID NO: 2035894 - DNA, 25 bp, Homo sapien
aatgacacaggatctgagaggccaa

SEQ ID NO: 2035895 - DNA, 25 bp, Homo sapien
gtcatggcagttagaagtggcttcc

SEQ ID NO: 2035896 - DNA, 25 bp, Homo sapien
tgtgaaacagtaagtgccggaggaa

SEQ ID NO: 2035897 - DNA, 25 bp, Homo sapien
cagcagggtttaatctcaggtttca

SEQ ID NO: 2035898 - DNA, 25 bp, Homo sapien
cagctgcacatgctgacgcagtggg

SEQ ID NO: 2035899 - DNA, 25 bp, Homo sapien
cagtgggtctgccagtgacgccgat

SEQ ID NO: 2035900 - DNA, 25 bp, Homo sapien
cgccgatatgctgcgagtctgggaa

SEQ ID NO: 2035901 - DNA, 25 bp, Homo sapien
cagtgacgccgatatgctgcgagtc

SEQ ID NO: 2035902 - DNA, 25 bp, Homo sapien
agagctcccgtcccaccccggcaga

SEQ ID NO: 2035903 - DNA, 25 bp, Homo sapien
gagctcccgtcccaccccggcagaa

SEQ ID NO: 2035904 - DNA, 25 bp, Homo sapien
gctcctttgttgctggatggtcagg

SEQ ID NO: 2035905 - DNA, 25 bp, Homo sapien
tttgttgctggatggtcaggaactc

SEQ ID NO: 2035906 - DNA, 25 bp, Homo sapien
tgctcctttgttgctggatggtcag

SEQ ID NO: 2035907 - DNA, 25 bp, Homo sapien
cctttgttgctggatggtcaggaac

SEQ ID NO: 2035908 - DNA, 25 bp, Homo sapien
gcacctattccaaagacaccactgg

SEQ ID NO: 2035909 - DNA, 25 bp, Homo sapien
cactggctgatcagggtccctttgg

SEQ ID NO: 2035910 - DNA, 25 bp, Homo sapien
tttggcctctcaatagccctgtcac

SEQ ID NO: 2035911 - DNA, 25 bp, Homo sapien
tggtgcgcagtagcacctcccagag

SEQ ID NO: 2035912 - DNA, 25 bp, Homo sapien
ccagccaactggcatggcaggcagg

SEQ ID NO: 2035913 - DNA, 25 bp, Homo sapien
agggagccagcgcagcctccaggcc

SEQ ID NO: 2035914 - DNA, 25 bp, Homo sapien
aggcagggagccagcgcagcctcca

SEQ ID NO: 2035915 - DNA, 25 bp, Homo sapien
caaaggacagaaccagccaactggc

SEQ ID NO: 2035916 - DNA, 25 bp, Homo sapien
tactggaggctgaaatgtcaaagat

SEQ ID NO: 2035917 - DNA, 25 bp, Homo sapien
tcaaagattaagacaccggccgatt

SEQ ID NO: 2035918 - DNA, 25 bp, Homo sapien
tgcttcatagatggcactgtctcat

SEQ ID NO: 2035919 - DNA, 25 bp, Homo sapien
aggctgcccctcttgatattgttgc

SEQ ID NO: 2035920 - DNA, 25 bp, Homo sapien
tccagcggatgcacctcaagcagta

SEQ ID NO: 2035921 - DNA, 25 bp, Homo sapien
caccggtgacggcaaacattactgc

SEQ ID NO: 2035922 - DNA, 25 bp, Homo sapien
tgttgtcattgaatacggcctcccg

SEQ ID NO: 2035923 - DNA, 25 bp, Homo sapien
ggtcctcggccgatgcttgcattga

SEQ ID NO: 2035924 - DNA, 25 bp, Homo sapien
gaactggtgtagcaatgatgcttca

SEQ ID NO: 2035925 - DNA, 25 bp, Homo sapien
tacggctctttctcacacttgcaag

SEQ ID NO: 2035926 - DNA, 25 bp, Homo sapien
caatgtttgtgtctggcctaggaga

SEQ ID NO: 2035927 - DNA, 25 bp, Homo sapien
tctagagaagtgacagcctacatta

SEQ ID NO: 2035928 - DNA, 25 bp, Homo sapien
cattaacagatgtagcaacgtggtc

SEQ ID NO: 2035929 - DNA, 25 bp, Homo sapien
tgcccggccacatctgtacttttaa

SEQ ID NO: 2035930 - DNA, 25 bp, Homo sapien
tttcaggtaccaaaagccatatccc

SEQ ID NO: 2035931 - DNA, 25 bp, Homo sapien
gggtacagctttacagtacatagga

SEQ ID NO: 2035932 - DNA, 25 bp, Homo sapien
caaggactgtcgtgcatgtgagtga

SEQ ID NO: 2035933 - DNA, 25 bp, Homo sapien
tactgtacagatgcaacctttgatg

SEQ ID NO: 2035934 - DNA, 25 bp, Homo sapien
tgctgtgcagagagacggcctgtaa

SEQ ID NO: 2035935 - DNA, 25 bp, Homo sapien
tgatatttataatggcgcctgctct

SEQ ID NO: 2035936 - DNA, 25 bp, Homo sapien
tcatcttgtcttacgctttccgagc

SEQ ID NO: 2035937 - DNA, 25 bp, Homo sapien
gctttccgagcaagttcaaaccaga

SEQ ID NO: 2035938 - DNA, 25 bp, Homo sapien
ttgtcttacgctttccgagcaagtt

SEQ ID NO: 2035939 - DNA, 25 bp, Homo sapien
tacgctttccgagcaagttcaaacc

SEQ ID NO: 2035940 - DNA, 25 bp, Homo sapien
ccacatcctcacgtgggaggtagca

SEQ ID NO: 2035941 - DNA, 25 bp, Homo sapien
cttggagagggtgtagtctgtgggc

SEQ ID NO: 2035942 - DNA, 25 bp, Homo sapien
cctcacgtgggaggtagcacttgga

SEQ ID NO: 2035943 - DNA, 25 bp, Homo sapien
tgtagtctgtgggcgtgatgctacc

SEQ ID NO: 2035944 - DNA, 25 bp, Homo sapien
agttccagggtcatcggtcagcgag

SEQ ID NO: 2035945 - DNA, 25 bp, Homo sapien
gggggatccataacagagattcaga

SEQ ID NO: 2035946 - DNA, 25 bp, Homo sapien
actgggttcccatcaaatatagtgg

SEQ ID NO: 2035947 - DNA, 25 bp, Homo sapien
ttcagagaggcaccgtggagttcca

SEQ ID NO: 2035948 - DNA, 25 bp, Homo sapien
ccaggtcgtctccatgggcttttct

SEQ ID NO: 2035949 - DNA, 25 bp, Homo sapien
ttgcagatacttttatgtggaacaa

SEQ ID NO: 2035950 - DNA, 25 bp, Homo sapien
tagaaatacatgtgtccaggtcgtc

SEQ ID NO: 2035951 - DNA, 25 bp, Homo sapien
gatacttttatgtggaacaacagtg

SEQ ID NO: 2035952 - DNA, 25 bp, Homo sapien
taaagtccacctggacggtgccctg

SEQ ID NO: 2035953 - DNA, 25 bp, Homo sapien
taactgcccaggaatgtcatgctga

SEQ ID NO: 2035954 - DNA, 25 bp, Homo sapien
aacgcccagtggtcattaagtgaaa

SEQ ID NO: 2035955 - DNA, 25 bp, Homo sapien
catggctgaaaggagttaaaacgcc

SEQ ID NO: 2035956 - DNA, 25 bp, Homo sapien
acgctgagctcggggactcggcccc

SEQ ID NO: 2035957 - DNA, 25 bp, Homo sapien
tgcgtgtggccactgagaaccaggc

SEQ ID NO: 2035958 - DNA, 25 bp, Homo sapien
ccgtggtgcacctcgcaggcgctgt

SEQ ID NO: 2035959 - DNA, 25 bp, Homo sapien
caactgaaagatgggacgctgagct

SEQ ID NO: 2035960 - DNA, 25 bp, Homo sapien
cactaaatcaaaggtaaggtcagcc

SEQ ID NO: 2035961 - DNA, 25 bp, Homo sapien
tgaattagcatcacgacaccctggc

SEQ ID NO: 2035962 - DNA, 25 bp, Homo sapien
ctgacagtggccgagaagacagcaa

SEQ ID NO: 2035963 - DNA, 25 bp, Homo sapien
ccccaggtgataactaagtcatgaa

SEQ ID NO: 2035964 - DNA, 25 bp, Homo sapien
cacttctccgatacagaggataatg

SEQ ID NO: 2035965 - DNA, 25 bp, Homo sapien
ctcccgtgaaagcacgtcatagttc

SEQ ID NO: 2035966 - DNA, 25 bp, Homo sapien
acgtcatagttctccttaaatggga

SEQ ID NO: 2035967 - DNA, 25 bp, Homo sapien
ccccagaacagttagcatcacttct

SEQ ID NO: 2035968 - DNA, 25 bp, Homo sapien
cggctatcgtgaaaccacaggctgc

SEQ ID NO: 2035969 - DNA, 25 bp, Homo sapien
gagttcaggcggctatcgtgaaacc

SEQ ID NO: 2035970 - DNA, 25 bp, Homo sapien
gagaggagttcaggcggctatcgtg

SEQ ID NO: 2035971 - DNA, 25 bp, Homo sapien
tcaggcggctatcgtgaaaccacag

SEQ ID NO: 2035972 - DNA, 25 bp, Homo sapien
ggaggacaggggcagacgtgggcag

SEQ ID NO: 2035973 - DNA, 25 bp, Homo sapien
caggaggacaggggcagacgtgggc

SEQ ID NO: 2035974 - DNA, 25 bp, Homo sapien
agaggcccaggtccacaccggctgg

SEQ ID NO: 2035975 - DNA, 25 bp, Homo sapien
gtccacaccggctggagccacgtgc

SEQ ID NO: 2035976 - DNA, 25 bp, Homo sapien
tacaagtcaggccattaatccgcac

SEQ ID NO: 2035977 - DNA, 25 bp, Homo sapien
ctgggtacaagtcaggccattaatc

SEQ ID NO: 2035978 - DNA, 25 bp, Homo sapien
caagtcaggccattaatccgcacac

SEQ ID NO: 2035979 - DNA, 25 bp, Homo sapien
gggtacaagtcaggccattaatccg

SEQ ID NO: 2035980 - DNA, 25 bp, Homo sapien
ctcatcaaagggcaagaagcgctag

SEQ ID NO: 2035981 - DNA, 25 bp, Homo sapien
gggctgagtgagcaaccgaagcgga

SEQ ID NO: 2035982 - DNA, 25 bp, Homo sapien
accgaagcggagcaacacgggacag

SEQ ID NO: 2035983 - DNA, 25 bp, Homo sapien
catcaaagggcaagaagcgctaggg

SEQ ID NO: 2035984 - DNA, 25 bp, Homo sapien
ctgtggcattcagatgctctcctac

SEQ ID NO: 2035985 - DNA, 25 bp, Homo sapien
agccatccccgttcagcgccacgct

SEQ ID NO: 2035986 - DNA, 25 bp, Homo sapien
cccgttcagcgccacgctgttgacc

SEQ ID NO: 2035987 - DNA, 25 bp, Homo sapien
acagccatccccgttcagcgccacg

SEQ ID NO: 2035988 - DNA, 25 bp, Homo sapien
catccccgttcagcgccacgctgtt

SEQ ID NO: 2035989 - DNA, 25 bp, Homo sapien
aagcgttctactttgtatgtgttca

SEQ ID NO: 2035990 - DNA, 25 bp, Homo sapien
gaacactttctcaaagcgttctact

SEQ ID NO: 2035991 - DNA, 25 bp, Homo sapien
aaacagtctttcagagctgaacact

SEQ ID NO: 2035992 - DNA, 25 bp, Homo sapien
tttcagagctgaacactttctcaaa

SEQ ID NO: 2035993 - DNA, 25 bp, Homo sapien
atggtttccagcaactaccttcagc

SEQ ID NO: 2035994 - DNA, 25 bp, Homo sapien
tcatggtttccagcaactaccttca

SEQ ID NO: 2035995 - DNA, 25 bp, Homo sapien
catggtttccagcaactaccttcag

SEQ ID NO: 2035996 - DNA, 25 bp, Homo sapien
aattacaattaatacttactgttat

SEQ ID NO: 2035997 - DNA, 25 bp, Homo sapien
acacttggccataatatgtcttttt

SEQ ID NO: 2035998 - DNA, 25 bp, Homo sapien
ggtggcattcccctatggctacaac

SEQ ID NO: 2035999 - DNA, 25 bp, Homo sapien
ttagatggctaggtgcggtgcctca

SEQ ID NO: 2036000 - DNA, 25 bp, Homo sapien
gatctgggcatgctataagaacagg

SEQ ID NO: 2036001 - DNA, 25 bp, Homo sapien
tagaccctggtggagaaatgcttca

SEQ ID NO: 2036002 - DNA, 25 bp, Homo sapien
tccataaaatctccagctcaagctg

SEQ ID NO: 2036003 - DNA, 25 bp, Homo sapien
cactgattcgtggattctctgggat

SEQ ID NO: 2036004 - DNA, 25 bp, Homo sapien
tgggatacttgtgctggacctcaca

SEQ ID NO: 2036005 - DNA, 25 bp, Homo sapien
ttagccaacctaactcaagattgag

SEQ ID NO: 2036006 - DNA, 25 bp, Homo sapien
cccaggatgaagacgacttccggct

SEQ ID NO: 2036007 - DNA, 25 bp, Homo sapien
cagagctgtctggaacgctctctcc

SEQ ID NO: 2036008 - DNA, 25 bp, Homo sapien
catcaaagatatcccccaggatgaa

SEQ ID NO: 2036009 - DNA, 25 bp, Homo sapien
gagctgtctggaacgctctctccat

SEQ ID NO: 2036010 - DNA, 25 bp, Homo sapien
tctctttcctaggtggaggctactt

SEQ ID NO: 2036011 - DNA, 25 bp, Homo sapien
gtctctttcctaggtggaggctact

SEQ ID NO: 2036012 - DNA, 25 bp, Homo sapien
ctgtaatttcaatgctttgggaggc

SEQ ID NO: 2036013 - DNA, 25 bp, Homo sapien
aggagttcaaaaccagcatgggcaa

SEQ ID NO: 2036014 - DNA, 25 bp, Homo sapien
aaccagcatgggcaacacagcaaaa

SEQ ID NO: 2036015 - DNA, 25 bp, Homo sapien
caaggagggaggatcacttgaggcc

SEQ ID NO: 2036016 - DNA, 25 bp, Homo sapien
tgaggagagggctataccgttttgc

SEQ ID NO: 2036017 - DNA, 25 bp, Homo sapien
gccataagccttgcctatgaggaga

SEQ ID NO: 2036018 - DNA, 25 bp, Homo sapien
cctaaatgtcctcctttgagaggaa

SEQ ID NO: 2036019 - DNA, 25 bp, Homo sapien
tcctcagtaaatggtaaattcaagg

SEQ ID NO: 2036020 - DNA, 25 bp, Homo sapien
ggcctaggaattccccaagcaaatg

SEQ ID NO: 2036021 - DNA, 25 bp, Homo sapien
cttcgtaatttgtccagccagtggc

SEQ ID NO: 2036022 - DNA, 25 bp, Homo sapien
caagcaaatgggtgtcagccaaaaa

SEQ ID NO: 2036023 - DNA, 25 bp, Homo sapien
agccagtggcctaggaattccccaa

SEQ ID NO: 2036024 - DNA, 25 bp, Homo sapien
gaggctgtggttttcacttcaggcc

SEQ ID NO: 2036025 - DNA, 25 bp, Homo sapien
cacaggctcacgtgtggtctgttca

SEQ ID NO: 2036026 - DNA, 25 bp, Homo sapien
agaggctgtggttttcacttcaggc

SEQ ID NO: 2036027 - DNA, 25 bp, Homo sapien
aggctcacgtgtggtctgttcacca

SEQ ID NO: 2036028 - DNA, 25 bp, Homo sapien
ctaagtaatagattaaaaattcaca

SEQ ID NO: 2036029 - DNA, 25 bp, Homo sapien
cacaaaatagaagcacagcaaagac

SEQ ID NO: 2036030 - DNA, 25 bp, Homo sapien
attcacaaaatagaagcacagcaaa

SEQ ID NO: 2036031 - DNA, 25 bp, Homo sapien
aaatagaagcacagcaaagacaaca

SEQ ID NO: 2036032 - DNA, 25 bp, Homo sapien
ttccaaaccccaattcgatcatcgc

SEQ ID NO: 2036033 - DNA, 25 bp, Homo sapien
tctgtcttccaaaccccaattcgat

SEQ ID NO: 2036034 - DNA, 25 bp, Homo sapien
caaaccccaattcgatcatcgccat

SEQ ID NO: 2036035 - DNA, 25 bp, Homo sapien
attctgtcttccaaaccccaattcg

SEQ ID NO: 2036036 - DNA, 25 bp, Homo sapien
ggttcaccacgagaaaactgcagag

SEQ ID NO: 2036037 - DNA, 25 bp, Homo sapien
caagggttcaccacgagaaaactgc

SEQ ID NO: 2036038 - DNA, 25 bp, Homo sapien
gcaacaacaaatccatcaagggttc

SEQ ID NO: 2036039 - DNA, 25 bp, Homo sapien
agggtgatggcattcaggtcttagc

SEQ ID NO: 2036040 - DNA, 25 bp, Homo sapien
taataatacaggtatcacgacctcc

SEQ ID NO: 2036041 - DNA, 25 bp, Homo sapien
gaaaagaattcagttatgttcccta

SEQ ID NO: 2036042 - DNA, 25 bp, Homo sapien
ggtatcacgacctccctctattaag

SEQ ID NO: 2036043 - DNA, 25 bp, Homo sapien
gattactaataaggaaaacaactga

SEQ ID NO: 2036044 - DNA, 25 bp, Homo sapien
gctctccatacctccgtatgtcaga

SEQ ID NO: 2036045 - DNA, 25 bp, Homo sapien
gactccttcaagctctccatacctc

SEQ ID NO: 2036046 - DNA, 25 bp, Homo sapien
cctccgtatgtcagaataaagctat

SEQ ID NO: 2036047 - DNA, 25 bp, Homo sapien
cagaataaagctattagaatgcttt

SEQ ID NO: 2036048 - DNA, 25 bp, Homo sapien
catcaaatgggaatccatgagaatg

SEQ ID NO: 2036049 - DNA, 25 bp, Homo sapien
atccatgagaatgatgtgtgtcaag

SEQ ID NO: 2036050 - DNA, 25 bp, Homo sapien
tgggaatccatgagaatgatgtgtg

SEQ ID NO: 2036051 - DNA, 25 bp, Homo sapien
gaaatcatcaaatgggaatccatga

SEQ ID NO: 2036052 - DNA, 25 bp, Homo sapien
accacacccagttaattttcatatt

SEQ ID NO: 2036053 - DNA, 25 bp, Homo sapien
ccaccacacccagttaattttcata

SEQ ID NO: 2036054 - DNA, 25 bp, Homo sapien
tgagactacagatgtgtaccaccac

SEQ ID NO: 2036055 - DNA, 25 bp, Homo sapien
agctgagactacagatgtgtaccac

SEQ ID NO: 2036056 - DNA, 25 bp, Homo sapien
atttaaaagggaacagctggcctgg

SEQ ID NO: 2036057 - DNA, 25 bp, Homo sapien
ttaaaagggaacagctggcctggca

SEQ ID NO: 2036058 - DNA, 25 bp, Homo sapien
tttaaaagggaacagctggcctggc

SEQ ID NO: 2036059 - DNA, 25 bp, Homo sapien
aatttaaaagggaacagctggcctg

SEQ ID NO: 2036060 - DNA, 25 bp, Homo sapien
tctgtaagaaacttcggaatggact

SEQ ID NO: 2036061 - DNA, 25 bp, Homo sapien
caggaaccatgcaccagtatggtga

SEQ ID NO: 2036062 - DNA, 25 bp, Homo sapien
ttcggaatggactgcacaagtggca

SEQ ID NO: 2036063 - DNA, 25 bp, Homo sapien
gaaacttcggaatggactgcacaag

SEQ ID NO: 2036064 - DNA, 25 bp, Homo sapien
ctgtgaggagttagccacttgttcc

SEQ ID NO: 2036065 - DNA, 25 bp, Homo sapien
tcttgcatgctgtgaataccaccag

SEQ ID NO: 2036066 - DNA, 25 bp, Homo sapien
tttgtcaggaaagaggaaaccgtga

SEQ ID NO: 2036067 - DNA, 25 bp, Homo sapien
gaaagtagccaaatggcagcgctgc

SEQ ID NO: 2036068 - DNA, 25 bp, Homo sapien
tgaacctcacaacccgcagtgtcca

SEQ ID NO: 2036069 - DNA, 25 bp, Homo sapien
ctcacaacccgcagtgtccacctca

SEQ ID NO: 2036070 - DNA, 25 bp, Homo sapien
cctcacaacccgcagtgtccacctc

SEQ ID NO: 2036071 - DNA, 25 bp, Homo sapien
tcctgaacctcacaacccgcagtgt

SEQ ID NO: 2036072 - DNA, 25 bp, Homo sapien
attttccaggaaaatcaccaagtca

SEQ ID NO: 2036073 - DNA, 25 bp, Homo sapien
ttttccaggaaaatcaccaagtcac

SEQ ID NO: 2036074 - DNA, 25 bp, Homo sapien
ataattttccaggaaaatcaccaag

SEQ ID NO: 2036075 - DNA, 25 bp, Homo sapien
ctataattttccaggaaaatcacca

SEQ ID NO: 2036076 - DNA, 25 bp, Homo sapien
aggctctaagttggcatctgctccc

SEQ ID NO: 2036077 - DNA, 25 bp, Homo sapien
attggtacgaggctctaagttggca

SEQ ID NO: 2036078 - DNA, 25 bp, Homo sapien
tacgaggctctaagttggcatctgc

SEQ ID NO: 2036079 - DNA, 25 bp, Homo sapien
ggtacgaggctctaagttggcatct

SEQ ID NO: 2036080 - DNA, 25 bp, Homo sapien
tctcgcatctctgggatcaagccat

SEQ ID NO: 2036081 - DNA, 25 bp, Homo sapien
gtctcgcatctctgggatcaagcca

SEQ ID NO: 2036082 - DNA, 25 bp, Homo sapien
ggtctcgcatctctgggatcaagcc

SEQ ID NO: 2036083 - DNA, 25 bp, Homo sapien
tgcgcaactcggagtaaaggccgga

SEQ ID NO: 2036084 - DNA, 25 bp, Homo sapien
gagtgtcgcgttacagagtcccctg

SEQ ID NO: 2036085 - DNA, 25 bp, Homo sapien
cgagctgtcgttagggcccaggaaa

SEQ ID NO: 2036086 - DNA, 25 bp, Homo sapien
aacttcctgtttccgcggtagcgcg

SEQ ID NO: 2036087 - DNA, 25 bp, Homo sapien
cggagccttggaaagtgccctccag

SEQ ID NO: 2036088 - DNA, 25 bp, Homo sapien
ccggagccttggaaagtgccctcca

SEQ ID NO: 2036089 - DNA, 25 bp, Homo sapien
ctgtgaacaagttacctgacatggc

SEQ ID NO: 2036090 - DNA, 25 bp, Homo sapien
cagtctcattgggtccttccgagaa

SEQ ID NO: 2036091 - DNA, 25 bp, Homo sapien
ctttgcaagtatgcgatgaagaacc

SEQ ID NO: 2036092 - DNA, 25 bp, Homo sapien
attgtgctaggcctaattatgcccc

SEQ ID NO: 2036093 - DNA, 25 bp, Homo sapien
agagccacctaccaatctcagccca

SEQ ID NO: 2036094 - DNA, 25 bp, Homo sapien
cagttccttgtggtcataggtttag

SEQ ID NO: 2036095 - DNA, 25 bp, Homo sapien
tggtcataggtttaggccctcagct

SEQ ID NO: 2036096 - DNA, 25 bp, Homo sapien
gctttgggatgaattcagttccttg

SEQ ID NO: 2036097 - DNA, 25 bp, Homo sapien
cctgaagctaagtacaagagttgcc

SEQ ID NO: 2036098 - DNA, 25 bp, Homo sapien
aggtaagtcccgagtgcagaagcca

SEQ ID NO: 2036099 - DNA, 25 bp, Homo sapien
cataggtttgactgtggccactggt

SEQ ID NO: 2036100 - DNA, 25 bp, Homo sapien
gatgaagaagtacccaggacaaggt

SEQ ID NO: 2036101 - DNA, 25 bp, Homo sapien
tcccctgctaccaaactgccctctg

SEQ ID NO: 2036102 - DNA, 25 bp, Homo sapien
tagatacccacacttcccctgctac

SEQ ID NO: 2036103 - DNA, 25 bp, Homo sapien
tgattctagatacccacacttcccc

SEQ ID NO: 2036104 - DNA, 25 bp, Homo sapien
caaactgccctctggttacgatggg

SEQ ID NO: 2036105 - DNA, 25 bp, Homo sapien
tttccttatgttcactggtttatag

SEQ ID NO: 2036106 - DNA, 25 bp, Homo sapien
cactggtttatagtaaaggatattg

SEQ ID NO: 2036107 - DNA, 25 bp, Homo sapien
catgtgggaagggacgtggagcttc

SEQ ID NO: 2036108 - DNA, 25 bp, Homo sapien
aattgatttgttaggagggctcaca

SEQ ID NO: 2036109 - DNA, 25 bp, Homo sapien
agcggcctccgcgaacaaaaagcga

SEQ ID NO: 2036110 - DNA, 25 bp, Homo sapien
aacagtacggagttctgcacgagcc

SEQ ID NO: 2036111 - DNA, 25 bp, Homo sapien
aatccggccacagaccatgaaggga

SEQ ID NO: 2036112 - DNA, 25 bp, Homo sapien
gcgcgcttgacccagaacagtacgg

SEQ ID NO: 2036113 - DNA, 25 bp, Homo sapien
catgttggcaaagtcgcagggcccc

SEQ ID NO: 2036114 - DNA, 25 bp, Homo sapien
tgttggcaaagtcgcagggccccca

SEQ ID NO: 2036115 - DNA, 25 bp, Homo sapien
atgttggcaaagtcgcagggccccc

SEQ ID NO: 2036116 - DNA, 25 bp, Homo sapien
cactctgttgttcgctgctctcagc

SEQ ID NO: 2036117 - DNA, 25 bp, Homo sapien
ttcactagcacccagcattctacca

SEQ ID NO: 2036118 - DNA, 25 bp, Homo sapien
accactctgttgttcgctgctctca

SEQ ID NO: 2036119 - DNA, 25 bp, Homo sapien
attctaccactctgttgttcgctgc

SEQ ID NO: 2036120 - DNA, 25 bp, Homo sapien
tccatgcttctgtgccactcttcct

SEQ ID NO: 2036121 - DNA, 25 bp, Homo sapien
gccactcttccttccgtgaccgtgg

SEQ ID NO: 2036122 - DNA, 25 bp, Homo sapien
ttccttccgtgaccgtggggatcat

SEQ ID NO: 2036123 - DNA, 25 bp, Homo sapien
ccctccatgcttctgtgccactctt

SEQ ID NO: 2036124 - DNA, 25 bp, Homo sapien
ttgcaggttatgcttcccgaggccc

SEQ ID NO: 2036125 - DNA, 25 bp, Homo sapien
gcccggccttgcgaagtgagcctgt

SEQ ID NO: 2036126 - DNA, 25 bp, Homo sapien
tctggcctatggagtatgcaaacca

SEQ ID NO: 2036127 - DNA, 25 bp, Homo sapien
ttcatggaccgcttctcaggtggcc

SEQ ID NO: 2036128 - DNA, 25 bp, Homo sapien
cagtgggtccttggaatatgaatac

SEQ ID NO: 2036129 - DNA, 25 bp, Homo sapien
tatccttgcctggtggtgtgccctc

SEQ ID NO: 2036130 - DNA, 25 bp, Homo sapien
gaatactcttttgtctacctctggc

SEQ ID NO: 2036131 - DNA, 25 bp, Homo sapien
tctggacccgtgtccccacttgtcc

SEQ ID NO: 2036132 - DNA, 25 bp, Homo sapien
gctcaaaggcatggggagctgagac

SEQ ID NO: 2036133 - DNA, 25 bp, Homo sapien
agctcaaaggcatggggagctgaga

SEQ ID NO: 2036134 - DNA, 25 bp, Homo sapien
agcctggtttgcgtcttctctcttc

SEQ ID NO: 2036135 - DNA, 25 bp, Homo sapien
ctggagcctggtttgcgtcttctct

SEQ ID NO: 2036136 - DNA, 25 bp, Homo sapien
ggagggagatgagccgcagaatggt

SEQ ID NO: 2036137 - DNA, 25 bp, Homo sapien
tgctggcattggtatggaaggtgcc

SEQ ID NO: 2036138 - DNA, 25 bp, Homo sapien
gagggcgactagagatcaaggtgag

SEQ ID NO: 2036139 - DNA, 25 bp, Homo sapien
gaaaaatagccacgagactaaagga

SEQ ID NO: 2036140 - DNA, 25 bp, Homo sapien
tacgcccggccccagtgtttgtgat

SEQ ID NO: 2036141 - DNA, 25 bp, Homo sapien
cgcccggccccagtgtttgtgattt

SEQ ID NO: 2036142 - DNA, 25 bp, Homo sapien
cactacgcccggccccagtgtttgt

SEQ ID NO: 2036143 - DNA, 25 bp, Homo sapien
ctacgcccggccccagtgtttgtga

SEQ ID NO: 2036144 - DNA, 25 bp, Homo sapien
cagtcacgatttggttgtagtggga

SEQ ID NO: 2036145 - DNA, 25 bp, Homo sapien
taaaagtactccagtcgcagtcacg

SEQ ID NO: 2036146 - DNA, 25 bp, Homo sapien
ctcggtggtcccgattttgcccagg

SEQ ID NO: 2036147 - DNA, 25 bp, Homo sapien
gcacaacagtaactggcttcagctt

SEQ ID NO: 2036148 - DNA, 25 bp, Homo sapien
cactggatagaggtaaaggattaga

SEQ ID NO: 2036149 - DNA, 25 bp, Homo sapien
taagttacgcatataaagcacccag

SEQ ID NO: 2036150 - DNA, 25 bp, Homo sapien
tcatgccccgttgttaaaattagga

SEQ ID NO: 2036151 - DNA, 25 bp, Homo sapien
tgccttgctggaatatcttcaactc

SEQ ID NO: 2036152 - DNA, 25 bp, Homo sapien
cccagcctatactctgttcttgatt

SEQ ID NO: 2036153 - DNA, 25 bp, Homo sapien
gaaaacgtatgttggcaagaatgag

SEQ ID NO: 2036154 - DNA, 25 bp, Homo sapien
ttcatgtgggaaaacgtatgttggc

SEQ ID NO: 2036155 - DNA, 25 bp, Homo sapien
tgatttcatgtgggaaaacgtatgt

SEQ ID NO: 2036156 - DNA, 25 bp, Homo sapien
tcatgtcgcttctccaagcttgggt

SEQ ID NO: 2036157 - DNA, 25 bp, Homo sapien
cacacaatcaccagacaagcttggg

SEQ ID NO: 2036158 - DNA, 25 bp, Homo sapien
acgtaggctgggaagtgctcgcaca

SEQ ID NO: 2036159 - DNA, 25 bp, Homo sapien
gagtaggtgcttatctcccaatgga

SEQ ID NO: 2036160 - DNA, 25 bp, Homo sapien
cagatgcataggtaaacaggagccc

SEQ ID NO: 2036161 - DNA, 25 bp, Homo sapien
cgcgtgacagcaccgagcaggccag

SEQ ID NO: 2036162 - DNA, 25 bp, Homo sapien
cataggtaaacaggagccctgacct

SEQ ID NO: 2036163 - DNA, 25 bp, Homo sapien
acagtgcccgcgtgacagcaccgag

SEQ ID NO: 2036164 - DNA, 25 bp, Homo sapien
gcaggatgttcaggtagaggcagag

SEQ ID NO: 2036165 - DNA, 25 bp, Homo sapien
aaaaggatctggagcaggatgttca

SEQ ID NO: 2036166 - DNA, 25 bp, Homo sapien
ggggaaaaggatctggagcaggatg

SEQ ID NO: 2036167 - DNA, 25 bp, Homo sapien
ggaaaaggatctggagcaggatgtt

SEQ ID NO: 2036168 - DNA, 25 bp, Homo sapien
tgtgtcagtccttctactggagagc

SEQ ID NO: 2036169 - DNA, 25 bp, Homo sapien
gcttaaacacataggccaactcggg

SEQ ID NO: 2036170 - DNA, 25 bp, Homo sapien
gatacttgtgatactgcgtgtgtca

SEQ ID NO: 2036171 - DNA, 25 bp, Homo sapien
cagtgggataaacacgtggttctgc

SEQ ID NO: 2036172 - DNA, 25 bp, Homo sapien
atccaccatctggaccacgttcccc

SEQ ID NO: 2036173 - DNA, 25 bp, Homo sapien
ccacgttccccaaaaaccatctcag

SEQ ID NO: 2036174 - DNA, 25 bp, Homo sapien
cacatccaccatctggaccacgttc

SEQ ID NO: 2036175 - DNA, 25 bp, Homo sapien
accatctcagtaagggtcagaatgg

SEQ ID NO: 2036176 - DNA, 25 bp, Homo sapien
ctttcagacgcgagggcggcttcgt

SEQ ID NO: 2036177 - DNA, 25 bp, Homo sapien
tccctgcacgcgtagaaggaaggcg

SEQ ID NO: 2036178 - DNA, 25 bp, Homo sapien
tcttcaaatcatgagggcactcggg

SEQ ID NO: 2036179 - DNA, 25 bp, Homo sapien
cctttagatgctttgggctccgact

SEQ ID NO: 2036180 - DNA, 25 bp, Homo sapien
gcgctccaacgacccgcgctctcgg

SEQ ID NO: 2036181 - DNA, 25 bp, Homo sapien
cgcgctctcggacccggtcacactg

SEQ ID NO: 2036182 - DNA, 25 bp, Homo sapien
ggccacactgcgctccaacgacccg

SEQ ID NO: 2036183 - DNA, 25 bp, Homo sapien
acactgcgctccaacgacccgcgct

SEQ ID NO: 2036184 - DNA, 25 bp, Homo sapien
ctgagttattgcatgcagcagggtt

SEQ ID NO: 2036185 - DNA, 25 bp, Homo sapien
aagaatacattgataggccggcacg

SEQ ID NO: 2036186 - DNA, 25 bp, Homo sapien
tgcagaaaaatacctgtaatgcctt

SEQ ID NO: 2036187 - DNA, 25 bp, Homo sapien
gagcatgagtcaggagagcctcttg

SEQ ID NO: 2036188 - DNA, 25 bp, Homo sapien
tggaaacaacgcattgcccaactcc

SEQ ID NO: 2036189 - DNA, 25 bp, Homo sapien
aaacaacgcattgcccaactcccca

SEQ ID NO: 2036190 - DNA, 25 bp, Homo sapien
tggcaggggccggtttcattgaagg

SEQ ID NO: 2036191 - DNA, 25 bp, Homo sapien
ggcaggggccggtttcattgaaggc

SEQ ID NO: 2036192 - DNA, 25 bp, Homo sapien
agagagagacccctctggtcccgtg

SEQ ID NO: 2036193 - DNA, 25 bp, Homo sapien
agagagacccctctggtcccgtgtc

SEQ ID NO: 2036194 - DNA, 25 bp, Homo sapien
atccaaatatgccccctcagagatg

SEQ ID NO: 2036195 - DNA, 25 bp, Homo sapien
caaatatgccccctcagagatggag

SEQ ID NO: 2036196 - DNA, 25 bp, Homo sapien
caggcacgctattagcctttgcctt

SEQ ID NO: 2036197 - DNA, 25 bp, Homo sapien
ggatctcccaggcacgctattagcc

SEQ ID NO: 2036198 - DNA, 25 bp, Homo sapien
ccaaatgttgtggaagtgcaaagga

SEQ ID NO: 2036199 - DNA, 25 bp, Homo sapien
tgtggaagtgcaaaggatctcccag

SEQ ID NO: 2036200 - DNA, 25 bp, Homo sapien
tcagttccctttttcaagtggcaaa

SEQ ID NO: 2036201 - DNA, 25 bp, Homo sapien
cctctgagctttgaggttcaaaatg

SEQ ID NO: 2036202 - DNA, 25 bp, Homo sapien
tggcaaacctttagcttcctctgag

SEQ ID NO: 2036203 - DNA, 25 bp, Homo sapien
cactatcttattggagtagctgtag

SEQ ID NO: 2036204 - DNA, 25 bp, Homo sapien
gggtgtgcgccagtcccactttctg

SEQ ID NO: 2036205 - DNA, 25 bp, Homo sapien
ctttctgcctcggtggctgccacta

SEQ ID NO: 2036206 - DNA, 25 bp, Homo sapien
acagctagggatgtgtccttgttgg

SEQ ID NO: 2036207 - DNA, 25 bp, Homo sapien
tgtgctcagggtgtgcgccagtccc

SEQ ID NO: 2036208 - DNA, 25 bp, Homo sapien
aatgggctacagagcaacagactcc

SEQ ID NO: 2036209 - DNA, 25 bp, Homo sapien
aagtctgcacaacatacctgaaacg

SEQ ID NO: 2036210 - DNA, 25 bp, Homo sapien
gagatgagaatatggcctggtgcct

SEQ ID NO: 2036211 - DNA, 25 bp, Homo sapien
ggcctccagcacgtaaaaaattagc

SEQ ID NO: 2036212 - DNA, 25 bp, Homo sapien
aagggcccacatcctcttgggactc

SEQ ID NO: 2036213 - DNA, 25 bp, Homo sapien
gggactccagccaaaccagtcaggt

SEQ ID NO: 2036214 - DNA, 25 bp, Homo sapien
caggtccccaaatatagcaggaggc

SEQ ID NO: 2036215 - DNA, 25 bp, Homo sapien
attaaagggcccacatcctcttggg

SEQ ID NO: 2036216 - DNA, 25 bp, Homo sapien
gggcagagcgctgccatctcatttg

SEQ ID NO: 2036217 - DNA, 25 bp, Homo sapien
agagcgctgccatctcatttgtggg

SEQ ID NO: 2036218 - DNA, 25 bp, Homo sapien
gggctgctgaatgtaagttgtgctt

SEQ ID NO: 2036219 - DNA, 25 bp, Homo sapien
taagttgtgctttttggcctagaag

SEQ ID NO: 2036220 - DNA, 25 bp, Homo sapien
cctcctctatgagccgcgacaccca

SEQ ID NO: 2036221 - DNA, 25 bp, Homo sapien
ggaagcgcagcttgcatcgtgaggg

SEQ ID NO: 2036222 - DNA, 25 bp, Homo sapien
tgctcctgcttaagccagcaaaggt

SEQ ID NO: 2036223 - DNA, 25 bp, Homo sapien
caaaggtgacctcgatggaaggcag

SEQ ID NO: 2036224 - DNA, 25 bp, Homo sapien
tcaggtggggcccagtggaactcac

SEQ ID NO: 2036225 - DNA, 25 bp, Homo sapien
tcatccttcaggtggggcccagtgg

SEQ ID NO: 2036226 - DNA, 25 bp, Homo sapien
tccttcaggtggggcccagtggaac

SEQ ID NO: 2036227 - DNA, 25 bp, Homo sapien
cttcaggtggggcccagtggaactc

SEQ ID NO: 2036228 - DNA, 25 bp, Homo sapien
tgcagaccatgcggtcctgcagcgc

SEQ ID NO: 2036229 - DNA, 25 bp, Homo sapien
tctccatgcagaccatgcggtcctg

SEQ ID NO: 2036230 - DNA, 25 bp, Homo sapien
tccatgcagaccatgcggtcctgca

SEQ ID NO: 2036231 - DNA, 25 bp, Homo sapien
catgcagaccatgcggtcctgcagc

SEQ ID NO: 2036232 - DNA, 25 bp, Homo sapien
gcctgcccgtggtggaagtaagcca

SEQ ID NO: 2036233 - DNA, 25 bp, Homo sapien
ccatgagcttgcagatgtgggcctg

SEQ ID NO: 2036234 - DNA, 25 bp, Homo sapien
cagggccaactcatagcagatcttc

SEQ ID NO: 2036235 - DNA, 25 bp, Homo sapien
tgtgacacaactcccacaccttgag

SEQ ID NO: 2036236 - DNA, 25 bp, Homo sapien
ttccttccttccagtctgtgttttc

SEQ ID NO: 2036237 - DNA, 25 bp, Homo sapien
cataataggccttctaattccctcc

SEQ ID NO: 2036238 - DNA, 25 bp, Homo sapien
ttctcggtatcatcatcttgttcct

SEQ ID NO: 2036239 - DNA, 25 bp, Homo sapien
ttttcttctcggtatcatcatcttg

SEQ ID NO: 2036240 - DNA, 25 bp, Homo sapien
ggataaactacttgttagtgtgttg

SEQ ID NO: 2036241 - DNA, 25 bp, Homo sapien
taatctgtccataactatgttttag

SEQ ID NO: 2036242 - DNA, 25 bp, Homo sapien
gagtagctatgctttcatgatcctg

SEQ ID NO: 2036243 - DNA, 25 bp, Homo sapien
gcataattatttagttacttgagta

SEQ ID NO: 2036244 - DNA, 25 bp, Homo sapien
catccttttgtcccttgggtccagc

SEQ ID NO: 2036245 - DNA, 25 bp, Homo sapien
cttgggcccaaaggtccctgtgaga

SEQ ID NO: 2036246 - DNA, 25 bp, Homo sapien
ttgggcccaaaggtccctgtgagat

SEQ ID NO: 2036247 - DNA, 25 bp, Homo sapien
ggtccctgtgagatgaggaacggtc

SEQ ID NO: 2036248 - DNA, 25 bp, Homo sapien
gtccctgtgagatgaggaacggtca

SEQ ID NO: 2036249 - DNA, 25 bp, Homo sapien
ggaaggacgggactcggaggagtgc

SEQ ID NO: 2036250 - DNA, 25 bp, Homo sapien
aaggacgggactcggaggagtgcag

SEQ ID NO: 2036251 - DNA, 25 bp, Homo sapien
caggagccttgggttaccacagcag

SEQ ID NO: 2036252 - DNA, 25 bp, Homo sapien
ccacaggagccttgggttaccacag

SEQ ID NO: 2036253 - DNA, 25 bp, Homo sapien
ccttggggacctgatcagtccaacg

SEQ ID NO: 2036254 - DNA, 25 bp, Homo sapien
cttggggacctgatcagtccaacga

SEQ ID NO: 2036255 - DNA, 25 bp, Homo sapien
ttggggacctgatcagtccaacgag

SEQ ID NO: 2036256 - DNA, 25 bp, Homo sapien
cttggctccaggatcgcccctgagg

SEQ ID NO: 2036257 - DNA, 25 bp, Homo sapien
tggctccaggatcgcccctgaggcc

SEQ ID NO: 2036258 - DNA, 25 bp, Homo sapien
ttggctccaggatcgcccctgaggc

SEQ ID NO: 2036259 - DNA, 25 bp, Homo sapien
ggctccaggatcgcccctgaggcca

SEQ ID NO: 2036260 - DNA, 25 bp, Homo sapien
gcttggcattgctgaccctgaagat

SEQ ID NO: 2036261 - DNA, 25 bp, Homo sapien
agcttggcattgctgaccctgaaga

SEQ ID NO: 2036262 - DNA, 25 bp, Homo sapien
cagggcacccacagcattggcagca

SEQ ID NO: 2036263 - DNA, 25 bp, Homo sapien
ccccagggcacccacagcattggca

SEQ ID NO: 2036264 - DNA, 25 bp, Homo sapien
tctcccccagggcacccacagcatt

SEQ ID NO: 2036265 - DNA, 25 bp, Homo sapien
ctgtgggaccctgtctcccccaggg

SEQ ID NO: 2036266 - DNA, 25 bp, Homo sapien
tttctctctgggacaaaatacaaat

SEQ ID NO: 2036267 - DNA, 25 bp, Homo sapien
cagaaaagaacgtctctgaggtcct

SEQ ID NO: 2036268 - DNA, 25 bp, Homo sapien
agggtccatacagaaaagaacgtct

SEQ ID NO: 2036269 - DNA, 25 bp, Homo sapien
tgggcagaagcctaggcccgcagag

SEQ ID NO: 2036270 - DNA, 25 bp, Homo sapien
gaggggggagagtcgaagcagtcgc

SEQ ID NO: 2036271 - DNA, 25 bp, Homo sapien
ctgacaccgccctggaggggggaga

SEQ ID NO: 2036272 - DNA, 25 bp, Homo sapien
ccctggaggggggagagtcgaagca

SEQ ID NO: 2036273 - DNA, 25 bp, Homo sapien
gcccctcccgcctgacaccgccctg

SEQ ID NO: 2036274 - DNA, 25 bp, Homo sapien
gctttcgcttggaaacaggtgcagg

SEQ ID NO: 2036275 - DNA, 25 bp, Homo sapien
ctttcgcttggaaacaggtgcagga

SEQ ID NO: 2036276 - DNA, 25 bp, Homo sapien
ggggtgcccggggcgttgctcaggc

SEQ ID NO: 2036277 - DNA, 25 bp, Homo sapien
ggtgcccggggcgttgctcaggccg

SEQ ID NO: 2036278 - DNA, 25 bp, Homo sapien
gtgcccggggcgttgctcaggccgg

SEQ ID NO: 2036279 - DNA, 25 bp, Homo sapien
cgcggggtgcccggggcgttgctca

SEQ ID NO: 2036280 - DNA, 25 bp, Homo sapien
gtcgcccgagcccagggatccgctt

SEQ ID NO: 2036281 - DNA, 25 bp, Homo sapien
cgcccgagcccagggatccgcttac

SEQ ID NO: 2036282 - DNA, 25 bp, Homo sapien
tcgcccgagcccagggatccgctta

SEQ ID NO: 2036283 - DNA, 25 bp, Homo sapien
aggctccatcgcgctcatggcggcc

SEQ ID NO: 2036284 - DNA, 25 bp, Homo sapien
ggctccatcgcgctcatggcggcca

SEQ ID NO: 2036285 - DNA, 25 bp, Homo sapien
cgatggggttcatgatagtgtacat

SEQ ID NO: 2036286 - DNA, 25 bp, Homo sapien
gggttcatgatagtgtacatgtttt

SEQ ID NO: 2036287 - DNA, 25 bp, Homo sapien
ggttcatgatagtgtacatgttttc

SEQ ID NO: 2036288 - DNA, 25 bp, Homo sapien
gcccgatggggttcatgatagtgta

SEQ ID NO: 2036289 - DNA, 25 bp, Homo sapien
tgatgaggtgttccagggggcccac

SEQ ID NO: 2036290 - DNA, 25 bp, Homo sapien
taggcatgatgaggtgttccagggg

SEQ ID NO: 2036291 - DNA, 25 bp, Homo sapien
gcatgatgaggtgttccagggggcc

SEQ ID NO: 2036292 - DNA, 25 bp, Homo sapien
ctaggcatgatgaggtgttccaggg

SEQ ID NO: 2036293 - DNA, 25 bp, Homo sapien
ctggcccacgggccacgaactcctg

SEQ ID NO: 2036294 - DNA, 25 bp, Homo sapien
gctggcccacgggccacgaactcct

SEQ ID NO: 2036295 - DNA, 25 bp, Homo sapien
tggcccacgggccacgaactcctgg

SEQ ID NO: 2036296 - DNA, 25 bp, Homo sapien
atgccgcgaggaggcgtcaccctcc

SEQ ID NO: 2036297 - DNA, 25 bp, Homo sapien
tggccatgccgcgaggaggcgtcac

SEQ ID NO: 2036298 - DNA, 25 bp, Homo sapien
ggaggcgtcaccctccgcattgggc

SEQ ID NO: 2036299 - DNA, 25 bp, Homo sapien
gcgaggaggcgtcaccctccgcatt

SEQ ID NO: 2036300 - DNA, 25 bp, Homo sapien
cgggaggctgacttagcatccgcag

SEQ ID NO: 2036301 - DNA, 25 bp, Homo sapien
aggctgacttagcatccgcagggtg

SEQ ID NO: 2036302 - DNA, 25 bp, Homo sapien
tgcgggaggctgacttagcatccgc

SEQ ID NO: 2036303 - DNA, 25 bp, Homo sapien
ggaggctgacttagcatccgcaggg

SEQ ID NO: 2036304 - DNA, 25 bp, Homo sapien
ttgtggggggatggctgggagccgg

SEQ ID NO: 2036305 - DNA, 25 bp, Homo sapien
gggttgtggggggatggctgggagc

SEQ ID NO: 2036306 - DNA, 25 bp, Homo sapien
cattggggttgtggggggatggctg

SEQ ID NO: 2036307 - DNA, 25 bp, Homo sapien
tggggttgtggggggatggctggga

SEQ ID NO: 2036308 - DNA, 25 bp, Homo sapien
aaggccttggcctcgccggagtgct

SEQ ID NO: 2036309 - DNA, 25 bp, Homo sapien
ttcggtcaggcgctgcgcagtacag

SEQ ID NO: 2036310 - DNA, 25 bp, Homo sapien
ggagtgctcgcaggcctctcttcgg

SEQ ID NO: 2036311 - DNA, 25 bp, Homo sapien
cggctgcagcgctatagtcctggaa

SEQ ID NO: 2036312 - DNA, 25 bp, Homo sapien
cccggggggctcccccagcgtgatg

SEQ ID NO: 2036313 - DNA, 25 bp, Homo sapien
cggggggctcccccagcgtgatgtt

SEQ ID NO: 2036314 - DNA, 25 bp, Homo sapien
ccaccaggagtgcaggaacccgggg

SEQ ID NO: 2036315 - DNA, 25 bp, Homo sapien
caggagtgcaggaacccggggggct

SEQ ID NO: 2036316 - DNA, 25 bp, Homo sapien
caccttgcggccagaagagcctctt

SEQ ID NO: 2036317 - DNA, 25 bp, Homo sapien
gtacagcgccaaccaccttgcggcc

SEQ ID NO: 2036318 - DNA, 25 bp, Homo sapien
ccatcggatctcagacaggaaggtc

SEQ ID NO: 2036319 - DNA, 25 bp, Homo sapien
agcaggtactcatagacgtacagcg

SEQ ID NO: 2036320 - DNA, 25 bp, Homo sapien
cctcttggcgtacgtgctgctccgc

SEQ ID NO: 2036321 - DNA, 25 bp, Homo sapien
tcttggcgtacgtgctgctccgcgc

SEQ ID NO: 2036322 - DNA, 25 bp, Homo sapien
ctcttggcgtacgtgctgctccgcg

SEQ ID NO: 2036323 - DNA, 25 bp, Homo sapien
tgttgaattagatgaaaactgtgcc

SEQ ID NO: 2036324 - DNA, 25 bp, Homo sapien
tatcaccaatttccgtgccaggcca

SEQ ID NO: 2036325 - DNA, 25 bp, Homo sapien
tggcagcccctacagtatgtgaaaa

SEQ ID NO: 2036326 - DNA, 25 bp, Homo sapien
aaactgtgcctcctttgaccaccag

SEQ ID NO: 2036327 - DNA, 25 bp, Homo sapien
cgggatatatcccactgccatgggt

SEQ ID NO: 2036328 - DNA, 25 bp, Homo sapien
tgccacggcattggtaagattgagg

SEQ ID NO: 2036329 - DNA, 25 bp, Homo sapien
catactgacagcgagaataatcatc

SEQ ID NO: 2036330 - DNA, 25 bp, Homo sapien
tctatcacatctgcgccaagctttt

SEQ ID NO: 2036331 - DNA, 25 bp, Homo sapien
tggaggacagtactgtgcagaactc

SEQ ID NO: 2036332 - DNA, 25 bp, Homo sapien
gcagaactctctaataccacaatat

SEQ ID NO: 2036333 - DNA, 25 bp, Homo sapien
agtcctcgtattattcccacgtttg

SEQ ID NO: 2036334 - DNA, 25 bp, Homo sapien
tgttgtttaccaccctctctggagg

SEQ ID NO: 2036335 - DNA, 25 bp, Homo sapien
ggttagggcacttgcaatcaaggag

SEQ ID NO: 2036336 - DNA, 25 bp, Homo sapien
tttagccgagccagattggtgagtc

SEQ ID NO: 2036337 - DNA, 25 bp, Homo sapien
gtttagccgagccagattggtgagt

SEQ ID NO: 2036338 - DNA, 25 bp, Homo sapien
ggtttagccgagccagattggtgag

SEQ ID NO: 2036339 - DNA, 25 bp, Homo sapien
ctaataagattgtttcggaggtcca

SEQ ID NO: 2036340 - DNA, 25 bp, Homo sapien
taataagattgtttcggaggtccaa

SEQ ID NO: 2036341 - DNA, 25 bp, Homo sapien
aataagattgtttcggaggtccaat

SEQ ID NO: 2036342 - DNA, 25 bp, Homo sapien
tactcagaatcagggtgaccgtgcg

SEQ ID NO: 2036343 - DNA, 25 bp, Homo sapien
ttgttactcagaatcagggtgaccg

SEQ ID NO: 2036344 - DNA, 25 bp, Homo sapien
ttactcagaatcagggtgaccgtgc

SEQ ID NO: 2036345 - DNA, 25 bp, Homo sapien
tgttactcagaatcagggtgaccgt

SEQ ID NO: 2036346 - DNA, 25 bp, Homo sapien
ggacctgcgcgagctccaggatgct

SEQ ID NO: 2036347 - DNA, 25 bp, Homo sapien
gcaggacctgcgcgagctccaggat

SEQ ID NO: 2036348 - DNA, 25 bp, Homo sapien
tgggggcaggacctgcgcgagctcc

SEQ ID NO: 2036349 - DNA, 25 bp, Homo sapien
gcgagctccaggatgctgcacacca

SEQ ID NO: 2036350 - DNA, 25 bp, Homo sapien
cctgccagcccctcggggacgccca

SEQ ID NO: 2036351 - DNA, 25 bp, Homo sapien
cagcccctcggggacgcccatcgtg

SEQ ID NO: 2036352 - DNA, 25 bp, Homo sapien
tgccagcccctcggggacgcccatc

SEQ ID NO: 2036353 - DNA, 25 bp, Homo sapien
ccagcccctcggggacgcccatcgt

SEQ ID NO: 2036354 - DNA, 25 bp, Homo sapien
cacgtggtagacactgggacctgct

SEQ ID NO: 2036355 - DNA, 25 bp, Homo sapien
ttgtcaccctggacacacgtggtag

SEQ ID NO: 2036356 - DNA, 25 bp, Homo sapien
tgtttaccgtgtctggactctgcca

SEQ ID NO: 2036357 - DNA, 25 bp, Homo sapien
gagcttaaaggctggtttgtcaccc

SEQ ID NO: 2036358 - DNA, 25 bp, Homo sapien
ccctggcaactgaataatgggctgc

SEQ ID NO: 2036359 - DNA, 25 bp, Homo sapien
tgccaaaggatctggacatgtctgt

SEQ ID NO: 2036360 - DNA, 25 bp, Homo sapien
tattcgtggtgccaaaggatctgga

SEQ ID NO: 2036361 - DNA, 25 bp, Homo sapien
taatgggctgccagaaatattcgtg

SEQ ID NO: 2036362 - DNA, 25 bp, Homo sapien
ctggggaccctccacacttggcctg

SEQ ID NO: 2036363 - DNA, 25 bp, Homo sapien
ctgtgcttggccatctggttctcat

SEQ ID NO: 2036364 - DNA, 25 bp, Homo sapien
ctctggggaccctccacacttggcc

SEQ ID NO: 2036365 - DNA, 25 bp, Homo sapien
cacacttggcctgtgcttggccatc

SEQ ID NO: 2036366 - DNA, 25 bp, Homo sapien
aggcgtccagaatgggaattggcac

SEQ ID NO: 2036367 - DNA, 25 bp, Homo sapien
ctctgggtatggagtagtggacacc

SEQ ID NO: 2036368 - DNA, 25 bp, Homo sapien
caggtgcacagtgtttccgtgggaa

SEQ ID NO: 2036369 - DNA, 25 bp, Homo sapien
ccgtgggaatcctaagcatggcaga

SEQ ID NO: 2036370 - DNA, 25 bp, Homo sapien
aggtctctggacccctcagcagcct

SEQ ID NO: 2036371 - DNA, 25 bp, Homo sapien
tcaggtctctggacccctcagcagc

SEQ ID NO: 2036372 - DNA, 25 bp, Homo sapien
gtctctggacccctcagcagcctca

SEQ ID NO: 2036373 - DNA, 25 bp, Homo sapien
tctctggacccctcagcagcctcac

SEQ ID NO: 2036374 - DNA, 25 bp, Homo sapien
ccaatgccagacagcgcctccagca

SEQ ID NO: 2036375 - DNA, 25 bp, Homo sapien
cctcgccagccagctcatagctgtg

SEQ ID NO: 2036376 - DNA, 25 bp, Homo sapien
gaggccgtctgttggtacatgtcca

SEQ ID NO: 2036377 - DNA, 25 bp, Homo sapien
gtcactgggcgaggccgtctgttgg

SEQ ID NO: 2036378 - DNA, 25 bp, Homo sapien
ccctgggcttctggcccatctagca

SEQ ID NO: 2036379 - DNA, 25 bp, Homo sapien
ttctggcccatctagcagctgctcc

SEQ ID NO: 2036380 - DNA, 25 bp, Homo sapien
ctggcccatctagcagctgctccag

SEQ ID NO: 2036381 - DNA, 25 bp, Homo sapien
ggcttctggcccatctagcagctgc

SEQ ID NO: 2036382 - DNA, 25 bp, Homo sapien
cttggtgctgtggataaggtcgagg

SEQ ID NO: 2036383 - DNA, 25 bp, Homo sapien
tgagtcccagtcgttatcagaggta

SEQ ID NO: 2036384 - DNA, 25 bp, Homo sapien
gcattcccattggcccgaagcttgg

SEQ ID NO: 2036385 - DNA, 25 bp, Homo sapien
tcccattggcccgaagcttggtgac

SEQ ID NO: 2036386 - DNA, 25 bp, Homo sapien
agccgaggcacagcgggagctccac

SEQ ID NO: 2036387 - DNA, 25 bp, Homo sapien
gcttgggccgccaggtgtactgcaa

SEQ ID NO: 2036388 - DNA, 25 bp, Homo sapien
tcaggcatgtgcaacagccgaggca

SEQ ID NO: 2036389 - DNA, 25 bp, Homo sapien
ggccgccaggtgtactgcaaagtca

SEQ ID NO: 2036390 - DNA, 25 bp, Homo sapien
tctccatgccaatcagcagtgctgg

SEQ ID NO: 2036391 - DNA, 25 bp, Homo sapien
tgcatccacctgaagcagaaagctc

SEQ ID NO: 2036392 - DNA, 25 bp, Homo sapien
agtgccaggtgcatggctgagtctc

SEQ ID NO: 2036393 - DNA, 25 bp, Homo sapien
tggctgagtctccatgccaatcagc

SEQ ID NO: 2036394 - DNA, 25 bp, Homo sapien
ttggtgaggttgacgatgccaaggt

SEQ ID NO: 2036395 - DNA, 25 bp, Homo sapien
tggtgaggttgacgatgccaaggtg

SEQ ID NO: 2036396 - DNA, 25 bp, Homo sapien
ggtgaggttgacgatgccaaggtgc

SEQ ID NO: 2036397 - DNA, 25 bp, Homo sapien
gttggtgaggttgacgatgccaagg

SEQ ID NO: 2036398 - DNA, 25 bp, Homo sapien
gtgctggcgtccgtggtgacaccat

SEQ ID NO: 2036399 - DNA, 25 bp, Homo sapien
tagtggcgtgtctctgttctcgtcc

SEQ ID NO: 2036400 - DNA, 25 bp, Homo sapien
tgacaccatagttgagtagggcctg

SEQ ID NO: 2036401 - DNA, 25 bp, Homo sapien
ggctatgtgcttgatgaccctggtc

SEQ ID NO: 2036402 - DNA, 25 bp, Homo sapien
gaagctctgccttgggagctttctg

SEQ ID NO: 2036403 - DNA, 25 bp, Homo sapien
tctgccttgggagctttctgcaagg

SEQ ID NO: 2036404 - DNA, 25 bp, Homo sapien
aagtgccagaagctctgccttggga

SEQ ID NO: 2036405 - DNA, 25 bp, Homo sapien
gttaaagctgaaagtgccagaagct

SEQ ID NO: 2036406 - DNA, 25 bp, Homo sapien
tagagtccgtcacagagccaaggat

SEQ ID NO: 2036407 - DNA, 25 bp, Homo sapien
atgtactcactccacaccattcggg

SEQ ID NO: 2036408 - DNA, 25 bp, Homo sapien
gtggagagacgcaacctgggaacca

SEQ ID NO: 2036409 - DNA, 25 bp, Homo sapien
ggtaggtcggttctgaagtaatgct

SEQ ID NO: 2036410 - DNA, 25 bp, Homo sapien
ttccagcgtcaggtttggagatcca

SEQ ID NO: 2036411 - DNA, 25 bp, Homo sapien
cagcgtcaggtttggagatccacaa

SEQ ID NO: 2036412 - DNA, 25 bp, Homo sapien
cgtcaggtttggagatccacaagtc

SEQ ID NO: 2036413 - DNA, 25 bp, Homo sapien
tcaggtttggagatccacaagtcac

SEQ ID NO: 2036414 - DNA, 25 bp, Homo sapien
aaagcagcccttcactacagtggca

SEQ ID NO: 2036415 - DNA, 25 bp, Homo sapien
ccaaagcagcccttcactacagtgg

SEQ ID NO: 2036416 - DNA, 25 bp, Homo sapien
cactacagtggcagatacacctgca

SEQ ID NO: 2036417 - DNA, 25 bp, Homo sapien
ggcagatacacctgcaaatcttcgc

SEQ ID NO: 2036418 - DNA, 25 bp, Homo sapien
tgaggaactagagaggaacgcctct

SEQ ID NO: 2036419 - DNA, 25 bp, Homo sapien
ctgagtaggcgctgacaggagaaca

SEQ ID NO: 2036420 - DNA, 25 bp, Homo sapien
gacatcctacattagtttctctgga

SEQ ID NO: 2036421 - DNA, 25 bp, Homo sapien
caggttctcacacgtccctgaggaa

SEQ ID NO: 2036422 - DNA, 25 bp, Homo sapien
acagccaccacctgcatcgaggcaa

SEQ ID NO: 2036423 - DNA, 25 bp, Homo sapien
ctcacagccaccacctgcatcgagg

SEQ ID NO: 2036424 - DNA, 25 bp, Homo sapien
gggtgtcacactgcccctgctcaca

SEQ ID NO: 2036425 - DNA, 25 bp, Homo sapien
cagccaccacctgcatcgaggcaac

SEQ ID NO: 2036426 - DNA, 25 bp, Homo sapien
tcatggagtagcccacggttctgga

SEQ ID NO: 2036427 - DNA, 25 bp, Homo sapien
cggttctggagtctgtgaaggtctc

SEQ ID NO: 2036428 - DNA, 25 bp, Homo sapien
ccaaataggggacatgtttaacatc

SEQ ID NO: 2036429 - DNA, 25 bp, Homo sapien
tgaattcgtagaactcaatgcattc

SEQ ID NO: 2036430 - DNA, 25 bp, Homo sapien
gcttttcctgcaaactctttccttg

SEQ ID NO: 2036431 - DNA, 25 bp, Homo sapien
ctgatctggcctcctacgaaaaacg

SEQ ID NO: 2036432 - DNA, 25 bp, Homo sapien
ttccatttacacgaggatttcccat

SEQ ID NO: 2036433 - DNA, 25 bp, Homo sapien
taccactccgattttgatcttctgc

SEQ ID NO: 2036434 - DNA, 25 bp, Homo sapien
tttttgtaggaagtcatccatttct

SEQ ID NO: 2036435 - DNA, 25 bp, Homo sapien
ctaccactccgattttgatcttctg

SEQ ID NO: 2036436 - DNA, 25 bp, Homo sapien
gatcttctgcctcaatttttgtagg

SEQ ID NO: 2036437 - DNA, 25 bp, Homo sapien
gggtcccatcaacgtccaaaaggca

SEQ ID NO: 2036438 - DNA, 25 bp, Homo sapien
tcccatcaacgtccaaaaggcagag

SEQ ID NO: 2036439 - DNA, 25 bp, Homo sapien
catcaacgtccaaaaggcagagcac

SEQ ID NO: 2036440 - DNA, 25 bp, Homo sapien
ggtcagggtcccatcaacgtccaaa

SEQ ID NO: 2036441 - DNA, 25 bp, Homo sapien
gcttcccactgtagagcgtgtctga

SEQ ID NO: 2036442 - DNA, 25 bp, Homo sapien
ctgtagagcgtgtctgagtcatgtc

SEQ ID NO: 2036443 - DNA, 25 bp, Homo sapien
agggtggcacaaaggatcctggatc

SEQ ID NO: 2036444 - DNA, 25 bp, Homo sapien
tggaaaccgcttcccactgtagagc

SEQ ID NO: 2036445 - DNA, 25 bp, Homo sapien
gggcactgacccttactctgtgttc

SEQ ID NO: 2036446 - DNA, 25 bp, Homo sapien
cagggcactgacccttactctgtgt

SEQ ID NO: 2036447 - DNA, 25 bp, Homo sapien
agggcactgacccttactctgtgtt

SEQ ID NO: 2036448 - DNA, 25 bp, Homo sapien
cccagggcccttcagggtattcctg

SEQ ID NO: 2036449 - DNA, 25 bp, Homo sapien
taactgatgaggaggactctccagc

SEQ ID NO: 2036450 - DNA, 25 bp, Homo sapien
tccagctagggaactgctttccagg

SEQ ID NO: 2036451 - DNA, 25 bp, Homo sapien
gactcagtgggcaagggttcccagg

SEQ ID NO: 2036452 - DNA, 25 bp, Homo sapien
tacagtgtttaccaatggcattcag

SEQ ID NO: 2036453 - DNA, 25 bp, Homo sapien
cctctacacagttcatgcatattct

SEQ ID NO: 2036454 - DNA, 25 bp, Homo sapien
tattctatgaaagcagtatccagcc

SEQ ID NO: 2036455 - DNA, 25 bp, Homo sapien
gcagtatccagccattaacacatta

SEQ ID NO: 2036456 - DNA, 25 bp, Homo sapien
tcctgggcacatgtctggtggacat

SEQ ID NO: 2036457 - DNA, 25 bp, Homo sapien
aaatccaagaatgggagtctgcttt

SEQ ID NO: 2036458 - DNA, 25 bp, Homo sapien
gtggacatggggctgtcatagtaag

SEQ ID NO: 2036459 - DNA, 25 bp, Homo sapien
tggtggacatggggctgtcatagta

SEQ ID NO: 2036460 - DNA, 25 bp, Homo sapien
gtaaacacttggtagagacactcac

SEQ ID NO: 2036461 - DNA, 25 bp, Homo sapien
tggtaaacacttggtagagacactc

SEQ ID NO: 2036462 - DNA, 25 bp, Homo sapien
tcttactgtattggtaaacacttgg

SEQ ID NO: 2036463 - DNA, 25 bp, Homo sapien
tgtattggtaaacacttggtagaga

SEQ ID NO: 2036464 - DNA, 25 bp, Homo sapien
tcatgagtatgttgtgtgttcctgg

SEQ ID NO: 2036465 - DNA, 25 bp, Homo sapien
catgagtatgttgtgtgttcctggc

SEQ ID NO: 2036466 - DNA, 25 bp, Homo sapien
acatgaaggccgcctgcatcctggg

SEQ ID NO: 2036467 - DNA, 25 bp, Homo sapien
tcacatgaaggccgcctgcatcctg

SEQ ID NO: 2036468 - DNA, 25 bp, Homo sapien
ctgggggagttcctgaagctactgc

SEQ ID NO: 2036469 - DNA, 25 bp, Homo sapien
tgaaggccgcctgcatcctggggga

SEQ ID NO: 2036470 - DNA, 25 bp, Homo sapien
cagggaagatcagccccattctgta

SEQ ID NO: 2036471 - DNA, 25 bp, Homo sapien
acaggcaagccatgaactgaggaca

SEQ ID NO: 2036472 - DNA, 25 bp, Homo sapien
attctgaggaatgtttctaaggtgt

SEQ ID NO: 2036473 - DNA, 25 bp, Homo sapien
tctgtacacaggcaagccatgaact

SEQ ID NO: 2036474 - DNA, 25 bp, Homo sapien
cagatgagtttatcaaacgcagcca

SEQ ID NO: 2036475 - DNA, 25 bp, Homo sapien
catgaaggaggtaacagatgagtca

SEQ ID NO: 2036476 - DNA, 25 bp, Homo sapien
tgctcggacaggtgaatgcaccatc

SEQ ID NO: 2036477 - DNA, 25 bp, Homo sapien
tgtccctatatacatcacatgaagg

SEQ ID NO: 2036478 - DNA, 25 bp, Homo sapien
gatccatacccgtcatccttggaat

SEQ ID NO: 2036479 - DNA, 25 bp, Homo sapien
gaatttcccctgcatccaaacctgt

SEQ ID NO: 2036480 - DNA, 25 bp, Homo sapien
ttggaatttcccctgcatccaaacc

SEQ ID NO: 2036481 - DNA, 25 bp, Homo sapien
actgtcttttccgatccatacccgt

SEQ ID NO: 2036482 - DNA, 25 bp, Homo sapien
caccgctttcaagggggtgttcact

SEQ ID NO: 2036483 - DNA, 25 bp, Homo sapien
cagggtttcttcaccgctttcaagg

SEQ ID NO: 2036484 - DNA, 25 bp, Homo sapien
actttcttcagtaacgtgtgctgct

SEQ ID NO: 2036485 - DNA, 25 bp, Homo sapien
gctttgacagggaacagccagcgtc

SEQ ID NO: 2036486 - DNA, 25 bp, Homo sapien
gcctcctggagcacgccgggacccc

SEQ ID NO: 2036487 - DNA, 25 bp, Homo sapien
tcctggagcacgccgggaccccctc

SEQ ID NO: 2036488 - DNA, 25 bp, Homo sapien
ctcctggagcacgccgggaccccct

SEQ ID NO: 2036489 - DNA, 25 bp, Homo sapien
aaattcggctggtgtgtgggctcct

SEQ ID NO: 2036490 - DNA, 25 bp, Homo sapien
aattaaaagccaaattcggctggtg

SEQ ID NO: 2036491 - DNA, 25 bp, Homo sapien
taaaagccaaattcggctggtgtgt

SEQ ID NO: 2036492 - DNA, 25 bp, Homo sapien
agacatcacaagaaaggtgaattaa

SEQ ID NO: 2036493 - DNA, 25 bp, Homo sapien
tttccagcacaggatttgctggcca

SEQ ID NO: 2036494 - DNA, 25 bp, Homo sapien
tgactcagtgttcagcacccctagg

SEQ ID NO: 2036495 - DNA, 25 bp, Homo sapien
cactggatacttatgcctgtgccca

SEQ ID NO: 2036496 - DNA, 25 bp, Homo sapien
aagataacactaggccattgatggc

SEQ ID NO: 2036497 - DNA, 25 bp, Homo sapien
cagtgcctgtttgtgaatcactgac

SEQ ID NO: 2036498 - DNA, 25 bp, Homo sapien
acagtgcctgtttgtgaatcactga

SEQ ID NO: 2036499 - DNA, 25 bp, Homo sapien
gacagtgcctgtttgtgaatcactg

SEQ ID NO: 2036500 - DNA, 25 bp, Homo sapien
ggttggagccccacattgataaggc

SEQ ID NO: 2036501 - DNA, 25 bp, Homo sapien
gactccagcagtgacgatgatgacg

SEQ ID NO: 2036502 - DNA, 25 bp, Homo sapien
gatgacgctccaggtagatgggcac

SEQ ID NO: 2036503 - DNA, 25 bp, Homo sapien
gagagctgcaatgatccggaagaga

SEQ ID NO: 2036504 - DNA, 25 bp, Homo sapien
gagaggggacgccatgaaagtggct

SEQ ID NO: 2036505 - DNA, 25 bp, Homo sapien
aggggacgccatgaaagtggcttcc

SEQ ID NO: 2036506 - DNA, 25 bp, Homo sapien
gggacgccatgaaagtggcttcccg

SEQ ID NO: 2036507 - DNA, 25 bp, Homo sapien
gaggggacgccatgaaagtggcttc

SEQ ID NO: 2036508 - DNA, 25 bp, Homo sapien
gcggggctttcagacagaggagttt

SEQ ID NO: 2036509 - DNA, 25 bp, Homo sapien
cagggcggggctttcagacagagga

SEQ ID NO: 2036510 - DNA, 25 bp, Homo sapien
gccatccagggcggggctttcagac

SEQ ID NO: 2036511 - DNA, 25 bp, Homo sapien
ctctcagggtcaccccggggccatc

SEQ ID NO: 2036512 - DNA, 25 bp, Homo sapien
agagacgcatgaacacagacaggta

SEQ ID NO: 2036513 - DNA, 25 bp, Homo sapien
cagtttgaagcaaacggagagacgc

SEQ ID NO: 2036514 - DNA, 25 bp, Homo sapien
caggtacacaaggtcatcagtggtg

SEQ ID NO: 2036515 - DNA, 25 bp, Homo sapien
aaggagcagtgcgtgatgttggcgt

SEQ ID NO: 2036516 - DNA, 25 bp, Homo sapien
aaggtcttggagctgcacgagccgt

SEQ ID NO: 2036517 - DNA, 25 bp, Homo sapien
tgattcatctcgtagccaatgaggg

SEQ ID NO: 2036518 - DNA, 25 bp, Homo sapien
aactctgtgattcatctcgtagcca

SEQ ID NO: 2036519 - DNA, 25 bp, Homo sapien
gcacgagccgtgctaaaaactctgt

SEQ ID NO: 2036520 - DNA, 25 bp, Homo sapien
catgtgtgaagcacctaagtgtcgt

SEQ ID NO: 2036521 - DNA, 25 bp, Homo sapien
cttgtgaatgacatgtgtgaagcac

SEQ ID NO: 2036522 - DNA, 25 bp, Homo sapien
gaagcacctaagtgtcgtttcttat

SEQ ID NO: 2036523 - DNA, 25 bp, Homo sapien
agagcttgtgaatgacatgtgtgaa

SEQ ID NO: 2036524 - DNA, 25 bp, Homo sapien
ggtgctttgtctcagcgggaactgt

SEQ ID NO: 2036525 - DNA, 25 bp, Homo sapien
gaacctccacgcaagccagaatgtg

SEQ ID NO: 2036526 - DNA, 25 bp, Homo sapien
caatcctctattgacagctgtggct

SEQ ID NO: 2036527 - DNA, 25 bp, Homo sapien
tgcccggtaactgtcgtgtcgcctg

SEQ ID NO: 2036528 - DNA, 25 bp, Homo sapien
tcctccctggacagtgcagagggtc

SEQ ID NO: 2036529 - DNA, 25 bp, Homo sapien
caaaccgtgccgggagccagtgttg

SEQ ID NO: 2036530 - DNA, 25 bp, Homo sapien
aaaccactgggcacgagagcctcct

SEQ ID NO: 2036531 - DNA, 25 bp, Homo sapien
ctggacagtgcagagggtcttgccc

SEQ ID NO: 2036532 - DNA, 25 bp, Homo sapien
ggtcactgtcggattcagtgctggt

SEQ ID NO: 2036533 - DNA, 25 bp, Homo sapien
ccagggtcactgtcggattcagtgc

SEQ ID NO: 2036534 - DNA, 25 bp, Homo sapien
cactgtcggattcagtgctggtcat

SEQ ID NO: 2036535 - DNA, 25 bp, Homo sapien
cagggtcactgtcggattcagtgct

SEQ ID NO: 2036536 - DNA, 25 bp, Homo sapien
ggtgtcgtcctctgttcctgtgctg

SEQ ID NO: 2036537 - DNA, 25 bp, Homo sapien
gggtgtcgtcctctgttcctgtgct

SEQ ID NO: 2036538 - DNA, 25 bp, Homo sapien
tgtcgtcctctgttcctgtgctggc

SEQ ID NO: 2036539 - DNA, 25 bp, Homo sapien
tcgtcctctgttcctgtgctggcct

SEQ ID NO: 2036540 - DNA, 25 bp, Homo sapien
tgagtgggtggcaagcacgtggtct

SEQ ID NO: 2036541 - DNA, 25 bp, Homo sapien
agtgggtggcaagcacgtggtcttt

SEQ ID NO: 2036542 - DNA, 25 bp, Homo sapien
cgcagccaggactgagtgggtggca

SEQ ID NO: 2036543 - DNA, 25 bp, Homo sapien
ccaggactgagtgggtggcaagcac

SEQ ID NO: 2036544 - DNA, 25 bp, Homo sapien
cgtggaatatgataccgctgtgcaa

SEQ ID NO: 2036545 - DNA, 25 bp, Homo sapien
gaactccaggcagttacaacagcgg

SEQ ID NO: 2036546 - DNA, 25 bp, Homo sapien
tgggtatcacccacaggacaaggca

SEQ ID NO: 2036547 - DNA, 25 bp, Homo sapien
ctacacactgttgggtgagaaagca

SEQ ID NO: 2036548 - DNA, 25 bp, Homo sapien
tgaatttcaactcctcctgttcgga

SEQ ID NO: 2036549 - DNA, 25 bp, Homo sapien
tcaactcctcctgttcggaatgtgc

SEQ ID NO: 2036550 - DNA, 25 bp, Homo sapien
tcctgttcggaatgtgctgcagctg

SEQ ID NO: 2036551 - DNA, 25 bp, Homo sapien
tcctcctgttcggaatgtgctgcag

SEQ ID NO: 2036552 - DNA, 25 bp, Homo sapien
tacatgacagcatacacgacagatg

SEQ ID NO: 2036553 - DNA, 25 bp, Homo sapien
aggcttggaattggaacaccgagga

SEQ ID NO: 2036554 - DNA, 25 bp, Homo sapien
acagatgcagagagccggatttccc

SEQ ID NO: 2036555 - DNA, 25 bp, Homo sapien
gacttcctgcgtaatctttcccaca

SEQ ID NO: 2036556 - DNA, 25 bp, Homo sapien
tctgccactccattcagatgtgtcc

SEQ ID NO: 2036557 - DNA, 25 bp, Homo sapien
gggagatgaagtttgtacccatggt

SEQ ID NO: 2036558 - DNA, 25 bp, Homo sapien
cattcagatgtgtccacgtctccat

SEQ ID NO: 2036559 - DNA, 25 bp, Homo sapien
agtttgtacccatggtcatctgtcc

SEQ ID NO: 2036560 - DNA, 25 bp, Homo sapien
gcctcggagaacctgaagggctgca

SEQ ID NO: 2036561 - DNA, 25 bp, Homo sapien
cggtgtctgcggcagcttccgcatc

SEQ ID NO: 2036562 - DNA, 25 bp, Homo sapien
ccaggcgcctcggagaacctgaagg

SEQ ID NO: 2036563 - DNA, 25 bp, Homo sapien
tcatgacatggccttgagagcagcg

SEQ ID NO: 2036564 - DNA, 25 bp, Homo sapien
gaaccagcggctcgctgagcctggg

SEQ ID NO: 2036565 - DNA, 25 bp, Homo sapien
gggaaccagcggctcgctgagcctg

SEQ ID NO: 2036566 - DNA, 25 bp, Homo sapien
ctgcagggaaccagcggctcgctga

SEQ ID NO: 2036567 - DNA, 25 bp, Homo sapien
ccagcggctcgctgagcctggggct

SEQ ID NO: 2036568 - DNA, 25 bp, Homo sapien
cccagaagtgcaaaacgaacaggct

SEQ ID NO: 2036569 - DNA, 25 bp, Homo sapien
ctcggtacggcccaaggcagcgaag

SEQ ID NO: 2036570 - DNA, 25 bp, Homo sapien
tttccgcggccaaagtgatgctgcc

SEQ ID NO: 2036571 - DNA, 25 bp, Homo sapien
gctgccaggattggttatgacccca

SEQ ID NO: 2036572 - DNA, 25 bp, Homo sapien
tggagagctcgtgccaaaacgtcct

SEQ ID NO: 2036573 - DNA, 25 bp, Homo sapien
ggctcccagagcgcgaagtcgcgat

SEQ ID NO: 2036574 - DNA, 25 bp, Homo sapien
agtcgcgatcctcggcggtggagag

SEQ ID NO: 2036575 - DNA, 25 bp, Homo sapien
cggtggagagctcgtgccaaaacgt

SEQ ID NO: 2036576 - DNA, 25 bp, Homo sapien
cgggcgtctgcaaaccaggtgacag

SEQ ID NO: 2036577 - DNA, 25 bp, Homo sapien
cgagcaaagcttccgcgatgcgagg

SEQ ID NO: 2036578 - DNA, 25 bp, Homo sapien
caggtgtggctcttgcgaggtgcgc

SEQ ID NO: 2036579 - DNA, 25 bp, Homo sapien
ctggcgagtggctgcatgcatctct

SEQ ID NO: 2036580 - DNA, 25 bp, Homo sapien
aaatcacaacgggagctgggcgcgg

SEQ ID NO: 2036581 - DNA, 25 bp, Homo sapien
ggaaatcacaacgggagctgggcgc

SEQ ID NO: 2036582 - DNA, 25 bp, Homo sapien
atcacaacgggagctgggcgcggga

SEQ ID NO: 2036583 - DNA, 25 bp, Homo sapien
ctggaaatcacaacgggagctgggc

SEQ ID NO: 2036584 - DNA, 25 bp, Homo sapien
cctgaggagtcttccctgcgcttcg

SEQ ID NO: 2036585 - DNA, 25 bp, Homo sapien
ctgaggagtcttccctgcgcttcgc

SEQ ID NO: 2036586 - DNA, 25 bp, Homo sapien
ccctgaggagtcttccctgcgcttc

SEQ ID NO: 2036587 - DNA, 25 bp, Homo sapien
gaggagtcttccctgcgcttcgcac

SEQ ID NO: 2036588 - DNA, 25 bp, Homo sapien
cgctcgtggtcgaacaggcagcatt

SEQ ID NO: 2036589 - DNA, 25 bp, Homo sapien
tattcatatcccaacagacccaagc

SEQ ID NO: 2036590 - DNA, 25 bp, Homo sapien
tggcagcaactgtaaagtaaggtct

SEQ ID NO: 2036591 - DNA, 25 bp, Homo sapien
tcctaagtcattgcgtggcagcaac

SEQ ID NO: 2036592 - DNA, 25 bp, Homo sapien
tataagcttcgtgtgaaatggctgc

SEQ ID NO: 2036593 - DNA, 25 bp, Homo sapien
gctccagacatcaaggaggtccaca

SEQ ID NO: 2036594 - DNA, 25 bp, Homo sapien
cacatgcaggttgactatcacagac

SEQ ID NO: 2036595 - DNA, 25 bp, Homo sapien
cattcctgccaaacgctgaagttgt

SEQ ID NO: 2036596 - DNA, 25 bp, Homo sapien
gacagtgctcggttggcttctgtcc

SEQ ID NO: 2036597 - DNA, 25 bp, Homo sapien
ttcttcctaatgatgagatgcagag

SEQ ID NO: 2036598 - DNA, 25 bp, Homo sapien
ttggtgacagtgctcggttggcttc

SEQ ID NO: 2036599 - DNA, 25 bp, Homo sapien
ttcctaatgatgagatgcagagttc

SEQ ID NO: 2036600 - DNA, 25 bp, Homo sapien
atccacttctgtcctttttccaaga

SEQ ID NO: 2036601 - DNA, 25 bp, Homo sapien
ggcatccacttctgtcctttttcca

SEQ ID NO: 2036602 - DNA, 25 bp, Homo sapien
cggcatccacttctgtcctttttcc

SEQ ID NO: 2036603 - DNA, 25 bp, Homo sapien
acttctgtcctttttccaagatcat

SEQ ID NO: 2036604 - DNA, 25 bp, Homo sapien
tccacttctagtatactgctgccaa

SEQ ID NO: 2036605 - DNA, 25 bp, Homo sapien
ccacttctagtatactgctgccaaa

SEQ ID NO: 2036606 - DNA, 25 bp, Homo sapien
ctaacgcgcgaggagtaggctgcat

SEQ ID NO: 2036607 - DNA, 25 bp, Homo sapien
ggaaacttccgcaaaagccctgatg

SEQ ID NO: 2036608 - DNA, 25 bp, Homo sapien
caaaactggccaggaagacggactc

SEQ ID NO: 2036609 - DNA, 25 bp, Homo sapien
tatctccggagacggaaacaccagg

SEQ ID NO: 2036610 - DNA, 25 bp, Homo sapien
tcattccagtgttaaggttctagga

SEQ ID NO: 2036611 - DNA, 25 bp, Homo sapien
gctccgggtaacaaggttctcagac

SEQ ID NO: 2036612 - DNA, 25 bp, Homo sapien
ttctcagactgcacatgggcacatg

SEQ ID NO: 2036613 - DNA, 25 bp, Homo sapien
tggaaaatacagtaggcaggaagtc

SEQ ID NO: 2036614 - DNA, 25 bp, Homo sapien
gattgtgtatacagtgcagaaaggg

SEQ ID NO: 2036615 - DNA, 25 bp, Homo sapien
aaagtgcttgtacatggttttttca

SEQ ID NO: 2036616 - DNA, 25 bp, Homo sapien
cctagggggataaccgagtgtgtcg

SEQ ID NO: 2036617 - DNA, 25 bp, Homo sapien
tgtcatcccttctactggtggcccc

SEQ ID NO: 2036618 - DNA, 25 bp, Homo sapien
agagtgagagtgtatttagtaagtc

SEQ ID NO: 2036619 - DNA, 25 bp, Homo sapien
ttttcccaactctaagtatactgga

SEQ ID NO: 2036620 - DNA, 25 bp, Homo sapien
caagttaggtcgtttccaattctgc

SEQ ID NO: 2036621 - DNA, 25 bp, Homo sapien
tgtaaaatgtcatgacctgcaagtt

SEQ ID NO: 2036622 - DNA, 25 bp, Homo sapien
tccttgtcggtgaccaagcatggtg

SEQ ID NO: 2036623 - DNA, 25 bp, Homo sapien
gaacaactgggcgaaagggcactac

SEQ ID NO: 2036624 - DNA, 25 bp, Homo sapien
ctgtttaaacggcacgggactctct

SEQ ID NO: 2036625 - DNA, 25 bp, Homo sapien
ctctttgttgcaggccagacgggtg

SEQ ID NO: 2036626 - DNA, 25 bp, Homo sapien
tcagcaagatccgtgaggagttccc

SEQ ID NO: 2036627 - DNA, 25 bp, Homo sapien
caagatccgtgaggagttcccggac

SEQ ID NO: 2036628 - DNA, 25 bp, Homo sapien
ggagttcccggaccgcatcatgaac

SEQ ID NO: 2036629 - DNA, 25 bp, Homo sapien
cagcaagatccgtgaggagttcccg

SEQ ID NO: 2036630 - DNA, 25 bp, Homo sapien
ccatggagactttctactagaggac

SEQ ID NO: 2036631 - DNA, 25 bp, Homo sapien
taattgtgttggtgtcggcccctca

SEQ ID NO: 2036632 - DNA, 25 bp, Homo sapien
gagaattgcgggttctacccagtca

SEQ ID NO: 2036633 - DNA, 25 bp, Homo sapien
tggatagtcggaatagagccgcccc

SEQ ID NO: 2036634 - DNA, 25 bp, Homo sapien
tgtcggtgctatctggctttgtcac

SEQ ID NO: 2036635 - DNA, 25 bp, Homo sapien
gcacaggttgagcagccatccaggg

SEQ ID NO: 2036636 - DNA, 25 bp, Homo sapien
gcttaaggttgctcacctcaccaga

SEQ ID NO: 2036637 - DNA, 25 bp, Homo sapien
tcaccagaaacatgggtgttgtcgg

SEQ ID NO: 2036638 - DNA, 25 bp, Homo sapien
ctgtgagagggcagcccacgctggc

SEQ ID NO: 2036639 - DNA, 25 bp, Homo sapien
agggcagcccacgctggctccatgc

SEQ ID NO: 2036640 - DNA, 25 bp, Homo sapien
tgagagggcagcccacgctggctcc

SEQ ID NO: 2036641 - DNA, 25 bp, Homo sapien
agagggcagcccacgctggctccat

SEQ ID NO: 2036642 - DNA, 25 bp, Homo sapien
caagtgatctggattcaatctttaa

SEQ ID NO: 2036643 - DNA, 25 bp, Homo sapien
acagcaacaagtgatctggattcaa

SEQ ID NO: 2036644 - DNA, 25 bp, Homo sapien
gtagaaaaccattccattaagacag

SEQ ID NO: 2036645 - DNA, 25 bp, Homo sapien
tacagctcctgtagaaaaccattcc

SEQ ID NO: 2036646 - DNA, 25 bp, Homo sapien
aagagtccagtgcaacgatccctgc

SEQ ID NO: 2036647 - DNA, 25 bp, Homo sapien
caatgaggctatgggacagtgtgca

SEQ ID NO: 2036648 - DNA, 25 bp, Homo sapien
gaaataatgcaccagctgaaaccac

SEQ ID NO: 2036649 - DNA, 25 bp, Homo sapien
cagtggacagactgagatggcctcc

SEQ ID NO: 2036650 - DNA, 25 bp, Homo sapien
cataggtagatttttccgcaaatgg

SEQ ID NO: 2036651 - DNA, 25 bp, Homo sapien
aattcttcataggtagatttttccg

SEQ ID NO: 2036652 - DNA, 25 bp, Homo sapien
gggcccaaaagttcaaccatatcat

SEQ ID NO: 2036653 - DNA, 25 bp, Homo sapien
tagatttttccgcaaatggtctggg

SEQ ID NO: 2036654 - DNA, 25 bp, Homo sapien
tacaaaagcttgctgctcatgctgc

SEQ ID NO: 2036655 - DNA, 25 bp, Homo sapien
cagtagccaatcaagcagtcatgca

SEQ ID NO: 2036656 - DNA, 25 bp, Homo sapien
gcaggtgtagcgcactctgatgcct

SEQ ID NO: 2036657 - DNA, 25 bp, Homo sapien
ccccatgtagatggtggtcccgtaa

SEQ ID NO: 2036658 - DNA, 25 bp, Homo sapien
cggccctatctcctgcagagccgtc

SEQ ID NO: 2036659 - DNA, 25 bp, Homo sapien
ggccctatctcctgcagagccgtcc

SEQ ID NO: 2036660 - DNA, 25 bp, Homo sapien
gccctatctcctgcagagccgtcct

SEQ ID NO: 2036661 - DNA, 25 bp, Homo sapien
ggagatttgcccaaccttttcattc

SEQ ID NO: 2036662 - DNA, 25 bp, Homo sapien
tataagcatcattaataagtattcg

SEQ ID NO: 2036663 - DNA, 25 bp, Homo sapien
taaggtttctccaataccatgtccc

SEQ ID NO: 2036664 - DNA, 25 bp, Homo sapien
tcatctatcaatcttgcagtggctt

SEQ ID NO: 2036665 - DNA, 25 bp, Homo sapien
cctttgccacgtgggatgatggata

SEQ ID NO: 2036666 - DNA, 25 bp, Homo sapien
gaagatttcttcagagactcgacca

SEQ ID NO: 2036667 - DNA, 25 bp, Homo sapien
tactgagcataacctagtcctttgc

SEQ ID NO: 2036668 - DNA, 25 bp, Homo sapien
tcatacacatcctatccaagagctg

SEQ ID NO: 2036669 - DNA, 25 bp, Homo sapien
agatcctactacagatgaagacttg

SEQ ID NO: 2036670 - DNA, 25 bp, Homo sapien
cagtgttgaagatcctactacagat

SEQ ID NO: 2036671 - DNA, 25 bp, Homo sapien
gttgaagatcctactacagatgaag

SEQ ID NO: 2036672 - DNA, 25 bp, Homo sapien
tgaagatcctactacagatgaagac

SEQ ID NO: 2036673 - DNA, 25 bp, Homo sapien
ctgtgtataaacagataaactcatt

SEQ ID NO: 2036674 - DNA, 25 bp, Homo sapien
tgtgtataaacagataaactcattg

SEQ ID NO: 2036675 - DNA, 25 bp, Homo sapien
gtgtataaacagataaactcattga

SEQ ID NO: 2036676 - DNA, 25 bp, Homo sapien
cactttgctgctcgggatggtctta

SEQ ID NO: 2036677 - DNA, 25 bp, Homo sapien
gcaggccaagatgctcggcagcctt

SEQ ID NO: 2036678 - DNA, 25 bp, Homo sapien
acatcaagccacaatgaagatacag

SEQ ID NO: 2036679 - DNA, 25 bp, Homo sapien
cattcaactctgctgtcggacgtgg

SEQ ID NO: 2036680 - DNA, 25 bp, Homo sapien
gatgagatcccacctatcaacgttt

SEQ ID NO: 2036681 - DNA, 25 bp, Homo sapien
gaaatttttgcatggtcaaggccac

SEQ ID NO: 2036682 - DNA, 25 bp, Homo sapien
gaattatcctggtacctctgtgaac

SEQ ID NO: 2036683 - DNA, 25 bp, Homo sapien
tatgatgcaagggttaacgttcacc

SEQ ID NO: 2036684 - DNA, 25 bp, Homo sapien
gacggtttgtgcaactatggttacc

SEQ ID NO: 2036685 - DNA, 25 bp, Homo sapien
caggttctctgggattgccactgtg

SEQ ID NO: 2036686 - DNA, 25 bp, Homo sapien
ggagattatgaaaaaccctttggca

SEQ ID NO: 2036687 - DNA, 25 bp, Homo sapien
tagttgtcggcctgagatttgggca

SEQ ID NO: 2036688 - DNA, 25 bp, Homo sapien
tggtatgccacagtcttcttctcct

SEQ ID NO: 2036689 - DNA, 25 bp, Homo sapien
ttcgtggtatgccacagtcttcttc

SEQ ID NO: 2036690 - DNA, 25 bp, Homo sapien
gcgtgctccagataccagccggcaa

SEQ ID NO: 2036691 - DNA, 25 bp, Homo sapien
tttaaaagcgggtctgcgtgctcca

SEQ ID NO: 2036692 - DNA, 25 bp, Homo sapien
tacaggtccctgttactggcacatc

SEQ ID NO: 2036693 - DNA, 25 bp, Homo sapien
gcttgtctgctgatgcaccttcagt

SEQ ID NO: 2036694 - DNA, 25 bp, Homo sapien
tcgccctactgccagcgcctcattt

SEQ ID NO: 2036695 - DNA, 25 bp, Homo sapien
tggcacatcttcctcgcttgtctgc

SEQ ID NO: 2036696 - DNA, 25 bp, Homo sapien
tgccttgcagcaatcaacgcagctt

SEQ ID NO: 2036697 - DNA, 25 bp, Homo sapien
cttcattacagacattagcaacatc

SEQ ID NO: 2036698 - DNA, 25 bp, Homo sapien
gcaatcaacgcagcttcattacaga

SEQ ID NO: 2036699 - DNA, 25 bp, Homo sapien
tggaatctgacagatgccttgcagc

SEQ ID NO: 2036700 - DNA, 25 bp, Homo sapien
aaccctggagttaaagatgccagtt

SEQ ID NO: 2036701 - DNA, 25 bp, Homo sapien
aaaccctggagttaaagatgccagt

SEQ ID NO: 2036702 - DNA, 25 bp, Homo sapien
accctggagttaaagatgccagttt

SEQ ID NO: 2036703 - DNA, 25 bp, Homo sapien
cggggtccaggatatctggtcgatt

SEQ ID NO: 2036704 - DNA, 25 bp, Homo sapien
gcgcggggtccaggatatctggtcg

SEQ ID NO: 2036705 - DNA, 25 bp, Homo sapien
ccaggatatctggtcgattggtgcc

SEQ ID NO: 2036706 - DNA, 25 bp, Homo sapien
atatctggtcgattggtgccggcca

SEQ ID NO: 2036707 - DNA, 25 bp, Homo sapien
tcttccttcccaccgcatcgatttc

SEQ ID NO: 2036708 - DNA, 25 bp, Homo sapien
caccgcatcgatttcatcgatgaag

SEQ ID NO: 2036709 - DNA, 25 bp, Homo sapien
tcgatttcatcgatgaagaggatgc

SEQ ID NO: 2036710 - DNA, 25 bp, Homo sapien
tttcatcgatgaagaggatgcaagg

SEQ ID NO: 2036711 - DNA, 25 bp, Homo sapien
ggccttagctagcagcgtcttccca

SEQ ID NO: 2036712 - DNA, 25 bp, Homo sapien
gaaatctaacgaccaatgatgaact

SEQ ID NO: 2036713 - DNA, 25 bp, Homo sapien
aatctaacgaccaatgatgaactta

SEQ ID NO: 2036714 - DNA, 25 bp, Homo sapien
gaagtagaaatctaacgaccaatga

SEQ ID NO: 2036715 - DNA, 25 bp, Homo sapien
tagaaatctaacgaccaatgatgaa

SEQ ID NO: 2036716 - DNA, 25 bp, Homo sapien
taggggcaccaagccctgtagggta

SEQ ID NO: 2036717 - DNA, 25 bp, Homo sapien
tacttaatagctgatccatttaaca

SEQ ID NO: 2036718 - DNA, 25 bp, Homo sapien
tatgaagttaatgctccacgcctag

SEQ ID NO: 2036719 - DNA, 25 bp, Homo sapien
tagccctaggggcaccaagccctgt

SEQ ID NO: 2036720 - DNA, 25 bp, Homo sapien
gtgggcaagagcatatttgctggaa

SEQ ID NO: 2036721 - DNA, 25 bp, Homo sapien
tccactggatcctgtgccgtgaacc

SEQ ID NO: 2036722 - DNA, 25 bp, Homo sapien
cagtgggcaagagcatatttgctgg

SEQ ID NO: 2036723 - DNA, 25 bp, Homo sapien
tgtgccgtgaacctcagcgccagca

SEQ ID NO: 2036724 - DNA, 25 bp, Homo sapien
ctcgagttgggcagaggctagccta

SEQ ID NO: 2036725 - DNA, 25 bp, Homo sapien
ccaaaacgatcctcgagttgggcag

SEQ ID NO: 2036726 - DNA, 25 bp, Homo sapien
aaaacgatcctcgagttgggcagag

SEQ ID NO: 2036727 - DNA, 25 bp, Homo sapien
aacgatcctcgagttgggcagaggc

SEQ ID NO: 2036728 - DNA, 25 bp, Homo sapien
cagaattataacttcagagatcaag

SEQ ID NO: 2036729 - DNA, 25 bp, Homo sapien
acttcacagaattataacttcagag

SEQ ID NO: 2036730 - DNA, 25 bp, Homo sapien
ttataacttcagagatcaagaaaca

SEQ ID NO: 2036731 - DNA, 25 bp, Homo sapien
caaacttcacagaattataacttca

SEQ ID NO: 2036732 - DNA, 25 bp, Homo sapien
tttctccgacactgaagagtccgcc

SEQ ID NO: 2036733 - DNA, 25 bp, Homo sapien
gcgatgatgagcaccgtaggcagca

SEQ ID NO: 2036734 - DNA, 25 bp, Homo sapien
agaccttggcagtggtttctccgac

SEQ ID NO: 2036735 - DNA, 25 bp, Homo sapien
gcagtggtttctccgacactgaaga

SEQ ID NO: 2036736 - DNA, 25 bp, Homo sapien
gacaacaggcacccgattttctcct

SEQ ID NO: 2036737 - DNA, 25 bp, Homo sapien
tcactttcagcaatgtagacaacag

SEQ ID NO: 2036738 - DNA, 25 bp, Homo sapien
ccaattcctgctgtaaagtttccag

SEQ ID NO: 2036739 - DNA, 25 bp, Homo sapien
tccttctatgcccaattcctgctgt

SEQ ID NO: 2036740 - DNA, 25 bp, Homo sapien
gaatgtagtgaaactaaaaggttca

SEQ ID NO: 2036741 - DNA, 25 bp, Homo sapien
ggtcaaggctattctaccaatcagc

SEQ ID NO: 2036742 - DNA, 25 bp, Homo sapien
gactgaatatgagccctgactcctg

SEQ ID NO: 2036743 - DNA, 25 bp, Homo sapien
tgatgttcaaaatccgagcaccgca

SEQ ID NO: 2036744 - DNA, 25 bp, Homo sapien
aacagatgcgccttgctgtgccagg

SEQ ID NO: 2036745 - DNA, 25 bp, Homo sapien
tcagaatagattaaccacagaggat

SEQ ID NO: 2036746 - DNA, 25 bp, Homo sapien
ttccaaccagtgttactgagtgagg

SEQ ID NO: 2036747 - DNA, 25 bp, Homo sapien
tcatagagagcaacaagtcatcgca

SEQ ID NO: 2036748 - DNA, 25 bp, Homo sapien
catggttacaaagccccaaaacctg

SEQ ID NO: 2036749 - DNA, 25 bp, Homo sapien
cactgcccagttctgatatatctgg

SEQ ID NO: 2036750 - DNA, 25 bp, Homo sapien
cctagagtatgaggcaggttttcct

SEQ ID NO: 2036751 - DNA, 25 bp, Homo sapien
gatgttagtaagatcacccctgcca

SEQ ID NO: 2036752 - DNA, 25 bp, Homo sapien
tatctggtgcgtataactcctagag

SEQ ID NO: 2036753 - DNA, 25 bp, Homo sapien
gcttgttgacgacttccaatctgtc

SEQ ID NO: 2036754 - DNA, 25 bp, Homo sapien
gaacaaaacgcttgttgacgacttc

SEQ ID NO: 2036755 - DNA, 25 bp, Homo sapien
tgttgacgacttccaatctgtctac

SEQ ID NO: 2036756 - DNA, 25 bp, Homo sapien
aaacgcttgttgacgacttccaatc

SEQ ID NO: 2036757 - DNA, 25 bp, Homo sapien
aagatagttattgacaaagtccttc

SEQ ID NO: 2036758 - DNA, 25 bp, Homo sapien
agatagttattgacaaagtccttcc

SEQ ID NO: 2036759 - DNA, 25 bp, Homo sapien
tggaccaccagtgagaatcatcttt

SEQ ID NO: 2036760 - DNA, 25 bp, Homo sapien
ctggaccaccagtgagaatcatctt

SEQ ID NO: 2036761 - DNA, 25 bp, Homo sapien
ttgccacctcgttttccaccgccac

SEQ ID NO: 2036762 - DNA, 25 bp, Homo sapien
ttcttgccacctcgttttccaccgc

SEQ ID NO: 2036763 - DNA, 25 bp, Homo sapien
cccataacttctttaggttcactag

SEQ ID NO: 2036764 - DNA, 25 bp, Homo sapien
tctctcccataacttctttaggttc

SEQ ID NO: 2036765 - DNA, 25 bp, Homo sapien
ataacttctttaggttcactagctt

SEQ ID NO: 2036766 - DNA, 25 bp, Homo sapien
tctcccataacttctttaggttcac

SEQ ID NO: 2036767 - DNA, 25 bp, Homo sapien
tgcttgagttgtaacaaatcggtaa

SEQ ID NO: 2036768 - DNA, 25 bp, Homo sapien
ttgcttgagttgtaacaaatcggta

SEQ ID NO: 2036769 - DNA, 25 bp, Homo sapien
cttgagttgtaacaaatcggtaaag

SEQ ID NO: 2036770 - DNA, 25 bp, Homo sapien
gcttgagttgtaacaaatcggtaaa

SEQ ID NO: 2036771 - DNA, 25 bp, Homo sapien
ttgagctgactacaagggcgctggg

SEQ ID NO: 2036772 - DNA, 25 bp, Homo sapien
tacaagggcgctgggatagcaggag

SEQ ID NO: 2036773 - DNA, 25 bp, Homo sapien
gccaagccaggttcccgtggccgac

SEQ ID NO: 2036774 - DNA, 25 bp, Homo sapien
ccaccacccgtacaccagtgcaagg

SEQ ID NO: 2036775 - DNA, 25 bp, Homo sapien
gagagcgactattcgacacgtgaac

SEQ ID NO: 2036776 - DNA, 25 bp, Homo sapien
tgaggaaccgtgtcacttaaacagt

SEQ ID NO: 2036777 - DNA, 25 bp, Homo sapien
gaaccgtgtcacttaaacagtgaga

SEQ ID NO: 2036778 - DNA, 25 bp, Homo sapien
cacttaaacagtgagagcgactatt

SEQ ID NO: 2036779 - DNA, 25 bp, Homo sapien
gcccacgccgccaggcacgaggagc

SEQ ID NO: 2036780 - DNA, 25 bp, Homo sapien
cgccaggcacgaggagctgctgtag

SEQ ID NO: 2036781 - DNA, 25 bp, Homo sapien
acagccgcaaacagcggtgcgccat

SEQ ID NO: 2036782 - DNA, 25 bp, Homo sapien
gccccacagccgcaaacagcggtgc

SEQ ID NO: 2036783 - DNA, 25 bp, Homo sapien
ggccgccgccgtggccctctcggcc

SEQ ID NO: 2036784 - DNA, 25 bp, Homo sapien
tggccctctcggcccgggacgctgc

SEQ ID NO: 2036785 - DNA, 25 bp, Homo sapien
cgccgccgtggccctctcggcccgg

SEQ ID NO: 2036786 - DNA, 25 bp, Homo sapien
cgtggccctctcggcccgggacgct

SEQ ID NO: 2036787 - DNA, 25 bp, Homo sapien
gactggcggcctcgggaagcgggct

SEQ ID NO: 2036788 - DNA, 25 bp, Homo sapien
tcggctcggggaaaggccgccaggc

SEQ ID NO: 2036789 - DNA, 25 bp, Homo sapien
cgcgccggcggctcacggaggagcc

SEQ ID NO: 2036790 - DNA, 25 bp, Homo sapien
caggcgcgggcaggcgacgactggc

SEQ ID NO: 2036791 - DNA, 25 bp, Homo sapien
tgacgtcggcgtctcctctccgagg

SEQ ID NO: 2036792 - DNA, 25 bp, Homo sapien
gctgacgtcggcgtctcctctccga

SEQ ID NO: 2036793 - DNA, 25 bp, Homo sapien
ccggcgcgctgacgtcggcgtctcc

SEQ ID NO: 2036794 - DNA, 25 bp, Homo sapien
gcgcgctgacgtcggcgtctcctct

SEQ ID NO: 2036795 - DNA, 25 bp, Homo sapien
tgcagtgagccgagacagagccatt

SEQ ID NO: 2036796 - DNA, 25 bp, Homo sapien
acccgggtggtggaggttgcagtga

SEQ ID NO: 2036797 - DNA, 25 bp, Homo sapien
tgagccgagacagagccattgcact

SEQ ID NO: 2036798 - DNA, 25 bp, Homo sapien
caggaaaatcgcttgtacccgggtg

SEQ ID NO: 2036799 - DNA, 25 bp, Homo sapien
taaaagccccgtcagtagtacacat

SEQ ID NO: 2036800 - DNA, 25 bp, Homo sapien
gacttttacacacgcaggaagccta

SEQ ID NO: 2036801 - DNA, 25 bp, Homo sapien
gaagctatgcctaaagtcagaccag

SEQ ID NO: 2036802 - DNA, 25 bp, Homo sapien
catgacgtatgggacaaaaggaacc

SEQ ID NO: 2036803 - DNA, 25 bp, Homo sapien
tgagaccctaggtaccaaattgtgg

SEQ ID NO: 2036804 - DNA, 25 bp, Homo sapien
tgatgtggtatgaaatgcagccgcc

SEQ ID NO: 2036805 - DNA, 25 bp, Homo sapien
gctcatttctgcagcgtggccaaca

SEQ ID NO: 2036806 - DNA, 25 bp, Homo sapien
cgtatgagccaaacacactgagaca

SEQ ID NO: 2036807 - DNA, 25 bp, Homo sapien
tgctgacatcggcatctctgttaga

SEQ ID NO: 2036808 - DNA, 25 bp, Homo sapien
tacacgggatagaaacacagtcacg

SEQ ID NO: 2036809 - DNA, 25 bp, Homo sapien
tatgacttactgcttagggctgtgc

SEQ ID NO: 2036810 - DNA, 25 bp, Homo sapien
gctctggatctctctgtacacggga

SEQ ID NO: 2036811 - DNA, 25 bp, Homo sapien
caaacgagcaattggcggacctgtc

SEQ ID NO: 2036812 - DNA, 25 bp, Homo sapien
gacgctgactcgtagcacaaaagca

SEQ ID NO: 2036813 - DNA, 25 bp, Homo sapien
gaagtagctactggcttccaaagcc

SEQ ID NO: 2036814 - DNA, 25 bp, Homo sapien
ggacctgtcacgtttcatcaatcga

SEQ ID NO: 2036815 - DNA, 25 bp, Homo sapien
agactgcgccggcttgaactgatga

SEQ ID NO: 2036816 - DNA, 25 bp, Homo sapien
gatttccgaaatgaacttcttgcag

SEQ ID NO: 2036817 - DNA, 25 bp, Homo sapien
cctggcgaggacatgtagaaagact

SEQ ID NO: 2036818 - DNA, 25 bp, Homo sapien
ctcactgatcgtcctctctgaaggg

SEQ ID NO: 2036819 - DNA, 25 bp, Homo sapien
ctccatggtgctccagtcctccatc

SEQ ID NO: 2036820 - DNA, 25 bp, Homo sapien
atggtgctccagtcctccatcaact

SEQ ID NO: 2036821 - DNA, 25 bp, Homo sapien
agtcctccatcaactctttgggaaa

SEQ ID NO: 2036822 - DNA, 25 bp, Homo sapien
tccagtcctccatcaactctttggg

SEQ ID NO: 2036823 - DNA, 25 bp, Homo sapien
tgatttgtccatagacttagatttt

SEQ ID NO: 2036824 - DNA, 25 bp, Homo sapien
tcatctgatttgtccatagacttag

SEQ ID NO: 2036825 - DNA, 25 bp, Homo sapien
tctgatttgtccatagacttagatt

SEQ ID NO: 2036826 - DNA, 25 bp, Homo sapien
catctgatttgtccatagacttaga

SEQ ID NO: 2036827 - DNA, 25 bp, Homo sapien
gaggcagacgtttcaggcacaaggt

SEQ ID NO: 2036828 - DNA, 25 bp, Homo sapien
aagcacagaggcagacgtttcaggc

SEQ ID NO: 2036829 - DNA, 25 bp, Homo sapien
cagaggcagacgtttcaggcacaag

SEQ ID NO: 2036830 - DNA, 25 bp, Homo sapien
gcacagaggcagacgtttcaggcac

SEQ ID NO: 2036831 - DNA, 25 bp, Homo sapien
tgcagagcagaaggtcccaatgaaa

SEQ ID NO: 2036832 - DNA, 25 bp, Homo sapien
gcaatgctccgaagtggccgatgat

SEQ ID NO: 2036833 - DNA, 25 bp, Homo sapien
tcatactactttcccctctttgcag

SEQ ID NO: 2036834 - DNA, 25 bp, Homo sapien
tgaaaagataggaagagtggagtat

SEQ ID NO: 2036835 - DNA, 25 bp, Homo sapien
tcccaaataaaactggcaatgagca

SEQ ID NO: 2036836 - DNA, 25 bp, Homo sapien
tggcaatgagcagtaccgttaaaga

SEQ ID NO: 2036837 - DNA, 25 bp, Homo sapien
agcagtaccgttaaagaggcagtca

SEQ ID NO: 2036838 - DNA, 25 bp, Homo sapien
taaaactggcaatgagcagtaccgt

SEQ ID NO: 2036839 - DNA, 25 bp, Homo sapien
ctttttgcaacactgtgagcacacc

SEQ ID NO: 2036840 - DNA, 25 bp, Homo sapien
ttttgcaacactgtgagcacaccgg

SEQ ID NO: 2036841 - DNA, 25 bp, Homo sapien
tttttgcaacactgtgagcacaccg

SEQ ID NO: 2036842 - DNA, 25 bp, Homo sapien
tttgcaacactgtgagcacaccggc

SEQ ID NO: 2036843 - DNA, 25 bp, Homo sapien
atgtgtttggaattttcttatttgt

SEQ ID NO: 2036844 - DNA, 25 bp, Homo sapien
gaactgacaggtataagaccaagtg

SEQ ID NO: 2036845 - DNA, 25 bp, Homo sapien
ctcctggttcggcaacaaaagcaga

SEQ ID NO: 2036846 - DNA, 25 bp, Homo sapien
tataagaccaagtgaagaaggaaaa

SEQ ID NO: 2036847 - DNA, 25 bp, Homo sapien
ctcttacagaactgacaggtataag

SEQ ID NO: 2036848 - DNA, 25 bp, Homo sapien
atgcacacatggcttttttattgag

SEQ ID NO: 2036849 - DNA, 25 bp, Homo sapien
gactaaatgcacacatggctttttt

SEQ ID NO: 2036850 - DNA, 25 bp, Homo sapien
atgactaaatgcacacatggctttt

SEQ ID NO: 2036851 - DNA, 25 bp, Homo sapien
aaatgcacacatggcttttttattg

SEQ ID NO: 2036852 - DNA, 25 bp, Homo sapien
cattccactgggtagcagaattcct

SEQ ID NO: 2036853 - DNA, 25 bp, Homo sapien
tcaccaggacctggcgaatatgcat

SEQ ID NO: 2036854 - DNA, 25 bp, Homo sapien
tatgcatcacttcttccacagtaag

SEQ ID NO: 2036855 - DNA, 25 bp, Homo sapien
ttttcaaggcggtgtagatgtcttt

SEQ ID NO: 2036856 - DNA, 25 bp, Homo sapien
aaattcaaaatgtcacgtgaataag

SEQ ID NO: 2036857 - DNA, 25 bp, Homo sapien
gaacaggtttcccaatgaccactgg

SEQ ID NO: 2036858 - DNA, 25 bp, Homo sapien
ttcccttcagatcagacccctgatt

SEQ ID NO: 2036859 - DNA, 25 bp, Homo sapien
cagacccctgattagtagcttcaga

SEQ ID NO: 2036860 - DNA, 25 bp, Homo sapien
tctggaagtgcaaaatttcccttca

SEQ ID NO: 2036861 - DNA, 25 bp, Homo sapien
gaaagttcctcacgtttgctcaggt

SEQ ID NO: 2036862 - DNA, 25 bp, Homo sapien
aactctattccgttaagcagggcta

SEQ ID NO: 2036863 - DNA, 25 bp, Homo sapien
tacactaagactaaagatggcagaa

SEQ ID NO: 2036864 - DNA, 25 bp, Homo sapien
gggaccaagtgatctactgaaattt

SEQ ID NO: 2036865 - DNA, 25 bp, Homo sapien
tccggccccgcacttgattggtgga

SEQ ID NO: 2036866 - DNA, 25 bp, Homo sapien
gaacagtcttgtgcattcggaccct

SEQ ID NO: 2036867 - DNA, 25 bp, Homo sapien
gccattgtggtgcagtgacactgaa

SEQ ID NO: 2036868 - DNA, 25 bp, Homo sapien
aatggtttccctacaagcagctgcg

SEQ ID NO: 2036869 - DNA, 25 bp, Homo sapien
aaagggaagctaaatcttagagcgc

SEQ ID NO: 2036870 - DNA, 25 bp, Homo sapien
cactgcatgtgttcggcccgtttga

SEQ ID NO: 2036871 - DNA, 25 bp, Homo sapien
tggccgggtaaagaaccacactagc

SEQ ID NO: 2036872 - DNA, 25 bp, Homo sapien
cttgcttgctcatgtgtcaatggga

SEQ ID NO: 2036873 - DNA, 25 bp, Homo sapien
ggagaattgataatcaaatgccagc

SEQ ID NO: 2036874 - DNA, 25 bp, Homo sapien
cagcaggtcttcagtagaggcagga

SEQ ID NO: 2036875 - DNA, 25 bp, Homo sapien
aaaaagccaccgtggcacctgacca

SEQ ID NO: 2036876 - DNA, 25 bp, Homo sapien
gttaaaaagccaccgtggcacctga

SEQ ID NO: 2036877 - DNA, 25 bp, Homo sapien
tacaattaggtcacccgaggagaca

SEQ ID NO: 2036878 - DNA, 25 bp, Homo sapien
ctatacaattaggtcacccgaggag

SEQ ID NO: 2036879 - DNA, 25 bp, Homo sapien
gagaccacggcatgatcggtgcatc

SEQ ID NO: 2036880 - DNA, 25 bp, Homo sapien
ttcccagttatttccctcaactgag

SEQ ID NO: 2036881 - DNA, 25 bp, Homo sapien
tgcttcaaaaggatgagagctgagc

SEQ ID NO: 2036882 - DNA, 25 bp, Homo sapien
gcgtccttggccatacactggttat

SEQ ID NO: 2036883 - DNA, 25 bp, Homo sapien
cagagaagctgtttgtatggtagaa

SEQ ID NO: 2036884 - DNA, 25 bp, Homo sapien
ggtcgaaaaggcgtccttggccata

SEQ ID NO: 2036885 - DNA, 25 bp, Homo sapien
tgatgatatgggcaggaattttgga

SEQ ID NO: 2036886 - DNA, 25 bp, Homo sapien
tcaatggaatgtcgtctctggggtg

SEQ ID NO: 2036887 - DNA, 25 bp, Homo sapien
tgcctcacgttagtaggcgtttcct

SEQ ID NO: 2036888 - DNA, 25 bp, Homo sapien
ggaactgcctcacgttagtaggcgt

SEQ ID NO: 2036889 - DNA, 25 bp, Homo sapien
caggactggctcttcagggaaagag

SEQ ID NO: 2036890 - DNA, 25 bp, Homo sapien
ctgctgctggtcgacttgtgcagcg

SEQ ID NO: 2036891 - DNA, 25 bp, Homo sapien
tggtcgacttgtgcagcgtttcttc

SEQ ID NO: 2036892 - DNA, 25 bp, Homo sapien
ttccttgtggacacggcctccagga

SEQ ID NO: 2036893 - DNA, 25 bp, Homo sapien
gcaaagtacaggtggagaaatcgac

SEQ ID NO: 2036894 - DNA, 25 bp, Homo sapien
tacaggtggagaaatcgacttctta

SEQ ID NO: 2036895 - DNA, 25 bp, Homo sapien
ggagaaatcgacttcttagacattt

SEQ ID NO: 2036896 - DNA, 25 bp, Homo sapien
tgagcaaagtacaggtggagaaatc

SEQ ID NO: 2036897 - DNA, 25 bp, Homo sapien
cccaaataattatctgctaccctga

SEQ ID NO: 2036898 - DNA, 25 bp, Homo sapien
aattatctgctaccctgattaaaac

SEQ ID NO: 2036899 - DNA, 25 bp, Homo sapien
caatacttcccaaataattatctgc

SEQ ID NO: 2036900 - DNA, 25 bp, Homo sapien
tgctaccctgattaaaacagcagaa

SEQ ID NO: 2036901 - DNA, 25 bp, Homo sapien
ggagacccagcaggcaatgacgtat

SEQ ID NO: 2036902 - DNA, 25 bp, Homo sapien
tatacaatactgacatcgcagatgg

SEQ ID NO: 2036903 - DNA, 25 bp, Homo sapien
ggcaatgacgtatacaatactgaca

SEQ ID NO: 2036904 - DNA, 25 bp, Homo sapien
cagcaggcaatgacgtatacaatac

SEQ ID NO: 2036905 - DNA, 25 bp, Homo sapien
gaaatctggagaatactattagaat

SEQ ID NO: 2036906 - DNA, 25 bp, Homo sapien
tagcatataggtggatgttgacatc

SEQ ID NO: 2036907 - DNA, 25 bp, Homo sapien
tgacatcaggaaggatatgagatct

SEQ ID NO: 2036908 - DNA, 25 bp, Homo sapien
gatgtgggaagcattagcatatagg

SEQ ID NO: 2036909 - DNA, 25 bp, Homo sapien
gcactactgcatgtggctaactttt

SEQ ID NO: 2036910 - DNA, 25 bp, Homo sapien
tattaaggtaatataagctggaaaa

SEQ ID NO: 2036911 - DNA, 25 bp, Homo sapien
tgctgacttgttttaaccccacata

SEQ ID NO: 2036912 - DNA, 25 bp, Homo sapien
tgttccccaaacgagaagatattaa

SEQ ID NO: 2036913 - DNA, 25 bp, Homo sapien
cctcatcttgggagtcaagctgggt

SEQ ID NO: 2036914 - DNA, 25 bp, Homo sapien
tgtcaaacctccattcaccatagat

SEQ ID NO: 2036915 - DNA, 25 bp, Homo sapien
cctgctgtgaggtacttaacccgtt

SEQ ID NO: 2036916 - DNA, 25 bp, Homo sapien
gagctgtccagttcggccagagttg

SEQ ID NO: 2036917 - DNA, 25 bp, Homo sapien
gatgactccacaagattctttgtag

SEQ ID NO: 2036918 - DNA, 25 bp, Homo sapien
gggcaaagggcatgctaagtactaa

SEQ ID NO: 2036919 - DNA, 25 bp, Homo sapien
aaaacaagaatgtggcccggcatgg

SEQ ID NO: 2036920 - DNA, 25 bp, Homo sapien
taatttatagaccagcacactcgac

SEQ ID NO: 2036921 - DNA, 25 bp, Homo sapien
gcatgcagtctgtgaggctgccgta

SEQ ID NO: 2036922 - DNA, 25 bp, Homo sapien
taagacatgctaagtggccgcattg

SEQ ID NO: 2036923 - DNA, 25 bp, Homo sapien
gatgcaaggacagcttaacacatga

SEQ ID NO: 2036924 - DNA, 25 bp, Homo sapien
cacatatggaaagctgacagctaac

SEQ ID NO: 2036925 - DNA, 25 bp, Homo sapien
aacaaggcaaggatgaccacttcta

SEQ ID NO: 2036926 - DNA, 25 bp, Homo sapien
taacatgatacaccaccgtaacaga

SEQ ID NO: 2036927 - DNA, 25 bp, Homo sapien
taattatttcaacccatgagagtac

SEQ ID NO: 2036928 - DNA, 25 bp, Homo sapien
gagtactctgtacagcccagtgctg

SEQ ID NO: 2036929 - DNA, 25 bp, Homo sapien
atgagagtactctgtacagcccagt

SEQ ID NO: 2036930 - DNA, 25 bp, Homo sapien
caagtgatccactctgaagctttgt

SEQ ID NO: 2036931 - DNA, 25 bp, Homo sapien
tctggtgatacaggccgcagctttc

SEQ ID NO: 2036932 - DNA, 25 bp, Homo sapien
taatctgctacgtctaatctcctct

SEQ ID NO: 2036933 - DNA, 25 bp, Homo sapien
tattctttcatggaggctccgtggc

SEQ ID NO: 2036934 - DNA, 25 bp, Homo sapien
taatctcctctggtgatacaggccg

SEQ ID NO: 2036935 - DNA, 25 bp, Homo sapien
gatttcatgagcactcttttttaac

SEQ ID NO: 2036936 - DNA, 25 bp, Homo sapien
tctggatctgatgaagtcgaggatg

SEQ ID NO: 2036937 - DNA, 25 bp, Homo sapien
ggaggtctggatctgatgaagtcga

SEQ ID NO: 2036938 - DNA, 25 bp, Homo sapien
atgagcactcttttttaaccgaggg

SEQ ID NO: 2036939 - DNA, 25 bp, Homo sapien
cagtatttctgagggcaactaggga

SEQ ID NO: 2036940 - DNA, 25 bp, Homo sapien
tataaaaccaagtgacgtggctggg

SEQ ID NO: 2036941 - DNA, 25 bp, Homo sapien
gaatgaggctgaccctcagctctgc

SEQ ID NO: 2036942 - DNA, 25 bp, Homo sapien
ttaacaagcagctcaaatagccact

SEQ ID NO: 2036943 - DNA, 25 bp, Homo sapien
gatattttggccaagtgccgtggct

SEQ ID NO: 2036944 - DNA, 25 bp, Homo sapien
aatagaagatattttggccaagtgc

SEQ ID NO: 2036945 - DNA, 25 bp, Homo sapien
agatattttggccaagtgccgtggc

SEQ ID NO: 2036946 - DNA, 25 bp, Homo sapien
agaagatattttggccaagtgccgt

SEQ ID NO: 2036947 - DNA, 25 bp, Homo sapien
tcttttgcagcgaatgtcatccatt

SEQ ID NO: 2036948 - DNA, 25 bp, Homo sapien
tcaatgggcaaagggttgtactgcc

SEQ ID NO: 2036949 - DNA, 25 bp, Homo sapien
tgccgctcttggaccttcttaagtt

SEQ ID NO: 2036950 - DNA, 25 bp, Homo sapien
gtcatccattaacatctcataaggg

SEQ ID NO: 2036951 - DNA, 25 bp, Homo sapien
tttagtgggatagctggccatgttg

SEQ ID NO: 2036952 - DNA, 25 bp, Homo sapien
tggacttccacaatctaacacactc

SEQ ID NO: 2036953 - DNA, 25 bp, Homo sapien
gactgtcatgcctaccaactctaag

SEQ ID NO: 2036954 - DNA, 25 bp, Homo sapien
tagtactatgcctgaaaaactgtag

SEQ ID NO: 2036955 - DNA, 25 bp, Homo sapien
tctgtgctagattcatcgctctttt

SEQ ID NO: 2036956 - DNA, 25 bp, Homo sapien
tgtgctagattcatcgctcttttcc

SEQ ID NO: 2036957 - DNA, 25 bp, Homo sapien
agctcttccaagtctgtgctagatt

SEQ ID NO: 2036958 - DNA, 25 bp, Homo sapien
gctcttccaagtctgtgctagattc

SEQ ID NO: 2036959 - DNA, 25 bp, Homo sapien
tctagacttcatgaggcagaatccc

SEQ ID NO: 2036960 - DNA, 25 bp, Homo sapien
ggcacttgctgatgctcaatatata

SEQ ID NO: 2036961 - DNA, 25 bp, Homo sapien
gaatcatcgattcttcagagaagcc

SEQ ID NO: 2036962 - DNA, 25 bp, Homo sapien
tctgaagcaatctgatcccggatgc

SEQ ID NO: 2036963 - DNA, 25 bp, Homo sapien
tttttatactcatcagctcttcaca

SEQ ID NO: 2036964 - DNA, 25 bp, Homo sapien
ttttatactcatcagctcttcacac

SEQ ID NO: 2036965 - DNA, 25 bp, Homo sapien
ttctgtttttatactcatcagctct

SEQ ID NO: 2036966 - DNA, 25 bp, Homo sapien
cttttctgtttttatactcatcagc

SEQ ID NO: 2036967 - DNA, 25 bp, Homo sapien
ttgctttggggtgctcatgacagtg

SEQ ID NO: 2036968 - DNA, 25 bp, Homo sapien
actgctccgctcactagccattccc

SEQ ID NO: 2036969 - DNA, 25 bp, Homo sapien
caaacctaattgataaatgcgtgtg

SEQ ID NO: 2036970 - DNA, 25 bp, Homo sapien
tggggtgctcatgacagtgtccata

SEQ ID NO: 2036971 - DNA, 25 bp, Homo sapien
ctcaatcgaaacagggagatgtaga

SEQ ID NO: 2036972 - DNA, 25 bp, Homo sapien
gcttcccgcaggaggaaagcaagag

SEQ ID NO: 2036973 - DNA, 25 bp, Homo sapien
aatcgaaacagggagatgtagagga

SEQ ID NO: 2036974 - DNA, 25 bp, Homo sapien
agagatcggcttcccgcaggaggaa

SEQ ID NO: 2036975 - DNA, 25 bp, Homo sapien
tctcgcacacaagtgtgaatatcca

SEQ ID NO: 2036976 - DNA, 25 bp, Homo sapien
tagaaaaaggaacatctcgcacaca

SEQ ID NO: 2036977 - DNA, 25 bp, Homo sapien
ggaacatctcgcacacaagtgtgaa

SEQ ID NO: 2036978 - DNA, 25 bp, Homo sapien
aaaaggaacatctcgcacacaagtg

SEQ ID NO: 2036979 - DNA, 25 bp, Homo sapien
tgcatctgattcagtagggagatga

SEQ ID NO: 2036980 - DNA, 25 bp, Homo sapien
tactgcctgataatgatttggtgca

SEQ ID NO: 2036981 - DNA, 25 bp, Homo sapien
tttggtcagaaatgtatggagctcc

SEQ ID NO: 2036982 - DNA, 25 bp, Homo sapien
caaacagtgcacgacatactgcctg

SEQ ID NO: 2036983 - DNA, 25 bp, Homo sapien
gcccagccaaaaacctgtcctcgta

SEQ ID NO: 2036984 - DNA, 25 bp, Homo sapien
atgcccagccaaaaacctgtcctcg

SEQ ID NO: 2036985 - DNA, 25 bp, Homo sapien
tgcccagccaaaaacctgtcctcgt

SEQ ID NO: 2036986 - DNA, 25 bp, Homo sapien
ccatgcccagccaaaaacctgtcct

SEQ ID NO: 2036987 - DNA, 25 bp, Homo sapien
taaaaggtatccattcaaacttcta

SEQ ID NO: 2036988 - DNA, 25 bp, Homo sapien
tgttacattactggtgccagggttg

SEQ ID NO: 2036989 - DNA, 25 bp, Homo sapien
ctgtagtttaagacagcaatctggc

SEQ ID NO: 2036990 - DNA, 25 bp, Homo sapien
tgttagctcactttcagatgtatga

SEQ ID NO: 2036991 - DNA, 25 bp, Homo sapien
catgtgatcgataagctgctctagg

SEQ ID NO: 2036992 - DNA, 25 bp, Homo sapien
catctctatatgaccgaatagctga

SEQ ID NO: 2036993 - DNA, 25 bp, Homo sapien
taccgtcagcttccaccgtgttggc

SEQ ID NO: 2036994 - DNA, 25 bp, Homo sapien
tagccctcatcattgctaccgtcag

SEQ ID NO: 2036995 - DNA, 25 bp, Homo sapien
gggtacacattgctctcacagcatg

SEQ ID NO: 2036996 - DNA, 25 bp, Homo sapien
acattgctctcacagcatgtaccat

SEQ ID NO: 2036997 - DNA, 25 bp, Homo sapien
cacagggtacacattgctctcacag

SEQ ID NO: 2036998 - DNA, 25 bp, Homo sapien
ctggcacagggtacacattgctctc

SEQ ID NO: 2036999 - DNA, 25 bp, Homo sapien
cagcgatggcttccaaccatagcaa

SEQ ID NO: 2037000 - DNA, 25 bp, Homo sapien
tgcaaatatcaacaccagcgatggc

SEQ ID NO: 2037001 - DNA, 25 bp, Homo sapien
caaagacccaagaatcactcagcaa

SEQ ID NO: 2037002 - DNA, 25 bp, Homo sapien
taccttgcctacaggagctgatcca

SEQ ID NO: 2037003 - DNA, 25 bp, Homo sapien
caaaaaccacaccttacctatggag

SEQ ID NO: 2037004 - DNA, 25 bp, Homo sapien
gaacatcgagcatgataaatgccaa

SEQ ID NO: 2037005 - DNA, 25 bp, Homo sapien
gacatcaaactacaggtccaaaatt

SEQ ID NO: 2037006 - DNA, 25 bp, Homo sapien
gatacctgaaggaataatgaccaag

SEQ ID NO: 2037007 - DNA, 25 bp, Homo sapien
gacaaactagatcctcaaaaatggc

SEQ ID NO: 2037008 - DNA, 25 bp, Homo sapien
caaaaatggctagttatgactcagt

SEQ ID NO: 2037009 - DNA, 25 bp, Homo sapien
gctcactataacatcaaatccctgc

SEQ ID NO: 2037010 - DNA, 25 bp, Homo sapien
ggatcaaagttactgacagtgatac

SEQ ID NO: 2037011 - DNA, 25 bp, Homo sapien
tagtggctttcatatgttatttact

SEQ ID NO: 2037012 - DNA, 25 bp, Homo sapien
tggctttcatatgttatttactgct

SEQ ID NO: 2037013 - DNA, 25 bp, Homo sapien
gttaatagtggctttcatatgttat

SEQ ID NO: 2037014 - DNA, 25 bp, Homo sapien
agttaatagtggctttcatatgtta

SEQ ID NO: 2037015 - DNA, 25 bp, Homo sapien
catcctcttaatgctggagtgcgcc

SEQ ID NO: 2037016 - DNA, 25 bp, Homo sapien
tactaatcaaactgtggtcccagga

SEQ ID NO: 2037017 - DNA, 25 bp, Homo sapien
actatactgactgatgttgcctgaa

SEQ ID NO: 2037018 - DNA, 25 bp, Homo sapien
cacctgagggtttgttatctctgac

SEQ ID NO: 2037019 - DNA, 25 bp, Homo sapien
cagccactatcactaagcagtaggg

SEQ ID NO: 2037020 - DNA, 25 bp, Homo sapien
ctatgcttcagacatccttgtgttc

SEQ ID NO: 2037021 - DNA, 25 bp, Homo sapien
tgtacctaagggaagagatgccgag

SEQ ID NO: 2037022 - DNA, 25 bp, Homo sapien
gacctgtaatacttggcaccacctt

SEQ ID NO: 2037023 - DNA, 25 bp, Homo sapien
tcttccagtcctctttgacaataca

SEQ ID NO: 2037024 - DNA, 25 bp, Homo sapien
agcgtaagatcaggcaaagccatct

SEQ ID NO: 2037025 - DNA, 25 bp, Homo sapien
cataaagcgtaagatcaggcaaagc

SEQ ID NO: 2037026 - DNA, 25 bp, Homo sapien
ttttaacttcttgtgatgcaattcc

SEQ ID NO: 2037027 - DNA, 25 bp, Homo sapien
gaaattaagggctacccattgtcaa

SEQ ID NO: 2037028 - DNA, 25 bp, Homo sapien
aacagcctcatttatgcagctaaag

SEQ ID NO: 2037029 - DNA, 25 bp, Homo sapien
aattgtcacctaaacgagccagaag

SEQ ID NO: 2037030 - DNA, 25 bp, Homo sapien
cagctaaagttgtgcatgcatgcaa

SEQ ID NO: 2037031 - DNA, 25 bp, Homo sapien
atacattgtgaatatcccaatttac

SEQ ID NO: 2037032 - DNA, 25 bp, Homo sapien
gaagggtacagactgcctttcggca

SEQ ID NO: 2037033 - DNA, 25 bp, Homo sapien
tcaaggaagggtacagactgccttt

SEQ ID NO: 2037034 - DNA, 25 bp, Homo sapien
tacagactgcctttcggcaaacagt

SEQ ID NO: 2037035 - DNA, 25 bp, Homo sapien
ctgcctttcggcaaacagttactga

SEQ ID NO: 2037036 - DNA, 25 bp, Homo sapien
cctgataatctgcaagtaaccctcc

SEQ ID NO: 2037037 - DNA, 25 bp, Homo sapien
tttccctgataatctgcaagtaacc

SEQ ID NO: 2037038 - DNA, 25 bp, Homo sapien
taatctgcaagtaaccctccatagt

SEQ ID NO: 2037039 - DNA, 25 bp, Homo sapien
ctgcaagtaaccctccatagtccat

SEQ ID NO: 2037040 - DNA, 25 bp, Homo sapien
aagaaagagagcggccgggcaccat

SEQ ID NO: 2037041 - DNA, 25 bp, Homo sapien
gtacatacaaggtaacaaaatgccc

SEQ ID NO: 2037042 - DNA, 25 bp, Homo sapien
aaaggatagcaatggctcagtaaaa

SEQ ID NO: 2037043 - DNA, 25 bp, Homo sapien
acaagaagggctggacaaatattac

SEQ ID NO: 2037044 - DNA, 25 bp, Homo sapien
tcctaaatcactctcaatctgattc

SEQ ID NO: 2037045 - DNA, 25 bp, Homo sapien
ggaagagctataccatgtcctattt

SEQ ID NO: 2037046 - DNA, 25 bp, Homo sapien
tcactctcaatctgattctttctct

SEQ ID NO: 2037047 - DNA, 25 bp, Homo sapien
acataaaaagtggaagagctatacc

SEQ ID NO: 2037048 - DNA, 25 bp, Homo sapien
aatactgctagtttcccgtgaggag

SEQ ID NO: 2037049 - DNA, 25 bp, Homo sapien
cgacagcggcactgaggatccgtgc

SEQ ID NO: 2037050 - DNA, 25 bp, Homo sapien
tgcggtgtttccgacagcggcactg

SEQ ID NO: 2037051 - DNA, 25 bp, Homo sapien
ccgaggaaaggctgtctaatgtgga

SEQ ID NO: 2037052 - DNA, 25 bp, Homo sapien
agccacggcgtgaggcgcacaggcc

SEQ ID NO: 2037053 - DNA, 25 bp, Homo sapien
cggcgtgaggcgcacaggccgctgg

SEQ ID NO: 2037054 - DNA, 25 bp, Homo sapien
cacggcgtgaggcgcacaggccgct

SEQ ID NO: 2037055 - DNA, 25 bp, Homo sapien
agcagccacggcgtgaggcgcacag

SEQ ID NO: 2037056 - DNA, 25 bp, Homo sapien
gccacgaggctctgacctccgaggg

SEQ ID NO: 2037057 - DNA, 25 bp, Homo sapien
tccgcacagcggatttgcgccgtcg

SEQ ID NO: 2037058 - DNA, 25 bp, Homo sapien
tgtcccgcgggcagcacaatgacga

SEQ ID NO: 2037059 - DNA, 25 bp, Homo sapien
ctgacgccgtcctcccctgcgggtc

SEQ ID NO: 2037060 - DNA, 25 bp, Homo sapien
cggcccagccgcgggtgttccaaga

SEQ ID NO: 2037061 - DNA, 25 bp, Homo sapien
ggcccagccgcgggtgttccaagaa

SEQ ID NO: 2037062 - DNA, 25 bp, Homo sapien
ccgcgggcgccagggtgacggcgcc

SEQ ID NO: 2037063 - DNA, 25 bp, Homo sapien
cggcgccgtccctccagacgcggat

SEQ ID NO: 2037064 - DNA, 25 bp, Homo sapien
tgacggcgccgtccctccagacgcg

SEQ ID NO: 2037065 - DNA, 25 bp, Homo sapien
gtgacggcgccgtccctccagacgc

SEQ ID NO: 2037066 - DNA, 25 bp, Homo sapien
cctgctcctcgttgatgggctggtt

SEQ ID NO: 2037067 - DNA, 25 bp, Homo sapien
ctgcgcggccgagcgcacacggtgg

SEQ ID NO: 2037068 - DNA, 25 bp, Homo sapien
gctggttgtacagccgcaggatctc

SEQ ID NO: 2037069 - DNA, 25 bp, Homo sapien
ctcctcgttgatgggctggttgtac

SEQ ID NO: 2037070 - DNA, 25 bp, Homo sapien
agctccggagcatcgtcgtcgcgcg

SEQ ID NO: 2037071 - DNA, 25 bp, Homo sapien
ccgcccactgcctcagtccgcggct

SEQ ID NO: 2037072 - DNA, 25 bp, Homo sapien
gtcgcgccgtgtgccggcgtctcct

SEQ ID NO: 2037073 - DNA, 25 bp, Homo sapien
gctgcgctcggcagtcgcgccgtgt

SEQ ID NO: 2037074 - DNA, 25 bp, Homo sapien
ccgcattgacgttccctaggcgctg

SEQ ID NO: 2037075 - DNA, 25 bp, Homo sapien
tccctaggcgctggatcgccgaagg

SEQ ID NO: 2037076 - DNA, 25 bp, Homo sapien
cgccgaaggtctggttgaaaacttg

SEQ ID NO: 2037077 - DNA, 25 bp, Homo sapien
ctggatcgccgaaggtctggttgaa

SEQ ID NO: 2037078 - DNA, 25 bp, Homo sapien
gccgctctgcgcgttttccgatttc

SEQ ID NO: 2037079 - DNA, 25 bp, Homo sapien
ccgcctggagcggatgcctaagaaa

SEQ ID NO: 2037080 - DNA, 25 bp, Homo sapien
tgctggttgaatacctccctctcca

SEQ ID NO: 2037081 - DNA, 25 bp, Homo sapien
gaaagcctccggcagtttcccgtga

SEQ ID NO: 2037082 - DNA, 25 bp, Homo sapien
ttcttattcttgtagaataagtgta

SEQ ID NO: 2037083 - DNA, 25 bp, Homo sapien
tactctggaggtactggctgtgctg

SEQ ID NO: 2037084 - DNA, 25 bp, Homo sapien
caagtgctcctaagaggcacattca

SEQ ID NO: 2037085 - DNA, 25 bp, Homo sapien
cagcccaagcttttcccagacactt

SEQ ID NO: 2037086 - DNA, 25 bp, Homo sapien
tggacaagtgctcctaagaggcaca

SEQ ID NO: 2037087 - DNA, 25 bp, Homo sapien
tacagtcataggacaaaatacagaa

SEQ ID NO: 2037088 - DNA, 25 bp, Homo sapien
cagttatacaacttgaagggtcaga

SEQ ID NO: 2037089 - DNA, 25 bp, Homo sapien
aacagttggtactggaattcaggcc

SEQ ID NO: 2037090 - DNA, 25 bp, Homo sapien
tacagaagcagtaaatgaaacagtt

SEQ ID NO: 2037091 - DNA, 25 bp, Homo sapien
actctggtacaataaggtgggaagc

SEQ ID NO: 2037092 - DNA, 25 bp, Homo sapien
catttgaaatacacgttactctggt

SEQ ID NO: 2037093 - DNA, 25 bp, Homo sapien
cagcctcaatgttaatacagccttg

SEQ ID NO: 2037094 - DNA, 25 bp, Homo sapien
gtctgtctcttagtacatacctcat

SEQ ID NO: 2037095 - DNA, 25 bp, Homo sapien
gaattaataacttggatagccaact

SEQ ID NO: 2037096 - DNA, 25 bp, Homo sapien
acttggatagccaactggtatagag

SEQ ID NO: 2037097 - DNA, 25 bp, Homo sapien
taataacttggatagccaactggta

SEQ ID NO: 2037098 - DNA, 25 bp, Homo sapien
aaagaattaataacttggatagcca

SEQ ID NO: 2037099 - DNA, 25 bp, Homo sapien
atgcctagctacttaaaattaactt

SEQ ID NO: 2037100 - DNA, 25 bp, Homo sapien
tctggacagtctcaaatatcccaag

SEQ ID NO: 2037101 - DNA, 25 bp, Homo sapien
tatcccaaggaccacgaataaacca

SEQ ID NO: 2037102 - DNA, 25 bp, Homo sapien
cgactgcaagatcacaatttatcag

SEQ ID NO: 2037103 - DNA, 25 bp, Homo sapien
tcaaggtccaaccataaatttctgg

SEQ ID NO: 2037104 - DNA, 25 bp, Homo sapien
ataaatctgtcatgaggttaatttc

SEQ ID NO: 2037105 - DNA, 25 bp, Homo sapien
gatcatactgatttgtctagggctc

SEQ ID NO: 2037106 - DNA, 25 bp, Homo sapien
aataattccattaacctgtgaaaag

SEQ ID NO: 2037107 - DNA, 25 bp, Homo sapien
acatttattttcaccaatgcaataa

SEQ ID NO: 2037108 - DNA, 25 bp, Homo sapien
caaaattgaagtatgccattcaagc

SEQ ID NO: 2037109 - DNA, 25 bp, Homo sapien
ctgtaaacaaagtagcatttattaa

SEQ ID NO: 2037110 - DNA, 25 bp, Homo sapien
ccattcaagccagattgtgatttta

SEQ ID NO: 2037111 - DNA, 25 bp, Homo sapien
tagctaagtaatgtacaatgtgtaa

SEQ ID NO: 2037112 - DNA, 25 bp, Homo sapien
ggtctccacggcaacagattatttc

SEQ ID NO: 2037113 - DNA, 25 bp, Homo sapien
catgatccaaacagcacatgcagat

SEQ ID NO: 2037114 - DNA, 25 bp, Homo sapien
gacacgaactgccagtcgcacttgg

SEQ ID NO: 2037115 - DNA, 25 bp, Homo sapien
cagggtaagtaaatactcggacacg

SEQ ID NO: 2037116 - DNA, 25 bp, Homo sapien
ggaaccctttaaatgtgtgaccatc

SEQ ID NO: 2037117 - DNA, 25 bp, Homo sapien
ccaaagctggtgataaaaggtagga

SEQ ID NO: 2037118 - DNA, 25 bp, Homo sapien
caaattcataagaagccaaagctgg

SEQ ID NO: 2037119 - DNA, 25 bp, Homo sapien
tgtgaccatcaggtacagcccttct

SEQ ID NO: 2037120 - DNA, 25 bp, Homo sapien
tctactgcatcagagggttgacaat

SEQ ID NO: 2037121 - DNA, 25 bp, Homo sapien
tactgacgcgtcaattgtggatgca

SEQ ID NO: 2037122 - DNA, 25 bp, Homo sapien
caaccaattgttcgatatgggtaca

SEQ ID NO: 2037123 - DNA, 25 bp, Homo sapien
aagggatgttgtagctccaggagca

SEQ ID NO: 2037124 - DNA, 25 bp, Homo sapien
caggattggtaggtttatggatgta

SEQ ID NO: 2037125 - DNA, 25 bp, Homo sapien
aggttcatcaggattggtaggttta

SEQ ID NO: 2037126 - DNA, 25 bp, Homo sapien
catcaggattggtaggtttatggat

SEQ ID NO: 2037127 - DNA, 25 bp, Homo sapien
gttcatcaggattggtaggtttatg

SEQ ID NO: 2037128 - DNA, 25 bp, Homo sapien
actcgggaatgaaaagagggcccag

SEQ ID NO: 2037129 - DNA, 25 bp, Homo sapien
caaaacattattaggcatgattatc

SEQ ID NO: 2037130 - DNA, 25 bp, Homo sapien
gagaaagaggactcgggaatgaaaa

SEQ ID NO: 2037131 - DNA, 25 bp, Homo sapien
tgattatcaaccagggagaaagagg

SEQ ID NO: 2037132 - DNA, 25 bp, Homo sapien
tgtgtcctgttaaactctcccaaaa

SEQ ID NO: 2037133 - DNA, 25 bp, Homo sapien
ctgttaaactctcccaaaaagtgat

SEQ ID NO: 2037134 - DNA, 25 bp, Homo sapien
taaactctcccaaaaagtgatggcc

SEQ ID NO: 2037135 - DNA, 25 bp, Homo sapien
ttaaactctcccaaaaagtgatggc

SEQ ID NO: 2037136 - DNA, 25 bp, Homo sapien
ggcttctaatccatatccaagaaga

SEQ ID NO: 2037137 - DNA, 25 bp, Homo sapien
ggctgcacagaaggttagcgtgatc

SEQ ID NO: 2037138 - DNA, 25 bp, Homo sapien
aaggttagcgtgatcttcacagtca

SEQ ID NO: 2037139 - DNA, 25 bp, Homo sapien
cacaaacaaaggcttctaatccata

SEQ ID NO: 2037140 - DNA, 25 bp, Homo sapien
gtaggtccctacatcacagaaatca

SEQ ID NO: 2037141 - DNA, 25 bp, Homo sapien
ggtctggtcctggtgctgttcctaa

SEQ ID NO: 2037142 - DNA, 25 bp, Homo sapien
tgacgtggtcaagctgatagcaccc

SEQ ID NO: 2037143 - DNA, 25 bp, Homo sapien
gcggttagttccaggacccttgcaa

SEQ ID NO: 2037144 - DNA, 25 bp, Homo sapien
tgtttctacagagaaaggccagcag

SEQ ID NO: 2037145 - DNA, 25 bp, Homo sapien
aaaggccagcagagtgcaccactgc

SEQ ID NO: 2037146 - DNA, 25 bp, Homo sapien
aggccagcagagtgcaccactgctc

SEQ ID NO: 2037147 - DNA, 25 bp, Homo sapien
cttgtttctacagagaaaggccagc

SEQ ID NO: 2037148 - DNA, 25 bp, Homo sapien
tccagctcgaagtggtttaacatag

SEQ ID NO: 2037149 - DNA, 25 bp, Homo sapien
gggctcgttcataaccaaggacatt

SEQ ID NO: 2037150 - DNA, 25 bp, Homo sapien
taacaaatcttgctgcttgccttgg

SEQ ID NO: 2037151 - DNA, 25 bp, Homo sapien
gagtatcaagaagccgtccagctcg

SEQ ID NO: 2037152 - DNA, 25 bp, Homo sapien
taaatctcaaatacaggcataaaat

SEQ ID NO: 2037153 - DNA, 25 bp, Homo sapien
cagtaaatctcaaatacaggcataa

SEQ ID NO: 2037154 - DNA, 25 bp, Homo sapien
taacagtaaatctcaaatacaggca

SEQ ID NO: 2037155 - DNA, 25 bp, Homo sapien
cataacagtaaatctcaaatacagg

SEQ ID NO: 2037156 - DNA, 25 bp, Homo sapien
ccactgcttagcatatacaagaaat

SEQ ID NO: 2037157 - DNA, 25 bp, Homo sapien
gttgtgtgagggtcgaatttgcaaa

SEQ ID NO: 2037158 - DNA, 25 bp, Homo sapien
gcagttttctgacgttccaaagcaa

SEQ ID NO: 2037159 - DNA, 25 bp, Homo sapien
tgcaaaaatcttaaccagtcgtgag

SEQ ID NO: 2037160 - DNA, 25 bp, Homo sapien
tggtggggcacaatggtccatgtct

SEQ ID NO: 2037161 - DNA, 25 bp, Homo sapien
ctggtggggcacaatggtccatgtc

SEQ ID NO: 2037162 - DNA, 25 bp, Homo sapien
ggggcacaatggtccatgtctgcaa

SEQ ID NO: 2037163 - DNA, 25 bp, Homo sapien
gtggggcacaatggtccatgtctgc

SEQ ID NO: 2037164 - DNA, 25 bp, Homo sapien
tacttcttgagataacgtttgattg

SEQ ID NO: 2037165 - DNA, 25 bp, Homo sapien
gtgtgttcactacttcttgagataa

SEQ ID NO: 2037166 - DNA, 25 bp, Homo sapien
cgtttgattgagtggtggatacatt

SEQ ID NO: 2037167 - DNA, 25 bp, Homo sapien
taacgtttgattgagtggtggatac

SEQ ID NO: 2037168 - DNA, 25 bp, Homo sapien
tcagattgaccatgaagtgctatac

SEQ ID NO: 2037169 - DNA, 25 bp, Homo sapien
tctcaagattaggatgctgaggtcc

SEQ ID NO: 2037170 - DNA, 25 bp, Homo sapien
tccagggtgtgatgactggacacac

SEQ ID NO: 2037171 - DNA, 25 bp, Homo sapien
tgcaagaatcactggtaccaaaggg

SEQ ID NO: 2037172 - DNA, 25 bp, Homo sapien
ttttctgagcccaaaaccgatcgcc

SEQ ID NO: 2037173 - DNA, 25 bp, Homo sapien
gaatcagccattctagttccatcac

SEQ ID NO: 2037174 - DNA, 25 bp, Homo sapien
ctaaagtcgtctcaccaaatatgtc

SEQ ID NO: 2037175 - DNA, 25 bp, Homo sapien
gaaaatatgatgctactaaagtcgt

SEQ ID NO: 2037176 - DNA, 25 bp, Homo sapien
ccagggaaaatgaatagcaaacaga

SEQ ID NO: 2037177 - DNA, 25 bp, Homo sapien
cgtgctcagcctaaacttcgacttt

SEQ ID NO: 2037178 - DNA, 25 bp, Homo sapien
gaaggaccatgtctcattttccact

SEQ ID NO: 2037179 - DNA, 25 bp, Homo sapien
tacagcacatcgaatctagcaattt

SEQ ID NO: 2037180 - DNA, 25 bp, Homo sapien
ttcttgcagatgttccaagaaagct

SEQ ID NO: 2037181 - DNA, 25 bp, Homo sapien
cacaggcacatggaacaggtttaga

SEQ ID NO: 2037182 - DNA, 25 bp, Homo sapien
tcacaggcacatggaacaggtttag

SEQ ID NO: 2037183 - DNA, 25 bp, Homo sapien
cttgcagatgttccaagaaagcttt

SEQ ID NO: 2037184 - DNA, 25 bp, Homo sapien
gatacctccgtgttggatcaatatt

SEQ ID NO: 2037185 - DNA, 25 bp, Homo sapien
ggtaaagatacctccgtgttggatc

SEQ ID NO: 2037186 - DNA, 25 bp, Homo sapien
aaagatacctccgtgttggatcaat

SEQ ID NO: 2037187 - DNA, 25 bp, Homo sapien
tacctccgtgttggatcaatattag

SEQ ID NO: 2037188 - DNA, 25 bp, Homo sapien
tttttaatgtcgattgtctatcaaa

SEQ ID NO: 2037189 - DNA, 25 bp, Homo sapien
taatgtcgattgtctatcaaaacaa

SEQ ID NO: 2037190 - DNA, 25 bp, Homo sapien
ttaatgtcgattgtctatcaaaaca

SEQ ID NO: 2037191 - DNA, 25 bp, Homo sapien
tttaatgtcgattgtctatcaaaac

SEQ ID NO: 2037192 - DNA, 25 bp, Homo sapien
tgtcatcacagagtagaagctgtta

SEQ ID NO: 2037193 - DNA, 25 bp, Homo sapien
cactatgagctgattttaataaagt

SEQ ID NO: 2037194 - DNA, 25 bp, Homo sapien
gtaacagttggcttataattccact

SEQ ID NO: 2037195 - DNA, 25 bp, Homo sapien
gtagaagctgttattaggtcaattt

SEQ ID NO: 2037196 - DNA, 25 bp, Homo sapien
tctcttattctaccatggacatcca

SEQ ID NO: 2037197 - DNA, 25 bp, Homo sapien
gataaatgctgttgatcaggtgcca

SEQ ID NO: 2037198 - DNA, 25 bp, Homo sapien
tcaatgattcctcgacgtctaaggg

SEQ ID NO: 2037199 - DNA, 25 bp, Homo sapien
cgtatagtctcagcaaggatttctc

SEQ ID NO: 2037200 - DNA, 25 bp, Homo sapien
ctcggaggctttctccggaggcagc

SEQ ID NO: 2037201 - DNA, 25 bp, Homo sapien
tcagctcggaggctttctccggagg

SEQ ID NO: 2037202 - DNA, 25 bp, Homo sapien
cttcagctcggaggctttctccgga

SEQ ID NO: 2037203 - DNA, 25 bp, Homo sapien
tgcttcagctcggaggctttctccg

SEQ ID NO: 2037204 - DNA, 25 bp, Homo sapien
cgccgcttctccccgcctcagatgc

SEQ ID NO: 2037205 - DNA, 25 bp, Homo sapien
gcagccggcgtctccccgccgcttc

SEQ ID NO: 2037206 - DNA, 25 bp, Homo sapien
ctggcagccggcgtctccccgccgc

SEQ ID NO: 2037207 - DNA, 25 bp, Homo sapien
gccgcttctccccgcctcagatgcc

SEQ ID NO: 2037208 - DNA, 25 bp, Homo sapien
agcgccgcagccgttcgcctagcgc

SEQ ID NO: 2037209 - DNA, 25 bp, Homo sapien
gcgactggagcacaaagcgccgcag

SEQ ID NO: 2037210 - DNA, 25 bp, Homo sapien
ttcgcctagcgcagctcccggggga

SEQ ID NO: 2037211 - DNA, 25 bp, Homo sapien
ggccagggagcgttaggagcgactg

SEQ ID NO: 2037212 - DNA, 25 bp, Homo sapien
cagatccttttcaggcgtgttacag

SEQ ID NO: 2037213 - DNA, 25 bp, Homo sapien
gattacgtcctcttgtcacttggct

SEQ ID NO: 2037214 - DNA, 25 bp, Homo sapien
tatatccgattgttgtgctgtgccc

SEQ ID NO: 2037215 - DNA, 25 bp, Homo sapien
tttgaagacccctcatatatccgat

SEQ ID NO: 2037216 - DNA, 25 bp, Homo sapien
ttaactgctgcactagactaccttc

SEQ ID NO: 2037217 - DNA, 25 bp, Homo sapien
gaagtaggctagcaatggtcacccc

SEQ ID NO: 2037218 - DNA, 25 bp, Homo sapien
ccagatttaccagctgtgaatgtct

SEQ ID NO: 2037219 - DNA, 25 bp, Homo sapien
cgctatgcgcgtacacagtttcctt

SEQ ID NO: 2037220 - DNA, 25 bp, Homo sapien
ccctgggatttgacatgtcgtgttt

SEQ ID NO: 2037221 - DNA, 25 bp, Homo sapien
tttaagcgtacaatcaagtgccatt

SEQ ID NO: 2037222 - DNA, 25 bp, Homo sapien
tgtaaaattggtgttgatgttccca

SEQ ID NO: 2037223 - DNA, 25 bp, Homo sapien
cctagtcaagctagctaaagatttg

SEQ ID NO: 2037224 - DNA, 25 bp, Homo sapien
tccctaataaacttcatctacagcc

SEQ ID NO: 2037225 - DNA, 25 bp, Homo sapien
tccttaacaataaaacctggctata

SEQ ID NO: 2037226 - DNA, 25 bp, Homo sapien
aacctggctataaaagtgccaacca

SEQ ID NO: 2037227 - DNA, 25 bp, Homo sapien
aaaggttagttatcggctgggcgca

SEQ ID NO: 2037228 - DNA, 25 bp, Homo sapien
ggttaaagaggacacaagctgtttc

SEQ ID NO: 2037229 - DNA, 25 bp, Homo sapien
tgcccagcagatacatgaggatgag

SEQ ID NO: 2037230 - DNA, 25 bp, Homo sapien
cacctcgcctggtcctgagtgcata

SEQ ID NO: 2037231 - DNA, 25 bp, Homo sapien
gagatttagttaaggcaaccctgcc

SEQ ID NO: 2037232 - DNA, 25 bp, Homo sapien
tatttccctagaatagatggcctgc

SEQ ID NO: 2037233 - DNA, 25 bp, Homo sapien
ttcattgtacttccccagccgtgtg

SEQ ID NO: 2037234 - DNA, 25 bp, Homo sapien
tgccttaactgtcctggagtccgtg

SEQ ID NO: 2037235 - DNA, 25 bp, Homo sapien
ctcgaaagctagagttgcctggaaa

SEQ ID NO: 2037236 - DNA, 25 bp, Homo sapien
gatggagcctgcaaatctggtccct

SEQ ID NO: 2037237 - DNA, 25 bp, Homo sapien
tggagcctgcaaatctggtccctgc

SEQ ID NO: 2037238 - DNA, 25 bp, Homo sapien
tcgaaagctagagttgcctggaaag

SEQ ID NO: 2037239 - DNA, 25 bp, Homo sapien
tgagctgcgtatgaactatttcccc

SEQ ID NO: 2037240 - DNA, 25 bp, Homo sapien
acatctcctcggatgccgcttcaag

SEQ ID NO: 2037241 - DNA, 25 bp, Homo sapien
tctggactcgctggtgtcggtcgcc

SEQ ID NO: 2037242 - DNA, 25 bp, Homo sapien
gatgccgcttcaaggtcgctgagct

SEQ ID NO: 2037243 - DNA, 25 bp, Homo sapien
caaatctctatcatgataaacagca

SEQ ID NO: 2037244 - DNA, 25 bp, Homo sapien
ccagcctcactcaaatctctatcat

SEQ ID NO: 2037245 - DNA, 25 bp, Homo sapien
ataactgaaaatggttcgccaacct

SEQ ID NO: 2037246 - DNA, 25 bp, Homo sapien
ccatgtgtgcctgattaggacaaat

SEQ ID NO: 2037247 - DNA, 25 bp, Homo sapien
aaatggttcgccaaccttgcagcag

SEQ ID NO: 2037248 - DNA, 25 bp, Homo sapien
tgtgtgcctgattaggacaaataac

SEQ ID NO: 2037249 - DNA, 25 bp, Homo sapien
agagcaaatcgaggtccccgtgtca

SEQ ID NO: 2037250 - DNA, 25 bp, Homo sapien
catgaggatgcatgtgacactggcc

SEQ ID NO: 2037251 - DNA, 25 bp, Homo sapien
cacaaccaagagcatcctaactgat

SEQ ID NO: 2037252 - DNA, 25 bp, Homo sapien
gatggagttggagacagagcaaatc

SEQ ID NO: 2037253 - DNA, 25 bp, Homo sapien
tgtgcccaccaaattaagggtggat

SEQ ID NO: 2037254 - DNA, 25 bp, Homo sapien
ggctaggcccatctctctttttcat

SEQ ID NO: 2037255 - DNA, 25 bp, Homo sapien
tgggacaaagacgtaggctgggagg

SEQ ID NO: 2037256 - DNA, 25 bp, Homo sapien
tattcactggaagctgattagattg

SEQ ID NO: 2037257 - DNA, 25 bp, Homo sapien
catggtcctgacttaatcgtgcttc

SEQ ID NO: 2037258 - DNA, 25 bp, Homo sapien
taaaacacctagcaacatggtcctg

SEQ ID NO: 2037259 - DNA, 25 bp, Homo sapien
tgacattagtgtgtcccacaggatc

SEQ ID NO: 2037260 - DNA, 25 bp, Homo sapien
ggagctccaggagcgtatctgtctc

SEQ ID NO: 2037261 - DNA, 25 bp, Homo sapien
cccatcagttttgaggaggcctggc

SEQ ID NO: 2037262 - DNA, 25 bp, Homo sapien
attttctggtctgggagccggccca

SEQ ID NO: 2037263 - DNA, 25 bp, Homo sapien
taggtgctaactttggctgcctcgc

SEQ ID NO: 2037264 - DNA, 25 bp, Homo sapien
cctcgctgagggatggcctgatgta

SEQ ID NO: 2037265 - DNA, 25 bp, Homo sapien
gcacaagcccctgcggcgttttgag

SEQ ID NO: 2037266 - DNA, 25 bp, Homo sapien
ggagaactttccagatcgccctgcg

SEQ ID NO: 2037267 - DNA, 25 bp, Homo sapien
cattcctgatcggaggctgcgaacg

SEQ ID NO: 2037268 - DNA, 25 bp, Homo sapien
gggctctcggagcttcccataaaac

SEQ ID NO: 2037269 - DNA, 25 bp, Homo sapien
tcctggctagaaaagtgccattctt

SEQ ID NO: 2037270 - DNA, 25 bp, Homo sapien
ctggctagaaaagtgccattctttt

SEQ ID NO: 2037271 - DNA, 25 bp, Homo sapien
cctggctagaaaagtgccattcttt

SEQ ID NO: 2037272 - DNA, 25 bp, Homo sapien
catggaacgctcagcgcagaaatct

SEQ ID NO: 2037273 - DNA, 25 bp, Homo sapien
ccttagatggacaaactgtgctccc

SEQ ID NO: 2037274 - DNA, 25 bp, Homo sapien
tgatcattgctcgagttccacaggg

SEQ ID NO: 2037275 - DNA, 25 bp, Homo sapien
cagggtgagatgtaaaagacgcttt

SEQ ID NO: 2037276 - DNA, 25 bp, Homo sapien
aacgatatatgatgtgatctgcacc

SEQ ID NO: 2037277 - DNA, 25 bp, Homo sapien
tagcagggcagtcctcaacgcattc

SEQ ID NO: 2037278 - DNA, 25 bp, Homo sapien
tgcaccatttccacgtttcagacga

SEQ ID NO: 2037279 - DNA, 25 bp, Homo sapien
aagggccgccagtttccaggatgag

SEQ ID NO: 2037280 - DNA, 25 bp, Homo sapien
tgaggagccaaacgtccacacctgc

SEQ ID NO: 2037281 - DNA, 25 bp, Homo sapien
ctgaggagccaaacgtccacacctg

SEQ ID NO: 2037282 - DNA, 25 bp, Homo sapien
agctgtcttggcatacatgcctgcc

SEQ ID NO: 2037283 - DNA, 25 bp, Homo sapien
taaatgaccgcatagggcagtggca

SEQ ID NO: 2037284 - DNA, 25 bp, Homo sapien
tggcagacacggcttacttcagaga

SEQ ID NO: 2037285 - DNA, 25 bp, Homo sapien
tgcttctcgtggtttccagagctgt

SEQ ID NO: 2037286 - DNA, 25 bp, Homo sapien
tcagtgccaactactcctagtacct

SEQ ID NO: 2037287 - DNA, 25 bp, Homo sapien
cagatttcgtaagctcatttctcca

SEQ ID NO: 2037288 - DNA, 25 bp, Homo sapien
cctctgcttcagatttcgtaagctc

SEQ ID NO: 2037289 - DNA, 25 bp, Homo sapien
cccaaaaaattcagtgccaactact

SEQ ID NO: 2037290 - DNA, 25 bp, Homo sapien
taaaaacacttaacacatccaatta

SEQ ID NO: 2037291 - DNA, 25 bp, Homo sapien
gggtgctcttcatcccctggatgta

SEQ ID NO: 2037292 - DNA, 25 bp, Homo sapien
ggtgctcttcatcccctggatgtaa

SEQ ID NO: 2037293 - DNA, 25 bp, Homo sapien
taaaccacaggttgttagcagatgc

SEQ ID NO: 2037294 - DNA, 25 bp, Homo sapien
tgtgacgcggcctcatgtggaagca

SEQ ID NO: 2037295 - DNA, 25 bp, Homo sapien
aagtgacctctgtgtgataccgaca

SEQ ID NO: 2037296 - DNA, 25 bp, Homo sapien
ggcataattgtaccaagcaccttgg

SEQ ID NO: 2037297 - DNA, 25 bp, Homo sapien
tcatttataacaactgaaggacggg

SEQ ID NO: 2037298 - DNA, 25 bp, Homo sapien
ttatgctagaaaggcgcaagggccg

SEQ ID NO: 2037299 - DNA, 25 bp, Homo sapien
caagtcagctctatgcctgaggcca

SEQ ID NO: 2037300 - DNA, 25 bp, Homo sapien
tgaggccacgaaaagccaaattgca

SEQ ID NO: 2037301 - DNA, 25 bp, Homo sapien
ctaggttcccgctcctgaattaact

SEQ ID NO: 2037302 - DNA, 25 bp, Homo sapien
ttgatgtatcaagagcaacctgtgt

SEQ ID NO: 2037303 - DNA, 25 bp, Homo sapien
gctcctgaattaactaaactcaaaa

SEQ ID NO: 2037304 - DNA, 25 bp, Homo sapien
gaaatttgatgtatcaagagcaacc

SEQ ID NO: 2037305 - DNA, 25 bp, Homo sapien
catactgtataacgtaaaaccagaa

SEQ ID NO: 2037306 - DNA, 25 bp, Homo sapien
gatgcgtctttaaaaaatggtctgt

SEQ ID NO: 2037307 - DNA, 25 bp, Homo sapien
ccagaaagtcgtgaagcagtttctg

SEQ ID NO: 2037308 - DNA, 25 bp, Homo sapien
ctcccaatggatcgcccagagaggg

SEQ ID NO: 2037309 - DNA, 25 bp, Homo sapien
gagaaaaggctcagcaatggcagtg

SEQ ID NO: 2037310 - DNA, 25 bp, Homo sapien
aggagtgagttaccaagccaggcct

SEQ ID NO: 2037311 - DNA, 25 bp, Homo sapien
tcagaaaattcctgctgccgaggga

SEQ ID NO: 2037312 - DNA, 25 bp, Homo sapien
tcggcgatggcttcatgctgggcta

SEQ ID NO: 2037313 - DNA, 25 bp, Homo sapien
tgtattttctagtatatctgcactt

SEQ ID NO: 2037314 - DNA, 25 bp, Homo sapien
tacatattcactggaacaaagacag

SEQ ID NO: 2037315 - DNA, 25 bp, Homo sapien
tggaacaaagacagctgtattttct

SEQ ID NO: 2037316 - DNA, 25 bp, Homo sapien
tcaccccttatacatattcactgga

SEQ ID NO: 2037317 - DNA, 25 bp, Homo sapien
aggagtgagttaccaagccaggccc

SEQ ID NO: 2037318 - DNA, 25 bp, Homo sapien
gagtggaacaggtcaactccagagt

SEQ ID NO: 2037319 - DNA, 25 bp, Homo sapien
aaggatgagtggaacaggtcaactc

SEQ ID NO: 2037320 - DNA, 25 bp, Homo sapien
gaacaggtcaactccagagtaaacc

SEQ ID NO: 2037321 - DNA, 25 bp, Homo sapien
gtcaactccagagtaaaccatacag

SEQ ID NO: 2037322 - DNA, 25 bp, Homo sapien
tatgcactgtgcgtccagcacagcc

SEQ ID NO: 2037323 - DNA, 25 bp, Homo sapien
tatcaatgggaacgcagaacaggca

SEQ ID NO: 2037324 - DNA, 25 bp, Homo sapien
taaaagagacttcattagctgttgg

SEQ ID NO: 2037325 - DNA, 25 bp, Homo sapien
ttagttctgctatgcactgtgcgtc

SEQ ID NO: 2037326 - DNA, 25 bp, Homo sapien
gaaatggactacatgcctaatgaca

SEQ ID NO: 2037327 - DNA, 25 bp, Homo sapien
ccctgcagggtgcaacagactgaga

SEQ ID NO: 2037328 - DNA, 25 bp, Homo sapien
gaactggaactcctgcctgaacaca

SEQ ID NO: 2037329 - DNA, 25 bp, Homo sapien
tgagagcaatctatgccccggctac

SEQ ID NO: 2037330 - DNA, 25 bp, Homo sapien
agaaccccttctgctgacataccat

SEQ ID NO: 2037331 - DNA, 25 bp, Homo sapien
cacttttaataccaccaggttctgg

SEQ ID NO: 2037332 - DNA, 25 bp, Homo sapien
tgcacattagcttacagtcagaacc

SEQ ID NO: 2037333 - DNA, 25 bp, Homo sapien
tgtacaacaaccaggcaggcaattt

SEQ ID NO: 2037334 - DNA, 25 bp, Homo sapien
acacaagaaatggtctaaagtcctc

SEQ ID NO: 2037335 - DNA, 25 bp, Homo sapien
taacttgttggtgtagctagagaac

SEQ ID NO: 2037336 - DNA, 25 bp, Homo sapien
gcattaaaccaaaggttgctgtcaa

SEQ ID NO: 2037337 - DNA, 25 bp, Homo sapien
aaactcagtcataggctaacataaa

SEQ ID NO: 2037338 - DNA, 25 bp, Homo sapien
tacagaaagcaaagcgtaagccaat

SEQ ID NO: 2037339 - DNA, 25 bp, Homo sapien
gccacgtctgtctctttgaccagca

SEQ ID NO: 2037340 - DNA, 25 bp, Homo sapien
aagtcaggactttttatcatgggca

SEQ ID NO: 2037341 - DNA, 25 bp, Homo sapien
aaatatatgcgacaccacccagaag

SEQ ID NO: 2037342 - DNA, 25 bp, Homo sapien
ccctccaccatgcccagctaatttt

SEQ ID NO: 2037343 - DNA, 25 bp, Homo sapien
cctccaccatgcccagctaattttt

SEQ ID NO: 2037344 - DNA, 25 bp, Homo sapien
tgttggccaggacagtctccatctc

SEQ ID NO: 2037345 - DNA, 25 bp, Homo sapien
tggccaggacagtctccatctcttg

SEQ ID NO: 2037346 - DNA, 25 bp, Homo sapien
aaatattcattaagttaaaatgaca

SEQ ID NO: 2037347 - DNA, 25 bp, Homo sapien
aatattcattaagttaaaatgacaa

SEQ ID NO: 2037348 - DNA, 25 bp, Homo sapien
tattcattaagttaaaatgacaatg

SEQ ID NO: 2037349 - DNA, 25 bp, Homo sapien
gcttcctaaatcataatctacccca

SEQ ID NO: 2037350 - DNA, 25 bp, Homo sapien
taatctaccccaactacattgaaat

SEQ ID NO: 2037351 - DNA, 25 bp, Homo sapien
tacttcaaaacttcagtctagtaaa

SEQ ID NO: 2037352 - DNA, 25 bp, Homo sapien
cttcaaaacttcagtctagtaaact

SEQ ID NO: 2037353 - DNA, 25 bp, Homo sapien
ctgactatcccagtaaggagaattt

SEQ ID NO: 2037354 - DNA, 25 bp, Homo sapien
tgcaatatatagtagaaattgctta

SEQ ID NO: 2037355 - DNA, 25 bp, Homo sapien
tccaacttctaactgctcatatcaa

SEQ ID NO: 2037356 - DNA, 25 bp, Homo sapien
tctaactgctcatatcaaacttctc

SEQ ID NO: 2037357 - DNA, 25 bp, Homo sapien
gaaattgcttattccaacttctaac

SEQ ID NO: 2037358 - DNA, 25 bp, Homo sapien
cagttactagtgcagaagcttgctg

SEQ ID NO: 2037359 - DNA, 25 bp, Homo sapien
tactgcaccgtttttgggatatgag

SEQ ID NO: 2037360 - DNA, 25 bp, Homo sapien
ggatatgaggcgtttgctgcagaca

SEQ ID NO: 2037361 - DNA, 25 bp, Homo sapien
tatcaagtgcaggttaaaatccaga

SEQ ID NO: 2037362 - DNA, 25 bp, Homo sapien
tgacataaaccccatcttagtgaga

SEQ ID NO: 2037363 - DNA, 25 bp, Homo sapien
agtgtccagccaacaaaagcgccaa

SEQ ID NO: 2037364 - DNA, 25 bp, Homo sapien
aacaaaagcgccaaccaaaatgact

SEQ ID NO: 2037365 - DNA, 25 bp, Homo sapien
tgagaataggttgccaatataacca

SEQ ID NO: 2037366 - DNA, 25 bp, Homo sapien
ctctcgaatacgtttccgtagagca

SEQ ID NO: 2037367 - DNA, 25 bp, Homo sapien
tcctctcgaatacgtttccgtagag

SEQ ID NO: 2037368 - DNA, 25 bp, Homo sapien
cctctcgaatacgtttccgtagagc

SEQ ID NO: 2037369 - DNA, 25 bp, Homo sapien
ggacctaggcgcaaataaaaccatc

SEQ ID NO: 2037370 - DNA, 25 bp, Homo sapien
gttttcaccctatttgaacactgga

SEQ ID NO: 2037371 - DNA, 25 bp, Homo sapien
tactctaacacagaggacctaggcg

SEQ ID NO: 2037372 - DNA, 25 bp, Homo sapien
gagcaggacttgagtactctaacac

SEQ ID NO: 2037373 - DNA, 25 bp, Homo sapien
tctaaaattagatcgtggtgccagc

SEQ ID NO: 2037374 - DNA, 25 bp, Homo sapien
gctacagaagttgggatcaggaaaa

SEQ ID NO: 2037375 - DNA, 25 bp, Homo sapien
gaaaaaggcagggaacagttccaga

SEQ ID NO: 2037376 - DNA, 25 bp, Homo sapien
tctaaaagatatctggcctagaagc

SEQ ID NO: 2037377 - DNA, 25 bp, Homo sapien
aggcaggagataagtcttccttaga

SEQ ID NO: 2037378 - DNA, 25 bp, Homo sapien
aaggcaggagataagtcttccttag

SEQ ID NO: 2037379 - DNA, 25 bp, Homo sapien
ggcaggagataagtcttccttagaa

SEQ ID NO: 2037380 - DNA, 25 bp, Homo sapien
taacctgaggctgagtatatatgag

SEQ ID NO: 2037381 - DNA, 25 bp, Homo sapien
cagttatttgatgctatgtgtattt

SEQ ID NO: 2037382 - DNA, 25 bp, Homo sapien
caagggcttttaagtaacacacagg

SEQ ID NO: 2037383 - DNA, 25 bp, Homo sapien
gaaacaaagacaagggctcaagtgg

SEQ ID NO: 2037384 - DNA, 25 bp, Homo sapien
ttatagccatgtatgagaatctcag

SEQ ID NO: 2037385 - DNA, 25 bp, Homo sapien
gtatgagaatctcagttgatctggg

SEQ ID NO: 2037386 - DNA, 25 bp, Homo sapien
ccatgtatgagaatctcagttgatc

SEQ ID NO: 2037387 - DNA, 25 bp, Homo sapien
tagccatgtatgagaatctcagttg

SEQ ID NO: 2037388 - DNA, 25 bp, Homo sapien
ctgcaagaaaggcaaaaaatgagac

SEQ ID NO: 2037389 - DNA, 25 bp, Homo sapien
gcaagaaaggcaaaaaatgagacaa

SEQ ID NO: 2037390 - DNA, 25 bp, Homo sapien
tgcaagaaaggcaaaaaatgagaca

SEQ ID NO: 2037391 - DNA, 25 bp, Homo sapien
actacagtggatcaccgcaggccca

SEQ ID NO: 2037392 - DNA, 25 bp, Homo sapien
tgcactacagtggatcaccgcaggc

SEQ ID NO: 2037393 - DNA, 25 bp, Homo sapien
gcccaatgcctgcactacagtggat

SEQ ID NO: 2037394 - DNA, 25 bp, Homo sapien
ggtgccagagcgcccaatgcctgca

SEQ ID NO: 2037395 - DNA, 25 bp, Homo sapien
aaattgagaaatgaagctggtgatt

SEQ ID NO: 2037396 - DNA, 25 bp, Homo sapien
tagattctgctacacaggcataggg

SEQ ID NO: 2037397 - DNA, 25 bp, Homo sapien
ctggtattcactatcgcttcctgga

SEQ ID NO: 2037398 - DNA, 25 bp, Homo sapien
tcctgtctcttaagcctgcctggta

SEQ ID NO: 2037399 - DNA, 25 bp, Homo sapien
tgctgatgtgctaaagtggtttacc

SEQ ID NO: 2037400 - DNA, 25 bp, Homo sapien
tagtgaccttttaacatccagcatt

SEQ ID NO: 2037401 - DNA, 25 bp, Homo sapien
ttcaaatacagtgtgatccacaagt

SEQ ID NO: 2037402 - DNA, 25 bp, Homo sapien
atacagtgtgatccacaagttctca

SEQ ID NO: 2037403 - DNA, 25 bp, Homo sapien
gtgtgatccacaagttctcaatata

SEQ ID NO: 2037404 - DNA, 25 bp, Homo sapien
ttaatacggcaacactgacacagga

SEQ ID NO: 2037405 - DNA, 25 bp, Homo sapien
tgaatgcactgtcaaaagtcacaac

SEQ ID NO: 2037406 - DNA, 25 bp, Homo sapien
caacacgactgtacaccaaaaggaa

SEQ ID NO: 2037407 - DNA, 25 bp, Homo sapien
gattccagtggatgttaataaccca

SEQ ID NO: 2037408 - DNA, 25 bp, Homo sapien
ctctgtgggctacggcccagtaccc

SEQ ID NO: 2037409 - DNA, 25 bp, Homo sapien
cagtgctctgtgggctacggcccag

SEQ ID NO: 2037410 - DNA, 25 bp, Homo sapien
gcaggaccagactcagtctgtgtgg

SEQ ID NO: 2037411 - DNA, 25 bp, Homo sapien
gcacaattacttcatcaagtcctgg

SEQ ID NO: 2037412 - DNA, 25 bp, Homo sapien
aattacttcatcaagtcctggctca

SEQ ID NO: 2037413 - DNA, 25 bp, Homo sapien
ggtcctgcgcacaattacttcatca

SEQ ID NO: 2037414 - DNA, 25 bp, Homo sapien
tgcgcacaattacttcatcaagtcc

SEQ ID NO: 2037415 - DNA, 25 bp, Homo sapien
tattgtggcccctagaaagctccag

SEQ ID NO: 2037416 - DNA, 25 bp, Homo sapien
taagcatatgccctgttcacagcct

SEQ ID NO: 2037417 - DNA, 25 bp, Homo sapien
caacaggaattgttaggccacagca

SEQ ID NO: 2037418 - DNA, 25 bp, Homo sapien
aaacaattaatgtgaagtgcctgcc

SEQ ID NO: 2037419 - DNA, 25 bp, Homo sapien
gagaaatgcctcaatcatcaccctg

SEQ ID NO: 2037420 - DNA, 25 bp, Homo sapien
ctatgtgtatgtacctcaaccaagg

SEQ ID NO: 2037421 - DNA, 25 bp, Homo sapien
gttcttgagaccacatgccacattt

SEQ ID NO: 2037422 - DNA, 25 bp, Homo sapien
gcaggttcataacccactatgtgta

SEQ ID NO: 2037423 - DNA, 25 bp, Homo sapien
cttctgacaagagcttcacactgaa

SEQ ID NO: 2037424 - DNA, 25 bp, Homo sapien
ttctgacaagagcttcacactgaat

SEQ ID NO: 2037425 - DNA, 25 bp, Homo sapien
gcggttcagcatgacaactgctttg

SEQ ID NO: 2037426 - DNA, 25 bp, Homo sapien
ccacaatgcggttcagcatgacaac

SEQ ID NO: 2037427 - DNA, 25 bp, Homo sapien
caatgcggttcagcatgacaactgc

SEQ ID NO: 2037428 - DNA, 25 bp, Homo sapien
gttcagcatgacaactgctttggtc

SEQ ID NO: 2037429 - DNA, 25 bp, Homo sapien
ggcagcatgtgttaggaagtggacc

SEQ ID NO: 2037430 - DNA, 25 bp, Homo sapien
agaaatggcagcatgtgttaggaag

SEQ ID NO: 2037431 - DNA, 25 bp, Homo sapien
ccagaaatggcagcatgtgttagga

SEQ ID NO: 2037432 - DNA, 25 bp, Homo sapien
aaatggcagcatgtgttaggaagtg

SEQ ID NO: 2037433 - DNA, 25 bp, Homo sapien
atctacttctaaaacaaaacacagt

SEQ ID NO: 2037434 - DNA, 25 bp, Homo sapien
gatctacttctaaaacaaaacacag

SEQ ID NO: 2037435 - DNA, 25 bp, Homo sapien
tgatctacttctaaaacaaaacaca

SEQ ID NO: 2037436 - DNA, 25 bp, Homo sapien
ttgatctacttctaaaacaaaacac

SEQ ID NO: 2037437 - DNA, 25 bp, Homo sapien
agactttgaaatccagtaaaaatat

SEQ ID NO: 2037438 - DNA, 25 bp, Homo sapien
tggctgatgcgctcagaggcaactg

SEQ ID NO: 2037439 - DNA, 25 bp, Homo sapien
tgatgcgctcagaggcaactgggca

SEQ ID NO: 2037440 - DNA, 25 bp, Homo sapien
ggagcacctggtctcagcacccgct

SEQ ID NO: 2037441 - DNA, 25 bp, Homo sapien
gctcaggtccttgaagacgaccaga

SEQ ID NO: 2037442 - DNA, 25 bp, Homo sapien
ttttcagacatttgcgtggtatcgt

SEQ ID NO: 2037443 - DNA, 25 bp, Homo sapien
tttcagacatttgcgtggtatcgta

SEQ ID NO: 2037444 - DNA, 25 bp, Homo sapien
tcagacatttgcgtggtatcgtatt

SEQ ID NO: 2037445 - DNA, 25 bp, Homo sapien
agacatttgcgtggtatcgtattac

SEQ ID NO: 2037446 - DNA, 25 bp, Homo sapien
tcagcattttgcagtttaacacgac

SEQ ID NO: 2037447 - DNA, 25 bp, Homo sapien
tatgtcaactaaactggcattaata

SEQ ID NO: 2037448 - DNA, 25 bp, Homo sapien
ttgcagtttaacacgactgtgatca

SEQ ID NO: 2037449 - DNA, 25 bp, Homo sapien
taagatgtaactcctttgtgcctct

SEQ ID NO: 2037450 - DNA, 25 bp, Homo sapien
ggcaagaagatgaccaattctaata

SEQ ID NO: 2037451 - DNA, 25 bp, Homo sapien
gcaagaagatgaccaattctaatag

SEQ ID NO: 2037452 - DNA, 25 bp, Homo sapien
caagaagatgaccaattctaatagt

SEQ ID NO: 2037453 - DNA, 25 bp, Homo sapien
taactagacgctctgatggaatgcc

SEQ ID NO: 2037454 - DNA, 25 bp, Homo sapien
tccactcaggtgtgacttccaactc

SEQ ID NO: 2037455 - DNA, 25 bp, Homo sapien
tgccgatgcagtccatgacatatct

SEQ ID NO: 2037456 - DNA, 25 bp, Homo sapien
taaaccccacttctgtgccgatgca

SEQ ID NO: 2037457 - DNA, 25 bp, Homo sapien
ctattccatcagcacaaaggttctg

SEQ ID NO: 2037458 - DNA, 25 bp, Homo sapien
tctgtgtgccccttggcaggcacac

SEQ ID NO: 2037459 - DNA, 25 bp, Homo sapien
catcagcacaaaggttctgtgtgcc

SEQ ID NO: 2037460 - DNA, 25 bp, Homo sapien
tgtgccccttggcaggcacactctt

SEQ ID NO: 2037461 - DNA, 25 bp, Homo sapien
tgacagcctagtcaatggtccattt

SEQ ID NO: 2037462 - DNA, 25 bp, Homo sapien
ttgacagcctagtcaatggtccatt

SEQ ID NO: 2037463 - DNA, 25 bp, Homo sapien
tatataaatctatttctttacaaat

SEQ ID NO: 2037464 - DNA, 25 bp, Homo sapien
ctatttctttacaaatatcttgtct

SEQ ID NO: 2037465 - DNA, 25 bp, Homo sapien
tctttacaaatatcttgtcttatta

SEQ ID NO: 2037466 - DNA, 25 bp, Homo sapien
tttctttacaaatatcttgtcttat

SEQ ID NO: 2037467 - DNA, 25 bp, Homo sapien
tatttatcaacactgaccccaagcc

SEQ ID NO: 2037468 - DNA, 25 bp, Homo sapien
atttatcaacactgaccccaagccc

SEQ ID NO: 2037469 - DNA, 25 bp, Homo sapien
gtatttatcaacactgaccccaagc

SEQ ID NO: 2037470 - DNA, 25 bp, Homo sapien
tttatcaacactgaccccaagccct

SEQ ID NO: 2037471 - DNA, 25 bp, Homo sapien
ctctgtatctgtttcgatttctgtt

SEQ ID NO: 2037472 - DNA, 25 bp, Homo sapien
tctgttttctggaaacttggccact

SEQ ID NO: 2037473 - DNA, 25 bp, Homo sapien
atgggcttacatctctgtatctgtt

SEQ ID NO: 2037474 - DNA, 25 bp, Homo sapien
gtatctgtttcgatttctgttttct

SEQ ID NO: 2037475 - DNA, 25 bp, Homo sapien
ggatagtcatgggactcatttcgaa

SEQ ID NO: 2037476 - DNA, 25 bp, Homo sapien
agtcatgggactcatttcgaatttc

SEQ ID NO: 2037477 - DNA, 25 bp, Homo sapien
ctatgaggatagtcatgggactcat

SEQ ID NO: 2037478 - DNA, 25 bp, Homo sapien
tatgaggatagtcatgggactcatt

SEQ ID NO: 2037479 - DNA, 25 bp, Homo sapien
tactcaagctgtgttactttcaaga

SEQ ID NO: 2037480 - DNA, 25 bp, Homo sapien
agatagtggtttgcttaatgcaaat

SEQ ID NO: 2037481 - DNA, 25 bp, Homo sapien
taatgcaaattgtgttcccgaaatc

SEQ ID NO: 2037482 - DNA, 25 bp, Homo sapien
gctgtatgacatccaattcccgcta

SEQ ID NO: 2037483 - DNA, 25 bp, Homo sapien
tctccagtggatgcgagttaagttc

SEQ ID NO: 2037484 - DNA, 25 bp, Homo sapien
tttgaaaatgcatgtgaaatctcca

SEQ ID NO: 2037485 - DNA, 25 bp, Homo sapien
tgaaatctccagtggatgcgagtta

SEQ ID NO: 2037486 - DNA, 25 bp, Homo sapien
ccagtggatgcgagttaagttcatt

SEQ ID NO: 2037487 - DNA, 25 bp, Homo sapien
gagtatccaactcttcgaactcccg

SEQ ID NO: 2037488 - DNA, 25 bp, Homo sapien
ccagcgacgctgagtatccaactct

SEQ ID NO: 2037489 - DNA, 25 bp, Homo sapien
aagtacagcggctgccagcgacgct

SEQ ID NO: 2037490 - DNA, 25 bp, Homo sapien
aactcttcgaactcccgctcgatgg

SEQ ID NO: 2037491 - DNA, 25 bp, Homo sapien
cacgccaagccctgtcggccgtggg

SEQ ID NO: 2037492 - DNA, 25 bp, Homo sapien
agctggcgcgagcagagcctgcgcc

SEQ ID NO: 2037493 - DNA, 25 bp, Homo sapien
aaagtacctggagcgtcggacgtca

SEQ ID NO: 2037494 - DNA, 25 bp, Homo sapien
ggagaggctcaggccccgcacgatc

SEQ ID NO: 2037495 - DNA, 25 bp, Homo sapien
aaaggtttagccgtgctgtccagta

SEQ ID NO: 2037496 - DNA, 25 bp, Homo sapien
tgtaagcctgcagattttatgccaa

SEQ ID NO: 2037497 - DNA, 25 bp, Homo sapien
agattagcggcctgtgaccaacttg

SEQ ID NO: 2037498 - DNA, 25 bp, Homo sapien
tttatgccaaataaaccgctggagc

SEQ ID NO: 2037499 - DNA, 25 bp, Homo sapien
aaataccgacctaccatgatggaag

SEQ ID NO: 2037500 - DNA, 25 bp, Homo sapien
catggctgctttgttcgtgaactca

SEQ ID NO: 2037501 - DNA, 25 bp, Homo sapien
tattcagactaagtgtccaccccag

SEQ ID NO: 2037502 - DNA, 25 bp, Homo sapien
cactgacagattgggcactcggtgg

SEQ ID NO: 2037503 - DNA, 25 bp, Homo sapien
tgaactctcaagacaagacatggag

SEQ ID NO: 2037504 - DNA, 25 bp, Homo sapien
aaaaggctagccactccaagattcc

SEQ ID NO: 2037505 - DNA, 25 bp, Homo sapien
tcagtggaaagatcagcggttgcca

SEQ ID NO: 2037506 - DNA, 25 bp, Homo sapien
caggagcactaaggattttcagggc

SEQ ID NO: 2037507 - DNA, 25 bp, Homo sapien
taactttaccactacgccctctaga

SEQ ID NO: 2037508 - DNA, 25 bp, Homo sapien
ctgataagcaaaaccccccgagtcg

SEQ ID NO: 2037509 - DNA, 25 bp, Homo sapien
tccactttccggttttggcagaatc

SEQ ID NO: 2037510 - DNA, 25 bp, Homo sapien
aatccttgatctgagccaggcctct

SEQ ID NO: 2037511 - DNA, 25 bp, Homo sapien
taccattcttatctgagtagttggg

SEQ ID NO: 2037512 - DNA, 25 bp, Homo sapien
gctttctgttgagacattgtcacca

SEQ ID NO: 2037513 - DNA, 25 bp, Homo sapien
ggaataccactttagttcatttgga

SEQ ID NO: 2037514 - DNA, 25 bp, Homo sapien
cttttgaaatataaacggagaggct

SEQ ID NO: 2037515 - DNA, 25 bp, Homo sapien
gctgctgtgagtgaaccattgctta

SEQ ID NO: 2037516 - DNA, 25 bp, Homo sapien
gtattcccagtatcatgtacgcact

SEQ ID NO: 2037517 - DNA, 25 bp, Homo sapien
gcaatcttgatttgagtaagggtct

SEQ ID NO: 2037518 - DNA, 25 bp, Homo sapien
tcaaaagcatgttgcagtagccagc

SEQ ID NO: 2037519 - DNA, 25 bp, Homo sapien
tccccacgggctggatcgagatggt

SEQ ID NO: 2037520 - DNA, 25 bp, Homo sapien
tcgagatggtccagttatgcccagc

SEQ ID NO: 2037521 - DNA, 25 bp, Homo sapien
gagcactcttgcgatgctgacactg

SEQ ID NO: 2037522 - DNA, 25 bp, Homo sapien
tgtgcgtctgcatcaaaggaacatt

SEQ ID NO: 2037523 - DNA, 25 bp, Homo sapien
tgggacacctcttcagtccgtggac

SEQ ID NO: 2037524 - DNA, 25 bp, Homo sapien
ttcaaatccaggaacgcgctgtccc

SEQ ID NO: 2037525 - DNA, 25 bp, Homo sapien
cgaacagacgtaaaccagaggcggg

SEQ ID NO: 2037526 - DNA, 25 bp, Homo sapien
tgtcttcccgctgtccaatcaaaag

SEQ ID NO: 2037527 - DNA, 25 bp, Homo sapien
tctgagctgagctccgcctggttgg

SEQ ID NO: 2037528 - DNA, 25 bp, Homo sapien
tttggcctacgtttcggctgccgga

SEQ ID NO: 2037529 - DNA, 25 bp, Homo sapien
tttcggctgccggaccgacgggaca

SEQ ID NO: 2037530 - DNA, 25 bp, Homo sapien
ggattaattgcacgcctctgtgtca

SEQ ID NO: 2037531 - DNA, 25 bp, Homo sapien
gtttcctttatgtgccctgtgatgg

SEQ ID NO: 2037532 - DNA, 25 bp, Homo sapien
tgatgtttcctttatgtgccctgtg

SEQ ID NO: 2037533 - DNA, 25 bp, Homo sapien
ctgtgatgggcggttctgttcctcc

SEQ ID NO: 2037534 - DNA, 25 bp, Homo sapien
tccgtgctaccctctggagtttctt

SEQ ID NO: 2037535 - DNA, 25 bp, Homo sapien
cattcttggtgccaagtagagggtt

SEQ ID NO: 2037536 - DNA, 25 bp, Homo sapien
gcacttaacactatcgtagttgaca

SEQ ID NO: 2037537 - DNA, 25 bp, Homo sapien
tgacagggattgtcagctccctgag

SEQ ID NO: 2037538 - DNA, 25 bp, Homo sapien
cttggtgccaagtagagggttcttc

SEQ ID NO: 2037539 - DNA, 25 bp, Homo sapien
tctcgtgccagcactgttctagctg

SEQ ID NO: 2037540 - DNA, 25 bp, Homo sapien
gcccggcctcatgggaggattttga

SEQ ID NO: 2037541 - DNA, 25 bp, Homo sapien
caagtttattgagcgtctcgtgcca

SEQ ID NO: 2037542 - DNA, 25 bp, Homo sapien
gaatgcagtggcaaaccaaatgggc

SEQ ID NO: 2037543 - DNA, 25 bp, Homo sapien
ttctgggccgctgtaactgccatcg

SEQ ID NO: 2037544 - DNA, 25 bp, Homo sapien
tagagtgtgcaggttggagtcttca

SEQ ID NO: 2037545 - DNA, 25 bp, Homo sapien
cattggcttccacacaagagggacg

SEQ ID NO: 2037546 - DNA, 25 bp, Homo sapien
tctaggctgcctagtgtgggcatcc

SEQ ID NO: 2037547 - DNA, 25 bp, Homo sapien
gctatagaattgttagcagcaactt

SEQ ID NO: 2037548 - DNA, 25 bp, Homo sapien
cttactgtgatgtggttgggtagct

SEQ ID NO: 2037549 - DNA, 25 bp, Homo sapien
tctctacaatgtctttatctccctg

SEQ ID NO: 2037550 - DNA, 25 bp, Homo sapien
tctccctgttactcttgatatgtat

SEQ ID NO: 2037551 - DNA, 25 bp, Homo sapien
gagagcttcagaccttccacgtcac

SEQ ID NO: 2037552 - DNA, 25 bp, Homo sapien
gaaaaccatcgcatagtctcaccta

SEQ ID NO: 2037553 - DNA, 25 bp, Homo sapien
taagtgtctgagtcgttggtcacat

SEQ ID NO: 2037554 - DNA, 25 bp, Homo sapien
tggaacgagttcatcagggtaagtg

SEQ ID NO: 2037555 - DNA, 25 bp, Homo sapien
tcattctccccgtgctgtacttgca

SEQ ID NO: 2037556 - DNA, 25 bp, Homo sapien
cagaaaatataagcagccgggtcat

SEQ ID NO: 2037557 - DNA, 25 bp, Homo sapien
ggcatcccctggttcttgaagagaa

SEQ ID NO: 2037558 - DNA, 25 bp, Homo sapien
tttattctcacgtggctcagagctt

SEQ ID NO: 2037559 - DNA, 25 bp, Homo sapien
aatgtggcttgaccgagctctttcc

SEQ ID NO: 2037560 - DNA, 25 bp, Homo sapien
ggatagccaggaatacatacgtatg

SEQ ID NO: 2037561 - DNA, 25 bp, Homo sapien
tttgcaggcagtatacaaagctgta

SEQ ID NO: 2037562 - DNA, 25 bp, Homo sapien
ctggactgagtaaaacgggcattta

SEQ ID NO: 2037563 - DNA, 25 bp, Homo sapien
tacacacttaggactccttgctcca

SEQ ID NO: 2037564 - DNA, 25 bp, Homo sapien
tcaaaatgccactttgcgaacccca

SEQ ID NO: 2037565 - DNA, 25 bp, Homo sapien
acaggcccagcttcttgtcggttca

SEQ ID NO: 2037566 - DNA, 25 bp, Homo sapien
cacctgtctggtgtcactgccatac

SEQ ID NO: 2037567 - DNA, 25 bp, Homo sapien
aagccgcggttggagccagaatcct

SEQ ID NO: 2037568 - DNA, 25 bp, Homo sapien
caggagcacatgtcactggcgggta

SEQ ID NO: 2037569 - DNA, 25 bp, Homo sapien
aaagagaacccgactctggaggctg

SEQ ID NO: 2037570 - DNA, 25 bp, Homo sapien
gtgtcctgtacccacccagaagatg

SEQ ID NO: 2037571 - DNA, 25 bp, Homo sapien
agcagactcccaggggcgtcctcag

SEQ ID NO: 2037572 - DNA, 25 bp, Homo sapien
ttgccgtgcacgagacgctgaggca

SEQ ID NO: 2037573 - DNA, 25 bp, Homo sapien
gccttgccgtgcacgagacgctgag

SEQ ID NO: 2037574 - DNA, 25 bp, Homo sapien
ttatgccttgccgtgcacgagacgc

SEQ ID NO: 2037575 - DNA, 25 bp, Homo sapien
caggccaggactgttcaccacagct

SEQ ID NO: 2037576 - DNA, 25 bp, Homo sapien
ttaaaactgaagtcgggagcaggcc

SEQ ID NO: 2037577 - DNA, 25 bp, Homo sapien
tgtgagtgaagagacgcttaaaact

SEQ ID NO: 2037578 - DNA, 25 bp, Homo sapien
gagacgcttaaaactgaagtcggga

SEQ ID NO: 2037579 - DNA, 25 bp, Homo sapien
ctggaggacgggaagagatgagctg

SEQ ID NO: 2037580 - DNA, 25 bp, Homo sapien
gacgggaagagatgagctgcgaaag

SEQ ID NO: 2037581 - DNA, 25 bp, Homo sapien
cgggaagagatgagctgcgaaagat

SEQ ID NO: 2037582 - DNA, 25 bp, Homo sapien
aggacgggaagagatgagctgcgaa

SEQ ID NO: 2037583 - DNA, 25 bp, Homo sapien
gccttcttccgtagcatgaacagca

SEQ ID NO: 2037584 - DNA, 25 bp, Homo sapien
ttccgtagcatgaacagcacccatg

SEQ ID NO: 2037585 - DNA, 25 bp, Homo sapien
ttcttccgtagcatgaacagcaccc

SEQ ID NO: 2037586 - DNA, 25 bp, Homo sapien
cactgggggccttcttccgtagcat

SEQ ID NO: 2037587 - DNA, 25 bp, Homo sapien
cacgttatgtctatcacgtttgatt

SEQ ID NO: 2037588 - DNA, 25 bp, Homo sapien
gcagggtgcctttgggaaggcggat

SEQ ID NO: 2037589 - DNA, 25 bp, Homo sapien
ggatgtttattgttcacgttatgtc

SEQ ID NO: 2037590 - DNA, 25 bp, Homo sapien
tttgggaaggcggatggcaggatgt

SEQ ID NO: 2037591 - DNA, 25 bp, Homo sapien
tcctgactgtacatcccacatgtat

SEQ ID NO: 2037592 - DNA, 25 bp, Homo sapien
ctgactgtacatcccacatgtattt

SEQ ID NO: 2037593 - DNA, 25 bp, Homo sapien
ttcctgactgtacatcccacatgta

SEQ ID NO: 2037594 - DNA, 25 bp, Homo sapien
cctgactgtacatcccacatgtatt

SEQ ID NO: 2037595 - DNA, 25 bp, Homo sapien
cacctctctcaaaggtggtgggcag

SEQ ID NO: 2037596 - DNA, 25 bp, Homo sapien
tccttgcacacctcattgtcggaca

SEQ ID NO: 2037597 - DNA, 25 bp, Homo sapien
acacctcattgtcggacagcagggt

SEQ ID NO: 2037598 - DNA, 25 bp, Homo sapien
attgtcggacagcagggtcaccaca

SEQ ID NO: 2037599 - DNA, 25 bp, Homo sapien
atttccgtgtattctgtgaaccact

SEQ ID NO: 2037600 - DNA, 25 bp, Homo sapien
tttccgtgtattctgtgaaccactc

SEQ ID NO: 2037601 - DNA, 25 bp, Homo sapien
tccttccagtggttggtgaacagga

SEQ ID NO: 2037602 - DNA, 25 bp, Homo sapien
gagatccgcttcacccctcaacctt

SEQ ID NO: 2037603 - DNA, 25 bp, Homo sapien
ctcctccttccagtggttggtgaac

SEQ ID NO: 2037604 - DNA, 25 bp, Homo sapien
ttggtgaacaggagatccgcttcac

SEQ ID NO: 2037605 - DNA, 25 bp, Homo sapien
tgtctttgcactcacccaatgggct

SEQ ID NO: 2037606 - DNA, 25 bp, Homo sapien
ggcattccggatgtccttcagcttg

SEQ ID NO: 2037607 - DNA, 25 bp, Homo sapien
agaacatccggctgtgcttccaggc

SEQ ID NO: 2037608 - DNA, 25 bp, Homo sapien
ttttgccaaagaacatccggctgtg

SEQ ID NO: 2037609 - DNA, 25 bp, Homo sapien
tgtgcttccaggcattccggatgtc

SEQ ID NO: 2037610 - DNA, 25 bp, Homo sapien
ctgttccacgtgttggccacagaga

SEQ ID NO: 2037611 - DNA, 25 bp, Homo sapien
ccacgtgttggccacagagagatgg

SEQ ID NO: 2037612 - DNA, 25 bp, Homo sapien
cgtgttggccacagagagatggaaa

SEQ ID NO: 2037613 - DNA, 25 bp, Homo sapien
ttggccacagagagatggaaaggta

SEQ ID NO: 2037614 - DNA, 25 bp, Homo sapien
tttggttagggacttccttgtcatg

SEQ ID NO: 2037615 - DNA, 25 bp, Homo sapien
ttatcagtgtccacacgtttccgaa

SEQ ID NO: 2037616 - DNA, 25 bp, Homo sapien
gttagggacttccttgtcatgcttg

SEQ ID NO: 2037617 - DNA, 25 bp, Homo sapien
tcagtgtccacacgtttccgaagct

SEQ ID NO: 2037618 - DNA, 25 bp, Homo sapien
gatttgcaggcctgcgtaaacccag

SEQ ID NO: 2037619 - DNA, 25 bp, Homo sapien
ttctgacatttccctgacacacagg

SEQ ID NO: 2037620 - DNA, 25 bp, Homo sapien
gccatcgccaaggacggtgcagatt

SEQ ID NO: 2037621 - DNA, 25 bp, Homo sapien
attcttacagcaggtggccgccatg

SEQ ID NO: 2037622 - DNA, 25 bp, Homo sapien
aaccagtgcgccctcttcattatca

SEQ ID NO: 2037623 - DNA, 25 bp, Homo sapien
gtgcgccctcttcattatcaacatt

SEQ ID NO: 2037624 - DNA, 25 bp, Homo sapien
ggttgtaaccagtgcgccctcttca

SEQ ID NO: 2037625 - DNA, 25 bp, Homo sapien
gttgtaaccagtgcgccctcttcat

SEQ ID NO: 2037626 - DNA, 25 bp, Homo sapien
gattatcatgttgggattgctggga

SEQ ID NO: 2037627 - DNA, 25 bp, Homo sapien
gtgaacctgagattatcatgttggg

SEQ ID NO: 2037628 - DNA, 25 bp, Homo sapien
ccatcaagtgaacctgagattatca

SEQ ID NO: 2037629 - DNA, 25 bp, Homo sapien
caggccatcaagtgaacctgagatt

SEQ ID NO: 2037630 - DNA, 25 bp, Homo sapien
caccaatcgggtctttagttgaaga

SEQ ID NO: 2037631 - DNA, 25 bp, Homo sapien
caatcgggtctttagttgaagataa

SEQ ID NO: 2037632 - DNA, 25 bp, Homo sapien
tgaatatgcaccaatcgggtcttta

SEQ ID NO: 2037633 - DNA, 25 bp, Homo sapien
atatgcaccaatcgggtctttagtt

SEQ ID NO: 2037634 - DNA, 25 bp, Homo sapien
tcccaaaacaccaaccatgcatcat

SEQ ID NO: 2037635 - DNA, 25 bp, Homo sapien
aacaccaaccatgcatcatcatcaa

SEQ ID NO: 2037636 - DNA, 25 bp, Homo sapien
ttgcatcccaaaacaccaaccatgc

SEQ ID NO: 2037637 - DNA, 25 bp, Homo sapien
ccttgcatcccaaaacaccaaccat

SEQ ID NO: 2037638 - DNA, 25 bp, Homo sapien
aggactttatatttccacctataat

SEQ ID NO: 2037639 - DNA, 25 bp, Homo sapien
taggactttatatttccacctataa

SEQ ID NO: 2037640 - DNA, 25 bp, Homo sapien
ttaggactttatatttccacctata

SEQ ID NO: 2037641 - DNA, 25 bp, Homo sapien
catggtctcccgtgctttttctagg

SEQ ID NO: 2037642 - DNA, 25 bp, Homo sapien
cgctcagagcttaccagtttcacat

SEQ ID NO: 2037643 - DNA, 25 bp, Homo sapien
gctaccacagccagataacgcattg

SEQ ID NO: 2037644 - DNA, 25 bp, Homo sapien
cagatgtgaactatgactgcccatg

SEQ ID NO: 2037645 - DNA, 25 bp, Homo sapien
tcccatgttgaagcctggagtggcc

SEQ ID NO: 2037646 - DNA, 25 bp, Homo sapien
cttctgatctcctcataggcctcag

SEQ ID NO: 2037647 - DNA, 25 bp, Homo sapien
gagctttggcgccacggtcccatgt

SEQ ID NO: 2037648 - DNA, 25 bp, Homo sapien
cacagggcacttctgatctcctcat

SEQ ID NO: 2037649 - DNA, 25 bp, Homo sapien
atttggtgccctgatctagagcctc

SEQ ID NO: 2037650 - DNA, 25 bp, Homo sapien
tttggtgccctgatctagagcctct

SEQ ID NO: 2037651 - DNA, 25 bp, Homo sapien
catttggtgccctgatctagagcct

SEQ ID NO: 2037652 - DNA, 25 bp, Homo sapien
ggcccgggatgcttttctaagtcaa

SEQ ID NO: 2037653 - DNA, 25 bp, Homo sapien
taacattgacattcgagacggccag

SEQ ID NO: 2037654 - DNA, 25 bp, Homo sapien
caaacctctttgacatgggaccact

SEQ ID NO: 2037655 - DNA, 25 bp, Homo sapien
aatcgtctggaatcttatgtctgcc

SEQ ID NO: 2037656 - DNA, 25 bp, Homo sapien
atagtacgagccgtgtgattcctac

SEQ ID NO: 2037657 - DNA, 25 bp, Homo sapien
tgaattgaagggaggcttctgccca

SEQ ID NO: 2037658 - DNA, 25 bp, Homo sapien
ccaaaaagctgagatagtacgagcc

SEQ ID NO: 2037659 - DNA, 25 bp, Homo sapien
gaagggaggcttctgcccaaaaagc

SEQ ID NO: 2037660 - DNA, 25 bp, Homo sapien
tcctccaggacttgtttctccaaat

SEQ ID NO: 2037661 - DNA, 25 bp, Homo sapien
ggtcctggagacatgggccctgatt

SEQ ID NO: 2037662 - DNA, 25 bp, Homo sapien
ttcgtgggtgaagactttgtggtcc

SEQ ID NO: 2037663 - DNA, 25 bp, Homo sapien
cacttggctgtttgggctttcctct

SEQ ID NO: 2037664 - DNA, 25 bp, Homo sapien
gtgttggctaccagaagttcacatc

SEQ ID NO: 2037665 - DNA, 25 bp, Homo sapien
ttttttctgtgttggctaccagaag

SEQ ID NO: 2037666 - DNA, 25 bp, Homo sapien
tttctgtgttggctaccagaagttc

SEQ ID NO: 2037667 - DNA, 25 bp, Homo sapien
tctgtgttggctaccagaagttcac

SEQ ID NO: 2037668 - DNA, 25 bp, Homo sapien
ctggatggattgtctttgaggtcac

SEQ ID NO: 2037669 - DNA, 25 bp, Homo sapien
gatggattgtctttgaggtcacaca

SEQ ID NO: 2037670 - DNA, 25 bp, Homo sapien
tgctgtggcttttgcccaaggagag

SEQ ID NO: 2037671 - DNA, 25 bp, Homo sapien
actccctggcccctaaggagagagc

SEQ ID NO: 2037672 - DNA, 25 bp, Homo sapien
gcttctcagttagaccaggacctgg

SEQ ID NO: 2037673 - DNA, 25 bp, Homo sapien
aggttcaaagttcccctgctacaag

SEQ ID NO: 2037674 - DNA, 25 bp, Homo sapien
tggcagtatggcatgctggttcagc

SEQ ID NO: 2037675 - DNA, 25 bp, Homo sapien
ccatctctttgtggtctgaggacaa

SEQ ID NO: 2037676 - DNA, 25 bp, Homo sapien
ggaggcaatgcgtgtacttctgaac

SEQ ID NO: 2037677 - DNA, 25 bp, Homo sapien
tcaagtccgaaatggtcttcacagg

SEQ ID NO: 2037678 - DNA, 25 bp, Homo sapien
gggtcacagcgcgaagaatccatct

SEQ ID NO: 2037679 - DNA, 25 bp, Homo sapien
cctgaaacccctgcttagtgtagta

SEQ ID NO: 2037680 - DNA, 25 bp, Homo sapien
cgcccctgcagcgtactctgcgctc

SEQ ID NO: 2037681 - DNA, 25 bp, Homo sapien
gcccctgcagcgtactctgcgctcg

SEQ ID NO: 2037682 - DNA, 25 bp, Homo sapien
cctgcagcgtactctgcgctcggct

SEQ ID NO: 2037683 - DNA, 25 bp, Homo sapien
ccctgcagcgtactctgcgctcggc

SEQ ID NO: 2037684 - DNA, 25 bp, Homo sapien
gcaggggtcggcgcagcctgtgagc

SEQ ID NO: 2037685 - DNA, 25 bp, Homo sapien
aggggtcggcgcagcctgtgagccg

SEQ ID NO: 2037686 - DNA, 25 bp, Homo sapien
agccctgggcgggagtgcggccccg

SEQ ID NO: 2037687 - DNA, 25 bp, Homo sapien
ggggtcggcgcagcctgtgagccgg

SEQ ID NO: 2037688 - DNA, 25 bp, Homo sapien
gcagcgccgcgtcccctctctcccc

SEQ ID NO: 2037689 - DNA, 25 bp, Homo sapien
gcgggacacctccccggcggccgca

SEQ ID NO: 2037690 - DNA, 25 bp, Homo sapien
cgggacacctccccggcggccgcag

SEQ ID NO: 2037691 - DNA, 25 bp, Homo sapien
cggccgcagcgccgcgtcccctctc

SEQ ID NO: 2037692 - DNA, 25 bp, Homo sapien
actgaattctgcaccgcccggaggc

SEQ ID NO: 2037693 - DNA, 25 bp, Homo sapien
gacgctttgggaactggacgtccgc

SEQ ID NO: 2037694 - DNA, 25 bp, Homo sapien
tcagctcttaaagaaccccggcgcg

SEQ ID NO: 2037695 - DNA, 25 bp, Homo sapien
ggtgtcccgcggttgcaagactgaa

SEQ ID NO: 2037696 - DNA, 25 bp, Homo sapien
ccctcagtcccgcatcctgcaccgc

SEQ ID NO: 2037697 - DNA, 25 bp, Homo sapien
ctcagtcccgcatcctgcaccgcgc

SEQ ID NO: 2037698 - DNA, 25 bp, Homo sapien
tcagtcccgcatcctgcaccgcgcg

SEQ ID NO: 2037699 - DNA, 25 bp, Homo sapien
agcccctcagtcccgcatcctgcac

SEQ ID NO: 2037700 - DNA, 25 bp, Homo sapien
tgttcagtcaaggatcagagtgtca

SEQ ID NO: 2037701 - DNA, 25 bp, Homo sapien
caatcctgcagtggaacgcagccag

SEQ ID NO: 2037702 - DNA, 25 bp, Homo sapien
tcatgggcttggtttgcaagaccac

SEQ ID NO: 2037703 - DNA, 25 bp, Homo sapien
tgatggacctttctaagcagtgctt

SEQ ID NO: 2037704 - DNA, 25 bp, Homo sapien
caggcattgttctcggagtccgtgg

SEQ ID NO: 2037705 - DNA, 25 bp, Homo sapien
tctgcagatgtgcttcgacttcctg

SEQ ID NO: 2037706 - DNA, 25 bp, Homo sapien
tgtggcttcctggtacactgctggc

SEQ ID NO: 2037707 - DNA, 25 bp, Homo sapien
ggcaggcaggctttttgccacactg

SEQ ID NO: 2037708 - DNA, 25 bp, Homo sapien
gctggagggagcaagatggcaccac

SEQ ID NO: 2037709 - DNA, 25 bp, Homo sapien
tggcaccactttctctagggctggt

SEQ ID NO: 2037710 - DNA, 25 bp, Homo sapien
aagatggcaccactttctctagggc

SEQ ID NO: 2037711 - DNA, 25 bp, Homo sapien
cgtgctggagggagcaagatggcac

SEQ ID NO: 2037712 - DNA, 25 bp, Homo sapien
tgctgaggccttggagatggattcc

SEQ ID NO: 2037713 - DNA, 25 bp, Homo sapien
gccttggagatggattccaaaaggc

SEQ ID NO: 2037714 - DNA, 25 bp, Homo sapien
ctgaggccttggagatggattccaa

SEQ ID NO: 2037715 - DNA, 25 bp, Homo sapien
gaggccttggagatggattccaaaa

SEQ ID NO: 2037716 - DNA, 25 bp, Homo sapien
caacatctaatttcatgttccttgg

SEQ ID NO: 2037717 - DNA, 25 bp, Homo sapien
cagacaacatctaatttcatgttcc

SEQ ID NO: 2037718 - DNA, 25 bp, Homo sapien
gacaacatctaatttcatgttcctt

SEQ ID NO: 2037719 - DNA, 25 bp, Homo sapien
tcacagacaacatctaatttcatgt

SEQ ID NO: 2037720 - DNA, 25 bp, Homo sapien
gctgtgatgtagcaaatgcattggc

SEQ ID NO: 2037721 - DNA, 25 bp, Homo sapien
tcagagcccagtaagaggcgggaca

SEQ ID NO: 2037722 - DNA, 25 bp, Homo sapien
tggcaagacatcaagggaccctctg

SEQ ID NO: 2037723 - DNA, 25 bp, Homo sapien
gcttgttgactgttaagaggtggca

SEQ ID NO: 2037724 - DNA, 25 bp, Homo sapien
gagcctccgtgggttgggacaggcc

SEQ ID NO: 2037725 - DNA, 25 bp, Homo sapien
cctccgtgggttgggacaggcctca

SEQ ID NO: 2037726 - DNA, 25 bp, Homo sapien
gtgggttgggacaggcctcagtgca

SEQ ID NO: 2037727 - DNA, 25 bp, Homo sapien
cctcagtgcaaacagaaagtcctgc

SEQ ID NO: 2037728 - DNA, 25 bp, Homo sapien
gagagagatgagccggggaggctga

SEQ ID NO: 2037729 - DNA, 25 bp, Homo sapien
agagatgagccggggaggctgagca

SEQ ID NO: 2037730 - DNA, 25 bp, Homo sapien
gagatgagccggggaggctgagcac

SEQ ID NO: 2037731 - DNA, 25 bp, Homo sapien
agtgagagagatgagccggggaggc

SEQ ID NO: 2037732 - DNA, 25 bp, Homo sapien
gggcagttctgtgcagagcagtttc

SEQ ID NO: 2037733 - DNA, 25 bp, Homo sapien
ctctctacagagagtggttccatct

SEQ ID NO: 2037734 - DNA, 25 bp, Homo sapien
gagcagtttctcgttagatgtggaa

SEQ ID NO: 2037735 - DNA, 25 bp, Homo sapien
tgtggaaacagttacacagagaagc

SEQ ID NO: 2037736 - DNA, 25 bp, Homo sapien
gctcggtccgtgtttctcagtctgg

SEQ ID NO: 2037737 - DNA, 25 bp, Homo sapien
tcctctgggtgctggcgttgcctgt

SEQ ID NO: 2037738 - DNA, 25 bp, Homo sapien
tccatgtcggactttcagatcacag

SEQ ID NO: 2037739 - DNA, 25 bp, Homo sapien
tcagtctggagggtttctgagctgc

SEQ ID NO: 2037740 - DNA, 25 bp, Homo sapien
gagccaaaggctgcgactgtagctg

SEQ ID NO: 2037741 - DNA, 25 bp, Homo sapien
ggctgtaccagccatgagatgccat

SEQ ID NO: 2037742 - DNA, 25 bp, Homo sapien
cctggaaagagtggagccccaagtt

SEQ ID NO: 2037743 - DNA, 25 bp, Homo sapien
tcttgtaatgcctgcaccagtcaca

SEQ ID NO: 2037744 - DNA, 25 bp, Homo sapien
ttataaagacccaaaccagtgtcga

SEQ ID NO: 2037745 - DNA, 25 bp, Homo sapien
cccaaaccagtgtcgagttccatgc

SEQ ID NO: 2037746 - DNA, 25 bp, Homo sapien
tgtgtgtatacatgcggaagttcat

SEQ ID NO: 2037747 - DNA, 25 bp, Homo sapien
gctgtgtgtatacatgcggaagttc

SEQ ID NO: 2037748 - DNA, 25 bp, Homo sapien
gcgggtctcccgctcatcactactc

SEQ ID NO: 2037749 - DNA, 25 bp, Homo sapien
gtgctgcagcgggtctcccgctcat

SEQ ID NO: 2037750 - DNA, 25 bp, Homo sapien
gctcatcactactctgtacacaatg

SEQ ID NO: 2037751 - DNA, 25 bp, Homo sapien
ggtctcccgctcatcactactctgt

SEQ ID NO: 2037752 - DNA, 25 bp, Homo sapien
tttaggaagctctttgaagaggttg

SEQ ID NO: 2037753 - DNA, 25 bp, Homo sapien
gattttaggaagctctttgaagagg

SEQ ID NO: 2037754 - DNA, 25 bp, Homo sapien
cagtgcttgatttgatcatctgcat

SEQ ID NO: 2037755 - DNA, 25 bp, Homo sapien
ccggtcacgtcagtgcttgatttga

SEQ ID NO: 2037756 - DNA, 25 bp, Homo sapien
tgatcgggtgattagtggaatccaa

SEQ ID NO: 2037757 - DNA, 25 bp, Homo sapien
gtgatcgggtgattagtggaatcca

SEQ ID NO: 2037758 - DNA, 25 bp, Homo sapien
ggtgatcgggtgattagtggaatcc

SEQ ID NO: 2037759 - DNA, 25 bp, Homo sapien
ggggtgatcgggtgattagtggaat

SEQ ID NO: 2037760 - DNA, 25 bp, Homo sapien
catttcatgtgacatgcagaaccag

SEQ ID NO: 2037761 - DNA, 25 bp, Homo sapien
tcatgtgacatgcagaaccagcctc

SEQ ID NO: 2037762 - DNA, 25 bp, Homo sapien
tttcatgtgacatgcagaaccagcc

SEQ ID NO: 2037763 - DNA, 25 bp, Homo sapien
tcatttcatgtgacatgcagaacca

SEQ ID NO: 2037764 - DNA, 25 bp, Homo sapien
gcagtgttgcgctgttcctagaata

SEQ ID NO: 2037765 - DNA, 25 bp, Homo sapien
gaccactagctgtaccacgaggctt

SEQ ID NO: 2037766 - DNA, 25 bp, Homo sapien
cacagctgtttctgcgcagggatgt

SEQ ID NO: 2037767 - DNA, 25 bp, Homo sapien
gaatagtgtccttgtagtctcgtta

SEQ ID NO: 2037768 - DNA, 25 bp, Homo sapien
ccaggactcagatgagtcaatgcag

SEQ ID NO: 2037769 - DNA, 25 bp, Homo sapien
gcttgctgcgatacggggcatccca

SEQ ID NO: 2037770 - DNA, 25 bp, Homo sapien
cagatgagtcaatgcagacctgctg

SEQ ID NO: 2037771 - DNA, 25 bp, Homo sapien
tagagccgaggccgcagaaggccct

SEQ ID NO: 2037772 - DNA, 25 bp, Homo sapien
tagagtgccagcgaccctccatgct

SEQ ID NO: 2037773 - DNA, 25 bp, Homo sapien
ttctgccaggaagtccagcggcatc

SEQ ID NO: 2037774 - DNA, 25 bp, Homo sapien
ctggacctagagtgccagcgaccct

SEQ ID NO: 2037775 - DNA, 25 bp, Homo sapien
catgggcatagctggacctagagtg

SEQ ID NO: 2037776 - DNA, 25 bp, Homo sapien
cagtgtctgggtgtaggtttccaga

SEQ ID NO: 2037777 - DNA, 25 bp, Homo sapien
ggagacaatttgtcatcagcattgg

SEQ ID NO: 2037778 - DNA, 25 bp, Homo sapien
tcattgcttttattgtgaggagaca

SEQ ID NO: 2037779 - DNA, 25 bp, Homo sapien
gaatagatcacggtggaggcccaag

SEQ ID NO: 2037780 - DNA, 25 bp, Homo sapien
agtgccagtcctttcgttctgtaat

SEQ ID NO: 2037781 - DNA, 25 bp, Homo sapien
tcatccctggtaggacgtggacatg

SEQ ID NO: 2037782 - DNA, 25 bp, Homo sapien
tgtgctcatgggcaggcgtgtgtgg

SEQ ID NO: 2037783 - DNA, 25 bp, Homo sapien
tggacatgcggttgcttttccatga

SEQ ID NO: 2037784 - DNA, 25 bp, Homo sapien
ttccgaccagcatgatgctggacag

SEQ ID NO: 2037785 - DNA, 25 bp, Homo sapien
ctgctgtgtacaacttccgaccagc

SEQ ID NO: 2037786 - DNA, 25 bp, Homo sapien
acaacttccgaccagcatgatgctg

SEQ ID NO: 2037787 - DNA, 25 bp, Homo sapien
cagaatggccaagtgctgctgctgt

SEQ ID NO: 2037788 - DNA, 25 bp, Homo sapien
gagaagtacttagtgaaagaaacca

SEQ ID NO: 2037789 - DNA, 25 bp, Homo sapien
attggtatgtggttttggttcattt

SEQ ID NO: 2037790 - DNA, 25 bp, Homo sapien
cacatgccttcaaatgctcatatat

SEQ ID NO: 2037791 - DNA, 25 bp, Homo sapien
tatgtaaagcatacattggtatgtg

SEQ ID NO: 2037792 - DNA, 25 bp, Homo sapien
gatgcatgtaacaggacctctcgga

SEQ ID NO: 2037793 - DNA, 25 bp, Homo sapien
gaaaggaagtgttcccatcacctgt

SEQ ID NO: 2037794 - DNA, 25 bp, Homo sapien
gccacccacggctgctttgagaaag

SEQ ID NO: 2037795 - DNA, 25 bp, Homo sapien
cactgctcctgtaactgaccttggg

SEQ ID NO: 2037796 - DNA, 25 bp, Homo sapien
ggttgtatccctaacctcagccgta

SEQ ID NO: 2037797 - DNA, 25 bp, Homo sapien
caaccgtgcggttagaaacgtagag

SEQ ID NO: 2037798 - DNA, 25 bp, Homo sapien
aagcgcactcgttccatcaaccgtg

SEQ ID NO: 2037799 - DNA, 25 bp, Homo sapien
tcagcagagtgagtgataagcgcac

SEQ ID NO: 2037800 - DNA, 25 bp, Homo sapien
ggaggagcttcaggatttgtaaaga

SEQ ID NO: 2037801 - DNA, 25 bp, Homo sapien
aagactgcccaagagttatggctta

SEQ ID NO: 2037802 - DNA, 25 bp, Homo sapien
agcttcaggatttgtaaagacttca

SEQ ID NO: 2037803 - DNA, 25 bp, Homo sapien
agactgcccaagagttatggcttac

SEQ ID NO: 2037804 - DNA, 25 bp, Homo sapien
cagagcagggcacatgtgcggctct

SEQ ID NO: 2037805 - DNA, 25 bp, Homo sapien
agaggcaggactgcgagtgccacca

SEQ ID NO: 2037806 - DNA, 25 bp, Homo sapien
tgtatgcagtacctgtgctgtgtct

SEQ ID NO: 2037807 - DNA, 25 bp, Homo sapien
gcagcatgccacctgtatgcagtac

SEQ ID NO: 2037808 - DNA, 25 bp, Homo sapien
tcccttgtggctccgtgcgtggaaa

SEQ ID NO: 2037809 - DNA, 25 bp, Homo sapien
agtcccttgtggctccgtgcgtgga

SEQ ID NO: 2037810 - DNA, 25 bp, Homo sapien
ttgtggctccgtgcgtggaaactga

SEQ ID NO: 2037811 - DNA, 25 bp, Homo sapien
gctgctctgtttgcgtggaaactga

SEQ ID NO: 2037812 - DNA, 25 bp, Homo sapien
gctgaggctgagtcccatgcggctc

SEQ ID NO: 2037813 - DNA, 25 bp, Homo sapien
gactgccatgcaggttgaagacggt

SEQ ID NO: 2037814 - DNA, 25 bp, Homo sapien
ctgtgtgaggtgattctgcgtagcc

SEQ ID NO: 2037815 - DNA, 25 bp, Homo sapien
aaatggctgttctttggactgtgtg

SEQ ID NO: 2037816 - DNA, 25 bp, Homo sapien
gctagcctgtttttcggagtagatg

SEQ ID NO: 2037817 - DNA, 25 bp, Homo sapien
tgaaaagagtagttgaagaatgtgt

SEQ ID NO: 2037818 - DNA, 25 bp, Homo sapien
ctgaaaagagtagttgaagaatgtg

SEQ ID NO: 2037819 - DNA, 25 bp, Homo sapien
ccccatttcactcagttcctccggg

SEQ ID NO: 2037820 - DNA, 25 bp, Homo sapien
tgtggcctggacggggtctctgtct

SEQ ID NO: 2037821 - DNA, 25 bp, Homo sapien
ttcactcagttcctccggggacact

SEQ ID NO: 2037822 - DNA, 25 bp, Homo sapien
catttcactcagttcctccggggac

SEQ ID NO: 2037823 - DNA, 25 bp, Homo sapien
cagggcttcgttggccatgggtcct

SEQ ID NO: 2037824 - DNA, 25 bp, Homo sapien
ccccagggcttcgttggccatgggt

SEQ ID NO: 2037825 - DNA, 25 bp, Homo sapien
tccccagggcttcgttggccatggg

SEQ ID NO: 2037826 - DNA, 25 bp, Homo sapien
gcttcgttggccatgggtcctgctt

SEQ ID NO: 2037827 - DNA, 25 bp, Homo sapien
aggattccgagggtctctggtggct

SEQ ID NO: 2037828 - DNA, 25 bp, Homo sapien
acaacagacacagcccgctgaggaa

SEQ ID NO: 2037829 - DNA, 25 bp, Homo sapien
tccgagggtctctggtggctgcctt

SEQ ID NO: 2037830 - DNA, 25 bp, Homo sapien
gcagtctcggggacaacagacacag

SEQ ID NO: 2037831 - DNA, 25 bp, Homo sapien
atgtggccctgtccgtcacctgaca

SEQ ID NO: 2037832 - DNA, 25 bp, Homo sapien
ggtatcactcgaatagctgccttca

SEQ ID NO: 2037833 - DNA, 25 bp, Homo sapien
gcagcaggcatggtctcattctcaa

SEQ ID NO: 2037834 - DNA, 25 bp, Homo sapien
tatccccttggatgttctgtcctcc

SEQ ID NO: 2037835 - DNA, 25 bp, Homo sapien
aggagtcaaggcaggctaccttgat

SEQ ID NO: 2037836 - DNA, 25 bp, Homo sapien
caagtatttgtagaggagtcaaggc

SEQ ID NO: 2037837 - DNA, 25 bp, Homo sapien
tagaggagtcaaggcaggctacctt

SEQ ID NO: 2037838 - DNA, 25 bp, Homo sapien
gtagaggagtcaaggcaggctacct

SEQ ID NO: 2037839 - DNA, 25 bp, Homo sapien
tgtaggatcgtccatttctttggca

SEQ ID NO: 2037840 - DNA, 25 bp, Homo sapien
tctttggcatcgtgacgttaggcgt

SEQ ID NO: 2037841 - DNA, 25 bp, Homo sapien
ctgctgatgtagacgactgtaggat

SEQ ID NO: 2037842 - DNA, 25 bp, Homo sapien
cagtgcctgtgtgaaagcgaagggt

SEQ ID NO: 2037843 - DNA, 25 bp, Homo sapien
gcccctgttgcgtgaagtccttgaa

SEQ ID NO: 2037844 - DNA, 25 bp, Homo sapien
gctctggaatttttgacgcgcagga

SEQ ID NO: 2037845 - DNA, 25 bp, Homo sapien
gggcctctgaactttgctgcctgag

SEQ ID NO: 2037846 - DNA, 25 bp, Homo sapien
tgaatgccgatagcgttccctgagg

SEQ ID NO: 2037847 - DNA, 25 bp, Homo sapien
tcgttcccggcaagcaaaattggac

SEQ ID NO: 2037848 - DNA, 25 bp, Homo sapien
ccctagagggttgtcgtgggactca

SEQ ID NO: 2037849 - DNA, 25 bp, Homo sapien
cagcaatggccggagttggtgctct

SEQ ID NO: 2037850 - DNA, 25 bp, Homo sapien
gactggacacttgaactgtgcccca

SEQ ID NO: 2037851 - DNA, 25 bp, Homo sapien
tgcatggcagccttgtagacccagc

SEQ ID NO: 2037852 - DNA, 25 bp, Homo sapien
catgaccgctagctcttcactgagg

SEQ ID NO: 2037853 - DNA, 25 bp, Homo sapien
gggttaccatgaccgctagctcttc

SEQ ID NO: 2037854 - DNA, 25 bp, Homo sapien
ctgttgctcttgactggggttacca

SEQ ID NO: 2037855 - DNA, 25 bp, Homo sapien
actgaggccagacccagtgagtgca

SEQ ID NO: 2037856 - DNA, 25 bp, Homo sapien
tcagtctgtcttggcttcaatttac

SEQ ID NO: 2037857 - DNA, 25 bp, Homo sapien
ttggcttcaatttactcagaataat

SEQ ID NO: 2037858 - DNA, 25 bp, Homo sapien
ctatggtcagtctgtcttggcttca

SEQ ID NO: 2037859 - DNA, 25 bp, Homo sapien
tgtcttggcttcaatttactcagaa

SEQ ID NO: 2037860 - DNA, 25 bp, Homo sapien
atttcatggacttccgttcccaaga

SEQ ID NO: 2037861 - DNA, 25 bp, Homo sapien
gaaatctgagcgtttgcgtcctagg

SEQ ID NO: 2037862 - DNA, 25 bp, Homo sapien
tttgcgtcctaggaagactggtgag

SEQ ID NO: 2037863 - DNA, 25 bp, Homo sapien
tccgttcccaagaaatctgagcgtt

SEQ ID NO: 2037864 - DNA, 25 bp, Homo sapien
gagaaaggaatgtctgtaggctccc

SEQ ID NO: 2037865 - DNA, 25 bp, Homo sapien
aggatgccctgctccgctcgagacg

SEQ ID NO: 2037866 - DNA, 25 bp, Homo sapien
tgccctgctccgctcgagacgccat

SEQ ID NO: 2037867 - DNA, 25 bp, Homo sapien
atgccctgctccgctcgagacgcca

SEQ ID NO: 2037868 - DNA, 25 bp, Homo sapien
ctcaggatgccctgctccgctcgag

SEQ ID NO: 2037869 - DNA, 25 bp, Homo sapien
cagcacggtgtttgaaaatccctgc

SEQ ID NO: 2037870 - DNA, 25 bp, Homo sapien
acagcacggtgtttgaaaatccctg

SEQ ID NO: 2037871 - DNA, 25 bp, Homo sapien
cacacccaccgccagtttgaagtgg

SEQ ID NO: 2037872 - DNA, 25 bp, Homo sapien
ttttcttccatcgtttggcacaccc

SEQ ID NO: 2037873 - DNA, 25 bp, Homo sapien
tatctctgcagaactgcgtggcgct

SEQ ID NO: 2037874 - DNA, 25 bp, Homo sapien
tgcgaggcgtcgtaagaactttcac

SEQ ID NO: 2037875 - DNA, 25 bp, Homo sapien
tactaggtagcggaacacaccactg

SEQ ID NO: 2037876 - DNA, 25 bp, Homo sapien
caaggaggcctagagctttgcgtta

SEQ ID NO: 2037877 - DNA, 25 bp, Homo sapien
cataagacaatgcaacctcagactg

SEQ ID NO: 2037878 - DNA, 25 bp, Homo sapien
gtcttccagtgtgagaccagtggtc

SEQ ID NO: 2037879 - DNA, 25 bp, Homo sapien
tgcagaccagggaccatgcggatgt

SEQ ID NO: 2037880 - DNA, 25 bp, Homo sapien
gatctgaaggcaccggtgcagacca

SEQ ID NO: 2037881 - DNA, 25 bp, Homo sapien
tttattagtttctcatcaagcagac

SEQ ID NO: 2037882 - DNA, 25 bp, Homo sapien
gggcctcgtctccgcctgcttgttg

SEQ ID NO: 2037883 - DNA, 25 bp, Homo sapien
gacctgggcctcgtctccgcctgct

SEQ ID NO: 2037884 - DNA, 25 bp, Homo sapien
gtttattagtttctcatcaagcaga

SEQ ID NO: 2037885 - DNA, 25 bp, Homo sapien
ggttaagagcacttgcagtggagca

SEQ ID NO: 2037886 - DNA, 25 bp, Homo sapien
agggaggttgcagcgtccctctcaa

SEQ ID NO: 2037887 - DNA, 25 bp, Homo sapien
tctcaagtgcagtacagaagcgaaa

SEQ ID NO: 2037888 - DNA, 25 bp, Homo sapien
taggattctcaggagggttttgacc

SEQ ID NO: 2037889 - DNA, 25 bp, Homo sapien
tgctgggcttttcctttgtaggctt

SEQ ID NO: 2037890 - DNA, 25 bp, Homo sapien
gaggtgtctgctgggcttttccttt

SEQ ID NO: 2037891 - DNA, 25 bp, Homo sapien
tttcctttgtaggctttcttcttga

SEQ ID NO: 2037892 - DNA, 25 bp, Homo sapien
tcctttgtaggctttcttcttgaaa

SEQ ID NO: 2037893 - DNA, 25 bp, Homo sapien
gaagtgcagtttctgtccgcgatga

SEQ ID NO: 2037894 - DNA, 25 bp, Homo sapien
gggaagtgcagtttctgtccgcgat

SEQ ID NO: 2037895 - DNA, 25 bp, Homo sapien
gtttctgtccgcgatgaaagggctg

SEQ ID NO: 2037896 - DNA, 25 bp, Homo sapien
tgcagtttctgtccgcgatgaaagg

SEQ ID NO: 2037897 - DNA, 25 bp, Homo sapien
cccagccggtgtgcggaagcgttga

SEQ ID NO: 2037898 - DNA, 25 bp, Homo sapien
acgtcagacagacggcccagccggt

SEQ ID NO: 2037899 - DNA, 25 bp, Homo sapien
tctccacaaggcttaatcactcgac

SEQ ID NO: 2037900 - DNA, 25 bp, Homo sapien
ttgaccaagataacggccccttctc

SEQ ID NO: 2037901 - DNA, 25 bp, Homo sapien
tgcatattcttgcatgacatgctca

SEQ ID NO: 2037902 - DNA, 25 bp, Homo sapien
tatgttgtagggtttcttctgtaga

SEQ ID NO: 2037903 - DNA, 25 bp, Homo sapien
gcatccgctgatcagctgcatgtgt

SEQ ID NO: 2037904 - DNA, 25 bp, Homo sapien
tattcttgcatgacatgctcacatc

SEQ ID NO: 2037905 - DNA, 25 bp, Homo sapien
ggaagcctggcgtgggtgcagggct

SEQ ID NO: 2037906 - DNA, 25 bp, Homo sapien
aagcctggcgtgggtgcagggcttc

SEQ ID NO: 2037907 - DNA, 25 bp, Homo sapien
gaagcctggcgtgggtgcagggctt

SEQ ID NO: 2037908 - DNA, 25 bp, Homo sapien
aacatatcttccctatccagtggct

SEQ ID NO: 2037909 - DNA, 25 bp, Homo sapien
ttccctatccagtggcttgtacaca

SEQ ID NO: 2037910 - DNA, 25 bp, Homo sapien
tatccagtggcttgtacacaaagtt

SEQ ID NO: 2037911 - DNA, 25 bp, Homo sapien
aataacatcaaacatatcttcccta

SEQ ID NO: 2037912 - DNA, 25 bp, Homo sapien
caaaacactgtctcctgaatccaaa

SEQ ID NO: 2037913 - DNA, 25 bp, Homo sapien
aacactgtctcctgaatccaaagtc

SEQ ID NO: 2037914 - DNA, 25 bp, Homo sapien
acactgtctcctgaatccaaagtca

SEQ ID NO: 2037915 - DNA, 25 bp, Homo sapien
aaaacactgtctcctgaatccaaag

SEQ ID NO: 2037916 - DNA, 25 bp, Homo sapien
tggctgctggtggtgacgtctgcat

SEQ ID NO: 2037917 - DNA, 25 bp, Homo sapien
gtgttttagggtcctcatgtctgga

SEQ ID NO: 2037918 - DNA, 25 bp, Homo sapien
tggtggtgacgtctgcattggtggt

SEQ ID NO: 2037919 - DNA, 25 bp, Homo sapien
gcctgcacacatcagcctctcatgg

SEQ ID NO: 2037920 - DNA, 25 bp, Homo sapien
gccccagcctggcttccggttcctg

SEQ ID NO: 2037921 - DNA, 25 bp, Homo sapien
cccagcctggcttccggttcctgct

SEQ ID NO: 2037922 - DNA, 25 bp, Homo sapien
gcctggcttccggttcctgcttgtc

SEQ ID NO: 2037923 - DNA, 25 bp, Homo sapien
cagcctggcttccggttcctgcttg

SEQ ID NO: 2037924 - DNA, 25 bp, Homo sapien
ccatcacaagattagtggttttctg

SEQ ID NO: 2037925 - DNA, 25 bp, Homo sapien
aaatgccatcacaagattagtggtt

SEQ ID NO: 2037926 - DNA, 25 bp, Homo sapien
catcacaagattagtggttttctgt

SEQ ID NO: 2037927 - DNA, 25 bp, Homo sapien
tgccatcacaagattagtggttttc

SEQ ID NO: 2037928 - DNA, 25 bp, Homo sapien
ctggcgtttgaagctcgatgattag

SEQ ID NO: 2037929 - DNA, 25 bp, Homo sapien
gtaacagcttgctgcgatggtattt

SEQ ID NO: 2037930 - DNA, 25 bp, Homo sapien
agctcgatgattagttttcagcagc

SEQ ID NO: 2037931 - DNA, 25 bp, Homo sapien
taacagcttgctgcgatggtatttc

SEQ ID NO: 2037932 - DNA, 25 bp, Homo sapien
gcaactgcttcaagaagcactggca

SEQ ID NO: 2037933 - DNA, 25 bp, Homo sapien
tgaaatttattctgccccaagtgga

SEQ ID NO: 2037934 - DNA, 25 bp, Homo sapien
gatgagtgtcctgcatgaaatttat

SEQ ID NO: 2037935 - DNA, 25 bp, Homo sapien
gatgtgcatggaggccaaatgcaga

SEQ ID NO: 2037936 - DNA, 25 bp, Homo sapien
ttcctggaggccagaacgccttgct

SEQ ID NO: 2037937 - DNA, 25 bp, Homo sapien
ttgagtagagtcctgcaccgccagg

SEQ ID NO: 2037938 - DNA, 25 bp, Homo sapien
ggatttgagtagagtcctgcaccgc

SEQ ID NO: 2037939 - DNA, 25 bp, Homo sapien
caggacctgggcggcttcccggctt

SEQ ID NO: 2037940 - DNA, 25 bp, Homo sapien
gaaggatttgagtagagtcctgcac

SEQ ID NO: 2037941 - DNA, 25 bp, Homo sapien
cagaacgccggccacactgggcaat

SEQ ID NO: 2037942 - DNA, 25 bp, Homo sapien
gatatttcgtagaggtctttaaatg

SEQ ID NO: 2037943 - DNA, 25 bp, Homo sapien
ccagctggttgtcgccatgttctca

SEQ ID NO: 2037944 - DNA, 25 bp, Homo sapien
aaatgctaaagcattgggcattgtg

SEQ ID NO: 2037945 - DNA, 25 bp, Homo sapien
cctgagtccggaaaggagttctgca

SEQ ID NO: 2037946 - DNA, 25 bp, Homo sapien
atgtggagggtatgcccaaaggcct

SEQ ID NO: 2037947 - DNA, 25 bp, Homo sapien
agtccggaaaggagttctgcatttc

SEQ ID NO: 2037948 - DNA, 25 bp, Homo sapien
atgcccaaaggcctgagtccggaaa

SEQ ID NO: 2037949 - DNA, 25 bp, Homo sapien
cggctctgtttgtgcgtgctttcca

SEQ ID NO: 2037950 - DNA, 25 bp, Homo sapien
tgtttgtgcgtgctttccatttttc

SEQ ID NO: 2037951 - DNA, 25 bp, Homo sapien
taaaaataacacggctctgtttgtg

SEQ ID NO: 2037952 - DNA, 25 bp, Homo sapien
ctctgtttgtgcgtgctttccattt

SEQ ID NO: 2037953 - DNA, 25 bp, Homo sapien
ctgtgtggcttgatgtttgtaagga

SEQ ID NO: 2037954 - DNA, 25 bp, Homo sapien
gcctggtcactgacttcgttaaggg

SEQ ID NO: 2037955 - DNA, 25 bp, Homo sapien
cgttaaggggaggatgggctgctgt

SEQ ID NO: 2037956 - DNA, 25 bp, Homo sapien
ggaggatgggctgctgtgcgtgctg

SEQ ID NO: 2037957 - DNA, 25 bp, Homo sapien
gaagctcatgggctgaacgcagtgt

SEQ ID NO: 2037958 - DNA, 25 bp, Homo sapien
tcccacgcagtgatcttgaaaagct

SEQ ID NO: 2037959 - DNA, 25 bp, Homo sapien
tgtggaataccctgtagaccgacat

SEQ ID NO: 2037960 - DNA, 25 bp, Homo sapien
accatgcatggagcttgtggcagtc

SEQ ID NO: 2037961 - DNA, 25 bp, Homo sapien
agcactgggagggttcagcgcaggg

SEQ ID NO: 2037962 - DNA, 25 bp, Homo sapien
gctcacctggagcttccggctttcc

SEQ ID NO: 2037963 - DNA, 25 bp, Homo sapien
ggtccctcgcttcctgtccttgtga

SEQ ID NO: 2037964 - DNA, 25 bp, Homo sapien
cgtgtggttgagtatacatctgcca

SEQ ID NO: 2037965 - DNA, 25 bp, Homo sapien
cccctcgctgcccggcctgactcca

SEQ ID NO: 2037966 - DNA, 25 bp, Homo sapien
ccctcgctgcccggcctgactccat

SEQ ID NO: 2037967 - DNA, 25 bp, Homo sapien
tcccctcgctgcccggcctgactcc

SEQ ID NO: 2037968 - DNA, 25 bp, Homo sapien
ctcccctcgctgcccggcctgactc

SEQ ID NO: 2037969 - DNA, 25 bp, Homo sapien
gggcaacgctgaaggccctttccag

SEQ ID NO: 2037970 - DNA, 25 bp, Homo sapien
cctctccgcgtgggcaacgctgaag

SEQ ID NO: 2037971 - DNA, 25 bp, Homo sapien
gctgaaggccctttccaggccgatc

SEQ ID NO: 2037972 - DNA, 25 bp, Homo sapien
tttccaggccgatcccggcactcag

SEQ ID NO: 2037973 - DNA, 25 bp, Homo sapien
tgtcactgttaccatcatcaatacg

SEQ ID NO: 2037974 - DNA, 25 bp, Homo sapien
tgcggcagagtcctatctgcagggc

SEQ ID NO: 2037975 - DNA, 25 bp, Homo sapien
caatacgctacttccttggcatctg

SEQ ID NO: 2037976 - DNA, 25 bp, Homo sapien
tcctagaagtcagtgtcttgtcctg

SEQ ID NO: 2037977 - DNA, 25 bp, Homo sapien
agagatccgaaaacagttcctgctg

SEQ ID NO: 2037978 - DNA, 25 bp, Homo sapien
gttcccaagttgctagtggctgagc

SEQ ID NO: 2037979 - DNA, 25 bp, Homo sapien
cctgaaacagagagatccgaaaaca

SEQ ID NO: 2037980 - DNA, 25 bp, Homo sapien
aggttcccaagttgctagtggctga

SEQ ID NO: 2037981 - DNA, 25 bp, Homo sapien
cagtgtagcgttggtggatttgttt

SEQ ID NO: 2037982 - DNA, 25 bp, Homo sapien
gcccttcttcagtgtagcgttggtg

SEQ ID NO: 2037983 - DNA, 25 bp, Homo sapien
cttcagtgtagcgttggtggatttg

SEQ ID NO: 2037984 - DNA, 25 bp, Homo sapien
tagcgttggtggatttgtttgtgaa

SEQ ID NO: 2037985 - DNA, 25 bp, Homo sapien
aggttactatcacacatatgtttac

SEQ ID NO: 2037986 - DNA, 25 bp, Homo sapien
aaggttactatcacacatatgttta

SEQ ID NO: 2037987 - DNA, 25 bp, Homo sapien
aaaggttactatcacacatatgttt

SEQ ID NO: 2037988 - DNA, 25 bp, Homo sapien
cttaaggtcattggaggatcatact

SEQ ID NO: 2037989 - DNA, 25 bp, Homo sapien
ggtcattggaggatcatacttaatt

SEQ ID NO: 2037990 - DNA, 25 bp, Homo sapien
tcttgacacttaaggtcattggagg

SEQ ID NO: 2037991 - DNA, 25 bp, Homo sapien
ggaggatcatacttaattgtttgaa

SEQ ID NO: 2037992 - DNA, 25 bp, Homo sapien
gctaactccaatactctgctgttcc

SEQ ID NO: 2037993 - DNA, 25 bp, Homo sapien
ctgctaactccaatactctgctgtt

SEQ ID NO: 2037994 - DNA, 25 bp, Homo sapien
ctccaatactctgctgttccatttg

SEQ ID NO: 2037995 - DNA, 25 bp, Homo sapien
taactccaatactctgctgttccat

SEQ ID NO: 2037996 - DNA, 25 bp, Homo sapien
taggagcgtacttgacataggaggc

SEQ ID NO: 2037997 - DNA, 25 bp, Homo sapien
ggtttgataggagcgtacacttgtg

SEQ ID NO: 2037998 - DNA, 25 bp, Homo sapien
cgaattttgagtgtatgaaggtttg

SEQ ID NO: 2037999 - DNA, 25 bp, Homo sapien
cacttgtgattgtcacccatcgagg

SEQ ID NO: 2038000 - DNA, 25 bp, Homo sapien
ggcgatgctgtgagtggtattatac

SEQ ID NO: 2038001 - DNA, 25 bp, Homo sapien
ctgtgagtggtattatactcatgtg

SEQ ID NO: 2038002 - DNA, 25 bp, Homo sapien
ggctggcgatgctgtgagtggtatt

SEQ ID NO: 2038003 - DNA, 25 bp, Homo sapien
gatgctgtgagtggtattatactca

SEQ ID NO: 2038004 - DNA, 25 bp, Homo sapien
catgcactgtcaaggtgtttgctga

SEQ ID NO: 2038005 - DNA, 25 bp, Homo sapien
tcaagggatataccgagaggagaca

SEQ ID NO: 2038006 - DNA, 25 bp, Homo sapien
cagggccaggtagccccatctgctg

SEQ ID NO: 2038007 - DNA, 25 bp, Homo sapien
catctgctgtcaaggagtgtgccga

SEQ ID NO: 2038008 - DNA, 25 bp, Homo sapien
ctagagggagccgacaagaagctga

SEQ ID NO: 2038009 - DNA, 25 bp, Homo sapien
cacggttggcgtggaagccaagttt

SEQ ID NO: 2038010 - DNA, 25 bp, Homo sapien
gtggcattggcgcacggttggcgtg

SEQ ID NO: 2038011 - DNA, 25 bp, Homo sapien
agccaagtttctagagggagccgac

SEQ ID NO: 2038012 - DNA, 25 bp, Homo sapien
gtttgatgactagcttaatttgcac

SEQ ID NO: 2038013 - DNA, 25 bp, Homo sapien
gaactttgtgtaggctgtttgatga

SEQ ID NO: 2038014 - DNA, 25 bp, Homo sapien
ggcactctgataggtttcaagtccc

SEQ ID NO: 2038015 - DNA, 25 bp, Homo sapien
tccttcttccatacactttggcact

SEQ ID NO: 2038016 - DNA, 25 bp, Homo sapien
cacacccggcccccttcatgtttct

SEQ ID NO: 2038017 - DNA, 25 bp, Homo sapien
tccctagcataaaccctgtgagtgc

SEQ ID NO: 2038018 - DNA, 25 bp, Homo sapien
tgtgaaccgttgtactccctagcat

SEQ ID NO: 2038019 - DNA, 25 bp, Homo sapien
atcagaacccacagttggccgggcg

SEQ ID NO: 2038020 - DNA, 25 bp, Homo sapien
cacaaatgttaagcccttgccgccg

SEQ ID NO: 2038021 - DNA, 25 bp, Homo sapien
cccatgacggggatggagatttgca

SEQ ID NO: 2038022 - DNA, 25 bp, Homo sapien
ctgtgtgtaggtgccgtctgcagcc

SEQ ID NO: 2038023 - DNA, 25 bp, Homo sapien
ccatggaaacagattgcgggaacac

SEQ ID NO: 2038024 - DNA, 25 bp, Homo sapien
agatttgcaggcgtctagccaccca

SEQ ID NO: 2038025 - DNA, 25 bp, Homo sapien
cggtttttggcgatctgaggtctgt

SEQ ID NO: 2038026 - DNA, 25 bp, Homo sapien
ccggtttttggcgatctgaggtctg

SEQ ID NO: 2038027 - DNA, 25 bp, Homo sapien
tttttggcgatctgaggtctgtttc

SEQ ID NO: 2038028 - DNA, 25 bp, Homo sapien
ggtttttggcgatctgaggtctgtt

SEQ ID NO: 2038029 - DNA, 25 bp, Homo sapien
gagggaactgtgttcacttcatcag

SEQ ID NO: 2038030 - DNA, 25 bp, Homo sapien
ctcgttcttgccgtttgagggaact

SEQ ID NO: 2038031 - DNA, 25 bp, Homo sapien
ccttggaggagtgaaatcaagtcct

SEQ ID NO: 2038032 - DNA, 25 bp, Homo sapien
tccttggaggagtgaaatcaagtcc

SEQ ID NO: 2038033 - DNA, 25 bp, Homo sapien
tgctctatcacacgcggttccagag

SEQ ID NO: 2038034 - DNA, 25 bp, Homo sapien
tgcctggcgggatacatggtacctg

SEQ ID NO: 2038035 - DNA, 25 bp, Homo sapien
cacgtatctttaccgctgcctgggc

SEQ ID NO: 2038036 - DNA, 25 bp, Homo sapien
tgtcttccaggagggcacgtatctt

SEQ ID NO: 2038037 - DNA, 25 bp, Homo sapien
ccttcgttaccaaggcagtggaaat

SEQ ID NO: 2038038 - DNA, 25 bp, Homo sapien
agtggaaattggtctaatgaactct

SEQ ID NO: 2038039 - DNA, 25 bp, Homo sapien
tgtgtgagagcacacgcacgggcct

SEQ ID NO: 2038040 - DNA, 25 bp, Homo sapien
aattggtctaatgaactctttctgc

SEQ ID NO: 2038041 - DNA, 25 bp, Homo sapien
aagagctcctctgtcacactcttgg

SEQ ID NO: 2038042 - DNA, 25 bp, Homo sapien
gctcctctgtcacactcttgggtct

SEQ ID NO: 2038043 - DNA, 25 bp, Homo sapien
ctgtcacactcttgggtctgctcac

SEQ ID NO: 2038044 - DNA, 25 bp, Homo sapien
cctctgtcacactcttgggtctgct

SEQ ID NO: 2038045 - DNA, 25 bp, Homo sapien
gacagcactgttttgcattctgtcc

SEQ ID NO: 2038046 - DNA, 25 bp, Homo sapien
ccggtaacatcaacgccagagccat

SEQ ID NO: 2038047 - DNA, 25 bp, Homo sapien
ggctgaaatatgcatctccttggat

SEQ ID NO: 2038048 - DNA, 25 bp, Homo sapien
ctgtccttcagacatcggctgaaat

SEQ ID NO: 2038049 - DNA, 25 bp, Homo sapien
tttgtcataatggacatactcaggc

SEQ ID NO: 2038050 - DNA, 25 bp, Homo sapien
tcaggcagtgaggagtcatcattcc

SEQ ID NO: 2038051 - DNA, 25 bp, Homo sapien
gtcccaagagcttcgcgagcgtgac

SEQ ID NO: 2038052 - DNA, 25 bp, Homo sapien
tcatcattccgccagagcacaaact

SEQ ID NO: 2038053 - DNA, 25 bp, Homo sapien
aataggcagagcctcgcaggcccat

SEQ ID NO: 2038054 - DNA, 25 bp, Homo sapien
ttaagttgcatggagcaataggcag

SEQ ID NO: 2038055 - DNA, 25 bp, Homo sapien
gagcaataggcagagcctcgcaggc

SEQ ID NO: 2038056 - DNA, 25 bp, Homo sapien
ctacattaagttgcatggagcaata

SEQ ID NO: 2038057 - DNA, 25 bp, Homo sapien
tgcaggtgtgcacggctgtcttcct

SEQ ID NO: 2038058 - DNA, 25 bp, Homo sapien
ccattcccttgtgcatgtgggtgct

SEQ ID NO: 2038059 - DNA, 25 bp, Homo sapien
tggaaagcagagatcttcccagtat

SEQ ID NO: 2038060 - DNA, 25 bp, Homo sapien
gaatgcacgtctgctcagggatcat

SEQ ID NO: 2038061 - DNA, 25 bp, Homo sapien
gatcatatgagtcgataattataga

SEQ ID NO: 2038062 - DNA, 25 bp, Homo sapien
catatgagtcgataattatagactt

SEQ ID NO: 2038063 - DNA, 25 bp, Homo sapien
ctagatcatatgagtcgataattat

SEQ ID NO: 2038064 - DNA, 25 bp, Homo sapien
tcatatgagtcgataattatagact

SEQ ID NO: 2038065 - DNA, 25 bp, Homo sapien
tctttactgttaggagatcttgaga

SEQ ID NO: 2038066 - DNA, 25 bp, Homo sapien
caaggtctgcactatccatgagctc

SEQ ID NO: 2038067 - DNA, 25 bp, Homo sapien
tgagctctgaggcactcacatggag

SEQ ID NO: 2038068 - DNA, 25 bp, Homo sapien
gactgactggccgttgccaaggtct

SEQ ID NO: 2038069 - DNA, 25 bp, Homo sapien
cagagccccagtttgccgaggttta

SEQ ID NO: 2038070 - DNA, 25 bp, Homo sapien
ccagtttgccgaggtttagaatgac

SEQ ID NO: 2038071 - DNA, 25 bp, Homo sapien
gagccccagtttgccgaggtttaga

SEQ ID NO: 2038072 - DNA, 25 bp, Homo sapien
cagcagagccccagtttgccgaggt

SEQ ID NO: 2038073 - DNA, 25 bp, Homo sapien
tctttggttggcagcgttcctttct

SEQ ID NO: 2038074 - DNA, 25 bp, Homo sapien
agagtggccagggatcggcatccac

SEQ ID NO: 2038075 - DNA, 25 bp, Homo sapien
ggtaaccgacattccgccagcgaaa

SEQ ID NO: 2038076 - DNA, 25 bp, Homo sapien
gccatggctgtggagctgtcaccta

SEQ ID NO: 2038077 - DNA, 25 bp, Homo sapien
gaaactgcagcgtcaattctttatg

SEQ ID NO: 2038078 - DNA, 25 bp, Homo sapien
tggattttggcctccgtgcccctgt

SEQ ID NO: 2038079 - DNA, 25 bp, Homo sapien
gactctgaggaggactgcgtttcat

SEQ ID NO: 2038080 - DNA, 25 bp, Homo sapien
aaggctgtttcacttctccattgga

SEQ ID NO: 2038081 - DNA, 25 bp, Homo sapien
cacttgtgggggagacgggcaggca

SEQ ID NO: 2038082 - DNA, 25 bp, Homo sapien
gggtgccaaggggaactggaggatc

SEQ ID NO: 2038083 - DNA, 25 bp, Homo sapien
tggaggatctgctggccactgcctt

SEQ ID NO: 2038084 - DNA, 25 bp, Homo sapien
ctgcctttgctctcatggcacttgt

SEQ ID NO: 2038085 - DNA, 25 bp, Homo sapien
gtgtggagtcgcaactgcagatgtt

SEQ ID NO: 2038086 - DNA, 25 bp, Homo sapien
ttttgggaagccgaccaggtgctgc

SEQ ID NO: 2038087 - DNA, 25 bp, Homo sapien
gacacccgtgtggagtcgcaactgc

SEQ ID NO: 2038088 - DNA, 25 bp, Homo sapien
caggtgctgcgggttgtgtagcagg

SEQ ID NO: 2038089 - DNA, 25 bp, Homo sapien
ctgattgctggttggtttctaaact

SEQ ID NO: 2038090 - DNA, 25 bp, Homo sapien
ttccacgtgtttgctccacagatgc

SEQ ID NO: 2038091 - DNA, 25 bp, Homo sapien
gacggccggcaagcagcgtttgttc

SEQ ID NO: 2038092 - DNA, 25 bp, Homo sapien
acacgtcttgtccagaacagggcct

SEQ ID NO: 2038093 - DNA, 25 bp, Homo sapien
caggcaaaatgcttctattgttatg

SEQ ID NO: 2038094 - DNA, 25 bp, Homo sapien
cagtttatagattaaatttgctttt

SEQ ID NO: 2038095 - DNA, 25 bp, Homo sapien
aacatatggagcagtttatagatta

SEQ ID NO: 2038096 - DNA, 25 bp, Homo sapien
ggattacaggcaaaatgcttctatt

SEQ ID NO: 2038097 - DNA, 25 bp, Homo sapien
ttgggaaccagcttgagaaatgagt

SEQ ID NO: 2038098 - DNA, 25 bp, Homo sapien
cagaccccagtctaaggccttggga

SEQ ID NO: 2038099 - DNA, 25 bp, Homo sapien
agaatggcccaggagggacatttga

SEQ ID NO: 2038100 - DNA, 25 bp, Homo sapien
tttcttccccgaggtgtctgtgagg

SEQ ID NO: 2038101 - DNA, 25 bp, Homo sapien
ttttcagtttcagaggcggagcaca

SEQ ID NO: 2038102 - DNA, 25 bp, Homo sapien
ctgttaattgtaatgcttctgctgg

SEQ ID NO: 2038103 - DNA, 25 bp, Homo sapien
ctgggacaaggagcacccgcgtgca

SEQ ID NO: 2038104 - DNA, 25 bp, Homo sapien
caggaaagtgacctcttgcttttca

SEQ ID NO: 2038105 - DNA, 25 bp, Homo sapien
cctcgacgggacagcgcaagagttg

SEQ ID NO: 2038106 - DNA, 25 bp, Homo sapien
gcggcttcctcgacgggacagcgca

SEQ ID NO: 2038107 - DNA, 25 bp, Homo sapien
agcagtatgccggaagctggttttc

SEQ ID NO: 2038108 - DNA, 25 bp, Homo sapien
ggttttcaggccacaaatgctttca

SEQ ID NO: 2038109 - DNA, 25 bp, Homo sapien
gatgtctccctctggattgtgaggg

SEQ ID NO: 2038110 - DNA, 25 bp, Homo sapien
ggtgtgcgggtcatggcccatgtgg

SEQ ID NO: 2038111 - DNA, 25 bp, Homo sapien
gatgagctccgcagctgtgtacacc

SEQ ID NO: 2038112 - DNA, 25 bp, Homo sapien
cttcctcccaggttgtggtgtgcgg

SEQ ID NO: 2038113 - DNA, 25 bp, Homo sapien
gcacgtgcaaagctaagctctcttg

SEQ ID NO: 2038114 - DNA, 25 bp, Homo sapien
ggagcacgtgcaaagctaagctctc

SEQ ID NO: 2038115 - DNA, 25 bp, Homo sapien
tgcaaagctaagctctcttgaacca

SEQ ID NO: 2038116 - DNA, 25 bp, Homo sapien
cgtgcaaagctaagctctcttgaac

SEQ ID NO: 2038117 - DNA, 25 bp, Homo sapien
gggatcaaaataatgggtctgcctg

SEQ ID NO: 2038118 - DNA, 25 bp, Homo sapien
ttcagcaggggggatcaaaataatg

SEQ ID NO: 2038119 - DNA, 25 bp, Homo sapien
cagaccatcatgtgttgaatagtgt

SEQ ID NO: 2038120 - DNA, 25 bp, Homo sapien
gcctgttctcagaccatcatgtgtt

SEQ ID NO: 2038121 - DNA, 25 bp, Homo sapien
gagattctgcctcttcccggcccat

SEQ ID NO: 2038122 - DNA, 25 bp, Homo sapien
tcctttctgggtgtcaccgtacaca

SEQ ID NO: 2038123 - DNA, 25 bp, Homo sapien
tacacatcctaaagaggttgctggc

SEQ ID NO: 2038124 - DNA, 25 bp, Homo sapien
tcttgtggttttgactgacttggaa

SEQ ID NO: 2038125 - DNA, 25 bp, Homo sapien
gtagttatccctgaaatggagccac

SEQ ID NO: 2038126 - DNA, 25 bp, Homo sapien
tgcttccatacgtggcctcttgtag

SEQ ID NO: 2038127 - DNA, 25 bp, Homo sapien
tcttgtagtttcttgggtcctagcc

SEQ ID NO: 2038128 - DNA, 25 bp, Homo sapien
tggagccacttagctctggagaaat

SEQ ID NO: 2038129 - DNA, 25 bp, Homo sapien
gacaaagcacggtgctaccacggcg

SEQ ID NO: 2038130 - DNA, 25 bp, Homo sapien
gagaaaaccaggctggtctatcatc

SEQ ID NO: 2038131 - DNA, 25 bp, Homo sapien
gccccaggacgacaaagcacggtgc

SEQ ID NO: 2038132 - DNA, 25 bp, Homo sapien
aggctggtctatcatctacactcat

SEQ ID NO: 2038133 - DNA, 25 bp, Homo sapien
gactatctctgagcgggagctacag

SEQ ID NO: 2038134 - DNA, 25 bp, Homo sapien
tgacggatggtgaaattgcagcccc

SEQ ID NO: 2038135 - DNA, 25 bp, Homo sapien
gtcacggatctcagttgggaacaca

SEQ ID NO: 2038136 - DNA, 25 bp, Homo sapien
tcaggaagtgacatgtgcagtgctc

SEQ ID NO: 2038137 - DNA, 25 bp, Homo sapien
tcctggtacgtagtaagggcagcgt

SEQ ID NO: 2038138 - DNA, 25 bp, Homo sapien
tgagcttcctggatgcgctgcttcc

SEQ ID NO: 2038139 - DNA, 25 bp, Homo sapien
agtgccacgtcaagcccaggatggt

SEQ ID NO: 2038140 - DNA, 25 bp, Homo sapien
cgttttctgttgcaaaggcactccc

SEQ ID NO: 2038141 - DNA, 25 bp, Homo sapien
tggttgtataggcagacttgtctcc

SEQ ID NO: 2038142 - DNA, 25 bp, Homo sapien
caaaggaagtctggttgtataggca

SEQ ID NO: 2038143 - DNA, 25 bp, Homo sapien
tgaggagctgctcttgtttccaaga

SEQ ID NO: 2038144 - DNA, 25 bp, Homo sapien
gcagacttgtctccccggtggttag

SEQ ID NO: 2038145 - DNA, 25 bp, Homo sapien
tgacttgcgtcgtaggagagctttg

SEQ ID NO: 2038146 - DNA, 25 bp, Homo sapien
catctctgcggtgacttgcgtcgta

SEQ ID NO: 2038147 - DNA, 25 bp, Homo sapien
acttgcgtcgtaggagagctttggt

SEQ ID NO: 2038148 - DNA, 25 bp, Homo sapien
tctgtcttcatctctgcggtgactt

SEQ ID NO: 2038149 - DNA, 25 bp, Homo sapien
taaagctgcatctcctgttgctgcc

SEQ ID NO: 2038150 - DNA, 25 bp, Homo sapien
gcctcgcccctgagacttgcaagtt

SEQ ID NO: 2038151 - DNA, 25 bp, Homo sapien
tatagggagcctctcatggttccag

SEQ ID NO: 2038152 - DNA, 25 bp, Homo sapien
tggctgggcgccatccttataggga

SEQ ID NO: 2038153 - DNA, 25 bp, Homo sapien
cattgcaggccctgttgctgtagac

SEQ ID NO: 2038154 - DNA, 25 bp, Homo sapien
ctttattccattgcaggccctgttg

SEQ ID NO: 2038155 - DNA, 25 bp, Homo sapien
tccattgcaggccctgttgctgtag

SEQ ID NO: 2038156 - DNA, 25 bp, Homo sapien
ttattccattgcaggccctgttgct

SEQ ID NO: 2038157 - DNA, 25 bp, Homo sapien
tcaaacccggcagtcttattctagt

SEQ ID NO: 2038158 - DNA, 25 bp, Homo sapien
tataggtatccaaactgtgacccag

SEQ ID NO: 2038159 - DNA, 25 bp, Homo sapien
tagtgccaccatgttatagcctctc

SEQ ID NO: 2038160 - DNA, 25 bp, Homo sapien
gaagactggatgtaccctcacgtgc

SEQ ID NO: 2038161 - DNA, 25 bp, Homo sapien
aggcgtgcagcaggaataaatcatg

SEQ ID NO: 2038162 - DNA, 25 bp, Homo sapien
cagacacagacgtgagcctggtgga

SEQ ID NO: 2038163 - DNA, 25 bp, Homo sapien
acacagacgtgagcctggtggacct

SEQ ID NO: 2038164 - DNA, 25 bp, Homo sapien
cccggaaggcgtgcagcaggaataa

SEQ ID NO: 2038165 - DNA, 25 bp, Homo sapien
gaatactcacttcagaacggtcgcg

SEQ ID NO: 2038166 - DNA, 25 bp, Homo sapien
cagaccttccatgcatgggcagaga

SEQ ID NO: 2038167 - DNA, 25 bp, Homo sapien
gcttcacagagggtaacaaatgacc

SEQ ID NO: 2038168 - DNA, 25 bp, Homo sapien
gcaccattctgcaggcactttcagg

SEQ ID NO: 2038169 - DNA, 25 bp, Homo sapien
ctccttaaaagcagggagaacatcc

SEQ ID NO: 2038170 - DNA, 25 bp, Homo sapien
ggagaacatccttccgcgctgagca

SEQ ID NO: 2038171 - DNA, 25 bp, Homo sapien
tccttaaaagcagggagaacatcct

SEQ ID NO: 2038172 - DNA, 25 bp, Homo sapien
atccttccgcgctgagcactgcaca

SEQ ID NO: 2038173 - DNA, 25 bp, Homo sapien
ctgcagggcggatgtccaccaggct

SEQ ID NO: 2038174 - DNA, 25 bp, Homo sapien
ccttgctgcccgtgtaggggtgtcc

SEQ ID NO: 2038175 - DNA, 25 bp, Homo sapien
cagtctctgcgagggagagccctgc

SEQ ID NO: 2038176 - DNA, 25 bp, Homo sapien
cttctgcagtctctgcgagggagag

SEQ ID NO: 2038177 - DNA, 25 bp, Homo sapien
tatttccagatcattcgtgtcctgg

SEQ ID NO: 2038178 - DNA, 25 bp, Homo sapien
agtttgactcttatttccagatcat

SEQ ID NO: 2038179 - DNA, 25 bp, Homo sapien
atttccagatcattcgtgtcctggg

SEQ ID NO: 2038180 - DNA, 25 bp, Homo sapien
tcatggcaaagagccctggcggctg

SEQ ID NO: 2038181 - DNA, 25 bp, Homo sapien
ctgtgctcatttccgtttctgagtc

SEQ ID NO: 2038182 - DNA, 25 bp, Homo sapien
cacttcctcctctaaggtcatggca

SEQ ID NO: 2038183 - DNA, 25 bp, Homo sapien
catttccgtttctgagtccccactt

SEQ ID NO: 2038184 - DNA, 25 bp, Homo sapien
gctgagtccacgaggcgctcgtgct

SEQ ID NO: 2038185 - DNA, 25 bp, Homo sapien
gcagaaatccttggctgctccccat

SEQ ID NO: 2038186 - DNA, 25 bp, Homo sapien
actctccatttgtgcttctagctgc

SEQ ID NO: 2038187 - DNA, 25 bp, Homo sapien
gctgctgacctctggagtgaatttt

SEQ ID NO: 2038188 - DNA, 25 bp, Homo sapien
gaggaatatgacacgtcggggctcc

SEQ ID NO: 2038189 - DNA, 25 bp, Homo sapien
ggaatatgacacgtcggggctccag

SEQ ID NO: 2038190 - DNA, 25 bp, Homo sapien
aatatgacacgtcggggctccagat

SEQ ID NO: 2038191 - DNA, 25 bp, Homo sapien
ccaggtagatgtggccatcccttct

SEQ ID NO: 2038192 - DNA, 25 bp, Homo sapien
cccgagggcaggacggtggaccaca

SEQ ID NO: 2038193 - DNA, 25 bp, Homo sapien
tgaaaccggctctcaacaggacatg

SEQ ID NO: 2038194 - DNA, 25 bp, Homo sapien
cacactgcacaggtgaaaccggctc

SEQ ID NO: 2038195 - DNA, 25 bp, Homo sapien
ggctctcaacaggacatgccctcgg

SEQ ID NO: 2038196 - DNA, 25 bp, Homo sapien
cagccgggcagccatacatgggctg

SEQ ID NO: 2038197 - DNA, 25 bp, Homo sapien
gtcttgacttatccctggctctgag

SEQ ID NO: 2038198 - DNA, 25 bp, Homo sapien
agctggttgcagatattaagaaata

SEQ ID NO: 2038199 - DNA, 25 bp, Homo sapien
tggagaaatcagcactcacacccag

SEQ ID NO: 2038200 - DNA, 25 bp, Homo sapien
gcctctgttgatactgccaggtgga

SEQ ID NO: 2038201 - DNA, 25 bp, Homo sapien
ggtggatatggtcctcatcacccac

SEQ ID NO: 2038202 - DNA, 25 bp, Homo sapien
ctgtcagtgggcgacgtggagctcc

SEQ ID NO: 2038203 - DNA, 25 bp, Homo sapien
ctgaggataaatgctgccaggcact

SEQ ID NO: 2038204 - DNA, 25 bp, Homo sapien
gctgcacgggctcccccattctcgg

SEQ ID NO: 2038205 - DNA, 25 bp, Homo sapien
cgggctcccccattctcggaagtgt

SEQ ID NO: 2038206 - DNA, 25 bp, Homo sapien
tggctgcacgggctcccccattctc

SEQ ID NO: 2038207 - DNA, 25 bp, Homo sapien
cacgggctcccccattctcggaagt

SEQ ID NO: 2038208 - DNA, 25 bp, Homo sapien
tgacgaagagaactgtctcctggtg

SEQ ID NO: 2038209 - DNA, 25 bp, Homo sapien
cgcctccgggcatcttcaactgtaa

SEQ ID NO: 2038210 - DNA, 25 bp, Homo sapien
tctgtaaccaacagaacgactgtgg

SEQ ID NO: 2038211 - DNA, 25 bp, Homo sapien
tgtatcttggttcgctggtctgtaa

SEQ ID NO: 2038212 - DNA, 25 bp, Homo sapien
tgggcgcgtgcttgcctggcattgg

SEQ ID NO: 2038213 - DNA, 25 bp, Homo sapien
cattgggtccgtgttttgtgcggta

SEQ ID NO: 2038214 - DNA, 25 bp, Homo sapien
aagacagttcttggaggttcaggct

SEQ ID NO: 2038215 - DNA, 25 bp, Homo sapien
tgtgcggtagtctctgtgtaataca

SEQ ID NO: 2038216 - DNA, 25 bp, Homo sapien
gtgtgctacttagtgcatggaacca

SEQ ID NO: 2038217 - DNA, 25 bp, Homo sapien
ctgggtgtgctacttagtgcatgga

SEQ ID NO: 2038218 - DNA, 25 bp, Homo sapien
tgctacttagtgcatggaaccaggg

SEQ ID NO: 2038219 - DNA, 25 bp, Homo sapien
gggtgtgctacttagtgcatggaac

SEQ ID NO: 2038220 - DNA, 25 bp, Homo sapien
ccagagggtggcctcgtattgaatg

SEQ ID NO: 2038221 - DNA, 25 bp, Homo sapien
ggctatatattctcttccccgtatt

SEQ ID NO: 2038222 - DNA, 25 bp, Homo sapien
gcctctggattgttctgtgtggctg

SEQ ID NO: 2038223 - DNA, 25 bp, Homo sapien
ggtggcctcgtattgaatggctata

SEQ ID NO: 2038224 - DNA, 25 bp, Homo sapien
gaccaaagggttttgcatggacgtg

SEQ ID NO: 2038225 - DNA, 25 bp, Homo sapien
tgcatggacgtggaggtctgggctg

SEQ ID NO: 2038226 - DNA, 25 bp, Homo sapien
catggtcaggttatggttggaccga

SEQ ID NO: 2038227 - DNA, 25 bp, Homo sapien
tatctcctggggaatgagttttcct

SEQ ID NO: 2038228 - DNA, 25 bp, Homo sapien
cagggattgaaaatatccacgtgat

SEQ ID NO: 2038229 - DNA, 25 bp, Homo sapien
gtggaagcagggattgaaaatatcc

SEQ ID NO: 2038230 - DNA, 25 bp, Homo sapien
tgaaaaaggcttttgcttgcaaggc

SEQ ID NO: 2038231 - DNA, 25 bp, Homo sapien
cctagtaccttgcaagtggaagcag

SEQ ID NO: 2038232 - DNA, 25 bp, Homo sapien
tggcctctaaatatccatctgctgt

SEQ ID NO: 2038233 - DNA, 25 bp, Homo sapien
catctgctgtgtaggaaggaccagt

SEQ ID NO: 2038234 - DNA, 25 bp, Homo sapien
tctaaatatccatctgctgtgtagg

SEQ ID NO: 2038235 - DNA, 25 bp, Homo sapien
aatatccatctgctgtgtaggaagg

SEQ ID NO: 2038236 - DNA, 25 bp, Homo sapien
cttcttcgattgtgtcctgtccagg

SEQ ID NO: 2038237 - DNA, 25 bp, Homo sapien
ctatcccttcttcgattgtgtcctg

SEQ ID NO: 2038238 - DNA, 25 bp, Homo sapien
tgtcctgtccaggtagtactcgtat

SEQ ID NO: 2038239 - DNA, 25 bp, Homo sapien
gtactcgtatgacccagaagccagc

SEQ ID NO: 2038240 - DNA, 25 bp, Homo sapien
tgtcttgtcaggaggatggagatga

SEQ ID NO: 2038241 - DNA, 25 bp, Homo sapien
tcaggaggatggagatgatgacagc

SEQ ID NO: 2038242 - DNA, 25 bp, Homo sapien
caggaggatggagatgatgacagct

SEQ ID NO: 2038243 - DNA, 25 bp, Homo sapien
gaggatggagatgatgacagctgcc

SEQ ID NO: 2038244 - DNA, 25 bp, Homo sapien
tgtctgagcgcattggctccttcag

SEQ ID NO: 2038245 - DNA, 25 bp, Homo sapien
tttagcctctgatccccagtttccc

SEQ ID NO: 2038246 - DNA, 25 bp, Homo sapien
ccctctgactcttgtctgagcgcat

SEQ ID NO: 2038247 - DNA, 25 bp, Homo sapien
tgctgcgggcgccaagagcccgcct

SEQ ID NO: 2038248 - DNA, 25 bp, Homo sapien
atgaatttctgcgaatttcttcatg

SEQ ID NO: 2038249 - DNA, 25 bp, Homo sapien
ctgggtctcttccgggcagctccac

SEQ ID NO: 2038250 - DNA, 25 bp, Homo sapien
tttatgaatttctgcgaatttcttc

SEQ ID NO: 2038251 - DNA, 25 bp, Homo sapien
gaatttctgcgaatttcttcatgct

SEQ ID NO: 2038252 - DNA, 25 bp, Homo sapien
accctccgagggctggacttctgga

SEQ ID NO: 2038253 - DNA, 25 bp, Homo sapien
gatggccgctaatcacgtcttggtc

SEQ ID NO: 2038254 - DNA, 25 bp, Homo sapien
ctttgtcgcttggtttgatggccgc

SEQ ID NO: 2038255 - DNA, 25 bp, Homo sapien
taaagctgccatgagatacgtcgtg

SEQ ID NO: 2038256 - DNA, 25 bp, Homo sapien
agccaggctgtctgctgtggatggc

SEQ ID NO: 2038257 - DNA, 25 bp, Homo sapien
ccatggcgctatctccttcatcctt

SEQ ID NO: 2038258 - DNA, 25 bp, Homo sapien
caggctgtctgctgtggatggctct

SEQ ID NO: 2038259 - DNA, 25 bp, Homo sapien
ctgttccggagagggcccctgagcc

SEQ ID NO: 2038260 - DNA, 25 bp, Homo sapien
tagcagcaggacatgcctggcccgg

SEQ ID NO: 2038261 - DNA, 25 bp, Homo sapien
cctggcccgggatggccatccacct

SEQ ID NO: 2038262 - DNA, 25 bp, Homo sapien
gcccgggatggccatccacctgagc

SEQ ID NO: 2038263 - DNA, 25 bp, Homo sapien
ggtagcagcaggacatgcctggccc

SEQ ID NO: 2038264 - DNA, 25 bp, Homo sapien
tccctccaagggaggcgaagctggt

SEQ ID NO: 2038265 - DNA, 25 bp, Homo sapien
gctaggcagtccaaagggtgtccct

SEQ ID NO: 2038266 - DNA, 25 bp, Homo sapien
tttgttgagtggatgatcacaaccc

SEQ ID NO: 2038267 - DNA, 25 bp, Homo sapien
tgggtgctcagtccgcgtttgttga

SEQ ID NO: 2038268 - DNA, 25 bp, Homo sapien
ttgatgtgacatctatgaggcccgt

SEQ ID NO: 2038269 - DNA, 25 bp, Homo sapien
ctgcaattcattgtctcaagtggga

SEQ ID NO: 2038270 - DNA, 25 bp, Homo sapien
gggtgggtcgtcattccctctgatg

SEQ ID NO: 2038271 - DNA, 25 bp, Homo sapien
gggccaagtcatgtcctccccgtgg

SEQ ID NO: 2038272 - DNA, 25 bp, Homo sapien
gatctaacatacaattgagcaactc

SEQ ID NO: 2038273 - DNA, 25 bp, Homo sapien
tacaattgagcaactcttggtggtg

SEQ ID NO: 2038274 - DNA, 25 bp, Homo sapien
taacatacaattgagcaactcttgg

SEQ ID NO: 2038275 - DNA, 25 bp, Homo sapien
ttctggtgatctaacatacaattga

SEQ ID NO: 2038276 - DNA, 25 bp, Homo sapien
cgcctttattgttggtgaacacagt

SEQ ID NO: 2038277 - DNA, 25 bp, Homo sapien
ctttgtccgcctttattgttggtga

SEQ ID NO: 2038278 - DNA, 25 bp, Homo sapien
ttgtccgcctttattgttggtgaac

SEQ ID NO: 2038279 - DNA, 25 bp, Homo sapien
gtccgcctttattgttggtgaacac

SEQ ID NO: 2038280 - DNA, 25 bp, Homo sapien
tcttgagtaccgtgggaactgaggc

SEQ ID NO: 2038281 - DNA, 25 bp, Homo sapien
tccacgcgtgctgggctagtacaga

SEQ ID NO: 2038282 - DNA, 25 bp, Homo sapien
tgctcacagaaggtgccccatgatg

SEQ ID NO: 2038283 - DNA, 25 bp, Homo sapien
ctagtacagaagatcggtaggcagg

SEQ ID NO: 2038284 - DNA, 25 bp, Homo sapien
gaccgatagccttggggactgcatg

SEQ ID NO: 2038285 - DNA, 25 bp, Homo sapien
aggaccgatagccttggggactgca

SEQ ID NO: 2038286 - DNA, 25 bp, Homo sapien
gaggaggaccgatagccttggggac

SEQ ID NO: 2038287 - DNA, 25 bp, Homo sapien
ctgaggaggaccgatagccttgggg

SEQ ID NO: 2038288 - DNA, 25 bp, Homo sapien
ctgactgaggaaaatggattctagg

SEQ ID NO: 2038289 - DNA, 25 bp, Homo sapien
acgtcattgaagaaggagagtgtgt

SEQ ID NO: 2038290 - DNA, 25 bp, Homo sapien
tctaggaacacaaacgtcattgaag

SEQ ID NO: 2038291 - DNA, 25 bp, Homo sapien
tgtgtgttactggttgagggtgtcc

SEQ ID NO: 2038292 - DNA, 25 bp, Homo sapien
cacttgtggacttcttcactggcct

SEQ ID NO: 2038293 - DNA, 25 bp, Homo sapien
agaaccaaggcaggcacttgtggac

SEQ ID NO: 2038294 - DNA, 25 bp, Homo sapien
ctggcttcagatcccgtgacagctg

SEQ ID NO: 2038295 - DNA, 25 bp, Homo sapien
ttcagatcccgtgacagctgcaagc

SEQ ID NO: 2038296 - DNA, 25 bp, Homo sapien
gaaatgatggtggagcagttgccct

SEQ ID NO: 2038297 - DNA, 25 bp, Homo sapien
tcagtaagcccttgacatccaaagg

SEQ ID NO: 2038298 - DNA, 25 bp, Homo sapien
gactaacatctaacaggtctgtgga

SEQ ID NO: 2038299 - DNA, 25 bp, Homo sapien
ccctttgacatagcgatagaccgtg

SEQ ID NO: 2038300 - DNA, 25 bp, Homo sapien
ccttgtggcacgtaattcatgtctg

SEQ ID NO: 2038301 - DNA, 25 bp, Homo sapien
ggccaccatccttgtggcacgtaat

SEQ ID NO: 2038302 - DNA, 25 bp, Homo sapien
gtggattctcatccttccgccggca

SEQ ID NO: 2038303 - DNA, 25 bp, Homo sapien
gtctgccacagcaaaatagccaatg

SEQ ID NO: 2038304 - DNA, 25 bp, Homo sapien
atgcgctgccctgctctcaacttcc

SEQ ID NO: 2038305 - DNA, 25 bp, Homo sapien
ccatgcgctgccctgctctcaactt

SEQ ID NO: 2038306 - DNA, 25 bp, Homo sapien
gcgctgccctgctctcaacttccac

SEQ ID NO: 2038307 - DNA, 25 bp, Homo sapien
ggcaagcagagtgcccacaaagacc

SEQ ID NO: 2038308 - DNA, 25 bp, Homo sapien
gagagttagacccatgcgctgggtc

SEQ ID NO: 2038309 - DNA, 25 bp, Homo sapien
agttagacccatgcgctgggtctgg

SEQ ID NO: 2038310 - DNA, 25 bp, Homo sapien
agacccatgcgctgggtctggctga

SEQ ID NO: 2038311 - DNA, 25 bp, Homo sapien
ctgagagttagacccatgcgctggg

SEQ ID NO: 2038312 - DNA, 25 bp, Homo sapien
cagaagtggcggtggaatgcacaca

SEQ ID NO: 2038313 - DNA, 25 bp, Homo sapien
ttttctttcgtaatggagagaagag

SEQ ID NO: 2038314 - DNA, 25 bp, Homo sapien
gcgtgtcacagtgcgcatgggctcc

SEQ ID NO: 2038315 - DNA, 25 bp, Homo sapien
aactcttgtacatccggtcactgtc

SEQ ID NO: 2038316 - DNA, 25 bp, Homo sapien
taagaattgctcaccggtgagactc

SEQ ID NO: 2038317 - DNA, 25 bp, Homo sapien
aattgctcaccggtgagactccatt

SEQ ID NO: 2038318 - DNA, 25 bp, Homo sapien
tgtttcataagaattgctcaccggt

SEQ ID NO: 2038319 - DNA, 25 bp, Homo sapien
ttcataagaattgctcaccggtgag

SEQ ID NO: 2038320 - DNA, 25 bp, Homo sapien
gtgtgggctcctgcgcctgttgtct

SEQ ID NO: 2038321 - DNA, 25 bp, Homo sapien
tcagggaaggcctcgcattgtgcca

SEQ ID NO: 2038322 - DNA, 25 bp, Homo sapien
tgaagtccctgcaaccagatcagct

SEQ ID NO: 2038323 - DNA, 25 bp, Homo sapien
gatcccagggctgtcgagctcattg

SEQ ID NO: 2038324 - DNA, 25 bp, Homo sapien
tgggacagcactggccttcctcctt

SEQ ID NO: 2038325 - DNA, 25 bp, Homo sapien
ctgcaaatgggacagcactggcctt

SEQ ID NO: 2038326 - DNA, 25 bp, Homo sapien
ggacagcactggccttcctcctttt

SEQ ID NO: 2038327 - DNA, 25 bp, Homo sapien
acagcactggccttcctccttttca

SEQ ID NO: 2038328 - DNA, 25 bp, Homo sapien
catttcctaggtcagcctgcaaaaa

SEQ ID NO: 2038329 - DNA, 25 bp, Homo sapien
cctgagtcagacatatccatcccaa

SEQ ID NO: 2038330 - DNA, 25 bp, Homo sapien
gcaaaaaccctgagtcagacatatc

SEQ ID NO: 2038331 - DNA, 25 bp, Homo sapien
cctgcagcccttgggctgcacattt

SEQ ID NO: 2038332 - DNA, 25 bp, Homo sapien
aatggaagcaacattgggaagcggc

SEQ ID NO: 2038333 - DNA, 25 bp, Homo sapien
ctgataccccagtgaggacttcggg

SEQ ID NO: 2038334 - DNA, 25 bp, Homo sapien
ctcaggagttagacacgtgtcagat

SEQ ID NO: 2038335 - DNA, 25 bp, Homo sapien
cactgggtgcagatccaagccattg

SEQ ID NO: 2038336 - DNA, 25 bp, Homo sapien
gcagaagcccaagcggagaaaacct

SEQ ID NO: 2038337 - DNA, 25 bp, Homo sapien
ccacctgcctctatcaggcgggata

SEQ ID NO: 2038338 - DNA, 25 bp, Homo sapien
cagaatgcttctagaagagccctcc

SEQ ID NO: 2038339 - DNA, 25 bp, Homo sapien
ggatacttgtcatgcatttctcttc

SEQ ID NO: 2038340 - DNA, 25 bp, Homo sapien
gggatatctaagtgcttaagtgacc

SEQ ID NO: 2038341 - DNA, 25 bp, Homo sapien
gatatctaagtgcttaagtgacccc

SEQ ID NO: 2038342 - DNA, 25 bp, Homo sapien
atctaagtgcttaagtgaccccgca

SEQ ID NO: 2038343 - DNA, 25 bp, Homo sapien
gcccaggggatatctaagtgcttaa

SEQ ID NO: 2038344 - DNA, 25 bp, Homo sapien
gccatgttcgcattttggaaggaga

SEQ ID NO: 2038345 - DNA, 25 bp, Homo sapien
ctgacaggcagtcaagggcatccct

SEQ ID NO: 2038346 - DNA, 25 bp, Homo sapien
caagtcgatgtagtcaagggccaga

SEQ ID NO: 2038347 - DNA, 25 bp, Homo sapien
cagaagaggcgtctgatgcaggccc

SEQ ID NO: 2038348 - DNA, 25 bp, Homo sapien
tctactgtaacggaatcgccaggtg

SEQ ID NO: 2038349 - DNA, 25 bp, Homo sapien
ttgtctgagagcctgcagcattggc

SEQ ID NO: 2038350 - DNA, 25 bp, Homo sapien
tcagatcaacgaaggataccaaagg

SEQ ID NO: 2038351 - DNA, 25 bp, Homo sapien
ccgggctcggataatgcatctcaga

SEQ ID NO: 2038352 - DNA, 25 bp, Homo sapien
ccagtgaaaacccacgtcctggctg

SEQ ID NO: 2038353 - DNA, 25 bp, Homo sapien
cagccagagccttgactagtgtgtc

SEQ ID NO: 2038354 - DNA, 25 bp, Homo sapien
ggctgtcagccgtgtcagccagagc

SEQ ID NO: 2038355 - DNA, 25 bp, Homo sapien
gaagtggaaggtcatccagcctcac

SEQ ID NO: 2038356 - DNA, 25 bp, Homo sapien
acatgtgtggctgtcctcccgtcat

SEQ ID NO: 2038357 - DNA, 25 bp, Homo sapien
ctcccgtcatcttctgccctatcag

SEQ ID NO: 2038358 - DNA, 25 bp, Homo sapien
catcttctgccctatcagaagatgg

SEQ ID NO: 2038359 - DNA, 25 bp, Homo sapien
gaacatgtgtggctgtcctcccgtc

SEQ ID NO: 2038360 - DNA, 25 bp, Homo sapien
ttctgaggcatgtgctgtgacacgg

SEQ ID NO: 2038361 - DNA, 25 bp, Homo sapien
tgactgtggcttgacgctgactgct

SEQ ID NO: 2038362 - DNA, 25 bp, Homo sapien
caactttgtggatggcttcctctgg

SEQ ID NO: 2038363 - DNA, 25 bp, Homo sapien
tgtgacacggttgtgcatggccccg

SEQ ID NO: 2038364 - DNA, 25 bp, Homo sapien
ccacagctgactcccatgagcgtga

SEQ ID NO: 2038365 - DNA, 25 bp, Homo sapien
gcttattctgtgcaaaccccaccgt

SEQ ID NO: 2038366 - DNA, 25 bp, Homo sapien
ccatgagcgtgagcacacggaagct

SEQ ID NO: 2038367 - DNA, 25 bp, Homo sapien
gaccacgccatgtgcttattctgtg

SEQ ID NO: 2038368 - DNA, 25 bp, Homo sapien
gggaaggagcaaaagccccttgcca

SEQ ID NO: 2038369 - DNA, 25 bp, Homo sapien
gtgagatgtctatgttctctttccc

SEQ ID NO: 2038370 - DNA, 25 bp, Homo sapien
gaaggagcaaaagccccttgccatc

SEQ ID NO: 2038371 - DNA, 25 bp, Homo sapien
tccctttctgacttggcccgtgaga

SEQ ID NO: 2038372 - DNA, 25 bp, Homo sapien
cttcctctgcattcgctgggtgatg

SEQ ID NO: 2038373 - DNA, 25 bp, Homo sapien
ttcctctgcattcgctgggtgatgc

SEQ ID NO: 2038374 - DNA, 25 bp, Homo sapien
tcctctgcattcgctgggtgatgct

SEQ ID NO: 2038375 - DNA, 25 bp, Homo sapien
tcctcagaagtgtggctccttcctc

SEQ ID NO: 2038376 - DNA, 25 bp, Homo sapien
gaaacttggccacgtgccctcgtgg

SEQ ID NO: 2038377 - DNA, 25 bp, Homo sapien
ggaaacttggccacgtgccctcgtg

SEQ ID NO: 2038378 - DNA, 25 bp, Homo sapien
ggtagaaacacggagttgggagcca

SEQ ID NO: 2038379 - DNA, 25 bp, Homo sapien
ctggtaggagtgtagttggtggtag

SEQ ID NO: 2038380 - DNA, 25 bp, Homo sapien
ccttgctgttgggtcggggatgcag

SEQ ID NO: 2038381 - DNA, 25 bp, Homo sapien
gggatgcagtcagaaaggagcatga

SEQ ID NO: 2038382 - DNA, 25 bp, Homo sapien
aagggcatctgtcccggcagggcca

SEQ ID NO: 2038383 - DNA, 25 bp, Homo sapien
gcattgggctgaaggactctctggc

SEQ ID NO: 2038384 - DNA, 25 bp, Homo sapien
cctccactatcagatggcggctgtc

SEQ ID NO: 2038385 - DNA, 25 bp, Homo sapien
tctggaacccacagctagccggctg

SEQ ID NO: 2038386 - DNA, 25 bp, Homo sapien
cagtcatgggcttgtcaccgagtgc

SEQ ID NO: 2038387 - DNA, 25 bp, Homo sapien
atcagatggcggctgtcagtcatgg

SEQ ID NO: 2038388 - DNA, 25 bp, Homo sapien
tgcctctgccggaagggacgtcctt

SEQ ID NO: 2038389 - DNA, 25 bp, Homo sapien
tattcccgggctgttgatgggatct

SEQ ID NO: 2038390 - DNA, 25 bp, Homo sapien
catccaccccagtgcacggaaaggt

SEQ ID NO: 2038391 - DNA, 25 bp, Homo sapien
tagctagaaacaggccacgctcttg

SEQ ID NO: 2038392 - DNA, 25 bp, Homo sapien
cagcattgctgtaatccggtggagt

SEQ ID NO: 2038393 - DNA, 25 bp, Homo sapien
ccagcattgctgtaatccggtggag

SEQ ID NO: 2038394 - DNA, 25 bp, Homo sapien
agcattgctgtaatccggtggagtg

SEQ ID NO: 2038395 - DNA, 25 bp, Homo sapien
gcattgctgtaatccggtggagtgg

SEQ ID NO: 2038396 - DNA, 25 bp, Homo sapien
agtattaacagatggagttggtcct

SEQ ID NO: 2038397 - DNA, 25 bp, Homo sapien
tggggagtagcagctccttggcaaa

SEQ ID NO: 2038398 - DNA, 25 bp, Homo sapien
tgctcctgtgcgttcactcttcctg

SEQ ID NO: 2038399 - DNA, 25 bp, Homo sapien
cagatggagttggtcctcccttccc

SEQ ID NO: 2038400 - DNA, 25 bp, Homo sapien
acaggatggccaatgggcattgtca

SEQ ID NO: 2038401 - DNA, 25 bp, Homo sapien
cctcatcaaaaaggccacaggatgg

SEQ ID NO: 2038402 - DNA, 25 bp, Homo sapien
ctggcctcatcaaaaaggccacagg

SEQ ID NO: 2038403 - DNA, 25 bp, Homo sapien
ggccacaggatggccaatgggcatt

SEQ ID NO: 2038404 - DNA, 25 bp, Homo sapien
cttatggtgtggaggccgccttcct

SEQ ID NO: 2038405 - DNA, 25 bp, Homo sapien
catggtgacgcggtgccgcaatcct

SEQ ID NO: 2038406 - DNA, 25 bp, Homo sapien
gcaatcctgccttatggtgtggagg

SEQ ID NO: 2038407 - DNA, 25 bp, Homo sapien
gcccagcatggaggcgtgtggtcca

SEQ ID NO: 2038408 - DNA, 25 bp, Homo sapien
gaaggagcagggcggtggtgatggc

SEQ ID NO: 2038409 - DNA, 25 bp, Homo sapien
aggagcagggcggtggtgatggctc

SEQ ID NO: 2038410 - DNA, 25 bp, Homo sapien
aaggagcagggcggtggtgatggct

SEQ ID NO: 2038411 - DNA, 25 bp, Homo sapien
tatgtgaggaaagccctccctttgg

SEQ ID NO: 2038412 - DNA, 25 bp, Homo sapien
atgtgaggaaagccctccctttggg

SEQ ID NO: 2038413 - DNA, 25 bp, Homo sapien
ttatgtgaggaaagccctccctttg

SEQ ID NO: 2038414 - DNA, 25 bp, Homo sapien
acactttgttagctgggagtgagga

SEQ ID NO: 2038415 - DNA, 25 bp, Homo sapien
tgggaagaaacactttgttagctgg

SEQ ID NO: 2038416 - DNA, 25 bp, Homo sapien
gaaaacgacaccagagaatccttct

SEQ ID NO: 2038417 - DNA, 25 bp, Homo sapien
agtgaggagccagcgaaaacgacac

SEQ ID NO: 2038418 - DNA, 25 bp, Homo sapien
tggagaatccttctcgccacacacg

SEQ ID NO: 2038419 - DNA, 25 bp, Homo sapien
ggagaatccttctcgccacacacgt

SEQ ID NO: 2038420 - DNA, 25 bp, Homo sapien
cgtggacaccggagaatccttctcg

SEQ ID NO: 2038421 - DNA, 25 bp, Homo sapien
ggagaatccttctcgccacacacat

SEQ ID NO: 2038422 - DNA, 25 bp, Homo sapien
ggacaccggagaatccttctcgcca

SEQ ID NO: 2038423 - DNA, 25 bp, Homo sapien
cgtggacaccggagaatccttctcg

SEQ ID NO: 2038424 - DNA, 25 bp, Homo sapien
ccgtggacaccggagaatccttctc

SEQ ID NO: 2038425 - DNA, 25 bp, Homo sapien
acacatcccgccgtggacactggag

SEQ ID NO: 2038426 - DNA, 25 bp, Homo sapien
cccgccgtggacactggagaatcct

SEQ ID NO: 2038427 - DNA, 25 bp, Homo sapien
acacgtcccgccgtggatactggag

SEQ ID NO: 2038428 - DNA, 25 bp, Homo sapien
cgccgtggatactggagaatccttc

SEQ ID NO: 2038429 - DNA, 25 bp, Homo sapien
acgtcccgccgtggacactggagaa

SEQ ID NO: 2038430 - DNA, 25 bp, Homo sapien
tgtccttccagtatgctgcttgggt

SEQ ID NO: 2038431 - DNA, 25 bp, Homo sapien
tctactcacacacgtcccgctgtgg

SEQ ID NO: 2038432 - DNA, 25 bp, Homo sapien
atctccacacacgtatcctgctgtg

SEQ ID NO: 2038433 - DNA, 25 bp, Homo sapien
tgctgtgaaaacctccacgctccct

SEQ ID NO: 2038434 - DNA, 25 bp, Homo sapien
ttaccttcctgattgacagggactt

SEQ ID NO: 2038435 - DNA, 25 bp, Homo sapien
gagtgttaccttcctgattgacagg

SEQ ID NO: 2038436 - DNA, 25 bp, Homo sapien
tccagagtgttaccttcctgattga

SEQ ID NO: 2038437 - DNA, 25 bp, Homo sapien
tgttaccttcctgattgacagggac

SEQ ID NO: 2038438 - DNA, 25 bp, Homo sapien
gtgcagacatgttgtccaagacttg

SEQ ID NO: 2038439 - DNA, 25 bp, Homo sapien
atgtttggtgcagacatgttgtcca

SEQ ID NO: 2038440 - DNA, 25 bp, Homo sapien
gtttggtgcagacatgttgtccaag

SEQ ID NO: 2038441 - DNA, 25 bp, Homo sapien
cagacatgttgtccaagacttgaca

SEQ ID NO: 2038442 - DNA, 25 bp, Homo sapien
ccagctgggagtttgtgaggccata

SEQ ID NO: 2038443 - DNA, 25 bp, Homo sapien
tcagagcctcgttgagtaacaatgg

SEQ ID NO: 2038444 - DNA, 25 bp, Homo sapien
cgagatcatcgagggaaccagctgg

SEQ ID NO: 2038445 - DNA, 25 bp, Homo sapien
tgttgacagtaaccacagagacgag

SEQ ID NO: 2038446 - DNA, 25 bp, Homo sapien
ctgctatcatgatttcagcaaaacc

SEQ ID NO: 2038447 - DNA, 25 bp, Homo sapien
tatcatgatttcagcaaaaccttgc

SEQ ID NO: 2038448 - DNA, 25 bp, Homo sapien
tacagtggctgagtattaatattaa

SEQ ID NO: 2038449 - DNA, 25 bp, Homo sapien
tcttcaatcttaaataggtacagtg

SEQ ID NO: 2038450 - DNA, 25 bp, Homo sapien
tagaggacacatgcaccgacgaggg

SEQ ID NO: 2038451 - DNA, 25 bp, Homo sapien
cacatgcaccgacgaggggtggatg

SEQ ID NO: 2038452 - DNA, 25 bp, Homo sapien
catgcaccgacgaggggtggatgga

SEQ ID NO: 2038453 - DNA, 25 bp, Homo sapien
gacacatgcaccgacgaggggtgga

SEQ ID NO: 2038454 - DNA, 25 bp, Homo sapien
tcaggggttgccatccattgtcccc

SEQ ID NO: 2038455 - DNA, 25 bp, Homo sapien
cattgtccccacaccagacgatgtg

SEQ ID NO: 2038456 - DNA, 25 bp, Homo sapien
attgtccccacaccagacgatgtgc

SEQ ID NO: 2038457 - DNA, 25 bp, Homo sapien
atggggatctcaggggttgccatcc

SEQ ID NO: 2038458 - DNA, 25 bp, Homo sapien
tgggctttcctacagcagcctggta

SEQ ID NO: 2038459 - DNA, 25 bp, Homo sapien
cagcctggtagcagatccctgagag

SEQ ID NO: 2038460 - DNA, 25 bp, Homo sapien
tacagcagcctggtagcagatccct

SEQ ID NO: 2038461 - DNA, 25 bp, Homo sapien
gatccctgagagtgggggctcttcc

SEQ ID NO: 2038462 - DNA, 25 bp, Homo sapien
gcgtgtccttctagtaggagtccaa

SEQ ID NO: 2038463 - DNA, 25 bp, Homo sapien
tccgaggctttagatagggagcagc

SEQ ID NO: 2038464 - DNA, 25 bp, Homo sapien
ctgtttctggagcattccgaggctt

SEQ ID NO: 2038465 - DNA, 25 bp, Homo sapien
ggaaatgtagtgtacagctgcagac

SEQ ID NO: 2038466 - DNA, 25 bp, Homo sapien
agagtaggaaccctggtccatgcag

SEQ ID NO: 2038467 - DNA, 25 bp, Homo sapien
gagacagagcttcccatgccagtgg

SEQ ID NO: 2038468 - DNA, 25 bp, Homo sapien
gctgttaaagtcacccggagggatg

SEQ ID NO: 2038469 - DNA, 25 bp, Homo sapien
gaaggcacaattcctggtgctcaga

SEQ ID NO: 2038470 - DNA, 25 bp, Homo sapien
caccttcatcggacttggcaggaca

SEQ ID NO: 2038471 - DNA, 25 bp, Homo sapien
tgaaatagtttgcagtcctggtgcc

SEQ ID NO: 2038472 - DNA, 25 bp, Homo sapien
acaagcgaccgcgtagttgggagaa

SEQ ID NO: 2038473 - DNA, 25 bp, Homo sapien
taaggaattaaacaactgggcagct

SEQ ID NO: 2038474 - DNA, 25 bp, Homo sapien
agaggacgaaaaggctttataatct

SEQ ID NO: 2038475 - DNA, 25 bp, Homo sapien
tataagatggaaggttctgggtgtc

SEQ ID NO: 2038476 - DNA, 25 bp, Homo sapien
tctgggtgtctcgaccgtgtttttc

SEQ ID NO: 2038477 - DNA, 25 bp, Homo sapien
atggaaggttctgggtgtctcgacc

SEQ ID NO: 2038478 - DNA, 25 bp, Homo sapien
ttttcttcctgtctcacttctgggc

SEQ ID NO: 2038479 - DNA, 25 bp, Homo sapien
agacagagctctcgcgaagctgtgc

SEQ ID NO: 2038480 - DNA, 25 bp, Homo sapien
gtggctcctggtacagtgactgctg

SEQ ID NO: 2038481 - DNA, 25 bp, Homo sapien
tctcgcgaagctgtgctgttttctc

SEQ ID NO: 2038482 - DNA, 25 bp, Homo sapien
gatgggaaagcggagttcgtgtggg

SEQ ID NO: 2038483 - DNA, 25 bp, Homo sapien
tgtttttgatcttgctccccgagcc

SEQ ID NO: 2038484 - DNA, 25 bp, Homo sapien
cgcaatctagccttatccagtggtg

SEQ ID NO: 2038485 - DNA, 25 bp, Homo sapien
tcttgatggcccagctgattgcagg

SEQ ID NO: 2038486 - DNA, 25 bp, Homo sapien
catcattgagctgcgcacgttcagg

SEQ ID NO: 2038487 - DNA, 25 bp, Homo sapien
cttcttctagcagccggccatgagc

SEQ ID NO: 2038488 - DNA, 25 bp, Homo sapien
cggccatgagcagtgcggtttctta

SEQ ID NO: 2038489 - DNA, 25 bp, Homo sapien
cagtgcggtttcttagctgcaaaca

SEQ ID NO: 2038490 - DNA, 25 bp, Homo sapien
ctagcagccggccatgagcagtgcg

SEQ ID NO: 2038491 - DNA, 25 bp, Homo sapien
cctggcacaaaagtagtccgtgtgt

SEQ ID NO: 2038492 - DNA, 25 bp, Homo sapien
gatgctgtcgggcacgtggttcccc

SEQ ID NO: 2038493 - DNA, 25 bp, Homo sapien
gtgcagggaacttcatgcaagctca

SEQ ID NO: 2038494 - DNA, 25 bp, Homo sapien
catgcaagctcattaggcctgatgc

SEQ ID NO: 2038495 - DNA, 25 bp, Homo sapien
tgaagaacctcgataccagacacca

SEQ ID NO: 2038496 - DNA, 25 bp, Homo sapien
cagtatgtccaaattcttgatgccc

SEQ ID NO: 2038497 - DNA, 25 bp, Homo sapien
gtctgttgttaccatcatgatcatc

SEQ ID NO: 2038498 - DNA, 25 bp, Homo sapien
cgtgcattgagtagctgaagaacct

SEQ ID NO: 2038499 - DNA, 25 bp, Homo sapien
ggactgtatcggaggagtgggctgc

SEQ ID NO: 2038500 - DNA, 25 bp, Homo sapien
ctccatagttcccagtaggtgtcac

SEQ ID NO: 2038501 - DNA, 25 bp, Homo sapien
ccttgtgcaaaaatagaccagggtg

SEQ ID NO: 2038502 - DNA, 25 bp, Homo sapien
ggtgaatattgagtgggactgtatc

SEQ ID NO: 2038503 - DNA, 25 bp, Homo sapien
tactgttactgtcactagacgtgcc

SEQ ID NO: 2038504 - DNA, 25 bp, Homo sapien
ccggcagcaccccagaatgtagtac

SEQ ID NO: 2038505 - DNA, 25 bp, Homo sapien
ccagctaatgcgactcgcaggcact

SEQ ID NO: 2038506 - DNA, 25 bp, Homo sapien
tcgcaggcactgaagtactgttact

SEQ ID NO: 2038507 - DNA, 25 bp, Homo sapien
gctgaaggacgaatgtgcacagccc

SEQ ID NO: 2038508 - DNA, 25 bp, Homo sapien
tcaaaacaccccaggtgagactgct

SEQ ID NO: 2038509 - DNA, 25 bp, Homo sapien
cagcccatgtcacaaggagtctgtc

SEQ ID NO: 2038510 - DNA, 25 bp, Homo sapien
catgtcacaaggagtctgtccggct

SEQ ID NO: 2038511 - DNA, 25 bp, Homo sapien
gatgacctggtagggctctgagtga

SEQ ID NO: 2038512 - DNA, 25 bp, Homo sapien
ccttgaagggacctgcatcgtacct

SEQ ID NO: 2038513 - DNA, 25 bp, Homo sapien
tagggctctgagtgactgacttaaa

SEQ ID NO: 2038514 - DNA, 25 bp, Homo sapien
tcccatgggctcctatggatttgcc

SEQ ID NO: 2038515 - DNA, 25 bp, Homo sapien
tttctgctgcgtgattaaacactgc

SEQ ID NO: 2038516 - DNA, 25 bp, Homo sapien
gaagtgtacttcatcatcgggagtg

SEQ ID NO: 2038517 - DNA, 25 bp, Homo sapien
ggcaaagacggacgtgatgacacct

SEQ ID NO: 2038518 - DNA, 25 bp, Homo sapien
catgtatgccgaagcgtgtcttgac

SEQ ID NO: 2038519 - DNA, 25 bp, Homo sapien
agcttgaaccaactgccaccctcta

SEQ ID NO: 2038520 - DNA, 25 bp, Homo sapien
tatatagagacggttgtcgcctggt

SEQ ID NO: 2038521 - DNA, 25 bp, Homo sapien
tttaaatagatccaactgagaaagg

SEQ ID NO: 2038522 - DNA, 25 bp, Homo sapien
gctgcaggctttaaatagatccaac

SEQ ID NO: 2038523 - DNA, 25 bp, Homo sapien
gcaattttccttgccagcgcgtata

SEQ ID NO: 2038524 - DNA, 25 bp, Homo sapien
tgcatacttagtgctctgagaacct

SEQ ID NO: 2038525 - DNA, 25 bp, Homo sapien
gaggatggctgctattcaagtagtc

SEQ ID NO: 2038526 - DNA, 25 bp, Homo sapien
agcgcgtatactgaagccatcccca

SEQ ID NO: 2038527 - DNA, 25 bp, Homo sapien
agaccatcttccctgatcccagaca

SEQ ID NO: 2038528 - DNA, 25 bp, Homo sapien
gacagcccctgtgacgggcctttgt

SEQ ID NO: 2038529 - DNA, 25 bp, Homo sapien
cgttgccagcgccaagctgggccag

SEQ ID NO: 2038530 - DNA, 25 bp, Homo sapien
tgaaccacagaagcgaacagccgtt

SEQ ID NO: 2038531 - DNA, 25 bp, Homo sapien
gggcgctgcggtcctcagccacaca

SEQ ID NO: 2038532 - DNA, 25 bp, Homo sapien
gtgacattggcatgagccgccctca

SEQ ID NO: 2038533 - DNA, 25 bp, Homo sapien
agggttgtgacattggcatgagccg

SEQ ID NO: 2038534 - DNA, 25 bp, Homo sapien
ttgtgacattggcatgagccgccct

SEQ ID NO: 2038535 - DNA, 25 bp, Homo sapien
ggttgtgacattggcatgagccgcc

SEQ ID NO: 2038536 - DNA, 25 bp, Homo sapien
gaccgtcctggcgcttgtcttgggc

SEQ ID NO: 2038537 - DNA, 25 bp, Homo sapien
agctgtactgaaatgcccattcttt

SEQ ID NO: 2038538 - DNA, 25 bp, Homo sapien
tggaccgtcctggcgcttgtcttgg

SEQ ID NO: 2038539 - DNA, 25 bp, Homo sapien
agctggaccgtcctggcgcttgtct

SEQ ID NO: 2038540 - DNA, 25 bp, Homo sapien
gatgggtgtgctcaatggtggcaga

SEQ ID NO: 2038541 - DNA, 25 bp, Homo sapien
tggctcatgccgtgagcataacctt

SEQ ID NO: 2038542 - DNA, 25 bp, Homo sapien
aaaagggttctattgtggctcatgc

SEQ ID NO: 2038543 - DNA, 25 bp, Homo sapien
gtggcagagctctgtacctgcacct

SEQ ID NO: 2038544 - DNA, 25 bp, Homo sapien
gcattaaacacaagccgagctgctg

SEQ ID NO: 2038545 - DNA, 25 bp, Homo sapien
tgaagactgtgacgatgatgtccca

SEQ ID NO: 2038546 - DNA, 25 bp, Homo sapien
ttcgttcagtccaacaagcctgggc

SEQ ID NO: 2038547 - DNA, 25 bp, Homo sapien
gatcaaacgtggctctgaagactgt

SEQ ID NO: 2038548 - DNA, 25 bp, Homo sapien
tatccttgacacatgggttctcccc

SEQ ID NO: 2038549 - DNA, 25 bp, Homo sapien
cacagcgtgtgtgaaagagcctaga

SEQ ID NO: 2038550 - DNA, 25 bp, Homo sapien
ccccaggagttacgcttttgcagaa

SEQ ID NO: 2038551 - DNA, 25 bp, Homo sapien
tcatcgtgggttgctctggtttgcc

SEQ ID NO: 2038552 - DNA, 25 bp, Homo sapien
gctcgggtctccgtgaccttgtcct

SEQ ID NO: 2038553 - DNA, 25 bp, Homo sapien
tggctcgggtctccgtgaccttgtc

SEQ ID NO: 2038554 - DNA, 25 bp, Homo sapien
tcgggtctccgtgaccttgtcctgc

SEQ ID NO: 2038555 - DNA, 25 bp, Homo sapien
ctggctcgggtctccgtgaccttgt

SEQ ID NO: 2038556 - DNA, 25 bp, Homo sapien
tccacacaggcagttatcagggcca

SEQ ID NO: 2038557 - DNA, 25 bp, Homo sapien
gggcatccatggcacccgaggcttc

SEQ ID NO: 2038558 - DNA, 25 bp, Homo sapien
ctggggcatccatggcacccgaggc

SEQ ID NO: 2038559 - DNA, 25 bp, Homo sapien
cacaggcagttatcagggccagagg

SEQ ID NO: 2038560 - DNA, 25 bp, Homo sapien
tagcgatggatacagaagccttggc

SEQ ID NO: 2038561 - DNA, 25 bp, Homo sapien
ccagacattccgtgggtgacgcgct

SEQ ID NO: 2038562 - DNA, 25 bp, Homo sapien
tcaccagagtgaggcttgtgggctt

SEQ ID NO: 2038563 - DNA, 25 bp, Homo sapien
tgtgggcttcatgcatagcgatgga

SEQ ID NO: 2038564 - DNA, 25 bp, Homo sapien
tgtctctctgttcatgggctctgct

SEQ ID NO: 2038565 - DNA, 25 bp, Homo sapien
cagatttgttgggtgggaccacaga

SEQ ID NO: 2038566 - DNA, 25 bp, Homo sapien
gaccacagatagtcatggtaagtgc

SEQ ID NO: 2038567 - DNA, 25 bp, Homo sapien
tcatggtaagtgcagtcatccttcc

SEQ ID NO: 2038568 - DNA, 25 bp, Homo sapien
aggagatggggatggtctcccactt

SEQ ID NO: 2038569 - DNA, 25 bp, Homo sapien
ggagatggggatggtctcccacttc

SEQ ID NO: 2038570 - DNA, 25 bp, Homo sapien
catcattgtcatcggaaccaccttc

SEQ ID NO: 2038571 - DNA, 25 bp, Homo sapien
tcattgtcatcggaaccaccttctt

SEQ ID NO: 2038572 - DNA, 25 bp, Homo sapien
atcatcattgtcatcggaaccacct

SEQ ID NO: 2038573 - DNA, 25 bp, Homo sapien
gggatctctttcttcatggatgacc

SEQ ID NO: 2038574 - DNA, 25 bp, Homo sapien
ttctgagccaaagctctccagtctc

SEQ ID NO: 2038575 - DNA, 25 bp, Homo sapien
gatctctttcttcatggatgaccag

SEQ ID NO: 2038576 - DNA, 25 bp, Homo sapien
ccagtctccacttagccaggggatc

SEQ ID NO: 2038577 - DNA, 25 bp, Homo sapien
tggctggtgattggcatggatggga

SEQ ID NO: 2038578 - DNA, 25 bp, Homo sapien
ggctggtgattggcatggatgggaa

SEQ ID NO: 2038579 - DNA, 25 bp, Homo sapien
gctggtgattggcatggatgggaaa

SEQ ID NO: 2038580 - DNA, 25 bp, Homo sapien
cttggctggtgattggcatggatgg

SEQ ID NO: 2038581 - DNA, 25 bp, Homo sapien
tctagttcactgcatgtcagccata

SEQ ID NO: 2038582 - DNA, 25 bp, Homo sapien
tccactgacacttctcctcaggatg

SEQ ID NO: 2038583 - DNA, 25 bp, Homo sapien
taaatgagtctgcattattaacgtg

SEQ ID NO: 2038584 - DNA, 25 bp, Homo sapien
tgcttttctcatggtctgtgctcat

SEQ ID NO: 2038585 - DNA, 25 bp, Homo sapien
cttggcttgtgaccccaccttggct

SEQ ID NO: 2038586 - DNA, 25 bp, Homo sapien
tcttggcttgtgaccttttcgtcat

SEQ ID NO: 2038587 - DNA, 25 bp, Homo sapien
ttcttggcttgtgaccttttcgtca

SEQ ID NO: 2038588 - DNA, 25 bp, Homo sapien
tggcttgtgaccccaccttggcttt

SEQ ID NO: 2038589 - DNA, 25 bp, Homo sapien
cttccttgggtcagagggttctcaa

SEQ ID NO: 2038590 - DNA, 25 bp, Homo sapien
cttgaaacaccaccgcttccttggg

SEQ ID NO: 2038591 - DNA, 25 bp, Homo sapien
aaatcagattgcctaggaagctggc

SEQ ID NO: 2038592 - DNA, 25 bp, Homo sapien
gctgttctagcaaccacactttgag

SEQ ID NO: 2038593 - DNA, 25 bp, Homo sapien
acatgtatgctctaagtggtctcac

SEQ ID NO: 2038594 - DNA, 25 bp, Homo sapien
gacatgtatgctctaagtggtctca

SEQ ID NO: 2038595 - DNA, 25 bp, Homo sapien
tgaaagctggtgacatgtatgctct

SEQ ID NO: 2038596 - DNA, 25 bp, Homo sapien
agctgaaagctggtgacatgtatgc

SEQ ID NO: 2038597 - DNA, 25 bp, Homo sapien
tgtggcttctctagcacctgcttgg

SEQ ID NO: 2038598 - DNA, 25 bp, Homo sapien
cttctctagcacctgcttgggaggg

SEQ ID NO: 2038599 - DNA, 25 bp, Homo sapien
tggcttctctagcacctgcttggga

SEQ ID NO: 2038600 - DNA, 25 bp, Homo sapien
tcaataatttcatcttgaacctctc

SEQ ID NO: 2038601 - DNA, 25 bp, Homo sapien
cgggtgtttttgtacgcagcttcca

SEQ ID NO: 2038602 - DNA, 25 bp, Homo sapien
ccaagcgaagggacagcaagttcct

SEQ ID NO: 2038603 - DNA, 25 bp, Homo sapien
ctcaccaagcgaagggacagcaagt

SEQ ID NO: 2038604 - DNA, 25 bp, Homo sapien
ccctctgctactcgccgggtgtttt

SEQ ID NO: 2038605 - DNA, 25 bp, Homo sapien
tcttacacaggagtcagccctggat

SEQ ID NO: 2038606 - DNA, 25 bp, Homo sapien
gctcccatcaccgtggctttttggg

SEQ ID NO: 2038607 - DNA, 25 bp, Homo sapien
ttgaccagggtttccgctcccatca

SEQ ID NO: 2038608 - DNA, 25 bp, Homo sapien
agccctggatgagacctgcagccct

SEQ ID NO: 2038609 - DNA, 25 bp, Homo sapien
ggtctcaactggtagccgatcctta

SEQ ID NO: 2038610 - DNA, 25 bp, Homo sapien
tagcttctcctatgcaggtctcaac

SEQ ID NO: 2038611 - DNA, 25 bp, Homo sapien
tatgcaggtctcaactggtagccga

SEQ ID NO: 2038612 - DNA, 25 bp, Homo sapien
ctggtagccgatccttaaagcccgt

SEQ ID NO: 2038613 - DNA, 25 bp, Homo sapien
cctcttcattcacccagcagggtga

SEQ ID NO: 2038614 - DNA, 25 bp, Homo sapien
gcggcttgaagtggctgcagcttct

SEQ ID NO: 2038615 - DNA, 25 bp, Homo sapien
ggcccaggtggcaaggagcctcggg

SEQ ID NO: 2038616 - DNA, 25 bp, Homo sapien
tgcctctttctgagggtgactccct

SEQ ID NO: 2038617 - DNA, 25 bp, Homo sapien
atccggatttccctcgcggctgtat

SEQ ID NO: 2038618 - DNA, 25 bp, Homo sapien
ccggatttccctcgcggctgtatat

SEQ ID NO: 2038619 - DNA, 25 bp, Homo sapien
tttccctcgcggctgtatattaata

SEQ ID NO: 2038620 - DNA, 25 bp, Homo sapien
tcgcggctgtatattaataaatggt

SEQ ID NO: 2038621 - DNA, 25 bp, Homo sapien
tgataattggtagccacagtctgcg

SEQ ID NO: 2038622 - DNA, 25 bp, Homo sapien
aacagtagtgccctgggtgtacagc

SEQ ID NO: 2038623 - DNA, 25 bp, Homo sapien
agccacagcatttgagtctagcacc

SEQ ID NO: 2038624 - DNA, 25 bp, Homo sapien
caggatcggagaccccggacttatt

SEQ ID NO: 2038625 - DNA, 25 bp, Homo sapien
gggctgcgtcacagttggactccca

SEQ ID NO: 2038626 - DNA, 25 bp, Homo sapien
gctgaagggatgctttgaacgtggg

SEQ ID NO: 2038627 - DNA, 25 bp, Homo sapien
cctggagaggagattgccggaagct

SEQ ID NO: 2038628 - DNA, 25 bp, Homo sapien
cccacttgcagaggacctgattatg

SEQ ID NO: 2038629 - DNA, 25 bp, Homo sapien
ctgctgttggtagggtaggaagtga

SEQ ID NO: 2038630 - DNA, 25 bp, Homo sapien
gaaaggccagcacgtaggggagtga

SEQ ID NO: 2038631 - DNA, 25 bp, Homo sapien
tcactgtgcagtagccaagcaggcc

SEQ ID NO: 2038632 - DNA, 25 bp, Homo sapien
gggtgtctgtcccagcggtggggca

SEQ ID NO: 2038633 - DNA, 25 bp, Homo sapien
ccagtgggcggccatttctgtgaca

SEQ ID NO: 2038634 - DNA, 25 bp, Homo sapien
tctgcgtggatcgttttctggattc

SEQ ID NO: 2038635 - DNA, 25 bp, Homo sapien
ttctgtgacattgcaatgttctgcg

SEQ ID NO: 2038636 - DNA, 25 bp, Homo sapien
ttctggattcctgccaaggtgttta

SEQ ID NO: 2038637 - DNA, 25 bp, Homo sapien
gagatgaccaggctgtgaggatggt

SEQ ID NO: 2038638 - DNA, 25 bp, Homo sapien
tgcagccagggaccaagctgctgca

SEQ ID NO: 2038639 - DNA, 25 bp, Homo sapien
tgctgcagtgagatgaccaggctgt

SEQ ID NO: 2038640 - DNA, 25 bp, Homo sapien
tctctgggacccaggtatccctggg

SEQ ID NO: 2038641 - DNA, 25 bp, Homo sapien
tacaattttggtgcaaaggcaagca

SEQ ID NO: 2038642 - DNA, 25 bp, Homo sapien
tcaattagtgagactgacgtccgag

SEQ ID NO: 2038643 - DNA, 25 bp, Homo sapien
gggcatctatagactcccagagtaa

SEQ ID NO: 2038644 - DNA, 25 bp, Homo sapien
gacgtccgagttacaaactgatctg

SEQ ID NO: 2038645 - DNA, 25 bp, Homo sapien
agccagttcgctttttctcctaagg

SEQ ID NO: 2038646 - DNA, 25 bp, Homo sapien
tccatctggtctgaccgcaaacagt

SEQ ID NO: 2038647 - DNA, 25 bp, Homo sapien
gagaacgggatgctttgaagatacc

SEQ ID NO: 2038648 - DNA, 25 bp, Homo sapien
gggaattgcatgcaaactagactga

SEQ ID NO: 2038649 - DNA, 25 bp, Homo sapien
gggcataccgctgacttttgtccct

SEQ ID NO: 2038650 - DNA, 25 bp, Homo sapien
ccggtgtaggagacccaaggcatct

SEQ ID NO: 2038651 - DNA, 25 bp, Homo sapien
agaacatttggtgggaatgaacact

SEQ ID NO: 2038652 - DNA, 25 bp, Homo sapien
tccagcaaagtgtggattgcattgt

SEQ ID NO: 2038653 - DNA, 25 bp, Homo sapien
tgctcacactgaccaagaatgccgc

SEQ ID NO: 2038654 - DNA, 25 bp, Homo sapien
tggagccaagccttcatgccacgaa

SEQ ID NO: 2038655 - DNA, 25 bp, Homo sapien
ttaagtgattaaagccagtgcttgg

SEQ ID NO: 2038656 - DNA, 25 bp, Homo sapien
ttcatgccacgaacatgctccacag

SEQ ID NO: 2038657 - DNA, 25 bp, Homo sapien
ttccaccaccgccagctgccagcac

SEQ ID NO: 2038658 - DNA, 25 bp, Homo sapien
ccaccaccgccagctgccagcaccg

SEQ ID NO: 2038659 - DNA, 25 bp, Homo sapien
tccaccaccgccagctgccagcacc

SEQ ID NO: 2038660 - DNA, 25 bp, Homo sapien
tagcatcacgaaggtgtcaggcaac

SEQ ID NO: 2038661 - DNA, 25 bp, Homo sapien
cattttagtaatgctcagctggacc

SEQ ID NO: 2038662 - DNA, 25 bp, Homo sapien
ggaataagtaaatcagcctgcagca

SEQ ID NO: 2038663 - DNA, 25 bp, Homo sapien
gcagaagactttgttcagctccaga

SEQ ID NO: 2038664 - DNA, 25 bp, Homo sapien
gagcagttcgtggaattttgcccat

SEQ ID NO: 2038665 - DNA, 25 bp, Homo sapien
gagtgttgtccataagagcagttcg

SEQ ID NO: 2038666 - DNA, 25 bp, Homo sapien
tcactaaaaccacggttgaatcttg

SEQ ID NO: 2038667 - DNA, 25 bp, Homo sapien
tgaatcttgggtgtgggcatccttt

SEQ ID NO: 2038668 - DNA, 25 bp, Homo sapien
tcaaagaaatacttcctgtggctcc

SEQ ID NO: 2038669 - DNA, 25 bp, Homo sapien
ccaatgctgggttctacacaggtca

SEQ ID NO: 2038670 - DNA, 25 bp, Homo sapien
taatcagcggcatacatttgtccct

SEQ ID NO: 2038671 - DNA, 25 bp, Homo sapien
tcaggtcccctcatgcaaggagtcc

SEQ ID NO: 2038672 - DNA, 25 bp, Homo sapien
tcacaacggagacacagggctcctc

SEQ ID NO: 2038673 - DNA, 25 bp, Homo sapien
ggcttctcacaacggagacacaggg

SEQ ID NO: 2038674 - DNA, 25 bp, Homo sapien
actggcttctcacaacggagacaca

SEQ ID NO: 2038675 - DNA, 25 bp, Homo sapien
ttctcacaacggagacacagggctc

SEQ ID NO: 2038676 - DNA, 25 bp, Homo sapien
cactttagaagctgtctcagagcca

SEQ ID NO: 2038677 - DNA, 25 bp, Homo sapien
agctgtcactttagaagctgtctca

SEQ ID NO: 2038678 - DNA, 25 bp, Homo sapien
tgtctcagagccaaggatgtgggaa

SEQ ID NO: 2038679 - DNA, 25 bp, Homo sapien
tagaagctgtctcagagccaaggat

SEQ ID NO: 2038680 - DNA, 25 bp, Homo sapien
gggactgccagaaaggcatgcttga

SEQ ID NO: 2038681 - DNA, 25 bp, Homo sapien
tgaaataatcccttggaaccttcca

SEQ ID NO: 2038682 - DNA, 25 bp, Homo sapien
accttccagagacccacccagagtg

SEQ ID NO: 2038683 - DNA, 25 bp, Homo sapien
ggaataaagcccctattctgctctc

SEQ ID NO: 2038684 - DNA, 25 bp, Homo sapien
aaggaatgtgcacgccgtagggcct

SEQ ID NO: 2038685 - DNA, 25 bp, Homo sapien
caggacagttgtgaagacccaagga

SEQ ID NO: 2038686 - DNA, 25 bp, Homo sapien
cagcgatacttacctggcaggacag

SEQ ID NO: 2038687 - DNA, 25 bp, Homo sapien
ggctcctcgtgaaccatggctgtta

SEQ ID NO: 2038688 - DNA, 25 bp, Homo sapien
agggaaccaccaagcggatattgaa

SEQ ID NO: 2038689 - DNA, 25 bp, Homo sapien
tagaaatgcttatagaaggacctct

SEQ ID NO: 2038690 - DNA, 25 bp, Homo sapien
tagtatggggtaatcccctctggga

SEQ ID NO: 2038691 - DNA, 25 bp, Homo sapien
tattgaagccaaaagagccgcaagg

SEQ ID NO: 2038692 - DNA, 25 bp, Homo sapien
acaaaggcaaatgccacacagcaat

SEQ ID NO: 2038693 - DNA, 25 bp, Homo sapien
cagcaattctaagcccatcaggtgc

SEQ ID NO: 2038694 - DNA, 25 bp, Homo sapien
catcaggtgcatgagacaccaaaca

SEQ ID NO: 2038695 - DNA, 25 bp, Homo sapien
aaacaccgctcacagacactgcgga

SEQ ID NO: 2038696 - DNA, 25 bp, Homo sapien
tgcagctgagcacgtgaggactttt

SEQ ID NO: 2038697 - DNA, 25 bp, Homo sapien
gatgcaacactatggcaacaaagcc

SEQ ID NO: 2038698 - DNA, 25 bp, Homo sapien
ggaatgcaaactgcgacccactgta

SEQ ID NO: 2038699 - DNA, 25 bp, Homo sapien
caaattcattggttctataggcgta

SEQ ID NO: 2038700 - DNA, 25 bp, Homo sapien
cacagacggtaaggctgaaatacac

SEQ ID NO: 2038701 - DNA, 25 bp, Homo sapien
tcaaaatagaggataaggctgacct

SEQ ID NO: 2038702 - DNA, 25 bp, Homo sapien
caaatcttgtacaaagaggagcaca

SEQ ID NO: 2038703 - DNA, 25 bp, Homo sapien
tcttagagaagcaaagcaactgcac

SEQ ID NO: 2038704 - DNA, 25 bp, Homo sapien
ttctggagacagtgtgcctatcctc

SEQ ID NO: 2038705 - DNA, 25 bp, Homo sapien
cagaacgtgtacctgacatgctcag

SEQ ID NO: 2038706 - DNA, 25 bp, Homo sapien
tcctcccctagagactgcaacaggg

SEQ ID NO: 2038707 - DNA, 25 bp, Homo sapien
gcccacacagaagcgtcaagcagaa

SEQ ID NO: 2038708 - DNA, 25 bp, Homo sapien
gacaagttacaagcgccaaatgcag

SEQ ID NO: 2038709 - DNA, 25 bp, Homo sapien
tgagaatgcctctggcggcctgtgc

SEQ ID NO: 2038710 - DNA, 25 bp, Homo sapien
tgtcccagagaaaacgcactgaaac

SEQ ID NO: 2038711 - DNA, 25 bp, Homo sapien
tcctcagggaacatgatgcagtacg

SEQ ID NO: 2038712 - DNA, 25 bp, Homo sapien
ctggctcaggtggttgaattccaag

SEQ ID NO: 2038713 - DNA, 25 bp, Homo sapien
tggctcaggtggttgaattccaagg

SEQ ID NO: 2038714 - DNA, 25 bp, Homo sapien
ggctcaggtggttgaattccaaggc

SEQ ID NO: 2038715 - DNA, 25 bp, Homo sapien
tctggctcaggtggttgaattccaa

SEQ ID NO: 2038716 - DNA, 25 bp, Homo sapien
gcattttacacaggcgaatctcagt

SEQ ID NO: 2038717 - DNA, 25 bp, Homo sapien
tccctgcgggactgtgtggcaaacc

SEQ ID NO: 2038718 - DNA, 25 bp, Homo sapien
gagcactcgcagttcacagaggtta

SEQ ID NO: 2038719 - DNA, 25 bp, Homo sapien
gagtcagctgcctagtatgtgtcaa

SEQ ID NO: 2038720 - DNA, 25 bp, Homo sapien
cagatactccttgacgggtggcggc

SEQ ID NO: 2038721 - DNA, 25 bp, Homo sapien
cacggtataccgagcaggtgttgca

SEQ ID NO: 2038722 - DNA, 25 bp, Homo sapien
gcgcagatacttcacagtgacagat

SEQ ID NO: 2038723 - DNA, 25 bp, Homo sapien
catgtagccatgactgcgcagatac

SEQ ID NO: 2038724 - DNA, 25 bp, Homo sapien
gcaaacagaggcaaatcaaaacctg

SEQ ID NO: 2038725 - DNA, 25 bp, Homo sapien
caaaaagcaaacagaggcaaatcaa

SEQ ID NO: 2038726 - DNA, 25 bp, Homo sapien
agcaaacagaggcaaatcaaaacct

SEQ ID NO: 2038727 - DNA, 25 bp, Homo sapien
cttaagcaaaaagcaaacagaggca

SEQ ID NO: 2038728 - DNA, 25 bp, Homo sapien
caggatgcttaccacactgtcaggt

SEQ ID NO: 2038729 - DNA, 25 bp, Homo sapien
gtcaggtaacccaatgagttctaga

SEQ ID NO: 2038730 - DNA, 25 bp, Homo sapien
taacccaatgagttctagaaaagga

SEQ ID NO: 2038731 - DNA, 25 bp, Homo sapien
catttccactctgggagtttttcag

SEQ ID NO: 2038732 - DNA, 25 bp, Homo sapien
tcatacatgggcaacctgacgaggg

SEQ ID NO: 2038733 - DNA, 25 bp, Homo sapien
gaggactgttctggaaagcaaccca

SEQ ID NO: 2038734 - DNA, 25 bp, Homo sapien
tatgacagaattgacccagtggtcg

SEQ ID NO: 2038735 - DNA, 25 bp, Homo sapien
tagtggtggtctagcaacccgattc

SEQ ID NO: 2038736 - DNA, 25 bp, Homo sapien
ttcaaggctgcataataaaatgttc

SEQ ID NO: 2038737 - DNA, 25 bp, Homo sapien
tcttgaatcgttgataaagactaat

SEQ ID NO: 2038738 - DNA, 25 bp, Homo sapien
aaatgtcttcttgaatcgttgataa

SEQ ID NO: 2038739 - DNA, 25 bp, Homo sapien
caaggctgcataataaaatgttcca

SEQ ID NO: 2038740 - DNA, 25 bp, Homo sapien
tatgtggttccaagcatgtcctgcg

SEQ ID NO: 2038741 - DNA, 25 bp, Homo sapien
tgcgtgccagtcgagatacagtccg

SEQ ID NO: 2038742 - DNA, 25 bp, Homo sapien
cttgcttatggcgaaggactcctgg

SEQ ID NO: 2038743 - DNA, 25 bp, Homo sapien
cactgggcagcagataaatgcaacc

SEQ ID NO: 2038744 - DNA, 25 bp, Homo sapien
gaagagtgttgataggtttcagctt

SEQ ID NO: 2038745 - DNA, 25 bp, Homo sapien
tgaagagtgttgataggtttcagct

SEQ ID NO: 2038746 - DNA, 25 bp, Homo sapien
ttgaagagtgttgataggtttcagc

SEQ ID NO: 2038747 - DNA, 25 bp, Homo sapien
tttgaagagtgttgataggtttcag

SEQ ID NO: 2038748 - DNA, 25 bp, Homo sapien
tttttcttccttacgcccatcagtc

SEQ ID NO: 2038749 - DNA, 25 bp, Homo sapien
ccttcacatgcccgcttgggtcttt

SEQ ID NO: 2038750 - DNA, 25 bp, Homo sapien
tccttacgcccatcagtcaaattct

SEQ ID NO: 2038751 - DNA, 25 bp, Homo sapien
ttcacatgcccgcttgggtctttcc

SEQ ID NO: 2038752 - DNA, 25 bp, Homo sapien
acaatccaacaattggccaggcatg

SEQ ID NO: 2038753 - DNA, 25 bp, Homo sapien
gaggtggatgttgcagcctgggaga

SEQ ID NO: 2038754 - DNA, 25 bp, Homo sapien
aggtggatgttgcagcctgggagac

SEQ ID NO: 2038755 - DNA, 25 bp, Homo sapien
catacaatccaacaattggccaggc

SEQ ID NO: 2038756 - DNA, 25 bp, Homo sapien
ccaccttcccactagctgagactac

SEQ ID NO: 2038757 - DNA, 25 bp, Homo sapien
ttagtgcagacgcctgatcagcact

SEQ ID NO: 2038758 - DNA, 25 bp, Homo sapien
tagtgcagacgcctgatcagcactg

SEQ ID NO: 2038759 - DNA, 25 bp, Homo sapien
tgcagacgcctgatcagcactgcac

SEQ ID NO: 2038760 - DNA, 25 bp, Homo sapien
catcatcgtggagttttcataaaca

SEQ ID NO: 2038761 - DNA, 25 bp, Homo sapien
aatctctatatatcccatcatcgtg

SEQ ID NO: 2038762 - DNA, 25 bp, Homo sapien
tcataaacacatagttaagaggctt

SEQ ID NO: 2038763 - DNA, 25 bp, Homo sapien
cagaaaaccagagattactcaggca

SEQ ID NO: 2038764 - DNA, 25 bp, Homo sapien
aggctggaccacagctcctcggatg

SEQ ID NO: 2038765 - DNA, 25 bp, Homo sapien
gcacgtcgggactcgtagttccggc

SEQ ID NO: 2038766 - DNA, 25 bp, Homo sapien
agagcagcccgacaaagcgtgggtc

SEQ ID NO: 2038767 - DNA, 25 bp, Homo sapien
tccagtgcccgctcagtgaagcttc

SEQ ID NO: 2038768 - DNA, 25 bp, Homo sapien
aaacagcgttctatgttgtcttgac

SEQ ID NO: 2038769 - DNA, 25 bp, Homo sapien
ggataaacatttggccagcataccc

SEQ ID NO: 2038770 - DNA, 25 bp, Homo sapien
cagctgtgaatatcctaagattatg

SEQ ID NO: 2038771 - DNA, 25 bp, Homo sapien
tgtttgctgctaaatggttcttggt

SEQ ID NO: 2038772 - DNA, 25 bp, Homo sapien
gctcttggggctaatacatgtagaa

SEQ ID NO: 2038773 - DNA, 25 bp, Homo sapien
ccttatttcagggagagagctcttg

SEQ ID NO: 2038774 - DNA, 25 bp, Homo sapien
gattgtcgtagagcttttggcttac

SEQ ID NO: 2038775 - DNA, 25 bp, Homo sapien
tctttgagtcaaagcaggaaacctt

SEQ ID NO: 2038776 - DNA, 25 bp, Homo sapien
ttttggaaataagtaatactgcatc

SEQ ID NO: 2038777 - DNA, 25 bp, Homo sapien
tgcatctgactctggtggctgtatt

SEQ ID NO: 2038778 - DNA, 25 bp, Homo sapien
ggaaataagtaatactgcatctgac

SEQ ID NO: 2038779 - DNA, 25 bp, Homo sapien
catctgactctggtggctgtattag

SEQ ID NO: 2038780 - DNA, 25 bp, Homo sapien
tagccagtggtaatacaaagcaggg

SEQ ID NO: 2038781 - DNA, 25 bp, Homo sapien
cttcagtgaacagaaaggagcagag

SEQ ID NO: 2038782 - DNA, 25 bp, Homo sapien
gaaacctcttccacgccatgggtaa

SEQ ID NO: 2038783 - DNA, 25 bp, Homo sapien
gaggcttactggagccacacctgca

SEQ ID NO: 2038784 - DNA, 25 bp, Homo sapien
gttcggtattctattcaggacttac

SEQ ID NO: 2038785 - DNA, 25 bp, Homo sapien
cttgacacaccttgtcgtctaaatg

SEQ ID NO: 2038786 - DNA, 25 bp, Homo sapien
caccttgtcgtctaaatgttcggta

SEQ ID NO: 2038787 - DNA, 25 bp, Homo sapien
tgtcgtctaaatgttcggtattcta

SEQ ID NO: 2038788 - DNA, 25 bp, Homo sapien
aggcatggctttccaccgtcgggcc

SEQ ID NO: 2038789 - DNA, 25 bp, Homo sapien
ccagacctgccatgcagtttatcct

SEQ ID NO: 2038790 - DNA, 25 bp, Homo sapien
ggtaactattatgagggaggcatgg

SEQ ID NO: 2038791 - DNA, 25 bp, Homo sapien
gctttccaccgtcgggccaggaaga

SEQ ID NO: 2038792 - DNA, 25 bp, Homo sapien
gatgcatacaggactggatcccagg

SEQ ID NO: 2038793 - DNA, 25 bp, Homo sapien
tctgcctgcagggtgaaaatgccag

SEQ ID NO: 2038794 - DNA, 25 bp, Homo sapien
caaaatagaggccaaatccagggac

SEQ ID NO: 2038795 - DNA, 25 bp, Homo sapien
caagtgtgtgatgttagaacctccc

SEQ ID NO: 2038796 - DNA, 25 bp, Homo sapien
cagacttgcccaaaggagagccagg

SEQ ID NO: 2038797 - DNA, 25 bp, Homo sapien
aactgagtcatagaggatacagact

SEQ ID NO: 2038798 - DNA, 25 bp, Homo sapien
atacagacttgcccaaaggagagcc

SEQ ID NO: 2038799 - DNA, 25 bp, Homo sapien
actgagtcatagaggatacagactt

SEQ ID NO: 2038800 - DNA, 25 bp, Homo sapien
caaatctagtttagcctgcatggca

SEQ ID NO: 2038801 - DNA, 25 bp, Homo sapien
tgagtcgagtatccagacagaggca

SEQ ID NO: 2038802 - DNA, 25 bp, Homo sapien
tcaccatttgcaagtggcaggagct

SEQ ID NO: 2038803 - DNA, 25 bp, Homo sapien
gaatgccagtacgagagtgtagcca

SEQ ID NO: 2038804 - DNA, 25 bp, Homo sapien
aaggttagatgtcaggaggtaataa

SEQ ID NO: 2038805 - DNA, 25 bp, Homo sapien
ggttagatgtcaggaggtaataagc

SEQ ID NO: 2038806 - DNA, 25 bp, Homo sapien
ataaaggttagatgtcaggaggtaa

SEQ ID NO: 2038807 - DNA, 25 bp, Homo sapien
taaaggttagatgtcaggaggtaat

SEQ ID NO: 2038808 - DNA, 25 bp, Homo sapien
gctcccgtttctgcttcttctgagg

SEQ ID NO: 2038809 - DNA, 25 bp, Homo sapien
tctgcttcttctgaggtttatccat

SEQ ID NO: 2038810 - DNA, 25 bp, Homo sapien
ctgctcctcttgctcccgtttctgc

SEQ ID NO: 2038811 - DNA, 25 bp, Homo sapien
gctcctcttgctcccgtttctgctt

SEQ ID NO: 2038812 - DNA, 25 bp, Homo sapien
taaggtcaattcatggcccaaaagg

SEQ ID NO: 2038813 - DNA, 25 bp, Homo sapien
tcatcatcctgggaaatcatctcct

SEQ ID NO: 2038814 - DNA, 25 bp, Homo sapien
gaggcagtcaggaatggcagctttt

SEQ ID NO: 2038815 - DNA, 25 bp, Homo sapien
gttacacgtaacagaaaacctgcag

SEQ ID NO: 2038816 - DNA, 25 bp, Homo sapien
catccagatagtgtttcggttcctt

SEQ ID NO: 2038817 - DNA, 25 bp, Homo sapien
tcaggaggcatccagatagtgtttc

SEQ ID NO: 2038818 - DNA, 25 bp, Homo sapien
cagatagtgtttcggttccttgggc

SEQ ID NO: 2038819 - DNA, 25 bp, Homo sapien
tccttgggcaagagggatgctggcc

SEQ ID NO: 2038820 - DNA, 25 bp, Homo sapien
tcagacaggcagttgcgcaagagaa

SEQ ID NO: 2038821 - DNA, 25 bp, Homo sapien
caggcagggcgtctccggagatggg

SEQ ID NO: 2038822 - DNA, 25 bp, Homo sapien
gcagtgcccgcagtcacaggataag

SEQ ID NO: 2038823 - DNA, 25 bp, Homo sapien
aattctgtgtagatatcagacaggc

SEQ ID NO: 2038824 - DNA, 25 bp, Homo sapien
gggccgctaggccaggaggccgtgt

SEQ ID NO: 2038825 - DNA, 25 bp, Homo sapien
gctaggccaggaggccgtgtcatcc

SEQ ID NO: 2038826 - DNA, 25 bp, Homo sapien
aggaggccgtgtcatcccattcaca

SEQ ID NO: 2038827 - DNA, 25 bp, Homo sapien
ggccaggaggccgtgtcatcccatt

SEQ ID NO: 2038828 - DNA, 25 bp, Homo sapien
gctgttctctgcctcatacagcaaa

SEQ ID NO: 2038829 - DNA, 25 bp, Homo sapien
tctctgcctcatacagcaaagtgtg

SEQ ID NO: 2038830 - DNA, 25 bp, Homo sapien
tctgcctcatacagcaaagtgtggg

SEQ ID NO: 2038831 - DNA, 25 bp, Homo sapien
gttctctgcctcatacagcaaagtg

SEQ ID NO: 2038832 - DNA, 25 bp, Homo sapien
caggaaaaggagggcggggcttgag

SEQ ID NO: 2038833 - DNA, 25 bp, Homo sapien
agttggctttggcattttccaggaa

SEQ ID NO: 2038834 - DNA, 25 bp, Homo sapien
aaaggagggcggggcttgagtctgg

SEQ ID NO: 2038835 - DNA, 25 bp, Homo sapien
tggcattttccaggaaaaggagggc

SEQ ID NO: 2038836 - DNA, 25 bp, Homo sapien
gccaagagctccataccaagtgaaa

SEQ ID NO: 2038837 - DNA, 25 bp, Homo sapien
gagtaagatgcaagatggaaagctg

SEQ ID NO: 2038838 - DNA, 25 bp, Homo sapien
aagaatccattgacacctaacatgc

SEQ ID NO: 2038839 - DNA, 25 bp, Homo sapien
gaaaatacaccacaagacaattgag

SEQ ID NO: 2038840 - DNA, 25 bp, Homo sapien
gctcaacacatgtgtggctgcaggg

SEQ ID NO: 2038841 - DNA, 25 bp, Homo sapien
atgctcttctcaccatagctcaaca

SEQ ID NO: 2038842 - DNA, 25 bp, Homo sapien
tcaccatagctcaacacatgtgtgg

SEQ ID NO: 2038843 - DNA, 25 bp, Homo sapien
tcttctcaccatagctcaacacatg

SEQ ID NO: 2038844 - DNA, 25 bp, Homo sapien
cgtgcagaacgtccagatgaccgta

SEQ ID NO: 2038845 - DNA, 25 bp, Homo sapien
tcaacatgccgttcacctggaagag

SEQ ID NO: 2038846 - DNA, 25 bp, Homo sapien
taggctgcccagcatatcagatatg

SEQ ID NO: 2038847 - DNA, 25 bp, Homo sapien
cacagccagcaggacgatcagattc

SEQ ID NO: 2038848 - DNA, 25 bp, Homo sapien
tcatacgagttgataatgtgcttca

SEQ ID NO: 2038849 - DNA, 25 bp, Homo sapien
ttcatacgagttgataatgtgcttc

SEQ ID NO: 2038850 - DNA, 25 bp, Homo sapien
tttcatacgagttgataatgtgctt

SEQ ID NO: 2038851 - DNA, 25 bp, Homo sapien
catacgagttgataatgtgcttcat

SEQ ID NO: 2038852 - DNA, 25 bp, Homo sapien
ttctcctgcttgtggttaaggcggg

SEQ ID NO: 2038853 - DNA, 25 bp, Homo sapien
cctgcttgtggttaaggcggggatg

SEQ ID NO: 2038854 - DNA, 25 bp, Homo sapien
tctcctgcttgtggttaaggcgggg

SEQ ID NO: 2038855 - DNA, 25 bp, Homo sapien
ctcctgcttgtggttaaggcgggga

SEQ ID NO: 2038856 - DNA, 25 bp, Homo sapien
ttttctgtgtctctggggtgaaggc

SEQ ID NO: 2038857 - DNA, 25 bp, Homo sapien
cagcaccacgtggcgaggaagacac

SEQ ID NO: 2038858 - DNA, 25 bp, Homo sapien
tctctggggtgaaggcggactgcgg

SEQ ID NO: 2038859 - DNA, 25 bp, Homo sapien
caccacgtggcgaggaagacacttc

SEQ ID NO: 2038860 - DNA, 25 bp, Homo sapien
atttggacagatacacagtgtgccc

SEQ ID NO: 2038861 - DNA, 25 bp, Homo sapien
caagcattgctactgcacgtttgtg

SEQ ID NO: 2038862 - DNA, 25 bp, Homo sapien
gctgccaatcctataaatccatggg

SEQ ID NO: 2038863 - DNA, 25 bp, Homo sapien
caaaaggccaccaatcaagcattgc

SEQ ID NO: 2038864 - DNA, 25 bp, Homo sapien
gctacagaaagcctttgagcagcag

SEQ ID NO: 2038865 - DNA, 25 bp, Homo sapien
taagttagcaacactgtgccgcttt

SEQ ID NO: 2038866 - DNA, 25 bp, Homo sapien
gacctgtagacaccacttgtggttt

SEQ ID NO: 2038867 - DNA, 25 bp, Homo sapien
tgctgggtgttttctcggattgctc

SEQ ID NO: 2038868 - DNA, 25 bp, Homo sapien
ggaatggatgactccctctcgctga

SEQ ID NO: 2038869 - DNA, 25 bp, Homo sapien
tggcaagtcagaatgaaggtggtct

SEQ ID NO: 2038870 - DNA, 25 bp, Homo sapien
cctctggtggcaagtcagaatgaag

SEQ ID NO: 2038871 - DNA, 25 bp, Homo sapien
tcgctgatggttcagagcccctgtg

SEQ ID NO: 2038872 - DNA, 25 bp, Homo sapien
ccaccggcacccatccctgttcagc

SEQ ID NO: 2038873 - DNA, 25 bp, Homo sapien
ccccaccggcacccatccctgttca

SEQ ID NO: 2038874 - DNA, 25 bp, Homo sapien
cccaccggcacccatccctgttcag

SEQ ID NO: 2038875 - DNA, 25 bp, Homo sapien
caccggcacccatccctgttcagca

SEQ ID NO: 2038876 - DNA, 25 bp, Homo sapien
gctctgtacaatctgtttccatgct

SEQ ID NO: 2038877 - DNA, 25 bp, Homo sapien
agctctgtacaatctgtttccatgc

SEQ ID NO: 2038878 - DNA, 25 bp, Homo sapien
tctgtacaatctgtttccatgctgt

SEQ ID NO: 2038879 - DNA, 25 bp, Homo sapien
ctctgtacaatctgtttccatgctg

SEQ ID NO: 2038880 - DNA, 25 bp, Homo sapien
gaagcaggacaagcctagctctgaa

SEQ ID NO: 2038881 - DNA, 25 bp, Homo sapien
tggaagcaggacaagcctagctctg

SEQ ID NO: 2038882 - DNA, 25 bp, Homo sapien
tttggaagcaggacaagcctagctc

SEQ ID NO: 2038883 - DNA, 25 bp, Homo sapien
gcaggacaagcctagctctgaaaca

SEQ ID NO: 2038884 - DNA, 25 bp, Homo sapien
ctcacatctcccgtcctctgagctt

SEQ ID NO: 2038885 - DNA, 25 bp, Homo sapien
accttccacccgctcacatctcccg

SEQ ID NO: 2038886 - DNA, 25 bp, Homo sapien
tctcccgtcctctgagcttcactgc

SEQ ID NO: 2038887 - DNA, 25 bp, Homo sapien
ccgctcacatctcccgtcctctgag

SEQ ID NO: 2038888 - DNA, 25 bp, Homo sapien
ttagggacgttaaccatgcttgcgt

SEQ ID NO: 2038889 - DNA, 25 bp, Homo sapien
ttttagggacgttaaccatgcttgc

SEQ ID NO: 2038890 - DNA, 25 bp, Homo sapien
ggacgttaaccatgcttgcgtgagc

SEQ ID NO: 2038891 - DNA, 25 bp, Homo sapien
tagggacgttaaccatgcttgcgtg

SEQ ID NO: 2038892 - DNA, 25 bp, Homo sapien
ccaacagctgttgaccagggaggct

SEQ ID NO: 2038893 - DNA, 25 bp, Homo sapien
ggagctccccaactgaaacgagaat

SEQ ID NO: 2038894 - DNA, 25 bp, Homo sapien
aaacgtccattgtgagcagcggtgc

SEQ ID NO: 2038895 - DNA, 25 bp, Homo sapien
gaggactaaggagcaggtttcaaaa

SEQ ID NO: 2038896 - DNA, 25 bp, Homo sapien
ctaaggggcatagaaaacgaggttg

SEQ ID NO: 2038897 - DNA, 25 bp, Homo sapien
agaaaacgaggttgtgaggatgctc

SEQ ID NO: 2038898 - DNA, 25 bp, Homo sapien
tagaaaacgaggttgtgaggatgct

SEQ ID NO: 2038899 - DNA, 25 bp, Homo sapien
gcatagaaaacgaggttgtgaggat

SEQ ID NO: 2038900 - DNA, 25 bp, Homo sapien
tgtgatcctaagaagtctttctctg

SEQ ID NO: 2038901 - DNA, 25 bp, Homo sapien
ctttgcattgaattttgcaagtgtg

SEQ ID NO: 2038902 - DNA, 25 bp, Homo sapien
ctgcctgaagattgcacctttgcat

SEQ ID NO: 2038903 - DNA, 25 bp, Homo sapien
tctttctctgatgggttattgtgag

SEQ ID NO: 2038904 - DNA, 25 bp, Homo sapien
tccttatcagtgagacgctgggatc

SEQ ID NO: 2038905 - DNA, 25 bp, Homo sapien
gctccttatcagtgagacgctggga

SEQ ID NO: 2038906 - DNA, 25 bp, Homo sapien
agacgctgggatccgtggcatgcag

SEQ ID NO: 2038907 - DNA, 25 bp, Homo sapien
acgctgggatccgtggcatgcagca

SEQ ID NO: 2038908 - DNA, 25 bp, Homo sapien
tctctgacacgaggcttggaggttg

SEQ ID NO: 2038909 - DNA, 25 bp, Homo sapien
tttcagtctctctgtatgatctctg

SEQ ID NO: 2038910 - DNA, 25 bp, Homo sapien
tggtcaggcagtcagcccatgcagt

SEQ ID NO: 2038911 - DNA, 25 bp, Homo sapien
cccatgcagtagctactgggtgatg

SEQ ID NO: 2038912 - DNA, 25 bp, Homo sapien
attgttcaaactattgccagggcag

SEQ ID NO: 2038913 - DNA, 25 bp, Homo sapien
tatagtgagggtaattgttcaaact

SEQ ID NO: 2038914 - DNA, 25 bp, Homo sapien
ctgagttgtatagtgagggtaattg

SEQ ID NO: 2038915 - DNA, 25 bp, Homo sapien
ttgttcaaactattgccagggcaga

SEQ ID NO: 2038916 - DNA, 25 bp, Homo sapien
caaatcagctgatcatagaggcgaa

SEQ ID NO: 2038917 - DNA, 25 bp, Homo sapien
atcagctgatcatagaggcgaaggg

SEQ ID NO: 2038918 - DNA, 25 bp, Homo sapien
cgaaggggatagctggagctttcca

SEQ ID NO: 2038919 - DNA, 25 bp, Homo sapien
tcacaaatcagctgatcatagaggc

SEQ ID NO: 2038920 - DNA, 25 bp, Homo sapien
catcccatggtttctcctggccaca

SEQ ID NO: 2038921 - DNA, 25 bp, Homo sapien
ccagggcggaggagtatctccaaga

SEQ ID NO: 2038922 - DNA, 25 bp, Homo sapien
gatgggaatttttagtgtgcatccc

SEQ ID NO: 2038923 - DNA, 25 bp, Homo sapien
ctcaggttcggctggagctgagctc

SEQ ID NO: 2038924 - DNA, 25 bp, Homo sapien
gaataaggcttaatttcctcctcca

SEQ ID NO: 2038925 - DNA, 25 bp, Homo sapien
tggaataaggcttaatttcctcctc

SEQ ID NO: 2038926 - DNA, 25 bp, Homo sapien
tctgacagcccatgctaggccatct

SEQ ID NO: 2038927 - DNA, 25 bp, Homo sapien
gtacctggtggcagtttgcaaactc

SEQ ID NO: 2038928 - DNA, 25 bp, Homo sapien
catgctaggccatctgtacctggtg

SEQ ID NO: 2038929 - DNA, 25 bp, Homo sapien
caacaccaaattctgatggctctgg

SEQ ID NO: 2038930 - DNA, 25 bp, Homo sapien
ccagaatgaaccatgggtgagggct

SEQ ID NO: 2038931 - DNA, 25 bp, Homo sapien
gaagcttagagctcatgctggtgct

SEQ ID NO: 2038932 - DNA, 25 bp, Homo sapien
gccacattgccaaagggaagcttag

SEQ ID NO: 2038933 - DNA, 25 bp, Homo sapien
gccagtgtgaatgttcagttgccca

SEQ ID NO: 2038934 - DNA, 25 bp, Homo sapien
cacagagattactgccaggggcttg

SEQ ID NO: 2038935 - DNA, 25 bp, Homo sapien
tgtggtgtgtgttgctttctgtccc

SEQ ID NO: 2038936 - DNA, 25 bp, Homo sapien
ctgtgcacagagattactgccaggg

SEQ ID NO: 2038937 - DNA, 25 bp, Homo sapien
ctgtcccctactggcattcagaatt

SEQ ID NO: 2038938 - DNA, 25 bp, Homo sapien
tcacactcgcgggtgtgtttcccat

SEQ ID NO: 2038939 - DNA, 25 bp, Homo sapien
tgcacaccagtgactctcacactcg

SEQ ID NO: 2038940 - DNA, 25 bp, Homo sapien
caccagtgactctcacactcgcggg

SEQ ID NO: 2038941 - DNA, 25 bp, Homo sapien
ctcacactcgcgggtgtgtttccca

SEQ ID NO: 2038942 - DNA, 25 bp, Homo sapien
ccgtgaagtgcttcggctgctcagg

SEQ ID NO: 2038943 - DNA, 25 bp, Homo sapien
gctcaaacgtgtttttgaaatggga

SEQ ID NO: 2038944 - DNA, 25 bp, Homo sapien
gaaatgggagatgagatgtattgtt

SEQ ID NO: 2038945 - DNA, 25 bp, Homo sapien
ttccgtgaagtgcttcggctgctca

SEQ ID NO: 2038946 - DNA, 25 bp, Homo sapien
ggaggggctatcctctcagtatctc

SEQ ID NO: 2038947 - DNA, 25 bp, Homo sapien
caggttcctggtggcgaagacagct

SEQ ID NO: 2038948 - DNA, 25 bp, Homo sapien
agagacagaggaggggctatcctct

SEQ ID NO: 2038949 - DNA, 25 bp, Homo sapien
tggtggcgaagacagctgccaaact

SEQ ID NO: 2038950 - DNA, 25 bp, Homo sapien
tgcaatgacattgcatctgcatctg

SEQ ID NO: 2038951 - DNA, 25 bp, Homo sapien
tggaagctccgatctagacacaggt

SEQ ID NO: 2038952 - DNA, 25 bp, Homo sapien
ccagtctgcatctgcaatgacattg

SEQ ID NO: 2038953 - DNA, 25 bp, Homo sapien
caggttcacaatcagcccagtctgc

SEQ ID NO: 2038954 - DNA, 25 bp, Homo sapien
gcagagtgaaacacatatgccttca

SEQ ID NO: 2038955 - DNA, 25 bp, Homo sapien
acacatatgccttcaatacattcag

SEQ ID NO: 2038956 - DNA, 25 bp, Homo sapien
tatgccttcaatacattcagtgggc

SEQ ID NO: 2038957 - DNA, 25 bp, Homo sapien
gtgaaacacatatgccttcaataca

SEQ ID NO: 2038958 - DNA, 25 bp, Homo sapien
ttgtccaaaatcaggtgattatagg

SEQ ID NO: 2038959 - DNA, 25 bp, Homo sapien
tccaaaatcaggtgattataggtgt

SEQ ID NO: 2038960 - DNA, 25 bp, Homo sapien
aaaatcaggtgattataggtgtggc

SEQ ID NO: 2038961 - DNA, 25 bp, Homo sapien
caaaatcaggtgattataggtgtgg

SEQ ID NO: 2038962 - DNA, 25 bp, Homo sapien
tctagttccatgaagaagctattgg

SEQ ID NO: 2038963 - DNA, 25 bp, Homo sapien
gccaaaccatattaagtaccatact

SEQ ID NO: 2038964 - DNA, 25 bp, Homo sapien
tccatgaagaagctattggtagttt

SEQ ID NO: 2038965 - DNA, 25 bp, Homo sapien
ttaattgctgtaggcttgtcatata

SEQ ID NO: 2038966 - DNA, 25 bp, Homo sapien
tagctgctaacgaaagtccagttgg

SEQ ID NO: 2038967 - DNA, 25 bp, Homo sapien
accatttctatatgaaggagcccaa

SEQ ID NO: 2038968 - DNA, 25 bp, Homo sapien
gatagatctacagaaggtagctgct

SEQ ID NO: 2038969 - DNA, 25 bp, Homo sapien
tatgtgagctccacttgaatgcgtc

SEQ ID NO: 2038970 - DNA, 25 bp, Homo sapien
agcattgagtccaatcaacccatca

SEQ ID NO: 2038971 - DNA, 25 bp, Homo sapien
tgagtccaatcaacccatcaggaca

SEQ ID NO: 2038972 - DNA, 25 bp, Homo sapien
ctgctgcatggaggttgtgagcact

SEQ ID NO: 2038973 - DNA, 25 bp, Homo sapien
acctgctgcatggaggttgtgagca

SEQ ID NO: 2038974 - DNA, 25 bp, Homo sapien
aagacaagcagtcctagatgcccag

SEQ ID NO: 2038975 - DNA, 25 bp, Homo sapien
gcagctgtgctcagatctgaacttg

SEQ ID NO: 2038976 - DNA, 25 bp, Homo sapien
cctagatgcccagattcttgttttg

SEQ ID NO: 2038977 - DNA, 25 bp, Homo sapien
tgtgctcagatctgaacttgttgga

SEQ ID NO: 2038978 - DNA, 25 bp, Homo sapien
catggttctcccaatggcttccaaa

SEQ ID NO: 2038979 - DNA, 25 bp, Homo sapien
taaattagttaagctgacaaactgg

SEQ ID NO: 2038980 - DNA, 25 bp, Homo sapien
taaatacctgactcttcgatggctg

SEQ ID NO: 2038981 - DNA, 25 bp, Homo sapien
gacccgctcctactacacagataaa

SEQ ID NO: 2038982 - DNA, 25 bp, Homo sapien
attcatcacaattaattacagaggg

SEQ ID NO: 2038983 - DNA, 25 bp, Homo sapien
aaacaggcataattcatcacaatta

SEQ ID NO: 2038984 - DNA, 25 bp, Homo sapien
tccaaaaataattggtgatccacaa

SEQ ID NO: 2038985 - DNA, 25 bp, Homo sapien
atgtcatactggttaaatattcggg

SEQ ID NO: 2038986 - DNA, 25 bp, Homo sapien
ttctgtgtacaacaaacatttcctg

SEQ ID NO: 2038987 - DNA, 25 bp, Homo sapien
aaaatataaaccatacagttattca

SEQ ID NO: 2038988 - DNA, 25 bp, Homo sapien
aagaaacctgtatcatgatcttcac

SEQ ID NO: 2038989 - DNA, 25 bp, Homo sapien
ctgagtatttcaaaaggcgaaggaa

SEQ ID NO: 2038990 - DNA, 25 bp, Homo sapien
ctgataccactttgctgtattagtc

SEQ ID NO: 2038991 - DNA, 25 bp, Homo sapien
ccactctactgataccactttgctg

SEQ ID NO: 2038992 - DNA, 25 bp, Homo sapien
taagcaggagcaagtcaggtcttac

SEQ ID NO: 2038993 - DNA, 25 bp, Homo sapien
tttaacaaactttcagttccacatg

SEQ ID NO: 2038994 - DNA, 25 bp, Homo sapien
cagagtccggagctgacaatgtgct

SEQ ID NO: 2038995 - DNA, 25 bp, Homo sapien
tacacactatcgaaggcatgaaggt

SEQ ID NO: 2038996 - DNA, 25 bp, Homo sapien
taagcactgaacctggtaatggcct

SEQ ID NO: 2038997 - DNA, 25 bp, Homo sapien
tactaatcctgaaaatgtccccgac

SEQ ID NO: 2038998 - DNA, 25 bp, Homo sapien
ggttgaggacttctgcacataggag

SEQ ID NO: 2038999 - DNA, 25 bp, Homo sapien
ggacttctgcacataggagcctgaa

SEQ ID NO: 2039000 - DNA, 25 bp, Homo sapien
tctgcacataggagcctgaagtcat

SEQ ID NO: 2039001 - DNA, 25 bp, Homo sapien
gcacataggagcctgaagtcatgta

SEQ ID NO: 2039002 - DNA, 25 bp, Homo sapien
aatgctggcaaagacgtgaagcgaa

SEQ ID NO: 2039003 - DNA, 25 bp, Homo sapien
gcaaagacgtgaagcgaaaggatct

SEQ ID NO: 2039004 - DNA, 25 bp, Homo sapien
agacgtgaagcgaaaggatctctca

SEQ ID NO: 2039005 - DNA, 25 bp, Homo sapien
tggcaaagacgtgaagcgaaaggat

SEQ ID NO: 2039006 - DNA, 25 bp, Homo sapien
gttaagacagttcgctgccccagtg

SEQ ID NO: 2039007 - DNA, 25 bp, Homo sapien
agaggcacgataattagctcactga

SEQ ID NO: 2039008 - DNA, 25 bp, Homo sapien
tgtgcctgccctggttttgatctct

SEQ ID NO: 2039009 - DNA, 25 bp, Homo sapien
agtttccctgactcttgccacagaa

SEQ ID NO: 2039010 - DNA, 25 bp, Homo sapien
tcactcttgagtgtggaaaatattt

SEQ ID NO: 2039011 - DNA, 25 bp, Homo sapien
taaaatcggtctggataagtcactc

SEQ ID NO: 2039012 - DNA, 25 bp, Homo sapien
tcaacacactacttcctggggcaca

SEQ ID NO: 2039013 - DNA, 25 bp, Homo sapien
gggaaagtgctagttctgactcttc

SEQ ID NO: 2039014 - DNA, 25 bp, Homo sapien
taaccagatgactgcttctccagca

SEQ ID NO: 2039015 - DNA, 25 bp, Homo sapien
tgagtgaggtccacagtatcatcct

SEQ ID NO: 2039016 - DNA, 25 bp, Homo sapien
tccttgagggatacttatttcggga

SEQ ID NO: 2039017 - DNA, 25 bp, Homo sapien
cgggaaataccgcagacattctcat

SEQ ID NO: 2039018 - DNA, 25 bp, Homo sapien
taggatccacggttaccgggcagag

SEQ ID NO: 2039019 - DNA, 25 bp, Homo sapien
ttctctgacggtaaaactgaccaat

SEQ ID NO: 2039020 - DNA, 25 bp, Homo sapien
gtttgttgttccagtaggatccacg

SEQ ID NO: 2039021 - DNA, 25 bp, Homo sapien
attcaggctgccagttgatggctgg

SEQ ID NO: 2039022 - DNA, 25 bp, Homo sapien
ccatcttccggtttaaatctgcatt

SEQ ID NO: 2039023 - DNA, 25 bp, Homo sapien
caatcaccatcttccggtttaaatc

SEQ ID NO: 2039024 - DNA, 25 bp, Homo sapien
tgccaatcaccatcttccggtttaa

SEQ ID NO: 2039025 - DNA, 25 bp, Homo sapien
aaatctgcattaggctcctcctcca

SEQ ID NO: 2039026 - DNA, 25 bp, Homo sapien
tgcctatgtgagctagtaaccagaa

SEQ ID NO: 2039027 - DNA, 25 bp, Homo sapien
cacagataataggtggctgagtccc

SEQ ID NO: 2039028 - DNA, 25 bp, Homo sapien
ggccaattacaaaaggttgcacagg

SEQ ID NO: 2039029 - DNA, 25 bp, Homo sapien
cagcagtgctttctacaaggccaag

SEQ ID NO: 2039030 - DNA, 25 bp, Homo sapien
gggtgaactctctctaggtgcacag

SEQ ID NO: 2039031 - DNA, 25 bp, Homo sapien
tgaactctctctaggtgcacaggaa

SEQ ID NO: 2039032 - DNA, 25 bp, Homo sapien
aactctctctaggtgcacaggaagg

SEQ ID NO: 2039033 - DNA, 25 bp, Homo sapien
tgggggtgaactctctctaggtgca

SEQ ID NO: 2039034 - DNA, 25 bp, Homo sapien
gattgtacacctgaacagtgctggg

SEQ ID NO: 2039035 - DNA, 25 bp, Homo sapien
tgtgggtcactcaatagggaaagcc

SEQ ID NO: 2039036 - DNA, 25 bp, Homo sapien
catgtctgggccctggttatagaga

SEQ ID NO: 2039037 - DNA, 25 bp, Homo sapien
cctgtgagtcatcaaggtggagtcc

SEQ ID NO: 2039038 - DNA, 25 bp, Homo sapien
gatgaagtgtccatcagttctttga

SEQ ID NO: 2039039 - DNA, 25 bp, Homo sapien
gggagatgaagtgtccatcagttct

SEQ ID NO: 2039040 - DNA, 25 bp, Homo sapien
ccagggagatgaagtgtccatcagt

SEQ ID NO: 2039041 - DNA, 25 bp, Homo sapien
gaagtgtccatcagttctttgatga

SEQ ID NO: 2039042 - DNA, 25 bp, Homo sapien
ccagcagttaatcttgcacgcaaca

SEQ ID NO: 2039043 - DNA, 25 bp, Homo sapien
gcagttaatcttgcacgcaacagag

SEQ ID NO: 2039044 - DNA, 25 bp, Homo sapien
taatcttgcacgcaacagagccctg

SEQ ID NO: 2039045 - DNA, 25 bp, Homo sapien
gcacgcaacagagccctgcttggct

SEQ ID NO: 2039046 - DNA, 25 bp, Homo sapien
ttcactttaaagaggcacagatgct

SEQ ID NO: 2039047 - DNA, 25 bp, Homo sapien
ggcagagcttttcaacatgaataat

SEQ ID NO: 2039048 - DNA, 25 bp, Homo sapien
tgagaattttatgccctggtagacc

SEQ ID NO: 2039049 - DNA, 25 bp, Homo sapien
gaccagagtctacataaacctcctg

SEQ ID NO: 2039050 - DNA, 25 bp, Homo sapien
ccattatttggagtttatcagaagt

SEQ ID NO: 2039051 - DNA, 25 bp, Homo sapien
gctaggccatacagcaggaaaacgt

SEQ ID NO: 2039052 - DNA, 25 bp, Homo sapien
aattaactactcaacacaccttggg

SEQ ID NO: 2039053 - DNA, 25 bp, Homo sapien
gacatatcgaaacatgagatgcagc

SEQ ID NO: 2039054 - DNA, 25 bp, Homo sapien
tcaaaattacagactgcaaacattc

SEQ ID NO: 2039055 - DNA, 25 bp, Homo sapien
agcaccagtttagggttttagcaca

SEQ ID NO: 2039056 - DNA, 25 bp, Homo sapien
agcaccttagttctttctaaagtga

SEQ ID NO: 2039057 - DNA, 25 bp, Homo sapien
cattacacatatgggatttctatcc

SEQ ID NO: 2039058 - DNA, 25 bp, Homo sapien
gagtaatttacggaagtgctagcac

SEQ ID NO: 2039059 - DNA, 25 bp, Homo sapien
taagctttgagaatgggtcagaagt

SEQ ID NO: 2039060 - DNA, 25 bp, Homo sapien
tgtccctttagatgtgattgactaa

SEQ ID NO: 2039061 - DNA, 25 bp, Homo sapien
gttgagtaagctttgagaatgggtc

SEQ ID NO: 2039062 - DNA, 25 bp, Homo sapien
tatgtccctttagatgtgattgact

SEQ ID NO: 2039063 - DNA, 25 bp, Homo sapien
tgatgtttactaatatttgagtcat

SEQ ID NO: 2039064 - DNA, 25 bp, Homo sapien
actatgatgtttactaatatttgag

SEQ ID NO: 2039065 - DNA, 25 bp, Homo sapien
tactatgatgtttactaatatttga

SEQ ID NO: 2039066 - DNA, 25 bp, Homo sapien
tatgatgtttactaatatttgagtc

SEQ ID NO: 2039067 - DNA, 25 bp, Homo sapien
tgaatgaatcttgtatgccttgctc

SEQ ID NO: 2039068 - DNA, 25 bp, Homo sapien
gttgtcaaatattggctacatagat

SEQ ID NO: 2039069 - DNA, 25 bp, Homo sapien
ttcccagtgttgcttttttgaatga

SEQ ID NO: 2039070 - DNA, 25 bp, Homo sapien
taaatgtttgttatgactagttgtc

SEQ ID NO: 2039071 - DNA, 25 bp, Homo sapien
tccattggataattaatactgtcaa

SEQ ID NO: 2039072 - DNA, 25 bp, Homo sapien
gatgacagacattaaagtagaccca

SEQ ID NO: 2039073 - DNA, 25 bp, Homo sapien
gcaccaggctcagcatacaaatatt

SEQ ID NO: 2039074 - DNA, 25 bp, Homo sapien
gcaatccatgcatacaaggtcaact

SEQ ID NO: 2039075 - DNA, 25 bp, Homo sapien
tctaagctcattaatgacacagggc

SEQ ID NO: 2039076 - DNA, 25 bp, Homo sapien
gtggtgacgaatatcatgaaaactg

SEQ ID NO: 2039077 - DNA, 25 bp, Homo sapien
tacttttaatcagtggtgtccaacc

SEQ ID NO: 2039078 - DNA, 25 bp, Homo sapien
ctctttgaatgagaggactttttgc

SEQ ID NO: 2039079 - DNA, 25 bp, Homo sapien
tattaagcggaaaagatgcaacatc

SEQ ID NO: 2039080 - DNA, 25 bp, Homo sapien
gacagatcatgcagccctttataag

SEQ ID NO: 2039081 - DNA, 25 bp, Homo sapien
gaatcacatttgcaacctctacagg

SEQ ID NO: 2039082 - DNA, 25 bp, Homo sapien
gatactttaacatagaactcctcaa

SEQ ID NO: 2039083 - DNA, 25 bp, Homo sapien
tctatcttcaaattgtaaggctctt

SEQ ID NO: 2039084 - DNA, 25 bp, Homo sapien
catctatcttcaaattgtaaggctc

SEQ ID NO: 2039085 - DNA, 25 bp, Homo sapien
gtctcatctatcttcaaattgtaag

SEQ ID NO: 2039086 - DNA, 25 bp, Homo sapien
ctcatctatcttcaaattgtaaggc

SEQ ID NO: 2039087 - DNA, 25 bp, Homo sapien
ctgttgggcagggtctaggcatttc

SEQ ID NO: 2039088 - DNA, 25 bp, Homo sapien
atataaattctgttgggcagggtct

SEQ ID NO: 2039089 - DNA, 25 bp, Homo sapien
gttgggcagggtctaggcatttcca

SEQ ID NO: 2039090 - DNA, 25 bp, Homo sapien
ataaattctgttgggcagggtctag

SEQ ID NO: 2039091 - DNA, 25 bp, Homo sapien
gagggtggatctgcgcagggttggg

SEQ ID NO: 2039092 - DNA, 25 bp, Homo sapien
gcgcagggttgggacagatctccat

SEQ ID NO: 2039093 - DNA, 25 bp, Homo sapien
gtggatctgcgcagggttgggacag

SEQ ID NO: 2039094 - DNA, 25 bp, Homo sapien
tctgcgcagggttgggacagatctc

SEQ ID NO: 2039095 - DNA, 25 bp, Homo sapien
ctggctgaagtgagacaaaggccgc

SEQ ID NO: 2039096 - DNA, 25 bp, Homo sapien
ctaaccccgcgctctggctgaagtg

SEQ ID NO: 2039097 - DNA, 25 bp, Homo sapien
cctaaccccgcgctctggctgaagt

SEQ ID NO: 2039098 - DNA, 25 bp, Homo sapien
tgtgccctaagacttggtagctctt

SEQ ID NO: 2039099 - DNA, 25 bp, Homo sapien
cctaagacttggtagctctttcgct

SEQ ID NO: 2039100 - DNA, 25 bp, Homo sapien
gccctaagacttggtagctctttcg

SEQ ID NO: 2039101 - DNA, 25 bp, Homo sapien
ctaagacttggtagctctttcgctt

SEQ ID NO: 2039102 - DNA, 25 bp, Homo sapien
tgctggaggcattctacaccatgac

SEQ ID NO: 2039103 - DNA, 25 bp, Homo sapien
ccatgactacccaggtagcctgtgt

SEQ ID NO: 2039104 - DNA, 25 bp, Homo sapien
gatgaatggctcatcccagtcacac

SEQ ID NO: 2039105 - DNA, 25 bp, Homo sapien
atccctgtctggaggaactaagagc

SEQ ID NO: 2039106 - DNA, 25 bp, Homo sapien
ggctgcgttcagattctgctcatca

SEQ ID NO: 2039107 - DNA, 25 bp, Homo sapien
cgtccaggctgcgttcagattctgc

SEQ ID NO: 2039108 - DNA, 25 bp, Homo sapien
ctccgtccaggctgcgttcagattc

SEQ ID NO: 2039109 - DNA, 25 bp, Homo sapien
ccaggctgcgttcagattctgctca

SEQ ID NO: 2039110 - DNA, 25 bp, Homo sapien
aacttcagcctgacactgggcatag

SEQ ID NO: 2039111 - DNA, 25 bp, Homo sapien
atcccaacttcagcctgacactggg

SEQ ID NO: 2039112 - DNA, 25 bp, Homo sapien
gaggattctgctgggcatctaaggg

SEQ ID NO: 2039113 - DNA, 25 bp, Homo sapien
ctgggcatagtgtggggaaacctcc

SEQ ID NO: 2039114 - DNA, 25 bp, Homo sapien
ctgacggcagcgtggccaaacaagg

SEQ ID NO: 2039115 - DNA, 25 bp, Homo sapien
tccagtgactggcagcatcgggaca

SEQ ID NO: 2039116 - DNA, 25 bp, Homo sapien
gtgactggcagcatcgggacatcca

SEQ ID NO: 2039117 - DNA, 25 bp, Homo sapien
gctgcagatgccctgacggcagcgt

SEQ ID NO: 2039118 - DNA, 25 bp, Homo sapien
gtagccctctcacatgcagcctgtt

SEQ ID NO: 2039119 - DNA, 25 bp, Homo sapien
cagcctgttgcctgcacacgtgtac

SEQ ID NO: 2039120 - DNA, 25 bp, Homo sapien
ctcacatgcagcctgttgcctgcac

SEQ ID NO: 2039121 - DNA, 25 bp, Homo sapien
gtgtagccctctcacatgcagcctg

SEQ ID NO: 2039122 - DNA, 25 bp, Homo sapien
gctgcacctgggccctgattcagag

SEQ ID NO: 2039123 - DNA, 25 bp, Homo sapien
ctgtgtccatcagagagctgcacct

SEQ ID NO: 2039124 - DNA, 25 bp, Homo sapien
aggctttctcgaagccttggctctg

SEQ ID NO: 2039125 - DNA, 25 bp, Homo sapien
cagcctggctgtgttctgtgtccat

SEQ ID NO: 2039126 - DNA, 25 bp, Homo sapien
cctccagaggaggggctttgttctt

SEQ ID NO: 2039127 - DNA, 25 bp, Homo sapien
agaggaggggctttgttctttccag

SEQ ID NO: 2039128 - DNA, 25 bp, Homo sapien
tgttctttccagggtctggggggca

SEQ ID NO: 2039129 - DNA, 25 bp, Homo sapien
tccagaggaggggctttgttctttc

SEQ ID NO: 2039130 - DNA, 25 bp, Homo sapien
tgccccaggcgcatcaccgtctgct

SEQ ID NO: 2039131 - DNA, 25 bp, Homo sapien
tccgcactccgggccattctttgag

SEQ ID NO: 2039132 - DNA, 25 bp, Homo sapien
gggctccaaacctcggggagatgca

SEQ ID NO: 2039133 - DNA, 25 bp, Homo sapien
caaacctcggggagatgcagagtca

SEQ ID NO: 2039134 - DNA, 25 bp, Homo sapien
ctgggggctgcacctcctcggcaga

SEQ ID NO: 2039135 - DNA, 25 bp, Homo sapien
cgtctgggcatctgacgggtgttct

SEQ ID NO: 2039136 - DNA, 25 bp, Homo sapien
tgcgagccggcataacaaacagcag

SEQ ID NO: 2039137 - DNA, 25 bp, Homo sapien
gggtttccttttctgcgagccggca

SEQ ID NO: 2039138 - DNA, 25 bp, Homo sapien
caaagtgctggatgcggtcgctgca

SEQ ID NO: 2039139 - DNA, 25 bp, Homo sapien
cgcgagtgtcgctgtcctccgagat

SEQ ID NO: 2039140 - DNA, 25 bp, Homo sapien
gcagcaccgcgagtgtcgctgtcct

SEQ ID NO: 2039141 - DNA, 25 bp, Homo sapien
cgagatgtcctcgtcttcatcaaag

SEQ ID NO: 2039142 - DNA, 25 bp, Homo sapien
taaaacgccaaggtcagtttccaga

SEQ ID NO: 2039143 - DNA, 25 bp, Homo sapien
cagagtaaaacgccaaggtcagttt

SEQ ID NO: 2039144 - DNA, 25 bp, Homo sapien
ctgcagagtaaaacgccaaggtcag

SEQ ID NO: 2039145 - DNA, 25 bp, Homo sapien
aacgccaaggtcagtttccagacgg

SEQ ID NO: 2039146 - DNA, 25 bp, Homo sapien
ctccgcgatcctgtcaaatggggcg

SEQ ID NO: 2039147 - DNA, 25 bp, Homo sapien
tgatgttgtcatggtctgcaaactc

SEQ ID NO: 2039148 - DNA, 25 bp, Homo sapien
gatgttgtcatggtctgcaaactcc

SEQ ID NO: 2039149 - DNA, 25 bp, Homo sapien
gatccacaaagttggccgtcatctg

SEQ ID NO: 2039150 - DNA, 25 bp, Homo sapien
gaagccaaactgatccacaaagttg

SEQ ID NO: 2039151 - DNA, 25 bp, Homo sapien
ttagggaaagcaccctcaatgtcct

SEQ ID NO: 2039152 - DNA, 25 bp, Homo sapien
tcgaggagtgaagatagtgagtact

SEQ ID NO: 2039153 - DNA, 25 bp, Homo sapien
ctcgaggagtgaagatagtgagtac

SEQ ID NO: 2039154 - DNA, 25 bp, Homo sapien
cgaggagtgaagatagtgagtactt

SEQ ID NO: 2039155 - DNA, 25 bp, Homo sapien
aggagtgaagatagtgagtacttgc

SEQ ID NO: 2039156 - DNA, 25 bp, Homo sapien
ctctgccaacaagctacagctcctg

SEQ ID NO: 2039157 - DNA, 25 bp, Homo sapien
ccttgctgtgtaaggaggtgcccag

SEQ ID NO: 2039158 - DNA, 25 bp, Homo sapien
tcaggcatatggagccctctgccaa

SEQ ID NO: 2039159 - DNA, 25 bp, Homo sapien
aggccttgctgtgtaaggaggtgcc

SEQ ID NO: 2039160 - DNA, 25 bp, Homo sapien
tctgcttcggggcaaagacaggagc

SEQ ID NO: 2039161 - DNA, 25 bp, Homo sapien
aggagcgtctgacagcgtcccagca

SEQ ID NO: 2039162 - DNA, 25 bp, Homo sapien
gtcccagcaccatgcgggtgccgag

SEQ ID NO: 2039163 - DNA, 25 bp, Homo sapien
ttgcagggtatgctcgggcacccgt

SEQ ID NO: 2039164 - DNA, 25 bp, Homo sapien
agcgctaatggcttcggagcaccag

SEQ ID NO: 2039165 - DNA, 25 bp, Homo sapien
gactgtctcttgtgccacatgctga

SEQ ID NO: 2039166 - DNA, 25 bp, Homo sapien
tgcaaggagcctggcagcgctaatg

SEQ ID NO: 2039167 - DNA, 25 bp, Homo sapien
catgctgacgcctggtaaggtctcc

SEQ ID NO: 2039168 - DNA, 25 bp, Homo sapien
tctgcgtgaggtggcctatgttccc

SEQ ID NO: 2039169 - DNA, 25 bp, Homo sapien
acgttggcgatctgcgtgaggtggc

SEQ ID NO: 2039170 - DNA, 25 bp, Homo sapien
cgatctgcgtgaggtggcctatgtt

SEQ ID NO: 2039171 - DNA, 25 bp, Homo sapien
ttggcgatctgcgtgaggtggccta

SEQ ID NO: 2039172 - DNA, 25 bp, Homo sapien
tgtgtggtcgttggcttcccaggcc

SEQ ID NO: 2039173 - DNA, 25 bp, Homo sapien
gccccaggcagcacttctgaaacaa

SEQ ID NO: 2039174 - DNA, 25 bp, Homo sapien
tctgccccaggcagcacttctgaaa

SEQ ID NO: 2039175 - DNA, 25 bp, Homo sapien
tgtgtgtggtcgttggcttcccagg

SEQ ID NO: 2039176 - DNA, 25 bp, Homo sapien
ggattccacaaatcaatgctatcta

SEQ ID NO: 2039177 - DNA, 25 bp, Homo sapien
tccacaaatcaatgctatctaactg

SEQ ID NO: 2039178 - DNA, 25 bp, Homo sapien
catcaggattccacaaatcaatgct

SEQ ID NO: 2039179 - DNA, 25 bp, Homo sapien
caggagcatcaggattccacaaatc

SEQ ID NO: 2039180 - DNA, 25 bp, Homo sapien
taccagcacatagtgaaatgtagaa

SEQ ID NO: 2039181 - DNA, 25 bp, Homo sapien
gtgaatttaccagcacatagtgaaa

SEQ ID NO: 2039182 - DNA, 25 bp, Homo sapien
ggagtgaatttaccagcacatagtg

SEQ ID NO: 2039183 - DNA, 25 bp, Homo sapien
gaatttaccagcacatagtgaaatg

SEQ ID NO: 2039184 - DNA, 25 bp, Homo sapien
cttacacgaaggcaagaaacaaggc

SEQ ID NO: 2039185 - DNA, 25 bp, Homo sapien
tgcaggctgactgccccttgagact

SEQ ID NO: 2039186 - DNA, 25 bp, Homo sapien
ccttgagactggcttacttggatta

SEQ ID NO: 2039187 - DNA, 25 bp, Homo sapien
gaaacaaggcagtcaatcataagat

SEQ ID NO: 2039188 - DNA, 25 bp, Homo sapien
ttgatgtaagtacttgctttacaca

SEQ ID NO: 2039189 - DNA, 25 bp, Homo sapien
gtaagtacttgctttacacagtttg

SEQ ID NO: 2039190 - DNA, 25 bp, Homo sapien
taagatcaaccaccatggactgaac

SEQ ID NO: 2039191 - DNA, 25 bp, Homo sapien
gatgtaagtacttgctttacacagt

SEQ ID NO: 2039192 - DNA, 25 bp, Homo sapien
gcccaagctggccagaaactggggc

SEQ ID NO: 2039193 - DNA, 25 bp, Homo sapien
cctggggtgggtgctggagacacca

SEQ ID NO: 2039194 - DNA, 25 bp, Homo sapien
ctggccagaaactggggcctggggt

SEQ ID NO: 2039195 - DNA, 25 bp, Homo sapien
ttcaaagtccttttggcccaagctg

SEQ ID NO: 2039196 - DNA, 25 bp, Homo sapien
taccgaatccggtactcggaactgc

SEQ ID NO: 2039197 - DNA, 25 bp, Homo sapien
catgaagttgttcggcttcaggagc

SEQ ID NO: 2039198 - DNA, 25 bp, Homo sapien
tccatagaccacctctacacgggtt

SEQ ID NO: 2039199 - DNA, 25 bp, Homo sapien
gggccagacggtcctgggctccata

SEQ ID NO: 2039200 - DNA, 25 bp, Homo sapien
ctctgagcggcggagccaaacggac

SEQ ID NO: 2039201 - DNA, 25 bp, Homo sapien
ggcggagccaaacggaccctcagct

SEQ ID NO: 2039202 - DNA, 25 bp, Homo sapien
ggagccaaacggaccctcagctgtt

SEQ ID NO: 2039203 - DNA, 25 bp, Homo sapien
gagcggcggagccaaacggaccctc

SEQ ID NO: 2039204 - DNA, 25 bp, Homo sapien
agcacctctacccagccaccccgtc

SEQ ID NO: 2039205 - DNA, 25 bp, Homo sapien
gccctgtctgggaaacgaggagcac

SEQ ID NO: 2039206 - DNA, 25 bp, Homo sapien
gccacccatagtctgggaagtgggg

SEQ ID NO: 2039207 - DNA, 25 bp, Homo sapien
gcgcctttgcccagccgcccatagt

SEQ ID NO: 2039208 - DNA, 25 bp, Homo sapien
gacgatggtggttttgttgcaaaga

SEQ ID NO: 2039209 - DNA, 25 bp, Homo sapien
gatgacgatggtggttttgttgcaa

SEQ ID NO: 2039210 - DNA, 25 bp, Homo sapien
catctccgaagagacagcaaccatc

SEQ ID NO: 2039211 - DNA, 25 bp, Homo sapien
tctccgaagagacagcaaccatcaa

SEQ ID NO: 2039212 - DNA, 25 bp, Homo sapien
tcagaaaccacagttagctgtattg

SEQ ID NO: 2039213 - DNA, 25 bp, Homo sapien
agttcacagatcctctttccacctg

SEQ ID NO: 2039214 - DNA, 25 bp, Homo sapien
tagctgtattgaccgccttttactg

SEQ ID NO: 2039215 - DNA, 25 bp, Homo sapien
cacagttagctgtattgaccgcctt

SEQ ID NO: 2039216 - DNA, 25 bp, Homo sapien
aaagagctcactgacaatgtggaag

SEQ ID NO: 2039217 - DNA, 25 bp, Homo sapien
tggcaaagagctcactgacaatgtg

SEQ ID NO: 2039218 - DNA, 25 bp, Homo sapien
gagctcactgacaatgtggaaggca

SEQ ID NO: 2039219 - DNA, 25 bp, Homo sapien
tcctgcctgggctgattggcaaaga

SEQ ID NO: 2039220 - DNA, 25 bp, Homo sapien
tgctgggggactattgtcaggcact

SEQ ID NO: 2039221 - DNA, 25 bp, Homo sapien
aggcactggccacccaacctgggta

SEQ ID NO: 2039222 - DNA, 25 bp, Homo sapien
acctgggtagcactgtccatctcag

SEQ ID NO: 2039223 - DNA, 25 bp, Homo sapien
tggccacccaacctgggtagcactg

SEQ ID NO: 2039224 - DNA, 25 bp, Homo sapien
tcttagagatgactgtagaaggctg

SEQ ID NO: 2039225 - DNA, 25 bp, Homo sapien
caaggccacgttcaagacttgggac

SEQ ID NO: 2039226 - DNA, 25 bp, Homo sapien
gcttctccggtatcttaatttgcca

SEQ ID NO: 2039227 - DNA, 25 bp, Homo sapien
acttgggacttcagtgatgcacttg

SEQ ID NO: 2039228 - DNA, 25 bp, Homo sapien
agggacatggtggatggacactaca

SEQ ID NO: 2039229 - DNA, 25 bp, Homo sapien
ggcggtgtccaacctctggtgctga

SEQ ID NO: 2039230 - DNA, 25 bp, Homo sapien
tggtcccggtgtgggtctctccatc

SEQ ID NO: 2039231 - DNA, 25 bp, Homo sapien
gcctcagtgcatgggcggtgtccaa

SEQ ID NO: 2039232 - DNA, 25 bp, Homo sapien
tgaagggggataacatttctgtcaa

SEQ ID NO: 2039233 - DNA, 25 bp, Homo sapien
gagttctgagggaccgcaatcctga

SEQ ID NO: 2039234 - DNA, 25 bp, Homo sapien
ggaccgcaatcctgaagacattgaa

SEQ ID NO: 2039235 - DNA, 25 bp, Homo sapien
tttctgtcaattctgccatgattgc

SEQ ID NO: 2039236 - DNA, 25 bp, Homo sapien
caggatcaaagtgggtaaccgtcat

SEQ ID NO: 2039237 - DNA, 25 bp, Homo sapien
ggagtcaccaggatcaaagtgggta

SEQ ID NO: 2039238 - DNA, 25 bp, Homo sapien
tcccatggagtcaccaggatcaaag

SEQ ID NO: 2039239 - DNA, 25 bp, Homo sapien
tgtatatcccatggagtcaccagga

SEQ ID NO: 2039240 - DNA, 25 bp, Homo sapien
aagcctttgccacttttgtcatatt

SEQ ID NO: 2039241 - DNA, 25 bp, Homo sapien
cttttgtcatattcataagatttct

SEQ ID NO: 2039242 - DNA, 25 bp, Homo sapien
gccacttttgtcatattcataagat

SEQ ID NO: 2039243 - DNA, 25 bp, Homo sapien
tcatagggcttgtccagaatgttca

SEQ ID NO: 2039244 - DNA, 25 bp, Homo sapien
tgaagcttgtactcttgaatcagag

SEQ ID NO: 2039245 - DNA, 25 bp, Homo sapien
cttggataagatcttcagatctctc

SEQ ID NO: 2039246 - DNA, 25 bp, Homo sapien
gatcgctgaggccattgcattgctt

SEQ ID NO: 2039247 - DNA, 25 bp, Homo sapien
cctgcctcctgttggcttggataag

SEQ ID NO: 2039248 - DNA, 25 bp, Homo sapien
gtgcttctgctcagccagttttatg

SEQ ID NO: 2039249 - DNA, 25 bp, Homo sapien
ggcaaaacggtcttggcctctgcac

SEQ ID NO: 2039250 - DNA, 25 bp, Homo sapien
ccctgtgcttctgctcagccagttt

SEQ ID NO: 2039251 - DNA, 25 bp, Homo sapien
ctccttcttgggcaaaacggtcttg

SEQ ID NO: 2039252 - DNA, 25 bp, Homo sapien
tgtcttttaatgtgacacttgtccg

SEQ ID NO: 2039253 - DNA, 25 bp, Homo sapien
tcctgaagccatgcctgtctttttc

SEQ ID NO: 2039254 - DNA, 25 bp, Homo sapien
tcttcttcctgaagccatgcctgtc

SEQ ID NO: 2039255 - DNA, 25 bp, Homo sapien
tttaatgtgacacttgtccggttgt

SEQ ID NO: 2039256 - DNA, 25 bp, Homo sapien
tttgtactttgaagagttcctactc

SEQ ID NO: 2039257 - DNA, 25 bp, Homo sapien
ttgtactttgaagagttcctactct

SEQ ID NO: 2039258 - DNA, 25 bp, Homo sapien
gtactttgaagagttcctactcttc

SEQ ID NO: 2039259 - DNA, 25 bp, Homo sapien
ctttgaagagttcctactcttcttt

SEQ ID NO: 2039260 - DNA, 25 bp, Homo sapien
cttcattagaaaggttgatgatttt

SEQ ID NO: 2039261 - DNA, 25 bp, Homo sapien
agaaaggttgatgatttttcactta

SEQ ID NO: 2039262 - DNA, 25 bp, Homo sapien
ttcattagaaaggttgatgattttt

SEQ ID NO: 2039263 - DNA, 25 bp, Homo sapien
tcattagaaaggttgatgatttttc

SEQ ID NO: 2039264 - DNA, 25 bp, Homo sapien
agaaacagaggaactcgagcatcca

SEQ ID NO: 2039265 - DNA, 25 bp, Homo sapien
agagaaacagaggaactcgagcatc

SEQ ID NO: 2039266 - DNA, 25 bp, Homo sapien
gagaaacagaggaactcgagcatcc

SEQ ID NO: 2039267 - DNA, 25 bp, Homo sapien
ctgctcctcggtagggtcggcatcc

SEQ ID NO: 2039268 - DNA, 25 bp, Homo sapien
tgagccgttcctggcattcgaactg

SEQ ID NO: 2039269 - DNA, 25 bp, Homo sapien
cggcatccctaccatccgccggcat

SEQ ID NO: 2039270 - DNA, 25 bp, Homo sapien
ctggcacttgagccgttcctggcat

SEQ ID NO: 2039271 - DNA, 25 bp, Homo sapien
cttgggacaagatgcgtattggatt

SEQ ID NO: 2039272 - DNA, 25 bp, Homo sapien
ttgggacaagatgcgtattggattt

SEQ ID NO: 2039273 - DNA, 25 bp, Homo sapien
ttactctgagatgtgaatgttgccc

SEQ ID NO: 2039274 - DNA, 25 bp, Homo sapien
tgggcctgagatgacagtatcaggt

SEQ ID NO: 2039275 - DNA, 25 bp, Homo sapien
gagatgtgaatgttgcccacggcct

SEQ ID NO: 2039276 - DNA, 25 bp, Homo sapien
cagctggtggatgatatctgggcct

SEQ ID NO: 2039277 - DNA, 25 bp, Homo sapien
gacatcctagggaaatgtgaggatt

SEQ ID NO: 2039278 - DNA, 25 bp, Homo sapien
gattgccatggtgcctctgagctta

SEQ ID NO: 2039279 - DNA, 25 bp, Homo sapien
tgtgaggattgccatggtgcctctg

SEQ ID NO: 2039280 - DNA, 25 bp, Homo sapien
ctgaagacatcctagggaaatgtga

SEQ ID NO: 2039281 - DNA, 25 bp, Homo sapien
tagaacagacactttgataagtgct

SEQ ID NO: 2039282 - DNA, 25 bp, Homo sapien
tgctggatgataattctgaaacaag

SEQ ID NO: 2039283 - DNA, 25 bp, Homo sapien
ttcatgaggcttttgaagagtggtg

SEQ ID NO: 2039284 - DNA, 25 bp, Homo sapien
tgaaacaagccctacccagtcgatt

SEQ ID NO: 2039285 - DNA, 25 bp, Homo sapien
gaaatctatcctgcaatatgagtga

SEQ ID NO: 2039286 - DNA, 25 bp, Homo sapien
tatgagtgactttcccagtgtacca

SEQ ID NO: 2039287 - DNA, 25 bp, Homo sapien
gtcaaggccgactattaacaaatgc

SEQ ID NO: 2039288 - DNA, 25 bp, Homo sapien
tgctcaccagccaacagaagaaatc

SEQ ID NO: 2039289 - DNA, 25 bp, Homo sapien
gacttgcgatgtaaacagcctcatt

SEQ ID NO: 2039290 - DNA, 25 bp, Homo sapien
aacaccagtgcagagacttgcgatg

SEQ ID NO: 2039291 - DNA, 25 bp, Homo sapien
gcagagacttgcgatgtaaacagcc

SEQ ID NO: 2039292 - DNA, 25 bp, Homo sapien
cagtgcagagacttgcgatgtaaac

SEQ ID NO: 2039293 - DNA, 25 bp, Homo sapien
caatcctcggagcagctgaaaaaag

SEQ ID NO: 2039294 - DNA, 25 bp, Homo sapien
gggtcccaatcctcggagcagctga

SEQ ID NO: 2039295 - DNA, 25 bp, Homo sapien
ctgggcctttttcatgatgacttgg

SEQ ID NO: 2039296 - DNA, 25 bp, Homo sapien
cagctgaaaaaagagctagcgccac

SEQ ID NO: 2039297 - DNA, 25 bp, Homo sapien
gaaatcagaggccacgtgaggtttg

SEQ ID NO: 2039298 - DNA, 25 bp, Homo sapien
tcagaggccacgtgaggtttgcaag

SEQ ID NO: 2039299 - DNA, 25 bp, Homo sapien
ggagtggcctgtagttttaactcag

SEQ ID NO: 2039300 - DNA, 25 bp, Homo sapien
gaggtttgcaaggtggagtggcctg

SEQ ID NO: 2039301 - DNA, 25 bp, Homo sapien
gggagcccccagtcctaacactgta

SEQ ID NO: 2039302 - DNA, 25 bp, Homo sapien
cctaacactgtattcagccgctgga

SEQ ID NO: 2039303 - DNA, 25 bp, Homo sapien
ccagtcctaacactgtattcagccg

SEQ ID NO: 2039304 - DNA, 25 bp, Homo sapien
tttcaaactctcatctcgggagccc

SEQ ID NO: 2039305 - DNA, 25 bp, Homo sapien
ctggccatgtaaaaggacaagggaa

SEQ ID NO: 2039306 - DNA, 25 bp, Homo sapien
gacaagggaaggcagaccatcctca

SEQ ID NO: 2039307 - DNA, 25 bp, Homo sapien
aagggaaggcagaccatcctcaact

SEQ ID NO: 2039308 - DNA, 25 bp, Homo sapien
ggaaggcagaccatcctcaacttct

SEQ ID NO: 2039309 - DNA, 25 bp, Homo sapien
gactgtcctcttggcatgtgaccct

SEQ ID NO: 2039310 - DNA, 25 bp, Homo sapien
tctgctataccccaggctgatttcc

SEQ ID NO: 2039311 - DNA, 25 bp, Homo sapien
tgtgaccctgaaggcttctagcacc

SEQ ID NO: 2039312 - DNA, 25 bp, Homo sapien
acgagcatctgctataccccaggct

SEQ ID NO: 2039313 - DNA, 25 bp, Homo sapien
gatgaagcccttgtaagggatcttg

SEQ ID NO: 2039314 - DNA, 25 bp, Homo sapien
ccgggatgaagcccttgtaagggat

SEQ ID NO: 2039315 - DNA, 25 bp, Homo sapien
gaagcccttgtaagggatcttgttc

SEQ ID NO: 2039316 - DNA, 25 bp, Homo sapien
gcccttgtaagggatcttgttctta

SEQ ID NO: 2039317 - DNA, 25 bp, Homo sapien
ttggtggcgtccatgtgggcccctg

SEQ ID NO: 2039318 - DNA, 25 bp, Homo sapien
ggtggcgtccatgtgggcccctgct

SEQ ID NO: 2039319 - DNA, 25 bp, Homo sapien
tggtggcgtccatgtgggcccctgc

SEQ ID NO: 2039320 - DNA, 25 bp, Homo sapien
gtggcgtccatgtgggcccctgctt

SEQ ID NO: 2039321 - DNA, 25 bp, Homo sapien
tgtcccggtcggccccgcagtcgaa

SEQ ID NO: 2039322 - DNA, 25 bp, Homo sapien
ctgtcccggtcggccccgcagtcga

SEQ ID NO: 2039323 - DNA, 25 bp, Homo sapien
tcccggtcggccccgcagtcgaaca

SEQ ID NO: 2039324 - DNA, 25 bp, Homo sapien
cggtcggccccgcagtcgaacagca

SEQ ID NO: 2039325 - DNA, 25 bp, Homo sapien
tttgaccacgtgcaaggaggggaat

SEQ ID NO: 2039326 - DNA, 25 bp, Homo sapien
ctttgaccacgtgcaaggaggggaa

SEQ ID NO: 2039327 - DNA, 25 bp, Homo sapien
gaagccgttcttgcccttgggtgcg

SEQ ID NO: 2039328 - DNA, 25 bp, Homo sapien
agccatgtgcagaggggtgaagccg

SEQ ID NO: 2039329 - DNA, 25 bp, Homo sapien
tgcagaggggtgaagccgttcttgc

SEQ ID NO: 2039330 - DNA, 25 bp, Homo sapien
aggggtgaagccgttcttgcccttg

SEQ ID NO: 2039331 - DNA, 25 bp, Homo sapien
agcggcggtagatagtctggtgctt

SEQ ID NO: 2039332 - DNA, 25 bp, Homo sapien
gcgcccctgtaacggatacaatagg

SEQ ID NO: 2039333 - DNA, 25 bp, Homo sapien
tggaatagtcataggccaggaccag

SEQ ID NO: 2039334 - DNA, 25 bp, Homo sapien
ctggaatagtcataggccaggacca

SEQ ID NO: 2039335 - DNA, 25 bp, Homo sapien
gggctccagtttgggcaggtactca

SEQ ID NO: 2039336 - DNA, 25 bp, Homo sapien
gggcaggtactcacccccctggtga

SEQ ID NO: 2039337 - DNA, 25 bp, Homo sapien
tccagtttgggcaggtactcacccc

SEQ ID NO: 2039338 - DNA, 25 bp, Homo sapien
tgggcaggtactcacccccctggtg

SEQ ID NO: 2039339 - DNA, 25 bp, Homo sapien
tttaagggccccaagcagatctcgt

SEQ ID NO: 2039340 - DNA, 25 bp, Homo sapien
ggccccaagcagatctcgtttctta

SEQ ID NO: 2039341 - DNA, 25 bp, Homo sapien
aagggccccaagcagatctcgtttc

SEQ ID NO: 2039342 - DNA, 25 bp, Homo sapien
ccagtgtttaagggccccaagcaga

SEQ ID NO: 2039343 - DNA, 25 bp, Homo sapien
cagcaatttcaaggcttccacggca

SEQ ID NO: 2039344 - DNA, 25 bp, Homo sapien
gtagatcccagcaatttcaaggctt

SEQ ID NO: 2039345 - DNA, 25 bp, Homo sapien
caatttcaaggcttccacggcagct

SEQ ID NO: 2039346 - DNA, 25 bp, Homo sapien
tcccagcaatttcaaggcttccacg

SEQ ID NO: 2039347 - DNA, 25 bp, Homo sapien
tctacccctgtgacccgctcctggc

SEQ ID NO: 2039348 - DNA, 25 bp, Homo sapien
taagattcccccgttcagtacctca

SEQ ID NO: 2039349 - DNA, 25 bp, Homo sapien
ggctgagcctctacccctgtgaccc

SEQ ID NO: 2039350 - DNA, 25 bp, Homo sapien
ccgttcagtacctcaggggagaaga

SEQ ID NO: 2039351 - DNA, 25 bp, Homo sapien
ccgtagctatcacgttccatgctgg

SEQ ID NO: 2039352 - DNA, 25 bp, Homo sapien
gtagctatcacgttccatgctggcc

SEQ ID NO: 2039353 - DNA, 25 bp, Homo sapien
cgtagctatcacgttccatgctggc

SEQ ID NO: 2039354 - DNA, 25 bp, Homo sapien
cccaccacgtccaggtggtccgcgc

SEQ ID NO: 2039355 - DNA, 25 bp, Homo sapien
tccccaccacgtccaggtggtccgc

SEQ ID NO: 2039356 - DNA, 25 bp, Homo sapien
ctccccaccacgtccaggtggtccg

SEQ ID NO: 2039357 - DNA, 25 bp, Homo sapien
ccccaccacgtccaggtggtccgcg

SEQ ID NO: 2039358 - DNA, 25 bp, Homo sapien
ccacagcggcggcgcaccctccatg

SEQ ID NO: 2039359 - DNA, 25 bp, Homo sapien
acagcggcggcgcaccctccatggt

SEQ ID NO: 2039360 - DNA, 25 bp, Homo sapien
cacagcggcggcgcaccctccatgg

SEQ ID NO: 2039361 - DNA, 25 bp, Homo sapien
cgccatcgaagtgcaccgagccacc

SEQ ID NO: 2039362 - DNA, 25 bp, Homo sapien
catcgaagtgcaccgagccaccggc

SEQ ID NO: 2039363 - DNA, 25 bp, Homo sapien
ccatcgaagtgcaccgagccaccgg

SEQ ID NO: 2039364 - DNA, 25 bp, Homo sapien
gccatcgaagtgcaccgagccaccg

SEQ ID NO: 2039365 - DNA, 25 bp, Homo sapien
tagccagtcagctcgtccagttcct

SEQ ID NO: 2039366 - DNA, 25 bp, Homo sapien
cggccgctgagcagcttctggagca

SEQ ID NO: 2039367 - DNA, 25 bp, Homo sapien
ctagccagtcagctcgtccagttcc

SEQ ID NO: 2039368 - DNA, 25 bp, Homo sapien
tccagttcctcccggctccggccgc

SEQ ID NO: 2039369 - DNA, 25 bp, Homo sapien
gacaggatggagagatagtgacctc

SEQ ID NO: 2039370 - DNA, 25 bp, Homo sapien
caaagggctacatcctaagatagtc

SEQ ID NO: 2039371 - DNA, 25 bp, Homo sapien
tgcaaaatcaaaagcgtaaacctgt

SEQ ID NO: 2039372 - DNA, 25 bp, Homo sapien
tccaagggtcagaaagtccccattc

SEQ ID NO: 2039373 - DNA, 25 bp, Homo sapien
catgctttcaggagggcttcgagga

SEQ ID NO: 2039374 - DNA, 25 bp, Homo sapien
caggttgaaagctacccagggctcc

SEQ ID NO: 2039375 - DNA, 25 bp, Homo sapien
taggccagttgtaacccatcagtga

SEQ ID NO: 2039376 - DNA, 25 bp, Homo sapien
tatttaaaggcaaacgatacggtgc

SEQ ID NO: 2039377 - DNA, 25 bp, Homo sapien
gtgtaattctttgattcagttgtag

SEQ ID NO: 2039378 - DNA, 25 bp, Homo sapien
ctttgattcagttgtagtctgactt

SEQ ID NO: 2039379 - DNA, 25 bp, Homo sapien
ttgctgaaggatgactcagtttccc

SEQ ID NO: 2039380 - DNA, 25 bp, Homo sapien
ggagttgctgaaggatgactcagtt

SEQ ID NO: 2039381 - DNA, 25 bp, Homo sapien
aaagcggcggtgaagatggattaaa

SEQ ID NO: 2039382 - DNA, 25 bp, Homo sapien
gattaaaggcctcacagtaacaggt

SEQ ID NO: 2039383 - DNA, 25 bp, Homo sapien
acgggctcaacaaggccacagagca

SEQ ID NO: 2039384 - DNA, 25 bp, Homo sapien
aggaaccagccccacgggctcaaca

SEQ ID NO: 2039385 - DNA, 25 bp, Homo sapien
tggacacacggagatttaacacctg

SEQ ID NO: 2039386 - DNA, 25 bp, Homo sapien
gataacttcctgacttgtgtttggg

SEQ ID NO: 2039387 - DNA, 25 bp, Homo sapien
ttaacacctgcaaagttaagcctga

SEQ ID NO: 2039388 - DNA, 25 bp, Homo sapien
ggcggcaagcctctgacggagataa

SEQ ID NO: 2039389 - DNA, 25 bp, Homo sapien
gtgctggcttgtagggaatattctt

SEQ ID NO: 2039390 - DNA, 25 bp, Homo sapien
tgttgttcccaatgaattatccaag

SEQ ID NO: 2039391 - DNA, 25 bp, Homo sapien
ggcttgtagggaatattcttaaaga

SEQ ID NO: 2039392 - DNA, 25 bp, Homo sapien
tgttgttgttcccaatgaattatcc

SEQ ID NO: 2039393 - DNA, 25 bp, Homo sapien
tcacagactttgtcattgtgttcag

SEQ ID NO: 2039394 - DNA, 25 bp, Homo sapien
tgtgttcaggtactgagtatctcat

SEQ ID NO: 2039395 - DNA, 25 bp, Homo sapien
tcattgtgttcaggtactgagtatc

SEQ ID NO: 2039396 - DNA, 25 bp, Homo sapien
ttcagaagatcacagactttgtcat

SEQ ID NO: 2039397 - DNA, 25 bp, Homo sapien
gatttaatggtaaatcactataaac

SEQ ID NO: 2039398 - DNA, 25 bp, Homo sapien
tggtaaatcactataaacatgaagg

SEQ ID NO: 2039399 - DNA, 25 bp, Homo sapien
tttaatggtaaatcactataaacat

SEQ ID NO: 2039400 - DNA, 25 bp, Homo sapien
taatggtaaatcactataaacatga

SEQ ID NO: 2039401 - DNA, 25 bp, Homo sapien
aggaggatgacccccaatactggat

SEQ ID NO: 2039402 - DNA, 25 bp, Homo sapien
agatggagaaggatgcccccctcag

SEQ ID NO: 2039403 - DNA, 25 bp, Homo sapien
gaggatgacccccaatactggatgg

SEQ ID NO: 2039404 - DNA, 25 bp, Homo sapien
atggagaaggatgcccccctcagtc

SEQ ID NO: 2039405 - DNA, 25 bp, Homo sapien
gaaacatcatgttcctcattctgcc

SEQ ID NO: 2039406 - DNA, 25 bp, Homo sapien
tgtaagaaacatcatgttcctcatt

SEQ ID NO: 2039407 - DNA, 25 bp, Homo sapien
tcatgagtaactgtctgtaagaaac

SEQ ID NO: 2039408 - DNA, 25 bp, Homo sapien
cattctgcccttgcttcttgggctc

SEQ ID NO: 2039409 - DNA, 25 bp, Homo sapien
tctgtgctcccgtctgcactgcatg

SEQ ID NO: 2039410 - DNA, 25 bp, Homo sapien
ccctgaacgtggacctggtgtgaca

SEQ ID NO: 2039411 - DNA, 25 bp, Homo sapien
cagtgagcacccggctgagggacaa

SEQ ID NO: 2039412 - DNA, 25 bp, Homo sapien
gagggtacgctgatgacttctgctg

SEQ ID NO: 2039413 - DNA, 25 bp, Homo sapien
gggccgcgggaaacttatcagcatc

SEQ ID NO: 2039414 - DNA, 25 bp, Homo sapien
gagctgctccgggggccgcgggaaa

SEQ ID NO: 2039415 - DNA, 25 bp, Homo sapien
agagctgctccgggggccgcgggaa

SEQ ID NO: 2039416 - DNA, 25 bp, Homo sapien
gggggccgcgggaaacttatcagca

SEQ ID NO: 2039417 - DNA, 25 bp, Homo sapien
tcacagctccagggcctggtcgcac

SEQ ID NO: 2039418 - DNA, 25 bp, Homo sapien
caggctccgcgcctgaccctccagc

SEQ ID NO: 2039419 - DNA, 25 bp, Homo sapien
gcctgaccctccagcctgcgcagcg

SEQ ID NO: 2039420 - DNA, 25 bp, Homo sapien
gcgcctgaccctccagcctgcgcag

SEQ ID NO: 2039421 - DNA, 25 bp, Homo sapien
gaccctccagcctgcgcagcgggca

SEQ ID NO: 2039422 - DNA, 25 bp, Homo sapien
ctcggccgggaagaacctctccagc

SEQ ID NO: 2039423 - DNA, 25 bp, Homo sapien
ggccgggaagaacctctccagcagg

SEQ ID NO: 2039424 - DNA, 25 bp, Homo sapien
tcggccgggaagaacctctccagca

SEQ ID NO: 2039425 - DNA, 25 bp, Homo sapien
cgggaagaacctctccagcaggcgg

SEQ ID NO: 2039426 - DNA, 25 bp, Homo sapien
agcgcctccagcctcccggctacac

SEQ ID NO: 2039427 - DNA, 25 bp, Homo sapien
gcagcgcctccagcctcccggctac

SEQ ID NO: 2039428 - DNA, 25 bp, Homo sapien
cgcctccagcctcccggctacacgg

SEQ ID NO: 2039429 - DNA, 25 bp, Homo sapien
ctccagcctcccggctacacggaac

SEQ ID NO: 2039430 - DNA, 25 bp, Homo sapien
gactgctttctggtactcgctcgcg

SEQ ID NO: 2039431 - DNA, 25 bp, Homo sapien
ggaagagcccgactgctttctggta

SEQ ID NO: 2039432 - DNA, 25 bp, Homo sapien
gagcggaagagcccgactgctttct

SEQ ID NO: 2039433 - DNA, 25 bp, Homo sapien
gagcccgactgctttctggtactcg

SEQ ID NO: 2039434 - DNA, 25 bp, Homo sapien
ctcctccaagcgctgggcgattggc

SEQ ID NO: 2039435 - DNA, 25 bp, Homo sapien
cctccaagcgctgggcgattggctt

SEQ ID NO: 2039436 - DNA, 25 bp, Homo sapien
ccaagcgctgggcgattggcttccc

SEQ ID NO: 2039437 - DNA, 25 bp, Homo sapien
agcgctgggcgattggcttcccgca

SEQ ID NO: 2039438 - DNA, 25 bp, Homo sapien
tgagaggtcatcatggtcttgagat

SEQ ID NO: 2039439 - DNA, 25 bp, Homo sapien
gagaggtcatcatggtcttgagatt

SEQ ID NO: 2039440 - DNA, 25 bp, Homo sapien
tcaagaagcattcgtctttctcctt

SEQ ID NO: 2039441 - DNA, 25 bp, Homo sapien
cctcaagaagcattcgtctttctcc

SEQ ID NO: 2039442 - DNA, 25 bp, Homo sapien
caagaagcattcgtctttctccttc

SEQ ID NO: 2039443 - DNA, 25 bp, Homo sapien
cccctcaagaagcattcgtctttct

SEQ ID NO: 2039444 - DNA, 25 bp, Homo sapien
atgtttgcacttcttccttgccagc

SEQ ID NO: 2039445 - DNA, 25 bp, Homo sapien
taatgtttgcacttcttccttgcca

SEQ ID NO: 2039446 - DNA, 25 bp, Homo sapien
ctactaatgtttgcacttcttcctt

SEQ ID NO: 2039447 - DNA, 25 bp, Homo sapien
actaatgtttgcacttcttccttgc

SEQ ID NO: 2039448 - DNA, 25 bp, Homo sapien
aaaaactggttaaagatgctggcac

SEQ ID NO: 2039449 - DNA, 25 bp, Homo sapien
tggtaagaaaaatggaaccgcatgc

SEQ ID NO: 2039450 - DNA, 25 bp, Homo sapien
aaatggaaccgcatgcagctgctga

SEQ ID NO: 2039451 - DNA, 25 bp, Homo sapien
aaccaaaaactggttaaagatgctg

SEQ ID NO: 2039452 - DNA, 25 bp, Homo sapien
ccctccacaccctggactctggctc

SEQ ID NO: 2039453 - DNA, 25 bp, Homo sapien
ccacaccctggactctggctcccga

SEQ ID NO: 2039454 - DNA, 25 bp, Homo sapien
accctggactctggctcccgaggac

SEQ ID NO: 2039455 - DNA, 25 bp, Homo sapien
acaccctggactctggctcccgagg

SEQ ID NO: 2039456 - DNA, 25 bp, Homo sapien
gcaacttgggctaccgcgtggactc

SEQ ID NO: 2039457 - DNA, 25 bp, Homo sapien
gaggacctggtcctgcggcaacttg

SEQ ID NO: 2039458 - DNA, 25 bp, Homo sapien
cctggactacagcacggaaggaccc

SEQ ID NO: 2039459 - DNA, 25 bp, Homo sapien
cctagaccaagacacgggagaacct

SEQ ID NO: 2039460 - DNA, 25 bp, Homo sapien
caagcactggactatcgcagggcag

SEQ ID NO: 2039461 - DNA, 25 bp, Homo sapien
tggtacgccctggactaagtcaccg

SEQ ID NO: 2039462 - DNA, 25 bp, Homo sapien
caacgccgtgaactccagcattgga

SEQ ID NO: 2039463 - DNA, 25 bp, Homo sapien
gccttactgcggactcaagcactgg

SEQ ID NO: 2039464 - DNA, 25 bp, Homo sapien
gaggactcctacacggaggactccg

SEQ ID NO: 2039465 - DNA, 25 bp, Homo sapien
cgcaccctggactatggcaccagag

SEQ ID NO: 2039466 - DNA, 25 bp, Homo sapien
atatagcaaggcaggaatcccgccc

SEQ ID NO: 2039467 - DNA, 25 bp, Homo sapien
ctggactcctgaacaagagaaccct

SEQ ID NO: 2039468 - DNA, 25 bp, Homo sapien
agccgtgccctggactgtggcacag

SEQ ID NO: 2039469 - DNA, 25 bp, Homo sapien
ggagaactcttgctccgcagagccg

SEQ ID NO: 2039470 - DNA, 25 bp, Homo sapien
cctcaccctggactaaggcactgga

SEQ ID NO: 2039471 - DNA, 25 bp, Homo sapien
tcttgcaggagagaatctccgccca

SEQ ID NO: 2039472 - DNA, 25 bp, Homo sapien
gtatttagtccggaactatgagata

SEQ ID NO: 2039473 - DNA, 25 bp, Homo sapien
aagccagtatttagtccggaactat

SEQ ID NO: 2039474 - DNA, 25 bp, Homo sapien
tatttagtccggaactatgagatac

SEQ ID NO: 2039475 - DNA, 25 bp, Homo sapien
ccagtatttagtccggaactatgag

SEQ ID NO: 2039476 - DNA, 25 bp, Homo sapien
atttagaccagaataggttttcata

SEQ ID NO: 2039477 - DNA, 25 bp, Homo sapien
tttagaccagaataggttttcatat

SEQ ID NO: 2039478 - DNA, 25 bp, Homo sapien
cccattcgacttagattaggggcag

SEQ ID NO: 2039479 - DNA, 25 bp, Homo sapien
cattcgacttagattaggggcagct

SEQ ID NO: 2039480 - DNA, 25 bp, Homo sapien
ttcgacttagattaggggcagctac

SEQ ID NO: 2039481 - DNA, 25 bp, Homo sapien
ccattcgacttagattaggggcagc

SEQ ID NO: 2039482 - DNA, 25 bp, Homo sapien
ggactctgaggagtgcgttcaaagt

SEQ ID NO: 2039483 - DNA, 25 bp, Homo sapien
tctgaggagtgcgttcaaagtcttc

SEQ ID NO: 2039484 - DNA, 25 bp, Homo sapien
actctgaggagtgcgttcaaagtct

SEQ ID NO: 2039485 - DNA, 25 bp, Homo sapien
gactctgaggagtgcgttcaaagtc

SEQ ID NO: 2039486 - DNA, 25 bp, Homo sapien
gcggacgtacggctctttggaggcg

SEQ ID NO: 2039487 - DNA, 25 bp, Homo sapien
cgtacggctctttggaggcggcaca

SEQ ID NO: 2039488 - DNA, 25 bp, Homo sapien
gcagcggacgtacggctctttggag

SEQ ID NO: 2039489 - DNA, 25 bp, Homo sapien
ctggcagcggacgtacggctctttg

SEQ ID NO: 2039490 - DNA, 25 bp, Homo sapien
tttcttctctgcgctttttacgaca

SEQ ID NO: 2039491 - DNA, 25 bp, Homo sapien
cttctctgcgctttttacgacagca

SEQ ID NO: 2039492 - DNA, 25 bp, Homo sapien
tttttacgacagcaaaagatgataa

SEQ ID NO: 2039493 - DNA, 25 bp, Homo sapien
ttttacgacagcaaaagatgataag

SEQ ID NO: 2039494 - DNA, 25 bp, Homo sapien
tgcaattagtccagctttatttgaa

SEQ ID NO: 2039495 - DNA, 25 bp, Homo sapien
acgcaacaggcactgatcagagccc

SEQ ID NO: 2039496 - DNA, 25 bp, Homo sapien
gcaattagtccagctttatttgaag

SEQ ID NO: 2039497 - DNA, 25 bp, Homo sapien
aacaggcactgatcagagcccactc

SEQ ID NO: 2039498 - DNA, 25 bp, Homo sapien
gatataaacagatgaagtcatttct

SEQ ID NO: 2039499 - DNA, 25 bp, Homo sapien
tatgtcccagagtactcagaagaag

SEQ ID NO: 2039500 - DNA, 25 bp, Homo sapien
ttacagatataaacagatgaagtca

SEQ ID NO: 2039501 - DNA, 25 bp, Homo sapien
agagtactcagaagaagcatttttt

SEQ ID NO: 2039502 - DNA, 25 bp, Homo sapien
gacaatttttgccactcatactgta

SEQ ID NO: 2039503 - DNA, 25 bp, Homo sapien
tctgtgagtcagacaatttttgcca

SEQ ID NO: 2039504 - DNA, 25 bp, Homo sapien
actcatactgtaatggaagtgaacc

SEQ ID NO: 2039505 - DNA, 25 bp, Homo sapien
tgtaatggaagtgaaccttcttttg

SEQ ID NO: 2039506 - DNA, 25 bp, Homo sapien
cttaacaagaactaccagctgaatc

SEQ ID NO: 2039507 - DNA, 25 bp, Homo sapien
aaggcttaacaagaactaccagctg

SEQ ID NO: 2039508 - DNA, 25 bp, Homo sapien
aacaagaactaccagctgaatcttc

SEQ ID NO: 2039509 - DNA, 25 bp, Homo sapien
ctgaaggcttaacaagaactaccag

SEQ ID NO: 2039510 - DNA, 25 bp, Homo sapien
tttgcaacaccaggagctttttttc

SEQ ID NO: 2039511 - DNA, 25 bp, Homo sapien
tatttgcaacaccaggagctttttt

SEQ ID NO: 2039512 - DNA, 25 bp, Homo sapien
tgcaacaccaggagctttttttcac

SEQ ID NO: 2039513 - DNA, 25 bp, Homo sapien
ttatttgcaacaccaggagcttttt

SEQ ID NO: 2039514 - DNA, 25 bp, Homo sapien
tgtgccaatatctgacagctgtaaa

SEQ ID NO: 2039515 - DNA, 25 bp, Homo sapien
tcaccagatttgagatcattactct

SEQ ID NO: 2039516 - DNA, 25 bp, Homo sapien
cttaaaatgtactcggcctttcagt

SEQ ID NO: 2039517 - DNA, 25 bp, Homo sapien
cgttacatttattgatgcatcacca

SEQ ID NO: 2039518 - DNA, 25 bp, Homo sapien
actaagcgtaaatttgcatggcaga

SEQ ID NO: 2039519 - DNA, 25 bp, Homo sapien
ggctgccgtgccgtgggcggcggct

SEQ ID NO: 2039520 - DNA, 25 bp, Homo sapien
gctgccgtgccgtgggcggcggctg

SEQ ID NO: 2039521 - DNA, 25 bp, Homo sapien
tctgtccttccgcactcaggagcgg

SEQ ID NO: 2039522 - DNA, 25 bp, Homo sapien
aacaacggcgtcaagctggctgaca

SEQ ID NO: 2039523 - DNA, 25 bp, Homo sapien
gcaccaggcacctgcggattggcct

SEQ ID NO: 2039524 - DNA, 25 bp, Homo sapien
caggcgacctcaacgtggagctgct

SEQ ID NO: 2039525 - DNA, 25 bp, Homo sapien
gtgcgcggagatgcggtccccgagg

SEQ ID NO: 2039526 - DNA, 25 bp, Homo sapien
cggagatgcggtccccgaggaggcc

SEQ ID NO: 2039527 - DNA, 25 bp, Homo sapien
gcgcggagatgcggtccccgaggag

SEQ ID NO: 2039528 - DNA, 25 bp, Homo sapien
ggtgcgcggagatgcggtccccgag

SEQ ID NO: 2039529 - DNA, 25 bp, Homo sapien
cattttggggcgagcactccagctc

SEQ ID NO: 2039530 - DNA, 25 bp, Homo sapien
agggaaggtcatctttgtcgcggaa

SEQ ID NO: 2039531 - DNA, 25 bp, Homo sapien
gtcctaagtcctttgtgtgccgtgg

SEQ ID NO: 2039532 - DNA, 25 bp, Homo sapien
tctttgtcgcggaaagcctgatgtg

SEQ ID NO: 2039533 - DNA, 25 bp, Homo sapien
ctgtttggttggagatcggccgttt

SEQ ID NO: 2039534 - DNA, 25 bp, Homo sapien
tctgtttggttggagatcggccgtt

SEQ ID NO: 2039535 - DNA, 25 bp, Homo sapien
tttctgtttggttggagatcggccg

SEQ ID NO: 2039536 - DNA, 25 bp, Homo sapien
atttctgtttggttggagatcggcc

SEQ ID NO: 2039537 - DNA, 25 bp, Homo sapien
tgtgggtgggggaagcggagcagct

SEQ ID NO: 2039538 - DNA, 25 bp, Homo sapien
ctgtgggtgggggaagcggagcagc

SEQ ID NO: 2039539 - DNA, 25 bp, Homo sapien
gggcagtgtgcatcgcccctactgc

SEQ ID NO: 2039540 - DNA, 25 bp, Homo sapien
aaggtgggttctgtgcggccaggaa

SEQ ID NO: 2039541 - DNA, 25 bp, Homo sapien
ggatgtgcggcgaaaggctgtgcag

SEQ ID NO: 2039542 - DNA, 25 bp, Homo sapien
gcagcgggcagtgtgcatcgcccct

SEQ ID NO: 2039543 - DNA, 25 bp, Homo sapien
ggcttgagggccggcggagccgcag

SEQ ID NO: 2039544 - DNA, 25 bp, Homo sapien
cttgagggccggcggagccgcaggc

SEQ ID NO: 2039545 - DNA, 25 bp, Homo sapien
ttgagggccggcggagccgcaggct

SEQ ID NO: 2039546 - DNA, 25 bp, Homo sapien
gcttgagggccggcggagccgcagg

SEQ ID NO: 2039547 - DNA, 25 bp, Homo sapien
ggtcgcctatctgggacctcagcgc

SEQ ID NO: 2039548 - DNA, 25 bp, Homo sapien
cgccagggtcgcctatctgggacct

SEQ ID NO: 2039549 - DNA, 25 bp, Homo sapien
gcggaccaagctaggggtgccaggg

SEQ ID NO: 2039550 - DNA, 25 bp, Homo sapien
ggcaccccgccagggtcgcctatct

SEQ ID NO: 2039551 - DNA, 25 bp, Homo sapien
ttagtatccaacatagccagaagct

SEQ ID NO: 2039552 - DNA, 25 bp, Homo sapien
caataagcgatgagggttccagtaa

SEQ ID NO: 2039553 - DNA, 25 bp, Homo sapien
tacttacagtactggttagtatcca

SEQ ID NO: 2039554 - DNA, 25 bp, Homo sapien
gcaaggaacattaaaggagctttac

SEQ ID NO: 2039555 - DNA, 25 bp, Homo sapien
tcctttatgaaatatctttcaactg

SEQ ID NO: 2039556 - DNA, 25 bp, Homo sapien
ctgtattcatacttcttttcttcct

SEQ ID NO: 2039557 - DNA, 25 bp, Homo sapien
tttatgaaatatctttcaactgcat

SEQ ID NO: 2039558 - DNA, 25 bp, Homo sapien
tatgaaatatctttcaactgcattt

SEQ ID NO: 2039559 - DNA, 25 bp, Homo sapien
gatggtatgcatgtgttaatatgtt

SEQ ID NO: 2039560 - DNA, 25 bp, Homo sapien
gtgatggtatgcatgtgttaatatg

SEQ ID NO: 2039561 - DNA, 25 bp, Homo sapien
tgatggtatgcatgtgttaatatgt

SEQ ID NO: 2039562 - DNA, 25 bp, Homo sapien
tagtgatggtatgcatgtgttaata

SEQ ID NO: 2039563 - DNA, 25 bp, Homo sapien
gcagaggatgtaatctcatgtcaat

SEQ ID NO: 2039564 - DNA, 25 bp, Homo sapien
ggcagaggatgtaatctcatgtcaa

SEQ ID NO: 2039565 - DNA, 25 bp, Homo sapien
ggctctacgttaactcttattagaa

SEQ ID NO: 2039566 - DNA, 25 bp, Homo sapien
tgtgtctgttcctccttaaatggct

SEQ ID NO: 2039567 - DNA, 25 bp, Homo sapien
tctgataatttgtgtctgttcctcc

SEQ ID NO: 2039568 - DNA, 25 bp, Homo sapien
catcatcttcgccacagaacttttg

SEQ ID NO: 2039569 - DNA, 25 bp, Homo sapien
gactggcacgttggaaaaagactca

SEQ ID NO: 2039570 - DNA, 25 bp, Homo sapien
actggcacgttggaaaaagactcaa

SEQ ID NO: 2039571 - DNA, 25 bp, Homo sapien
acagactggcacgttggaaaaagac

SEQ ID NO: 2039572 - DNA, 25 bp, Homo sapien
cagactggcacgttggaaaaagact

SEQ ID NO: 2039573 - DNA, 25 bp, Homo sapien
agctcagaggcatggaatagagccc

SEQ ID NO: 2039574 - DNA, 25 bp, Homo sapien
ctcagaggcatggaatagagcccca

SEQ ID NO: 2039575 - DNA, 25 bp, Homo sapien
ataagctcagaggcatggaatagag

SEQ ID NO: 2039576 - DNA, 25 bp, Homo sapien
taagctcagaggcatggaatagagc

SEQ ID NO: 2039577 - DNA, 25 bp, Homo sapien
cccacaatttggagcattctttgga

SEQ ID NO: 2039578 - DNA, 25 bp, Homo sapien
tctgcacagcattacctcaagggtg

SEQ ID NO: 2039579 - DNA, 25 bp, Homo sapien
tacagaagctatggtgtgggcaccc

SEQ ID NO: 2039580 - DNA, 25 bp, Homo sapien
ggcacggtccgcttgtacagaagct

SEQ ID NO: 2039581 - DNA, 25 bp, Homo sapien
catgagatggagctggtctgacctc

SEQ ID NO: 2039582 - DNA, 25 bp, Homo sapien
tgacgaggaacaggatcagaggcct

SEQ ID NO: 2039583 - DNA, 25 bp, Homo sapien
gcccgcacgctggaatcgctaagtt

SEQ ID NO: 2039584 - DNA, 25 bp, Homo sapien
ggagatatggaaatgggcacccaca

SEQ ID NO: 2039585 - DNA, 25 bp, Homo sapien
gaagacctgcccatcgaggagatat

SEQ ID NO: 2039586 - DNA, 25 bp, Homo sapien
attgcatagcccttagaagtttatc

SEQ ID NO: 2039587 - DNA, 25 bp, Homo sapien
ttcaattgcatagcccttagaagtt

SEQ ID NO: 2039588 - DNA, 25 bp, Homo sapien
catagcccttagaagtttatcagtc

SEQ ID NO: 2039589 - DNA, 25 bp, Homo sapien
cttcattcaattgcatagcccttag

SEQ ID NO: 2039590 - DNA, 25 bp, Homo sapien
gttttcacgcaagagatcttcttct

SEQ ID NO: 2039591 - DNA, 25 bp, Homo sapien
gctgttttcacgcaagagatcttct

SEQ ID NO: 2039592 - DNA, 25 bp, Homo sapien
tcacgcaagagatcttcttctttct

SEQ ID NO: 2039593 - DNA, 25 bp, Homo sapien
ttcacgcaagagatcttcttctttc

SEQ ID NO: 2039594 - DNA, 25 bp, Homo sapien
ctgcttttgtttattagtcagaatc

SEQ ID NO: 2039595 - DNA, 25 bp, Homo sapien
ttgtttattagtcagaatctcatct

SEQ ID NO: 2039596 - DNA, 25 bp, Homo sapien
ttcagaaagttgtttccgggtatca

SEQ ID NO: 2039597 - DNA, 25 bp, Homo sapien
cagaaagttgtttccgggtatcatt

SEQ ID NO: 2039598 - DNA, 25 bp, Homo sapien
ctgaaatacagccacgcagcagtac

SEQ ID NO: 2039599 - DNA, 25 bp, Homo sapien
ttctgaaatacagccacgcagcagt

SEQ ID NO: 2039600 - DNA, 25 bp, Homo sapien
ttgcttctgaaatacagccacgcag

SEQ ID NO: 2039601 - DNA, 25 bp, Homo sapien
tgcttctgaaatacagccacgcagc

SEQ ID NO: 2039602 - DNA, 25 bp, Homo sapien
atcccacaggattacttccatgctt

SEQ ID NO: 2039603 - DNA, 25 bp, Homo sapien
ctggtaatcccacaggattacttcc

SEQ ID NO: 2039604 - DNA, 25 bp, Homo sapien
aggttttctggtaatcccacaggat

SEQ ID NO: 2039605 - DNA, 25 bp, Homo sapien
ggtaatcccacaggattacttccat

SEQ ID NO: 2039606 - DNA, 25 bp, Homo sapien
gagtggaagtttgatattaaggatg

SEQ ID NO: 2039607 - DNA, 25 bp, Homo sapien
cttgagtggaagtttgatattaagg

SEQ ID NO: 2039608 - DNA, 25 bp, Homo sapien
tggaagtttgatattaaggatggtt

SEQ ID NO: 2039609 - DNA, 25 bp, Homo sapien
aagtttgatattaaggatggttatc

SEQ ID NO: 2039610 - DNA, 25 bp, Homo sapien
tatttatttctggttcttgagacat

SEQ ID NO: 2039611 - DNA, 25 bp, Homo sapien
ttatttatttctggttcttgagaca

SEQ ID NO: 2039612 - DNA, 25 bp, Homo sapien
ctctctatcacagtccttatttatt

SEQ ID NO: 2039613 - DNA, 25 bp, Homo sapien
ttatttctggttcttgagacatttt

SEQ ID NO: 2039614 - DNA, 25 bp, Homo sapien
cctctgatgttagctttaagtcttg

SEQ ID NO: 2039615 - DNA, 25 bp, Homo sapien
gactttaagcctttgtgactcttcc

SEQ ID NO: 2039616 - DNA, 25 bp, Homo sapien
ctctggctggctattttcactgact

SEQ ID NO: 2039617 - DNA, 25 bp, Homo sapien
tttcactgactttaagcctttgtga

SEQ ID NO: 2039618 - DNA, 25 bp, Homo sapien
ttgctgtgcttccttaatatgctcc

SEQ ID NO: 2039619 - DNA, 25 bp, Homo sapien
tactagtgtacaacgtggaaacctg

SEQ ID NO: 2039620 - DNA, 25 bp, Homo sapien
tctagtcttcctacccagtccataa

SEQ ID NO: 2039621 - DNA, 25 bp, Homo sapien
taagttaaatgctagcctatacaaa

SEQ ID NO: 2039622 - DNA, 25 bp, Homo sapien
ctttatagtcagaaagtaattcaca

SEQ ID NO: 2039623 - DNA, 25 bp, Homo sapien
ctggattgctgttttcagaagagat

SEQ ID NO: 2039624 - DNA, 25 bp, Homo sapien
gttttcagaagagatttttagcatc

SEQ ID NO: 2039625 - DNA, 25 bp, Homo sapien
tttctttatagtcagaaagtaattc

SEQ ID NO: 2039626 - DNA, 25 bp, Homo sapien
tcaaagagttgtgctgcctccttat

SEQ ID NO: 2039627 - DNA, 25 bp, Homo sapien
tgcagaagccatgctaactttctct

SEQ ID NO: 2039628 - DNA, 25 bp, Homo sapien
gcagaagccatgctaactttctctg

SEQ ID NO: 2039629 - DNA, 25 bp, Homo sapien
tgctgcctccttatgcagaagccat

SEQ ID NO: 2039630 - DNA, 25 bp, Homo sapien
cgtctgtccagatagatcttgagaa

SEQ ID NO: 2039631 - DNA, 25 bp, Homo sapien
gatagatcttgagaagatacatcaa

SEQ ID NO: 2039632 - DNA, 25 bp, Homo sapien
tctggccgtctgtccagatagatct

SEQ ID NO: 2039633 - DNA, 25 bp, Homo sapien
acagcatactctctggccgtctgtc

SEQ ID NO: 2039634 - DNA, 25 bp, Homo sapien
ttttgttcatgtacgccaagcaaaa

SEQ ID NO: 2039635 - DNA, 25 bp, Homo sapien
tttttgttcatgtacgccaagcaaa

SEQ ID NO: 2039636 - DNA, 25 bp, Homo sapien
tttgttcatgtacgccaagcaaaag

SEQ ID NO: 2039637 - DNA, 25 bp, Homo sapien
aatatcagcaccatataagagcagt

SEQ ID NO: 2039638 - DNA, 25 bp, Homo sapien
caccatataagagcagtgctttggc

SEQ ID NO: 2039639 - DNA, 25 bp, Homo sapien
ttcaatatcagcaccatataagagc

SEQ ID NO: 2039640 - DNA, 25 bp, Homo sapien
tgattcaatatcagcaccatataag

SEQ ID NO: 2039641 - DNA, 25 bp, Homo sapien
catctggaatattttgatcagcgcc

SEQ ID NO: 2039642 - DNA, 25 bp, Homo sapien
gagtggtatttccatactcatctgg

SEQ ID NO: 2039643 - DNA, 25 bp, Homo sapien
tctggaatattttgatcagcgccat

SEQ ID NO: 2039644 - DNA, 25 bp, Homo sapien
ctcatctggaatattttgatcagcg

SEQ ID NO: 2039645 - DNA, 25 bp, Homo sapien
taacacacattcatcttcctggcat

SEQ ID NO: 2039646 - DNA, 25 bp, Homo sapien
acattcatcttcctggcattgtacg

SEQ ID NO: 2039647 - DNA, 25 bp, Homo sapien
attcatcttcctggcattgtacggc

SEQ ID NO: 2039648 - DNA, 25 bp, Homo sapien
acacattcatcttcctggcattgta

SEQ ID NO: 2039649 - DNA, 25 bp, Homo sapien
tgacatcgtctgtccagcaggagtt

SEQ ID NO: 2039650 - DNA, 25 bp, Homo sapien
ttgacatcgtctgtccagcaggagt

SEQ ID NO: 2039651 - DNA, 25 bp, Homo sapien
aaagtacatctttgcatgccgacat

SEQ ID NO: 2039652 - DNA, 25 bp, Homo sapien
tatagcaaagtacatctttgcatgc

SEQ ID NO: 2039653 - DNA, 25 bp, Homo sapien
ttgatatagcaaagtacatctttgc

SEQ ID NO: 2039654 - DNA, 25 bp, Homo sapien
gcaaagtacatctttgcatgccgac

SEQ ID NO: 2039655 - DNA, 25 bp, Homo sapien
tgtccctcttgttcatgtccgtgtc

SEQ ID NO: 2039656 - DNA, 25 bp, Homo sapien
gacgtggtacctcggctccatgaag

SEQ ID NO: 2039657 - DNA, 25 bp, Homo sapien
gctgtcgtcgtagtctccccaagcg

SEQ ID NO: 2039658 - DNA, 25 bp, Homo sapien
ctcttgttcatgtccgtgtccctga

SEQ ID NO: 2039659 - DNA, 25 bp, Homo sapien
gagcgtcttcataaaggagttgtca

SEQ ID NO: 2039660 - DNA, 25 bp, Homo sapien
gaagcggtggtgaaaccacttgccc

SEQ ID NO: 2039661 - DNA, 25 bp, Homo sapien
acagcagaggcagcgggcattgaac

SEQ ID NO: 2039662 - DNA, 25 bp, Homo sapien
ggcattgaacaaacctcagtcacca

SEQ ID NO: 2039663 - DNA, 25 bp, Homo sapien
gcaagaaacaccaggcaaagcgact

SEQ ID NO: 2039664 - DNA, 25 bp, Homo sapien
agcgactaacgccaagccaagctag

SEQ ID NO: 2039665 - DNA, 25 bp, Homo sapien
accaggcaaagcgactaacgccaag

SEQ ID NO: 2039666 - DNA, 25 bp, Homo sapien
gaaacaccaggcaaagcgactaacg

SEQ ID NO: 2039667 - DNA, 25 bp, Homo sapien
gtatatcatacttgcaccttctctg

SEQ ID NO: 2039668 - DNA, 25 bp, Homo sapien
cttgtcatgtgatattcctgtatat

SEQ ID NO: 2039669 - DNA, 25 bp, Homo sapien
gatattcctgtatatcatacttgca

SEQ ID NO: 2039670 - DNA, 25 bp, Homo sapien
catacttgcaccttctctgttcaat

SEQ ID NO: 2039671 - DNA, 25 bp, Homo sapien
ggcgtgcccaaaaactcaatagtag

SEQ ID NO: 2039672 - DNA, 25 bp, Homo sapien
catgttgagccacgttggaacctga

SEQ ID NO: 2039673 - DNA, 25 bp, Homo sapien
catgctatgtaggaggtcaccttcc

SEQ ID NO: 2039674 - DNA, 25 bp, Homo sapien
catgcaaaatttaaaggcgtgccca

SEQ ID NO: 2039675 - DNA, 25 bp, Homo sapien
ccagaaattccaatgttgtgttgaa

SEQ ID NO: 2039676 - DNA, 25 bp, Homo sapien
cagaaattccaatgttgtgttgaaa

SEQ ID NO: 2039677 - DNA, 25 bp, Homo sapien
gccagaaattccaatgttgtgttga

SEQ ID NO: 2039678 - DNA, 25 bp, Homo sapien
aagttggtgagggattttgcaaagc

SEQ ID NO: 2039679 - DNA, 25 bp, Homo sapien
tgcaaagctcttcaaacggcatgaa

SEQ ID NO: 2039680 - DNA, 25 bp, Homo sapien
acaatgcaaagatatgagaccaacc

SEQ ID NO: 2039681 - DNA, 25 bp, Homo sapien
tgaagaactgttgaccagtgaagat

SEQ ID NO: 2039682 - DNA, 25 bp, Homo sapien
attttcttggggtctattgccagac

SEQ ID NO: 2039683 - DNA, 25 bp, Homo sapien
cccgagaagcgggtgtgggattaca

SEQ ID NO: 2039684 - DNA, 25 bp, Homo sapien
gcctggcccatttttgactctcttt

SEQ ID NO: 2039685 - DNA, 25 bp, Homo sapien
ctggcccatttttgactctctttcc

SEQ ID NO: 2039686 - DNA, 25 bp, Homo sapien
ggcccatttttgactctctttccat

SEQ ID NO: 2039687 - DNA, 25 bp, Homo sapien
ggctctttctacctgtacagcgcat

SEQ ID NO: 2039688 - DNA, 25 bp, Homo sapien
cacaggatcctccaaggctctttct

SEQ ID NO: 2039689 - DNA, 25 bp, Homo sapien
tattgtcagggactactcctccaca

SEQ ID NO: 2039690 - DNA, 25 bp, Homo sapien
tcttaatattgtcagggactactcc

SEQ ID NO: 2039691 - DNA, 25 bp, Homo sapien
tactaggatatctggtaagtctggg

SEQ ID NO: 2039692 - DNA, 25 bp, Homo sapien
gtgagctggacaatctatactgacc

SEQ ID NO: 2039693 - DNA, 25 bp, Homo sapien
gagctagtttactgtcagccaggcc

SEQ ID NO: 2039694 - DNA, 25 bp, Homo sapien
atactgaccaccctcatatgtctgg

SEQ ID NO: 2039695 - DNA, 25 bp, Homo sapien
gtccccaaggcagtaaatcaaatgc

SEQ ID NO: 2039696 - DNA, 25 bp, Homo sapien
atgtccccaaggcagtaaatcaaat

SEQ ID NO: 2039697 - DNA, 25 bp, Homo sapien
tgtccccaaggcagtaaatcaaatg

SEQ ID NO: 2039698 - DNA, 25 bp, Homo sapien
cccagacatggatagggtcttggac

SEQ ID NO: 2039699 - DNA, 25 bp, Homo sapien
cagacatggatagggtcttggactc

SEQ ID NO: 2039700 - DNA, 25 bp, Homo sapien
atcccagacatggatagggtcttgg

SEQ ID NO: 2039701 - DNA, 25 bp, Homo sapien
gacatggatagggtcttggactcca

SEQ ID NO: 2039702 - DNA, 25 bp, Homo sapien
ccataaatggtttcttgacaaagga

SEQ ID NO: 2039703 - DNA, 25 bp, Homo sapien
aacatgagcatctgtgttcacagca

SEQ ID NO: 2039704 - DNA, 25 bp, Homo sapien
tcttgacaaaggaaacatgagcatc

SEQ ID NO: 2039705 - DNA, 25 bp, Homo sapien
tgcacctcctcactgttagcgatct

SEQ ID NO: 2039706 - DNA, 25 bp, Homo sapien
ctgtcactgtctatgttttccaaat

SEQ ID NO: 2039707 - DNA, 25 bp, Homo sapien
gtcactgtctatgttttccaaatgg

SEQ ID NO: 2039708 - DNA, 25 bp, Homo sapien
tgtcactgtctatgttttccaaatg

SEQ ID NO: 2039709 - DNA, 25 bp, Homo sapien
tcctgatggcctgcagattcaagaa

SEQ ID NO: 2039710 - DNA, 25 bp, Homo sapien
gtttcttctcctgatggcctgcaga

SEQ ID NO: 2039711 - DNA, 25 bp, Homo sapien
ctggtttcttctcctgatggcctgc

SEQ ID NO: 2039712 - DNA, 25 bp, Homo sapien
tctcctgatggcctgcagattcaag

SEQ ID NO: 2039713 - DNA, 25 bp, Homo sapien
tgattcacagtgtggtaggccagct

SEQ ID NO: 2039714 - DNA, 25 bp, Homo sapien
gtgattcacagtgtggtaggccagc

SEQ ID NO: 2039715 - DNA, 25 bp, Homo sapien
ggcggtgattcacagtgtggtaggc

SEQ ID NO: 2039716 - DNA, 25 bp, Homo sapien
cggtgattcacagtgtggtaggcca

SEQ ID NO: 2039717 - DNA, 25 bp, Homo sapien
gactaggatcaaggtaggtcacatc

SEQ ID NO: 2039718 - DNA, 25 bp, Homo sapien
ctaggatcaaggtaggtcacatcat

SEQ ID NO: 2039719 - DNA, 25 bp, Homo sapien
gcagactaggatcaaggtaggtcac

SEQ ID NO: 2039720 - DNA, 25 bp, Homo sapien
cagactaggatcaaggtaggtcaca

SEQ ID NO: 2039721 - DNA, 25 bp, Homo sapien
aagtggcctggagtcatgagcatga

SEQ ID NO: 2039722 - DNA, 25 bp, Homo sapien
tgtcagacagaaagtggcctggagt

SEQ ID NO: 2039723 - DNA, 25 bp, Homo sapien
ggcctggagtcatgagcatgatggt

SEQ ID NO: 2039724 - DNA, 25 bp, Homo sapien
acagaaagtggcctggagtcatgag

SEQ ID NO: 2039725 - DNA, 25 bp, Homo sapien
ctgctgtacctcagcaataagtggc

SEQ ID NO: 2039726 - DNA, 25 bp, Homo sapien
ggtgttggatctctggccttggaaa

SEQ ID NO: 2039727 - DNA, 25 bp, Homo sapien
tcagcaataagtggcagagacgtgg

SEQ ID NO: 2039728 - DNA, 25 bp, Homo sapien
gctactggagaaggagccctccctt

SEQ ID NO: 2039729 - DNA, 25 bp, Homo sapien
gactacactgcatatgatgagttca

SEQ ID NO: 2039730 - DNA, 25 bp, Homo sapien
tggcatccagtatgagtctccaagt

SEQ ID NO: 2039731 - DNA, 25 bp, Homo sapien
agttcaaccactacatggcatccag

SEQ ID NO: 2039732 - DNA, 25 bp, Homo sapien
gcaacaaattcacaataccacatgt

SEQ ID NO: 2039733 - DNA, 25 bp, Homo sapien
ctggaccattcttccctgtagtggc

SEQ ID NO: 2039734 - DNA, 25 bp, Homo sapien
gaccattcttccctgtagtggcctc

SEQ ID NO: 2039735 - DNA, 25 bp, Homo sapien
tggcctcctttgcctgaatgtagct

SEQ ID NO: 2039736 - DNA, 25 bp, Homo sapien
cattcttccctgtagtggcctcctt

SEQ ID NO: 2039737 - DNA, 25 bp, Homo sapien
agagagtaagaacactctgagcaag

SEQ ID NO: 2039738 - DNA, 25 bp, Homo sapien
ttccgcctactcaacaggttattga

SEQ ID NO: 2039739 - DNA, 25 bp, Homo sapien
tggagtctcctggaacaatggcact

SEQ ID NO: 2039740 - DNA, 25 bp, Homo sapien
gctggagtctcctggaacaatggca

SEQ ID NO: 2039741 - DNA, 25 bp, Homo sapien
ccagctggagtctcctggaacaatg

SEQ ID NO: 2039742 - DNA, 25 bp, Homo sapien
caaggtgagcctctaacactaccac

SEQ ID NO: 2039743 - DNA, 25 bp, Homo sapien
cagtgaccagcatgacaaggtgagc

SEQ ID NO: 2039744 - DNA, 25 bp, Homo sapien
agttgtgcctttgccgaaaccagcc

SEQ ID NO: 2039745 - DNA, 25 bp, Homo sapien
gacctagccagaggccagtttcagc

SEQ ID NO: 2039746 - DNA, 25 bp, Homo sapien
tcatgcctggacacaaggatcacca

SEQ ID NO: 2039747 - DNA, 25 bp, Homo sapien
cgggatggtctgagcagcccttttc

SEQ ID NO: 2039748 - DNA, 25 bp, Homo sapien
acccagcacatgaccagacagtagc

SEQ ID NO: 2039749 - DNA, 25 bp, Homo sapien
tgggttacacgtccacagcagggtt

SEQ ID NO: 2039750 - DNA, 25 bp, Homo sapien
ccctggataatgtcagagtaaaaaa

SEQ ID NO: 2039751 - DNA, 25 bp, Homo sapien
ggataatgtcagagtaaaaaatact

SEQ ID NO: 2039752 - DNA, 25 bp, Homo sapien
gaagacatccctggataatgtcaga

SEQ ID NO: 2039753 - DNA, 25 bp, Homo sapien
catccctggataatgtcagagtaaa

SEQ ID NO: 2039754 - DNA, 25 bp, Homo sapien
tgcagcagtaatggcaaaagggctc

SEQ ID NO: 2039755 - DNA, 25 bp, Homo sapien
aaagggctctcagttgcctctggga

SEQ ID NO: 2039756 - DNA, 25 bp, Homo sapien
agctgggacccctgtctagtgaaga

SEQ ID NO: 2039757 - DNA, 25 bp, Homo sapien
tgggcttctctccaactggtggctg

SEQ ID NO: 2039758 - DNA, 25 bp, Homo sapien
gagtttatcttttcagtagtctgtg

SEQ ID NO: 2039759 - DNA, 25 bp, Homo sapien
gtctgtgctttgatgagctgaatat

SEQ ID NO: 2039760 - DNA, 25 bp, Homo sapien
ggaacaggtgaatacagaacttctt

SEQ ID NO: 2039761 - DNA, 25 bp, Homo sapien
gactgactgagactccatttcgttg

SEQ ID NO: 2039762 - DNA, 25 bp, Homo sapien
tctctctctgtagtaagaatgttcc

SEQ ID NO: 2039763 - DNA, 25 bp, Homo sapien
tcccgcttttaggtattggctgaag

SEQ ID NO: 2039764 - DNA, 25 bp, Homo sapien
agaatgttcccgcttttaggtattg

SEQ ID NO: 2039765 - DNA, 25 bp, Homo sapien
gtgaaaagtttatggaacattccat

SEQ ID NO: 2039766 - DNA, 25 bp, Homo sapien
cagcgattagctcgtttttcattta

SEQ ID NO: 2039767 - DNA, 25 bp, Homo sapien
gctcctctgattcaggatcacttat

SEQ ID NO: 2039768 - DNA, 25 bp, Homo sapien
tacacattggcattaacactttttg

SEQ ID NO: 2039769 - DNA, 25 bp, Homo sapien
tcatcactcagcatatacacattgg

SEQ ID NO: 2039770 - DNA, 25 bp, Homo sapien
gcaggagaatgtgagaacccatgag

SEQ ID NO: 2039771 - DNA, 25 bp, Homo sapien
gagaatgtgagaacccatgaggcag

SEQ ID NO: 2039772 - DNA, 25 bp, Homo sapien
gagggttccatcacgatccttttgc

SEQ ID NO: 2039773 - DNA, 25 bp, Homo sapien
ttgagggttccatcacgatcctttt

SEQ ID NO: 2039774 - DNA, 25 bp, Homo sapien
catcacgatccttttgcatagtttg

SEQ ID NO: 2039775 - DNA, 25 bp, Homo sapien
gttccatcacgatccttttgcatag

SEQ ID NO: 2039776 - DNA, 25 bp, Homo sapien
gggtagaatcccatgcatgagaagg

SEQ ID NO: 2039777 - DNA, 25 bp, Homo sapien
tcacagcatagtgcagagatgtcct

SEQ ID NO: 2039778 - DNA, 25 bp, Homo sapien
tatagtctcccatttaggtacaagc

SEQ ID NO: 2039779 - DNA, 25 bp, Homo sapien
ggtacaagcctagacagacaggaac

SEQ ID NO: 2039780 - DNA, 25 bp, Homo sapien
ggtgtgtcatccgtgaagaggcgct

SEQ ID NO: 2039781 - DNA, 25 bp, Homo sapien
atggtgtgtcatccgtgaagaggcg

SEQ ID NO: 2039782 - DNA, 25 bp, Homo sapien
tggtgtgtcatccgtgaagaggcgc

SEQ ID NO: 2039783 - DNA, 25 bp, Homo sapien
ggtgtgtcatccgtgaagaggcgct

SEQ ID NO: 2039784 - DNA, 25 bp, Homo sapien
atggtgtgtcatccgtgaagaggcg

SEQ ID NO: 2039785 - DNA, 25 bp, Homo sapien
tggtgtgtcatccgtgaagaggcgc

SEQ ID NO: 2039786 - DNA, 25 bp, Homo sapien
cacctcccagacattgggtggccag

SEQ ID NO: 2039787 - DNA, 25 bp, Homo sapien
gatggggcagccgggaagaggcact

SEQ ID NO: 2039788 - DNA, 25 bp, Homo sapien
tccccacttcccagacaaggtggcc

SEQ ID NO: 2039789 - DNA, 25 bp, Homo sapien
ggccgggcagaggcgttactcacct

SEQ ID NO: 2039790 - DNA, 25 bp, Homo sapien
taggaatgcttttactacagctagg

SEQ ID NO: 2039791 - DNA, 25 bp, Homo sapien
actacagctaggtcccctcgtacat

SEQ ID NO: 2039792 - DNA, 25 bp, Homo sapien
tttactacagctaggtcccctcgta

SEQ ID NO: 2039793 - DNA, 25 bp, Homo sapien
taggtcccctcgtacatctttatgt

SEQ ID NO: 2039794 - DNA, 25 bp, Homo sapien
tcctcttagaggaatccccttttga

SEQ ID NO: 2039795 - DNA, 25 bp, Homo sapien
ttgtgtgtccatttagctgaggcat

SEQ ID NO: 2039796 - DNA, 25 bp, Homo sapien
taagttattgccataggaagaacgt

SEQ ID NO: 2039797 - DNA, 25 bp, Homo sapien
ccataggaagaacgtgggctgtttt

SEQ ID NO: 2039798 - DNA, 25 bp, Homo sapien
tcctcattcattgcaagatagaatt

SEQ ID NO: 2039799 - DNA, 25 bp, Homo sapien
ctttgcgtagagttttccttcctca

SEQ ID NO: 2039800 - DNA, 25 bp, Homo sapien
cctttgattgccacaatcccaactg

SEQ ID NO: 2039801 - DNA, 25 bp, Homo sapien
tagaattcactttccacccctttga

SEQ ID NO: 2039802 - DNA, 25 bp, Homo sapien
tgccacatcccaggtaaggatcata

SEQ ID NO: 2039803 - DNA, 25 bp, Homo sapien
tgggctgctcttgattccctctgcc

SEQ ID NO: 2039804 - DNA, 25 bp, Homo sapien
gggctgctcttgattccctctgcca

SEQ ID NO: 2039805 - DNA, 25 bp, Homo sapien
catcccaggtaaggatcataagcag

SEQ ID NO: 2039806 - DNA, 25 bp, Homo sapien
ggaactgaagtgttttcactaactg

SEQ ID NO: 2039807 - DNA, 25 bp, Homo sapien
cccatggggaactgaagtgttttca

SEQ ID NO: 2039808 - DNA, 25 bp, Homo sapien
gccctggtcccatggggaactgaag

SEQ ID NO: 2039809 - DNA, 25 bp, Homo sapien
aactgaagtgttttcactaactgcc

SEQ ID NO: 2039810 - DNA, 25 bp, Homo sapien
tgccagagttgacatcgacattttg

SEQ ID NO: 2039811 - DNA, 25 bp, Homo sapien
agcaggagctgtccggaaatgtcca

SEQ ID NO: 2039812 - DNA, 25 bp, Homo sapien
acatgggaagcactgagctggcctg

SEQ ID NO: 2039813 - DNA, 25 bp, Homo sapien
tgaacttctgacaagagagccaggg

SEQ ID NO: 2039814 - DNA, 25 bp, Homo sapien
cacattttggtgatctctgcggcag

SEQ ID NO: 2039815 - DNA, 25 bp, Homo sapien
cggcagcgaggaagaccacattttg

SEQ ID NO: 2039816 - DNA, 25 bp, Homo sapien
cagcggcagagttagcccaacacgg

SEQ ID NO: 2039817 - DNA, 25 bp, Homo sapien
ggcagttggagtcccggtttcctga

SEQ ID NO: 2039818 - DNA, 25 bp, Homo sapien
cagttttcttacagggatggagtcc

SEQ ID NO: 2039819 - DNA, 25 bp, Homo sapien
cacagcatccatggccttaggcgaa

SEQ ID NO: 2039820 - DNA, 25 bp, Homo sapien
tacagccccttttgatagctcagaa

SEQ ID NO: 2039821 - DNA, 25 bp, Homo sapien
tgctccctgcgcatggaacataaaa

SEQ ID NO: 2039822 - DNA, 25 bp, Homo sapien
ctctgacctcctagagaggaggctg

SEQ ID NO: 2039823 - DNA, 25 bp, Homo sapien
gggaatgacagtggggctgtagcct

SEQ ID NO: 2039824 - DNA, 25 bp, Homo sapien
tgcagtgcaggccatcaaggggaca

SEQ ID NO: 2039825 - DNA, 25 bp, Homo sapien
aggaccactaaccaggtgcctgtgt

SEQ ID NO: 2039826 - DNA, 25 bp, Homo sapien
gaggaggcattcaaaggtagactca

SEQ ID NO: 2039827 - DNA, 25 bp, Homo sapien
tcaaaggtagactcatgaaatggag

SEQ ID NO: 2039828 - DNA, 25 bp, Homo sapien
ctcgaggaggcattcaaaggtagac

SEQ ID NO: 2039829 - DNA, 25 bp, Homo sapien
ggcattcaaaggtagactcatgaaa

SEQ ID NO: 2039830 - DNA, 25 bp, Homo sapien
tctgcctgagttggcgttctgagga

SEQ ID NO: 2039831 - DNA, 25 bp, Homo sapien
cttggatctgacagcactgtggaca

SEQ ID NO: 2039832 - DNA, 25 bp, Homo sapien
tggcatcagactagacacagactgg

SEQ ID NO: 2039833 - DNA, 25 bp, Homo sapien
agcaatctgacagcgctgcggacag

SEQ ID NO: 2039834 - DNA, 25 bp, Homo sapien
gctatcgttaagaggaactgtccca

SEQ ID NO: 2039835 - DNA, 25 bp, Homo sapien
tgtgaactcggcagctcaagacaac

SEQ ID NO: 2039836 - DNA, 25 bp, Homo sapien
tagtgctccactgcagaacatgtga

SEQ ID NO: 2039837 - DNA, 25 bp, Homo sapien
gattcctgaatgtacaaccgagcca

SEQ ID NO: 2039838 - DNA, 25 bp, Homo sapien
ttcagctcaacaagcaaaacccaag

SEQ ID NO: 2039839 - DNA, 25 bp, Homo sapien
ctcaacaagcaaaacccaagagccc

SEQ ID NO: 2039840 - DNA, 25 bp, Homo sapien
attcagctcaacaagcaaaacccaa

SEQ ID NO: 2039841 - DNA, 25 bp, Homo sapien
cagctcaacaagcaaaacccaagag

SEQ ID NO: 2039842 - DNA, 25 bp, Homo sapien
atccctagctgaagcgacgctctct

SEQ ID NO: 2039843 - DNA, 25 bp, Homo sapien
tcagatccctagctgaagcgacgct

SEQ ID NO: 2039844 - DNA, 25 bp, Homo sapien
gactaatcagatccctagctgaagc

SEQ ID NO: 2039845 - DNA, 25 bp, Homo sapien
gcatgactaatcagatccctagctg

SEQ ID NO: 2039846 - DNA, 25 bp, Homo sapien
taccctagccaagctgcaggagtgt

SEQ ID NO: 2039847 - DNA, 25 bp, Homo sapien
tcagatgtgacgtgcagactccgat

SEQ ID NO: 2039848 - DNA, 25 bp, Homo sapien
gctgctggcacgtggacaactcttt

SEQ ID NO: 2039849 - DNA, 25 bp, Homo sapien
gagactgttcctggtccccgagatt

SEQ ID NO: 2039850 - DNA, 25 bp, Homo sapien
aatttacaataaaccctgcaaatct

SEQ ID NO: 2039851 - DNA, 25 bp, Homo sapien
caaatttacaataaaccctgcaaat

SEQ ID NO: 2039852 - DNA, 25 bp, Homo sapien
atttacaataaaccctgcaaatctg

SEQ ID NO: 2039853 - DNA, 25 bp, Homo sapien
ttgcctgattccccgcttcttgttt

SEQ ID NO: 2039854 - DNA, 25 bp, Homo sapien
ccttgcctgattccccgcttcttgt

SEQ ID NO: 2039855 - DNA, 25 bp, Homo sapien
cttgcctgattccccgcttcttgtt

SEQ ID NO: 2039856 - DNA, 25 bp, Homo sapien
tgcctgattccccgcttcttgtttt

SEQ ID NO: 2039857 - DNA, 25 bp, Homo sapien
cagtcctgggcaaatgggaaaggcc

SEQ ID NO: 2039858 - DNA, 25 bp, Homo sapien
tgatttggtggttgtgttgctgtta

SEQ ID NO: 2039859 - DNA, 25 bp, Homo sapien
tatcaccttctgaagcatgcagtcc

SEQ ID NO: 2039860 - DNA, 25 bp, Homo sapien
cccagtgccaggtcatggagggctt

SEQ ID NO: 2039861 - DNA, 25 bp, Homo sapien
tcactgtggaacacctccatctccc

SEQ ID NO: 2039862 - DNA, 25 bp, Homo sapien
cctcgcagacattctcgctgcactg

SEQ ID NO: 2039863 - DNA, 25 bp, Homo sapien
tccccctcgcagacattctcgctgc

SEQ ID NO: 2039864 - DNA, 25 bp, Homo sapien
cccctcgcagacattctcgctgcac

SEQ ID NO: 2039865 - DNA, 25 bp, Homo sapien
tcgcagacattctcgctgcactggg

SEQ ID NO: 2039866 - DNA, 25 bp, Homo sapien
ggggctggacacaggtcctcctcct

SEQ ID NO: 2039867 - DNA, 25 bp, Homo sapien
ccttctgaccctgtgtattccttta

SEQ ID NO: 2039868 - DNA, 25 bp, Homo sapien
tcctccttctgaccctgtgtattcc

SEQ ID NO: 2039869 - DNA, 25 bp, Homo sapien
cacaggggctggacacaggtcctcc

SEQ ID NO: 2039870 - DNA, 25 bp, Homo sapien
gaagtgttgaggattgcctggctgc

SEQ ID NO: 2039871 - DNA, 25 bp, Homo sapien
ccctgtcgaatcctggggtgcactg

SEQ ID NO: 2039872 - DNA, 25 bp, Homo sapien
tcaggcactgggagcccttgtaggt

SEQ ID NO: 2039873 - DNA, 25 bp, Homo sapien
caggcactgggagcccttgtaggtt

SEQ ID NO: 2039874 - DNA, 25 bp, Homo sapien
agataaggtgtttggacagctgcct

SEQ ID NO: 2039875 - DNA, 25 bp, Homo sapien
gataaggtgtttggacagctgcctg

SEQ ID NO: 2039876 - DNA, 25 bp, Homo sapien
ctgggtgatttctgctcatagtcga

SEQ ID NO: 2039877 - DNA, 25 bp, Homo sapien
ctcatagtcgactctgaagaaatgg

SEQ ID NO: 2039878 - DNA, 25 bp, Homo sapien
gtctatgggctgagtccagcacagc

SEQ ID NO: 2039879 - DNA, 25 bp, Homo sapien
aggcaaatgcactgacccctgacac

SEQ ID NO: 2039880 - DNA, 25 bp, Homo sapien
gaagtctatgggctgagtccagcac

SEQ ID NO: 2039881 - DNA, 25 bp, Homo sapien
ccgaggcaaatgcactgacccctga

SEQ ID NO: 2039882 - DNA, 25 bp, Homo sapien
gaaaatagcagtgggcctgagtcct

SEQ ID NO: 2039883 - DNA, 25 bp, Homo sapien
catgaactcagagctagagggctgt

SEQ ID NO: 2039884 - DNA, 25 bp, Homo sapien
gactcttgaggaagtgacggtcacc

SEQ ID NO: 2039885 - DNA, 25 bp, Homo sapien
tgtgccatgcagaaacttccctgtg

SEQ ID NO: 2039886 - DNA, 25 bp, Homo sapien
ctgttggggatgaaaggtgtctgcc

SEQ ID NO: 2039887 - DNA, 25 bp, Homo sapien
aagtgaaagggtccctgttcagctc

SEQ ID NO: 2039888 - DNA, 25 bp, Homo sapien
cttgaagtgaaagggtccctgttca

SEQ ID NO: 2039889 - DNA, 25 bp, Homo sapien
ggggatgaaaggtgtctgccttgaa

SEQ ID NO: 2039890 - DNA, 25 bp, Homo sapien
cttgccgggaagtcaggatcgccca

SEQ ID NO: 2039891 - DNA, 25 bp, Homo sapien
ccgggaagtcaggatcgcccaggca

SEQ ID NO: 2039892 - DNA, 25 bp, Homo sapien
gggaagtcaggatcgcccaggcagg

SEQ ID NO: 2039893 - DNA, 25 bp, Homo sapien
ttgccgggaagtcaggatcgcccag

SEQ ID NO: 2039894 - DNA, 25 bp, Homo sapien
aggaggatggcagttaggcagctca

SEQ ID NO: 2039895 - DNA, 25 bp, Homo sapien
ggaggatggcagttaggcagctcat

SEQ ID NO: 2039896 - DNA, 25 bp, Homo sapien
gaggaggatggcagttaggcagctc

SEQ ID NO: 2039897 - DNA, 25 bp, Homo sapien
aatgtgtcctgtgatggcccagagg

SEQ ID NO: 2039898 - DNA, 25 bp, Homo sapien
catggtccaaagaagcacaggcaag

SEQ ID NO: 2039899 - DNA, 25 bp, Homo sapien
aaagtctccggtagggtaggtcatg

SEQ ID NO: 2039900 - DNA, 25 bp, Homo sapien
gatcattcatgtcccctatcctggg

SEQ ID NO: 2039901 - DNA, 25 bp, Homo sapien
caccatggctggccttattttacct

SEQ ID NO: 2039902 - DNA, 25 bp, Homo sapien
tacacaagtacttaccattatgttc

SEQ ID NO: 2039903 - DNA, 25 bp, Homo sapien
ccatggctggccttattttaccttt

SEQ ID NO: 2039904 - DNA, 25 bp, Homo sapien
tttatattatatttttactgtgcct

SEQ ID NO: 2039905 - DNA, 25 bp, Homo sapien
gattcctcaaaactggccttgttgc

SEQ ID NO: 2039906 - DNA, 25 bp, Homo sapien
gtgcaaaccctgatctactactgaa

SEQ ID NO: 2039907 - DNA, 25 bp, Homo sapien
tctctaataagcctaggaagacagg

SEQ ID NO: 2039908 - DNA, 25 bp, Homo sapien
taagcaagactgattgaccatcctc

SEQ ID NO: 2039909 - DNA, 25 bp, Homo sapien
tcgggcttgccactccgcgccaggg

SEQ ID NO: 2039910 - DNA, 25 bp, Homo sapien
atgtgggtgtccggcagtggtgtca

SEQ ID NO: 2039911 - DNA, 25 bp, Homo sapien
gtgtccggcagtggtgtcaggatca

SEQ ID NO: 2039912 - DNA, 25 bp, Homo sapien
tccatgtcgggcttgccactccgcg

SEQ ID NO: 2039913 - DNA, 25 bp, Homo sapien
ccaggggcgccgcgtgtgtggccag

SEQ ID NO: 2039914 - DNA, 25 bp, Homo sapien
ggcgccgcgtgtgtggccagctcac

SEQ ID NO: 2039915 - DNA, 25 bp, Homo sapien
tgcccaggggcgccgcgtgtgtggc

SEQ ID NO: 2039916 - DNA, 25 bp, Homo sapien
aggggcgccgcgtgtgtggccagct

SEQ ID NO: 2039917 - DNA, 25 bp, Homo sapien
aaagcacaggaagttttcagctgag

SEQ ID NO: 2039918 - DNA, 25 bp, Homo sapien
ccaaagcacaggaagttttcagctg

SEQ ID NO: 2039919 - DNA, 25 bp, Homo sapien
aggccaaagcacaggaagttttcag

SEQ ID NO: 2039920 - DNA, 25 bp, Homo sapien
agcacaggaagttttcagctgagcc

SEQ ID NO: 2039921 - DNA, 25 bp, Homo sapien
gagccatgggcgagaaagcgaggtg

SEQ ID NO: 2039922 - DNA, 25 bp, Homo sapien
catgggcgagaaagcgaggtgcacc

SEQ ID NO: 2039923 - DNA, 25 bp, Homo sapien
ctgtgtgccagcagcgcgcactgga

SEQ ID NO: 2039924 - DNA, 25 bp, Homo sapien
cgcgagtccagcagttggcgcagtt

SEQ ID NO: 2039925 - DNA, 25 bp, Homo sapien
caggcagtgggctgccggctctgag

SEQ ID NO: 2039926 - DNA, 25 bp, Homo sapien
cccgcgggccgcgagtccagcagtt

SEQ ID NO: 2039927 - DNA, 25 bp, Homo sapien
ctgggggcgagtgtggcggcaccag

SEQ ID NO: 2039928 - DNA, 25 bp, Homo sapien
caggtccgtgatgagctcgtccagc

SEQ ID NO: 2039929 - DNA, 25 bp, Homo sapien
gctcgtccagctgctctaggatccg

SEQ ID NO: 2039930 - DNA, 25 bp, Homo sapien
gagctcgtccagctgctctaggatc

SEQ ID NO: 2039931 - DNA, 25 bp, Homo sapien
ggtccgtgatgagctcgtccagctg

SEQ ID NO: 2039932 - DNA, 25 bp, Homo sapien
cgtcgggggccgcatgaggaagtgg

SEQ ID NO: 2039933 - DNA, 25 bp, Homo sapien
gcatgaggaagtggccgcgtgcagc

SEQ ID NO: 2039934 - DNA, 25 bp, Homo sapien
gggggccgcatgaggaagtggccgc

SEQ ID NO: 2039935 - DNA, 25 bp, Homo sapien
ccgcatgaggaagtggccgcgtgca

SEQ ID NO: 2039936 - DNA, 25 bp, Homo sapien
cgaggtggacaggttcacgacgaca

SEQ ID NO: 2039937 - DNA, 25 bp, Homo sapien
gtcagcgacgtctcggacagggaca

SEQ ID NO: 2039938 - DNA, 25 bp, Homo sapien
acagtggggcatagcgtctgggcga

SEQ ID NO: 2039939 - DNA, 25 bp, Homo sapien
gtgggcaccagccttcgggggacac

SEQ ID NO: 2039940 - DNA, 25 bp, Homo sapien
ctcacgccccagcaggttctcatag

SEQ ID NO: 2039941 - DNA, 25 bp, Homo sapien
tctcggcacggcccggggccagaat

SEQ ID NO: 2039942 - DNA, 25 bp, Homo sapien
gcacggccccactggtctcggcacg

SEQ ID NO: 2039943 - DNA, 25 bp, Homo sapien
ctcggcacggccccactggtctcgg

SEQ ID NO: 2039944 - DNA, 25 bp, Homo sapien
cacggcccggggccagaatgttgtc

SEQ ID NO: 2039945 - DNA, 25 bp, Homo sapien
gtcggggttagaggactgcaccact

SEQ ID NO: 2039946 - DNA, 25 bp, Homo sapien
ttagaggactgcaccacttgcaggg

SEQ ID NO: 2039947 - DNA, 25 bp, Homo sapien
gtgcggtagggtcgcaggccccagt

SEQ ID NO: 2039948 - DNA, 25 bp, Homo sapien
gggttagaggactgcaccacttgca

SEQ ID NO: 2039949 - DNA, 25 bp, Homo sapien
gcgcctacgtccgagcaaggacgtc

SEQ ID NO: 2039950 - DNA, 25 bp, Homo sapien
gagcgggtgcgcctacgtccgagca

SEQ ID NO: 2039951 - DNA, 25 bp, Homo sapien
gggtgcgcctacgtccgagcaagga

SEQ ID NO: 2039952 - DNA, 25 bp, Homo sapien
gtgcgcctacgtccgagcaaggacg

SEQ ID NO: 2039953 - DNA, 25 bp, Homo sapien
ccgtgcaccttggactgggccctgg

SEQ ID NO: 2039954 - DNA, 25 bp, Homo sapien
ggactggccgcaaagctgccccgga

SEQ ID NO: 2039955 - DNA, 25 bp, Homo sapien
cagtaggcgtcgaaggttggaccgg

SEQ ID NO: 2039956 - DNA, 25 bp, Homo sapien
gagctcctccgacggatagggcctg

SEQ ID NO: 2039957 - DNA, 25 bp, Homo sapien
gtcgcagtagaacgcccggggatcc

SEQ ID NO: 2039958 - DNA, 25 bp, Homo sapien
cgtcgcagtagaacgcccggggatc

SEQ ID NO: 2039959 - DNA, 25 bp, Homo sapien
gcccgggcaccgtgaggccgtggaa

SEQ ID NO: 2039960 - DNA, 25 bp, Homo sapien
ggcgtcggggtgtgcgacagcgcca

SEQ ID NO: 2039961 - DNA, 25 bp, Homo sapien
ggtatgagtcgcttggcgtcggggt

SEQ ID NO: 2039962 - DNA, 25 bp, Homo sapien
gggtgtgcgacagcgccatatggcg

SEQ ID NO: 2039963 - DNA, 25 bp, Homo sapien
tcgggaggtgcgcagcggcccgcgg

SEQ ID NO: 2039964 - DNA, 25 bp, Homo sapien
aggggcgcgatgtggccggggccgc

SEQ ID NO: 2039965 - DNA, 25 bp, Homo sapien
gacccgcgggtggctcgggaggtgc

SEQ ID NO: 2039966 - DNA, 25 bp, Homo sapien
cggcggcgcacaggggcgcgatgtg

SEQ ID NO: 2039967 - DNA, 25 bp, Homo sapien
caacacctgcagcaaggcgggcgcg

SEQ ID NO: 2039968 - DNA, 25 bp, Homo sapien
ctgggcaacacctgcagcaaggcgg

SEQ ID NO: 2039969 - DNA, 25 bp, Homo sapien
ctcggctgggcaacacctgcagcaa

SEQ ID NO: 2039970 - DNA, 25 bp, Homo sapien
ggctgggcaacacctgcagcaaggc

SEQ ID NO: 2039971 - DNA, 25 bp, Homo sapien
tgtcctggtacacggtcgacaccag

SEQ ID NO: 2039972 - DNA, 25 bp, Homo sapien
cttgatgtcctggtacacggtcgac

SEQ ID NO: 2039973 - DNA, 25 bp, Homo sapien
tgatgtcctggtacacggtcgacac

SEQ ID NO: 2039974 - DNA, 25 bp, Homo sapien
cctggtacacggtcgacaccagcag

SEQ ID NO: 2039975 - DNA, 25 bp, Homo sapien
cctgggccgagaatgcaggcgcttc

SEQ ID NO: 2039976 - DNA, 25 bp, Homo sapien
agaatgcaggcgcttcctccatgcc

SEQ ID NO: 2039977 - DNA, 25 bp, Homo sapien
cgcagcgggcgtagcagccctggct

SEQ ID NO: 2039978 - DNA, 25 bp, Homo sapien
cgcttcctccatgccggagtcagaa

SEQ ID NO: 2039979 - DNA, 25 bp, Homo sapien
aggtgttgccccacgagacgtcagt

SEQ ID NO: 2039980 - DNA, 25 bp, Homo sapien
tccgatcgtgcacagtcgaaggcga

SEQ ID NO: 2039981 - DNA, 25 bp, Homo sapien
cgcatttgggccttatttataggtg

SEQ ID NO: 2039982 - DNA, 25 bp, Homo sapien
gcagcttgaaggacgggccgcattt

SEQ ID NO: 2039983 - DNA, 25 bp, Homo sapien
cggcagtcccaaaccatcgagccac

SEQ ID NO: 2039984 - DNA, 25 bp, Homo sapien
acggcagtcccaaaccatcgagcca

SEQ ID NO: 2039985 - DNA, 25 bp, Homo sapien
agacctcagtgtctaagcaggagtc

SEQ ID NO: 2039986 - DNA, 25 bp, Homo sapien
acacagacctcagtgtctaagcagg

SEQ ID NO: 2039987 - DNA, 25 bp, Homo sapien
cagacctcagtgtctaagcaggagt

SEQ ID NO: 2039988 - DNA, 25 bp, Homo sapien
acagacctcagtgtctaagcaggag

SEQ ID NO: 2039989 - DNA, 25 bp, Homo sapien
ggccaggctcctaagcttgctgtgg

SEQ ID NO: 2039990 - DNA, 25 bp, Homo sapien
ggctcctaagcttgctgtgggccac

SEQ ID NO: 2039991 - DNA, 25 bp, Homo sapien
ctcctaagcttgctgtgggccacag

SEQ ID NO: 2039992 - DNA, 25 bp, Homo sapien
caggctcctaagcttgctgtgggcc

SEQ ID NO: 2039993 - DNA, 25 bp, Homo sapien
agggactgcagtgattgccccacac

SEQ ID NO: 2039994 - DNA, 25 bp, Homo sapien
ttctcatggcaacagtagctgtggg

SEQ ID NO: 2039995 - DNA, 25 bp, Homo sapien
ccgccctgcagggttctcatggcaa

SEQ ID NO: 2039996 - DNA, 25 bp, Homo sapien
cagggttctcatggcaacagtagct

SEQ ID NO: 2039997 - DNA, 25 bp, Homo sapien
cccttcactggcacactcttcctgc

SEQ ID NO: 2039998 - DNA, 25 bp, Homo sapien
tcggggtcatccatgacgaaggaca

SEQ ID NO: 2039999 - DNA, 25 bp, Homo sapien
cgctctcaaagtcggggtcatccat

SEQ ID NO: 2040000 - DNA, 25 bp, Homo sapien
cctcgctctcaaagtcggggtcatc

SEQ ID NO: 2040001 - DNA, 25 bp, Homo sapien
catccatgacgaaggacagcatttg

SEQ ID NO: 2040002 - DNA, 25 bp, Homo sapien
acccttccctggctcaatctcagca

SEQ ID NO: 2040003 - DNA, 25 bp, Homo sapien
cctggtgctgctgcacttctccaga

SEQ ID NO: 2040004 - DNA, 25 bp, Homo sapien
ctcaatctcagcagggggcctggtg

SEQ ID NO: 2040005 - DNA, 25 bp, Homo sapien
ctggtgctgctgcacttctccagac

SEQ ID NO: 2040006 - DNA, 25 bp, Homo sapien
tgggggatccgccacttctgcttcc

SEQ ID NO: 2040007 - DNA, 25 bp, Homo sapien
ttttgggggatccgccacttctgct

SEQ ID NO: 2040008 - DNA, 25 bp, Homo sapien
ccttttgggggatccgccacttctg

SEQ ID NO: 2040009 - DNA, 25 bp, Homo sapien
gcagggccttttgggggatccgcca

SEQ ID NO: 2040010 - DNA, 25 bp, Homo sapien
gagtgatgtcttgactggggacagg

SEQ ID NO: 2040011 - DNA, 25 bp, Homo sapien
tgatgtcttgactggggacagggcc

SEQ ID NO: 2040012 - DNA, 25 bp, Homo sapien
ttgaaagagtgatgtcttgactggg

SEQ ID NO: 2040013 - DNA, 25 bp, Homo sapien
aagagtgatgtcttgactggggaca

SEQ ID NO: 2040014 - DNA, 25 bp, Homo sapien
gtggctggtctttgaggtccacatc

SEQ ID NO: 2040015 - DNA, 25 bp, Homo sapien
tggaaccctgccaccatcgggttgc

SEQ ID NO: 2040016 - DNA, 25 bp, Homo sapien
cacatcgtcctggaaccctgccacc

SEQ ID NO: 2040017 - DNA, 25 bp, Homo sapien
ggtctttgaggtccacatcgtcctg

SEQ ID NO: 2040018 - DNA, 25 bp, Homo sapien
gccttggttccaggcaccctggtac

SEQ ID NO: 2040019 - DNA, 25 bp, Homo sapien
tggttccaggcaccctggtacccag

SEQ ID NO: 2040020 - DNA, 25 bp, Homo sapien
ttccaggcaccctggtacccagcac

SEQ ID NO: 2040021 - DNA, 25 bp, Homo sapien
aggccttggttccaggcaccctggt

SEQ ID NO: 2040022 - DNA, 25 bp, Homo sapien
ccccaggtgctgtgttgtagtggag

SEQ ID NO: 2040023 - DNA, 25 bp, Homo sapien
aggccccctcatggccgtcacaggg

SEQ ID NO: 2040024 - DNA, 25 bp, Homo sapien
ggtgctgtgttgtagtggagaggcc

SEQ ID NO: 2040025 - DNA, 25 bp, Homo sapien
gtgttgtagtggagaggccccctca

SEQ ID NO: 2040026 - DNA, 25 bp, Homo sapien
ggcggtcatcgggaacaaagtcctc

SEQ ID NO: 2040027 - DNA, 25 bp, Homo sapien
catcgggaacaaagtcctccacact

SEQ ID NO: 2040028 - DNA, 25 bp, Homo sapien
ggtcatcgggaacaaagtcctccac

SEQ ID NO: 2040029 - DNA, 25 bp, Homo sapien
ggtccaggcggtcatcgggaacaaa

SEQ ID NO: 2040030 - DNA, 25 bp, Homo sapien
tgggtcctcttcactcggcaccaga

SEQ ID NO: 2040031 - DNA, 25 bp, Homo sapien
tgctgggtcctcttcactcggcacc

SEQ ID NO: 2040032 - DNA, 25 bp, Homo sapien
agtgatgctgggtcctcttcactcg

SEQ ID NO: 2040033 - DNA, 25 bp, Homo sapien
gatgctgggtcctcttcactcggca

SEQ ID NO: 2040034 - DNA, 25 bp, Homo sapien
gcccacccgggatgtgcccatggga

SEQ ID NO: 2040035 - DNA, 25 bp, Homo sapien
agcgcggagcgctccgaaatccagg

SEQ ID NO: 2040036 - DNA, 25 bp, Homo sapien
tgcccatgggactgggacaagcagg

SEQ ID NO: 2040037 - DNA, 25 bp, Homo sapien
caagcaggaagaagcgcggagcgct

SEQ ID NO: 2040038 - DNA, 25 bp, Homo sapien
gtgacgtcccaaacagcctagagat

SEQ ID NO: 2040039 - DNA, 25 bp, Homo sapien
gacgtcccaaacagcctagagatga

SEQ ID NO: 2040040 - DNA, 25 bp, Homo sapien
ggcaggtgacgtcccaaacagccta

SEQ ID NO: 2040041 - DNA, 25 bp, Homo sapien
aggtgacgtcccaaacagcctagag

SEQ ID NO: 2040042 - DNA, 25 bp, Homo sapien
tgctgctgatgagactgtgaagagc

SEQ ID NO: 2040043 - DNA, 25 bp, Homo sapien
aggatggactctgccccttggccgc

SEQ ID NO: 2040044 - DNA, 25 bp, Homo sapien
cagcacctgtgttggctgtgaacac

SEQ ID NO: 2040045 - DNA, 25 bp, Homo sapien
tggccatgactgtgagcctccatca

SEQ ID NO: 2040046 - DNA, 25 bp, Homo sapien
aatctggatgtgatctgtgatgctc

SEQ ID NO: 2040047 - DNA, 25 bp, Homo sapien
aggaatctggatgtgatctgtgatg

SEQ ID NO: 2040048 - DNA, 25 bp, Homo sapien
atgtgatctgtgatgctctctccgc

SEQ ID NO: 2040049 - DNA, 25 bp, Homo sapien
ggatgtgatctgtgatgctctctcc

SEQ ID NO: 2040050 - DNA, 25 bp, Homo sapien
ccctcctgggcaaatcgccagtgtg

SEQ ID NO: 2040051 - DNA, 25 bp, Homo sapien
ggccctcctgggcaaatcgccagtg

SEQ ID NO: 2040052 - DNA, 25 bp, Homo sapien
tcctgggcaaatcgccagtgtgggt

SEQ ID NO: 2040053 - DNA, 25 bp, Homo sapien
gggccctcctgggcaaatcgccagt

SEQ ID NO: 2040054 - DNA, 25 bp, Homo sapien
tcagccaagtgtaagtccgtatttc

SEQ ID NO: 2040055 - DNA, 25 bp, Homo sapien
cagccaagtgtaagtccgtatttcc

SEQ ID NO: 2040056 - DNA, 25 bp, Homo sapien
gccaagtgtaagtccgtatttccaa

SEQ ID NO: 2040057 - DNA, 25 bp, Homo sapien
agccaagtgtaagtccgtatttcca

SEQ ID NO: 2040058 - DNA, 25 bp, Homo sapien
cattcctcagtcatctggttatcct

SEQ ID NO: 2040059 - DNA, 25 bp, Homo sapien
caacattcctcagtcatctggttat

SEQ ID NO: 2040060 - DNA, 25 bp, Homo sapien
gtcatctggttatcctggaacctgt

SEQ ID NO: 2040061 - DNA, 25 bp, Homo sapien
cctcagtcatctggttatcctggaa

SEQ ID NO: 2040062 - DNA, 25 bp, Homo sapien
gcaggacggtgatgttcagaggaga

SEQ ID NO: 2040063 - DNA, 25 bp, Homo sapien
acggtgatgttcagaggagaggttg

SEQ ID NO: 2040064 - DNA, 25 bp, Homo sapien
aactgcaggacggtgatgttcagag

SEQ ID NO: 2040065 - DNA, 25 bp, Homo sapien
aaaactgcaggacggtgatgttcag

SEQ ID NO: 2040066 - DNA, 25 bp, Homo sapien
tactagcgtcctgtacccgcaggtc

SEQ ID NO: 2040067 - DNA, 25 bp, Homo sapien
cgtcctgtacccgcaggtccctcat

SEQ ID NO: 2040068 - DNA, 25 bp, Homo sapien
agcgtcctgtacccgcaggtccctc

SEQ ID NO: 2040069 - DNA, 25 bp, Homo sapien
ctagcgtcctgtacccgcaggtccc

SEQ ID NO: 2040070 - DNA, 25 bp, Homo sapien
cgtggatcccccgtaggaactgtgt

SEQ ID NO: 2040071 - DNA, 25 bp, Homo sapien
aggaactgtgtgaccgctccttagg

SEQ ID NO: 2040072 - DNA, 25 bp, Homo sapien
actgtgtgaccgctccttaggctct

SEQ ID NO: 2040073 - DNA, 25 bp, Homo sapien
tgaccgctccttaggctctctgtgc

SEQ ID NO: 2040074 - DNA, 25 bp, Homo sapien
caccaacgtgatccaaagaaaattt

SEQ ID NO: 2040075 - DNA, 25 bp, Homo sapien
tagcaggtctcacaccaacgtgatc

SEQ ID NO: 2040076 - DNA, 25 bp, Homo sapien
agtgacatagcaggtctcacaccaa

SEQ ID NO: 2040077 - DNA, 25 bp, Homo sapien
aaacccttcttcaactccatcagtg

SEQ ID NO: 2040078 - DNA, 25 bp, Homo sapien
cttatctgggtttgttccagacact

SEQ ID NO: 2040079 - DNA, 25 bp, Homo sapien
tccagacacttccttatggtatggc

SEQ ID NO: 2040080 - DNA, 25 bp, Homo sapien
ccagacacttccttatggtatggca

SEQ ID NO: 2040081 - DNA, 25 bp, Homo sapien
atctgggtttgttccagacacttcc

SEQ ID NO: 2040082 - DNA, 25 bp, Homo sapien
gaaaggaagactgtctatgctgaag

SEQ ID NO: 2040083 - DNA, 25 bp, Homo sapien
gattgttggataccattctaggcct

SEQ ID NO: 2040084 - DNA, 25 bp, Homo sapien
tctatgctgaaggattgttggatac

SEQ ID NO: 2040085 - DNA, 25 bp, Homo sapien
ggttgaggtatcaagcacctctaag

SEQ ID NO: 2040086 - DNA, 25 bp, Homo sapien
ctcagaggtttcatcattgctattg

SEQ ID NO: 2040087 - DNA, 25 bp, Homo sapien
gctattgttgtcgatattgctgtta

SEQ ID NO: 2040088 - DNA, 25 bp, Homo sapien
catcattgctattgttgtcgatatt

SEQ ID NO: 2040089 - DNA, 25 bp, Homo sapien
gatattgctgttaattaaaactgta

SEQ ID NO: 2040090 - DNA, 25 bp, Homo sapien
tagaggagaaacttagagcagcacc

SEQ ID NO: 2040091 - DNA, 25 bp, Homo sapien
gctgcggtagttatttacctgaatt

SEQ ID NO: 2040092 - DNA, 25 bp, Homo sapien
aggagaaacttagagcagcaccact

SEQ ID NO: 2040093 - DNA, 25 bp, Homo sapien
tccactagaggagaaacttagagca

SEQ ID NO: 2040094 - DNA, 25 bp, Homo sapien
cttctgttctatgataatctttcat

SEQ ID NO: 2040095 - DNA, 25 bp, Homo sapien
ccctctagcagtgtccagtttctat

SEQ ID NO: 2040096 - DNA, 25 bp, Homo sapien
gttggtggtacggttgagaccatct

SEQ ID NO: 2040097 - DNA, 25 bp, Homo sapien
tacggttgagaccatctcccaggta

SEQ ID NO: 2040098 - DNA, 25 bp, Homo sapien
tgtttaactcccatttacacgtgag

SEQ ID NO: 2040099 - DNA, 25 bp, Homo sapien
cacactttcatttttgttggccgat

SEQ ID NO: 2040100 - DNA, 25 bp, Homo sapien
cattcgtcttttccctgcaatcagc

SEQ ID NO: 2040101 - DNA, 25 bp, Homo sapien
ccgtaagttcccctgactgcacata

SEQ ID NO: 2040102 - DNA, 25 bp, Homo sapien
tctcttggatggtagttgtgtcagc

SEQ ID NO: 2040103 - DNA, 25 bp, Homo sapien
cagaagtgtgagaaggctacattcc

SEQ ID NO: 2040104 - DNA, 25 bp, Homo sapien
gatcttacagcctcaagaagtgtga

SEQ ID NO: 2040105 - DNA, 25 bp, Homo sapien
gaatttgtgagcatcttgacctgag

SEQ ID NO: 2040106 - DNA, 25 bp, Homo sapien
gaaggaggaatatcactgagctcac

SEQ ID NO: 2040107 - DNA, 25 bp, Homo sapien
caaacccagaatttctaatatttgc

SEQ ID NO: 2040108 - DNA, 25 bp, Homo sapien
ctaatatttgcggtcttccttcctt

SEQ ID NO: 2040109 - DNA, 25 bp, Homo sapien
tggcagatactctttcaagtgaaaa

SEQ ID NO: 2040110 - DNA, 25 bp, Homo sapien
aagatatccaatcttcaatggcaga

SEQ ID NO: 2040111 - DNA, 25 bp, Homo sapien
tgcactggttcccaggttcttggca

SEQ ID NO: 2040112 - DNA, 25 bp, Homo sapien
gcactggttcccaggttcttggcat

SEQ ID NO: 2040113 - DNA, 25 bp, Homo sapien
catggtacatctaaatgtatgttta

SEQ ID NO: 2040114 - DNA, 25 bp, Homo sapien
gtacatggtacatctaaatgtatgt

SEQ ID NO: 2040115 - DNA, 25 bp, Homo sapien
aaattacaatggtacatggtacatc

SEQ ID NO: 2040116 - DNA, 25 bp, Homo sapien
tacaatggtacatggtacatctaaa

SEQ ID NO: 2040117 - DNA, 25 bp, Homo sapien
cagatccacaaaggttcattagtag

SEQ ID NO: 2040118 - DNA, 25 bp, Homo sapien
tgcacaatgtggacagaatcatgaa

SEQ ID NO: 2040119 - DNA, 25 bp, Homo sapien
catggaatatacagtgagaaagtgc

SEQ ID NO: 2040120 - DNA, 25 bp, Homo sapien
gaactcatcagattagacatggcca

SEQ ID NO: 2040121 - DNA, 25 bp, Homo sapien
agtcaactattactttgttctcgtt

SEQ ID NO: 2040122 - DNA, 25 bp, Homo sapien
taagtcaactattactttgttctcg

SEQ ID NO: 2040123 - DNA, 25 bp, Homo sapien
aagtcaactattactttgttctcgt

SEQ ID NO: 2040124 - DNA, 25 bp, Homo sapien
atggctggctaagtctacagggata

SEQ ID NO: 2040125 - DNA, 25 bp, Homo sapien
ataccagcctctcttcaaccaccca

SEQ ID NO: 2040126 - DNA, 25 bp, Homo sapien
cagcctctcttcaaccacccaattt

SEQ ID NO: 2040127 - DNA, 25 bp, Homo sapien
tcatggctggctaagtctacaggga

SEQ ID NO: 2040128 - DNA, 25 bp, Homo sapien
catgacatacaccagatggctctcc

SEQ ID NO: 2040129 - DNA, 25 bp, Homo sapien
agctaggaaagcaaacccatttgct

SEQ ID NO: 2040130 - DNA, 25 bp, Homo sapien
gacccctgagccaccctccgcagct

SEQ ID NO: 2040131 - DNA, 25 bp, Homo sapien
ggagcgacccctgagccaccctccg

SEQ ID NO: 2040132 - DNA, 25 bp, Homo sapien
cagcacccggctgggagcgacccct

SEQ ID NO: 2040133 - DNA, 25 bp, Homo sapien
ggctgggagcgacccctgagccacc

SEQ ID NO: 2040134 - DNA, 25 bp, Homo sapien
tcttctctcccatcgcctccgcgcg

SEQ ID NO: 2040135 - DNA, 25 bp, Homo sapien
ttctctcccatcgcctccgcgcgca

SEQ ID NO: 2040136 - DNA, 25 bp, Homo sapien
tctcccatcgcctccgcgcgcagcg

SEQ ID NO: 2040137 - DNA, 25 bp, Homo sapien
ctctcccatcgcctccgcgcgcagc

SEQ ID NO: 2040138 - DNA, 25 bp, Homo sapien
gggtgtgatgtgataggaacagtga

SEQ ID NO: 2040139 - DNA, 25 bp, Homo sapien
gaggcgcgggcgataagccgcggcg

SEQ ID NO: 2040140 - DNA, 25 bp, Homo sapien
aagccgtgacggctgggagcaaaaa

SEQ ID NO: 2040141 - DNA, 25 bp, Homo sapien
ggtggcgctgacaaaaagccgcaaa

SEQ ID NO: 2040142 - DNA, 25 bp, Homo sapien
ctgtaaaatgcagcgttggtgtctc

SEQ ID NO: 2040143 - DNA, 25 bp, Homo sapien
gtttgctgtaaaatgcagcgttggt

SEQ ID NO: 2040144 - DNA, 25 bp, Homo sapien
tgctgtaaaatgcagcgttggtgtc

SEQ ID NO: 2040145 - DNA, 25 bp, Homo sapien
aactttagtaagttagcagaagcaa

SEQ ID NO: 2040146 - DNA, 25 bp, Homo sapien
attccaaagggaggtcacagggtct

SEQ ID NO: 2040147 - DNA, 25 bp, Homo sapien
ttccaaagggaggtcacagggtctg

SEQ ID NO: 2040148 - DNA, 25 bp, Homo sapien
tattccaaagggaggtcacagggtc

SEQ ID NO: 2040149 - DNA, 25 bp, Homo sapien
gtacaagttagtgtggcccatatcc

SEQ ID NO: 2040150 - DNA, 25 bp, Homo sapien
ggtacaagttagtgtggcccatatc

SEQ ID NO: 2040151 - DNA, 25 bp, Homo sapien
tacaagttagtgtggcccatatccc

SEQ ID NO: 2040152 - DNA, 25 bp, Homo sapien
gacttgtccagagaatatcacctga

SEQ ID NO: 2040153 - DNA, 25 bp, Homo sapien
tgtgctgattcctttaaaggcatat

SEQ ID NO: 2040154 - DNA, 25 bp, Homo sapien
actttatgctgtttctccctataag

SEQ ID NO: 2040155 - DNA, 25 bp, Homo sapien
tacttgttgactttatgctgtttct

SEQ ID NO: 2040156 - DNA, 25 bp, Homo sapien
tatgctgtttctccctataagtttg

SEQ ID NO: 2040157 - DNA, 25 bp, Homo sapien
ctgtacttgttgactttatgctgtt

SEQ ID NO: 2040158 - DNA, 25 bp, Homo sapien
atcatactgaacaggtgaaagatta

SEQ ID NO: 2040159 - DNA, 25 bp, Homo sapien
caaaataattacacccatataagac

SEQ ID NO: 2040160 - DNA, 25 bp, Homo sapien
cactttattttcagtcttttcaaag

SEQ ID NO: 2040161 - DNA, 25 bp, Homo sapien
ttaatcagcagtcactttattttca

SEQ ID NO: 2040162 - DNA, 25 bp, Homo sapien
taatcagcagtcactttattttcag

SEQ ID NO: 2040163 - DNA, 25 bp, Homo sapien
tattttcagtcttttcaaagccact

SEQ ID NO: 2040164 - DNA, 25 bp, Homo sapien
ctagtaagcttcatagttgacatca

SEQ ID NO: 2040165 - DNA, 25 bp, Homo sapien
aagcttcatagttgacatcattata

SEQ ID NO: 2040166 - DNA, 25 bp, Homo sapien
agcttcatagttgacatcattatat

SEQ ID NO: 2040167 - DNA, 25 bp, Homo sapien
tttcaacccagaaatcattggttaa

SEQ ID NO: 2040168 - DNA, 25 bp, Homo sapien
caaattcaagagtttggatcccatt

SEQ ID NO: 2040169 - DNA, 25 bp, Homo sapien
gcacacagtactatgtaagttggct

SEQ ID NO: 2040170 - DNA, 25 bp, Homo sapien
aagcctgcacacagtactatgtaag

SEQ ID NO: 2040171 - DNA, 25 bp, Homo sapien
tttttttgtaggacatgtgatcatc

SEQ ID NO: 2040172 - DNA, 25 bp, Homo sapien
tgtagctgtttttttgtaggacatg

SEQ ID NO: 2040173 - DNA, 25 bp, Homo sapien
agctgtttttttgtaggacatgtga

SEQ ID NO: 2040174 - DNA, 25 bp, Homo sapien
catttgtacttgcttttgtagctgt

SEQ ID NO: 2040175 - DNA, 25 bp, Homo sapien
tctcattgaagttcacttgaagtca

SEQ ID NO: 2040176 - DNA, 25 bp, Homo sapien
tgaaatatctggacaatgttggcca

SEQ ID NO: 2040177 - DNA, 25 bp, Homo sapien
tcccagtggaggcttgggtccttta

SEQ ID NO: 2040178 - DNA, 25 bp, Homo sapien
acttcacttgaggttcacgtctcat

SEQ ID NO: 2040179 - DNA, 25 bp, Homo sapien
ttcgttgccgcaaagaaccgtcagc

SEQ ID NO: 2040180 - DNA, 25 bp, Homo sapien
tacctttatggccactgcaacgagg

SEQ ID NO: 2040181 - DNA, 25 bp, Homo sapien
cacaaagagcaccacaagcagtagt

SEQ ID NO: 2040182 - DNA, 25 bp, Homo sapien
tacctggtcgccacggtatgtgaag

SEQ ID NO: 2040183 - DNA, 25 bp, Homo sapien
agcctcatcaagtgttccttcagat

SEQ ID NO: 2040184 - DNA, 25 bp, Homo sapien
caagggtgcagcctcatcaagtgtt

SEQ ID NO: 2040185 - DNA, 25 bp, Homo sapien
ttcatcaggtgttctttccaccaag

SEQ ID NO: 2040186 - DNA, 25 bp, Homo sapien
ccgtgtcaggtgttctttctgccaa

SEQ ID NO: 2040187 - DNA, 25 bp, Homo sapien
ttgtttatattccaaaagttgttga

SEQ ID NO: 2040188 - DNA, 25 bp, Homo sapien
tgagaatttttagatatcttttgtt

SEQ ID NO: 2040189 - DNA, 25 bp, Homo sapien
ttgagaatttttagatatcttttgt

SEQ ID NO: 2040190 - DNA, 25 bp, Homo sapien
tttatattccaaaagttgttgatga

SEQ ID NO: 2040191 - DNA, 25 bp, Homo sapien
ttgtgaggcaagcacttttggatgc

SEQ ID NO: 2040192 - DNA, 25 bp, Homo sapien
gcagtggctcgtgcttgtgaggcaa

SEQ ID NO: 2040193 - DNA, 25 bp, Homo sapien
tcttgaaacttattgctgaaacaat

SEQ ID NO: 2040194 - DNA, 25 bp, Homo sapien
aacatagggagaccatgtgtcaaca

SEQ ID NO: 2040195 - DNA, 25 bp, Homo sapien
caacgttcttaattttactatatgt

SEQ ID NO: 2040196 - DNA, 25 bp, Homo sapien
tgctgatcttctcaacgttcttaat

SEQ ID NO: 2040197 - DNA, 25 bp, Homo sapien
gatcttctcaacgttcttaatttta

SEQ ID NO: 2040198 - DNA, 25 bp, Homo sapien
ctgatcttctcaacgttcttaattt

SEQ ID NO: 2040199 - DNA, 25 bp, Homo sapien
gaagaaccatgccaactatctctga

SEQ ID NO: 2040200 - DNA, 25 bp, Homo sapien
agagattaaatccacaagcaacagc

SEQ ID NO: 2040201 - DNA, 25 bp, Homo sapien
gatgatccatgacatatggcaagca

SEQ ID NO: 2040202 - DNA, 25 bp, Homo sapien
tgtagcttcagcacagatgtcaaca

SEQ ID NO: 2040203 - DNA, 25 bp, Homo sapien
cacttcttttccttatggccaataa

SEQ ID NO: 2040204 - DNA, 25 bp, Homo sapien
catttaaacttatcaactgcaattg

SEQ ID NO: 2040205 - DNA, 25 bp, Homo sapien
ggccaataaaagtggtgtgtggcca

SEQ ID NO: 2040206 - DNA, 25 bp, Homo sapien
taaacttatcaactgcaattgcatt

SEQ ID NO: 2040207 - DNA, 25 bp, Homo sapien
gattccaccattatctatgttcaag

SEQ ID NO: 2040208 - DNA, 25 bp, Homo sapien
ttaccttaccagaagcactgtaccc

SEQ ID NO: 2040209 - DNA, 25 bp, Homo sapien
aatatcctatgaacttaaacaatgg

SEQ ID NO: 2040210 - DNA, 25 bp, Homo sapien
caccacattaactctggttatctcc

SEQ ID NO: 2040211 - DNA, 25 bp, Homo sapien
gattccaaatgccaatgtcaggcac

SEQ ID NO: 2040212 - DNA, 25 bp, Homo sapien
gttatacgggctcaagattcaatcc

SEQ ID NO: 2040213 - DNA, 25 bp, Homo sapien
ttatacgggctcaagattcaatcct

SEQ ID NO: 2040214 - DNA, 25 bp, Homo sapien
cagttatacgggctcaagattcaat

SEQ ID NO: 2040215 - DNA, 25 bp, Homo sapien
tatacgggctcaagattcaatcctt

SEQ ID NO: 2040216 - DNA, 25 bp, Homo sapien
ttgttcttcaattcaatgtctgcac

SEQ ID NO: 2040217 - DNA, 25 bp, Homo sapien
caattcaatgtctgcaccacaggac

SEQ ID NO: 2040218 - DNA, 25 bp, Homo sapien
tggacagctgtgttgccatacacac

SEQ ID NO: 2040219 - DNA, 25 bp, Homo sapien
cactgttaacagcataatggacagc

SEQ ID NO: 2040220 - DNA, 25 bp, Homo sapien
ggatcagcaccagaatctatgagaa

SEQ ID NO: 2040221 - DNA, 25 bp, Homo sapien
tggatcagcaccagaatctatgaga

SEQ ID NO: 2040222 - DNA, 25 bp, Homo sapien
atatttggatcagcaccagaatcta

SEQ ID NO: 2040223 - DNA, 25 bp, Homo sapien
tttggatcagcaccagaatctatga

SEQ ID NO: 2040224 - DNA, 25 bp, Homo sapien
agctggtactttctatctgccagaa

SEQ ID NO: 2040225 - DNA, 25 bp, Homo sapien
ttcaccatcaaggacgtcaagctgg

SEQ ID NO: 2040226 - DNA, 25 bp, Homo sapien
caaggacgtcaagctggtactttct

SEQ ID NO: 2040227 - DNA, 25 bp, Homo sapien
cgtcaagctggtactttctatctgc

SEQ ID NO: 2040228 - DNA, 25 bp, Homo sapien
caggtccattgtcgtcttcttcatc

SEQ ID NO: 2040229 - DNA, 25 bp, Homo sapien
tcaggtccattgtcgtcttcttcat

SEQ ID NO: 2040230 - DNA, 25 bp, Homo sapien
aggtccattgtcgtcttcttcatca

SEQ ID NO: 2040231 - DNA, 25 bp, Homo sapien
ttcaggtccattgtcgtcttcttca

SEQ ID NO: 2040232 - DNA, 25 bp, Homo sapien
tgacagcggtggcacagagcctctc

SEQ ID NO: 2040233 - DNA, 25 bp, Homo sapien
taagagtcgttgttggtgtagaaca

SEQ ID NO: 2040234 - DNA, 25 bp, Homo sapien
ccttgacagcggtggcacagagcct

SEQ ID NO: 2040235 - DNA, 25 bp, Homo sapien
tctggcccttgacagcggtggcaca

SEQ ID NO: 2040236 - DNA, 25 bp, Homo sapien
ctgctagagagagcccgtgcctccc

SEQ ID NO: 2040237 - DNA, 25 bp, Homo sapien
tgctagagagagcccgtgcctcccg

SEQ ID NO: 2040238 - DNA, 25 bp, Homo sapien
ctggctgcgcttcgcccagcacggc

SEQ ID NO: 2040239 - DNA, 25 bp, Homo sapien
cgaggcaggaaaccgccctggctgc

SEQ ID NO: 2040240 - DNA, 25 bp, Homo sapien
tccagggtggcgctgagtgtcggtt

SEQ ID NO: 2040241 - DNA, 25 bp, Homo sapien
caagtatccgcgtggctggtggcgc

SEQ ID NO: 2040242 - DNA, 25 bp, Homo sapien
gcagctgagcccatggtagaggcta

SEQ ID NO: 2040243 - DNA, 25 bp, Homo sapien
ggcgcagtggcggtgtccgaccctg

SEQ ID NO: 2040244 - DNA, 25 bp, Homo sapien
ggttcgcctgctggtggcgcggaca

SEQ ID NO: 2040245 - DNA, 25 bp, Homo sapien
gcggacaggttctggggttgccacc

SEQ ID NO: 2040246 - DNA, 25 bp, Homo sapien
tcgcctgctggtggcgcggacaggt

SEQ ID NO: 2040247 - DNA, 25 bp, Homo sapien
agggtagccgtgtggcacacgccct

SEQ ID NO: 2040248 - DNA, 25 bp, Homo sapien
gacaggcacggatggcgggtcccgt

SEQ ID NO: 2040249 - DNA, 25 bp, Homo sapien
ttctgacaggcacggatggcgggtc

SEQ ID NO: 2040250 - DNA, 25 bp, Homo sapien
tgcctgtgtgccaagtgcaggtagc

SEQ ID NO: 2040251 - DNA, 25 bp, Homo sapien
agttctgacaggcacggatggcggg

SEQ ID NO: 2040252 - DNA, 25 bp, Homo sapien
gcagttctcacccttggactgagag

SEQ ID NO: 2040253 - DNA, 25 bp, Homo sapien
gctgagctgcagttctcacccttgg

SEQ ID NO: 2040254 - DNA, 25 bp, Homo sapien
gctgcagttctcacccttggactga

SEQ ID NO: 2040255 - DNA, 25 bp, Homo sapien
ttctcacccttggactgagagggaa

SEQ ID NO: 2040256 - DNA, 25 bp, Homo sapien
ccatgtgattaaagtgggtgaccat

SEQ ID NO: 2040257 - DNA, 25 bp, Homo sapien
cccaagtcaagggatggttccccag

SEQ ID NO: 2040258 - DNA, 25 bp, Homo sapien
tcaagggatggttccccagctgcag

SEQ ID NO: 2040259 - DNA, 25 bp, Homo sapien
gcaccctctgattatgtgataggga

SEQ ID NO: 2040260 - DNA, 25 bp, Homo sapien
tataaaatctagacagaggcattct

SEQ ID NO: 2040261 - DNA, 25 bp, Homo sapien
taaaatctagacagaggcattctca

SEQ ID NO: 2040262 - DNA, 25 bp, Homo sapien
aaatctagacagaggcattctcaga

SEQ ID NO: 2040263 - DNA, 25 bp, Homo sapien
atctagacagaggcattctcagaaa

SEQ ID NO: 2040264 - DNA, 25 bp, Homo sapien
ctctcaggagctactttgtgatatc

SEQ ID NO: 2040265 - DNA, 25 bp, Homo sapien
ttcttagagcacgtttgaaacacac

SEQ ID NO: 2040266 - DNA, 25 bp, Homo sapien
tatttggatagctctaacgatttcg

SEQ ID NO: 2040267 - DNA, 25 bp, Homo sapien
tagctctaacgatttcgttggaaac

SEQ ID NO: 2040268 - DNA, 25 bp, Homo sapien
taaatgagcctattcacagatagca

SEQ ID NO: 2040269 - DNA, 25 bp, Homo sapien
tcttgttgaatagtcagaaccacag

SEQ ID NO: 2040270 - DNA, 25 bp, Homo sapien
tggtacacaggacagacctaggaat

SEQ ID NO: 2040271 - DNA, 25 bp, Homo sapien
acagaagtgagctgtagttgacaca

SEQ ID NO: 2040272 - DNA, 25 bp, Homo sapien
tatatgggaatgcaaccaggcgcgg

SEQ ID NO: 2040273 - DNA, 25 bp, Homo sapien
gcaataagcatagatcttgtccaga

SEQ ID NO: 2040274 - DNA, 25 bp, Homo sapien
caaagttggacttctactacagata

SEQ ID NO: 2040275 - DNA, 25 bp, Homo sapien
tcttggtggaggtcgtatacatctt

SEQ ID NO: 2040276 - DNA, 25 bp, Homo sapien
cactcctagtgtgtcctcctgtaac

SEQ ID NO: 2040277 - DNA, 25 bp, Homo sapien
tgggtgcatgggctaactcaatgct

SEQ ID NO: 2040278 - DNA, 25 bp, Homo sapien
cacgtagatgcacctagagaaggca

SEQ ID NO: 2040279 - DNA, 25 bp, Homo sapien
aagctagaggctatatttctcagac

SEQ ID NO: 2040280 - DNA, 25 bp, Homo sapien
aaaatacactttaatctaaccatgg

SEQ ID NO: 2040281 - DNA, 25 bp, Homo sapien
tatacaatcagagactaatttgaag

SEQ ID NO: 2040282 - DNA, 25 bp, Homo sapien
tttaatctaaccatggaatttcaca

SEQ ID NO: 2040283 - DNA, 25 bp, Homo sapien
ttatatacaatcagagactaatttg

SEQ ID NO: 2040284 - DNA, 25 bp, Homo sapien
tctcattaaatgagcacagagtcat

SEQ ID NO: 2040285 - DNA, 25 bp, Homo sapien
tatttctcattaaatgagcacagag

SEQ ID NO: 2040286 - DNA, 25 bp, Homo sapien
tttctcattaaatgagcacagagtc

SEQ ID NO: 2040287 - DNA, 25 bp, Homo sapien
tcattaaatgagcacagagtcatta

SEQ ID NO: 2040288 - DNA, 25 bp, Homo sapien
catcagtgcggctttcaataccact

SEQ ID NO: 2040289 - DNA, 25 bp, Homo sapien
tcagtgcggctttcaataccacttg

SEQ ID NO: 2040290 - DNA, 25 bp, Homo sapien
cagtgcggctttcaataccacttga

SEQ ID NO: 2040291 - DNA, 25 bp, Homo sapien
gtgcggctttcaataccacttgaaa

SEQ ID NO: 2040292 - DNA, 25 bp, Homo sapien
gagacgatcggttttccagtgcttc

SEQ ID NO: 2040293 - DNA, 25 bp, Homo sapien
tcggttttccagtgcttcttatctg

SEQ ID NO: 2040294 - DNA, 25 bp, Homo sapien
tagagacgatcggttttccagtgct

SEQ ID NO: 2040295 - DNA, 25 bp, Homo sapien
cagtgcttcttatctgatacacatt

SEQ ID NO: 2040296 - DNA, 25 bp, Homo sapien
gcaatcttaaccctgaagcctgtga

SEQ ID NO: 2040297 - DNA, 25 bp, Homo sapien
gaaaactctgttctatcacgactga

SEQ ID NO: 2040298 - DNA, 25 bp, Homo sapien
tctgctctgcatggttaaagaagcc

SEQ ID NO: 2040299 - DNA, 25 bp, Homo sapien
aaaccctcagtgtgttgtgccaaag

SEQ ID NO: 2040300 - DNA, 25 bp, Homo sapien
cattggcagcgaggcaaatcagtgt

SEQ ID NO: 2040301 - DNA, 25 bp, Homo sapien
taatctagggagtacactctaggga

SEQ ID NO: 2040302 - DNA, 25 bp, Homo sapien
aaagagttaactgcctggtgcggtg

SEQ ID NO: 2040303 - DNA, 25 bp, Homo sapien
tcagcttctaattcgagtggcccta

SEQ ID NO: 2040304 - DNA, 25 bp, Homo sapien
aaaaagggggtcatgagttcacatc

SEQ ID NO: 2040305 - DNA, 25 bp, Homo sapien
cgcaccagggcctgtcgagggatgg

SEQ ID NO: 2040306 - DNA, 25 bp, Homo sapien
aacgtcacgcaccagggcctgtcga

SEQ ID NO: 2040307 - DNA, 25 bp, Homo sapien
cgtcacgcaccagggcctgtcgagg

SEQ ID NO: 2040308 - DNA, 25 bp, Homo sapien
tagctgttatccaatcattttcaca

SEQ ID NO: 2040309 - DNA, 25 bp, Homo sapien
tgccctctgtggtgaaaagcacaat

SEQ ID NO: 2040310 - DNA, 25 bp, Homo sapien
tttcacattgttaaaaacgttagca

SEQ ID NO: 2040311 - DNA, 25 bp, Homo sapien
cctctgtggtgaaaagcacaattag

SEQ ID NO: 2040312 - DNA, 25 bp, Homo sapien
atcctgagaacatgctaacagcagc

SEQ ID NO: 2040313 - DNA, 25 bp, Homo sapien
gggaagcacgaacaaaaccagatgg

SEQ ID NO: 2040314 - DNA, 25 bp, Homo sapien
gcagtggatcttgtagaaagcgttc

SEQ ID NO: 2040315 - DNA, 25 bp, Homo sapien
tttgaccactttccggaaagactga

SEQ ID NO: 2040316 - DNA, 25 bp, Homo sapien
tatggtctgtattctttccctcaag

SEQ ID NO: 2040317 - DNA, 25 bp, Homo sapien
cctcaagctacctctgtaaaactag

SEQ ID NO: 2040318 - DNA, 25 bp, Homo sapien
tcaagggaggaatagagtggaactc

SEQ ID NO: 2040319 - DNA, 25 bp, Homo sapien
tacagcatgcatgctgatccaggca

SEQ ID NO: 2040320 - DNA, 25 bp, Homo sapien
ttggcacaggcatcacaattggcag

SEQ ID NO: 2040321 - DNA, 25 bp, Homo sapien
catggacaaattaagtcctctttct

SEQ ID NO: 2040322 - DNA, 25 bp, Homo sapien
cttatctaagtgatctctgtggcac

SEQ ID NO: 2040323 - DNA, 25 bp, Homo sapien
cagggggtggcttaaaaacatgcca

SEQ ID NO: 2040324 - DNA, 25 bp, Homo sapien
gtggtagagtgtaggaataaactca

SEQ ID NO: 2040325 - DNA, 25 bp, Homo sapien
cattcaccttcatttgcatatagta

SEQ ID NO: 2040326 - DNA, 25 bp, Homo sapien
tacaggtctaacgtgaaacagttta

SEQ ID NO: 2040327 - DNA, 25 bp, Homo sapien
ctccttgggttacaggtctaacgtg

SEQ ID NO: 2040328 - DNA, 25 bp, Homo sapien
tctatacacatctccttgggttaca

SEQ ID NO: 2040329 - DNA, 25 bp, Homo sapien
cagtttcagctctatacacatctcc

SEQ ID NO: 2040330 - DNA, 25 bp, Homo sapien
ttaaatcttgtattgagtgattata

SEQ ID NO: 2040331 - DNA, 25 bp, Homo sapien
tgaactcaggccaaccgcccacctt

SEQ ID NO: 2040332 - DNA, 25 bp, Homo sapien
cccagccacaagtgagttttctaaa

SEQ ID NO: 2040333 - DNA, 25 bp, Homo sapien
atgaatgtttacaactgtaaaaagt

SEQ ID NO: 2040334 - DNA, 25 bp, Homo sapien
caataccatagatggattggattgc

SEQ ID NO: 2040335 - DNA, 25 bp, Homo sapien
ccttatcttgttcgtcattatagaa

SEQ ID NO: 2040336 - DNA, 25 bp, Homo sapien
ttggattgctccttatcttgttcgt

SEQ ID NO: 2040337 - DNA, 25 bp, Homo sapien
tttttttgctgcttaccacaacata

SEQ ID NO: 2040338 - DNA, 25 bp, Homo sapien
ctgtttcttccagccatatcgtttg

SEQ ID NO: 2040339 - DNA, 25 bp, Homo sapien
tcttccagccatatcgtttgatatt

SEQ ID NO: 2040340 - DNA, 25 bp, Homo sapien
cagccatatcgtttgatatttcctc

SEQ ID NO: 2040341 - DNA, 25 bp, Homo sapien
gtttcttccagccatatcgtttgat

SEQ ID NO: 2040342 - DNA, 25 bp, Homo sapien
tactaaatagcatgcagaagactgt

SEQ ID NO: 2040343 - DNA, 25 bp, Homo sapien
taagttttgtgagagcaaggaccat

SEQ ID NO: 2040344 - DNA, 25 bp, Homo sapien
gcttcctaagcagtggcatgtacca

SEQ ID NO: 2040345 - DNA, 25 bp, Homo sapien
tggctctagatgtgggttaacctgc

SEQ ID NO: 2040346 - DNA, 25 bp, Homo sapien
caccaagagatccaccattttcagg

SEQ ID NO: 2040347 - DNA, 25 bp, Homo sapien
tgtgtgctaggtcacaacctgctac

SEQ ID NO: 2040348 - DNA, 25 bp, Homo sapien
aacctgctacagaaccaaagagaag

SEQ ID NO: 2040349 - DNA, 25 bp, Homo sapien
ttgtcatctaggcaacaggcaccca

SEQ ID NO: 2040350 - DNA, 25 bp, Homo sapien
tccgagaggtccaaaagtttagcac

SEQ ID NO: 2040351 - DNA, 25 bp, Homo sapien
gcaacacttgtagaatccgagaggt

SEQ ID NO: 2040352 - DNA, 25 bp, Homo sapien
gaggttaccatcagtttcatcagca

SEQ ID NO: 2040353 - DNA, 25 bp, Homo sapien
tctgaagctcattcctatgtgcaca

SEQ ID NO: 2040354 - DNA, 25 bp, Homo sapien
tttcactaccatctggttgaatttc

SEQ ID NO: 2040355 - DNA, 25 bp, Homo sapien
gtttcactaccatctggttgaattt

SEQ ID NO: 2040356 - DNA, 25 bp, Homo sapien
caattttaaaatcttttcgattcat

SEQ ID NO: 2040357 - DNA, 25 bp, Homo sapien
ctatcaattttaaaatcttttcgat

SEQ ID NO: 2040358 - DNA, 25 bp, Homo sapien
tcaattttaaaatcttttcgattca

SEQ ID NO: 2040359 - DNA, 25 bp, Homo sapien
ttatttgttctgatgaaaagcttga

SEQ ID NO: 2040360 - DNA, 25 bp, Homo sapien
ttctgatgaaaagcttgaaccttat

SEQ ID NO: 2040361 - DNA, 25 bp, Homo sapien
agcttgaaccttataagccttggtt

SEQ ID NO: 2040362 - DNA, 25 bp, Homo sapien
agttagcggggagagaatttatttg

SEQ ID NO: 2040363 - DNA, 25 bp, Homo sapien
gaacatgtggaaaagatcgaaagca

SEQ ID NO: 2040364 - DNA, 25 bp, Homo sapien
ttcgttcagtgttgatattcttttc

SEQ ID NO: 2040365 - DNA, 25 bp, Homo sapien
agggttcgttcagtgttgatattct

SEQ ID NO: 2040366 - DNA, 25 bp, Homo sapien
gcagccttaagattactgatctcct

SEQ ID NO: 2040367 - DNA, 25 bp, Homo sapien
aaaggcagccttaagattactgatc

SEQ ID NO: 2040368 - DNA, 25 bp, Homo sapien
tatctttggttagcatgctgtttgc

SEQ ID NO: 2040369 - DNA, 25 bp, Homo sapien
ctttggttagcatgctgtttgcttc

SEQ ID NO: 2040370 - DNA, 25 bp, Homo sapien
tctttggttagcatgctgtttgctt

SEQ ID NO: 2040371 - DNA, 25 bp, Homo sapien
atctttggttagcatgctgtttgct

SEQ ID NO: 2040372 - DNA, 25 bp, Homo sapien
tagttctagctctgcgattaaccta

SEQ ID NO: 2040373 - DNA, 25 bp, Homo sapien
tctcgtatttcaggcagtaaccttt

SEQ ID NO: 2040374 - DNA, 25 bp, Homo sapien
gattaacctagtatgtgaccccgag

SEQ ID NO: 2040375 - DNA, 25 bp, Homo sapien
tactgctagataaagacaggtcaga

SEQ ID NO: 2040376 - DNA, 25 bp, Homo sapien
aaatgaatttaagctaagccattac

SEQ ID NO: 2040377 - DNA, 25 bp, Homo sapien
caaatgaatttaagctaagccatta

SEQ ID NO: 2040378 - DNA, 25 bp, Homo sapien
acaaatgaatttaagctaagccatt

SEQ ID NO: 2040379 - DNA, 25 bp, Homo sapien
taactaataagatctacagccagaa

SEQ ID NO: 2040380 - DNA, 25 bp, Homo sapien
ataactaataagatctacagccaga

SEQ ID NO: 2040381 - DNA, 25 bp, Homo sapien
tataactaataagatctacagccag

SEQ ID NO: 2040382 - DNA, 25 bp, Homo sapien
agccagaaaaacagcccaatattgc

SEQ ID NO: 2040383 - DNA, 25 bp, Homo sapien
ttttatacatgagtacagaatgacc

SEQ ID NO: 2040384 - DNA, 25 bp, Homo sapien
cttgcacacacacttaccctaatat

SEQ ID NO: 2040385 - DNA, 25 bp, Homo sapien
gaatgaccactatgtattaacatag

SEQ ID NO: 2040386 - DNA, 25 bp, Homo sapien
tattttaagatgtgacctattgtga

SEQ ID NO: 2040387 - DNA, 25 bp, Homo sapien
ttcttgcgtcaattcaaaatactgt

SEQ ID NO: 2040388 - DNA, 25 bp, Homo sapien
tatctgtaatctcttgtctatttct

SEQ ID NO: 2040389 - DNA, 25 bp, Homo sapien
agaaggcctcgcgccaactgctcag

SEQ ID NO: 2040390 - DNA, 25 bp, Homo sapien
tttgtttctgctagatccaactgag

SEQ ID NO: 2040391 - DNA, 25 bp, Homo sapien
cactgttggtagcttattggtttcc

SEQ ID NO: 2040392 - DNA, 25 bp, Homo sapien
gtgtcttctgatcctacactatgga

SEQ ID NO: 2040393 - DNA, 25 bp, Homo sapien
tacaatttgctacctgagaggacca

SEQ ID NO: 2040394 - DNA, 25 bp, Homo sapien
ggagctagtagtctttcctcagcct

SEQ ID NO: 2040395 - DNA, 25 bp, Homo sapien
tcattttgtagttcctgtattttct

SEQ ID NO: 2040396 - DNA, 25 bp, Homo sapien
cattttgtagttcctgtattttctt

SEQ ID NO: 2040397 - DNA, 25 bp, Homo sapien
ttcattttgtagttcctgtattttc

SEQ ID NO: 2040398 - DNA, 25 bp, Homo sapien
ctgtattttctttaaattttctctg

SEQ ID NO: 2040399 - DNA, 25 bp, Homo sapien
gactcatattgtgttagttgctgaa

SEQ ID NO: 2040400 - DNA, 25 bp, Homo sapien
taagcttttgccaacgccagtgaaa

SEQ ID NO: 2040401 - DNA, 25 bp, Homo sapien
ggaaacagctgtggagaactacttt

SEQ ID NO: 2040402 - DNA, 25 bp, Homo sapien
gaacaatggctcttacaaaattcac

SEQ ID NO: 2040403 - DNA, 25 bp, Homo sapien
ttgctcagcttcaagctgatcttgt

SEQ ID NO: 2040404 - DNA, 25 bp, Homo sapien
aagctgatcttgtagctcccgcatc

SEQ ID NO: 2040405 - DNA, 25 bp, Homo sapien
ctgatcttgtagctcccgcatctgt

SEQ ID NO: 2040406 - DNA, 25 bp, Homo sapien
tgctcagcttcaagctgatcttgta

SEQ ID NO: 2040407 - DNA, 25 bp, Homo sapien
gctccagttgcagggttagattctt

SEQ ID NO: 2040408 - DNA, 25 bp, Homo sapien
tctgcctcaaatgcttgagtcttca

SEQ ID NO: 2040409 - DNA, 25 bp, Homo sapien
aagctgagctaactcaaattctaat

SEQ ID NO: 2040410 - DNA, 25 bp, Homo sapien
caacagccgcttatttgattcctgc

SEQ ID NO: 2040411 - DNA, 25 bp, Homo sapien
tctcaatctgaacaacccgattttc

SEQ ID NO: 2040412 - DNA, 25 bp, Homo sapien
tgagattgcttcagatcaacgtcta

SEQ ID NO: 2040413 - DNA, 25 bp, Homo sapien
gcttcagatcaacgtctagcatgga

SEQ ID NO: 2040414 - DNA, 25 bp, Homo sapien
gatcaacgtctagcatggaacactg

SEQ ID NO: 2040415 - DNA, 25 bp, Homo sapien
catttacctcttgttctaaccgttg

SEQ ID NO: 2040416 - DNA, 25 bp, Homo sapien
ctaaccgttgttgtaatgatttaag

SEQ ID NO: 2040417 - DNA, 25 bp, Homo sapien
gactttgcctcttcaatagattgat

SEQ ID NO: 2040418 - DNA, 25 bp, Homo sapien
tgtcagttaaacgagctttggttac

SEQ ID NO: 2040419 - DNA, 25 bp, Homo sapien
gaacaggtactcatcatctaccacg

SEQ ID NO: 2040420 - DNA, 25 bp, Homo sapien
ggcttttctgataatttacctgagg

SEQ ID NO: 2040421 - DNA, 25 bp, Homo sapien
catctaatgctctctagggtaaaaa

SEQ ID NO: 2040422 - DNA, 25 bp, Homo sapien
taactcttagctaggtatataacag

SEQ ID NO: 2040423 - DNA, 25 bp, Homo sapien
tcctcttgtaaagatgtaattcgag

SEQ ID NO: 2040424 - DNA, 25 bp, Homo sapien
agtgattaagcatgtcttgagcctc

SEQ ID NO: 2040425 - DNA, 25 bp, Homo sapien
gagatgcttcacctcctcttgtaaa

SEQ ID NO: 2040426 - DNA, 25 bp, Homo sapien
cactttttcgagattatgtttgaga

SEQ ID NO: 2040427 - DNA, 25 bp, Homo sapien
gatgaacaaataacaatcctactca

SEQ ID NO: 2040428 - DNA, 25 bp, Homo sapien
tgaacaaataacaatcctactcaaa

SEQ ID NO: 2040429 - DNA, 25 bp, Homo sapien
accgcatccggcccttaccaaacat

SEQ ID NO: 2040430 - DNA, 25 bp, Homo sapien
gcatccggcccttaccaaacattta

SEQ ID NO: 2040431 - DNA, 25 bp, Homo sapien
cacctggctgccaatcgattttcaa

SEQ ID NO: 2040432 - DNA, 25 bp, Homo sapien
cctggctgccaatcgattttcaaca

SEQ ID NO: 2040433 - DNA, 25 bp, Homo sapien
gcacctggctgccaatcgattttca

SEQ ID NO: 2040434 - DNA, 25 bp, Homo sapien
tggctgccaatcgattttcaacaaa

SEQ ID NO: 2040435 - DNA, 25 bp, Homo sapien
tggttgcatacattgtgaactgcat

SEQ ID NO: 2040436 - DNA, 25 bp, Homo sapien
tgaactgcatttaatcccactgaac

SEQ ID NO: 2040437 - DNA, 25 bp, Homo sapien
tgagggtaatatgatcataaatata

SEQ ID NO: 2040438 - DNA, 25 bp, Homo sapien
ccacttatatgatgatggttgcata

SEQ ID NO: 2040439 - DNA, 25 bp, Homo sapien
gattctgtcctaagtaagtcattgg

SEQ ID NO: 2040440 - DNA, 25 bp, Homo sapien
tcctcaatcttacagctgtgtccga

SEQ ID NO: 2040441 - DNA, 25 bp, Homo sapien
tcatgacctctgtctcttcgttcag

SEQ ID NO: 2040442 - DNA, 25 bp, Homo sapien
ggactctaactgactaattgacttg

SEQ ID NO: 2040443 - DNA, 25 bp, Homo sapien
tctcattagcaagctgtgaattctg

SEQ ID NO: 2040444 - DNA, 25 bp, Homo sapien
ctgggacagcttctcattagcaagc

SEQ ID NO: 2040445 - DNA, 25 bp, Homo sapien
tccttctcaatctgagacactgtag

SEQ ID NO: 2040446 - DNA, 25 bp, Homo sapien
tttggtactcattaattctatgctg

SEQ ID NO: 2040447 - DNA, 25 bp, Homo sapien
tgagacactgtagattctagatttc

SEQ ID NO: 2040448 - DNA, 25 bp, Homo sapien
tcattaattctatgctgtagcaaca

SEQ ID NO: 2040449 - DNA, 25 bp, Homo sapien
ccttgccagtttgctattgacataa

SEQ ID NO: 2040450 - DNA, 25 bp, Homo sapien
caattgctaggtcacatagtaggca

SEQ ID NO: 2040451 - DNA, 25 bp, Homo sapien
catctgcaatgtccaagtgatctag

SEQ ID NO: 2040452 - DNA, 25 bp, Homo sapien
cttaacacttatatagggctactga

SEQ ID NO: 2040453 - DNA, 25 bp, Homo sapien
cactccactggtattggcatcttac

SEQ ID NO: 2040454 - DNA, 25 bp, Homo sapien
gcttcaactgcctactataaaaaat

SEQ ID NO: 2040455 - DNA, 25 bp, Homo sapien
tcagtggctgccctagatattacat

SEQ ID NO: 2040456 - DNA, 25 bp, Homo sapien
tccttgtaaggccttttcagtggct

SEQ ID NO: 2040457 - DNA, 25 bp, Homo sapien
attatcttgtctagttttatgtttg

SEQ ID NO: 2040458 - DNA, 25 bp, Homo sapien
catccaattctttcattatcttgtc

SEQ ID NO: 2040459 - DNA, 25 bp, Homo sapien
tcttgtctagttttatgtttgaggt

SEQ ID NO: 2040460 - DNA, 25 bp, Homo sapien
cttcatccaattctttcattatctt

SEQ ID NO: 2040461 - DNA, 25 bp, Homo sapien
ccacttaactagagttttgtatcct

SEQ ID NO: 2040462 - DNA, 25 bp, Homo sapien
tatacgtatttcttattgcccagtg

SEQ ID NO: 2040463 - DNA, 25 bp, Homo sapien
gcaatacagattagaaatatacgta

SEQ ID NO: 2040464 - DNA, 25 bp, Homo sapien
tattgcccagtgttaaacactaaca

SEQ ID NO: 2040465 - DNA, 25 bp, Homo sapien
tcctggaccctaacacttccttcca

SEQ ID NO: 2040466 - DNA, 25 bp, Homo sapien
cacctcctggaccctaacacttcct

SEQ ID NO: 2040467 - DNA, 25 bp, Homo sapien
ccattgactcttctggtttagcttt

SEQ ID NO: 2040468 - DNA, 25 bp, Homo sapien
catttcattatgcagctgttcttcc

SEQ ID NO: 2040469 - DNA, 25 bp, Homo sapien
gttcttccagcttatagattgtttt

SEQ ID NO: 2040470 - DNA, 25 bp, Homo sapien
cacttctgctccatttcatctttta

SEQ ID NO: 2040471 - DNA, 25 bp, Homo sapien
ttaactgcatttcattatgcagctg

SEQ ID NO: 2040472 - DNA, 25 bp, Homo sapien
tctgcattggagctagttctgttat

SEQ ID NO: 2040473 - DNA, 25 bp, Homo sapien
ttatctgcattggagctagttctgt

SEQ ID NO: 2040474 - DNA, 25 bp, Homo sapien
tttatctgcattggagctagttctg

SEQ ID NO: 2040475 - DNA, 25 bp, Homo sapien
tatctgcattggagctagttctgtt

SEQ ID NO: 2040476 - DNA, 25 bp, Homo sapien
aaatcgggtacaactggtgctacag

SEQ ID NO: 2040477 - DNA, 25 bp, Homo sapien
caaaaggtagttgattgccaacgaa

SEQ ID NO: 2040478 - DNA, 25 bp, Homo sapien
tgccaacgaaagctttaggaatagg

SEQ ID NO: 2040479 - DNA, 25 bp, Homo sapien
tatcaatgtcactacttaaatcggg

SEQ ID NO: 2040480 - DNA, 25 bp, Homo sapien
gagtgcattgcactacactccagtg

SEQ ID NO: 2040481 - DNA, 25 bp, Homo sapien
ccttcatgattgaaaacacctggcc

SEQ ID NO: 2040482 - DNA, 25 bp, Homo sapien
ccaacaaggactagagaggaacttc

SEQ ID NO: 2040483 - DNA, 25 bp, Homo sapien
tgtggtgacacatgaccgtggtcct

SEQ ID NO: 2040484 - DNA, 25 bp, Homo sapien
tgtctcggagcgtttcccaagccca

SEQ ID NO: 2040485 - DNA, 25 bp, Homo sapien
tctacaccatttcgccctaacctca

SEQ ID NO: 2040486 - DNA, 25 bp, Homo sapien
agaagagatgtcgtttgatttcttc

SEQ ID NO: 2040487 - DNA, 25 bp, Homo sapien
agcccactggtcatttttgaagaag

SEQ ID NO: 2040488 - DNA, 25 bp, Homo sapien
aagttccaaccaaagaatctgcata

SEQ ID NO: 2040489 - DNA, 25 bp, Homo sapien
gtaagttccaaccaaagaatctgca

SEQ ID NO: 2040490 - DNA, 25 bp, Homo sapien
tactgtaagttccaaccaaagaatc

SEQ ID NO: 2040491 - DNA, 25 bp, Homo sapien
ctgtaagttccaaccaaagaatctg

SEQ ID NO: 2040492 - DNA, 25 bp, Homo sapien
tacaagcatttcgtataaaaatacc

SEQ ID NO: 2040493 - DNA, 25 bp, Homo sapien
acttcaggggaaatataatcaggtg

SEQ ID NO: 2040494 - DNA, 25 bp, Homo sapien
tgttccaaccgctgtatcacatcgt

SEQ ID NO: 2040495 - DNA, 25 bp, Homo sapien
catcaccaccttgggattttaatac

SEQ ID NO: 2040496 - DNA, 25 bp, Homo sapien
ttattcatcttcatacaagtaccaa

SEQ ID NO: 2040497 - DNA, 25 bp, Homo sapien
aaatgtccagatttatccagcagca

SEQ ID NO: 2040498 - DNA, 25 bp, Homo sapien
ttcatcttcatacaagtaccaaaat

SEQ ID NO: 2040499 - DNA, 25 bp, Homo sapien
gctaacttcaaatgtccagatttat

SEQ ID NO: 2040500 - DNA, 25 bp, Homo sapien
agctatttccctcaacaaatgagaa

SEQ ID NO: 2040501 - DNA, 25 bp, Homo sapien
ggtcacttatgtcatacggaagaag

SEQ ID NO: 2040502 - DNA, 25 bp, Homo sapien
tctgaaaggtcacttatgtcatacg

SEQ ID NO: 2040503 - DNA, 25 bp, Homo sapien
gagtcttgagttctgaaaggtcact

SEQ ID NO: 2040504 - DNA, 25 bp, Homo sapien
gaatggattgcatccaatgcaagaa

SEQ ID NO: 2040505 - DNA, 25 bp, Homo sapien
attaagtttacaagatctccaccag

SEQ ID NO: 2040506 - DNA, 25 bp, Homo sapien
tacttctgcagtatagaatcgtgcc

SEQ ID NO: 2040507 - DNA, 25 bp, Homo sapien
gaataaaacccatggaatggattgc

SEQ ID NO: 2040508 - DNA, 25 bp, Homo sapien
tataacataattattcagaagagtt

SEQ ID NO: 2040509 - DNA, 25 bp, Homo sapien
tctaatttaacttgtgcatcagtgg

SEQ ID NO: 2040510 - DNA, 25 bp, Homo sapien
caaattacagaagttgcaagtctag

SEQ ID NO: 2040511 - DNA, 25 bp, Homo sapien
aacataaatgccacaaagacccttg

SEQ ID NO: 2040512 - DNA, 25 bp, Homo sapien
ccttcctggtggatttatgccttac

SEQ ID NO: 2040513 - DNA, 25 bp, Homo sapien
gcaaaagccatgatgtccctttctt

SEQ ID NO: 2040514 - DNA, 25 bp, Homo sapien
acccaaggactgttggcaaaagcca

SEQ ID NO: 2040515 - DNA, 25 bp, Homo sapien
ctgaacaacccaaggactgttggca

SEQ ID NO: 2040516 - DNA, 25 bp, Homo sapien
tcagctttcattcgtaaatctctga

SEQ ID NO: 2040517 - DNA, 25 bp, Homo sapien
ttcataatcttcagctttcattcgt

SEQ ID NO: 2040518 - DNA, 25 bp, Homo sapien
tccaaatgcacctctaccaatcacc

SEQ ID NO: 2040519 - DNA, 25 bp, Homo sapien
taccaatcaccttcactacttcata

SEQ ID NO: 2040520 - DNA, 25 bp, Homo sapien
aattttactgggatgagatactctg

SEQ ID NO: 2040521 - DNA, 25 bp, Homo sapien
aatgctttgccacctaacttgataa

SEQ ID NO: 2040522 - DNA, 25 bp, Homo sapien
cactgttgctgtcctatgagtcagg

SEQ ID NO: 2040523 - DNA, 25 bp, Homo sapien
tctgggaatgtccaaagtacactgt

SEQ ID NO: 2040524 - DNA, 25 bp, Homo sapien
tagtctagtctctcttaaacttcaa

SEQ ID NO: 2040525 - DNA, 25 bp, Homo sapien
tagtctctcttaaacttcaaactta

SEQ ID NO: 2040526 - DNA, 25 bp, Homo sapien
tctctagtctagtctctcttaaact

SEQ ID NO: 2040527 - DNA, 25 bp, Homo sapien
ctacatatcaacttccaaattttta

SEQ ID NO: 2040528 - DNA, 25 bp, Homo sapien
tatgaatcttgtaccctaaagtctc

SEQ ID NO: 2040529 - DNA, 25 bp, Homo sapien
ctaagatttgtttgataaacatgtt

SEQ ID NO: 2040530 - DNA, 25 bp, Homo sapien
tcttgtaccctaaagtctctgtgac

SEQ ID NO: 2040531 - DNA, 25 bp, Homo sapien
catataattatgaatcttgtaccct

SEQ ID NO: 2040532 - DNA, 25 bp, Homo sapien
tcccaattgcttgttgttaataaat

SEQ ID NO: 2040533 - DNA, 25 bp, Homo sapien
aatgtacttattagttcatgtagct

SEQ ID NO: 2040534 - DNA, 25 bp, Homo sapien
tgtacttattagttcatgtagcttt

SEQ ID NO: 2040535 - DNA, 25 bp, Homo sapien
ccaattgcttgttgttaataaatgt

SEQ ID NO: 2040536 - DNA, 25 bp, Homo sapien
gaaaatccaaatcatataccaaagc

SEQ ID NO: 2040537 - DNA, 25 bp, Homo sapien
atccaaatcatataccaaagcatcc

SEQ ID NO: 2040538 - DNA, 25 bp, Homo sapien
gcaggaaaatccaaatcatatacca

SEQ ID NO: 2040539 - DNA, 25 bp, Homo sapien
ggcaggaaaatccaaatcatatacc

SEQ ID NO: 2040540 - DNA, 25 bp, Homo sapien
tggttcaagaagttcccctggttca

SEQ ID NO: 2040541 - DNA, 25 bp, Homo sapien
ctccactggttcaagaagttcccct

SEQ ID NO: 2040542 - DNA, 25 bp, Homo sapien
tatttatgttgggttctatcactta

SEQ ID NO: 2040543 - DNA, 25 bp, Homo sapien
ttatgttgggttctatcacttacaa

SEQ ID NO: 2040544 - DNA, 25 bp, Homo sapien
ctacaaatatttatgttgggttcta

SEQ ID NO: 2040545 - DNA, 25 bp, Homo sapien
aaatatttatgttgggttctatcac

SEQ ID NO: 2040546 - DNA, 25 bp, Homo sapien
tgcccttcaccataccccactccta

SEQ ID NO: 2040547 - DNA, 25 bp, Homo sapien
ctgcccttcaccataccccactcct

SEQ ID NO: 2040548 - DNA, 25 bp, Homo sapien
gcccttcaccataccccactcctat

SEQ ID NO: 2040549 - DNA, 25 bp, Homo sapien
taattagaagataaggaagtccgga

SEQ ID NO: 2040550 - DNA, 25 bp, Homo sapien
ttttcaaaggtactcaaaatcactg

SEQ ID NO: 2040551 - DNA, 25 bp, Homo sapien
tgagaaattattacaggccctagac

SEQ ID NO: 2040552 - DNA, 25 bp, Homo sapien
taaatagacttaactaaactccatc

SEQ ID NO: 2040553 - DNA, 25 bp, Homo sapien
ccaagttcagattgacggggtaata

SEQ ID NO: 2040554 - DNA, 25 bp, Homo sapien
gtctttaccaagttcagattgacgg

SEQ ID NO: 2040555 - DNA, 25 bp, Homo sapien
tctttaccaagttcagattgacggg

SEQ ID NO: 2040556 - DNA, 25 bp, Homo sapien
tcagtctttaccaagttcagattga

SEQ ID NO: 2040557 - DNA, 25 bp, Homo sapien
caatctcactgtctctccaatcttt

SEQ ID NO: 2040558 - DNA, 25 bp, Homo sapien
aatctcactgtctctccaatctttt

SEQ ID NO: 2040559 - DNA, 25 bp, Homo sapien
cacatgtaaataaaggtccccacca

SEQ ID NO: 2040560 - DNA, 25 bp, Homo sapien
caaatgaagctatagcaagaggcca

SEQ ID NO: 2040561 - DNA, 25 bp, Homo sapien
cattaaatagattggactctcaggg

SEQ ID NO: 2040562 - DNA, 25 bp, Homo sapien
tggtcagggatgcttacaacaattc

SEQ ID NO: 2040563 - DNA, 25 bp, Homo sapien
agcaaacaatccgaattcacttccg

SEQ ID NO: 2040564 - DNA, 25 bp, Homo sapien
tttcaaatcgagtctcaaaactgtc

SEQ ID NO: 2040565 - DNA, 25 bp, Homo sapien
cttccgatttgggatcccgcagcag

SEQ ID NO: 2040566 - DNA, 25 bp, Homo sapien
ccattttttcaaatcgagtctcaaa

SEQ ID NO: 2040567 - DNA, 25 bp, Homo sapien
gagccggaacctcagggtcaccagg

SEQ ID NO: 2040568 - DNA, 25 bp, Homo sapien
atttcaaccaacttcctccgcggtg

SEQ ID NO: 2040569 - DNA, 25 bp, Homo sapien
ttcctccgcggtgggttcgcagccg

SEQ ID NO: 2040570 - DNA, 25 bp, Homo sapien
gcggaggagccggaacctcagggtc

SEQ ID NO: 2040571 - DNA, 25 bp, Homo sapien
acgacagccgacagcgccgtcgcca

SEQ ID NO: 2040572 - DNA, 25 bp, Homo sapien
agcctcgtcgctccggcgaggtgct

SEQ ID NO: 2040573 - DNA, 25 bp, Homo sapien
ggcagcccctcacgacagccgacag

SEQ ID NO: 2040574 - DNA, 25 bp, Homo sapien
acagccgctcggacgcccaaagtcg

SEQ ID NO: 2040575 - DNA, 25 bp, Homo sapien
tggagactccctccgggcaacaagg

SEQ ID NO: 2040576 - DNA, 25 bp, Homo sapien
tccccgtcccgagatgggcaggagc

SEQ ID NO: 2040577 - DNA, 25 bp, Homo sapien
ggcgaaagcaaagggcgggtgagga

SEQ ID NO: 2040578 - DNA, 25 bp, Homo sapien
ccgctccgctcagaggcgctgtaga

SEQ ID NO: 2040579 - DNA, 25 bp, Homo sapien
atcagtctcggccacgagctggtcc

SEQ ID NO: 2040580 - DNA, 25 bp, Homo sapien
cggccacgagctggtccacgcagga

SEQ ID NO: 2040581 - DNA, 25 bp, Homo sapien
gggctgctgctacggtgtccggtgg

SEQ ID NO: 2040582 - DNA, 25 bp, Homo sapien
ggcagggcgaggtcgatgcccgatg

SEQ ID NO: 2040583 - DNA, 25 bp, Homo sapien
gacgatagttgggtcccggcggctg

SEQ ID NO: 2040584 - DNA, 25 bp, Homo sapien
ctgttcaaacaaacggagaccgccg

SEQ ID NO: 2040585 - DNA, 25 bp, Homo sapien
gctgagagggactaatatgtccgcc

SEQ ID NO: 2040586 - DNA, 25 bp, Homo sapien
gaagaggaagacgatagttgggtcc

SEQ ID NO: 2040587 - DNA, 25 bp, Homo sapien
tgcttctgatcgctgtcccggcaga

SEQ ID NO: 2040588 - DNA, 25 bp, Homo sapien
tgggttgcagccagtccagagactt

SEQ ID NO: 2040589 - DNA, 25 bp, Homo sapien
gctctgaggagccatgcagggctct

SEQ ID NO: 2040590 - DNA, 25 bp, Homo sapien
ggttctcgccttggccggctctgag

SEQ ID NO: 2040591 - DNA, 25 bp, Homo sapien
acgaggagagagtgcttgttctcct

SEQ ID NO: 2040592 - DNA, 25 bp, Homo sapien
ggagagagtgcttgttctccttgtt

SEQ ID NO: 2040593 - DNA, 25 bp, Homo sapien
gagagagtgcttgttctccttgttg

SEQ ID NO: 2040594 - DNA, 25 bp, Homo sapien
ctgacgaggagagagtgcttgttct

SEQ ID NO: 2040595 - DNA, 25 bp, Homo sapien
agtggtactccatggacagccctcc

SEQ ID NO: 2040596 - DNA, 25 bp, Homo sapien
cagcattgagcaccagtggcgtttg

SEQ ID NO: 2040597 - DNA, 25 bp, Homo sapien
ggttttcagtggtactccatggaca

SEQ ID NO: 2040598 - DNA, 25 bp, Homo sapien
agccctccgcgagccccggcgttga

SEQ ID NO: 2040599 - DNA, 25 bp, Homo sapien
caaggctcttctgattattgtgaca

SEQ ID NO: 2040600 - DNA, 25 bp, Homo sapien
acaaggctcttctgattattgtgac

SEQ ID NO: 2040601 - DNA, 25 bp, Homo sapien
tacaaggctcttctgattattgtga

SEQ ID NO: 2040602 - DNA, 25 bp, Homo sapien
ctacaaggctcttctgattattgtg

SEQ ID NO: 2040603 - DNA, 25 bp, Homo sapien
gtagagcaggctggggcttcagttg

SEQ ID NO: 2040604 - DNA, 25 bp, Homo sapien
tctgggtagagcaggctggggcttc

SEQ ID NO: 2040605 - DNA, 25 bp, Homo sapien
gggtagagcaggctggggcttcagt

SEQ ID NO: 2040606 - DNA, 25 bp, Homo sapien
ctgggtagagcaggctggggcttca

SEQ ID NO: 2040607 - DNA, 25 bp, Homo sapien
agtgcttaatgtgctcaatacgcac

SEQ ID NO: 2040608 - DNA, 25 bp, Homo sapien
tcagctcatagagtgcttaatgtgc

SEQ ID NO: 2040609 - DNA, 25 bp, Homo sapien
agagtgcttaatgtgctcaatacgc

SEQ ID NO: 2040610 - DNA, 25 bp, Homo sapien
atagagtgcttaatgtgctcaatac

SEQ ID NO: 2040611 - DNA, 25 bp, Homo sapien
aacagcatgctggggaacattgtag

SEQ ID NO: 2040612 - DNA, 25 bp, Homo sapien
gccaacagcatgctggggaacattg

SEQ ID NO: 2040613 - DNA, 25 bp, Homo sapien
ttaacttgtttgttaacaatgccaa

SEQ ID NO: 2040614 - DNA, 25 bp, Homo sapien
cttaacttgtttgttaacaatgcca

SEQ ID NO: 2040615 - DNA, 25 bp, Homo sapien
gggcattcctttttggacagtacac

SEQ ID NO: 2040616 - DNA, 25 bp, Homo sapien
ggcattcctttttggacagtacaca

SEQ ID NO: 2040617 - DNA, 25 bp, Homo sapien
ttcttatagatttgcatatacgtgg

SEQ ID NO: 2040618 - DNA, 25 bp, Homo sapien
ttatagatttgcatatacgtggcca

SEQ ID NO: 2040619 - DNA, 25 bp, Homo sapien
taaaaggcctagagaacatatatcg

SEQ ID NO: 2040620 - DNA, 25 bp, Homo sapien
aaaggcctagagaacatatatcggg

SEQ ID NO: 2040621 - DNA, 25 bp, Homo sapien
tagagaacatatatcgggtgcctct

SEQ ID NO: 2040622 - DNA, 25 bp, Homo sapien
aggcctagagaacatatatcgggtg

SEQ ID NO: 2040623 - DNA, 25 bp, Homo sapien
ctctgtatctttcaattacagtata

SEQ ID NO: 2040624 - DNA, 25 bp, Homo sapien
atctctgtatctttcaattacagta

SEQ ID NO: 2040625 - DNA, 25 bp, Homo sapien
tggtagaggactccaagcctcagat

SEQ ID NO: 2040626 - DNA, 25 bp, Homo sapien
gggaccttcattctacaactgcaag

SEQ ID NO: 2040627 - DNA, 25 bp, Homo sapien
gcctcagataagaatcaccaccctg

SEQ ID NO: 2040628 - DNA, 25 bp, Homo sapien
caactgcaaggaagtggattctgta

SEQ ID NO: 2040629 - DNA, 25 bp, Homo sapien
gatccttccattaagagagccaaca

SEQ ID NO: 2040630 - DNA, 25 bp, Homo sapien
catggtattaaccactgccactgaa

SEQ ID NO: 2040631 - DNA, 25 bp, Homo sapien
tgccactgaattttcgatccttcca

SEQ ID NO: 2040632 - DNA, 25 bp, Homo sapien
agagacctatttctagcctatctag

SEQ ID NO: 2040633 - DNA, 25 bp, Homo sapien
ttacatatatgggtgtagctttact

SEQ ID NO: 2040634 - DNA, 25 bp, Homo sapien
caagttctgtgtaaaggataaacct

SEQ ID NO: 2040635 - DNA, 25 bp, Homo sapien
tcgctcaagttctgtgtaaaggata

SEQ ID NO: 2040636 - DNA, 25 bp, Homo sapien
ctggagtagaaaggctgtcgctcaa

SEQ ID NO: 2040637 - DNA, 25 bp, Homo sapien
agtagaaaggctgtcgctcaagttc

SEQ ID NO: 2040638 - DNA, 25 bp, Homo sapien
aaattggaggattcacacaacctga

SEQ ID NO: 2040639 - DNA, 25 bp, Homo sapien
gctacggtaaccaagaggatgtaga

SEQ ID NO: 2040640 - DNA, 25 bp, Homo sapien
caaaacaattggacactcaaaagca

SEQ ID NO: 2040641 - DNA, 25 bp, Homo sapien
ttaaaatctgtcatagggctgggcg

SEQ ID NO: 2040642 - DNA, 25 bp, Homo sapien
aaaacttctaacagatgcaggtgaa

SEQ ID NO: 2040643 - DNA, 25 bp, Homo sapien
cttctaacagatgcaggtgaaatat

SEQ ID NO: 2040644 - DNA, 25 bp, Homo sapien
ttataaagctctcttcgtaaagaag

SEQ ID NO: 2040645 - DNA, 25 bp, Homo sapien
ctaacagatgcaggtgaaatatagg

SEQ ID NO: 2040646 - DNA, 25 bp, Homo sapien
cttttgagacagtcattgggcccat

SEQ ID NO: 2040647 - DNA, 25 bp, Homo sapien
caatgatgccaaaggtctgtgttcc

SEQ ID NO: 2040648 - DNA, 25 bp, Homo sapien
cggtacaatgatgccaaaggtctgt

SEQ ID NO: 2040649 - DNA, 25 bp, Homo sapien
gccaaaggtctgtgttccttttgag

SEQ ID NO: 2040650 - DNA, 25 bp, Homo sapien
catctgcaggtgtcatagcttcctc

SEQ ID NO: 2040651 - DNA, 25 bp, Homo sapien
ggacacggtcctcctgttaactcca

SEQ ID NO: 2040652 - DNA, 25 bp, Homo sapien
aagccacctccaagacaaattcagg

SEQ ID NO: 2040653 - DNA, 25 bp, Homo sapien
aatgcagcgtcatctgtggacacgg

SEQ ID NO: 2040654 - DNA, 25 bp, Homo sapien
gaatggctttcttgtctgggttcct

SEQ ID NO: 2040655 - DNA, 25 bp, Homo sapien
tctgagatgaaaaccagaatggctt

SEQ ID NO: 2040656 - DNA, 25 bp, Homo sapien
atgttctgagatgaaaaccagaatg

SEQ ID NO: 2040657 - DNA, 25 bp, Homo sapien
ttctgagatgaaaaccagaatggct

SEQ ID NO: 2040658 - DNA, 25 bp, Homo sapien
ttagctttgagttcttctagtttct

SEQ ID NO: 2040659 - DNA, 25 bp, Homo sapien
ctccttagctttgagttcttctagt

SEQ ID NO: 2040660 - DNA, 25 bp, Homo sapien
ccttagctttgagttcttctagttt

SEQ ID NO: 2040661 - DNA, 25 bp, Homo sapien
tgctccttagctttgagttcttcta

SEQ ID NO: 2040662 - DNA, 25 bp, Homo sapien
tgtccacagaggagatatttctgac

SEQ ID NO: 2040663 - DNA, 25 bp, Homo sapien
gctcaggtagagtgaactcctagaa

SEQ ID NO: 2040664 - DNA, 25 bp, Homo sapien
gtgtccacagaggagatatttctga

SEQ ID NO: 2040665 - DNA, 25 bp, Homo sapien
tttcttgtgctcaggtagagtgaac

SEQ ID NO: 2040666 - DNA, 25 bp, Homo sapien
gggtatcacaaaggcccctagtggc

SEQ ID NO: 2040667 - DNA, 25 bp, Homo sapien
tgggcttctacaggccaggatcacc

SEQ ID NO: 2040668 - DNA, 25 bp, Homo sapien
agttctgtagaaactgggcttctac

SEQ ID NO: 2040669 - DNA, 25 bp, Homo sapien
ccctagtggcattagttctgtagaa

SEQ ID NO: 2040670 - DNA, 25 bp, Homo sapien
ggctgtgagccgactcccatggtgc

SEQ ID NO: 2040671 - DNA, 25 bp, Homo sapien
cgcctctgaggtgggaagtaatacc

SEQ ID NO: 2040672 - DNA, 25 bp, Homo sapien
atggtgcccactatagccctgaccg

SEQ ID NO: 2040673 - DNA, 25 bp, Homo sapien
tccaacatggtcctcgctgaaggca

SEQ ID NO: 2040674 - DNA, 25 bp, Homo sapien
tgctcaggaatctagcaagacccat

SEQ ID NO: 2040675 - DNA, 25 bp, Homo sapien
ttgacatccacaagggacccctcta

SEQ ID NO: 2040676 - DNA, 25 bp, Homo sapien
ccttgacatccacaagggacccctc

SEQ ID NO: 2040677 - DNA, 25 bp, Homo sapien
tctttgctcaggaatctagcaagac

SEQ ID NO: 2040678 - DNA, 25 bp, Homo sapien
agggactgtttggttaagcaaatcg

SEQ ID NO: 2040679 - DNA, 25 bp, Homo sapien
ttaagcaaatcggtttatccctgta

SEQ ID NO: 2040680 - DNA, 25 bp, Homo sapien
gcaaatcggtttatccctgtatcct

SEQ ID NO: 2040681 - DNA, 25 bp, Homo sapien
aagcaaatcggtttatccctgtatc

SEQ ID NO: 2040682 - DNA, 25 bp, Homo sapien
ctttcttttaaatcatcaatttcac

SEQ ID NO: 2040683 - DNA, 25 bp, Homo sapien
ttcttttaaatcatcaatttcactt

SEQ ID NO: 2040684 - DNA, 25 bp, Homo sapien
accaggcccggcccatgctttcttt

SEQ ID NO: 2040685 - DNA, 25 bp, Homo sapien
caggcccggcccatgctttctttta

SEQ ID NO: 2040686 - DNA, 25 bp, Homo sapien
cgatctggaattagagagacctttg

SEQ ID NO: 2040687 - DNA, 25 bp, Homo sapien
ttcagcattggtaactggcatccga

SEQ ID NO: 2040688 - DNA, 25 bp, Homo sapien
ccctctgacgaagatggtggtaggt

SEQ ID NO: 2040689 - DNA, 25 bp, Homo sapien
tatcttcccctctgacgaagatggt

SEQ ID NO: 2040690 - DNA, 25 bp, Homo sapien
ggacaatcaaacctcgaacaaatcg

SEQ ID NO: 2040691 - DNA, 25 bp, Homo sapien
gacaactatgtcttccgagtggagg

SEQ ID NO: 2040692 - DNA, 25 bp, Homo sapien
aatcgtttatcttgctagtcacagc

SEQ ID NO: 2040693 - DNA, 25 bp, Homo sapien
tgagaaagccgtgtttcccaccttc

SEQ ID NO: 2040694 - DNA, 25 bp, Homo sapien
tgcttccagagatgtagtcgcctat

SEQ ID NO: 2040695 - DNA, 25 bp, Homo sapien
tattccgaatgagacacaaagagtt

SEQ ID NO: 2040696 - DNA, 25 bp, Homo sapien
attccgaatgagacacaaagagttg

SEQ ID NO: 2040697 - DNA, 25 bp, Homo sapien
ttattccgaatgagacacaaagagt

SEQ ID NO: 2040698 - DNA, 25 bp, Homo sapien
tctccggtgaacgtgacggttccaa

SEQ ID NO: 2040699 - DNA, 25 bp, Homo sapien
tgagggagactcgttaaaggaaatc

SEQ ID NO: 2040700 - DNA, 25 bp, Homo sapien
acatgagtccaaggaacgtccccga

SEQ ID NO: 2040701 - DNA, 25 bp, Homo sapien
actccatgtggagattcagtgcgtg

SEQ ID NO: 2040702 - DNA, 25 bp, Homo sapien
tcagttagagggctaaaaatcttag

SEQ ID NO: 2040703 - DNA, 25 bp, Homo sapien
ggctaaaaatcttagaacagtatgc

SEQ ID NO: 2040704 - DNA, 25 bp, Homo sapien
cttgaagatcagttagagggctaaa

SEQ ID NO: 2040705 - DNA, 25 bp, Homo sapien
aatcttagaacagtatgcagtggaa

SEQ ID NO: 2040706 - DNA, 25 bp, Homo sapien
cagtttccctacactggtttttgca

SEQ ID NO: 2040707 - DNA, 25 bp, Homo sapien
tttccctacactggtttttgcaatc

SEQ ID NO: 2040708 - DNA, 25 bp, Homo sapien
ttccctacactggtttttgcaatct

SEQ ID NO: 2040709 - DNA, 25 bp, Homo sapien
ctttttaagaggaggtactatggca

SEQ ID NO: 2040710 - DNA, 25 bp, Homo sapien
gccctgtgactaagcggctactgta

SEQ ID NO: 2040711 - DNA, 25 bp, Homo sapien
tgagccctaggaataggccctgagc

SEQ ID NO: 2040712 - DNA, 25 bp, Homo sapien
gaagttctgacggaaagcactgctc

SEQ ID NO: 2040713 - DNA, 25 bp, Homo sapien
ttaagcacctataattggaagggat

SEQ ID NO: 2040714 - DNA, 25 bp, Homo sapien
gttcattggaatagaatactcggat

SEQ ID NO: 2040715 - DNA, 25 bp, Homo sapien
gaatactcggatttagaggattggt

SEQ ID NO: 2040716 - DNA, 25 bp, Homo sapien
actgatattaagggtgtcatggatg

SEQ ID NO: 2040717 - DNA, 25 bp, Homo sapien
gctttaaatgcatgagtagtttgga

SEQ ID NO: 2040718 - DNA, 25 bp, Homo sapien
gcatgagagttaatagttaccatct

SEQ ID NO: 2040719 - DNA, 25 bp, Homo sapien
ttaacaagggaaacattgcccttga

SEQ ID NO: 2040720 - DNA, 25 bp, Homo sapien
gaagagtctaataggttttcgcagc

SEQ ID NO: 2040721 - DNA, 25 bp, Homo sapien
tttcatatgggtagagttgttgctc

SEQ ID NO: 2040722 - DNA, 25 bp, Homo sapien
ctttgtgctcctcggatattgcaag

SEQ ID NO: 2040723 - DNA, 25 bp, Homo sapien
tcctcggatattgcaagttctttgg

SEQ ID NO: 2040724 - DNA, 25 bp, Homo sapien
cggatattgcaagttctttgggcgc

SEQ ID NO: 2040725 - DNA, 25 bp, Homo sapien
tgtgctcctcggatattgcaagttc

SEQ ID NO: 2040726 - DNA, 25 bp, Homo sapien
ggaaaagggcaggggagcaccagcc

SEQ ID NO: 2040727 - DNA, 25 bp, Homo sapien
agggaaaagggcaggggagcaccag

SEQ ID NO: 2040728 - DNA, 25 bp, Homo sapien
aaagggcaggggagcaccagccaca

SEQ ID NO: 2040729 - DNA, 25 bp, Homo sapien
aaaagggcaggggagcaccagccac

SEQ ID NO: 2040730 - DNA, 25 bp, Homo sapien
aactaaacaatagctgagagtatca

SEQ ID NO: 2040731 - DNA, 25 bp, Homo sapien
gctgagagtatcatcgccactatca

SEQ ID NO: 2040732 - DNA, 25 bp, Homo sapien
caatagctgagagtatcatcgccac

SEQ ID NO: 2040733 - DNA, 25 bp, Homo sapien
tttgccaaaactaaacaatagctga

SEQ ID NO: 2040734 - DNA, 25 bp, Homo sapien
catcgtcattggtccatagggagct

SEQ ID NO: 2040735 - DNA, 25 bp, Homo sapien
tagaatattggtaccacacagtgcc

SEQ ID NO: 2040736 - DNA, 25 bp, Homo sapien
gagggatgggctttgccctaattca

SEQ ID NO: 2040737 - DNA, 25 bp, Homo sapien
gatgcccacttcctgaacctttgtc

SEQ ID NO: 2040738 - DNA, 25 bp, Homo sapien
cagcctgatttctgtgtccctacag

SEQ ID NO: 2040739 - DNA, 25 bp, Homo sapien
agcctgatttctgtgtccctacagc

SEQ ID NO: 2040740 - DNA, 25 bp, Homo sapien
gcctgatttctgtgtccctacagct

SEQ ID NO: 2040741 - DNA, 25 bp, Homo sapien
agtgttttggcagccctgcatgtcg

SEQ ID NO: 2040742 - DNA, 25 bp, Homo sapien
cctgcatgtcgtattctgaacaaga

SEQ ID NO: 2040743 - DNA, 25 bp, Homo sapien
ggtcatctttagcatcattatgtga

SEQ ID NO: 2040744 - DNA, 25 bp, Homo sapien
cattatgtgagagtgttttggcagc

SEQ ID NO: 2040745 - DNA, 25 bp, Homo sapien
ttgggaggccaaggcgggtggattg

SEQ ID NO: 2040746 - DNA, 25 bp, Homo sapien
ggctcacacctgtaatcccagcact

SEQ ID NO: 2040747 - DNA, 25 bp, Homo sapien
cctgaggtcaggagaccagtctggc

SEQ ID NO: 2040748 - DNA, 25 bp, Homo sapien
tgaggataaatctgccaggcacggt

SEQ ID NO: 2040749 - DNA, 25 bp, Homo sapien
ttagtattcttgttccaggatagtg

SEQ ID NO: 2040750 - DNA, 25 bp, Homo sapien
gtattcttgttccaggatagtgcta

SEQ ID NO: 2040751 - DNA, 25 bp, Homo sapien
tagtattcttgttccaggatagtgc

SEQ ID NO: 2040752 - DNA, 25 bp, Homo sapien
attcttgttccaggatagtgctagc

SEQ ID NO: 2040753 - DNA, 25 bp, Homo sapien
gctgtaatggcaaaacggcctttca

SEQ ID NO: 2040754 - DNA, 25 bp, Homo sapien
agagtggacgtgatactcatcccag

SEQ ID NO: 2040755 - DNA, 25 bp, Homo sapien
aaactctctggtgcttgtaagcacc

SEQ ID NO: 2040756 - DNA, 25 bp, Homo sapien
agcacccttcttgaggaattctgag

SEQ ID NO: 2040757 - DNA, 25 bp, Homo sapien
aaaatgactttcagagcctatctct

SEQ ID NO: 2040758 - DNA, 25 bp, Homo sapien
aatgactttcagagcctatctctgg

SEQ ID NO: 2040759 - DNA, 25 bp, Homo sapien
caccatcactgtcagaccagcaaaa

SEQ ID NO: 2040760 - DNA, 25 bp, Homo sapien
accatcactgtcagaccagcaaaat

SEQ ID NO: 2040761 - DNA, 25 bp, Homo sapien
atccacagctatgatcacttgtttc

SEQ ID NO: 2040762 - DNA, 25 bp, Homo sapien
cacagctatgatcacttgtttctcc

SEQ ID NO: 2040763 - DNA, 25 bp, Homo sapien
ctgttgattgtcttcatccacagct

SEQ ID NO: 2040764 - DNA, 25 bp, Homo sapien
acagctatgatcacttgtttctcca

SEQ ID NO: 2040765 - DNA, 25 bp, Homo sapien
ctaagtcatggacaccttttggttt

SEQ ID NO: 2040766 - DNA, 25 bp, Homo sapien
aagtcatggacaccttttggtttct

SEQ ID NO: 2040767 - DNA, 25 bp, Homo sapien
gtcatggacaccttttggtttctta

SEQ ID NO: 2040768 - DNA, 25 bp, Homo sapien
tcatggacaccttttggtttcttat

SEQ ID NO: 2040769 - DNA, 25 bp, Homo sapien
tctccagattgtcttgtccctcagc

SEQ ID NO: 2040770 - DNA, 25 bp, Homo sapien
ccagattgtcttgtccctcagcttt

SEQ ID NO: 2040771 - DNA, 25 bp, Homo sapien
ctccagattgtcttgtccctcagct

SEQ ID NO: 2040772 - DNA, 25 bp, Homo sapien
tccagattgtcttgtccctcagctt

SEQ ID NO: 2040773 - DNA, 25 bp, Homo sapien
ccgagacagggtatgcaaggtacat

SEQ ID NO: 2040774 - DNA, 25 bp, Homo sapien
tattaaccgagacagggtatgcaag

SEQ ID NO: 2040775 - DNA, 25 bp, Homo sapien
atttgtaagtattaaccgagacagg

SEQ ID NO: 2040776 - DNA, 25 bp, Homo sapien
taagtattaaccgagacagggtatg

SEQ ID NO: 2040777 - DNA, 25 bp, Homo sapien
aaaggttatacatgctttttattct

SEQ ID NO: 2040778 - DNA, 25 bp, Homo sapien
gtgacttctgggatctatatttcca

SEQ ID NO: 2040779 - DNA, 25 bp, Homo sapien
tgtttcacatttggtgacttctggg

SEQ ID NO: 2040780 - DNA, 25 bp, Homo sapien
aattatgaaataggtaagtcatgcc

SEQ ID NO: 2040781 - DNA, 25 bp, Homo sapien
ggaaatcatcgcatactacgcactg

SEQ ID NO: 2040782 - DNA, 25 bp, Homo sapien
gttcttctcaaccagtcctccaggg

SEQ ID NO: 2040783 - DNA, 25 bp, Homo sapien
gctgtacagtaagagtgcgggcttt

SEQ ID NO: 2040784 - DNA, 25 bp, Homo sapien
ttgacaaacccagccactctgatgg

SEQ ID NO: 2040785 - DNA, 25 bp, Homo sapien
atgaacaggcttagatcctccctta

SEQ ID NO: 2040786 - DNA, 25 bp, Homo sapien
gtttctttgcttgtagagtatgaac

SEQ ID NO: 2040787 - DNA, 25 bp, Homo sapien
caggcttagatcctcccttaggata

SEQ ID NO: 2040788 - DNA, 25 bp, Homo sapien
cccttaggatactcttaaccagatc

SEQ ID NO: 2040789 - DNA, 25 bp, Homo sapien
cttcatgtgcttgacaggattgaca

SEQ ID NO: 2040790 - DNA, 25 bp, Homo sapien
attgacagaagttctcttcactgtg

SEQ ID NO: 2040791 - DNA, 25 bp, Homo sapien
gaaacttcacatcttcatgtgcttg

SEQ ID NO: 2040792 - DNA, 25 bp, Homo sapien
agaaatgaatccagttgaaacttca

SEQ ID NO: 2040793 - DNA, 25 bp, Homo sapien
cctttgattgtttccaattgttgcc

SEQ ID NO: 2040794 - DNA, 25 bp, Homo sapien
agtgacatcctttgattgtttccaa

SEQ ID NO: 2040795 - DNA, 25 bp, Homo sapien
caagtccctatagtgacatcctttg

SEQ ID NO: 2040796 - DNA, 25 bp, Homo sapien
cttaacccaagtccctatagtgaca

SEQ ID NO: 2040797 - DNA, 25 bp, Homo sapien
cagctggtgtggttagaatcatgga

SEQ ID NO: 2040798 - DNA, 25 bp, Homo sapien
gccatctatttaccaacctgctaag

SEQ ID NO: 2040799 - DNA, 25 bp, Homo sapien
tactggctctagttaatcacaggcc

SEQ ID NO: 2040800 - DNA, 25 bp, Homo sapien
gaactgccaagagggtagtgagacc

SEQ ID NO: 2040801 - DNA, 25 bp, Homo sapien
aaagctgccagttaaaacatgcttt

SEQ ID NO: 2040802 - DNA, 25 bp, Homo sapien
catacagttgtttctctttagatgg

SEQ ID NO: 2040803 - DNA, 25 bp, Homo sapien
tttatcttatggaccttataaatca

SEQ ID NO: 2040804 - DNA, 25 bp, Homo sapien
agctcagaaccagccgggcacattg

SEQ ID NO: 2040805 - DNA, 25 bp, Homo sapien
cctataatggagaaattgatctgcc

SEQ ID NO: 2040806 - DNA, 25 bp, Homo sapien
taagctttgcaatcccttaggacac

SEQ ID NO: 2040807 - DNA, 25 bp, Homo sapien
gatgaatggattcgctaggcccaca

SEQ ID NO: 2040808 - DNA, 25 bp, Homo sapien
gtaactcacctgtagacctgctgaa

SEQ ID NO: 2040809 - DNA, 25 bp, Homo sapien
tatttgacagattgcaactacactc

SEQ ID NO: 2040810 - DNA, 25 bp, Homo sapien
tacactcactttgatgtccttctgg

SEQ ID NO: 2040811 - DNA, 25 bp, Homo sapien
tgaaaacaatcttctaggccaaagg

SEQ ID NO: 2040812 - DNA, 25 bp, Homo sapien
caaagttgctagaactatgtagtat

SEQ ID NO: 2040813 - DNA, 25 bp, Homo sapien
agtatcaaaagctagggccaggtgc

SEQ ID NO: 2040814 - DNA, 25 bp, Homo sapien
tgactagaacagtctcaagcccaaa

SEQ ID NO: 2040815 - DNA, 25 bp, Homo sapien
aatgagaccaggattgactagaaca

SEQ ID NO: 2040816 - DNA, 25 bp, Homo sapien
gacagtatcaaaagctagggccagg

SEQ ID NO: 2040817 - DNA, 25 bp, Homo sapien
gaaactgcctttaggaagccaatgt

SEQ ID NO: 2040818 - DNA, 25 bp, Homo sapien
tttggcaaactggtggaaactgcct

SEQ ID NO: 2040819 - DNA, 25 bp, Homo sapien
tgctgctgacacaatgatcctttgg

SEQ ID NO: 2040820 - DNA, 25 bp, Homo sapien
aataacctaagttgaaccacagtgg

SEQ ID NO: 2040821 - DNA, 25 bp, Homo sapien
accatatggttgttgccagtcctga

SEQ ID NO: 2040822 - DNA, 25 bp, Homo sapien
acagcctaggtgtgccaagttgcca

SEQ ID NO: 2040823 - DNA, 25 bp, Homo sapien
ttatcactgagaccatagtccttgc

SEQ ID NO: 2040824 - DNA, 25 bp, Homo sapien
taacaaagcagataccgagtcatcc

SEQ ID NO: 2040825 - DNA, 25 bp, Homo sapien
ttacgtgctattctgtccattaata

SEQ ID NO: 2040826 - DNA, 25 bp, Homo sapien
cgtgctattctgtccattaataaaa

SEQ ID NO: 2040827 - DNA, 25 bp, Homo sapien
gctattctgtccattaataaaatta

SEQ ID NO: 2040828 - DNA, 25 bp, Homo sapien
tacgtgctattctgtccattaataa

SEQ ID NO: 2040829 - DNA, 25 bp, Homo sapien
ttccatcaggagtgggatctgagaa

SEQ ID NO: 2040830 - DNA, 25 bp, Homo sapien
tttccatcaggagtgggatctgaga

SEQ ID NO: 2040831 - DNA, 25 bp, Homo sapien
gatgaaaaggccttgtttatagaaa

SEQ ID NO: 2040832 - DNA, 25 bp, Homo sapien
caaaaaatctaataaacgagtctgg

SEQ ID NO: 2040833 - DNA, 25 bp, Homo sapien
gtctggcaaggctgcatattcaaga

SEQ ID NO: 2040834 - DNA, 25 bp, Homo sapien
aatctaataaacgagtctggcaagg

SEQ ID NO: 2040835 - DNA, 25 bp, Homo sapien
cttcttctgacctgataactggaag

SEQ ID NO: 2040836 - DNA, 25 bp, Homo sapien
tcttctgacctgataactggaagtt

SEQ ID NO: 2040837 - DNA, 25 bp, Homo sapien
ttctgacctgataactggaagtttc

SEQ ID NO: 2040838 - DNA, 25 bp, Homo sapien
ttcttctgacctgataactggaagt

SEQ ID NO: 2040839 - DNA, 25 bp, Homo sapien
gtcaaccatctctctaatctcgtca

SEQ ID NO: 2040840 - DNA, 25 bp, Homo sapien
tggaatagcacattagtggagcctg

SEQ ID NO: 2040841 - DNA, 25 bp, Homo sapien
gatatgttccgcaattaggcagcca

SEQ ID NO: 2040842 - DNA, 25 bp, Homo sapien
taggcagccaactacttttttgtca

SEQ ID NO: 2040843 - DNA, 25 bp, Homo sapien
acttctcaacacaataaactctctg

SEQ ID NO: 2040844 - DNA, 25 bp, Homo sapien
tctcaacacaataaactctctgaac

SEQ ID NO: 2040845 - DNA, 25 bp, Homo sapien
cattatctggttcacttctcaacac

SEQ ID NO: 2040846 - DNA, 25 bp, Homo sapien
ggttccaggattcattatctggttc

SEQ ID NO: 2040847 - DNA, 25 bp, Homo sapien
tcagcttttatttctgatcgtgaaa

SEQ ID NO: 2040848 - DNA, 25 bp, Homo sapien
ttttagttggcattattcacttaac

SEQ ID NO: 2040849 - DNA, 25 bp, Homo sapien
atttctgatcgtgaaatcttttagt

SEQ ID NO: 2040850 - DNA, 25 bp, Homo sapien
cacttaacagaagataagcatatct

SEQ ID NO: 2040851 - DNA, 25 bp, Homo sapien
gaattcatatactggacacactaca

SEQ ID NO: 2040852 - DNA, 25 bp, Homo sapien
tactggacacactacaaagtttaac

SEQ ID NO: 2040853 - DNA, 25 bp, Homo sapien
gccagcaatctgttatcctcttaaa

SEQ ID NO: 2040854 - DNA, 25 bp, Homo sapien
cagaataggtgtttcaatatactat

SEQ ID NO: 2040855 - DNA, 25 bp, Homo sapien
tacatgaagtttcactggaaattta

SEQ ID NO: 2040856 - DNA, 25 bp, Homo sapien
tctacatgaagtttcactggaaatt

SEQ ID NO: 2040857 - DNA, 25 bp, Homo sapien
acatgaagtttcactggaaatttac

SEQ ID NO: 2040858 - DNA, 25 bp, Homo sapien
ctacatgaagtttcactggaaattt

SEQ ID NO: 2040859 - DNA, 25 bp, Homo sapien
ctttttcagggcatactttgggtct

SEQ ID NO: 2040860 - DNA, 25 bp, Homo sapien
ttttcagggcatactttgggtcttc

SEQ ID NO: 2040861 - DNA, 25 bp, Homo sapien
atcagggtattcagccagaattctt

SEQ ID NO: 2040862 - DNA, 25 bp, Homo sapien
tcagggtattcagccagaattcttt

SEQ ID NO: 2040863 - DNA, 25 bp, Homo sapien
cagggtattcagccagaattctttc

SEQ ID NO: 2040864 - DNA, 25 bp, Homo sapien
tgaaagccacacaccaaaagcaagc

SEQ ID NO: 2040865 - DNA, 25 bp, Homo sapien
catacaataggtacaaggcaagcta

SEQ ID NO: 2040866 - DNA, 25 bp, Homo sapien
tatgtctggcatgccaaagacctcc

SEQ ID NO: 2040867 - DNA, 25 bp, Homo sapien
ctaccaaagccacaagaaggagact

SEQ ID NO: 2040868 - DNA, 25 bp, Homo sapien
taatagggaaggagaagctacgttg

SEQ ID NO: 2040869 - DNA, 25 bp, Homo sapien
cgttgtgtgtatctgaagttaaaca

SEQ ID NO: 2040870 - DNA, 25 bp, Homo sapien
cttctaagaatctaatagggaagga

SEQ ID NO: 2040871 - DNA, 25 bp, Homo sapien
tccacactcgtggtgattaatgagc

SEQ ID NO: 2040872 - DNA, 25 bp, Homo sapien
gaatgagcttaactagttgttccag

SEQ ID NO: 2040873 - DNA, 25 bp, Homo sapien
ccagaggttaaaactaggagctttg

SEQ ID NO: 2040874 - DNA, 25 bp, Homo sapien
ctatggcaagtgtgaaagcagattc

SEQ ID NO: 2040875 - DNA, 25 bp, Homo sapien
aatctagtaagatgggactgaacca

SEQ ID NO: 2040876 - DNA, 25 bp, Homo sapien
tctaccaacgtcatagtaattcagc

SEQ ID NO: 2040877 - DNA, 25 bp, Homo sapien
ggcatgagccactgaccggtattgt

SEQ ID NO: 2040878 - DNA, 25 bp, Homo sapien
ggtattgtcgactctttcttcaaag

SEQ ID NO: 2040879 - DNA, 25 bp, Homo sapien
tcctatttctaccaacgtcatagta

SEQ ID NO: 2040880 - DNA, 25 bp, Homo sapien
catatttaacagcacttataaactg

SEQ ID NO: 2040881 - DNA, 25 bp, Homo sapien
catcttctggatttgaagctgtata

SEQ ID NO: 2040882 - DNA, 25 bp, Homo sapien
gcacttataaactggttgtggaaaa

SEQ ID NO: 2040883 - DNA, 25 bp, Homo sapien
ttgaagctgtatacagcattccaca

SEQ ID NO: 2040884 - DNA, 25 bp, Homo sapien
gctgggattataggaacgaatcacc

SEQ ID NO: 2040885 - DNA, 25 bp, Homo sapien
gattataggaacgaatcaccacgcc

SEQ ID NO: 2040886 - DNA, 25 bp, Homo sapien
ctcaccgaaacctccaccttccgag

SEQ ID NO: 2040887 - DNA, 25 bp, Homo sapien
gggattataggaacgaatcaccacg

SEQ ID NO: 2040888 - DNA, 25 bp, Homo sapien
ctgtttttcatcagttttctctgct

SEQ ID NO: 2040889 - DNA, 25 bp, Homo sapien
tataatcaactgtttttcatcagtt

SEQ ID NO: 2040890 - DNA, 25 bp, Homo sapien
tcaactgtttttcatcagttttctc

SEQ ID NO: 2040891 - DNA, 25 bp, Homo sapien
tctctgcttcttttagtttcaagtc

SEQ ID NO: 2040892 - DNA, 25 bp, Homo sapien
aaatgggaattacacttaggcaaag

SEQ ID NO: 2040893 - DNA, 25 bp, Homo sapien
acttaggcaaagaatgatttcgtgg

SEQ ID NO: 2040894 - DNA, 25 bp, Homo sapien
caaagaatgatttcgtggtgtctcc

SEQ ID NO: 2040895 - DNA, 25 bp, Homo sapien
ctccaaatgggaattacacttaggc

SEQ ID NO: 2040896 - DNA, 25 bp, Homo sapien
ttactgagaatactatgctgttggg

SEQ ID NO: 2040897 - DNA, 25 bp, Homo sapien
ctgttatcactgcttttagatgtct

SEQ ID NO: 2040898 - DNA, 25 bp, Homo sapien
ctggttactgagaatactatgctgt

SEQ ID NO: 2040899 - DNA, 25 bp, Homo sapien
cactgcttttagatgtctggttact

SEQ ID NO: 2040900 - DNA, 25 bp, Homo sapien
gagcagagtcgaagcagcagtaaca

SEQ ID NO: 2040901 - DNA, 25 bp, Homo sapien
gcttggattccaaacattggctgaa

SEQ ID NO: 2040902 - DNA, 25 bp, Homo sapien
ctggactgttttctagcttggattc

SEQ ID NO: 2040903 - DNA, 25 bp, Homo sapien
tgactgagcagagtcgaagcagcag

SEQ ID NO: 2040904 - DNA, 25 bp, Homo sapien
ggtgaaagtcttttcatagaagaaa

SEQ ID NO: 2040905 - DNA, 25 bp, Homo sapien
aaagtcttttcatagaagaaaagat

SEQ ID NO: 2040906 - DNA, 25 bp, Homo sapien
gtgaaagtcttttcatagaagaaaa

SEQ ID NO: 2040907 - DNA, 25 bp, Homo sapien
tgaaagtcttttcatagaagaaaag

SEQ ID NO: 2040908 - DNA, 25 bp, Homo sapien
caaatgacaattttcaggagccctt

SEQ ID NO: 2040909 - DNA, 25 bp, Homo sapien
taaaaacgtactttgagtcactgga

SEQ ID NO: 2040910 - DNA, 25 bp, Homo sapien
catctgattatccaatggtgggtca

SEQ ID NO: 2040911 - DNA, 25 bp, Homo sapien
gagagtccaacttattgtgctgcac

SEQ ID NO: 2040912 - DNA, 25 bp, Homo sapien
tcagatccttgcgtgcattgagaac

SEQ ID NO: 2040913 - DNA, 25 bp, Homo sapien
ttttcgggaccactgaagtagccat

SEQ ID NO: 2040914 - DNA, 25 bp, Homo sapien
tcacctcagaagttacaggcacagg

SEQ ID NO: 2040915 - DNA, 25 bp, Homo sapien
tagcctttgtgatctccggttaagc

SEQ ID NO: 2040916 - DNA, 25 bp, Homo sapien
tactcatgcgtgtttccaattctgg

SEQ ID NO: 2040917 - DNA, 25 bp, Homo sapien
actttcactggaagatttagcctgt

SEQ ID NO: 2040918 - DNA, 25 bp, Homo sapien
gatgctgcctttgatgaccttgtac

SEQ ID NO: 2040919 - DNA, 25 bp, Homo sapien
gtagctttatcattagatgctgcct

SEQ ID NO: 2040920 - DNA, 25 bp, Homo sapien
tcctggtaggcgtgaatgctgacta

SEQ ID NO: 2040921 - DNA, 25 bp, Homo sapien
caggcctagctctattactggagga

SEQ ID NO: 2040922 - DNA, 25 bp, Homo sapien
tattggacttcgattcacttgaaac

SEQ ID NO: 2040923 - DNA, 25 bp, Homo sapien
gctagtattattactgaggagcagg

SEQ ID NO: 2040924 - DNA, 25 bp, Homo sapien
caaaaccattccttctaatatgctc

SEQ ID NO: 2040925 - DNA, 25 bp, Homo sapien
ccaaaatatagactcgatgtctcag

SEQ ID NO: 2040926 - DNA, 25 bp, Homo sapien
gactcgatgtctcagccaccataac

SEQ ID NO: 2040927 - DNA, 25 bp, Homo sapien
gtctcagccaccataactcatgaag

SEQ ID NO: 2040928 - DNA, 25 bp, Homo sapien
ttctgatgaatgatacttcttatca

SEQ ID NO: 2040929 - DNA, 25 bp, Homo sapien
tcctgtatgtttagtaatctttaaa

SEQ ID NO: 2040930 - DNA, 25 bp, Homo sapien
ttcctgtatgtttagtaatctttaa

SEQ ID NO: 2040931 - DNA, 25 bp, Homo sapien
tacttcttatcacttcctgtatgtt

SEQ ID NO: 2040932 - DNA, 25 bp, Homo sapien
catgataactgggataattcatcac

SEQ ID NO: 2040933 - DNA, 25 bp, Homo sapien
tcaaatcatgataactgggataatt

SEQ ID NO: 2040934 - DNA, 25 bp, Homo sapien
catacaaccacgtaataatcaaatc

SEQ ID NO: 2040935 - DNA, 25 bp, Homo sapien
cagacatacaaccacgtaataatca

SEQ ID NO: 2040936 - DNA, 25 bp, Homo sapien
caaatatccttgtaagagagtggca

SEQ ID NO: 2040937 - DNA, 25 bp, Homo sapien
gggcaaccaacagaagctagatgag

SEQ ID NO: 2040938 - DNA, 25 bp, Homo sapien
gattggagtaatgtggtcataggcc

SEQ ID NO: 2040939 - DNA, 25 bp, Homo sapien
gcacagatatccttgtaagagaagg

SEQ ID NO: 2040940 - DNA, 25 bp, Homo sapien
tcccggcacctctggaggcgaggct

SEQ ID NO: 2040941 - DNA, 25 bp, Homo sapien
cctctggaggcgaggctggtggatc

SEQ ID NO: 2040942 - DNA, 25 bp, Homo sapien
caatcccggcacctctggaggcgag

SEQ ID NO: 2040943 - DNA, 25 bp, Homo sapien
cacctctggaggcgaggctggtgga

SEQ ID NO: 2040944 - DNA, 25 bp, Homo sapien
tgaccgtcttgggtgcgcttgcgca

SEQ ID NO: 2040945 - DNA, 25 bp, Homo sapien
cagatgggagttacctgtgaccgtc

SEQ ID NO: 2040946 - DNA, 25 bp, Homo sapien
tcacatccgggtatcaggagacact

SEQ ID NO: 2040947 - DNA, 25 bp, Homo sapien
cgtgtcacgcagtttttcaccccgg

SEQ ID NO: 2040948 - DNA, 25 bp, Homo sapien
gagtaggcgcttccggccattcata

SEQ ID NO: 2040949 - DNA, 25 bp, Homo sapien
tgcagtcggtcagtgttcggttgaa

SEQ ID NO: 2040950 - DNA, 25 bp, Homo sapien
gcgtttccgccatgcgcctgcagtg

SEQ ID NO: 2040951 - DNA, 25 bp, Homo sapien
ttgacgtccggagcccctggagtag

SEQ ID NO: 2040952 - DNA, 25 bp, Homo sapien
cttaatccactcatagttcaatttt

SEQ ID NO: 2040953 - DNA, 25 bp, Homo sapien
gccaatctgaatcttaatccactca

SEQ ID NO: 2040954 - DNA, 25 bp, Homo sapien
tcttaatccactcatagttcaattt

SEQ ID NO: 2040955 - DNA, 25 bp, Homo sapien
caggccctttttatcccactcatgg

SEQ ID NO: 2040956 - DNA, 25 bp, Homo sapien
cctgggaggtgagcttgactttttc

SEQ ID NO: 2040957 - DNA, 25 bp, Homo sapien
tttatactgagggacactgtgttac

SEQ ID NO: 2040958 - DNA, 25 bp, Homo sapien
tgtatttgtcctgcccatagtagcc

SEQ ID NO: 2040959 - DNA, 25 bp, Homo sapien
ggcaaaaggcaagagacccctgtaa

SEQ ID NO: 2040960 - DNA, 25 bp, Homo sapien
taaaaattggagcttagtgccgtgg

SEQ ID NO: 2040961 - DNA, 25 bp, Homo sapien
ccctgtaatgcagcaagtggagaga

SEQ ID NO: 2040962 - DNA, 25 bp, Homo sapien
taaacagttggctcctgtcctcgtg

SEQ ID NO: 2040963 - DNA, 25 bp, Homo sapien
aaattacgttttgtcctggcatggt

SEQ ID NO: 2040964 - DNA, 25 bp, Homo sapien
gctgagctgccttcacaattgtggt

SEQ ID NO: 2040965 - DNA, 25 bp, Homo sapien
tagtttttgcatatcattctggacc

SEQ ID NO: 2040966 - DNA, 25 bp, Homo sapien
tgtggttcagacaaaatgcacccaa

SEQ ID NO: 2040967 - DNA, 25 bp, Homo sapien
gagcacatatagaagtcagtctaac

SEQ ID NO: 2040968 - DNA, 25 bp, Homo sapien
taagagagttcatgtccatgctcaa

SEQ ID NO: 2040969 - DNA, 25 bp, Homo sapien
aagagagttcatgtccatgctcaac

SEQ ID NO: 2040970 - DNA, 25 bp, Homo sapien
ttaagagagttcatgtccatgctca

SEQ ID NO: 2040971 - DNA, 25 bp, Homo sapien
gaagtaaggaccaaagcaacattag

SEQ ID NO: 2040972 - DNA, 25 bp, Homo sapien
tcttggccagattccctccagaaaa

SEQ ID NO: 2040973 - DNA, 25 bp, Homo sapien
tccagaaaaccaatatggcctccat

SEQ ID NO: 2040974 - DNA, 25 bp, Homo sapien
cacaaattgcttgaagacacgatcc

SEQ ID NO: 2040975 - DNA, 25 bp, Homo sapien
tgattaactttacatgatgtggctg

SEQ ID NO: 2040976 - DNA, 25 bp, Homo sapien
ttaactttacatgatgtggctgggc

SEQ ID NO: 2040977 - DNA, 25 bp, Homo sapien
aaaaactaagcttagcatctttgtg

SEQ ID NO: 2040978 - DNA, 25 bp, Homo sapien
ttttgattaactttacatgatgtgg

SEQ ID NO: 2040979 - DNA, 25 bp, Homo sapien
gggaggccaaggctgcagtgaacta

SEQ ID NO: 2040980 - DNA, 25 bp, Homo sapien
ggccaaggctgcagtgaactatcgc

SEQ ID NO: 2040981 - DNA, 25 bp, Homo sapien
gcctggccaacatggtgaaacccca

SEQ ID NO: 2040982 - DNA, 25 bp, Homo sapien
tcatgatgtcaggagttcaagaacg

SEQ ID NO: 2040983 - DNA, 25 bp, Homo sapien
gacagtgctctaaatttgacccttc

SEQ ID NO: 2040984 - DNA, 25 bp, Homo sapien
gctaaaattcactgtaagagaactg

SEQ ID NO: 2040985 - DNA, 25 bp, Homo sapien
gcccttccacaaattgactgtttag

SEQ ID NO: 2040986 - DNA, 25 bp, Homo sapien
tgcagtaaactatggtagtatcagt

SEQ ID NO: 2040987 - DNA, 25 bp, Homo sapien
ggacttccttaatccaatgaaaata

SEQ ID NO: 2040988 - DNA, 25 bp, Homo sapien
ccatgtaagtcaactgatattaaag

SEQ ID NO: 2040989 - DNA, 25 bp, Homo sapien
acaatcaccatgtaagtcaactgat

SEQ ID NO: 2040990 - DNA, 25 bp, Homo sapien
tggtaaaaagggcagtgaaatataa

SEQ ID NO: 2040991 - DNA, 25 bp, Homo sapien
gaagaggcaagtgataacaatattc

SEQ ID NO: 2040992 - DNA, 25 bp, Homo sapien
aattcttctttataggaatctcagg

SEQ ID NO: 2040993 - DNA, 25 bp, Homo sapien
taggaatctcaggaagaagaggcaa

SEQ ID NO: 2040994 - DNA, 25 bp, Homo sapien
tagtccaaatatgcttcactaattg

SEQ ID NO: 2040995 - DNA, 25 bp, Homo sapien
cctactgacttcagtctaggactcg

SEQ ID NO: 2040996 - DNA, 25 bp, Homo sapien
gacttcagtctaggactcggactgg

SEQ ID NO: 2040997 - DNA, 25 bp, Homo sapien
tggaattcctactgacttcagtcta

SEQ ID NO: 2040998 - DNA, 25 bp, Homo sapien
cggactggcatcagtataataatca

SEQ ID NO: 2040999 - DNA, 25 bp, Homo sapien
tgaagtgaatcgcttatcaaactct

SEQ ID NO: 2041000 - DNA, 25 bp, Homo sapien
actgaagtgaatcgcttatcaaact

SEQ ID NO: 2041001 - DNA, 25 bp, Homo sapien
aagtgaatcgcttatcaaactctct

SEQ ID NO: 2041002 - DNA, 25 bp, Homo sapien
gactgaagtgaatcgcttatcaaac

SEQ ID NO: 2041003 - DNA, 25 bp, Homo sapien
aacttgttttacaaacatatgtcgg

SEQ ID NO: 2041004 - DNA, 25 bp, Homo sapien
ttgttttacaaacatatgtcggtgc

SEQ ID NO: 2041005 - DNA, 25 bp, Homo sapien
tcaacttgttttacaaacatatgtc

SEQ ID NO: 2041006 - DNA, 25 bp, Homo sapien
cttgttttacaaacatatgtcggtg

SEQ ID NO: 2041007 - DNA, 25 bp, Homo sapien
caagcgaaggtgttccaaccaacgg

SEQ ID NO: 2041008 - DNA, 25 bp, Homo sapien
catcaaaggcgttttggacccaatt

SEQ ID NO: 2041009 - DNA, 25 bp, Homo sapien
tccaatgactctgagcaagcgaagg

SEQ ID NO: 2041010 - DNA, 25 bp, Homo sapien
aacggaaaaagttgcagctgccatc

SEQ ID NO: 2041011 - DNA, 25 bp, Homo sapien
atgcatcaccacgccccggtaattt

SEQ ID NO: 2041012 - DNA, 25 bp, Homo sapien
ggcatgcatcaccacgccccggtaa

SEQ ID NO: 2041013 - DNA, 25 bp, Homo sapien
ggagacggggtttcattgtgttgac

SEQ ID NO: 2041014 - DNA, 25 bp, Homo sapien
caggctggttttgaattcctgacct

SEQ ID NO: 2041015 - DNA, 25 bp, Homo sapien
gtccgccatcaaacacagctaatta

SEQ ID NO: 2041016 - DNA, 25 bp, Homo sapien
gggactacacgtgtccgccatcaaa

SEQ ID NO: 2041017 - DNA, 25 bp, Homo sapien
gacacaatcacaccttagggcagcc

SEQ ID NO: 2041018 - DNA, 25 bp, Homo sapien
cctgaggagtttgtaaatgactact

SEQ ID NO: 2041019 - DNA, 25 bp, Homo sapien
gcttcagaacgcagctccagggatg

SEQ ID NO: 2041020 - DNA, 25 bp, Homo sapien
gggcttcagacaaaccttcaggctc

SEQ ID NO: 2041021 - DNA, 25 bp, Homo sapien
tgaaagtcatgctacaagttcagct

SEQ ID NO: 2041022 - DNA, 25 bp, Homo sapien
gatgcaatcgacttcatgggcttca

SEQ ID NO: 2041023 - DNA, 25 bp, Homo sapien
aaaagtgtccatacagctagcttat

SEQ ID NO: 2041024 - DNA, 25 bp, Homo sapien
tgtccatacagctagcttatagtcc

SEQ ID NO: 2041025 - DNA, 25 bp, Homo sapien
tagcttatagtcctctcaaagagac

SEQ ID NO: 2041026 - DNA, 25 bp, Homo sapien
cagctagcttatagtcctctcaaag

SEQ ID NO: 2041027 - DNA, 25 bp, Homo sapien
ggtacaggctgtgtacatggtgaat

SEQ ID NO: 2041028 - DNA, 25 bp, Homo sapien
acaggctgtgtacatggtgaataac

SEQ ID NO: 2041029 - DNA, 25 bp, Homo sapien
tcagtgttagcacaacaataagtcc

SEQ ID NO: 2041030 - DNA, 25 bp, Homo sapien
gaagggtacaggctgtgtacatggt

SEQ ID NO: 2041031 - DNA, 25 bp, Homo sapien
catgaacatgcaaggaaggcttgat

SEQ ID NO: 2041032 - DNA, 25 bp, Homo sapien
tagagttggcactaacaaaaagacc

SEQ ID NO: 2041033 - DNA, 25 bp, Homo sapien
tcctgtcttgcagcgcacatacatg

SEQ ID NO: 2041034 - DNA, 25 bp, Homo sapien
ctggaagtagtgacaagtaaagcac

SEQ ID NO: 2041035 - DNA, 25 bp, Homo sapien
cactgtcactcaggctagattgcag

SEQ ID NO: 2041036 - DNA, 25 bp, Homo sapien
agattgcagtggcatgatcacagct

SEQ ID NO: 2041037 - DNA, 25 bp, Homo sapien
ctagattgcagtggcatgatcacag

SEQ ID NO: 2041038 - DNA, 25 bp, Homo sapien
ggctagattgcagtggcatgatcac

SEQ ID NO: 2041039 - DNA, 25 bp, Homo sapien
caaattgcctaagttgtccctagga

SEQ ID NO: 2041040 - DNA, 25 bp, Homo sapien
tactctgcagtggaagccataactc

SEQ ID NO: 2041041 - DNA, 25 bp, Homo sapien
ctgaaaaagacacacgaatgcctgg

SEQ ID NO: 2041042 - DNA, 25 bp, Homo sapien
tgttaatcaggtagccagactctcc

SEQ ID NO: 2041043 - DNA, 25 bp, Homo sapien
ttggactgcacctatcaatgttggg

SEQ ID NO: 2041044 - DNA, 25 bp, Homo sapien
agcctgagttcctgccgtgagacca

SEQ ID NO: 2041045 - DNA, 25 bp, Homo sapien
aaagggccgacttgggtgcaacaat

SEQ ID NO: 2041046 - DNA, 25 bp, Homo sapien
tactgaaaggtcaagacaccaggct

SEQ ID NO: 2041047 - DNA, 25 bp, Homo sapien
tcaaaatgccagttcaggataagct

SEQ ID NO: 2041048 - DNA, 25 bp, Homo sapien
cattaaggaaatattgcgatgaggg

SEQ ID NO: 2041049 - DNA, 25 bp, Homo sapien
tttgtggacctctgaagtagagcca

SEQ ID NO: 2041050 - DNA, 25 bp, Homo sapien
gcaagctgcttctctcattaaggaa

SEQ ID NO: 2041051 - DNA, 25 bp, Homo sapien
tgtctgggactagagtcaggtaccc

SEQ ID NO: 2041052 - DNA, 25 bp, Homo sapien
gagccagccctaacttgaactagaa

SEQ ID NO: 2041053 - DNA, 25 bp, Homo sapien
ccgcatccggccttaagttggctga

SEQ ID NO: 2041054 - DNA, 25 bp, Homo sapien
caatgtgtggcctgttgagatgagc

SEQ ID NO: 2041055 - DNA, 25 bp, Homo sapien
actatgcccagccgacttcattcct

SEQ ID NO: 2041056 - DNA, 25 bp, Homo sapien
caggatatggagctatcacattttg

SEQ ID NO: 2041057 - DNA, 25 bp, Homo sapien
aggatatggagctatcacattttgc

SEQ ID NO: 2041058 - DNA, 25 bp, Homo sapien
ccaggatatggagctatcacatttt

SEQ ID NO: 2041059 - DNA, 25 bp, Homo sapien
gaaaaagtcctgtctattccaaggc

SEQ ID NO: 2041060 - DNA, 25 bp, Homo sapien
caaggctcctagaaccctacaggaa

SEQ ID NO: 2041061 - DNA, 25 bp, Homo sapien
tatccttgaaaaccaatctgcagag

SEQ ID NO: 2041062 - DNA, 25 bp, Homo sapien
gaatatctgaggtttgctctactga

SEQ ID NO: 2041063 - DNA, 25 bp, Homo sapien
aaaaagctttatcttacaagatatt

SEQ ID NO: 2041064 - DNA, 25 bp, Homo sapien
gtgcctggccctaaaaagctttatc

SEQ ID NO: 2041065 - DNA, 25 bp, Homo sapien
cctaaaaagctttatcttacaagat

SEQ ID NO: 2041066 - DNA, 25 bp, Homo sapien
tggccctaaaaagctttatcttaca

SEQ ID NO: 2041067 - DNA, 25 bp, Homo sapien
gagggataatgggggctatacttac

SEQ ID NO: 2041068 - DNA, 25 bp, Homo sapien
tgagggataatgggggctatactta

SEQ ID NO: 2041069 - DNA, 25 bp, Homo sapien
atgagggataatgggggctatactt

SEQ ID NO: 2041070 - DNA, 25 bp, Homo sapien
aatgagggataatgggggctatact

SEQ ID NO: 2041071 - DNA, 25 bp, Homo sapien
ctaaattgttgggctgtttctattt

SEQ ID NO: 2041072 - DNA, 25 bp, Homo sapien
tggtctttgcgctgagagagcctct

SEQ ID NO: 2041073 - DNA, 25 bp, Homo sapien
tcataaagaactaacgagcttggct

SEQ ID NO: 2041074 - DNA, 25 bp, Homo sapien
gaggttcaataccacagccttcaag

SEQ ID NO: 2041075 - DNA, 25 bp, Homo sapien
tgcacagtgcccgatttaacaggca

SEQ ID NO: 2041076 - DNA, 25 bp, Homo sapien
gcaacttttgctttcgaaatcgtgt

SEQ ID NO: 2041077 - DNA, 25 bp, Homo sapien
caaggcacttgagtaagaccataac

SEQ ID NO: 2041078 - DNA, 25 bp, Homo sapien
cgtcaagctatttattacaaggcac

SEQ ID NO: 2041079 - DNA, 25 bp, Homo sapien
ttcatttcctccagtgcctaagtca

SEQ ID NO: 2041080 - DNA, 25 bp, Homo sapien
tgtattgcttacataaacagagtta

SEQ ID NO: 2041081 - DNA, 25 bp, Homo sapien
tattgcttacataaacagagttatt

SEQ ID NO: 2041082 - DNA, 25 bp, Homo sapien
tttgtattgcttacataaacagagt

SEQ ID NO: 2041083 - DNA, 25 bp, Homo sapien
tgcttacataaacagagttatttta

SEQ ID NO: 2041084 - DNA, 25 bp, Homo sapien
aagagattctcccccgccactcctc

SEQ ID NO: 2041085 - DNA, 25 bp, Homo sapien
caagagattctcccccgccactcct

SEQ ID NO: 2041086 - DNA, 25 bp, Homo sapien
agagattctcccccgccactcctct

SEQ ID NO: 2041087 - DNA, 25 bp, Homo sapien
ccccatgttagtcagatcgttctaa

SEQ ID NO: 2041088 - DNA, 25 bp, Homo sapien
gttagtcagatcgttctaaaactcc

SEQ ID NO: 2041089 - DNA, 25 bp, Homo sapien
gtcagatcgttctaaaactcctaat

SEQ ID NO: 2041090 - DNA, 25 bp, Homo sapien
catgttagtcagatcgttctaaaac

SEQ ID NO: 2041091 - DNA, 25 bp, Homo sapien
gaattgtactcaccactccataagg

SEQ ID NO: 2041092 - DNA, 25 bp, Homo sapien
gaaggcaagaacactagtgacggga

SEQ ID NO: 2041093 - DNA, 25 bp, Homo sapien
taacagtgttcaatcagtagcagtc

SEQ ID NO: 2041094 - DNA, 25 bp, Homo sapien
gcataagcacttaagtcacacagga

SEQ ID NO: 2041095 - DNA, 25 bp, Homo sapien
aaaagggctggctgtgaaactacta

SEQ ID NO: 2041096 - DNA, 25 bp, Homo sapien
tattcctaaggcattgaaaaatctg

SEQ ID NO: 2041097 - DNA, 25 bp, Homo sapien
aacactgaactaaaagggctggctg

SEQ ID NO: 2041098 - DNA, 25 bp, Homo sapien
taacccctttgctactctgacagtc

SEQ ID NO: 2041099 - DNA, 25 bp, Homo sapien
tcttgactactcagcggcacgagct

SEQ ID NO: 2041100 - DNA, 25 bp, Homo sapien
taagttgtatgtgacaccgctgatc

SEQ ID NO: 2041101 - DNA, 25 bp, Homo sapien
caatcttgcaaaaatccctcgagtg

SEQ ID NO: 2041102 - DNA, 25 bp, Homo sapien
tcaaactcatcgaatgggtgatcca

SEQ ID NO: 2041103 - DNA, 25 bp, Homo sapien
cctcttgcgggcaggaactatccaa

SEQ ID NO: 2041104 - DNA, 25 bp, Homo sapien
ccaggaggtggtagacataactgat

SEQ ID NO: 2041105 - DNA, 25 bp, Homo sapien
gaaagaatttatctggcttagcaac

SEQ ID NO: 2041106 - DNA, 25 bp, Homo sapien
gagtacatactcaatccaccagtga

SEQ ID NO: 2041107 - DNA, 25 bp, Homo sapien
tcccgggttcaaccatctcggccca

SEQ ID NO: 2041108 - DNA, 25 bp, Homo sapien
tgagaacgctgtgatgagggaactt

SEQ ID NO: 2041109 - DNA, 25 bp, Homo sapien
ccagggtcccttagaaagtggcagt

SEQ ID NO: 2041110 - DNA, 25 bp, Homo sapien
tagatcccatgctacagtaccaatg

SEQ ID NO: 2041111 - DNA, 25 bp, Homo sapien
taaagactcaactcagccttgcgcc

SEQ ID NO: 2041112 - DNA, 25 bp, Homo sapien
acaactcacagagtgttccattaca

SEQ ID NO: 2041113 - DNA, 25 bp, Homo sapien
tacaactctactttaaatacaactc

SEQ ID NO: 2041114 - DNA, 25 bp, Homo sapien
cacagagtgttccattacaataatt

SEQ ID NO: 2041115 - DNA, 25 bp, Homo sapien
gcaatccaccggctttacgccttcc

SEQ ID NO: 2041116 - DNA, 25 bp, Homo sapien
taaatctgcagagtgtctactatgc

SEQ ID NO: 2041117 - DNA, 25 bp, Homo sapien
ctatgctaagtgacatttcttgtga

SEQ ID NO: 2041118 - DNA, 25 bp, Homo sapien
cagcctaaatctgcagagtgtctac

SEQ ID NO: 2041119 - DNA, 25 bp, Homo sapien
tctgcagagtgtctactatgctaag

SEQ ID NO: 2041120 - DNA, 25 bp, Homo sapien
gactgcttttctatgcaagaagtac

SEQ ID NO: 2041121 - DNA, 25 bp, Homo sapien
gcttttctatgcaagaagtactaag

SEQ ID NO: 2041122 - DNA, 25 bp, Homo sapien
tatatttgtacttcatttggaatgg

SEQ ID NO: 2041123 - DNA, 25 bp, Homo sapien
gggactgcttttctatgcaagaagt

SEQ ID NO: 2041124 - DNA, 25 bp, Homo sapien
tgaggccaggcaacaataagatagt

SEQ ID NO: 2041125 - DNA, 25 bp, Homo sapien
cactaagatggatcatatgaaggat

SEQ ID NO: 2041126 - DNA, 25 bp, Homo sapien
gatagtaggtctggtgctggcatcc

SEQ ID NO: 2041127 - DNA, 25 bp, Homo sapien
tccttgcttgttcccgtgaggccag

SEQ ID NO: 2041128 - DNA, 25 bp, Homo sapien
ggaataattcagaagacattactat

SEQ ID NO: 2041129 - DNA, 25 bp, Homo sapien
gaataattcagaagacattactatt

SEQ ID NO: 2041130 - DNA, 25 bp, Homo sapien
aggaagcggctgaaactctcacccc

SEQ ID NO: 2041131 - DNA, 25 bp, Homo sapien
cagaccgtcgggtagtacgtttctg

SEQ ID NO: 2041132 - DNA, 25 bp, Homo sapien
cgtttctgtaaccacgggacagtgg

SEQ ID NO: 2041133 - DNA, 25 bp, Homo sapien
tcgaagtgatgaaaggtctaagcag

SEQ ID NO: 2041134 - DNA, 25 bp, Homo sapien
agctcccgggacaacatccgcaggt

SEQ ID NO: 2041135 - DNA, 25 bp, Homo sapien
agcccaggataagggataagcccac

SEQ ID NO: 2041136 - DNA, 25 bp, Homo sapien
ggtagtagaaggcataagcgacgct

SEQ ID NO: 2041137 - DNA, 25 bp, Homo sapien
taagcgacgctgaagcccaggataa

SEQ ID NO: 2041138 - DNA, 25 bp, Homo sapien
gagcgggcgagagcgggcgagagcg

SEQ ID NO: 2041139 - DNA, 25 bp, Homo sapien
ctctgtgtcctcattatctcaattt

SEQ ID NO: 2041140 - DNA, 25 bp, Homo sapien
gctccatcagctgctactggagagg

SEQ ID NO: 2041141 - DNA, 25 bp, Homo sapien
atacacatttatactagcaacccaa

SEQ ID NO: 2041142 - DNA, 25 bp, Homo sapien
caacccaaatatgagatatctaaga

SEQ ID NO: 2041143 - DNA, 25 bp, Homo sapien
ttccttgatattgttgtcattgata

SEQ ID NO: 2041144 - DNA, 25 bp, Homo sapien
cacaaaaacagaccctttaatatag

SEQ ID NO: 2041145 - DNA, 25 bp, Homo sapien
ttagattcagggtttgacagccaag

SEQ ID NO: 2041146 - DNA, 25 bp, Homo sapien
actggagcctgcagtcgaaatctgc

SEQ ID NO: 2041147 - DNA, 25 bp, Homo sapien
gtgtttattagattcagggtttgac

SEQ ID NO: 2041148 - DNA, 25 bp, Homo sapien
gcagtcgaaatctgcttaaagcttc

SEQ ID NO: 2041149 - DNA, 25 bp, Homo sapien
taggagataagttaccttcctctaa

SEQ ID NO: 2041150 - DNA, 25 bp, Homo sapien
aggagataagttaccttcctctaag

SEQ ID NO: 2041151 - DNA, 25 bp, Homo sapien
aataggagataagttaccttcctct

SEQ ID NO: 2041152 - DNA, 25 bp, Homo sapien
ataggagataagttaccttcctcta

SEQ ID NO: 2041153 - DNA, 25 bp, Homo sapien
tgctaacggtgccaacagtgctggc

SEQ ID NO: 2041154 - DNA, 25 bp, Homo sapien
tatgctaacaatgcatgctaacggt

SEQ ID NO: 2041155 - DNA, 25 bp, Homo sapien
cttgattatccattctgttagcatt

SEQ ID NO: 2041156 - DNA, 25 bp, Homo sapien
tcctttgactatcaggaaaagcaac

SEQ ID NO: 2041157 - DNA, 25 bp, Homo sapien
taaaagtctttaccgttgctcacaa

SEQ ID NO: 2041158 - DNA, 25 bp, Homo sapien
gagtctgcctatcaccctaattctg

SEQ ID NO: 2041159 - DNA, 25 bp, Homo sapien
gactaaaagaatatggaatccctaa

SEQ ID NO: 2041160 - DNA, 25 bp, Homo sapien
tgcataaagtcaagacacaccttct

SEQ ID NO: 2041161 - DNA, 25 bp, Homo sapien
tttgaccgctagcaaagaatgcctc

SEQ ID NO: 2041162 - DNA, 25 bp, Homo sapien
agaatgcctctccagtcatacgtgg

SEQ ID NO: 2041163 - DNA, 25 bp, Homo sapien
tctggtcatagttcattcaaactgt

SEQ ID NO: 2041164 - DNA, 25 bp, Homo sapien
tctcagatgttttgtattcagttga

SEQ ID NO: 2041165 - DNA, 25 bp, Homo sapien
tctggtgcagggctattaaactgaa

SEQ ID NO: 2041166 - DNA, 25 bp, Homo sapien
tcaaagatggccacaccagtctaca

SEQ ID NO: 2041167 - DNA, 25 bp, Homo sapien
gagaagtgccaacagtaacaatcca

SEQ ID NO: 2041168 - DNA, 25 bp, Homo sapien
ggcatgccggatgttatttttcaaa

SEQ ID NO: 2041169 - DNA, 25 bp, Homo sapien
aatgaaagtgggtacattactacta

SEQ ID NO: 2041170 - DNA, 25 bp, Homo sapien
aaatgaaagtgggtacattactact

SEQ ID NO: 2041171 - DNA, 25 bp, Homo sapien
gatatagcacgttgttatttccaga

SEQ ID NO: 2041172 - DNA, 25 bp, Homo sapien
cctgatgaagtgtctagatgtccta

SEQ ID NO: 2041173 - DNA, 25 bp, Homo sapien
caaaggtgcagatcaatatgagtct

SEQ ID NO: 2041174 - DNA, 25 bp, Homo sapien
tgtcctatatttttgaagactgtcc

SEQ ID NO: 2041175 - DNA, 25 bp, Homo sapien
aataagttgaaattagttggcaagt

SEQ ID NO: 2041176 - DNA, 25 bp, Homo sapien
tagttggcaagtaattgatattcac

SEQ ID NO: 2041177 - DNA, 25 bp, Homo sapien
gaaatccttaagtcatccatacatt

SEQ ID NO: 2041178 - DNA, 25 bp, Homo sapien
tcacagtctgcataatgtaaataag

SEQ ID NO: 2041179 - DNA, 25 bp, Homo sapien
aatccattgaagaggcgatttggtt

SEQ ID NO: 2041180 - DNA, 25 bp, Homo sapien
atccattgaagaggcgatttggttc

SEQ ID NO: 2041181 - DNA, 25 bp, Homo sapien
ccattgaagaggcgatttggttcca

SEQ ID NO: 2041182 - DNA, 25 bp, Homo sapien
attgaagaggcgatttggttccatt

SEQ ID NO: 2041183 - DNA, 25 bp, Homo sapien
tgtcgaaaggaactaccatgcatgc

SEQ ID NO: 2041184 - DNA, 25 bp, Homo sapien
gataagttaaactcgcaagcaccag

SEQ ID NO: 2041185 - DNA, 25 bp, Homo sapien
tggccttaagaaagtacctctgccc

SEQ ID NO: 2041186 - DNA, 25 bp, Homo sapien
gctgacttacagctgtggaccagaa

SEQ ID NO: 2041187 - DNA, 25 bp, Homo sapien
ccatagcattgtatgttcatatggg

SEQ ID NO: 2041188 - DNA, 25 bp, Homo sapien
ttccatagcattgtatgttcatatg

SEQ ID NO: 2041189 - DNA, 25 bp, Homo sapien
tatgggtacataaagaagtatgtac

SEQ ID NO: 2041190 - DNA, 25 bp, Homo sapien
tgttcatatgggtacataaagaagt

SEQ ID NO: 2041191 - DNA, 25 bp, Homo sapien
taagttgttagctgtaaaaacatga

SEQ ID NO: 2041192 - DNA, 25 bp, Homo sapien
tagagcaatggtaaatcatttgcag

SEQ ID NO: 2041193 - DNA, 25 bp, Homo sapien
gcagagactaatttatcgaagacta

SEQ ID NO: 2041194 - DNA, 25 bp, Homo sapien
gaaacattcagcttactaatgtaga

SEQ ID NO: 2041195 - DNA, 25 bp, Homo sapien
tcaaagaatcagtgtagtgttacag

SEQ ID NO: 2041196 - DNA, 25 bp, Homo sapien
tttcggaaacttaagatcagcctag

SEQ ID NO: 2041197 - DNA, 25 bp, Homo sapien
ctgaagcatggcattaatggttcca

SEQ ID NO: 2041198 - DNA, 25 bp, Homo sapien
tagacattcctaagcatttgaccag

SEQ ID NO: 2041199 - DNA, 25 bp, Homo sapien
tcatcttgattgttcgttcactcta

SEQ ID NO: 2041200 - DNA, 25 bp, Homo sapien
gtaagcttagtgtcatgcagcattt

SEQ ID NO: 2041201 - DNA, 25 bp, Homo sapien
gttcactctatttgctgattcagca

SEQ ID NO: 2041202 - DNA, 25 bp, Homo sapien
ctgtaagcttagtgtcatgcagcat

SEQ ID NO: 2041203 - DNA, 25 bp, Homo sapien
gatgtatcagtgaacacagaacctc

SEQ ID NO: 2041204 - DNA, 25 bp, Homo sapien
tgtatcagtgaacacagaacctcac

SEQ ID NO: 2041205 - DNA, 25 bp, Homo sapien
gggatgtatcagtgaacacagaacc

SEQ ID NO: 2041206 - DNA, 25 bp, Homo sapien
ggaaggggatgtatcagtgaacaca

SEQ ID NO: 2041207 - DNA, 25 bp, Homo sapien
taaatagtagagctgtagtgaagct

SEQ ID NO: 2041208 - DNA, 25 bp, Homo sapien
tagtttccaggattaaatagtagag

SEQ ID NO: 2041209 - DNA, 25 bp, Homo sapien
ctttgccctccagaatacattgggt

SEQ ID NO: 2041210 - DNA, 25 bp, Homo sapien
cttcttaggaaatagtctgcatctt

SEQ ID NO: 2041211 - DNA, 25 bp, Homo sapien
tccacatggtcactacgaggctaac

SEQ ID NO: 2041212 - DNA, 25 bp, Homo sapien
tcaagtctgcaagcgaggtcaggac

SEQ ID NO: 2041213 - DNA, 25 bp, Homo sapien
tgattgttcatcctgcggtccaaac

SEQ ID NO: 2041214 - DNA, 25 bp, Homo sapien
cgattgtcgatccaaaagctgagga

SEQ ID NO: 2041215 - DNA, 25 bp, Homo sapien
ccttctacattgtcatgtttctcta

SEQ ID NO: 2041216 - DNA, 25 bp, Homo sapien
gaaatagtcattaacctgtctataa

SEQ ID NO: 2041217 - DNA, 25 bp, Homo sapien
cattgcacactttacacagattgaa

SEQ ID NO: 2041218 - DNA, 25 bp, Homo sapien
cagggtccagtatgcttttgagtaa

SEQ ID NO: 2041219 - DNA, 25 bp, Homo sapien
taatttatgtagcaccctcaaggag

SEQ ID NO: 2041220 - DNA, 25 bp, Homo sapien
ggctgctctgaactactgctgttga

SEQ ID NO: 2041221 - DNA, 25 bp, Homo sapien
cgtgagagtgatgggaccagaaact

SEQ ID NO: 2041222 - DNA, 25 bp, Homo sapien
ccttagcttaccttgcaggctgggc

SEQ ID NO: 2041223 - DNA, 25 bp, Homo sapien
tttctccacagcttagtaaatcaag

SEQ ID NO: 2041224 - DNA, 25 bp, Homo sapien
tctgtactagctttgcaatgttcta

SEQ ID NO: 2041225 - DNA, 25 bp, Homo sapien
taataacagcgcttcaacattggtt

SEQ ID NO: 2041226 - DNA, 25 bp, Homo sapien
cactcctggctagttgacccttgca

SEQ ID NO: 2041227 - DNA, 25 bp, Homo sapien
gcaaactattaggagtgtaggccct

SEQ ID NO: 2041228 - DNA, 25 bp, Homo sapien
cctagtgcacttgtataaccgagcg

SEQ ID NO: 2041229 - DNA, 25 bp, Homo sapien
tccagcagtgtgcatggcaaactat

SEQ ID NO: 2041230 - DNA, 25 bp, Homo sapien
taacgttggctcctacctagtgcac

SEQ ID NO: 2041231 - DNA, 25 bp, Homo sapien
caatcagagaattgtgtggtctcca

SEQ ID NO: 2041232 - DNA, 25 bp, Homo sapien
gaaagtatgaagtctctagccctct

SEQ ID NO: 2041233 - DNA, 25 bp, Homo sapien
tgcaagtcctggtgaaagcaatggg

SEQ ID NO: 2041234 - DNA, 25 bp, Homo sapien
gctgactcatgcagagtttggccaa

SEQ ID NO: 2041235 - DNA, 25 bp, Homo sapien
taaggtcatggtaaacattaagttc

SEQ ID NO: 2041236 - DNA, 25 bp, Homo sapien
agaatacagttcagccatgtgaagt

SEQ ID NO: 2041237 - DNA, 25 bp, Homo sapien
gaagtacatttacactgttgtgaag

SEQ ID NO: 2041238 - DNA, 25 bp, Homo sapien
gaaagtcagcatttgagtgtagaga

SEQ ID NO: 2041239 - DNA, 25 bp, Homo sapien
ggagatcgaggccacagtttgctat

SEQ ID NO: 2041240 - DNA, 25 bp, Homo sapien
atagattgtcttcccctcaaatgag

SEQ ID NO: 2041241 - DNA, 25 bp, Homo sapien
aactgattatttatggccgtgacac

SEQ ID NO: 2041242 - DNA, 25 bp, Homo sapien
tcatctataagtagcatctgggaag

SEQ ID NO: 2041243 - DNA, 25 bp, Homo sapien
caaggatgtacatcttcaattcagc

SEQ ID NO: 2041244 - DNA, 25 bp, Homo sapien
aggctctcattgcagttgtttacag

SEQ ID NO: 2041245 - DNA, 25 bp, Homo sapien
aacaaggatgtacatcttcaattca

SEQ ID NO: 2041246 - DNA, 25 bp, Homo sapien
acaaggatgtacatcttcaattcag

SEQ ID NO: 2041247 - DNA, 25 bp, Homo sapien
cctgtaacagatcatcggtgaggag

SEQ ID NO: 2041248 - DNA, 25 bp, Homo sapien
tgcattcaggctgcaggtaccactt

SEQ ID NO: 2041249 - DNA, 25 bp, Homo sapien
tttgcccataactcagatgcgatgc

SEQ ID NO: 2041250 - DNA, 25 bp, Homo sapien
ggtaccacttcatgctagggctctg

SEQ ID NO: 2041251 - DNA, 25 bp, Homo sapien
tgcagagaagtatagtcaacaggtc

SEQ ID NO: 2041252 - DNA, 25 bp, Homo sapien
gaaaagcctgataagttgtacttca

SEQ ID NO: 2041253 - DNA, 25 bp, Homo sapien
gtgctgaaactactggacatccaca

SEQ ID NO: 2041254 - DNA, 25 bp, Homo sapien
tctggaagataacacagaggaaaac

SEQ ID NO: 2041255 - DNA, 25 bp, Homo sapien
gtttggcttggggctccaagtccca

SEQ ID NO: 2041256 - DNA, 25 bp, Homo sapien
gcttggggctccaagtcccatcttc

SEQ ID NO: 2041257 - DNA, 25 bp, Homo sapien
tttggcttggggctccaagtcccat

SEQ ID NO: 2041258 - DNA, 25 bp, Homo sapien
tggcttggggctccaagtcccatct

SEQ ID NO: 2041259 - DNA, 25 bp, Homo sapien
ttcacagcagacacggagctttgtt

SEQ ID NO: 2041260 - DNA, 25 bp, Homo sapien
tcacagcagacacggagctttgttt

SEQ ID NO: 2041261 - DNA, 25 bp, Homo sapien
cttgaatttttcgggtgaaggactg

SEQ ID NO: 2041262 - DNA, 25 bp, Homo sapien
tgaatttttcgggtgaaggactgca

SEQ ID NO: 2041263 - DNA, 25 bp, Homo sapien
gaatttttcgggtgaaggactgcag

SEQ ID NO: 2041264 - DNA, 25 bp, Homo sapien
ttgaatttttcgggtgaaggactgc

SEQ ID NO: 2041265 - DNA, 25 bp, Homo sapien
agcagagcaatgatctcacacccat

SEQ ID NO: 2041266 - DNA, 25 bp, Homo sapien
aggggagtgccagcagacagcagag

SEQ ID NO: 2041267 - DNA, 25 bp, Homo sapien
agtgccagcagacagcagagcaatg

SEQ ID NO: 2041268 - DNA, 25 bp, Homo sapien
gggagtgccagcagacagcagagca

SEQ ID NO: 2041269 - DNA, 25 bp, Homo sapien
ccacccactaataggacctcaccac

SEQ ID NO: 2041270 - DNA, 25 bp, Homo sapien
gtccacccactaataggacctcacc

SEQ ID NO: 2041271 - DNA, 25 bp, Homo sapien
caaacaaggacgcgttgtccaccca

SEQ ID NO: 2041272 - DNA, 25 bp, Homo sapien
ggcaaacaaggacgcgttgtccacc

SEQ ID NO: 2041273 - DNA, 25 bp, Homo sapien
taacaccacagcacgtaaaatcccg

SEQ ID NO: 2041274 - DNA, 25 bp, Homo sapien
cagaatgcttctggtgccaagtagg

SEQ ID NO: 2041275 - DNA, 25 bp, Homo sapien
cagccttctaagtgcgtgtactgag

SEQ ID NO: 2041276 - DNA, 25 bp, Homo sapien
ccaagtaggtgcagcgtggatactc

SEQ ID NO: 2041277 - DNA, 25 bp, Homo sapien
gagcctggagtatctccatgcctcg

SEQ ID NO: 2041278 - DNA, 25 bp, Homo sapien
tggagtatctccatgcctcgacctg

SEQ ID NO: 2041279 - DNA, 25 bp, Homo sapien
gagtatctccatgcctcgacctgac

SEQ ID NO: 2041280 - DNA, 25 bp, Homo sapien
cctggagtatctccatgcctcgacc

SEQ ID NO: 2041281 - DNA, 25 bp, Homo sapien
ttggttctttggctcctgaaattgg

SEQ ID NO: 2041282 - DNA, 25 bp, Homo sapien
tgcaggattactaagttcttcgggt

SEQ ID NO: 2041283 - DNA, 25 bp, Homo sapien
tggctcctgaaattggtccatcaca

SEQ ID NO: 2041284 - DNA, 25 bp, Homo sapien
tccatcacacttgggggacaattca

SEQ ID NO: 2041285 - DNA, 25 bp, Homo sapien
ttgcgtagggggagtgaggatggcc

SEQ ID NO: 2041286 - DNA, 25 bp, Homo sapien
cattgcgtagggggagtgaggatgg

SEQ ID NO: 2041287 - DNA, 25 bp, Homo sapien
attgcgtagggggagtgaggatggc

SEQ ID NO: 2041288 - DNA, 25 bp, Homo sapien
tgcgtagggggagtgaggatggcct

SEQ ID NO: 2041289 - DNA, 25 bp, Homo sapien
tgctgacacccactgaattgattcc

SEQ ID NO: 2041290 - DNA, 25 bp, Homo sapien
gtttctcccaaattttgcatacagc

SEQ ID NO: 2041291 - DNA, 25 bp, Homo sapien
tgtttctcccaaattttgcatacag

SEQ ID NO: 2041292 - DNA, 25 bp, Homo sapien
cactgaattgattccactctggatt

SEQ ID NO: 2041293 - DNA, 25 bp, Homo sapien
cttctaagttttggagttgcttctt

SEQ ID NO: 2041294 - DNA, 25 bp, Homo sapien
gaggtcatcacaagcatcttctaag

SEQ ID NO: 2041295 - DNA, 25 bp, Homo sapien
gaaaacatcaccaatttgataaggt

SEQ ID NO: 2041296 - DNA, 25 bp, Homo sapien
gtatcattaaacagtcatcatctgc

SEQ ID NO: 2041297 - DNA, 25 bp, Homo sapien
tataataatgtctccccaaagattt

SEQ ID NO: 2041298 - DNA, 25 bp, Homo sapien
ataataatgtctccccaaagatttc

SEQ ID NO: 2041299 - DNA, 25 bp, Homo sapien
tgtattttatgggcactgtccgctc

SEQ ID NO: 2041300 - DNA, 25 bp, Homo sapien
actgtccgctcctggacaatttctg

SEQ ID NO: 2041301 - DNA, 25 bp, Homo sapien
gtctgcaaggcagcatcccgaccgt

SEQ ID NO: 2041302 - DNA, 25 bp, Homo sapien
agatgtctgcaaggcagcatcccga

SEQ ID NO: 2041303 - DNA, 25 bp, Homo sapien
tctcccttccaaatattagccagac

SEQ ID NO: 2041304 - DNA, 25 bp, Homo sapien
ggaaatgaaccattatgaccaggtt

SEQ ID NO: 2041305 - DNA, 25 bp, Homo sapien
atttaagcatccagagccagttcca

SEQ ID NO: 2041306 - DNA, 25 bp, Homo sapien
tggctgagtgtccatttaagcatcc

SEQ ID NO: 2041307 - DNA, 25 bp, Homo sapien
atgaaccattatgaccaggttcttc

SEQ ID NO: 2041308 - DNA, 25 bp, Homo sapien
ttgccaccgtttctggggaagtgcc

SEQ ID NO: 2041309 - DNA, 25 bp, Homo sapien
gggaagtgccttaagccgtgtgtca

SEQ ID NO: 2041310 - DNA, 25 bp, Homo sapien
gccgtgtgtcatcaggtgaaaagga

SEQ ID NO: 2041311 - DNA, 25 bp, Homo sapien
gatcgtgcgtggtctcagtccttat

SEQ ID NO: 2041312 - DNA, 25 bp, Homo sapien
ccactgtccttcttattgctacaag

SEQ ID NO: 2041313 - DNA, 25 bp, Homo sapien
cttattgctacaagctctaagctca

SEQ ID NO: 2041314 - DNA, 25 bp, Homo sapien
ccacggtcttaatgccaaccttttg

SEQ ID NO: 2041315 - DNA, 25 bp, Homo sapien
ccgtgcaggcccacggtcttaatgc

SEQ ID NO: 2041316 - DNA, 25 bp, Homo sapien
cagggccatggcaagcattgataac

SEQ ID NO: 2041317 - DNA, 25 bp, Homo sapien
catggcaagcattgataacccggac

SEQ ID NO: 2041318 - DNA, 25 bp, Homo sapien
ggccatggcaagcattgataacccg

SEQ ID NO: 2041319 - DNA, 25 bp, Homo sapien
ccatggcaagcattgataacccgga

SEQ ID NO: 2041320 - DNA, 25 bp, Homo sapien
ttggcaggccccacatgatccgtat

SEQ ID NO: 2041321 - DNA, 25 bp, Homo sapien
ccagcacgccatgtggattgggtgt

SEQ ID NO: 2041322 - DNA, 25 bp, Homo sapien
catgatccgtattgcctctgcgtcc

SEQ ID NO: 2041323 - DNA, 25 bp, Homo sapien
ttgtgaggtctagccttggcaggcc

SEQ ID NO: 2041324 - DNA, 25 bp, Homo sapien
catagaatttaagctcctaaagagt

SEQ ID NO: 2041325 - DNA, 25 bp, Homo sapien
tgcatagagggataggagaattgct

SEQ ID NO: 2041326 - DNA, 25 bp, Homo sapien
tatgtgtcatgtgaatgcatagagg

SEQ ID NO: 2041327 - DNA, 25 bp, Homo sapien
tataccctgggtcctaactcaatgc

SEQ ID NO: 2041328 - DNA, 25 bp, Homo sapien
tcttgataacgttgacagaaatagc

SEQ ID NO: 2041329 - DNA, 25 bp, Homo sapien
ttacatctgtagagttctccggcct

SEQ ID NO: 2041330 - DNA, 25 bp, Homo sapien
tggactccaagtgaggagtgttgct

SEQ ID NO: 2041331 - DNA, 25 bp, Homo sapien
tgctggtcggatttgggtcttgata

SEQ ID NO: 2041332 - DNA, 25 bp, Homo sapien
caagaaattggcacgttgtggccag

SEQ ID NO: 2041333 - DNA, 25 bp, Homo sapien
gactaggcgaggacaaccatgattt

SEQ ID NO: 2041334 - DNA, 25 bp, Homo sapien
cagtgaccgccgtttgagtcgtgac

SEQ ID NO: 2041335 - DNA, 25 bp, Homo sapien
ccatccaggtgtgagttgagggcac

SEQ ID NO: 2041336 - DNA, 25 bp, Homo sapien
gacccccttgctggtgcatgaggaa

SEQ ID NO: 2041337 - DNA, 25 bp, Homo sapien
ccaggtctcatttgcagggaaaaag

SEQ ID NO: 2041338 - DNA, 25 bp, Homo sapien
aagacaggcactaccaaggcttccg

SEQ ID NO: 2041339 - DNA, 25 bp, Homo sapien
gactgccaggcagctttgcacggca

SEQ ID NO: 2041340 - DNA, 25 bp, Homo sapien
tcgctttgatactgcagctgtcctg

SEQ ID NO: 2041341 - DNA, 25 bp, Homo sapien
taacagagctcgctttgatactgca

SEQ ID NO: 2041342 - DNA, 25 bp, Homo sapien
tgtcttagacataacagagctcgct

SEQ ID NO: 2041343 - DNA, 25 bp, Homo sapien
gccatccgctccaaggtcccctctt

SEQ ID NO: 2041344 - DNA, 25 bp, Homo sapien
agaaaactccaggatgccggccggg

SEQ ID NO: 2041345 - DNA, 25 bp, Homo sapien
gatgtagattgtggcatggatgtcc

SEQ ID NO: 2041346 - DNA, 25 bp, Homo sapien
tgaattagaagttcttgctgggcgc

SEQ ID NO: 2041347 - DNA, 25 bp, Homo sapien
ctccaggtgtcgtgatatatgtctg

SEQ ID NO: 2041348 - DNA, 25 bp, Homo sapien
gaatgctgaccacttgggagttgct

SEQ ID NO: 2041349 - DNA, 25 bp, Homo sapien
tttaggacaatactgaatgctgacc

SEQ ID NO: 2041350 - DNA, 25 bp, Homo sapien
tggagatcaggagtaccacatttta

SEQ ID NO: 2041351 - DNA, 25 bp, Homo sapien
tcctttgtcggaatctcttagtaat

SEQ ID NO: 2041352 - DNA, 25 bp, Homo sapien
ggaacatgagatagatcaagtgaca

SEQ ID NO: 2041353 - DNA, 25 bp, Homo sapien
cattttgctcttggaacatgagata

SEQ ID NO: 2041354 - DNA, 25 bp, Homo sapien
gctcttggaacatgagatagatcaa

SEQ ID NO: 2041355 - DNA, 25 bp, Homo sapien
atgaaagtaatcctgtttcatgctc

SEQ ID NO: 2041356 - DNA, 25 bp, Homo sapien
gctcacttgctgcatgctgtttgtt

SEQ ID NO: 2041357 - DNA, 25 bp, Homo sapien
gccaagctcagtgcgttgggaagag

SEQ ID NO: 2041358 - DNA, 25 bp, Homo sapien
acaaagagctcacttgctgcatgct

SEQ ID NO: 2041359 - DNA, 25 bp, Homo sapien
gctcagtgcgttgggaagaggcaca

SEQ ID NO: 2041360 - DNA, 25 bp, Homo sapien
tgatgccttccacgcagatccagaa

SEQ ID NO: 2041361 - DNA, 25 bp, Homo sapien
ggtttgtggccaactgtagggcttc

SEQ ID NO: 2041362 - DNA, 25 bp, Homo sapien
aagtcaacacaaggcttctggctga

SEQ ID NO: 2041363 - DNA, 25 bp, Homo sapien
tgtaaacccatttctctaagtgacc

SEQ ID NO: 2041364 - DNA, 25 bp, Homo sapien
gggctgaacatcccagtagccaagt

SEQ ID NO: 2041365 - DNA, 25 bp, Homo sapien
cccagtagccaagtggacaagtaga

SEQ ID NO: 2041366 - DNA, 25 bp, Homo sapien
cagtagccaagtggacaagtagact

SEQ ID NO: 2041367 - DNA, 25 bp, Homo sapien
gtagccaagtggacaagtagactct

SEQ ID NO: 2041368 - DNA, 25 bp, Homo sapien
gcagagtaagggactagtgggaatc

SEQ ID NO: 2041369 - DNA, 25 bp, Homo sapien
ggcagagtaagggactagtgggaat

SEQ ID NO: 2041370 - DNA, 25 bp, Homo sapien
cagagtaagggactagtgggaatct

SEQ ID NO: 2041371 - DNA, 25 bp, Homo sapien
ggaagcaaatgcgtgctgagagcca

SEQ ID NO: 2041372 - DNA, 25 bp, Homo sapien
agccagccgggtcagaggtctctga

SEQ ID NO: 2041373 - DNA, 25 bp, Homo sapien
caaatgcgtgctgagagccagccgg

SEQ ID NO: 2041374 - DNA, 25 bp, Homo sapien
tagcagtggcgtccttaacagtggg

SEQ ID NO: 2041375 - DNA, 25 bp, Homo sapien
aggaggatctgtttacaccgactgg

SEQ ID NO: 2041376 - DNA, 25 bp, Homo sapien
cgactggctcatattgatccttttg

SEQ ID NO: 2041377 - DNA, 25 bp, Homo sapien
ctgtgtggcttcattggtgcagagg

SEQ ID NO: 2041378 - DNA, 25 bp, Homo sapien
gaggggaacgacaatgctggcctct

SEQ ID NO: 2041379 - DNA, 25 bp, Homo sapien
ccaggtattgggttctttgagaagc

SEQ ID NO: 2041380 - DNA, 25 bp, Homo sapien
gagaagcccattgtctccttgaagt

SEQ ID NO: 2041381 - DNA, 25 bp, Homo sapien
tcctgtgatccctcttggttgacgc

SEQ ID NO: 2041382 - DNA, 25 bp, Homo sapien
tgacgcgatactgaattacacccct

SEQ ID NO: 2041383 - DNA, 25 bp, Homo sapien
cacacttcaaccaagaagtgttcaa

SEQ ID NO: 2041384 - DNA, 25 bp, Homo sapien
gactcatatttgaagatgcctccaa

SEQ ID NO: 2041385 - DNA, 25 bp, Homo sapien
taaccagagcaaagcgctgctgtgg

SEQ ID NO: 2041386 - DNA, 25 bp, Homo sapien
tgtagccacatcacttgggagactc

SEQ ID NO: 2041387 - DNA, 25 bp, Homo sapien
taaattttccatcccaataggccac

SEQ ID NO: 2041388 - DNA, 25 bp, Homo sapien
ctgattcctactgcttgtctttaaa

SEQ ID NO: 2041389 - DNA, 25 bp, Homo sapien
tcaaacccaaagctgcctgtcataa

SEQ ID NO: 2041390 - DNA, 25 bp, Homo sapien
gcccttctgctataaacttgcacat

SEQ ID NO: 2041391 - DNA, 25 bp, Homo sapien
tggccactccatatgctactataat

SEQ ID NO: 2041392 - DNA, 25 bp, Homo sapien
ataattatttggttcttatatgagg

SEQ ID NO: 2041393 - DNA, 25 bp, Homo sapien
cacgcctggccactccatatgctac

SEQ ID NO: 2041394 - DNA, 25 bp, Homo sapien
gcctggccactccatatgctactat

SEQ ID NO: 2041395 - DNA, 25 bp, Homo sapien
cctcagaagttgttaacgctgttgg

SEQ ID NO: 2041396 - DNA, 25 bp, Homo sapien
tacgggctcaggctccgttccacag

SEQ ID NO: 2041397 - DNA, 25 bp, Homo sapien
ctcagaagttgttaacgctgttggg

SEQ ID NO: 2041398 - DNA, 25 bp, Homo sapien
gctcaggctccgttccacagtcaga

SEQ ID NO: 2041399 - DNA, 25 bp, Homo sapien
aaatagtacagtggagagcgaattc

SEQ ID NO: 2041400 - DNA, 25 bp, Homo sapien
tgtgttggagaaggcaccctgctgc

SEQ ID NO: 2041401 - DNA, 25 bp, Homo sapien
acagtggagagcgaattctgtccat

SEQ ID NO: 2041402 - DNA, 25 bp, Homo sapien
ctgagaaaataagcgatggtatgac

SEQ ID NO: 2041403 - DNA, 25 bp, Homo sapien
tgcgtggcattgaatgctgaggaaa

SEQ ID NO: 2041404 - DNA, 25 bp, Homo sapien
gaacttcaggggtggttgcgtggca

SEQ ID NO: 2041405 - DNA, 25 bp, Homo sapien
aagtctccatacagtcagctgattt

SEQ ID NO: 2041406 - DNA, 25 bp, Homo sapien
tctccatacagtcagctgatttttc

SEQ ID NO: 2041407 - DNA, 25 bp, Homo sapien
gtggtttctttcagtccagactgat

SEQ ID NO: 2041408 - DNA, 25 bp, Homo sapien
gctgattttcgctgggaggtctcct

SEQ ID NO: 2041409 - DNA, 25 bp, Homo sapien
tcaacactccagtcaggaggacgtg

SEQ ID NO: 2041410 - DNA, 25 bp, Homo sapien
agggtgtgccacagcctcgtgttgt

SEQ ID NO: 2041411 - DNA, 25 bp, Homo sapien
tgatacaagtcctgggaaacagcct

SEQ ID NO: 2041412 - DNA, 25 bp, Homo sapien
gctaaatctggacagaagccattga

SEQ ID NO: 2041413 - DNA, 25 bp, Homo sapien
gctgcttagaagtctgctctgggac

SEQ ID NO: 2041414 - DNA, 25 bp, Homo sapien
tgggcattgctaaatctggacagaa

SEQ ID NO: 2041415 - DNA, 25 bp, Homo sapien
aaaccagaaagcagtagtaggaggg

SEQ ID NO: 2041416 - DNA, 25 bp, Homo sapien
aaccagaaagcagtagtaggagggg

SEQ ID NO: 2041417 - DNA, 25 bp, Homo sapien
tcagcagccttgtggccgtggggac

SEQ ID NO: 2041418 - DNA, 25 bp, Homo sapien
ctttttattatcaggtaacattaag

SEQ ID NO: 2041419 - DNA, 25 bp, Homo sapien
tattatcaggtaacattaaggcccc

SEQ ID NO: 2041420 - DNA, 25 bp, Homo sapien
gattccaaggggagtcagcagcctt

SEQ ID NO: 2041421 - DNA, 25 bp, Homo sapien
agtggtagaatcaggcttcaggatt

SEQ ID NO: 2041422 - DNA, 25 bp, Homo sapien
ggccaccggttctcctctcatcatt

SEQ ID NO: 2041423 - DNA, 25 bp, Homo sapien
gagtggtagaatcaggcttcaggat

SEQ ID NO: 2041424 - DNA, 25 bp, Homo sapien
ttctctgctggccaccggttctcct

SEQ ID NO: 2041425 - DNA, 25 bp, Homo sapien
ccagggcacgtggtcccaccctggg

SEQ ID NO: 2041426 - DNA, 25 bp, Homo sapien
cactgtgctggacattgccccaggg

SEQ ID NO: 2041427 - DNA, 25 bp, Homo sapien
ccccagggcacgtggtcccaccctg

SEQ ID NO: 2041428 - DNA, 25 bp, Homo sapien
actgtgctggacattgccccagggc

SEQ ID NO: 2041429 - DNA, 25 bp, Homo sapien
aggcggtaaggagcagtcctgctgc

SEQ ID NO: 2041430 - DNA, 25 bp, Homo sapien
ttggaggcggtaaggagcagtcctg

SEQ ID NO: 2041431 - DNA, 25 bp, Homo sapien
ggaggcggtaaggagcagtcctgct

SEQ ID NO: 2041432 - DNA, 25 bp, Homo sapien
cggtaaggagcagtcctgctgctgg

SEQ ID NO: 2041433 - DNA, 25 bp, Homo sapien
aacagagatgggtcatagaagcctg

SEQ ID NO: 2041434 - DNA, 25 bp, Homo sapien
aaggaagagtaaaggtgcaagtctg

SEQ ID NO: 2041435 - DNA, 25 bp, Homo sapien
catcaccttaggctctagctgctga

SEQ ID NO: 2041436 - DNA, 25 bp, Homo sapien
atagaagcctgggtccggttccaca

SEQ ID NO: 2041437 - DNA, 25 bp, Homo sapien
ggtcacctagtaaacctcctgcatt

SEQ ID NO: 2041438 - DNA, 25 bp, Homo sapien
gagagttccaacctcctctggtctg

SEQ ID NO: 2041439 - DNA, 25 bp, Homo sapien
tgccccagagcatgacaaggcagaa

SEQ ID NO: 2041440 - DNA, 25 bp, Homo sapien
cccaagtaacttgcaaaggagaggt

SEQ ID NO: 2041441 - DNA, 25 bp, Homo sapien
gtgtgtatacctgctttataaataa

SEQ ID NO: 2041442 - DNA, 25 bp, Homo sapien
agatccacgactgttctgctggagg

SEQ ID NO: 2041443 - DNA, 25 bp, Homo sapien
tgtatgtgtgtatacctgctttata

SEQ ID NO: 2041444 - DNA, 25 bp, Homo sapien
tctgagatccacgactgttctgctg

SEQ ID NO: 2041445 - DNA, 25 bp, Homo sapien
catggcacgatgctgagctattttt

SEQ ID NO: 2041446 - DNA, 25 bp, Homo sapien
cagccattcttaatgcccagagttt

SEQ ID NO: 2041447 - DNA, 25 bp, Homo sapien
gactacagacgcatggcacgatgct

SEQ ID NO: 2041448 - DNA, 25 bp, Homo sapien
cctatcttatggtgctgaactttga

SEQ ID NO: 2041449 - DNA, 25 bp, Homo sapien
gcagcattgtatggtcctggaggtt

SEQ ID NO: 2041450 - DNA, 25 bp, Homo sapien
cccctttattggcagcattgtatgg

SEQ ID NO: 2041451 - DNA, 25 bp, Homo sapien
cagcattgtatggtcctggaggttt

SEQ ID NO: 2041452 - DNA, 25 bp, Homo sapien
caaaataggtggaaatgtgttaact

SEQ ID NO: 2041453 - DNA, 25 bp, Homo sapien
acttcatgttagttgtcaggcctga

SEQ ID NO: 2041454 - DNA, 25 bp, Homo sapien
aaggggagtgctaacaagtctctcc

SEQ ID NO: 2041455 - DNA, 25 bp, Homo sapien
taaactggagtgaaagtctacgtag

SEQ ID NO: 2041456 - DNA, 25 bp, Homo sapien
tggtggcagatcctaaagttttaaa

SEQ ID NO: 2041457 - DNA, 25 bp, Homo sapien
gaaagtctacgtagctgggatttga

SEQ ID NO: 2041458 - DNA, 25 bp, Homo sapien
gtggtggtggcagatcctaaagttt

SEQ ID NO: 2041459 - DNA, 25 bp, Homo sapien
tgccacccaatacctccccgtagtg

SEQ ID NO: 2041460 - DNA, 25 bp, Homo sapien
acacccatgtgcctgcccgggataa

SEQ ID NO: 2041461 - DNA, 25 bp, Homo sapien
gataatctagcttcctcagatctgc

SEQ ID NO: 2041462 - DNA, 25 bp, Homo sapien
ggtagggtgaacagaagtagaatcc

SEQ ID NO: 2041463 - DNA, 25 bp, Homo sapien
taggttacccgttctagttctcaca

SEQ ID NO: 2041464 - DNA, 25 bp, Homo sapien
acactggtaaggacgatgactgatt

SEQ ID NO: 2041465 - DNA, 25 bp, Homo sapien
taaacttagtttgcttggcagtctt

SEQ ID NO: 2041466 - DNA, 25 bp, Homo sapien
cttgtttccctgtactggcagcttc

SEQ ID NO: 2041467 - DNA, 25 bp, Homo sapien
tttcattatgaaggtttagatcttc

SEQ ID NO: 2041468 - DNA, 25 bp, Homo sapien
cattatgaaggtttagatcttcttt

SEQ ID NO: 2041469 - DNA, 25 bp, Homo sapien
gttttcattatgaaggtttagatct

SEQ ID NO: 2041470 - DNA, 25 bp, Homo sapien
atgaaggtttagatcttcttttaga

SEQ ID NO: 2041471 - DNA, 25 bp, Homo sapien
ctgcgtgcggttactctgcgagtcc

SEQ ID NO: 2041472 - DNA, 25 bp, Homo sapien
ggttactctgcgagtccacaccttc

SEQ ID NO: 2041473 - DNA, 25 bp, Homo sapien
ccaggaccagcgacgtggaccagca

SEQ ID NO: 2041474 - DNA, 25 bp, Homo sapien
accagcgacgtggaccagcacactg

SEQ ID NO: 2041475 - DNA, 25 bp, Homo sapien
tccttatgaaacatcgccgaagcag

SEQ ID NO: 2041476 - DNA, 25 bp, Homo sapien
tgtggcgcggccgaaataaatcaac

SEQ ID NO: 2041477 - DNA, 25 bp, Homo sapien
gccgaagcagccagttttgtgacag

SEQ ID NO: 2041478 - DNA, 25 bp, Homo sapien
cgagaaggcctcataaatctgggct

SEQ ID NO: 2041479 - DNA, 25 bp, Homo sapien
aaaaggcacattggagacgtcaggc

SEQ ID NO: 2041480 - DNA, 25 bp, Homo sapien
ggtccctagcgccaaagatgcattg

SEQ ID NO: 2041481 - DNA, 25 bp, Homo sapien
gctcattgggtcgaaacagtccgga

SEQ ID NO: 2041482 - DNA, 25 bp, Homo sapien
caaatcccgaaagaggagacatgcg

SEQ ID NO: 2041483 - DNA, 25 bp, Homo sapien
gtcgaatcggtcaatgtccaccccg

SEQ ID NO: 2041484 - DNA, 25 bp, Homo sapien
tagagcccgaacgttgtcgaatcgg

SEQ ID NO: 2041485 - DNA, 25 bp, Homo sapien
attcactacccattccctcgttagg

SEQ ID NO: 2041486 - DNA, 25 bp, Homo sapien
gagcccttagagcccgaacgttgtc

SEQ ID NO: 2041487 - DNA, 25 bp, Homo sapien
gtccagggatatccacgcagacatc

SEQ ID NO: 2041488 - DNA, 25 bp, Homo sapien
gggtatcgagtgtccagggatatcc

SEQ ID NO: 2041489 - DNA, 25 bp, Homo sapien
gagtgtccagggatatccacgcaga

SEQ ID NO: 2041490 - DNA, 25 bp, Homo sapien
ggatatccacgcagacatccttgta

SEQ ID NO: 2041491 - DNA, 25 bp, Homo sapien
ctcgcgccagggctcgatctcctcg

SEQ ID NO: 2041492 - DNA, 25 bp, Homo sapien
gccagggctcgatctcctcggggct

SEQ ID NO: 2041493 - DNA, 25 bp, Homo sapien
ctcagggttggaggccgtacacagc

SEQ ID NO: 2041494 - DNA, 25 bp, Homo sapien
gacagagatcaggctcgcgccaggg

SEQ ID NO: 2041495 - DNA, 25 bp, Homo sapien
cacttaaacatttggtcggaactca

SEQ ID NO: 2041496 - DNA, 25 bp, Homo sapien
tggaatcaaaggaaatcaaatgccc

SEQ ID NO: 2041497 - DNA, 25 bp, Homo sapien
aattgcttcgaatagcaaatccgag

SEQ ID NO: 2041498 - DNA, 25 bp, Homo sapien
tttccgtcagtgcttacaaatgagc

SEQ ID NO: 2041499 - DNA, 25 bp, Homo sapien
cattccagagttttctaccttcagc

SEQ ID NO: 2041500 - DNA, 25 bp, Homo sapien
ccgggcggacgcctggctatctctt

SEQ ID NO: 2041501 - DNA, 25 bp, Homo sapien
aagcaaggcattccgagtcctggcg

SEQ ID NO: 2041502 - DNA, 25 bp, Homo sapien
gcattcgatcgcattcaggttaaaa

SEQ ID NO: 2041503 - DNA, 25 bp, Homo sapien
gactaaattggatgagaacggtttc

SEQ ID NO: 2041504 - DNA, 25 bp, Homo sapien
ccaggagccacaagttcacaactca

SEQ ID NO: 2041505 - DNA, 25 bp, Homo sapien
tgaaaaacgaagaattctcgccaac

SEQ ID NO: 2041506 - DNA, 25 bp, Homo sapien
cggtttctggaccttctcggtagca

SEQ ID NO: 2041507 - DNA, 25 bp, Homo sapien
agttacgtgcagaggaaacaacgct

SEQ ID NO: 2041508 - DNA, 25 bp, Homo sapien
gaaacaacgcttagctacgaggtct

SEQ ID NO: 2041509 - DNA, 25 bp, Homo sapien
accatctctggaaaccatactttac

SEQ ID NO: 2041510 - DNA, 25 bp, Homo sapien
gaggtctcaccatctctggaaacca

SEQ ID NO: 2041511 - DNA, 25 bp, Homo sapien
aaatcatttacttggatttacctgg

SEQ ID NO: 2041512 - DNA, 25 bp, Homo sapien
aaaccagagcctaaacgctttctag

SEQ ID NO: 2041513 - DNA, 25 bp, Homo sapien
ctaggagaccgaccttcagaaaatc

SEQ ID NO: 2041514 - DNA, 25 bp, Homo sapien
gcctaaacgctttctaggagaccga

SEQ ID NO: 2041515 - DNA, 25 bp, Homo sapien
gggtcacgtctgtcggaagaaatcc

SEQ ID NO: 2041516 - DNA, 25 bp, Homo sapien
tggggtcacgtctgtcggaagaaat

SEQ ID NO: 2041517 - DNA, 25 bp, Homo sapien
tcacgtctgtcggaagaaatccttt

SEQ ID NO: 2041518 - DNA, 25 bp, Homo sapien
ggtcacgtctgtcggaagaaatcct

SEQ ID NO: 2041519 - DNA, 25 bp, Homo sapien
ccgctgacagatcggcgctgataac

SEQ ID NO: 2041520 - DNA, 25 bp, Homo sapien
acggctcctgcagcggacgagcctg

SEQ ID NO: 2041521 - DNA, 25 bp, Homo sapien
gataaccccgcgacgttcatttcca

SEQ ID NO: 2041522 - DNA, 25 bp, Homo sapien
aaagggagcgagacatatatcacgg

SEQ ID NO: 2041523 - DNA, 25 bp, Homo sapien
ggtcggtctcacacaacttcagggc

SEQ ID NO: 2041524 - DNA, 25 bp, Homo sapien
tgagccgtagcatcccgagataggg

SEQ ID NO: 2041525 - DNA, 25 bp, Homo sapien
caaaagttggagagcgtcctcggac

SEQ ID NO: 2041526 - DNA, 25 bp, Homo sapien
tcctcggacacgactgatgtggaag

SEQ ID NO: 2041527 - DNA, 25 bp, Homo sapien
gagcgctgtttgtttagggctcggt

SEQ ID NO: 2041528 - DNA, 25 bp, Homo sapien
agcgcagttccgacccacagcctgg

SEQ ID NO: 2041529 - DNA, 25 bp, Homo sapien
agcctggcacccttcggcgagcgct

SEQ ID NO: 2041530 - DNA, 25 bp, Homo sapien
agctgctcgctgagcgcagttccga

SEQ ID NO: 2041531 - DNA, 25 bp, Homo sapien
cagtgcaggtaagggtcgcgcctca

SEQ ID NO: 2041532 - DNA, 25 bp, Homo sapien
cgctgaggcgagttgtgccaagact

SEQ ID NO: 2041533 - DNA, 25 bp, Homo sapien
caagacttgagtctgttgtgccaag

SEQ ID NO: 2041534 - DNA, 25 bp, Homo sapien
gtaacccagagtccggtagcgctga

SEQ ID NO: 2041535 - DNA, 25 bp, Homo sapien
actgattaccgtagtcaatagtggc

SEQ ID NO: 2041536 - DNA, 25 bp, Homo sapien
caatagtggcttttagggcggagaa

SEQ ID NO: 2041537 - DNA, 25 bp, Homo sapien
tgaactcgggttgtgtaggatgcca

SEQ ID NO: 2041538 - DNA, 25 bp, Homo sapien
tgtgttgtaagttgcagtatcccca

SEQ ID NO: 2041539 - DNA, 25 bp, Homo sapien
ttgctcgggtttggcaacgacgtac

SEQ ID NO: 2041540 - DNA, 25 bp, Homo sapien
ccccggatatttgtgggttgcagcg

SEQ ID NO: 2041541 - DNA, 25 bp, Homo sapien
cagtctttaaaagctccgggacagc

SEQ ID NO: 2041542 - DNA, 25 bp, Homo sapien
caacgacgtactgtaatgatgatgg

SEQ ID NO: 2041543 - DNA, 25 bp, Homo sapien
actatggaaggcttcacgaatttgg

SEQ ID NO: 2041544 - DNA, 25 bp, Homo sapien
ggccatgctaatcttctctgtatcc

SEQ ID NO: 2041545 - DNA, 25 bp, Homo sapien
cgaatttgggtgtcattcttgcgct

SEQ ID NO: 2041546 - DNA, 25 bp, Homo sapien
aatttgggtgtcattcttgcgctgg

SEQ ID NO: 2041547 - DNA, 25 bp, Homo sapien
agctgcaagcttccatccctgcggt

SEQ ID NO: 2041548 - DNA, 25 bp, Homo sapien
gctgcaagcttccatccctgcggta

SEQ ID NO: 2041549 - DNA, 25 bp, Homo sapien
tgcaagcttccatccctgcggtagt

SEQ ID NO: 2041550 - DNA, 25 bp, Homo sapien
ctgcaagcttccatccctgcggtag

SEQ ID NO: 2041551 - DNA, 25 bp, Homo sapien
gctgcagccagggggcatctctccg

SEQ ID NO: 2041552 - DNA, 25 bp, Homo sapien
gcagccagggggcatctctccgagc

SEQ ID NO: 2041553 - DNA, 25 bp, Homo sapien
agccagggggcatctctccgagctc

SEQ ID NO: 2041554 - DNA, 25 bp, Homo sapien
gccagggggcatctctccgagctct

SEQ ID NO: 2041555 - DNA, 25 bp, Homo sapien
ggtagggttgctggcctgcctacca

SEQ ID NO: 2041556 - DNA, 25 bp, Homo sapien
cagggcagggggtagggttgctggc

SEQ ID NO: 2041557 - DNA, 25 bp, Homo sapien
agaaacactgactgccattaccagg

SEQ ID NO: 2041558 - DNA, 25 bp, Homo sapien
acactgactgccattaccagggcag

SEQ ID NO: 2041559 - DNA, 25 bp, Homo sapien
gaaacagctactcgtctgctggctg

SEQ ID NO: 2041560 - DNA, 25 bp, Homo sapien
tgactcttggccttgttccgagggc

SEQ ID NO: 2041561 - DNA, 25 bp, Homo sapien
caaaagcctctacctgctgtggcca

SEQ ID NO: 2041562 - DNA, 25 bp, Homo sapien
ggcacacacggctggtgcctgggct

SEQ ID NO: 2041563 - DNA, 25 bp, Homo sapien
ttggcttggagtttaagcctcctaa

SEQ ID NO: 2041564 - DNA, 25 bp, Homo sapien
acagcaccgaggttggcttggagtt

SEQ ID NO: 2041565 - DNA, 25 bp, Homo sapien
aaattagtagtgcagggtgaccctc

SEQ ID NO: 2041566 - DNA, 25 bp, Homo sapien
ggtaatgcgtccaccccacggatct

SEQ ID NO: 2041567 - DNA, 25 bp, Homo sapien
tctcttggccaggacgaaaggagcc

SEQ ID NO: 2041568 - DNA, 25 bp, Homo sapien
cctcccctagcaggaatgaaggtgt

SEQ ID NO: 2041569 - DNA, 25 bp, Homo sapien
gaccttagcatgacacagagtcctg

SEQ ID NO: 2041570 - DNA, 25 bp, Homo sapien
gggcataattcctagtgcacggcat

SEQ ID NO: 2041571 - DNA, 25 bp, Homo sapien
tcttccaggataagttgtcctaatg

SEQ ID NO: 2041572 - DNA, 25 bp, Homo sapien
ctctgaagcctcatgtcttagcttt

SEQ ID NO: 2041573 - DNA, 25 bp, Homo sapien
tatatacttgttaatctgtgccttc

SEQ ID NO: 2041574 - DNA, 25 bp, Homo sapien
cctaatgccacgaaaatttttgtgc

SEQ ID NO: 2041575 - DNA, 25 bp, Homo sapien
caaagagaggtggacaataggctga

SEQ ID NO: 2041576 - DNA, 25 bp, Homo sapien
ataggctgagagatagagacttagg

SEQ ID NO: 2041577 - DNA, 25 bp, Homo sapien
ttccacaaagagaggtggacaatag

SEQ ID NO: 2041578 - DNA, 25 bp, Homo sapien
gagacttaggttcctcgccagctgc

SEQ ID NO: 2041579 - DNA, 25 bp, Homo sapien
acatgcttgctgttgagtgtgcaca

SEQ ID NO: 2041580 - DNA, 25 bp, Homo sapien
aagtttggcgcctttcttcaccaca

SEQ ID NO: 2041581 - DNA, 25 bp, Homo sapien
cttttgtccagaatagattatgtgc

SEQ ID NO: 2041582 - DNA, 25 bp, Homo sapien
gaattgctttcgtcttcttgaaaag

SEQ ID NO: 2041583 - DNA, 25 bp, Homo sapien
gtcagtgacagtttgaatagggtca

SEQ ID NO: 2041584 - DNA, 25 bp, Homo sapien
tgagctccaactgtgttccgactgc

SEQ ID NO: 2041585 - DNA, 25 bp, Homo sapien
aatagggtcattctggaggtggttc

SEQ ID NO: 2041586 - DNA, 25 bp, Homo sapien
tttttgcgaagaactgtcagtgaca

SEQ ID NO: 2041587 - DNA, 25 bp, Homo sapien
tgcttttgtgcagcggtccagacag

SEQ ID NO: 2041588 - DNA, 25 bp, Homo sapien
aatcccgagaacagcgagctcaagt

SEQ ID NO: 2041589 - DNA, 25 bp, Homo sapien
caagatgggctctacataggcgtca

SEQ ID NO: 2041590 - DNA, 25 bp, Homo sapien
tggcgactgcgctgacagaacgtga

SEQ ID NO: 2041591 - DNA, 25 bp, Homo sapien
aagggccagtgcaactgggcgcttg

SEQ ID NO: 2041592 - DNA, 25 bp, Homo sapien
atggaagggaagggccagtgcaact

SEQ ID NO: 2041593 - DNA, 25 bp, Homo sapien
cctccggggcggaccctgctccact

SEQ ID NO: 2041594 - DNA, 25 bp, Homo sapien
ccagtgcaactgggcgcttgggcca

SEQ ID NO: 2041595 - DNA, 25 bp, Homo sapien
tgtgactaacccacaggcaggttgg

SEQ ID NO: 2041596 - DNA, 25 bp, Homo sapien
gaatgggatgtcctatggaaaccta

SEQ ID NO: 2041597 - DNA, 25 bp, Homo sapien
tactacctaacggatagcatttgta

SEQ ID NO: 2041598 - DNA, 25 bp, Homo sapien
tctgtaaacactctgatgaagtctg

SEQ ID NO: 2041599 - DNA, 25 bp, Homo sapien
aggtctggctgcttgaggctcctgg

SEQ ID NO: 2041600 - DNA, 25 bp, Homo sapien
tctggctgcttgaggctcctggatg

SEQ ID NO: 2041601 - DNA, 25 bp, Homo sapien
gtctggctgcttgaggctcctggat

SEQ ID NO: 2041602 - DNA, 25 bp, Homo sapien
ggtctggctgcttgaggctcctgga

SEQ ID NO: 2041603 - DNA, 25 bp, Homo sapien
gagaaggccacttcgcttatgacct

SEQ ID NO: 2041604 - DNA, 25 bp, Homo sapien
tgagaaggccacttcgcttatgacc

SEQ ID NO: 2041605 - DNA, 25 bp, Homo sapien
agaaggccacttcgcttatgacctt

SEQ ID NO: 2041606 - DNA, 25 bp, Homo sapien
tctaaggaaagttaggacgttgcag

SEQ ID NO: 2041607 - DNA, 25 bp, Homo sapien
tccaagtctgcactagggaaccagc

SEQ ID NO: 2041608 - DNA, 25 bp, Homo sapien
aaccagcgtgacgacgggtgcttca

SEQ ID NO: 2041609 - DNA, 25 bp, Homo sapien
gacgttgcaggtgcgtgtctgcacc

SEQ ID NO: 2041610 - DNA, 25 bp, Homo sapien
caaaaaatggcgagatctggcagtt

SEQ ID NO: 2041611 - DNA, 25 bp, Homo sapien
gtagccaaaaaatggcgagatctgg

SEQ ID NO: 2041612 - DNA, 25 bp, Homo sapien
tctacatatcctatagctttggggc

SEQ ID NO: 2041613 - DNA, 25 bp, Homo sapien
agtggtctgtctgtcaaaataatca

SEQ ID NO: 2041614 - DNA, 25 bp, Homo sapien
gaccggaaaatggaaaagtctggca

SEQ ID NO: 2041615 - DNA, 25 bp, Homo sapien
ccccatatgaaactgagacagcgat

SEQ ID NO: 2041616 - DNA, 25 bp, Homo sapien
tgagacagcgatacgaatccagacc

SEQ ID NO: 2041617 - DNA, 25 bp, Homo sapien
tggagcagtccgcagaacaaggaaa

SEQ ID NO: 2041618 - DNA, 25 bp, Homo sapien
ttaggacccctctcataaaacctca

SEQ ID NO: 2041619 - DNA, 25 bp, Homo sapien
aacctcacctcactaggctttatat

SEQ ID NO: 2041620 - DNA, 25 bp, Homo sapien
taggctttatatctcctagggtatt

SEQ ID NO: 2041621 - DNA, 25 bp, Homo sapien
cacctcactaggctttatatctcct

SEQ ID NO: 2041622 - DNA, 25 bp, Homo sapien
tcaaggtcctggccggaagcgcctc

SEQ ID NO: 2041623 - DNA, 25 bp, Homo sapien
aatgcctggcgaaatcaagctcctt

SEQ ID NO: 2041624 - DNA, 25 bp, Homo sapien
cggaagcgcctctcctgggttaggt

SEQ ID NO: 2041625 - DNA, 25 bp, Homo sapien
ttaggtttagcgtgctggcaatgcc

SEQ ID NO: 2041626 - DNA, 25 bp, Homo sapien
ctggttgcttgagtaagatagtttt

SEQ ID NO: 2041627 - DNA, 25 bp, Homo sapien
ggttgcttgagtaagatagttttta

SEQ ID NO: 2041628 - DNA, 25 bp, Homo sapien
cggctggttgcttgagtaagatagt

SEQ ID NO: 2041629 - DNA, 25 bp, Homo sapien
aatttttagctgaattaaccttgag

SEQ ID NO: 2041630 - DNA, 25 bp, Homo sapien
tcctccagagggacagacagtggcc

SEQ ID NO: 2041631 - DNA, 25 bp, Homo sapien
ctctcagacacgctgatggttttcg

SEQ ID NO: 2041632 - DNA, 25 bp, Homo sapien
gagcttggctctgatgcctctcaga

SEQ ID NO: 2041633 - DNA, 25 bp, Homo sapien
cacgctgatggttttcgatgagggt

SEQ ID NO: 2041634 - DNA, 25 bp, Homo sapien
gaaccatgggaacttagaactagca

SEQ ID NO: 2041635 - DNA, 25 bp, Homo sapien
tcaggtctaaatattggagccccaa

SEQ ID NO: 2041636 - DNA, 25 bp, Homo sapien
tagcaaaggcttaggaacactgtgg

SEQ ID NO: 2041637 - DNA, 25 bp, Homo sapien
tagagatccttaagcgacagagcct

SEQ ID NO: 2041638 - DNA, 25 bp, Homo sapien
catctgccacgcaagttaatggcag

SEQ ID NO: 2041639 - DNA, 25 bp, Homo sapien
ctctcgacatctgccacgcaagtta

SEQ ID NO: 2041640 - DNA, 25 bp, Homo sapien
ttaatggcagttgggtgtttgcatg

SEQ ID NO: 2041641 - DNA, 25 bp, Homo sapien
cacgcaagttaatggcagttgggtg

SEQ ID NO: 2041642 - DNA, 25 bp, Homo sapien
atccatttgccaaaacctccaaaag

SEQ ID NO: 2041643 - DNA, 25 bp, Homo sapien
tggagtcatcatcctctgtagtctc

SEQ ID NO: 2041644 - DNA, 25 bp, Homo sapien
gagtcatcatcctctgtagtctcca

SEQ ID NO: 2041645 - DNA, 25 bp, Homo sapien
ggtggagtcatcatcctctgtagtc

SEQ ID NO: 2041646 - DNA, 25 bp, Homo sapien
cggtggagtcatcatcctctgtagt

SEQ ID NO: 2041647 - DNA, 25 bp, Homo sapien
caggctcttcggctctctgccctct

SEQ ID NO: 2041648 - DNA, 25 bp, Homo sapien
tgtgggaactgaaagcacattgaag

SEQ ID NO: 2041649 - DNA, 25 bp, Homo sapien
gctgtgggaactgaaagcacattga

SEQ ID NO: 2041650 - DNA, 25 bp, Homo sapien
ctggctgtgggaactgaaagcacat

SEQ ID NO: 2041651 - DNA, 25 bp, Homo sapien
ctttgtaagccctgggtctttctcg

SEQ ID NO: 2041652 - DNA, 25 bp, Homo sapien
ccagcccagacttctctttttcctt

SEQ ID NO: 2041653 - DNA, 25 bp, Homo sapien
cagacttctctttttcctttgtaag

SEQ ID NO: 2041654 - DNA, 25 bp, Homo sapien
ctcctgtcctgccagcccagacttc

SEQ ID NO: 2041655 - DNA, 25 bp, Homo sapien
gaggaacacattcgaatgtctctga

SEQ ID NO: 2041656 - DNA, 25 bp, Homo sapien
tggcttaatcgtccagctgtcctct

SEQ ID NO: 2041657 - DNA, 25 bp, Homo sapien
cattcgaatgtctctgagcccctgg

SEQ ID NO: 2041658 - DNA, 25 bp, Homo sapien
taagctaccccaatcagcagggagg

SEQ ID NO: 2041659 - DNA, 25 bp, Homo sapien
ccaaatggttcttttaatggctctc

SEQ ID NO: 2041660 - DNA, 25 bp, Homo sapien
gtcacgaagactctgggatatttat

SEQ ID NO: 2041661 - DNA, 25 bp, Homo sapien
cacagttgtgtttgacgctgccagt

SEQ ID NO: 2041662 - DNA, 25 bp, Homo sapien
tcggctccgggcagctcgtgggcct

SEQ ID NO: 2041663 - DNA, 25 bp, Homo sapien
gccagaccatgagggttggcatcgc

SEQ ID NO: 2041664 - DNA, 25 bp, Homo sapien
gaccatgagggttggcatcgcagcc

SEQ ID NO: 2041665 - DNA, 25 bp, Homo sapien
cagaccatgagggttggcatcgcag

SEQ ID NO: 2041666 - DNA, 25 bp, Homo sapien
atgagggttggcatcgcagcctcca

SEQ ID NO: 2041667 - DNA, 25 bp, Homo sapien
tcatgcggactttctgcaagagctt

SEQ ID NO: 2041668 - DNA, 25 bp, Homo sapien
taagagtgctgtagacttcaggtaa

SEQ ID NO: 2041669 - DNA, 25 bp, Homo sapien
catcattttatgcttgggacttagg

SEQ ID NO: 2041670 - DNA, 25 bp, Homo sapien
cggctggcgagaataggctgtatct

SEQ ID NO: 2041671 - DNA, 25 bp, Homo sapien
gcatgtccctgagtataaagctaag

SEQ ID NO: 2041672 - DNA, 25 bp, Homo sapien
catctttagagagtcgggagctgca

SEQ ID NO: 2041673 - DNA, 25 bp, Homo sapien
tgggatggcaacagccgctcatgct

SEQ ID NO: 2041674 - DNA, 25 bp, Homo sapien
gaaatttggcttagagcatgtccct

SEQ ID NO: 2041675 - DNA, 25 bp, Homo sapien
tagtccactggtcttagaagagctg

SEQ ID NO: 2041676 - DNA, 25 bp, Homo sapien
cccttttgtgggaagctgagcatgg

SEQ ID NO: 2041677 - DNA, 25 bp, Homo sapien
tgtacagggacaacaatggctttgg

SEQ ID NO: 2041678 - DNA, 25 bp, Homo sapien
gacttctgattgtcgagaccccagg

SEQ ID NO: 2041679 - DNA, 25 bp, Homo sapien
tgtaatgctcggtgattagtttcaa

SEQ ID NO: 2041680 - DNA, 25 bp, Homo sapien
gtttcaattccagtgtaagagctgg

SEQ ID NO: 2041681 - DNA, 25 bp, Homo sapien
cttcatgtaatgctcggtgattagt

SEQ ID NO: 2041682 - DNA, 25 bp, Homo sapien
atgctcggtgattagtttcaattcc

SEQ ID NO: 2041683 - DNA, 25 bp, Homo sapien
tttctttggatttcggcatcggttg

SEQ ID NO: 2041684 - DNA, 25 bp, Homo sapien
tcggcatcggttgggcctctttctg

SEQ ID NO: 2041685 - DNA, 25 bp, Homo sapien
tctgtgtcgagtgtctatttttctt

SEQ ID NO: 2041686 - DNA, 25 bp, Homo sapien
tctaccttattctgtgtcgagtgtc

SEQ ID NO: 2041687 - DNA, 25 bp, Homo sapien
taacactgtagttcgtgaggtaggc

SEQ ID NO: 2041688 - DNA, 25 bp, Homo sapien
tgtagttcgtgaggtaggccttttc

SEQ ID NO: 2041689 - DNA, 25 bp, Homo sapien
tctttaacactgtagttcgtgaggt

SEQ ID NO: 2041690 - DNA, 25 bp, Homo sapien
gggagaatctttaacactgtagttc

SEQ ID NO: 2041691 - DNA, 25 bp, Homo sapien
tgcacgattaagtagaatttaggct

SEQ ID NO: 2041692 - DNA, 25 bp, Homo sapien
taactgcagaaagtctgtgcacgat

SEQ ID NO: 2041693 - DNA, 25 bp, Homo sapien
tgtgcacgattaagtagaatttagg

SEQ ID NO: 2041694 - DNA, 25 bp, Homo sapien
gaaagtctgtgcacgattaagtaga

SEQ ID NO: 2041695 - DNA, 25 bp, Homo sapien
gctggataaatgaatttcacaatct

SEQ ID NO: 2041696 - DNA, 25 bp, Homo sapien
ctgcatgcgtgctgctggataaatg

SEQ ID NO: 2041697 - DNA, 25 bp, Homo sapien
gataaatgaatttcacaatctgcac

SEQ ID NO: 2041698 - DNA, 25 bp, Homo sapien
tggataaatgaatttcacaatctgc

SEQ ID NO: 2041699 - DNA, 25 bp, Homo sapien
gatgctgatggcttgtggaatcaca

SEQ ID NO: 2041700 - DNA, 25 bp, Homo sapien
tgaaatgcccttggagccacggtag

SEQ ID NO: 2041701 - DNA, 25 bp, Homo sapien
cagtcggctctgacgtgaaatgccc

SEQ ID NO: 2041702 - DNA, 25 bp, Homo sapien
aagaaacggtaaatggatgggccag

SEQ ID NO: 2041703 - DNA, 25 bp, Homo sapien
tcacacagtggtgattctggctgtt

SEQ ID NO: 2041704 - DNA, 25 bp, Homo sapien
gttacacacatttgtcaggatctca

SEQ ID NO: 2041705 - DNA, 25 bp, Homo sapien
gtttttccctaaagtgcagattgtc

SEQ ID NO: 2041706 - DNA, 25 bp, Homo sapien
tgtcttccgccaagaccttgttaca

SEQ ID NO: 2041707 - DNA, 25 bp, Homo sapien
gatgaggcctaatggcctctaggag

SEQ ID NO: 2041708 - DNA, 25 bp, Homo sapien
tgttaccaaaatgagagcgagccct

SEQ ID NO: 2041709 - DNA, 25 bp, Homo sapien
taggaggtcgacaaattaagcaggg

SEQ ID NO: 2041710 - DNA, 25 bp, Homo sapien
cctggaaagtctagggcgtgggaag

SEQ ID NO: 2041711 - DNA, 25 bp, Homo sapien
tgcagcttcggttacagttggatct

SEQ ID NO: 2041712 - DNA, 25 bp, Homo sapien
ggtgcagcttcggttacagttggat

SEQ ID NO: 2041713 - DNA, 25 bp, Homo sapien
gcttcggttacagttggatctgtcc

SEQ ID NO: 2041714 - DNA, 25 bp, Homo sapien
gcagcttcggttacagttggatctg

SEQ ID NO: 2041715 - DNA, 25 bp, Homo sapien
agtgaattccttgggcggctgccat

SEQ ID NO: 2041716 - DNA, 25 bp, Homo sapien
gggagtgaattccttgggcggctgc

SEQ ID NO: 2041717 - DNA, 25 bp, Homo sapien
cacatggtctcagggagtgaattcc

SEQ ID NO: 2041718 - DNA, 25 bp, Homo sapien
acacatggtctcagggagtgaattc

SEQ ID NO: 2041719 - DNA, 25 bp, Homo sapien
gcaatgggatgctgtggtccaccga

SEQ ID NO: 2041720 - DNA, 25 bp, Homo sapien
tgctgtggtccaccgaccatgggcc

SEQ ID NO: 2041721 - DNA, 25 bp, Homo sapien
gccttcctgcaatgggatgctgtgg

SEQ ID NO: 2041722 - DNA, 25 bp, Homo sapien
ccagtgccttcctgcaatgggatgc

SEQ ID NO: 2041723 - DNA, 25 bp, Homo sapien
tctgtaggcatcagtcactctgtgg

SEQ ID NO: 2041724 - DNA, 25 bp, Homo sapien
cagtccattccctcggtatctgtag

SEQ ID NO: 2041725 - DNA, 25 bp, Homo sapien
ttcattctggcttggtaacgggtgg

SEQ ID NO: 2041726 - DNA, 25 bp, Homo sapien
taacgggtgggttgtggtctcatta

SEQ ID NO: 2041727 - DNA, 25 bp, Homo sapien
gggccgtgccaagcctgccaacttg

SEQ ID NO: 2041728 - DNA, 25 bp, Homo sapien
gcagggcgttgtcagggaaaacttc

SEQ ID NO: 2041729 - DNA, 25 bp, Homo sapien
tgccaagcctgccaacttgggctgc

SEQ ID NO: 2041730 - DNA, 25 bp, Homo sapien
ccgatgcccgcagagagcagggtca

SEQ ID NO: 2041731 - DNA, 25 bp, Homo sapien
caaagcattggcctttcagagtcga

SEQ ID NO: 2041732 - DNA, 25 bp, Homo sapien
tggccctggtcggtgccttctgtgg

SEQ ID NO: 2041733 - DNA, 25 bp, Homo sapien
gaaatgacttaatgcccggggtgct

SEQ ID NO: 2041734 - DNA, 25 bp, Homo sapien
catgatgcttgtcatgagaagtgac

SEQ ID NO: 2041735 - DNA, 25 bp, Homo sapien
tgctgcttgtgtccttgtgtgaggt

SEQ ID NO: 2041736 - DNA, 25 bp, Homo sapien
tgcttgtgtccttgtgtgaggtcat

SEQ ID NO: 2041737 - DNA, 25 bp, Homo sapien
ctgcttgtgtccttgtgtgaggtca

SEQ ID NO: 2041738 - DNA, 25 bp, Homo sapien
tgtgctgcttgtgtccttgtgtgag

SEQ ID NO: 2041739 - DNA, 25 bp, Homo sapien
tattcaaggcttctaaacgatttgg

SEQ ID NO: 2041740 - DNA, 25 bp, Homo sapien
tgacgccccaagacactggtggcag

SEQ ID NO: 2041741 - DNA, 25 bp, Homo sapien
cagaattagacttatggagagcgtt

SEQ ID NO: 2041742 - DNA, 25 bp, Homo sapien
tgtgaaggaatcttttgtgatcacc

SEQ ID NO: 2041743 - DNA, 25 bp, Homo sapien
tatctagaaggctttatgcagtgct

SEQ ID NO: 2041744 - DNA, 25 bp, Homo sapien
cagtgagtgagtaaagctggcaccc

SEQ ID NO: 2041745 - DNA, 25 bp, Homo sapien
tacaccttagattccccatgagatc

SEQ ID NO: 2041746 - DNA, 25 bp, Homo sapien
cgtttgggagtcttctacaccttag

SEQ ID NO: 2041747 - DNA, 25 bp, Homo sapien
aggccagaatgggactgcgctgatt

SEQ ID NO: 2041748 - DNA, 25 bp, Homo sapien
actgcgctgattagagagggagcaa

SEQ ID NO: 2041749 - DNA, 25 bp, Homo sapien
ggaggagcctgcgtgcttccgcgtc

SEQ ID NO: 2041750 - DNA, 25 bp, Homo sapien
aaggtcagcacaacaaaccctcctg

SEQ ID NO: 2041751 - DNA, 25 bp, Homo sapien
taagacaaatgaccgaagcgcacgt

SEQ ID NO: 2041752 - DNA, 25 bp, Homo sapien
gcccagagtttacagttgagacgtt

SEQ ID NO: 2041753 - DNA, 25 bp, Homo sapien
gctacgagccttgcaacatatgaga

SEQ ID NO: 2041754 - DNA, 25 bp, Homo sapien
gggcgtgcgcagctctaattctccg

SEQ ID NO: 2041755 - DNA, 25 bp, Homo sapien
aaaagctccaggcattggaaacgtt

SEQ ID NO: 2041756 - DNA, 25 bp, Homo sapien
aacaaaagctccaggcattggaaac

SEQ ID NO: 2041757 - DNA, 25 bp, Homo sapien
gctccaggcattggaaacgtttccc

SEQ ID NO: 2041758 - DNA, 25 bp, Homo sapien
ggagcgccagggtccggccgcgctg

SEQ ID NO: 2041759 - DNA, 25 bp, Homo sapien
ccctcggtgtggtatgtctgtataa

SEQ ID NO: 2041760 - DNA, 25 bp, Homo sapien
aatgatgggccggttccctcggtgt

SEQ ID NO: 2041761 - DNA, 25 bp, Homo sapien
tataaacatcgttagcctccgggcc

SEQ ID NO: 2041762 - DNA, 25 bp, Homo sapien
taatttcgccttacaaattgcggcc

SEQ ID NO: 2041763 - DNA, 25 bp, Homo sapien
aagccccgacaagcggcgctggctg

SEQ ID NO: 2041764 - DNA, 25 bp, Homo sapien
gggagcagagcgcagaatcctcttt

SEQ ID NO: 2041765 - DNA, 25 bp, Homo sapien
tccactctatgttcgcaaccacaag

SEQ ID NO: 2041766 - DNA, 25 bp, Homo sapien
atggtagggttgactcttaatctcc

SEQ ID NO: 2041767 - DNA, 25 bp, Homo sapien
ggagcccacttggttcggatttgga

SEQ ID NO: 2041768 - DNA, 25 bp, Homo sapien
aagagtactcaagccagccatcgtc

SEQ ID NO: 2041769 - DNA, 25 bp, Homo sapien
gggcaatgcccacacccggtgttgt

SEQ ID NO: 2041770 - DNA, 25 bp, Homo sapien
tctctatcacagtcaaagggagccc

SEQ ID NO: 2041771 - DNA, 25 bp, Homo sapien
cttgtagtcgccaggcaatggacgg

SEQ ID NO: 2041772 - DNA, 25 bp, Homo sapien
cgttcaccaacttgtagtcgccagg

SEQ ID NO: 2041773 - DNA, 25 bp, Homo sapien
gaagttatgaaggatgcgttcacca

SEQ ID NO: 2041774 - DNA, 25 bp, Homo sapien
gccaggcaatggacgggcacactca

SEQ ID NO: 2041775 - DNA, 25 bp, Homo sapien
ggtatatgtccttgggtatacatat

SEQ ID NO: 2041776 - DNA, 25 bp, Homo sapien
atcattccttgtaagagctgcttcg

SEQ ID NO: 2041777 - DNA, 25 bp, Homo sapien
ccttgtaagagctgcttcggtgttc

SEQ ID NO: 2041778 - DNA, 25 bp, Homo sapien
gagctgcttcggtgttcgttgataa

SEQ ID NO: 2041779 - DNA, 25 bp, Homo sapien
tatcgagatgactgagggcagaggg

SEQ ID NO: 2041780 - DNA, 25 bp, Homo sapien
ggctgctctgggagtaatggccata

SEQ ID NO: 2041781 - DNA, 25 bp, Homo sapien
tcttttgctacaggctccatttccc

SEQ ID NO: 2041782 - DNA, 25 bp, Homo sapien
aatccaattagtaattcactttctc

SEQ ID NO: 2041783 - DNA, 25 bp, Homo sapien
tgtccaccctgttcctgagagacat

SEQ ID NO: 2041784 - DNA, 25 bp, Homo sapien
caccctgttcctgagagacatgagt

SEQ ID NO: 2041785 - DNA, 25 bp, Homo sapien
tgttcctgagagacatgagtaaggc

SEQ ID NO: 2041786 - DNA, 25 bp, Homo sapien
ccctgttcctgagagacatgagtaa

SEQ ID NO: 2041787 - DNA, 25 bp, Homo sapien
gaatacaacataatgaacccaacct

SEQ ID NO: 2041788 - DNA, 25 bp, Homo sapien
ttaagagacacacgtctagtaccat

SEQ ID NO: 2041789 - DNA, 25 bp, Homo sapien
acctctttaagagacacacgtctag

SEQ ID NO: 2041790 - DNA, 25 bp, Homo sapien
taatgaacccaacctctttaagaga

SEQ ID NO: 2041791 - DNA, 25 bp, Homo sapien
aagaggctgatgttgtcgctcgacc

SEQ ID NO: 2041792 - DNA, 25 bp, Homo sapien
cagcagaagatgtgacccactggct

SEQ ID NO: 2041793 - DNA, 25 bp, Homo sapien
tgtctagtccgaaaagaagtggcct

SEQ ID NO: 2041794 - DNA, 25 bp, Homo sapien
tggcctattacagatgatcccctgg

SEQ ID NO: 2041795 - DNA, 25 bp, Homo sapien
caaatttggtaagagagtttgagga

SEQ ID NO: 2041796 - DNA, 25 bp, Homo sapien
tcaaatttggtaagagagtttgagg

SEQ ID NO: 2041797 - DNA, 25 bp, Homo sapien
ctcaaatttggtaagagagtttgag

SEQ ID NO: 2041798 - DNA, 25 bp, Homo sapien
taggaagccccagtgtacaataagg

SEQ ID NO: 2041799 - DNA, 25 bp, Homo sapien
ttgagggcgtctctcagggaacacg

SEQ ID NO: 2041800 - DNA, 25 bp, Homo sapien
taagggcacctcatgtctcaaatag

SEQ ID NO: 2041801 - DNA, 25 bp, Homo sapien
gagtgagatatgctacccagttgtg

SEQ ID NO: 2041802 - DNA, 25 bp, Homo sapien
agaacaccaacagaggtaaaggttg

SEQ ID NO: 2041803 - DNA, 25 bp, Homo sapien
gaaataacaacacaattatgtaatg

SEQ ID NO: 2041804 - DNA, 25 bp, Homo sapien
tccccttgccacagcaagagaaaag

SEQ ID NO: 2041805 - DNA, 25 bp, Homo sapien
aattctggggcaagtaaaagttctg

SEQ ID NO: 2041806 - DNA, 25 bp, Homo sapien
taaaatctataagacaggagatcca

SEQ ID NO: 2041807 - DNA, 25 bp, Homo sapien
gaagaaattagcttagggaagacga

SEQ ID NO: 2041808 - DNA, 25 bp, Homo sapien
cagaggaaacacgaatactttctgc

SEQ ID NO: 2041809 - DNA, 25 bp, Homo sapien
agggagggcgaagaaaccattcttg

SEQ ID NO: 2041810 - DNA, 25 bp, Homo sapien
attacttttgaagagggcaaacatg

SEQ ID NO: 2041811 - DNA, 25 bp, Homo sapien
aaacatgttgttaggtttcttgctg

SEQ ID NO: 2041812 - DNA, 25 bp, Homo sapien
ggcaaacatgttgttaggtttcttg

SEQ ID NO: 2041813 - DNA, 25 bp, Homo sapien
gagggcaaacatgttgttaggtttc

SEQ ID NO: 2041814 - DNA, 25 bp, Homo sapien
accctgatggaaactcattctacct

SEQ ID NO: 2041815 - DNA, 25 bp, Homo sapien
agaaaacctctcggtaaatagacat

SEQ ID NO: 2041816 - DNA, 25 bp, Homo sapien
ttttctcatggagaataatcttctt

SEQ ID NO: 2041817 - DNA, 25 bp, Homo sapien
tatttctatctccaaccgttcttca

SEQ ID NO: 2041818 - DNA, 25 bp, Homo sapien
ccgttcttcattcgcttgaaatctc

SEQ ID NO: 2041819 - DNA, 25 bp, Homo sapien
catcttgtatttctatctccaaccg

SEQ ID NO: 2041820 - DNA, 25 bp, Homo sapien
cagcaacagctgcacgtatcaccaa

SEQ ID NO: 2041821 - DNA, 25 bp, Homo sapien
gaaaaccataaggatgagaatcggg

SEQ ID NO: 2041822 - DNA, 25 bp, Homo sapien
agtccagaaagtgccacagcaaact

SEQ ID NO: 2041823 - DNA, 25 bp, Homo sapien
ccataaggatgagaatcgggtctca

SEQ ID NO: 2041824 - DNA, 25 bp, Homo sapien
cacaacaaacgctggagaagacgca

SEQ ID NO: 2041825 - DNA, 25 bp, Homo sapien
agacgcagcattccgtttggaacct

SEQ ID NO: 2041826 - DNA, 25 bp, Homo sapien
gtatggctgagggttagccctaggc

SEQ ID NO: 2041827 - DNA, 25 bp, Homo sapien
agtaacctcggccacaacaaacgct

SEQ ID NO: 2041828 - DNA, 25 bp, Homo sapien
ggatgacgccttgccctgcaataag

SEQ ID NO: 2041829 - DNA, 25 bp, Homo sapien
tggcactccttcaacacggatgacg

SEQ ID NO: 2041830 - DNA, 25 bp, Homo sapien
cactaggttataaatcagcgccagg

SEQ ID NO: 2041831 - DNA, 25 bp, Homo sapien
gctcctgcagcaatgggtatgccca

SEQ ID NO: 2041832 - DNA, 25 bp, Homo sapien
tcaccttgtgtgaaggcaacacctc

SEQ ID NO: 2041833 - DNA, 25 bp, Homo sapien
aggccagggaatcattgaccccgtc

SEQ ID NO: 2041834 - DNA, 25 bp, Homo sapien
cctgcttgacagtgtctgtgacagc

SEQ ID NO: 2041835 - DNA, 25 bp, Homo sapien
gaatcacgttcacatgcatgctttg

SEQ ID NO: 2041836 - DNA, 25 bp, Homo sapien
aatgggagctccctagtggtcacgg

SEQ ID NO: 2041837 - DNA, 25 bp, Homo sapien
gcttcagtaagcaaaggcacatttg

SEQ ID NO: 2041838 - DNA, 25 bp, Homo sapien
tgaacttggagatactcagaagggc

SEQ ID NO: 2041839 - DNA, 25 bp, Homo sapien
cacatttgtcaaggcttcgggatga

SEQ ID NO: 2041840 - DNA, 25 bp, Homo sapien
cgctggcatcagtgtttcgagttcc

SEQ ID NO: 2041841 - DNA, 25 bp, Homo sapien
tggcatcagtgtttcgagttccagc

SEQ ID NO: 2041842 - DNA, 25 bp, Homo sapien
catcagtgtttcgagttccagcttt

SEQ ID NO: 2041843 - DNA, 25 bp, Homo sapien
tcagtgtttcgagttccagctttcc

SEQ ID NO: 2041844 - DNA, 25 bp, Homo sapien
tccagagggcacatgaattccatcc

SEQ ID NO: 2041845 - DNA, 25 bp, Homo sapien
tttgaggaagcctgaaagacccctg

SEQ ID NO: 2041846 - DNA, 25 bp, Homo sapien
agtgaattctcaaaggtcccctctg

SEQ ID NO: 2041847 - DNA, 25 bp, Homo sapien
tgggcagtagcggtggtccactacc

SEQ ID NO: 2041848 - DNA, 25 bp, Homo sapien
gcagcagccttctgcactttgtgtc

SEQ ID NO: 2041849 - DNA, 25 bp, Homo sapien
tgttagcaactcaggagaagaagct

SEQ ID NO: 2041850 - DNA, 25 bp, Homo sapien
ccatgttagcaactcaggagaagaa

SEQ ID NO: 2041851 - DNA, 25 bp, Homo sapien
catgttagcaactcaggagaagaag

SEQ ID NO: 2041852 - DNA, 25 bp, Homo sapien
tgctcacagtgccgtttgacccagt

SEQ ID NO: 2041853 - DNA, 25 bp, Homo sapien
tgtgctcacagtgccgtttgaccca

SEQ ID NO: 2041854 - DNA, 25 bp, Homo sapien
ttgtgctcacagtgccgtttgaccc

SEQ ID NO: 2041855 - DNA, 25 bp, Homo sapien
gccttgtgctcacagtgccgtttga

SEQ ID NO: 2041856 - DNA, 25 bp, Homo sapien
tcccctggttagagagagacaggcc

SEQ ID NO: 2041857 - DNA, 25 bp, Homo sapien
tactgaagagctaccagtaggagct

SEQ ID NO: 2041858 - DNA, 25 bp, Homo sapien
tccatgcaggacaggctaagaaatt

SEQ ID NO: 2041859 - DNA, 25 bp, Homo sapien
tcttgggtggcactagactgtccat

SEQ ID NO: 2041860 - DNA, 25 bp, Homo sapien
taacaacggagtcagtcttccctgc

SEQ ID NO: 2041861 - DNA, 25 bp, Homo sapien
tccatttctgataacaacggagtca

SEQ ID NO: 2041862 - DNA, 25 bp, Homo sapien
cctgctgccgaggattttttgaaac

SEQ ID NO: 2041863 - DNA, 25 bp, Homo sapien
ttttgaaacagcgtgaatactgctc

SEQ ID NO: 2041864 - DNA, 25 bp, Homo sapien
cacaaagccgtggatgagaccggtc

SEQ ID NO: 2041865 - DNA, 25 bp, Homo sapien
gaaggtattcattagcactccagtg

SEQ ID NO: 2041866 - DNA, 25 bp, Homo sapien
tcgcaagggaggacaatcacaacat

SEQ ID NO: 2041867 - DNA, 25 bp, Homo sapien
cacccagtgagtggaacttgagccc

SEQ ID NO: 2041868 - DNA, 25 bp, Homo sapien
cagtgaccgatcctgtcagctcttc

SEQ ID NO: 2041869 - DNA, 25 bp, Homo sapien
tctctcctggtgctgtagcctgctc

SEQ ID NO: 2041870 - DNA, 25 bp, Homo sapien
agctttgatctgttgcagtgaccga

SEQ ID NO: 2041871 - DNA, 25 bp, Homo sapien
acggtgtgacgctgctatccagggc

SEQ ID NO: 2041872 - DNA, 25 bp, Homo sapien
tcctcatattgttcctctattgtcc

SEQ ID NO: 2041873 - DNA, 25 bp, Homo sapien
tccagctggtaagccccaacatcgt

SEQ ID NO: 2041874 - DNA, 25 bp, Homo sapien
gccccaacatcgtgtatcttaaaaa

SEQ ID NO: 2041875 - DNA, 25 bp, Homo sapien
tgcatcttcagattgtttccttctt

SEQ ID NO: 2041876 - DNA, 25 bp, Homo sapien
tataagtttcactctatgcactgct

SEQ ID NO: 2041877 - DNA, 25 bp, Homo sapien
taccatccatttacctgaatgtgag

SEQ ID NO: 2041878 - DNA, 25 bp, Homo sapien
tgcttgctgtaggtttagtgtattc

SEQ ID NO: 2041879 - DNA, 25 bp, Homo sapien
actaaacattcagtatacatggaca

SEQ ID NO: 2041880 - DNA, 25 bp, Homo sapien
gtagcacccttaacacttcctgatt

SEQ ID NO: 2041881 - DNA, 25 bp, Homo sapien
aagcaggtcctcaattatcccttta

SEQ ID NO: 2041882 - DNA, 25 bp, Homo sapien
agagattctcagtgtagcaccctta

SEQ ID NO: 2041883 - DNA, 25 bp, Homo sapien
atccctttacaagagattctcagtg

SEQ ID NO: 2041884 - DNA, 25 bp, Homo sapien
tccagggatgctgtgagaattagtt

SEQ ID NO: 2041885 - DNA, 25 bp, Homo sapien
gagaattagttagatgacatctgca

SEQ ID NO: 2041886 - DNA, 25 bp, Homo sapien
tgctgtgagaattagttagatgaca

SEQ ID NO: 2041887 - DNA, 25 bp, Homo sapien
cattctcctgttaataattcataaa

SEQ ID NO: 2041888 - DNA, 25 bp, Homo sapien
ctttcctctggacaaagagaccggt

SEQ ID NO: 2041889 - DNA, 25 bp, Homo sapien
ctgcatttcatgacaggtggagatt

SEQ ID NO: 2041890 - DNA, 25 bp, Homo sapien
gcatttcatgacaggtggagatttc

SEQ ID NO: 2041891 - DNA, 25 bp, Homo sapien
ctctggacaaagagaccggttccat

SEQ ID NO: 2041892 - DNA, 25 bp, Homo sapien
gaaacagaatgggactgccagtccc

SEQ ID NO: 2041893 - DNA, 25 bp, Homo sapien
cagaatgggactgccagtccctaac

SEQ ID NO: 2041894 - DNA, 25 bp, Homo sapien
ctgcagagtcccgataaagaaacag

SEQ ID NO: 2041895 - DNA, 25 bp, Homo sapien
gcagagtcccgataaagaaacagaa

SEQ ID NO: 2041896 - DNA, 25 bp, Homo sapien
ttccatcaatggattcacaagagca

SEQ ID NO: 2041897 - DNA, 25 bp, Homo sapien
gtcctcttggacatttctctggcaa

SEQ ID NO: 2041898 - DNA, 25 bp, Homo sapien
tgcactctaattccatcaatggatt

SEQ ID NO: 2041899 - DNA, 25 bp, Homo sapien
aaagtcctcttggacatttctctgg

SEQ ID NO: 2041900 - DNA, 25 bp, Homo sapien
ctagacacttaaagcttgattcctc

SEQ ID NO: 2041901 - DNA, 25 bp, Homo sapien
tcattttcatagttgccctggctca

SEQ ID NO: 2041902 - DNA, 25 bp, Homo sapien
ggctcaaaactagacatgtggaaaa

SEQ ID NO: 2041903 - DNA, 25 bp, Homo sapien
gaaaagtctagacacttaaagcttg

SEQ ID NO: 2041904 - DNA, 25 bp, Homo sapien
agagctgccagtcatggtactgccc

SEQ ID NO: 2041905 - DNA, 25 bp, Homo sapien
cagagctgccagtcatggtactgcc

SEQ ID NO: 2041906 - DNA, 25 bp, Homo sapien
ggcagagctgccagtcatggtactg

SEQ ID NO: 2041907 - DNA, 25 bp, Homo sapien
tctggcagagctgccagtcatggta

SEQ ID NO: 2041908 - DNA, 25 bp, Homo sapien
aaagggcttggtaacccgatctgag

SEQ ID NO: 2041909 - DNA, 25 bp, Homo sapien
gcttggtaacccgatctgagccttc

SEQ ID NO: 2041910 - DNA, 25 bp, Homo sapien
tggtaacccgatctgagccttccca

SEQ ID NO: 2041911 - DNA, 25 bp, Homo sapien
acaaagggcttggtaacccgatctg

SEQ ID NO: 2041912 - DNA, 25 bp, Homo sapien
cccaggccatgtccggtgaggagct

SEQ ID NO: 2041913 - DNA, 25 bp, Homo sapien
aggcccaggccatgtccggtgagga

SEQ ID NO: 2041914 - DNA, 25 bp, Homo sapien
gcccaggccatgtccggtgaggagc

SEQ ID NO: 2041915 - DNA, 25 bp, Homo sapien
acaggcccaggccatgtccggtgag

SEQ ID NO: 2041916 - DNA, 25 bp, Homo sapien
tagcactctgaagcattgcctctgg

SEQ ID NO: 2041917 - DNA, 25 bp, Homo sapien
cagccataccactagcactctgaag

SEQ ID NO: 2041918 - DNA, 25 bp, Homo sapien
gcaccttctgatgactgcactggag

SEQ ID NO: 2041919 - DNA, 25 bp, Homo sapien
ttctcactaagcctcacagccaggg

SEQ ID NO: 2041920 - DNA, 25 bp, Homo sapien
cttcagagaaagcgtggtcaggaca

SEQ ID NO: 2041921 - DNA, 25 bp, Homo sapien
tcagagaaagcgtggtcaggacaag

SEQ ID NO: 2041922 - DNA, 25 bp, Homo sapien
ttcagagaaagcgtggtcaggacaa

SEQ ID NO: 2041923 - DNA, 25 bp, Homo sapien
ccagcacatttcagtggcaactctg

SEQ ID NO: 2041924 - DNA, 25 bp, Homo sapien
tctgcacagcatagcaaccaactcc

SEQ ID NO: 2041925 - DNA, 25 bp, Homo sapien
cccagcacatttcagtggcaactct

SEQ ID NO: 2041926 - DNA, 25 bp, Homo sapien
gaatctccccagcaatttgacctct

SEQ ID NO: 2041927 - DNA, 25 bp, Homo sapien
tccttaggtcgatccctctctcagg

SEQ ID NO: 2041928 - DNA, 25 bp, Homo sapien
tctctcaggcatccggagaatctcc

SEQ ID NO: 2041929 - DNA, 25 bp, Homo sapien
tgaatcccccttccttaggtcgatc

SEQ ID NO: 2041930 - DNA, 25 bp, Homo sapien
aacacactagtggtgaaggccacac

SEQ ID NO: 2041931 - DNA, 25 bp, Homo sapien
cacaccagcaaaccatgagaacagg

SEQ ID NO: 2041932 - DNA, 25 bp, Homo sapien
agaacacactagtggtgaaggccac

SEQ ID NO: 2041933 - DNA, 25 bp, Homo sapien
caccagcaaaccatgagaacaggat

SEQ ID NO: 2041934 - DNA, 25 bp, Homo sapien
ttaaaatgaacgtcctggaacatgg

SEQ ID NO: 2041935 - DNA, 25 bp, Homo sapien
gacaccaatctttgtggccctataa

SEQ ID NO: 2041936 - DNA, 25 bp, Homo sapien
atggataaagaatgacacttttccc

SEQ ID NO: 2041937 - DNA, 25 bp, Homo sapien
cccggagatacaggctttataccag

SEQ ID NO: 2041938 - DNA, 25 bp, Homo sapien
ttttcaccacagaaatagagtgaat

SEQ ID NO: 2041939 - DNA, 25 bp, Homo sapien
tcaccacagaaatagagtgaattac

SEQ ID NO: 2041940 - DNA, 25 bp, Homo sapien
tttcaccacagaaatagagtgaatt

SEQ ID NO: 2041941 - DNA, 25 bp, Homo sapien
ttcaccacagaaatagagtgaatta

SEQ ID NO: 2041942 - DNA, 25 bp, Homo sapien
agaggaactggacactcacacttca

SEQ ID NO: 2041943 - DNA, 25 bp, Homo sapien
tgcagggtgaacgtgctcctccgtg

SEQ ID NO: 2041944 - DNA, 25 bp, Homo sapien
ggaactggacactcacacttcagca

SEQ ID NO: 2041945 - DNA, 25 bp, Homo sapien
ccgtgctagaagttttccagggcag

SEQ ID NO: 2041946 - DNA, 25 bp, Homo sapien
ttgtcataaaattactcagaaaagg

SEQ ID NO: 2041947 - DNA, 25 bp, Homo sapien
gcattggcaggagttagtaagctcc

SEQ ID NO: 2041948 - DNA, 25 bp, Homo sapien
gcaatgctgctctctgaatgtgggc

SEQ ID NO: 2041949 - DNA, 25 bp, Homo sapien
taccagacatttggctggcattggc

SEQ ID NO: 2041950 - DNA, 25 bp, Homo sapien
ggaaggaataaaatgttgatccaag

SEQ ID NO: 2041951 - DNA, 25 bp, Homo sapien
tattatgggtctgtttagtgtctcg

SEQ ID NO: 2041952 - DNA, 25 bp, Homo sapien
tctgtttagtgtctcggtcaaggga

SEQ ID NO: 2041953 - DNA, 25 bp, Homo sapien
tgtgcagttgaggacggtttattat

SEQ ID NO: 2041954 - DNA, 25 bp, Homo sapien
gagagcagtgtgatccttaagggcc

SEQ ID NO: 2041955 - DNA, 25 bp, Homo sapien
gaaaccagtcagtaggacccaagaa

SEQ ID NO: 2041956 - DNA, 25 bp, Homo sapien
taggagaaagaacaccggtcaagct

SEQ ID NO: 2041957 - DNA, 25 bp, Homo sapien
ggtaactaaggatgtcaagtgccca

SEQ ID NO: 2041958 - DNA, 25 bp, Homo sapien
tctcagtgcctaacatcaggaatat

SEQ ID NO: 2041959 - DNA, 25 bp, Homo sapien
taacccatctggagacttgtcaacg

SEQ ID NO: 2041960 - DNA, 25 bp, Homo sapien
caacgctacttaagaaggtccttgg

SEQ ID NO: 2041961 - DNA, 25 bp, Homo sapien
ctaagatttggtagtgtgtgcgcac

SEQ ID NO: 2041962 - DNA, 25 bp, Homo sapien
caagtgactccttcatgtagttgtc

SEQ ID NO: 2041963 - DNA, 25 bp, Homo sapien
caataagatgttttgctgagcatgc

SEQ ID NO: 2041964 - DNA, 25 bp, Homo sapien
tgagcatgcagttgacatgaactcc

SEQ ID NO: 2041965 - DNA, 25 bp, Homo sapien
tagcactccttaggtcacaagtcac

SEQ ID NO: 2041966 - DNA, 25 bp, Homo sapien
atggatcaagcacttaaaatctaag

SEQ ID NO: 2041967 - DNA, 25 bp, Homo sapien
ggtgagactgaattaaactaaagag

SEQ ID NO: 2041968 - DNA, 25 bp, Homo sapien
ggatcaagcacttaaaatctaagac

SEQ ID NO: 2041969 - DNA, 25 bp, Homo sapien
aacaaagataaataggtgagactga

SEQ ID NO: 2041970 - DNA, 25 bp, Homo sapien
caagcccttggcacccgcgggcctg

SEQ ID NO: 2041971 - DNA, 25 bp, Homo sapien
tggggttccctgcaagcccttggca

SEQ ID NO: 2041972 - DNA, 25 bp, Homo sapien
cgtcttatatttggggttccctgca

SEQ ID NO: 2041973 - DNA, 25 bp, Homo sapien
ttcgatgtctcccacgtcttatatt

SEQ ID NO: 2041974 - DNA, 25 bp, Homo sapien
agctgctcaaggttagcagccttct

SEQ ID NO: 2041975 - DNA, 25 bp, Homo sapien
tctcctgttacttggtgattctgct

SEQ ID NO: 2041976 - DNA, 25 bp, Homo sapien
ctagtctcctgttacttggtgattc

SEQ ID NO: 2041977 - DNA, 25 bp, Homo sapien
tagcagccttctgaagtccacccag

SEQ ID NO: 2041978 - DNA, 25 bp, Homo sapien
caggaaattgctacatgattttgtc

SEQ ID NO: 2041979 - DNA, 25 bp, Homo sapien
ttgcaggccaggaaattgctacatg

SEQ ID NO: 2041980 - DNA, 25 bp, Homo sapien
acatcactgcccactttctgttgga

SEQ ID NO: 2041981 - DNA, 25 bp, Homo sapien
tctgttggactttctccactttgct

SEQ ID NO: 2041982 - DNA, 25 bp, Homo sapien
agagatctccaaggactgctgtcca

SEQ ID NO: 2041983 - DNA, 25 bp, Homo sapien
taaccgggctcagagatctccaagg

SEQ ID NO: 2041984 - DNA, 25 bp, Homo sapien
gaaagccagtaaccgggctcagaga

SEQ ID NO: 2041985 - DNA, 25 bp, Homo sapien
taagtgcctgaaagccagtaaccgg

SEQ ID NO: 2041986 - DNA, 25 bp, Homo sapien
tatgcaggtagcttaactccagtgg

SEQ ID NO: 2041987 - DNA, 25 bp, Homo sapien
gattaagtacagctgatcgcactca

SEQ ID NO: 2041988 - DNA, 25 bp, Homo sapien
ggttccaggtgatccaggctaggca

SEQ ID NO: 2041989 - DNA, 25 bp, Homo sapien
ggctaggcagctgagttaggccctc

SEQ ID NO: 2041990 - DNA, 25 bp, Homo sapien
tggctccacagatttggtgctacta

SEQ ID NO: 2041991 - DNA, 25 bp, Homo sapien
gctccacagatttggtgctactaat

SEQ ID NO: 2041992 - DNA, 25 bp, Homo sapien
ttctggctccacagatttggtgcta

SEQ ID NO: 2041993 - DNA, 25 bp, Homo sapien
aggttgatattattagtaacttcat

SEQ ID NO: 2041994 - DNA, 25 bp, Homo sapien
tatattccctaagaacgtccacaaa

SEQ ID NO: 2041995 - DNA, 25 bp, Homo sapien
tccctaagaacgtccacaaactctg

SEQ ID NO: 2041996 - DNA, 25 bp, Homo sapien
ccctaagaacgtccacaaactctgg

SEQ ID NO: 2041997 - DNA, 25 bp, Homo sapien
tttatattccctaagaacgtccaca

SEQ ID NO: 2041998 - DNA, 25 bp, Homo sapien
cagccaggcgtctggtaagcaccga

SEQ ID NO: 2041999 - DNA, 25 bp, Homo sapien
gcctctgagacacatattgttgtcc

SEQ ID NO: 2042000 - DNA, 25 bp, Homo sapien
gtgtgggaaattttccttgcctctg

SEQ ID NO: 2042001 - DNA, 25 bp, Homo sapien
cacatattgttgtccaacaatggca

SEQ ID NO: 2042002 - DNA, 25 bp, Homo sapien
aactcatcagaagcacactaccatc

SEQ ID NO: 2042003 - DNA, 25 bp, Homo sapien
ctcccaagatttaagatgattagtg

SEQ ID NO: 2042004 - DNA, 25 bp, Homo sapien
ctgcatagtggtctcctcccaagat

SEQ ID NO: 2042005 - DNA, 25 bp, Homo sapien
ttcaactcatcagaagcacactacc

SEQ ID NO: 2042006 - DNA, 25 bp, Homo sapien
ttagtcagagcgaagaatacaaaga

SEQ ID NO: 2042007 - DNA, 25 bp, Homo sapien
tagtcagagcgaagaatacaaagat

SEQ ID NO: 2042008 - DNA, 25 bp, Homo sapien
ttagagggaatgcttcttcccctcc

SEQ ID NO: 2042009 - DNA, 25 bp, Homo sapien
ccccagcatgggctgctacaggctg

SEQ ID NO: 2042010 - DNA, 25 bp, Homo sapien
cagcatgggctgctacaggctggaa

SEQ ID NO: 2042011 - DNA, 25 bp, Homo sapien
gcatgggctgctacaggctggaagc

SEQ ID NO: 2042012 - DNA, 25 bp, Homo sapien
tgctctctccagagttgaagtaggg

SEQ ID NO: 2042013 - DNA, 25 bp, Homo sapien
tctctccagagttgaagtagggcaa

SEQ ID NO: 2042014 - DNA, 25 bp, Homo sapien
ctccagagttgaagtagggcaaagg

SEQ ID NO: 2042015 - DNA, 25 bp, Homo sapien
ctctctccagagttgaagtagggca

SEQ ID NO: 2042016 - DNA, 25 bp, Homo sapien
ctgtttggtaaggagcagaaaaggt

SEQ ID NO: 2042017 - DNA, 25 bp, Homo sapien
tggtaaggagcagaaaaggttgtac

SEQ ID NO: 2042018 - DNA, 25 bp, Homo sapien
ttggtaaggagcagaaaaggttgta

SEQ ID NO: 2042019 - DNA, 25 bp, Homo sapien
ctgtgtcaggaaaccccctaaggtg

SEQ ID NO: 2042020 - DNA, 25 bp, Homo sapien
cccctaaggtgtggtccctcagcag

SEQ ID NO: 2042021 - DNA, 25 bp, Homo sapien
ccccctaaggtgtggtccctcagca

SEQ ID NO: 2042022 - DNA, 25 bp, Homo sapien
tttttggagactggtaagataattc

SEQ ID NO: 2042023 - DNA, 25 bp, Homo sapien
tggagactggtaagataattcagta

SEQ ID NO: 2042024 - DNA, 25 bp, Homo sapien
tggtaagataattcagtatgcaggt

SEQ ID NO: 2042025 - DNA, 25 bp, Homo sapien
actccccactctcatggggcatttt

SEQ ID NO: 2042026 - DNA, 25 bp, Homo sapien
tgtcaggtaattgttacgttcaaga

SEQ ID NO: 2042027 - DNA, 25 bp, Homo sapien
acagaattcagctctaattctgcag

SEQ ID NO: 2042028 - DNA, 25 bp, Homo sapien
gcctgagtgaaatctcctaaactag

SEQ ID NO: 2042029 - DNA, 25 bp, Homo sapien
tacgttcaagaaaagctctagcctg

SEQ ID NO: 2042030 - DNA, 25 bp, Homo sapien
tttgtcttttatgagtgccgatgca

SEQ ID NO: 2042031 - DNA, 25 bp, Homo sapien
gctggtcgtcccatcctctctttct

SEQ ID NO: 2042032 - DNA, 25 bp, Homo sapien
cacagcacctttgcccaagctcttg

SEQ ID NO: 2042033 - DNA, 25 bp, Homo sapien
cagaagtcatgtcctggtgttatgg

SEQ ID NO: 2042034 - DNA, 25 bp, Homo sapien
catgtcctggtgttatgggatcttt

SEQ ID NO: 2042035 - DNA, 25 bp, Homo sapien
tttacattaaccatgccaacacccg

SEQ ID NO: 2042036 - DNA, 25 bp, Homo sapien
ctgccaaggttgagtatctaaggac

SEQ ID NO: 2042037 - DNA, 25 bp, Homo sapien
tattcaacaggacctcaatgtaggg

SEQ ID NO: 2042038 - DNA, 25 bp, Homo sapien
gagaattgaacatttagtctgtcag

SEQ ID NO: 2042039 - DNA, 25 bp, Homo sapien
cctgaacaggggtcactaacgtaat

SEQ ID NO: 2042040 - DNA, 25 bp, Homo sapien
tctgccttatctccattataaatcc

SEQ ID NO: 2042041 - DNA, 25 bp, Homo sapien
ggtcactaacgtaatctctcctttc

SEQ ID NO: 2042042 - DNA, 25 bp, Homo sapien
gatcttaagatgatatagctgttca

SEQ ID NO: 2042043 - DNA, 25 bp, Homo sapien
tagtcgagtgatacctttttactca

SEQ ID NO: 2042044 - DNA, 25 bp, Homo sapien
ttctatatgcattgaaaacccatca

SEQ ID NO: 2042045 - DNA, 25 bp, Homo sapien
gcatgctttgaatcaatatttgcca

SEQ ID NO: 2042046 - DNA, 25 bp, Homo sapien
tcttttgggttacttgagcatttgt

SEQ ID NO: 2042047 - DNA, 25 bp, Homo sapien
aattgctctctcattaccactgggc

SEQ ID NO: 2042048 - DNA, 25 bp, Homo sapien
caatgaaagaacatcatctgaatga

SEQ ID NO: 2042049 - DNA, 25 bp, Homo sapien
tccagcacaccttggagtcctagtg

SEQ ID NO: 2042050 - DNA, 25 bp, Homo sapien
gagtcctagtgttaaggaatgtatt

SEQ ID NO: 2042051 - DNA, 25 bp, Homo sapien
agcatgccccatgatctaagatccg

SEQ ID NO: 2042052 - DNA, 25 bp, Homo sapien
ggattatgtacacaattgagacatc

SEQ ID NO: 2042053 - DNA, 25 bp, Homo sapien
tttttccgttctcagctatagcatg

SEQ ID NO: 2042054 - DNA, 25 bp, Homo sapien
tctctagagagtaacataaaagtga

SEQ ID NO: 2042055 - DNA, 25 bp, Homo sapien
gcagttttggcaggccatccaggca

SEQ ID NO: 2042056 - DNA, 25 bp, Homo sapien
tcctttatgggcagcaatgctggtg

SEQ ID NO: 2042057 - DNA, 25 bp, Homo sapien
ttgttgccagagatcacaagggtct

SEQ ID NO: 2042058 - DNA, 25 bp, Homo sapien
ttgctgtatcctgccgtacccactg

SEQ ID NO: 2042059 - DNA, 25 bp, Homo sapien
tttaatcgtgtgtagatgatccttt

SEQ ID NO: 2042060 - DNA, 25 bp, Homo sapien
ttaatcgtgtgtagatgatcctttt

SEQ ID NO: 2042061 - DNA, 25 bp, Homo sapien
taactgagataatgacttctacttt

SEQ ID NO: 2042062 - DNA, 25 bp, Homo sapien
tttcttaactgagataatgacttct

SEQ ID NO: 2042063 - DNA, 25 bp, Homo sapien
tcatgtagtgtaataagtggtgtgc

SEQ ID NO: 2042064 - DNA, 25 bp, Homo sapien
aatttttattgcctatgccagtacc

SEQ ID NO: 2042065 - DNA, 25 bp, Homo sapien
gaatcattcgtttggtgtcatacat

SEQ ID NO: 2042066 - DNA, 25 bp, Homo sapien
tatctcttccgtaccctgtgttcag

SEQ ID NO: 2042067 - DNA, 25 bp, Homo sapien
acactgaacccagctagatttattt

SEQ ID NO: 2042068 - DNA, 25 bp, Homo sapien
tcctttaagtactgaacgttgaaca

SEQ ID NO: 2042069 - DNA, 25 bp, Homo sapien
tttgtcacccagagtgtgagcaagg

SEQ ID NO: 2042070 - DNA, 25 bp, Homo sapien
tggccggaagcctatctatttcaat

SEQ ID NO: 2042071 - DNA, 25 bp, Homo sapien
tagaagaggttgatggtagcttgaa

SEQ ID NO: 2042072 - DNA, 25 bp, Homo sapien
atggtagcttgaaccagggtggaca

SEQ ID NO: 2042073 - DNA, 25 bp, Homo sapien
agaggttgatggtagcttgaaccag

SEQ ID NO: 2042074 - DNA, 25 bp, Homo sapien
ccgtagaagaggttgatggtagctt

SEQ ID NO: 2042075 - DNA, 25 bp, Homo sapien
tgtccacctagagtgaaaatagctt

SEQ ID NO: 2042076 - DNA, 25 bp, Homo sapien
tcccacagcgttgaggttacagata

SEQ ID NO: 2042077 - DNA, 25 bp, Homo sapien
tcacacttgtggagctcaattgtct

SEQ ID NO: 2042078 - DNA, 25 bp, Homo sapien
ttgtcttgtttaatcaggaggccag

SEQ ID NO: 2042079 - DNA, 25 bp, Homo sapien
tataatcatattagctaagaaatac

SEQ ID NO: 2042080 - DNA, 25 bp, Homo sapien
taattatggctagcttttgggcaca

SEQ ID NO: 2042081 - DNA, 25 bp, Homo sapien
tatatatctgaatactaagcagttt

SEQ ID NO: 2042082 - DNA, 25 bp, Homo sapien
aagaaatactaattatggctagctt

SEQ ID NO: 2042083 - DNA, 25 bp, Homo sapien
gaatgatagttgctgtaacaggcta

SEQ ID NO: 2042084 - DNA, 25 bp, Homo sapien
cactgctctttcaatactctgttaa

SEQ ID NO: 2042085 - DNA, 25 bp, Homo sapien
gctaatagaaggtttagcacccctc

SEQ ID NO: 2042086 - DNA, 25 bp, Homo sapien
atttattcatcccttaagatgtggg

SEQ ID NO: 2042087 - DNA, 25 bp, Homo sapien
tattagcagatctaaaggcataatc

SEQ ID NO: 2042088 - DNA, 25 bp, Homo sapien
cagtattagcagatctaaaggcata

SEQ ID NO: 2042089 - DNA, 25 bp, Homo sapien
ttcagtattagcagatctaaaggca

SEQ ID NO: 2042090 - DNA, 25 bp, Homo sapien
aattcagtattagcagatctaaagg

SEQ ID NO: 2042091 - DNA, 25 bp, Homo sapien
cccgtttcttctattcccattgcag

SEQ ID NO: 2042092 - DNA, 25 bp, Homo sapien
cgtttcttctattcccattgcagtc

SEQ ID NO: 2042093 - DNA, 25 bp, Homo sapien
ccgtttcttctattcccattgcagt

SEQ ID NO: 2042094 - DNA, 25 bp, Homo sapien
tgtgaggtcagcaatcccactggcc

SEQ ID NO: 2042095 - DNA, 25 bp, Homo sapien
tccctattgactttttctgctatgg

SEQ ID NO: 2042096 - DNA, 25 bp, Homo sapien
gggatcttaatccacactcactggt

SEQ ID NO: 2042097 - DNA, 25 bp, Homo sapien
cctgtgtctcgcaagagggggatct

SEQ ID NO: 2042098 - DNA, 25 bp, Homo sapien
atgcaagagttgggtgcagacgctc

SEQ ID NO: 2042099 - DNA, 25 bp, Homo sapien
actcctaatccagtgggagacccgg

SEQ ID NO: 2042100 - DNA, 25 bp, Homo sapien
atccagtgggagacccgggcaatgc

SEQ ID NO: 2042101 - DNA, 25 bp, Homo sapien
gagacccgggcaatgcaagagttgg

SEQ ID NO: 2042102 - DNA, 25 bp, Homo sapien
cagccttgcccttccgcgtcgttgt

SEQ ID NO: 2042103 - DNA, 25 bp, Homo sapien
cttccgcgtcgttgtcgctggcagg

SEQ ID NO: 2042104 - DNA, 25 bp, Homo sapien
ttgcccttccgcgtcgttgtcgctg

SEQ ID NO: 2042105 - DNA, 25 bp, Homo sapien
tgcccttccgcgtcgttgtcgctgg

SEQ ID NO: 2042106 - DNA, 25 bp, Homo sapien
cagtccaggcggtgagtgttcatta

SEQ ID NO: 2042107 - DNA, 25 bp, Homo sapien
gttcattagtaggcattgtgctttt

SEQ ID NO: 2042108 - DNA, 25 bp, Homo sapien
tgttcattagtaggcattgtgcttt

SEQ ID NO: 2042109 - DNA, 25 bp, Homo sapien
gtgttcattagtaggcattgtgctt

SEQ ID NO: 2042110 - DNA, 25 bp, Homo sapien
caacttaagaccaagtcctcctcct

SEQ ID NO: 2042111 - DNA, 25 bp, Homo sapien
cagctgcgtccaacttaagaccaag

SEQ ID NO: 2042112 - DNA, 25 bp, Homo sapien
agacagctgcgtccaacttaagacc

SEQ ID NO: 2042113 - DNA, 25 bp, Homo sapien
gacagctgcgtccaacttaagacca

SEQ ID NO: 2042114 - DNA, 25 bp, Homo sapien
cagggtagtcggctctctgggtctc

SEQ ID NO: 2042115 - DNA, 25 bp, Homo sapien
ctccagggtagtcggctctctgggt

SEQ ID NO: 2042116 - DNA, 25 bp, Homo sapien
ctctccagggtagtcggctctctgg

SEQ ID NO: 2042117 - DNA, 25 bp, Homo sapien
gggtagtcggctctctgggtctcac

SEQ ID NO: 2042118 - DNA, 25 bp, Homo sapien
ctgcttccggtaacttgccagtcca

SEQ ID NO: 2042119 - DNA, 25 bp, Homo sapien
ccggtaacttgccagtccacaggga

SEQ ID NO: 2042120 - DNA, 25 bp, Homo sapien
ttccggtaacttgccagtccacagg

SEQ ID NO: 2042121 - DNA, 25 bp, Homo sapien
gcttccggtaacttgccagtccaca

SEQ ID NO: 2042122 - DNA, 25 bp, Homo sapien
ctaaccctttcattgactcctcctc

SEQ ID NO: 2042123 - DNA, 25 bp, Homo sapien
taaccctttcattgactcctcctct

SEQ ID NO: 2042124 - DNA, 25 bp, Homo sapien
aaccctttcattgactcctcctcta

SEQ ID NO: 2042125 - DNA, 25 bp, Homo sapien
tttactccgaggcagggcaaaatgt

SEQ ID NO: 2042126 - DNA, 25 bp, Homo sapien
tttgattttactccgaggcagggca

SEQ ID NO: 2042127 - DNA, 25 bp, Homo sapien
gattttactccgaggcagggcaaaa

SEQ ID NO: 2042128 - DNA, 25 bp, Homo sapien
ggtgtttgattttactccgaggcag

SEQ ID NO: 2042129 - DNA, 25 bp, Homo sapien
aaagtcagacagggtcaactgcagg

SEQ ID NO: 2042130 - DNA, 25 bp, Homo sapien
caaagtcagacagggtcaactgcag

SEQ ID NO: 2042131 - DNA, 25 bp, Homo sapien
gcaaagtcagacagggtcaactgca

SEQ ID NO: 2042132 - DNA, 25 bp, Homo sapien
cctccactgtatgctcttgggtctt

SEQ ID NO: 2042133 - DNA, 25 bp, Homo sapien
tgctcactgcctccactgtatgctc

SEQ ID NO: 2042134 - DNA, 25 bp, Homo sapien
gctcactgcctccactgtatgctct

SEQ ID NO: 2042135 - DNA, 25 bp, Homo sapien
ctgtatgctcttgggtctttctgaa

SEQ ID NO: 2042136 - DNA, 25 bp, Homo sapien
aattctctccaaaccttggtgcaca

SEQ ID NO: 2042137 - DNA, 25 bp, Homo sapien
ttctctccaaaccttggtgcacaca

SEQ ID NO: 2042138 - DNA, 25 bp, Homo sapien
attctctccaaaccttggtgcacac

SEQ ID NO: 2042139 - DNA, 25 bp, Homo sapien
tctctccaaaccttggtgcacacac

SEQ ID NO: 2042140 - DNA, 25 bp, Homo sapien
tatccaggggtcatccagtctgttt

SEQ ID NO: 2042141 - DNA, 25 bp, Homo sapien
ctatgagcattgaacatctccttct

SEQ ID NO: 2042142 - DNA, 25 bp, Homo sapien
tgtgcagcttgagtatccaggggtc

SEQ ID NO: 2042143 - DNA, 25 bp, Homo sapien
tcttcttcactcaagtctacactct

SEQ ID NO: 2042144 - DNA, 25 bp, Homo sapien
aaagcagttgatgctgttcatgttc

SEQ ID NO: 2042145 - DNA, 25 bp, Homo sapien
tcatgttctggggttcactcgcaag

SEQ ID NO: 2042146 - DNA, 25 bp, Homo sapien
ttgaagggaaacgactggacagttc

SEQ ID NO: 2042147 - DNA, 25 bp, Homo sapien
gacacttcctaacaacagcgtgctt

SEQ ID NO: 2042148 - DNA, 25 bp, Homo sapien
gcgtttgtgcggttgaaggaaagga

SEQ ID NO: 2042149 - DNA, 25 bp, Homo sapien
ataaggagaagtcggtctttcttgg

SEQ ID NO: 2042150 - DNA, 25 bp, Homo sapien
tgaataaggagaagtcggtctttct

SEQ ID NO: 2042151 - DNA, 25 bp, Homo sapien
agatgccgtgcctgcgtttgtgcgg

SEQ ID NO: 2042152 - DNA, 25 bp, Homo sapien
atttacgggaaagaagagacagttg

SEQ ID NO: 2042153 - DNA, 25 bp, Homo sapien
aagagacagttgctggaggaagaag

SEQ ID NO: 2042154 - DNA, 25 bp, Homo sapien
ctgacttgatttacgggaaagaaga

SEQ ID NO: 2042155 - DNA, 25 bp, Homo sapien
cttgatttacgggaaagaagagaca

SEQ ID NO: 2042156 - DNA, 25 bp, Homo sapien
gagagagttacagcctcctttgacg

SEQ ID NO: 2042157 - DNA, 25 bp, Homo sapien
ttattgtcatcggtcatgggcccca

SEQ ID NO: 2042158 - DNA, 25 bp, Homo sapien
ggtcaaggtctctaacacaactggg

SEQ ID NO: 2042159 - DNA, 25 bp, Homo sapien
ccagctgtcaactctatgaggtcaa

SEQ ID NO: 2042160 - DNA, 25 bp, Homo sapien
caacccacaatgtccaaaggaggag

SEQ ID NO: 2042161 - DNA, 25 bp, Homo sapien
gagggagagagcattcttggcttcc

SEQ ID NO: 2042162 - DNA, 25 bp, Homo sapien
tgttaccagccaaatacccttgaag

SEQ ID NO: 2042163 - DNA, 25 bp, Homo sapien
tgaaccttacaggtagagctgaggg

SEQ ID NO: 2042164 - DNA, 25 bp, Homo sapien
ttgagcaaaattccatggccccacg

SEQ ID NO: 2042165 - DNA, 25 bp, Homo sapien
atggccccacgaagacaaccagagt

SEQ ID NO: 2042166 - DNA, 25 bp, Homo sapien
catggccccacgaagacaaccagag

SEQ ID NO: 2042167 - DNA, 25 bp, Homo sapien
gcaaaattccatggccccacgaaga

SEQ ID NO: 2042168 - DNA, 25 bp, Homo sapien
tgcggtgtgggagggggttgcctca

SEQ ID NO: 2042169 - DNA, 25 bp, Homo sapien
agggggttgcctcagtccagtcaaa

SEQ ID NO: 2042170 - DNA, 25 bp, Homo sapien
ttcccagggaggataggaactcgaa

SEQ ID NO: 2042171 - DNA, 25 bp, Homo sapien
gagcagctacttgatgtgccaaaca

SEQ ID NO: 2042172 - DNA, 25 bp, Homo sapien
gaactcgaatttgtggagcagctac

SEQ ID NO: 2042173 - DNA, 25 bp, Homo sapien
caagaggatacttgctggtgtgcct

SEQ ID NO: 2042174 - DNA, 25 bp, Homo sapien
gactttaccaatcacagcctttctt

SEQ ID NO: 2042175 - DNA, 25 bp, Homo sapien
cagactttaccaatcacagcctttc

SEQ ID NO: 2042176 - DNA, 25 bp, Homo sapien
cacagactttaccaatcacagcctt

SEQ ID NO: 2042177 - DNA, 25 bp, Homo sapien
acacagactttaccaatcacagcct

SEQ ID NO: 2042178 - DNA, 25 bp, Homo sapien
agtgtcaatagcaggcctctgaatc

SEQ ID NO: 2042179 - DNA, 25 bp, Homo sapien
tgtcaatagcaggcctctgaatcat

SEQ ID NO: 2042180 - DNA, 25 bp, Homo sapien
gtgtcaatagcaggcctctgaatca

SEQ ID NO: 2042181 - DNA, 25 bp, Homo sapien
gcttggaagtttcaaggtagttagc

SEQ ID NO: 2042182 - DNA, 25 bp, Homo sapien
tggaagtttcaaggtagttagccaa

SEQ ID NO: 2042183 - DNA, 25 bp, Homo sapien
ttggaagtttcaaggtagttagcca

SEQ ID NO: 2042184 - DNA, 25 bp, Homo sapien
gctgctgtaaacagacaccaggctc

SEQ ID NO: 2042185 - DNA, 25 bp, Homo sapien
ggccattgagctttgactccactga

SEQ ID NO: 2042186 - DNA, 25 bp, Homo sapien
cacagagctggccattgagctttga

SEQ ID NO: 2042187 - DNA, 25 bp, Homo sapien
ctgctgtaaacagacaccaggctcc

SEQ ID NO: 2042188 - DNA, 25 bp, Homo sapien
tgtaaagggccacgtgccatctctg

SEQ ID NO: 2042189 - DNA, 25 bp, Homo sapien
taacaacgattgttcatgtaaaggg

SEQ ID NO: 2042190 - DNA, 25 bp, Homo sapien
agggccacgtgccatctctgtcctg

SEQ ID NO: 2042191 - DNA, 25 bp, Homo sapien
tgttcatgtaaagggccacgtgcca

SEQ ID NO: 2042192 - DNA, 25 bp, Homo sapien
tgaaaccctctctgtctggcactcc

SEQ ID NO: 2042193 - DNA, 25 bp, Homo sapien
ccgggttggcggcacctctctggac

SEQ ID NO: 2042194 - DNA, 25 bp, Homo sapien
tctggacggtgtatttgctctccat

SEQ ID NO: 2042195 - DNA, 25 bp, Homo sapien
ctctctggacggtgtatttgctctc

SEQ ID NO: 2042196 - DNA, 25 bp, Homo sapien
taggtgtcacagagcttaattcagt

SEQ ID NO: 2042197 - DNA, 25 bp, Homo sapien
agtgtggcaattgttccttactgca

SEQ ID NO: 2042198 - DNA, 25 bp, Homo sapien
tgttaagttgcccataccgcctggg

SEQ ID NO: 2042199 - DNA, 25 bp, Homo sapien
tagagttacccattagctccagggc

SEQ ID NO: 2042200 - DNA, 25 bp, Homo sapien
tatgagataaacgacagggtaactg

SEQ ID NO: 2042201 - DNA, 25 bp, Homo sapien
gggtaactgtccacattggtcccag

SEQ ID NO: 2042202 - DNA, 25 bp, Homo sapien
tcaggaacccgtatttatagaagac

SEQ ID NO: 2042203 - DNA, 25 bp, Homo sapien
gacatggtaggtgccaaacgtgctt

SEQ ID NO: 2042204 - DNA, 25 bp, Homo sapien
aatttgcgttgtcctttgctaagag

SEQ ID NO: 2042205 - DNA, 25 bp, Homo sapien
aaaatttgcgttgtcctttgctaag

SEQ ID NO: 2042206 - DNA, 25 bp, Homo sapien
agtgtaaggtcattttagcccacct

SEQ ID NO: 2042207 - DNA, 25 bp, Homo sapien
tgtaaggtcattttagcccacctgg

SEQ ID NO: 2042208 - DNA, 25 bp, Homo sapien
tagcgatagctttacggtgggacag

SEQ ID NO: 2042209 - DNA, 25 bp, Homo sapien
gggtccaagtaactcgctcgcagtc

SEQ ID NO: 2042210 - DNA, 25 bp, Homo sapien
taagatgttcgtgcttctgggctct

SEQ ID NO: 2042211 - DNA, 25 bp, Homo sapien
ggaatgaatagacccaactgcaatg

SEQ ID NO: 2042212 - DNA, 25 bp, Homo sapien
agcgagccgaactagccgagctagg

SEQ ID NO: 2042213 - DNA, 25 bp, Homo sapien
ggcgcgcgcacctataaatacggac

SEQ ID NO: 2042214 - DNA, 25 bp, Homo sapien
tgattccgtgttattgcaaagaggg

SEQ ID NO: 2042215 - DNA, 25 bp, Homo sapien
gaggactcggttcagcttgctcgcc

SEQ ID NO: 2042216 - DNA, 25 bp, Homo sapien
cagctgcagaggtcccggtgagtat

SEQ ID NO: 2042217 - DNA, 25 bp, Homo sapien
tccaggccgacttcgcagaactact

SEQ ID NO: 2042218 - DNA, 25 bp, Homo sapien
aactcgttcactcagggaatcctgc

SEQ ID NO: 2042219 - DNA, 25 bp, Homo sapien
gacgatgcctttatcagcgtgcagg

SEQ ID NO: 2042220 - DNA, 25 bp, Homo sapien
ggttacacgtgtttgcacgagccca

SEQ ID NO: 2042221 - DNA, 25 bp, Homo sapien
ggctacgggacacgggttgctccca

SEQ ID NO: 2042222 - DNA, 25 bp, Homo sapien
attcgcagaggagcaccgcgcttgt

SEQ ID NO: 2042223 - DNA, 25 bp, Homo sapien
gcccagtagaaagcggcgtccgagc

SEQ ID NO: 2042224 - DNA, 25 bp, Homo sapien
gggtccaccattccacgtgtctcgg

SEQ ID NO: 2042225 - DNA, 25 bp, Homo sapien
tgctcagtagctttcccaggaagcg

SEQ ID NO: 2042226 - DNA, 25 bp, Homo sapien
ccttatggaactcagcggttgggac

SEQ ID NO: 2042227 - DNA, 25 bp, Homo sapien
tctcttcagaaagatagcggtgagg

SEQ ID NO: 2042228 - DNA, 25 bp, Homo sapien
tggggacgtgtggataatccaacct

SEQ ID NO: 2042229 - DNA, 25 bp, Homo sapien
aagtagcattaagtttgttccatgt

SEQ ID NO: 2042230 - DNA, 25 bp, Homo sapien
agtagcattaagtttgttccatgtg

SEQ ID NO: 2042231 - DNA, 25 bp, Homo sapien
gggacgtgtggataatccaacctca

SEQ ID NO: 2042232 - DNA, 25 bp, Homo sapien
ttttctgtcccgacacggccatgct

SEQ ID NO: 2042233 - DNA, 25 bp, Homo sapien
tggtgaacttctaggcttggctctg

SEQ ID NO: 2042234 - DNA, 25 bp, Homo sapien
tgaggttgaggcttggcatcaccac

SEQ ID NO: 2042235 - DNA, 25 bp, Homo sapien
tgctatccaggtaatgcagggttga

SEQ ID NO: 2042236 - DNA, 25 bp, Homo sapien
tcacatggataagaaggaacctcgg

SEQ ID NO: 2042237 - DNA, 25 bp, Homo sapien
ggcccagcgggcaccaagattgtgt

SEQ ID NO: 2042238 - DNA, 25 bp, Homo sapien
tagtagctgcctctactcggaggga

SEQ ID NO: 2042239 - DNA, 25 bp, Homo sapien
tcagcctggaaaagcgggatgtcag

SEQ ID NO: 2042240 - DNA, 25 bp, Homo sapien
tgttgtcatccggagccagtgtgtt

SEQ ID NO: 2042241 - DNA, 25 bp, Homo sapien
tgtgttaatcttggttggtccctcc

SEQ ID NO: 2042242 - DNA, 25 bp, Homo sapien
tataggcacaccagccagtgtgttc

SEQ ID NO: 2042243 - DNA, 25 bp, Homo sapien
cagtgtagggccacgtataggcaca

SEQ ID NO: 2042244 - DNA, 25 bp, Homo sapien
tgagttacagccctggacctaggga

SEQ ID NO: 2042245 - DNA, 25 bp, Homo sapien
gacaagaaaatccacctgacagtac

SEQ ID NO: 2042246 - DNA, 25 bp, Homo sapien
caggctgcaacagagtgaagcccgg

SEQ ID NO: 2042247 - DNA, 25 bp, Homo sapien
ttactgtgcacctaatatgagttac

SEQ ID NO: 2042248 - DNA, 25 bp, Homo sapien
actccagggagcgttttactggcgt

SEQ ID NO: 2042249 - DNA, 25 bp, Homo sapien
agactccagggagcgttttactggc

SEQ ID NO: 2042250 - DNA, 25 bp, Homo sapien
ggagactccagggagcgttttactg

SEQ ID NO: 2042251 - DNA, 25 bp, Homo sapien
ccagggagcgttttactggcgtcct

SEQ ID NO: 2042252 - DNA, 25 bp, Homo sapien
tctgaagggtccggtaaacaccagc

SEQ ID NO: 2042253 - DNA, 25 bp, Homo sapien
acaccagcttggatgtgaggacccc

SEQ ID NO: 2042254 - DNA, 25 bp, Homo sapien
ctaatgaagttagctccgttctctc

SEQ ID NO: 2042255 - DNA, 25 bp, Homo sapien
atgaagttagctccgttctctcctg

SEQ ID NO: 2042256 - DNA, 25 bp, Homo sapien
cgagtcccagttctgtcctgtcctg

SEQ ID NO: 2042257 - DNA, 25 bp, Homo sapien
gagtcccagttctgtcctgtcctgt

SEQ ID NO: 2042258 - DNA, 25 bp, Homo sapien
cagttctgtcctgtcctgttgggct

SEQ ID NO: 2042259 - DNA, 25 bp, Homo sapien
tcccagttctgtcctgtcctgttgg

SEQ ID NO: 2042260 - DNA, 25 bp, Homo sapien
gtactccacacctggtttggcctcc

SEQ ID NO: 2042261 - DNA, 25 bp, Homo sapien
ggtgcatgtaggaagcccctcaggc

SEQ ID NO: 2042262 - DNA, 25 bp, Homo sapien
gaaggtgcatgtaggaagcccctca

SEQ ID NO: 2042263 - DNA, 25 bp, Homo sapien
gtgcatgtaggaagcccctcaggcc

SEQ ID NO: 2042264 - DNA, 25 bp, Homo sapien
gcatgtgtctaatggatgtgtcctc

SEQ ID NO: 2042265 - DNA, 25 bp, Homo sapien
tatcttctgttaagaggtagcagct

SEQ ID NO: 2042266 - DNA, 25 bp, Homo sapien
tagatccgtggacaacaaaacaaag

SEQ ID NO: 2042267 - DNA, 25 bp, Homo sapien
tgctttaagggtctgtgtatcttct

SEQ ID NO: 2042268 - DNA, 25 bp, Homo sapien
ggaatttgttcctgtattcagccag

SEQ ID NO: 2042269 - DNA, 25 bp, Homo sapien
gggaatttgttcctgtattcagcca

SEQ ID NO: 2042270 - DNA, 25 bp, Homo sapien
gaatttgttcctgtattcagccagc

SEQ ID NO: 2042271 - DNA, 25 bp, Homo sapien
ctgtgtacttgaggtatccaagaca

SEQ ID NO: 2042272 - DNA, 25 bp, Homo sapien
gtgaagaagcaactgtgccatccag

SEQ ID NO: 2042273 - DNA, 25 bp, Homo sapien
tgaggtatccaagacactctcacct

SEQ ID NO: 2042274 - DNA, 25 bp, Homo sapien
cccatggggaacactagagccatta

SEQ ID NO: 2042275 - DNA, 25 bp, Homo sapien
cttccacgaagtgggctggtcctaa

SEQ ID NO: 2042276 - DNA, 25 bp, Homo sapien
gttgtccttcggactgagctgctgc

SEQ ID NO: 2042277 - DNA, 25 bp, Homo sapien
tgggtgcccactgcctcacgttgtc

SEQ ID NO: 2042278 - DNA, 25 bp, Homo sapien
ggctggtcctaactctcgggccaga

SEQ ID NO: 2042279 - DNA, 25 bp, Homo sapien
actctgcttaccaggctcaggagag

SEQ ID NO: 2042280 - DNA, 25 bp, Homo sapien
ttgttgagtgggtgggggtggatgc

SEQ ID NO: 2042281 - DNA, 25 bp, Homo sapien
gttgagtgggtgggggtggatgcat

SEQ ID NO: 2042282 - DNA, 25 bp, Homo sapien
tcacattgttgagtgggtgggggtg

SEQ ID NO: 2042283 - DNA, 25 bp, Homo sapien
gtcacattgttgagtgggtgggggt

SEQ ID NO: 2042284 - DNA, 25 bp, Homo sapien
tcgaacccgcatctgcaccgtgcgt

SEQ ID NO: 2042285 - DNA, 25 bp, Homo sapien
cagagcccatgtctgtaggctccgc

SEQ ID NO: 2042286 - DNA, 25 bp, Homo sapien
tgcaccgtgcgtgccttggccaggc

SEQ ID NO: 2042287 - DNA, 25 bp, Homo sapien
agcctggcagggtgctgctgtagga

SEQ ID NO: 2042288 - DNA, 25 bp, Homo sapien
tgcagagagcaactcaggccatcct

SEQ ID NO: 2042289 - DNA, 25 bp, Homo sapien
tgtgctggcgtcagtcccagcttcc

SEQ ID NO: 2042290 - DNA, 25 bp, Homo sapien
tcaggccatccttcgtctgtgctgg

SEQ ID NO: 2042291 - DNA, 25 bp, Homo sapien
catccttcgtctgtgctggcgtcag

SEQ ID NO: 2042292 - DNA, 25 bp, Homo sapien
aataaatgccctcccagatatgcgc

SEQ ID NO: 2042293 - DNA, 25 bp, Homo sapien
tgtaagtcgcgagtaaagtaccctg

SEQ ID NO: 2042294 - DNA, 25 bp, Homo sapien
gtgagttagagacgccatccagagc

SEQ ID NO: 2042295 - DNA, 25 bp, Homo sapien
tagttagactcattaaggcccagca

SEQ ID NO: 2042296 - DNA, 25 bp, Homo sapien
aggctccctccctgcttgcgcagcc

SEQ ID NO: 2042297 - DNA, 25 bp, Homo sapien
ctgcacgttccccaaggcccctgca

SEQ ID NO: 2042298 - DNA, 25 bp, Homo sapien
caggctccctccctgcttgcgcagc

SEQ ID NO: 2042299 - DNA, 25 bp, Homo sapien
cacgttccccaaggcccctgcaggc

SEQ ID NO: 2042300 - DNA, 25 bp, Homo sapien
tccttgggacccctgatgagcacag

SEQ ID NO: 2042301 - DNA, 25 bp, Homo sapien
caggctctcagtctgcgggccagat

SEQ ID NO: 2042302 - DNA, 25 bp, Homo sapien
acatctgtgcattgggctgtgccca

SEQ ID NO: 2042303 - DNA, 25 bp, Homo sapien
tcttctgaccctgaaaacgctggca

SEQ ID NO: 2042304 - DNA, 25 bp, Homo sapien
tgatagaggccccagtattgaggag

SEQ ID NO: 2042305 - DNA, 25 bp, Homo sapien
ctgctgaccgtgtgatagaggcccc

SEQ ID NO: 2042306 - DNA, 25 bp, Homo sapien
ccgtgtgatagaggccccagtattg

SEQ ID NO: 2042307 - DNA, 25 bp, Homo sapien
cagtattgaggaggatttggacttc

SEQ ID NO: 2042308 - DNA, 25 bp, Homo sapien
tcatgctacaaatcgttgggccagg

SEQ ID NO: 2042309 - DNA, 25 bp, Homo sapien
gagcggagggaatgtcagtaccact

SEQ ID NO: 2042310 - DNA, 25 bp, Homo sapien
gcatgcaaagtggaagtgaacgcct

SEQ ID NO: 2042311 - DNA, 25 bp, Homo sapien
agatacagtgcggaggagccaagct

SEQ ID NO: 2042312 - DNA, 25 bp, Homo sapien
tgcttattgtaagaggagagccagt

SEQ ID NO: 2042313 - DNA, 25 bp, Homo sapien
aaatgtccaagcaagccttttgtca

SEQ ID NO: 2042314 - DNA, 25 bp, Homo sapien
cagcatctggaacgggcctttgaac

SEQ ID NO: 2042315 - DNA, 25 bp, Homo sapien
gaggagggcagttggcaagtggaac

SEQ ID NO: 2042316 - DNA, 25 bp, Homo sapien
gaaccctacttgtgtgccacagtgg

SEQ ID NO: 2042317 - DNA, 25 bp, Homo sapien
ccctacttgtgtgccacagtggagg

SEQ ID NO: 2042318 - DNA, 25 bp, Homo sapien
cttcactgagaaccctacttgtgtg

SEQ ID NO: 2042319 - DNA, 25 bp, Homo sapien
actgagaaccctacttgtgtgccac

SEQ ID NO: 2042320 - DNA, 25 bp, Homo sapien
ggcggcaggaagcatctttatcctt

SEQ ID NO: 2042321 - DNA, 25 bp, Homo sapien
ttatccttgtcatcatcggtgttta

SEQ ID NO: 2042322 - DNA, 25 bp, Homo sapien
aacacggaccctttcctgagctggc

SEQ ID NO: 2042323 - DNA, 25 bp, Homo sapien
tgtgaaaaggctagcacctgccatc

SEQ ID NO: 2042324 - DNA, 25 bp, Homo sapien
ttccttcactgagatggtccccaga

SEQ ID NO: 2042325 - DNA, 25 bp, Homo sapien
tccttcactgagatggtccccagag

SEQ ID NO: 2042326 - DNA, 25 bp, Homo sapien
cttccttcactgagatggtccccag

SEQ ID NO: 2042327 - DNA, 25 bp, Homo sapien
cagagctgctcacaagtctcaccat

SEQ ID NO: 2042328 - DNA, 25 bp, Homo sapien
cactaagtggcggaagcggggagag

SEQ ID NO: 2042329 - DNA, 25 bp, Homo sapien
ggcactgagaatactggtgtccagt

SEQ ID NO: 2042330 - DNA, 25 bp, Homo sapien
aagcggggagagaagctggcatgca

SEQ ID NO: 2042331 - DNA, 25 bp, Homo sapien
actgagaatactggtgtccagttcc

SEQ ID NO: 2042332 - DNA, 25 bp, Homo sapien
gacctacatgagactgagcaattcg

SEQ ID NO: 2042333 - DNA, 25 bp, Homo sapien
gagcaattcgtctcttctcacgctg

SEQ ID NO: 2042334 - DNA, 25 bp, Homo sapien
cacgctgctgattcgtctgttctca

SEQ ID NO: 2042335 - DNA, 25 bp, Homo sapien
cagaaccttcccttggcggttgtat

SEQ ID NO: 2042336 - DNA, 25 bp, Homo sapien
ggctgcaatccccaccttaagctgg

SEQ ID NO: 2042337 - DNA, 25 bp, Homo sapien
tgatgctgtcacaagccatggagcc

SEQ ID NO: 2042338 - DNA, 25 bp, Homo sapien
ccttcaaatggagcatgggcctgct

SEQ ID NO: 2042339 - DNA, 25 bp, Homo sapien
taggtgatggagcaaaagccccagt

SEQ ID NO: 2042340 - DNA, 25 bp, Homo sapien
aaagcattgtgagaggaggaaggaa

SEQ ID NO: 2042341 - DNA, 25 bp, Homo sapien
ttaataaagcattgtgagaggagga

SEQ ID NO: 2042342 - DNA, 25 bp, Homo sapien
gcattgtgagaggaggaaggaacgg

SEQ ID NO: 2042343 - DNA, 25 bp, Homo sapien
taataaagcattgtgagaggaggaa

SEQ ID NO: 2042344 - DNA, 25 bp, Homo sapien
agaggaaatacttgaggaccgtggc

SEQ ID NO: 2042345 - DNA, 25 bp, Homo sapien
caaaagaggaaatacttgaggaccg

SEQ ID NO: 2042346 - DNA, 25 bp, Homo sapien
aaagaggaaatacttgaggaccgtg

SEQ ID NO: 2042347 - DNA, 25 bp, Homo sapien
aggaaatacttgaggaccgtggctg

SEQ ID NO: 2042348 - DNA, 25 bp, Homo sapien
cagatttggtgaaaagtggcccgtg

SEQ ID NO: 2042349 - DNA, 25 bp, Homo sapien
aaagtggcccgtggtgctctgtcac

SEQ ID NO: 2042350 - DNA, 25 bp, Homo sapien
tgaaaagtggcccgtggtgctctgt

SEQ ID NO: 2042351 - DNA, 25 bp, Homo sapien
aacagatttggtgaaaagtggcccg

SEQ ID NO: 2042352 - DNA, 25 bp, Homo sapien
catcttgtgagctaattgtggctgt

SEQ ID NO: 2042353 - DNA, 25 bp, Homo sapien
gatccctcataccagaagcactttc

SEQ ID NO: 2042354 - DNA, 25 bp, Homo sapien
gtctgaagctgcaagatccctcata

SEQ ID NO: 2042355 - DNA, 25 bp, Homo sapien
actcagcatcttgtgagctaattgt

SEQ ID NO: 2042356 - DNA, 25 bp, Homo sapien
atgtgttcttggaagctccattggc

SEQ ID NO: 2042357 - DNA, 25 bp, Homo sapien
gttcttggaagctccattggcaaac

SEQ ID NO: 2042358 - DNA, 25 bp, Homo sapien
acacgtatgatgtgttcttggaagc

SEQ ID NO: 2042359 - DNA, 25 bp, Homo sapien
tcaggaaacacgtatgatgtgttct

SEQ ID NO: 2042360 - DNA, 25 bp, Homo sapien
cgtctgcagagcctctgtgcgggtc

SEQ ID NO: 2042361 - DNA, 25 bp, Homo sapien
gggaaggaggtgtgatactccctcc

SEQ ID NO: 2042362 - DNA, 25 bp, Homo sapien
gaaggaggtgtgatactccctcctc

SEQ ID NO: 2042363 - DNA, 25 bp, Homo sapien
aaggaggtgtgatactccctcctcc

SEQ ID NO: 2042364 - DNA, 25 bp, Homo sapien
ggaaggaggtgtgatactccctcct

SEQ ID NO: 2042365 - DNA, 25 bp, Homo sapien
cacatgttaatattgggatgaggag

SEQ ID NO: 2042366 - DNA, 25 bp, Homo sapien
tgtactcattagtgacccttgctgg

SEQ ID NO: 2042367 - DNA, 25 bp, Homo sapien
cccttgctggtgtctcacatgttaa

SEQ ID NO: 2042368 - DNA, 25 bp, Homo sapien
tccctcttgcatgtgcagcccacag

SEQ ID NO: 2042369 - DNA, 25 bp, Homo sapien
ttgcattttgcaaggagagcagaat

SEQ ID NO: 2042370 - DNA, 25 bp, Homo sapien
agcaagaacattatggggcccacca

SEQ ID NO: 2042371 - DNA, 25 bp, Homo sapien
tttagcaagaacattatggggccca

SEQ ID NO: 2042372 - DNA, 25 bp, Homo sapien
tagcaagaacattatggggcccacc

SEQ ID NO: 2042373 - DNA, 25 bp, Homo sapien
caagaacattatggggcccaccata

SEQ ID NO: 2042374 - DNA, 25 bp, Homo sapien
ccaccggtatcgaagtcaggacagt

SEQ ID NO: 2042375 - DNA, 25 bp, Homo sapien
tgcatccggtgtctgtcatcaggct

SEQ ID NO: 2042376 - DNA, 25 bp, Homo sapien
ctgagggtccgtccttgcaaagcct

SEQ ID NO: 2042377 - DNA, 25 bp, Homo sapien
tgaacaccgtgttccttcctccttg

SEQ ID NO: 2042378 - DNA, 25 bp, Homo sapien
gacatccttgtggatatgcgtggcc

SEQ ID NO: 2042379 - DNA, 25 bp, Homo sapien
tgcgtggccctccactcttcaacat

SEQ ID NO: 2042380 - DNA, 25 bp, Homo sapien
tccttgtggatatgcgtggccctcc

SEQ ID NO: 2042381 - DNA, 25 bp, Homo sapien
actggacatccttgtggatatgcgt

SEQ ID NO: 2042382 - DNA, 25 bp, Homo sapien
tcctgcttcgcagctgaggcacagt

SEQ ID NO: 2042383 - DNA, 25 bp, Homo sapien
tctttttgtgactgggacgtaagtc

SEQ ID NO: 2042384 - DNA, 25 bp, Homo sapien
aggccttcctgcttcgcagctgagg

SEQ ID NO: 2042385 - DNA, 25 bp, Homo sapien
ggacgtaagtcatagaatttcaggg

SEQ ID NO: 2042386 - DNA, 25 bp, Homo sapien
gagtcagcaacaccggaatttggga

SEQ ID NO: 2042387 - DNA, 25 bp, Homo sapien
cacctggcagagtcagcaacaccgg

SEQ ID NO: 2042388 - DNA, 25 bp, Homo sapien
cagcaacaccggaatttgggacccg

SEQ ID NO: 2042389 - DNA, 25 bp, Homo sapien
ggcagagtcagcaacaccggaattt

SEQ ID NO: 2042390 - DNA, 25 bp, Homo sapien
tgcatgccaccaggtttagaccaag

SEQ ID NO: 2042391 - DNA, 25 bp, Homo sapien
tcacagtgatctctagagctgctgc

SEQ ID NO: 2042392 - DNA, 25 bp, Homo sapien
gagtatctaacagccaccgcagtct

SEQ ID NO: 2042393 - DNA, 25 bp, Homo sapien
aagctgataagggatcggcctcaca

SEQ ID NO: 2042394 - DNA, 25 bp, Homo sapien
tgctcccaaggcaaataccagacat

SEQ ID NO: 2042395 - DNA, 25 bp, Homo sapien
ccagacatctctgggtggagtctta

SEQ ID NO: 2042396 - DNA, 25 bp, Homo sapien
gctggttcaccctgcagacttggat

SEQ ID NO: 2042397 - DNA, 25 bp, Homo sapien
tgtagctttcagaaggctttggagc

SEQ ID NO: 2042398 - DNA, 25 bp, Homo sapien
gtggagctggtgaaattctcctggt

SEQ ID NO: 2042399 - DNA, 25 bp, Homo sapien
tgtctgtatggtgttgatgcactgg

SEQ ID NO: 2042400 - DNA, 25 bp, Homo sapien
tgtggagctggtgaaattctcctgg

SEQ ID NO: 2042401 - DNA, 25 bp, Homo sapien
gtctgtatggtgttgatgcactggc

SEQ ID NO: 2042402 - DNA, 25 bp, Homo sapien
aagtgctgttgacgctgccatctgg

SEQ ID NO: 2042403 - DNA, 25 bp, Homo sapien
gaagttctgatctccccaggtgtta

SEQ ID NO: 2042404 - DNA, 25 bp, Homo sapien
tgatctccccaggtgttacttccac

SEQ ID NO: 2042405 - DNA, 25 bp, Homo sapien
tggaagtgctgttgacgctgccatc

SEQ ID NO: 2042406 - DNA, 25 bp, Homo sapien
tggtttggcttggtgaccctcagct

SEQ ID NO: 2042407 - DNA, 25 bp, Homo sapien
tgccttttatccacattagtcacgg

SEQ ID NO: 2042408 - DNA, 25 bp, Homo sapien
tgtaaacactcttctcagatgaagc

SEQ ID NO: 2042409 - DNA, 25 bp, Homo sapien
gtaacatcaaaccttcccatagctg

SEQ ID NO: 2042410 - DNA, 25 bp, Homo sapien
ctggaggcaccttctgcttgatgtc

SEQ ID NO: 2042411 - DNA, 25 bp, Homo sapien
tgtccatcaactgtggaccctgttc

SEQ ID NO: 2042412 - DNA, 25 bp, Homo sapien
tccatcaactgtggaccctgttcca

SEQ ID NO: 2042413 - DNA, 25 bp, Homo sapien
ccatcaactgtggaccctgttccat

SEQ ID NO: 2042414 - DNA, 25 bp, Homo sapien
gaagccttttgagaatcgccctggg

SEQ ID NO: 2042415 - DNA, 25 bp, Homo sapien
gctgcagcagtagggcagacggtct

SEQ ID NO: 2042416 - DNA, 25 bp, Homo sapien
cagacggtcttgtgggtgtgaacag

SEQ ID NO: 2042417 - DNA, 25 bp, Homo sapien
ccatccttaattgctttaagaagcc

SEQ ID NO: 2042418 - DNA, 25 bp, Homo sapien
actccagagatgttttgagggtggc

SEQ ID NO: 2042419 - DNA, 25 bp, Homo sapien
ctgaacgggactccagagatgtttt

SEQ ID NO: 2042420 - DNA, 25 bp, Homo sapien
ccagagatgttttgagggtggcact

SEQ ID NO: 2042421 - DNA, 25 bp, Homo sapien
tgttttgagggtggcactaccatgg

SEQ ID NO: 2042422 - DNA, 25 bp, Homo sapien
cacacagcaagtatgctgtgggtct

SEQ ID NO: 2042423 - DNA, 25 bp, Homo sapien
cccaaacatggctgcagtttagaat

SEQ ID NO: 2042424 - DNA, 25 bp, Homo sapien
gaagacctggtcattcccaaacatg

SEQ ID NO: 2042425 - DNA, 25 bp, Homo sapien
cctttgactaacaggcactggatgt

SEQ ID NO: 2042426 - DNA, 25 bp, Homo sapien
tcatcggtgtgactgtgttgtctca

SEQ ID NO: 2042427 - DNA, 25 bp, Homo sapien
caatcaactggtgcagtgagtttga

SEQ ID NO: 2042428 - DNA, 25 bp, Homo sapien
acttgaagttggacggaggaagaca

SEQ ID NO: 2042429 - DNA, 25 bp, Homo sapien
tctcatggagtaagcatcctcatgg

SEQ ID NO: 2042430 - DNA, 25 bp, Homo sapien
cacactctgagagtgtcttctgcat

SEQ ID NO: 2042431 - DNA, 25 bp, Homo sapien
ttgcacgctgtgtgaagttttttgc

SEQ ID NO: 2042432 - DNA, 25 bp, Homo sapien
tcgtgctgcacaggcgtctccaaat

SEQ ID NO: 2042433 - DNA, 25 bp, Homo sapien
caaatcgtgctgcacaggcgtctcc

SEQ ID NO: 2042434 - DNA, 25 bp, Homo sapien
ggcccagggagattaagacataatt

SEQ ID NO: 2042435 - DNA, 25 bp, Homo sapien
tggcccagggagattaagacataat

SEQ ID NO: 2042436 - DNA, 25 bp, Homo sapien
ctgggagactttatggactatgacc

SEQ ID NO: 2042437 - DNA, 25 bp, Homo sapien
ccccagtggccttgtggcaaacaca

SEQ ID NO: 2042438 - DNA, 25 bp, Homo sapien
ccacggaaggaccagtattgcctcc

SEQ ID NO: 2042439 - DNA, 25 bp, Homo sapien
tgatcttcccttcctacatggtgag

SEQ ID NO: 2042440 - DNA, 25 bp, Homo sapien
agttcaagtccagctccgtttggag

SEQ ID NO: 2042441 - DNA, 25 bp, Homo sapien
ccgtttggagttccttggtggctgc

SEQ ID NO: 2042442 - DNA, 25 bp, Homo sapien
tccctggtagcgctgagttcaagtc

SEQ ID NO: 2042443 - DNA, 25 bp, Homo sapien
tgcatgctgagcaaacatttggccc

SEQ ID NO: 2042444 - DNA, 25 bp, Homo sapien
cttctgtaagaaatccctcttgcac

SEQ ID NO: 2042445 - DNA, 25 bp, Homo sapien
aaatccctcttgcactgtgttcaca

SEQ ID NO: 2042446 - DNA, 25 bp, Homo sapien
ctgaatggatttctggattcttttc

SEQ ID NO: 2042447 - DNA, 25 bp, Homo sapien
cctcttgcactgtgttcacatcaaa

SEQ ID NO: 2042448 - DNA, 25 bp, Homo sapien
actattagaattccaacaccataca

SEQ ID NO: 2042449 - DNA, 25 bp, Homo sapien
taaaactaacacaggcctcggtggc

SEQ ID NO: 2042450 - DNA, 25 bp, Homo sapien
tctcataaaactaacacaggcctcg

SEQ ID NO: 2042451 - DNA, 25 bp, Homo sapien
caattcacctctttaaagcctcttt

SEQ ID NO: 2042452 - DNA, 25 bp, Homo sapien
tgtagtcagccaaaaaagacccagc

SEQ ID NO: 2042453 - DNA, 25 bp, Homo sapien
gaccagggtattcagaaaggactcc

SEQ ID NO: 2042454 - DNA, 25 bp, Homo sapien
tggcaagtatactctcgaggaggga

SEQ ID NO: 2042455 - DNA, 25 bp, Homo sapien
tgaagactccatagtaggccaggcg

SEQ ID NO: 2042456 - DNA, 25 bp, Homo sapien
cagcaactgtgtagcactgtgaaag

SEQ ID NO: 2042457 - DNA, 25 bp, Homo sapien
ccctctagttgggtgggcacgcaag

SEQ ID NO: 2042458 - DNA, 25 bp, Homo sapien
gccctgtttagatacacagcaactg

SEQ ID NO: 2042459 - DNA, 25 bp, Homo sapien
tggagacttcccgaggacttagatc

SEQ ID NO: 2042460 - DNA, 25 bp, Homo sapien
tccggctgaacaggcgagaactgat

SEQ ID NO: 2042461 - DNA, 25 bp, Homo sapien
gaactgattgcctttgaattcccgg

SEQ ID NO: 2042462 - DNA, 25 bp, Homo sapien
acttgcccgagcacgaagtcatgcc

SEQ ID NO: 2042463 - DNA, 25 bp, Homo sapien
tacagacggctggtccagagttcct

SEQ ID NO: 2042464 - DNA, 25 bp, Homo sapien
taagaattgctctctcggtaccaga

SEQ ID NO: 2042465 - DNA, 25 bp, Homo sapien
ctttacagagcagcccttagcctgg

SEQ ID NO: 2042466 - DNA, 25 bp, Homo sapien
tgagagatactgcatcagccctaga

SEQ ID NO: 2042467 - DNA, 25 bp, Homo sapien
tcagcattggaagtgcactttcccc

SEQ ID NO: 2042468 - DNA, 25 bp, Homo sapien
tctgagtgttggatgagtcagtcgc

SEQ ID NO: 2042469 - DNA, 25 bp, Homo sapien
ggagcgtggcgctctgtaacttcct

SEQ ID NO: 2042470 - DNA, 25 bp, Homo sapien
gtatttaaccctcgcactttctcca

SEQ ID NO: 2042471 - DNA, 25 bp, Homo sapien
ctgccaccccgccacgtgtatttaa

SEQ ID NO: 2042472 - DNA, 25 bp, Homo sapien
cacactgattctagtgaggtcacag

SEQ ID NO: 2042473 - DNA, 25 bp, Homo sapien
gatggaaccgaaccgagggtctgca

SEQ ID NO: 2042474 - DNA, 25 bp, Homo sapien
gtcacagattcggagcttcacacac

SEQ ID NO: 2042475 - DNA, 25 bp, Homo sapien
ttgccctgcattgctgatccccttg

SEQ ID NO: 2042476 - DNA, 25 bp, Homo sapien
agaatggtctagagagctccccact

SEQ ID NO: 2042477 - DNA, 25 bp, Homo sapien
gacgtccgatggatgacaggccgcc

SEQ ID NO: 2042478 - DNA, 25 bp, Homo sapien
gcaggtcctgtggtatctgagaatg

SEQ ID NO: 2042479 - DNA, 25 bp, Homo sapien
gtccgatggatgacaggccgccagc

SEQ ID NO: 2042480 - DNA, 25 bp, Homo sapien
tccttttgcacgtccatgacatgag

SEQ ID NO: 2042481 - DNA, 25 bp, Homo sapien
tgagcttttcggaggcaaaggaagt

SEQ ID NO: 2042482 - DNA, 25 bp, Homo sapien
cacgtccatgacatgagcttttcgg

SEQ ID NO: 2042483 - DNA, 25 bp, Homo sapien
gaggtctccttttgcacgtccatga

SEQ ID NO: 2042484 - DNA, 25 bp, Homo sapien
agacacgtcgcagccttgggcttcg

SEQ ID NO: 2042485 - DNA, 25 bp, Homo sapien
cacggaacattccagacacgtcgca

SEQ ID NO: 2042486 - DNA, 25 bp, Homo sapien
gggcttcggcgaggaggaagtctga

SEQ ID NO: 2042487 - DNA, 25 bp, Homo sapien
ctctgtgacacggaacattccagac

SEQ ID NO: 2042488 - DNA, 25 bp, Homo sapien
cacacaagccactctgtaccacgtg

SEQ ID NO: 2042489 - DNA, 25 bp, Homo sapien
ggcattttgttgttccgatcacaga

SEQ ID NO: 2042490 - DNA, 25 bp, Homo sapien
taccacgtgccctaccttagtgacg

SEQ ID NO: 2042491 - DNA, 25 bp, Homo sapien
ccttagtgacgggagtaaggagctt

SEQ ID NO: 2042492 - DNA, 25 bp, Homo sapien
gttggcacagttgggtaagcacagt

SEQ ID NO: 2042493 - DNA, 25 bp, Homo sapien
gaatcacatcaccaacaccaatgtc

SEQ ID NO: 2042494 - DNA, 25 bp, Homo sapien
cagcttccagtcatgcagctgcaaa

SEQ ID NO: 2042495 - DNA, 25 bp, Homo sapien
gggagtaaactgagtgtaaatctgg

SEQ ID NO: 2042496 - DNA, 25 bp, Homo sapien
ggccttctccctgcccttcccagcc

SEQ ID NO: 2042497 - DNA, 25 bp, Homo sapien
agggccttctccctgcccttcccag

SEQ ID NO: 2042498 - DNA, 25 bp, Homo sapien
ttagacagggccttctccctgccct

SEQ ID NO: 2042499 - DNA, 25 bp, Homo sapien
ccttctccctgcccttcccagccac

SEQ ID NO: 2042500 - DNA, 25 bp, Homo sapien
catcgtcttcttgggtctgagtggc

SEQ ID NO: 2042501 - DNA, 25 bp, Homo sapien
taacgcagccagtgttcacgtccac

SEQ ID NO: 2042502 - DNA, 25 bp, Homo sapien
aagtaagtaaaagatcacaatcagg

SEQ ID NO: 2042503 - DNA, 25 bp, Homo sapien
gaagggatctggagctacgaaatcc

SEQ ID NO: 2042504 - DNA, 25 bp, Homo sapien
tctcgtggtgcatgtgtagattttc

SEQ ID NO: 2042505 - DNA, 25 bp, Homo sapien
gtctcgtggtgcatgtgtagatttt

SEQ ID NO: 2042506 - DNA, 25 bp, Homo sapien
ctcgtggtgcatgtgtagattttcc

SEQ ID NO: 2042507 - DNA, 25 bp, Homo sapien
gacgttctagggaccccgtgttgca

SEQ ID NO: 2042508 - DNA, 25 bp, Homo sapien
ccagtcaaggttcgagagtcacagc

SEQ ID NO: 2042509 - DNA, 25 bp, Homo sapien
taaacttgttaaatgcagacgctgg

SEQ ID NO: 2042510 - DNA, 25 bp, Homo sapien
gagtcacagccatccaagtgttgag

SEQ ID NO: 2042511 - DNA, 25 bp, Homo sapien
tatatgctggagtcctaactcccag

SEQ ID NO: 2042512 - DNA, 25 bp, Homo sapien
tctgttagctggatacatagcctct

SEQ ID NO: 2042513 - DNA, 25 bp, Homo sapien
gagtgctatgagtcccctaaaaata

SEQ ID NO: 2042514 - DNA, 25 bp, Homo sapien
cccaagatggatgctagaactctag

SEQ ID NO: 2042515 - DNA, 25 bp, Homo sapien
caattttgacttggctgtatcttca

SEQ ID NO: 2042516 - DNA, 25 bp, Homo sapien
agtagttgctacacacgtgaacacg

SEQ ID NO: 2042517 - DNA, 25 bp, Homo sapien
cgtgaacacgatacaacaattttga

SEQ ID NO: 2042518 - DNA, 25 bp, Homo sapien
tgccaggagagaacgcttccctaga

SEQ ID NO: 2042519 - DNA, 25 bp, Homo sapien
gtttgctttaagtctacaatcacaa

SEQ ID NO: 2042520 - DNA, 25 bp, Homo sapien
gtgtttgctttaagtctacaatcac

SEQ ID NO: 2042521 - DNA, 25 bp, Homo sapien
tgtttgctttaagtctacaatcaca

SEQ ID NO: 2042522 - DNA, 25 bp, Homo sapien
tgtgtttgctttaagtctacaatca

SEQ ID NO: 2042523 - DNA, 25 bp, Homo sapien
accagagagattttgcctcgaggac

SEQ ID NO: 2042524 - DNA, 25 bp, Homo sapien
aactcagtgcaatgggcctgcagcc

SEQ ID NO: 2042525 - DNA, 25 bp, Homo sapien
gattttgcctcgaggacaactcagt

SEQ ID NO: 2042526 - DNA, 25 bp, Homo sapien
tcgaggacaactcagtgcaatgggc

SEQ ID NO: 2042527 - DNA, 25 bp, Homo sapien
cccacttagaggagcccttttcatt

SEQ ID NO: 2042528 - DNA, 25 bp, Homo sapien
cttagaggagcccttttcattaaca

SEQ ID NO: 2042529 - DNA, 25 bp, Homo sapien
gggcatccaatctgtatctgatgaa

SEQ ID NO: 2042530 - DNA, 25 bp, Homo sapien
gaggagcccttttcattaacagctc

SEQ ID NO: 2042531 - DNA, 25 bp, Homo sapien
agggagccttgtgcaagccgcagaa

SEQ ID NO: 2042532 - DNA, 25 bp, Homo sapien
gcttggcctccccagtggtttgctg

SEQ ID NO: 2042533 - DNA, 25 bp, Homo sapien
ggagcacggaatgtctgccatctct

SEQ ID NO: 2042534 - DNA, 25 bp, Homo sapien
tggtttgctgttgggtccgaggatc

SEQ ID NO: 2042535 - DNA, 25 bp, Homo sapien
ggaccgtctgggatcttcctccgaa

SEQ ID NO: 2042536 - DNA, 25 bp, Homo sapien
gggtctgaacaagtcatggaccgtc

SEQ ID NO: 2042537 - DNA, 25 bp, Homo sapien
gctgtgggtcttgccctgcaatggg

SEQ ID NO: 2042538 - DNA, 25 bp, Homo sapien
tcttcctccgaagacagcgtctggg

SEQ ID NO: 2042539 - DNA, 25 bp, Homo sapien
tctatttcaagctcagtggtctgga

SEQ ID NO: 2042540 - DNA, 25 bp, Homo sapien
tctgggttaaagctacaagaactcc

SEQ ID NO: 2042541 - DNA, 25 bp, Homo sapien
tattttctgtaacactcccctgccg

SEQ ID NO: 2042542 - DNA, 25 bp, Homo sapien
tcccctgccggtattgaagagaaca

SEQ ID NO: 2042543 - DNA, 25 bp, Homo sapien
agtaagttgaacacggacacagaga

SEQ ID NO: 2042544 - DNA, 25 bp, Homo sapien
gaggactgggtttaaactgcatggc

SEQ ID NO: 2042545 - DNA, 25 bp, Homo sapien
gaggaacaacatacaccgggcctgt

SEQ ID NO: 2042546 - DNA, 25 bp, Homo sapien
aaaatgacacttggacagatgccac

SEQ ID NO: 2042547 - DNA, 25 bp, Homo sapien
ggcaacaacagccaccgactgagtt

SEQ ID NO: 2042548 - DNA, 25 bp, Homo sapien
tccatcaatgacgtggatattcaac

SEQ ID NO: 2042549 - DNA, 25 bp, Homo sapien
gcgtatttcccggacgccatgggca

SEQ ID NO: 2042550 - DNA, 25 bp, Homo sapien
gatattcaacactacagggcctggc

SEQ ID NO: 2042551 - DNA, 25 bp, Homo sapien
catgggtcaccctgaatggcccaaa

SEQ ID NO: 2042552 - DNA, 25 bp, Homo sapien
ggtcaccctgaatggcccaaactct

SEQ ID NO: 2042553 - DNA, 25 bp, Homo sapien
tgggtcaccctgaatggcccaaact

SEQ ID NO: 2042554 - DNA, 25 bp, Homo sapien
tcatgggtcaccctgaatggcccaa

SEQ ID NO: 2042555 - DNA, 25 bp, Homo sapien
ttcttggtgggttcagaaacaagtg

SEQ ID NO: 2042556 - DNA, 25 bp, Homo sapien
tggtgggttcagaaacaagtgacca

SEQ ID NO: 2042557 - DNA, 25 bp, Homo sapien
gaacagaaatatttatagttagtca

SEQ ID NO: 2042558 - DNA, 25 bp, Homo sapien
ccttcttggtgggttcagaaacaag

SEQ ID NO: 2042559 - DNA, 25 bp, Homo sapien
ctctgagatatcagggaatgaaagg

SEQ ID NO: 2042560 - DNA, 25 bp, Homo sapien
tgaaatctctgagatatcagggaat

SEQ ID NO: 2042561 - DNA, 25 bp, Homo sapien
tgaccaggaatagggttttaataca

SEQ ID NO: 2042562 - DNA, 25 bp, Homo sapien
aatctctgagatatcagggaatgaa

SEQ ID NO: 2042563 - DNA, 25 bp, Homo sapien
ctctggggataagttagtaccagct

SEQ ID NO: 2042564 - DNA, 25 bp, Homo sapien
tgacaagtttataaggaccacgaga

SEQ ID NO: 2042565 - DNA, 25 bp, Homo sapien
ggcaagccagcatgacagcaaagaa

SEQ ID NO: 2042566 - DNA, 25 bp, Homo sapien
taaatgcgcactgttacgtctgtca

SEQ ID NO: 2042567 - DNA, 25 bp, Homo sapien
taaaatgctcgtacgcaggtggcgg

SEQ ID NO: 2042568 - DNA, 25 bp, Homo sapien
accactgtgcttcagcctaggcgat

SEQ ID NO: 2042569 - DNA, 25 bp, Homo sapien
aaatagaaaaaatgagacgggtctg

SEQ ID NO: 2042570 - DNA, 25 bp, Homo sapien
cctaggcgatagagtgaggccttgt

SEQ ID NO: 2042571 - DNA, 25 bp, Homo sapien
ggtggtgcacatcagctactgtgga

SEQ ID NO: 2042572 - DNA, 25 bp, Homo sapien
gagccagcccatgaaatcctgtact

SEQ ID NO: 2042573 - DNA, 25 bp, Homo sapien
aatgggaagatgtaacagaccgctc

SEQ ID NO: 2042574 - DNA, 25 bp, Homo sapien
tccagaggtgtgaagctcagtcgag

SEQ ID NO: 2042575 - DNA, 25 bp, Homo sapien
tacagcacggttgagagaggttctc

SEQ ID NO: 2042576 - DNA, 25 bp, Homo sapien
agaaagggtgctccttgaagcacca

SEQ ID NO: 2042577 - DNA, 25 bp, Homo sapien
aagggtgctccttgaagcaccaggg

SEQ ID NO: 2042578 - DNA, 25 bp, Homo sapien
gcctcggcctcatcagccaccacca

SEQ ID NO: 2042579 - DNA, 25 bp, Homo sapien
ggcctcggcctcatcagccaccacc

SEQ ID NO: 2042580 - DNA, 25 bp, Homo sapien
tcacttgggtgagggtgatggcact

SEQ ID NO: 2042581 - DNA, 25 bp, Homo sapien
gggtgagggtgatggcactgcccac

SEQ ID NO: 2042582 - DNA, 25 bp, Homo sapien
acttgggtgagggtgatggcactgc

SEQ ID NO: 2042583 - DNA, 25 bp, Homo sapien
ttgggtgagggtgatggcactgccc

SEQ ID NO: 2042584 - DNA, 25 bp, Homo sapien
tcgtacacaggtgtacaagctgttc

SEQ ID NO: 2042585 - DNA, 25 bp, Homo sapien
gtgagtctttctcttgaccgtcttg

SEQ ID NO: 2042586 - DNA, 25 bp, Homo sapien
tcttccgctctgagaaaaccagcaa

SEQ ID NO: 2042587 - DNA, 25 bp, Homo sapien
ctctccaagcgcaccgagcaggagg

SEQ ID NO: 2042588 - DNA, 25 bp, Homo sapien
tggcgcccacatacgcagggcaagg

SEQ ID NO: 2042589 - DNA, 25 bp, Homo sapien
gcttcccctcatcctgcaactgaga

SEQ ID NO: 2042590 - DNA, 25 bp, Homo sapien
tcatcctgcaactgagactcatcac

SEQ ID NO: 2042591 - DNA, 25 bp, Homo sapien
tgagactcatcaccagcccgaactg

SEQ ID NO: 2042592 - DNA, 25 bp, Homo sapien
aagggaggcgttctttttgcacgca

SEQ ID NO: 2042593 - DNA, 25 bp, Homo sapien
tagcccttcaagagcatgtatgcca

SEQ ID NO: 2042594 - DNA, 25 bp, Homo sapien
cctatttgggaacgaggccgctttg

SEQ ID NO: 2042595 - DNA, 25 bp, Homo sapien
agagtcaccacgaccggatgcaagg

SEQ ID NO: 2042596 - DNA, 25 bp, Homo sapien
ctgcaaatgtaaccaggggctcgga

SEQ ID NO: 2042597 - DNA, 25 bp, Homo sapien
caaatgtaaccaggggctcggacat

SEQ ID NO: 2042598 - DNA, 25 bp, Homo sapien
tgcaaatgtaaccaggggctcggac

SEQ ID NO: 2042599 - DNA, 25 bp, Homo sapien
gcaaatgtaaccaggggctcggaca

SEQ ID NO: 2042600 - DNA, 25 bp, Homo sapien
tctttccttgtgcttaaactattcc

SEQ ID NO: 2042601 - DNA, 25 bp, Homo sapien
caaagaagttgcattttggttattc

SEQ ID NO: 2042602 - DNA, 25 bp, Homo sapien
agttgcattttggttattcttttct

SEQ ID NO: 2042603 - DNA, 25 bp, Homo sapien
ttccaaagagaagggtgactctccc

SEQ ID NO: 2042604 - DNA, 25 bp, Homo sapien
cgttcagttcaatacctgggtttct

SEQ ID NO: 2042605 - DNA, 25 bp, Homo sapien
agagacagcctcttacagacgcctg

SEQ ID NO: 2042606 - DNA, 25 bp, Homo sapien
tattccgactcagcatttcctcaca

SEQ ID NO: 2042607 - DNA, 25 bp, Homo sapien
cactggagagctgtcttactcttag

SEQ ID NO: 2042608 - DNA, 25 bp, Homo sapien
cactggtcaggatcgcatcaaacag

SEQ ID NO: 2042609 - DNA, 25 bp, Homo sapien
tggtcaggatcgcatcaaacagcaa

SEQ ID NO: 2042610 - DNA, 25 bp, Homo sapien
ttgcactggtcaggatcgcatcaaa

SEQ ID NO: 2042611 - DNA, 25 bp, Homo sapien
ggatcgcatcaaacagcaatattga

SEQ ID NO: 2042612 - DNA, 25 bp, Homo sapien
aatgtctacaaagaaggttccaatt

SEQ ID NO: 2042613 - DNA, 25 bp, Homo sapien
tgtccctaaggtgcaccctgacagc

SEQ ID NO: 2042614 - DNA, 25 bp, Homo sapien
tctggggacgcctggcattcagctc

SEQ ID NO: 2042615 - DNA, 25 bp, Homo sapien
tgacaacctacttcccttacgttca

SEQ ID NO: 2042616 - DNA, 25 bp, Homo sapien
tcagctctccggatggttgggctgc

SEQ ID NO: 2042617 - DNA, 25 bp, Homo sapien
caggtgtgccgttttccataattag

SEQ ID NO: 2042618 - DNA, 25 bp, Homo sapien
cagagccccggaacagcggtgttca

SEQ ID NO: 2042619 - DNA, 25 bp, Homo sapien
cataattagtcacagcccctgaagg

SEQ ID NO: 2042620 - DNA, 25 bp, Homo sapien
gcggtgttcactcagttaaacctca

SEQ ID NO: 2042621 - DNA, 25 bp, Homo sapien
caatccaattaactgcttgtagcat

SEQ ID NO: 2042622 - DNA, 25 bp, Homo sapien
gatacaatagtcagcactgtcagag

SEQ ID NO: 2042623 - DNA, 25 bp, Homo sapien
gggtgaaaggtcagattgctgcata

SEQ ID NO: 2042624 - DNA, 25 bp, Homo sapien
acaacgtttgtgcactatctttgga

SEQ ID NO: 2042625 - DNA, 25 bp, Homo sapien
catacggtagcaactctgaaatctg

SEQ ID NO: 2042626 - DNA, 25 bp, Homo sapien
tcttctgccacgtcaaatctgttga

SEQ ID NO: 2042627 - DNA, 25 bp, Homo sapien
ggctaaatcctacttctgaggacag

SEQ ID NO: 2042628 - DNA, 25 bp, Homo sapien
gagtccctctagagcactttcagtt

SEQ ID NO: 2042629 - DNA, 25 bp, Homo sapien
ccctcttggaagtggtggtaagcct

SEQ ID NO: 2042630 - DNA, 25 bp, Homo sapien
gataggcaagaacaccacagattcg

SEQ ID NO: 2042631 - DNA, 25 bp, Homo sapien
tctgctggccaggaatacgtgagcc

SEQ ID NO: 2042632 - DNA, 25 bp, Homo sapien
tgttcatgcaccaccgagttggcct

SEQ ID NO: 2042633 - DNA, 25 bp, Homo sapien
gtactgaacatgagaaagaatccca

SEQ ID NO: 2042634 - DNA, 25 bp, Homo sapien
cactgtactgaacatgagaaagaat

SEQ ID NO: 2042635 - DNA, 25 bp, Homo sapien
gccagaaggttttttagcttcactg

SEQ ID NO: 2042636 - DNA, 25 bp, Homo sapien
aggttttttagcttcactgtactga

SEQ ID NO: 2042637 - DNA, 25 bp, Homo sapien
tcactagcagtgaccctgaacttca

SEQ ID NO: 2042638 - DNA, 25 bp, Homo sapien
gcatacaaatgagtgagcttacgat

SEQ ID NO: 2042639 - DNA, 25 bp, Homo sapien
gacataatgactgcttccttgcctg

SEQ ID NO: 2042640 - DNA, 25 bp, Homo sapien
ggccctgagcatctaagggtgctaa

SEQ ID NO: 2042641 - DNA, 25 bp, Homo sapien
tagaagtacaggaatgggaagtcca

SEQ ID NO: 2042642 - DNA, 25 bp, Homo sapien
ctgtagaagtacaggaatgggaagt

SEQ ID NO: 2042643 - DNA, 25 bp, Homo sapien
acaggaatgggaagtccaggacgct

SEQ ID NO: 2042644 - DNA, 25 bp, Homo sapien
aagtacaggaatgggaagtccagga

SEQ ID NO: 2042645 - DNA, 25 bp, Homo sapien
gagagtctgtccacgtccatggaga

SEQ ID NO: 2042646 - DNA, 25 bp, Homo sapien
catagaagtgataggcaagggtgcc

SEQ ID NO: 2042647 - DNA, 25 bp, Homo sapien
gaattcgttccgtctctttggcagc

SEQ ID NO: 2042648 - DNA, 25 bp, Homo sapien
ggaccccagacctagagagtggcca

SEQ ID NO: 2042649 - DNA, 25 bp, Homo sapien
ctccagcagggtgaacgggactcat

SEQ ID NO: 2042650 - DNA, 25 bp, Homo sapien
tgctccagcagggtgaacgggactc

SEQ ID NO: 2042651 - DNA, 25 bp, Homo sapien
aaatgctccagcagggtgaacggga

SEQ ID NO: 2042652 - DNA, 25 bp, Homo sapien
ctctcagcacccagtctttcatcag

SEQ ID NO: 2042653 - DNA, 25 bp, Homo sapien
agtgtcccaggactctctctgatga

SEQ ID NO: 2042654 - DNA, 25 bp, Homo sapien
gcaggaaacttcaacaaatcgaagt

SEQ ID NO: 2042655 - DNA, 25 bp, Homo sapien
cgaagttgcagagaagagtccttca

SEQ ID NO: 2042656 - DNA, 25 bp, Homo sapien
gatgaatccaacaggctccacaatg

SEQ ID NO: 2042657 - DNA, 25 bp, Homo sapien
tgtgggatgagatgcaaatgccagg

SEQ ID NO: 2042658 - DNA, 25 bp, Homo sapien
ctgtgggatgagatgcaaatgccag

SEQ ID NO: 2042659 - DNA, 25 bp, Homo sapien
tatatagtttaagtattgctggtca

SEQ ID NO: 2042660 - DNA, 25 bp, Homo sapien
atatatagtttaagtattgctggtc

SEQ ID NO: 2042661 - DNA, 25 bp, Homo sapien
atagtttaagtattgctggtcaatg

SEQ ID NO: 2042662 - DNA, 25 bp, Homo sapien
gtttaagtattgctggtcaatgtca

SEQ ID NO: 2042663 - DNA, 25 bp, Homo sapien
ttctctcaggagtcattcccttcag

SEQ ID NO: 2042664 - DNA, 25 bp, Homo sapien
ctctcaggagtcattcccttcagac

SEQ ID NO: 2042665 - DNA, 25 bp, Homo sapien
tctctcaggagtcattcccttcaga

SEQ ID NO: 2042666 - DNA, 25 bp, Homo sapien
cttctctcaggagtcattcccttca

SEQ ID NO: 2042667 - DNA, 25 bp, Homo sapien
tcaccaaagctgctccattgactgg

SEQ ID NO: 2042668 - DNA, 25 bp, Homo sapien
ttgactggctgcaacaaaggcctca

SEQ ID NO: 2042669 - DNA, 25 bp, Homo sapien
ttcagcaggccccaaaacctggagg

SEQ ID NO: 2042670 - DNA, 25 bp, Homo sapien
cttttctctttaggccttcagcagg

SEQ ID NO: 2042671 - DNA, 25 bp, Homo sapien
ctgggtttctgggacttctgtagaa

SEQ ID NO: 2042672 - DNA, 25 bp, Homo sapien
cactgggtttctgggacttctgtag

SEQ ID NO: 2042673 - DNA, 25 bp, Homo sapien
tttctgggacttctgtagaatttta

SEQ ID NO: 2042674 - DNA, 25 bp, Homo sapien
gacttctgtagaattttataagccc

SEQ ID NO: 2042675 - DNA, 25 bp, Homo sapien
taagtgaattatagcccaaaaatat

SEQ ID NO: 2042676 - DNA, 25 bp, Homo sapien
gaattatagcccaaaaatatccatc

SEQ ID NO: 2042677 - DNA, 25 bp, Homo sapien
tatagcccaaaaatatccatctgga

SEQ ID NO: 2042678 - DNA, 25 bp, Homo sapien
gagtaagtgaattatagcccaaaaa

SEQ ID NO: 2042679 - DNA, 25 bp, Homo sapien
ggagtcattgaagggaaggcatcct

SEQ ID NO: 2042680 - DNA, 25 bp, Homo sapien
tgattacatcaggtatcatgagctt

SEQ ID NO: 2042681 - DNA, 25 bp, Homo sapien
gagctttaccgcctctctttgacac

SEQ ID NO: 2042682 - DNA, 25 bp, Homo sapien
tctttgacacctgctagtctccttt

SEQ ID NO: 2042683 - DNA, 25 bp, Homo sapien
taaacaggaggatagtcttgaagtt

SEQ ID NO: 2042684 - DNA, 25 bp, Homo sapien
ctacagatctttgcaggagatgttt

SEQ ID NO: 2042685 - DNA, 25 bp, Homo sapien
tacagatctttgcaggagatgtttt

SEQ ID NO: 2042686 - DNA, 25 bp, Homo sapien
cacatcattgattgtaagagccttc

SEQ ID NO: 2042687 - DNA, 25 bp, Homo sapien
agagctaagccactctcagggaagt

SEQ ID NO: 2042688 - DNA, 25 bp, Homo sapien
gaatctcagtgaccatttagtgact

SEQ ID NO: 2042689 - DNA, 25 bp, Homo sapien
gctctgaggagaaccaccacgtggt

SEQ ID NO: 2042690 - DNA, 25 bp, Homo sapien
ggaggcacagacttggtaataggct

SEQ ID NO: 2042691 - DNA, 25 bp, Homo sapien
cctccagggtttctgacttcggtga

SEQ ID NO: 2042692 - DNA, 25 bp, Homo sapien
atgaggactgaactagggcggcagc

SEQ ID NO: 2042693 - DNA, 25 bp, Homo sapien
gattggggctaccaagtgagaagca

SEQ ID NO: 2042694 - DNA, 25 bp, Homo sapien
taacttcagctacattatgcaaagt

SEQ ID NO: 2042695 - DNA, 25 bp, Homo sapien
gatgataacttcagctacattatgc

SEQ ID NO: 2042696 - DNA, 25 bp, Homo sapien
tgaaaacacttctggtacccacaga

SEQ ID NO: 2042697 - DNA, 25 bp, Homo sapien
acagatgataacttcagctacatta

SEQ ID NO: 2042698 - DNA, 25 bp, Homo sapien
agggtataaactgaggcggtaagag

SEQ ID NO: 2042699 - DNA, 25 bp, Homo sapien
ctatggcgtaggagaggaaacactc

SEQ ID NO: 2042700 - DNA, 25 bp, Homo sapien
gggtataaactgaggcggtaagagc

SEQ ID NO: 2042701 - DNA, 25 bp, Homo sapien
cagtctggacaatgctctggaccca

SEQ ID NO: 2042702 - DNA, 25 bp, Homo sapien
gacccagcatagattatacccacaa

SEQ ID NO: 2042703 - DNA, 25 bp, Homo sapien
tctggacccagcatagattataccc

SEQ ID NO: 2042704 - DNA, 25 bp, Homo sapien
cagcatagattatacccacaaacag

SEQ ID NO: 2042705 - DNA, 25 bp, Homo sapien
aggaagccacacaagaacatgagat

SEQ ID NO: 2042706 - DNA, 25 bp, Homo sapien
gcaggaagccacacaagaacatgag

SEQ ID NO: 2042707 - DNA, 25 bp, Homo sapien
ctgaagcaggaagccacacaagaac

SEQ ID NO: 2042708 - DNA, 25 bp, Homo sapien
aagcaggaagccacacaagaacatg

SEQ ID NO: 2042709 - DNA, 25 bp, Homo sapien
tcttgtgggaagtgattatgccata

SEQ ID NO: 2042710 - DNA, 25 bp, Homo sapien
ttggtgtcttgtgggaagtgattat

SEQ ID NO: 2042711 - DNA, 25 bp, Homo sapien
agtgattatgccataagggcagagc

SEQ ID NO: 2042712 - DNA, 25 bp, Homo sapien
ggaagtgattatgccataagggcag

SEQ ID NO: 2042713 - DNA, 25 bp, Homo sapien
tagatgtgtcgctgagtgagcctca

SEQ ID NO: 2042714 - DNA, 25 bp, Homo sapien
tccagcaccaccttatctacctcac

SEQ ID NO: 2042715 - DNA, 25 bp, Homo sapien
gaggaccaaggctagatgtgtcgct

SEQ ID NO: 2042716 - DNA, 25 bp, Homo sapien
cctccactgtaagggcagttgcctc

SEQ ID NO: 2042717 - DNA, 25 bp, Homo sapien
gggcgacagagggaggctccgcctc

SEQ ID NO: 2042718 - DNA, 25 bp, Homo sapien
ccaagaccatcccactgcacttcag

SEQ ID NO: 2042719 - DNA, 25 bp, Homo sapien
gcgacagagggaggctccgcctcaa

SEQ ID NO: 2042720 - DNA, 25 bp, Homo sapien
gagccaagaccatcccactgcactt

SEQ ID NO: 2042721 - DNA, 25 bp, Homo sapien
tgtccagtcagataaaacgggtcac

SEQ ID NO: 2042722 - DNA, 25 bp, Homo sapien
aacagcgctatctgtcccaagacag

SEQ ID NO: 2042723 - DNA, 25 bp, Homo sapien
gcagtaactgccatgtattgacaag

SEQ ID NO: 2042724 - DNA, 25 bp, Homo sapien
caatgttctgcaatggcttggcaac

SEQ ID NO: 2042725 - DNA, 25 bp, Homo sapien
tgaagcaaaagtccaccaatgagcg

SEQ ID NO: 2042726 - DNA, 25 bp, Homo sapien
actgctgttgatctctacccagccc

SEQ ID NO: 2042727 - DNA, 25 bp, Homo sapien
aaagtccaccaatgagcgtctgcca

SEQ ID NO: 2042728 - DNA, 25 bp, Homo sapien
gcaaaagtccaccaatgagcgtctg

SEQ ID NO: 2042729 - DNA, 25 bp, Homo sapien
ggtaggtaaatttcaagacagacag

SEQ ID NO: 2042730 - DNA, 25 bp, Homo sapien
tagggtaggtaaatttcaagacaga

SEQ ID NO: 2042731 - DNA, 25 bp, Homo sapien
tgtagggtaggtaaatttcaagaca

SEQ ID NO: 2042732 - DNA, 25 bp, Homo sapien
gggtaggtaaatttcaagacagaca

SEQ ID NO: 2042733 - DNA, 25 bp, Homo sapien
ctgaaaaacaaacaccaaattactg

SEQ ID NO: 2042734 - DNA, 25 bp, Homo sapien
aaacaaacaccaaattactggacat

SEQ ID NO: 2042735 - DNA, 25 bp, Homo sapien
tcctccactctcgagctcacctcct

SEQ ID NO: 2042736 - DNA, 25 bp, Homo sapien
ctctcctccactctcgagctcacct

SEQ ID NO: 2042737 - DNA, 25 bp, Homo sapien
cttctgctgttcttgacctactctt

SEQ ID NO: 2042738 - DNA, 25 bp, Homo sapien
tgacctactctttccactagctctg

SEQ ID NO: 2042739 - DNA, 25 bp, Homo sapien
cttgttcgtgaggtaagaagccagg

SEQ ID NO: 2042740 - DNA, 25 bp, Homo sapien
ttgttcgtgaggtaagaagccaggt

SEQ ID NO: 2042741 - DNA, 25 bp, Homo sapien
ttcgtgaggtaagaagccaggtagc

SEQ ID NO: 2042742 - DNA, 25 bp, Homo sapien
tgttcgtgaggtaagaagccaggta

SEQ ID NO: 2042743 - DNA, 25 bp, Homo sapien
ccttctcggggatccacggtgcctg

SEQ ID NO: 2042744 - DNA, 25 bp, Homo sapien
ctgtcaactcgtccccttctcgggg

SEQ ID NO: 2042745 - DNA, 25 bp, Homo sapien
tcaactcgtccccttctcggggatc

SEQ ID NO: 2042746 - DNA, 25 bp, Homo sapien
tccccttctcggggatccacggtgc

SEQ ID NO: 2042747 - DNA, 25 bp, Homo sapien
gtcatggtgtgaacatagtctgcta

SEQ ID NO: 2042748 - DNA, 25 bp, Homo sapien
taagatttggtgtagccttcacagt

SEQ ID NO: 2042749 - DNA, 25 bp, Homo sapien
aatgcacatgccgaaagaccttagt

SEQ ID NO: 2042750 - DNA, 25 bp, Homo sapien
gaccttagttttggatgtgatgaaa

SEQ ID NO: 2042751 - DNA, 25 bp, Homo sapien
tattggcccagagttagcctttctc

SEQ ID NO: 2042752 - DNA, 25 bp, Homo sapien
caattatgtttccagactgtggccg

SEQ ID NO: 2042753 - DNA, 25 bp, Homo sapien
tgggtaacacttccaaatatgggag

SEQ ID NO: 2042754 - DNA, 25 bp, Homo sapien
tacaagggaggattttacaacatac

SEQ ID NO: 2042755 - DNA, 25 bp, Homo sapien
catgcctcctattactgaagtcaga

SEQ ID NO: 2042756 - DNA, 25 bp, Homo sapien
tcagattggaaccactaaagatcca

SEQ ID NO: 2042757 - DNA, 25 bp, Homo sapien
tcaactaatttgagctatctggcct

SEQ ID NO: 2042758 - DNA, 25 bp, Homo sapien
tagtttttagtacgtgctggacacc

SEQ ID NO: 2042759 - DNA, 25 bp, Homo sapien
tcagaaagggctagatgacctgtcg

SEQ ID NO: 2042760 - DNA, 25 bp, Homo sapien
gaaaatagcccttatcaccagagac

SEQ ID NO: 2042761 - DNA, 25 bp, Homo sapien
tctgtacccgggtcagaaaatagcc

SEQ ID NO: 2042762 - DNA, 25 bp, Homo sapien
tcttagaaatgtatcgccccagcca

SEQ ID NO: 2042763 - DNA, 25 bp, Homo sapien
cgctgtgcccagctgagttcacttt

SEQ ID NO: 2042764 - DNA, 25 bp, Homo sapien
tgaacatgttcagaccccgaaaagt

SEQ ID NO: 2042765 - DNA, 25 bp, Homo sapien
tctgaggcggtcatgagacactgta

SEQ ID NO: 2042766 - DNA, 25 bp, Homo sapien
tgtagtggagccatctgggttgcat

SEQ ID NO: 2042767 - DNA, 25 bp, Homo sapien
acagcagttacggagaaggctcctg

SEQ ID NO: 2042768 - DNA, 25 bp, Homo sapien
gaaacagcagttacggagaaggctc

SEQ ID NO: 2042769 - DNA, 25 bp, Homo sapien
aaacagcagttacggagaaggctcc

SEQ ID NO: 2042770 - DNA, 25 bp, Homo sapien
agagaaacagcagttacggagaagg

SEQ ID NO: 2042771 - DNA, 25 bp, Homo sapien
gctgctgttgagacagatgatccga

SEQ ID NO: 2042772 - DNA, 25 bp, Homo sapien
tgaagcagcctacaggcactttagc

SEQ ID NO: 2042773 - DNA, 25 bp, Homo sapien
gggaagcctcttagtgcagcaacac

SEQ ID NO: 2042774 - DNA, 25 bp, Homo sapien
aaattgaatcgtaagcctgctgctg

SEQ ID NO: 2042775 - DNA, 25 bp, Homo sapien
ctatccagtaaacaactccccttat

SEQ ID NO: 2042776 - DNA, 25 bp, Homo sapien
tatccagtaaacaactccccttatc

SEQ ID NO: 2042777 - DNA, 25 bp, Homo sapien
tttttgtattttctgaagagatgga

SEQ ID NO: 2042778 - DNA, 25 bp, Homo sapien
gcgcatgccaccacatctggataat

SEQ ID NO: 2042779 - DNA, 25 bp, Homo sapien
tttgtattttctgaagagatggagt

SEQ ID NO: 2042780 - DNA, 25 bp, Homo sapien
tattttctgaagagatggagtttca

SEQ ID NO: 2042781 - DNA, 25 bp, Homo sapien
agggaagatcgccaaagcctaggag

SEQ ID NO: 2042782 - DNA, 25 bp, Homo sapien
gtgagggaagatcgccaaagcctag

SEQ ID NO: 2042783 - DNA, 25 bp, Homo sapien
aggtgagggaagatcgccaaagcct

SEQ ID NO: 2042784 - DNA, 25 bp, Homo sapien
cactcaagtataactattacatgtg

SEQ ID NO: 2042785 - DNA, 25 bp, Homo sapien
gctgtggctcttaggcttacccaaa

SEQ ID NO: 2042786 - DNA, 25 bp, Homo sapien
tcagtcctccttctgtctggagagg

SEQ ID NO: 2042787 - DNA, 25 bp, Homo sapien
tgtttgccttagctctgtaacgctg

SEQ ID NO: 2042788 - DNA, 25 bp, Homo sapien
gcattctttgggactgacagtcaca

SEQ ID NO: 2042789 - DNA, 25 bp, Homo sapien
gttcacccgggagttcagaatcgca

SEQ ID NO: 2042790 - DNA, 25 bp, Homo sapien
caagagcaccattgtcagcctgact

SEQ ID NO: 2042791 - DNA, 25 bp, Homo sapien
caagacgtagtcagatggctcacat

SEQ ID NO: 2042792 - DNA, 25 bp, Homo sapien
tattctttgtccgatggcattgggc

SEQ ID NO: 2042793 - DNA, 25 bp, Homo sapien
tacaggaccagttaggaggcatcag

SEQ ID NO: 2042794 - DNA, 25 bp, Homo sapien
taacagcccgtgcagagatcaatag

SEQ ID NO: 2042795 - DNA, 25 bp, Homo sapien
taaccatctggtcataagggaacag

SEQ ID NO: 2042796 - DNA, 25 bp, Homo sapien
ggaacagatgcgaggcctggtcaca

SEQ ID NO: 2042797 - DNA, 25 bp, Homo sapien
ccagttgtagccagggacgttttca

SEQ ID NO: 2042798 - DNA, 25 bp, Homo sapien
tcagagagtggtcctgaagtcctcc

SEQ ID NO: 2042799 - DNA, 25 bp, Homo sapien
caatttgtaggtcctgctgccgtga

SEQ ID NO: 2042800 - DNA, 25 bp, Homo sapien
ttatcagcgcaagccaaggtaggtc

SEQ ID NO: 2042801 - DNA, 25 bp, Homo sapien
gacctcgtgatctgcccacctcagc

SEQ ID NO: 2042802 - DNA, 25 bp, Homo sapien
gacggaatctcgctttgtcaccagg

SEQ ID NO: 2042803 - DNA, 25 bp, Homo sapien
agacggaatctcgctttgtcaccag

SEQ ID NO: 2042804 - DNA, 25 bp, Homo sapien
ctgacctcgtgatctgcccacctca

SEQ ID NO: 2042805 - DNA, 25 bp, Homo sapien
gacacgctcctgaattgctcctgaa

SEQ ID NO: 2042806 - DNA, 25 bp, Homo sapien
gactgaagttgatgccacgtgttga

SEQ ID NO: 2042807 - DNA, 25 bp, Homo sapien
ccaggctggttattagagaatctcc

SEQ ID NO: 2042808 - DNA, 25 bp, Homo sapien
tgtctctaatacctcgccaggctgg

SEQ ID NO: 2042809 - DNA, 25 bp, Homo sapien
taaaaagtacctggatgccgagcag

SEQ ID NO: 2042810 - DNA, 25 bp, Homo sapien
tacaggcatgcgcacaggaaaaagt

SEQ ID NO: 2042811 - DNA, 25 bp, Homo sapien
aataaggtcgctgagatttgccgcc

SEQ ID NO: 2042812 - DNA, 25 bp, Homo sapien
tcctgggtccacatcgaagaattca

SEQ ID NO: 2042813 - DNA, 25 bp, Homo sapien
gtttcagattgcagtacaggtacct

SEQ ID NO: 2042814 - DNA, 25 bp, Homo sapien
cagcctcttttgcacctcgttggta

SEQ ID NO: 2042815 - DNA, 25 bp, Homo sapien
cataaatttgtgatagccgtgctga

SEQ ID NO: 2042816 - DNA, 25 bp, Homo sapien
gagcgatgtgtgcaaaaccagtgaa

SEQ ID NO: 2042817 - DNA, 25 bp, Homo sapien
ctggacatgctgaaggtaactctga

SEQ ID NO: 2042818 - DNA, 25 bp, Homo sapien
actcatatgctaagacaggtctgcc

SEQ ID NO: 2042819 - DNA, 25 bp, Homo sapien
caactgaagtgggtctaaaaatgtc

SEQ ID NO: 2042820 - DNA, 25 bp, Homo sapien
caaacctttggtatgcattgccaga

SEQ ID NO: 2042821 - DNA, 25 bp, Homo sapien
tcaaagcagatagggtaaccccaaa

SEQ ID NO: 2042822 - DNA, 25 bp, Homo sapien
tctcaaagcagatagggtaacccca

SEQ ID NO: 2042823 - DNA, 25 bp, Homo sapien
tctctcaaagcagatagggtaaccc

SEQ ID NO: 2042824 - DNA, 25 bp, Homo sapien
gtctctcaaagcagatagggtaacc

SEQ ID NO: 2042825 - DNA, 25 bp, Homo sapien
cccagtagacacacctacgagatgc

SEQ ID NO: 2042826 - DNA, 25 bp, Homo sapien
ttcaaacagatttttggagaccaag

SEQ ID NO: 2042827 - DNA, 25 bp, Homo sapien
taactggcaattaaatctcttcctt

SEQ ID NO: 2042828 - DNA, 25 bp, Homo sapien
catttcatgccacatctaactggca

SEQ ID NO: 2042829 - DNA, 25 bp, Homo sapien
gctgctgccaaacaaccgatggttg

SEQ ID NO: 2042830 - DNA, 25 bp, Homo sapien
tagacacagttcagtcaggatgccc

SEQ ID NO: 2042831 - DNA, 25 bp, Homo sapien
tcacaggcgctacgttcaaagctgc

SEQ ID NO: 2042832 - DNA, 25 bp, Homo sapien
cctttacagagtgtcagtgagcgga

SEQ ID NO: 2042833 - DNA, 25 bp, Homo sapien
aatttagaagccgttcgcgctctgt

SEQ ID NO: 2042834 - DNA, 25 bp, Homo sapien
ttagaagccgttcgcgctctgttcc

SEQ ID NO: 2042835 - DNA, 25 bp, Homo sapien
agaaatttagaagccgttcgcgctc

SEQ ID NO: 2042836 - DNA, 25 bp, Homo sapien
gccgttcgcgctctgttcctttgta

SEQ ID NO: 2042837 - DNA, 25 bp, Homo sapien
tctatcccccggagatgataaaaag

SEQ ID NO: 2042838 - DNA, 25 bp, Homo sapien
gggactgcagacgcacaccacttca

SEQ ID NO: 2042839 - DNA, 25 bp, Homo sapien
taaaaggaactagtatattagattg

SEQ ID NO: 2042840 - DNA, 25 bp, Homo sapien
tgtaatagaactactttctatcccc

SEQ ID NO: 2042841 - DNA, 25 bp, Homo sapien
tcagtattgttctttcaaccgtggg

SEQ ID NO: 2042842 - DNA, 25 bp, Homo sapien
tattgtgccacccttttaagatgag

SEQ ID NO: 2042843 - DNA, 25 bp, Homo sapien
gacagtctcgagatgaagaaaggca

SEQ ID NO: 2042844 - DNA, 25 bp, Homo sapien
tttgctaagaaacgggaaatccatg

SEQ ID NO: 2042845 - DNA, 25 bp, Homo sapien
agtggctcccagtaagaccatggcc

SEQ ID NO: 2042846 - DNA, 25 bp, Homo sapien
ggccaaatacatcctgaagtagaat

SEQ ID NO: 2042847 - DNA, 25 bp, Homo sapien
ccaaattttgtaagtgtgattccac

SEQ ID NO: 2042848 - DNA, 25 bp, Homo sapien
aaatattaatccgtgagtggctccc

SEQ ID NO: 2042849 - DNA, 25 bp, Homo sapien
tattctgcacagacactgcatcgtg

SEQ ID NO: 2042850 - DNA, 25 bp, Homo sapien
gaacgtccgttctgtccacgatgtg

SEQ ID NO: 2042851 - DNA, 25 bp, Homo sapien
gattactttgtggtgcgactctgcc

SEQ ID NO: 2042852 - DNA, 25 bp, Homo sapien
taagccagggtgtagagttgaacca

SEQ ID NO: 2042853 - DNA, 25 bp, Homo sapien
gctccacgcggctgcctttcatgct

SEQ ID NO: 2042854 - DNA, 25 bp, Homo sapien
accgtgaacgctctggttatgtggc

SEQ ID NO: 2042855 - DNA, 25 bp, Homo sapien
ctttcatgctcaccgtgaacgctct

SEQ ID NO: 2042856 - DNA, 25 bp, Homo sapien
gtgggcaagtgcctcttccgcgcgc

SEQ ID NO: 2042857 - DNA, 25 bp, Homo sapien
tgaaataaagcacttcctttaggat

SEQ ID NO: 2042858 - DNA, 25 bp, Homo sapien
tatgctcccagatgtccaactcaat

SEQ ID NO: 2042859 - DNA, 25 bp, Homo sapien
ggtttacatggaatctaagacagcc

SEQ ID NO: 2042860 - DNA, 25 bp, Homo sapien
gagcaagcgccagacttggtatctt

SEQ ID NO: 2042861 - DNA, 25 bp, Homo sapien
caaactgagactgtatgaggactca

SEQ ID NO: 2042862 - DNA, 25 bp, Homo sapien
ccaggttgaccaaggatacagcgtt

SEQ ID NO: 2042863 - DNA, 25 bp, Homo sapien
caccgaggttgaagatagtgtcgtc

SEQ ID NO: 2042864 - DNA, 25 bp, Homo sapien
tgttgaccaagaccatggcgatggt

SEQ ID NO: 2042865 - DNA, 25 bp, Homo sapien
caggtactgttcgtagaagacataa

SEQ ID NO: 2042866 - DNA, 25 bp, Homo sapien
tgtctacaagactcaccgaaagcaa

SEQ ID NO: 2042867 - DNA, 25 bp, Homo sapien
gccaagtggtcagactcctttggga

SEQ ID NO: 2042868 - DNA, 25 bp, Homo sapien
gggaggcctcattaaagctcgctct

SEQ ID NO: 2042869 - DNA, 25 bp, Homo sapien
agaaaaccttgctggctgtctacaa

SEQ ID NO: 2042870 - DNA, 25 bp, Homo sapien
taggcactgccgttaatgcccatgg

SEQ ID NO: 2042871 - DNA, 25 bp, Homo sapien
taaggaaatactcggtaggcactgc

SEQ ID NO: 2042872 - DNA, 25 bp, Homo sapien
tcttcagagcgtcaataaagtcagc

SEQ ID NO: 2042873 - DNA, 25 bp, Homo sapien
taggtcatgaagtacgtggctccga

SEQ ID NO: 2042874 - DNA, 25 bp, Homo sapien
ccatggccaaggaggatgttaactg

SEQ ID NO: 2042875 - DNA, 25 bp, Homo sapien
tgcagaactataggcagcatgtccc

SEQ ID NO: 2042876 - DNA, 25 bp, Homo sapien
atggccaaggaggatgttaactgca

SEQ ID NO: 2042877 - DNA, 25 bp, Homo sapien
actgcagaactataggcagcatgtc

SEQ ID NO: 2042878 - DNA, 25 bp, Homo sapien
tgcaaaatatcagcagaatctgagc

SEQ ID NO: 2042879 - DNA, 25 bp, Homo sapien
aggccagagacttccggtcatcatc

SEQ ID NO: 2042880 - DNA, 25 bp, Homo sapien
gcttccgtgggtaactggctgcctg

SEQ ID NO: 2042881 - DNA, 25 bp, Homo sapien
ttgggccatatatctggcttccgtg

SEQ ID NO: 2042882 - DNA, 25 bp, Homo sapien
tcatcactatttttgggccatatat

SEQ ID NO: 2042883 - DNA, 25 bp, Homo sapien
gatgggggagtgagatagcccataa

SEQ ID NO: 2042884 - DNA, 25 bp, Homo sapien
tgggggagtgagatagcccataacc

SEQ ID NO: 2042885 - DNA, 25 bp, Homo sapien
atgggggagtgagatagcccataac

SEQ ID NO: 2042886 - DNA, 25 bp, Homo sapien
tcagaggcctgcagcgaacgcaggc

SEQ ID NO: 2042887 - DNA, 25 bp, Homo sapien
gcctctgtttgccttccggagtcag

SEQ ID NO: 2042888 - DNA, 25 bp, Homo sapien
tgggcaggaatctcatgaagtctcc

SEQ ID NO: 2042889 - DNA, 25 bp, Homo sapien
gggttatccgaaaggaacatgggca

SEQ ID NO: 2042890 - DNA, 25 bp, Homo sapien
tgtccactcgacagcaagacgactg

SEQ ID NO: 2042891 - DNA, 25 bp, Homo sapien
tggcttcacccagtcgaaataatcg

SEQ ID NO: 2042892 - DNA, 25 bp, Homo sapien
cagaactggtcagtgatattgtcca

SEQ ID NO: 2042893 - DNA, 25 bp, Homo sapien
gaaataatcgtcgatccaggacgag

SEQ ID NO: 2042894 - DNA, 25 bp, Homo sapien
tagagaggacagacagggttactga

SEQ ID NO: 2042895 - DNA, 25 bp, Homo sapien
ctagagaggacagacagggttactg

SEQ ID NO: 2042896 - DNA, 25 bp, Homo sapien
agagaggacagacagggttactgac

SEQ ID NO: 2042897 - DNA, 25 bp, Homo sapien
gaaaaactacatgagcacttaatga

SEQ ID NO: 2042898 - DNA, 25 bp, Homo sapien
gaaagtctattttcagtgagacatt

SEQ ID NO: 2042899 - DNA, 25 bp, Homo sapien
tctacgttttatactgctaacagtc

SEQ ID NO: 2042900 - DNA, 25 bp, Homo sapien
gctccacagggaggaagtctttagt

SEQ ID NO: 2042901 - DNA, 25 bp, Homo sapien
agctgcgccgcgttaaatatctgct

SEQ ID NO: 2042902 - DNA, 25 bp, Homo sapien
caccagggaatcattgttgcagccc

SEQ ID NO: 2042903 - DNA, 25 bp, Homo sapien
gcggacccgcatgcaggtactgact

SEQ ID NO: 2042904 - DNA, 25 bp, Homo sapien
ccttggaagaagtgtagtcgtgccc

SEQ ID NO: 2042905 - DNA, 25 bp, Homo sapien
atctggcatcgaaagagactgatcc

SEQ ID NO: 2042906 - DNA, 25 bp, Homo sapien
ccaatatctactttgttcaggactg

SEQ ID NO: 2042907 - DNA, 25 bp, Homo sapien
gagactgatccaatccaatatctac

SEQ ID NO: 2042908 - DNA, 25 bp, Homo sapien
tctactttgttcaggactgcgatgc

SEQ ID NO: 2042909 - DNA, 25 bp, Homo sapien
taatctgtttcagtgagaggaaaga

SEQ ID NO: 2042910 - DNA, 25 bp, Homo sapien
tcttagaaggcatgtgataatctgt

SEQ ID NO: 2042911 - DNA, 25 bp, Homo sapien
tgtctggcttcttagaaggcatgtg

SEQ ID NO: 2042912 - DNA, 25 bp, Homo sapien
agaaaaaccacagataagcgcatac

SEQ ID NO: 2042913 - DNA, 25 bp, Homo sapien
ccagtcctttagcagaagtggagaa

SEQ ID NO: 2042914 - DNA, 25 bp, Homo sapien
agcaaaagatgtctagccgattttt

SEQ ID NO: 2042915 - DNA, 25 bp, Homo sapien
tgaagaagcgaaacaaacagctctc

SEQ ID NO: 2042916 - DNA, 25 bp, Homo sapien
gaggcctggacgcttgttccatctt

SEQ ID NO: 2042917 - DNA, 25 bp, Homo sapien
ttaaatagactataatcctggcacc

SEQ ID NO: 2042918 - DNA, 25 bp, Homo sapien
acaaaggttatacccgctagctgct

SEQ ID NO: 2042919 - DNA, 25 bp, Homo sapien
aaacaaaggttatacccgctagctg

SEQ ID NO: 2042920 - DNA, 25 bp, Homo sapien
gactataatcctggcaccaacttac

SEQ ID NO: 2042921 - DNA, 25 bp, Homo sapien
taaccccaagagactcacgaaacag

SEQ ID NO: 2042922 - DNA, 25 bp, Homo sapien
aatgtctaaccccaagagactcacg

SEQ ID NO: 2042923 - DNA, 25 bp, Homo sapien
tcttgacgtttaatgtctaacccca

SEQ ID NO: 2042924 - DNA, 25 bp, Homo sapien
ccaagagactcacgaaacaggtaat

SEQ ID NO: 2042925 - DNA, 25 bp, Homo sapien
gagagagaaggtgtgcacggctggc

SEQ ID NO: 2042926 - DNA, 25 bp, Homo sapien
agaagaaagtcaatgaagactgcca

SEQ ID NO: 2042927 - DNA, 25 bp, Homo sapien
aagactgccaatcccgcaaagagag

SEQ ID NO: 2042928 - DNA, 25 bp, Homo sapien
acggctggcatcacggacaatgctc

SEQ ID NO: 2042929 - DNA, 25 bp, Homo sapien
ctcccctatagtggacagagtcact

SEQ ID NO: 2042930 - DNA, 25 bp, Homo sapien
cactagtgggtctatttgatgattc

SEQ ID NO: 2042931 - DNA, 25 bp, Homo sapien
agtttgtggcccgtggatggtcttc

SEQ ID NO: 2042932 - DNA, 25 bp, Homo sapien
cccagccatgtaggcattgcagttt

SEQ ID NO: 2042933 - DNA, 25 bp, Homo sapien
gaaggattcagtggctactcaagga

SEQ ID NO: 2042934 - DNA, 25 bp, Homo sapien
catcttgtaagcgagtgcctgtgga

SEQ ID NO: 2042935 - DNA, 25 bp, Homo sapien
ggaaagtggcaagacgaactctagg

SEQ ID NO: 2042936 - DNA, 25 bp, Homo sapien
gaactctaggtctctttcaccctga

SEQ ID NO: 2042937 - DNA, 25 bp, Homo sapien
gaaaaatgctacagtctcagaaaag

SEQ ID NO: 2042938 - DNA, 25 bp, Homo sapien
catactgggagccacttctcctagg

SEQ ID NO: 2042939 - DNA, 25 bp, Homo sapien
aggatgacaggaacatactgggagc

SEQ ID NO: 2042940 - DNA, 25 bp, Homo sapien
aaatgctacagtctcagaaaaggat

SEQ ID NO: 2042941 - DNA, 25 bp, Homo sapien
acactcacgaatgcggagcccagga

SEQ ID NO: 2042942 - DNA, 25 bp, Homo sapien
aggtcacactcacgaatgcggagcc

SEQ ID NO: 2042943 - DNA, 25 bp, Homo sapien
gccctgtgagaatatggaagtatac

SEQ ID NO: 2042944 - DNA, 25 bp, Homo sapien
gagccctgtgagaatatggaagtat

SEQ ID NO: 2042945 - DNA, 25 bp, Homo sapien
tgaagatgttgtccactccaacagc

SEQ ID NO: 2042946 - DNA, 25 bp, Homo sapien
agctcagcacgatcaagatgcccgc

SEQ ID NO: 2042947 - DNA, 25 bp, Homo sapien
agggcaacccaatgtagctgaagac

SEQ ID NO: 2042948 - DNA, 25 bp, Homo sapien
caggaacgggatgacttcaatcaca

SEQ ID NO: 2042949 - DNA, 25 bp, Homo sapien
gaagcctgcgacagcttttcatgtg

SEQ ID NO: 2042950 - DNA, 25 bp, Homo sapien
tcaatacttcgttcagcagtgaagg

SEQ ID NO: 2042951 - DNA, 25 bp, Homo sapien
gatggcatagctaattacaacggtg

SEQ ID NO: 2042952 - DNA, 25 bp, Homo sapien
tttcatgtgccccaaggctagggaa

SEQ ID NO: 2042953 - DNA, 25 bp, Homo sapien
taaatacattcagcatgctcccaag

SEQ ID NO: 2042954 - DNA, 25 bp, Homo sapien
gagggcataaagtgcaacctggcct

SEQ ID NO: 2042955 - DNA, 25 bp, Homo sapien
gctgttagaaaacaatgcaggtggc

SEQ ID NO: 2042956 - DNA, 25 bp, Homo sapien
taagtgggtgaactgcatgatacat

SEQ ID NO: 2042957 - DNA, 25 bp, Homo sapien
taattattgacagggaaggtaatca

SEQ ID NO: 2042958 - DNA, 25 bp, Homo sapien
tgacagggaaggtaatcacaagggc

SEQ ID NO: 2042959 - DNA, 25 bp, Homo sapien
aaggtaatcacaagggcagtggcgt

SEQ ID NO: 2042960 - DNA, 25 bp, Homo sapien
cacaagggcagtggcgttattgtag

SEQ ID NO: 2042961 - DNA, 25 bp, Homo sapien
cacctggctagaatcaattcttaaa

SEQ ID NO: 2042962 - DNA, 25 bp, Homo sapien
tgcaatcgcggctttttgtggcctt

SEQ ID NO: 2042963 - DNA, 25 bp, Homo sapien
caatgaatcaaaaactatgtatatt

SEQ ID NO: 2042964 - DNA, 25 bp, Homo sapien
gtggccttgaccacccgaactcaat

SEQ ID NO: 2042965 - DNA, 25 bp, Homo sapien
cccctatggctagtcagttgctgac

SEQ ID NO: 2042966 - DNA, 25 bp, Homo sapien
tatctggattcttaactggttgggc

SEQ ID NO: 2042967 - DNA, 25 bp, Homo sapien
caaagtcaattgtttcccctatggc

SEQ ID NO: 2042968 - DNA, 25 bp, Homo sapien
tcccctgccaccaagtgaggagaag

SEQ ID NO: 2042969 - DNA, 25 bp, Homo sapien
tctataaatgaacttcggaggccca

SEQ ID NO: 2042970 - DNA, 25 bp, Homo sapien
tgaggtccatgagctccctagaggg

SEQ ID NO: 2042971 - DNA, 25 bp, Homo sapien
gctccctagagggtctataaatgaa

SEQ ID NO: 2042972 - DNA, 25 bp, Homo sapien
acttcggaggcccatgaccttcaag

SEQ ID NO: 2042973 - DNA, 25 bp, Homo sapien
gctaatgacaaaaccgagatgactt

SEQ ID NO: 2042974 - DNA, 25 bp, Homo sapien
atgacaaaaccgagatgactttatc

SEQ ID NO: 2042975 - DNA, 25 bp, Homo sapien
acaaaaccgagatgactttatctaa

SEQ ID NO: 2042976 - DNA, 25 bp, Homo sapien
ctaatgacaaaaccgagatgacttt

SEQ ID NO: 2042977 - DNA, 25 bp, Homo sapien
aaacgtacccagacaagggtcatgg

SEQ ID NO: 2042978 - DNA, 25 bp, Homo sapien
cacgggaacactggtccaccaaacg

SEQ ID NO: 2042979 - DNA, 25 bp, Homo sapien
caacacaagccacgggaacactggt

SEQ ID NO: 2042980 - DNA, 25 bp, Homo sapien
ggagcaaacttgtatcattcagaga

SEQ ID NO: 2042981 - DNA, 25 bp, Homo sapien
ggcaaggtcttgttgtttgctcacc

SEQ ID NO: 2042982 - DNA, 25 bp, Homo sapien
gaatggtgtctaccaatgattgtct

SEQ ID NO: 2042983 - DNA, 25 bp, Homo sapien
gctcacctctgggttatgctcataa

SEQ ID NO: 2042984 - DNA, 25 bp, Homo sapien
ttttgcccatgtaccctaagtcaga

SEQ ID NO: 2042985 - DNA, 25 bp, Homo sapien
cacggaatggctgttctggaagtaa

SEQ ID NO: 2042986 - DNA, 25 bp, Homo sapien
cagtctcattgtcataagaggcagt

SEQ ID NO: 2042987 - DNA, 25 bp, Homo sapien
tcggcatacacaaagaagtcgtccc

SEQ ID NO: 2042988 - DNA, 25 bp, Homo sapien
caaaatggtgcagttcgtgttatac

SEQ ID NO: 2042989 - DNA, 25 bp, Homo sapien
tatgcacaggtacagttctccaagg

SEQ ID NO: 2042990 - DNA, 25 bp, Homo sapien
aagaagccggtacagtttatgcaca

SEQ ID NO: 2042991 - DNA, 25 bp, Homo sapien
ctttctaggagcaatgggatggatc

SEQ ID NO: 2042992 - DNA, 25 bp, Homo sapien
tcagggatggtaatctggcagctcc

SEQ ID NO: 2042993 - DNA, 25 bp, Homo sapien
ggtccaaagggtacatcagctcccg

SEQ ID NO: 2042994 - DNA, 25 bp, Homo sapien
caaagtactctttttccaggcgagc

SEQ ID NO: 2042995 - DNA, 25 bp, Homo sapien
tctgtatgtcaagcggaggtccaaa

SEQ ID NO: 2042996 - DNA, 25 bp, Homo sapien
tgacgaacacgcagtaatgaagacc

SEQ ID NO: 2042997 - DNA, 25 bp, Homo sapien
ctttgtcacttgcattaacagaaaa

SEQ ID NO: 2042998 - DNA, 25 bp, Homo sapien
taacagaaaaagctatattgctatc

SEQ ID NO: 2042999 - DNA, 25 bp, Homo sapien
gagtgtactcggagacaaaataccg

SEQ ID NO: 2043000 - DNA, 25 bp, Homo sapien
tatcgatgggagtgtactcggagac

SEQ ID NO: 2043001 - DNA, 25 bp, Homo sapien
aagcaaaaacgccatgtaggtgatc

SEQ ID NO: 2043002 - DNA, 25 bp, Homo sapien
gccatgtaggtgatccacatgatga

SEQ ID NO: 2043003 - DNA, 25 bp, Homo sapien
aaaaacgccatgtaggtgatccaca

SEQ ID NO: 2043004 - DNA, 25 bp, Homo sapien
aacacaagcaaaaacgccatgtagg

SEQ ID NO: 2043005 - DNA, 25 bp, Homo sapien
ttggtggcattgttcatgggctcca

SEQ ID NO: 2043006 - DNA, 25 bp, Homo sapien
cagactcgtcacagcctttggtggc

SEQ ID NO: 2043007 - DNA, 25 bp, Homo sapien
tccaagccaaggatcgtccagggag

SEQ ID NO: 2043008 - DNA, 25 bp, Homo sapien
tagagcagtcttggcagctacatgg

SEQ ID NO: 2043009 - DNA, 25 bp, Homo sapien
cacatcccggcaggcattgtacatt

SEQ ID NO: 2043010 - DNA, 25 bp, Homo sapien
attacaggcgtcagcgtccttccca

SEQ ID NO: 2043011 - DNA, 25 bp, Homo sapien
tcaatccagttggtggcattacagg

SEQ ID NO: 2043012 - DNA, 25 bp, Homo sapien
gagtgatggtaaaaggtgcctgtcc

SEQ ID NO: 2043013 - DNA, 25 bp, Homo sapien
caggctctatcatggctggtaagaa

SEQ ID NO: 2043014 - DNA, 25 bp, Homo sapien
gctggaatgggtcctgtactgtcga

SEQ ID NO: 2043015 - DNA, 25 bp, Homo sapien
tcttcaaggagatgcttacacattc

SEQ ID NO: 2043016 - DNA, 25 bp, Homo sapien
ctggaaagacaggttaactagggtg

SEQ ID NO: 2043017 - DNA, 25 bp, Homo sapien
tctgtccgacgtagtattgtaactc

SEQ ID NO: 2043018 - DNA, 25 bp, Homo sapien
tctgtcgagggctacatgtcagctc

SEQ ID NO: 2043019 - DNA, 25 bp, Homo sapien
cacaaaacaggttcagtaggttata

SEQ ID NO: 2043020 - DNA, 25 bp, Homo sapien
ggtttgtaacaggatcaacataatc

SEQ ID NO: 2043021 - DNA, 25 bp, Homo sapien
tcttttagtgtctgaagctgccgaa

SEQ ID NO: 2043022 - DNA, 25 bp, Homo sapien
caaagaagaatcctggacagagttc

SEQ ID NO: 2043023 - DNA, 25 bp, Homo sapien
tgaagctgccgaacatcacaacaga

SEQ ID NO: 2043024 - DNA, 25 bp, Homo sapien
gctgcaggttgtcttttagtgtctg

SEQ ID NO: 2043025 - DNA, 25 bp, Homo sapien
ctctccataccaaacacaggactgt

SEQ ID NO: 2043026 - DNA, 25 bp, Homo sapien
tgtacctcttgtccccatatgcaat

SEQ ID NO: 2043027 - DNA, 25 bp, Homo sapien
gggccagaatattcgcaattgtacc

SEQ ID NO: 2043028 - DNA, 25 bp, Homo sapien
gcactaagtcatatccatcctttgg

SEQ ID NO: 2043029 - DNA, 25 bp, Homo sapien
ggccccgggcctgcaatcgtctgtt

SEQ ID NO: 2043030 - DNA, 25 bp, Homo sapien
taactgactttgatcaattgataac

SEQ ID NO: 2043031 - DNA, 25 bp, Homo sapien
gtaactgactttgatcaattgataa

SEQ ID NO: 2043032 - DNA, 25 bp, Homo sapien
aacaagctcagaacaggtcacccaa

SEQ ID NO: 2043033 - DNA, 25 bp, Homo sapien
gaacaagctcagaacaggtcaccca

SEQ ID NO: 2043034 - DNA, 25 bp, Homo sapien
gctcagaacaggtcacccaagcccc

SEQ ID NO: 2043035 - DNA, 25 bp, Homo sapien
agagcgtggccggagacagaaacag

SEQ ID NO: 2043036 - DNA, 25 bp, Homo sapien
gaaagagagcgtggccggagacaga

SEQ ID NO: 2043037 - DNA, 25 bp, Homo sapien
gtggccggagacagaaacaggacaa

SEQ ID NO: 2043038 - DNA, 25 bp, Homo sapien
cacaggaaagagagcgtggccggag

SEQ ID NO: 2043039 - DNA, 25 bp, Homo sapien
gtcccggtggccggcgaccgctcac

SEQ ID NO: 2043040 - DNA, 25 bp, Homo sapien
tgagccgtcgctgggcccgtcgcct

SEQ ID NO: 2043041 - DNA, 25 bp, Homo sapien
cgccacgtccccacagggcgtcccg

SEQ ID NO: 2043042 - DNA, 25 bp, Homo sapien
gggcctgagccgtcgctgggcccgt

SEQ ID NO: 2043043 - DNA, 25 bp, Homo sapien
ccaagggccaggccgcgagcggtca

SEQ ID NO: 2043044 - DNA, 25 bp, Homo sapien
caagggccaggccgcgagcggtcat

SEQ ID NO: 2043045 - DNA, 25 bp, Homo sapien
tggacacagtagcagcaggaggagg

SEQ ID NO: 2043046 - DNA, 25 bp, Homo sapien
cgctggacacagtagcagcaggagg

SEQ ID NO: 2043047 - DNA, 25 bp, Homo sapien
ggagcaggcgctgaccgcggcagca

SEQ ID NO: 2043048 - DNA, 25 bp, Homo sapien
ctgctgacgccggcggcgttcggct

SEQ ID NO: 2043049 - DNA, 25 bp, Homo sapien
ggctctacttccccgggctgtttca

SEQ ID NO: 2043050 - DNA, 25 bp, Homo sapien
gcggcgttcggctggttgggctccc

SEQ ID NO: 2043051 - DNA, 25 bp, Homo sapien
cctgctatgggtaatctcatctaga

SEQ ID NO: 2043052 - DNA, 25 bp, Homo sapien
gaaggcctccatattgttcaagcta

SEQ ID NO: 2043053 - DNA, 25 bp, Homo sapien
ttaagtcttaggatgcggagctaac

SEQ ID NO: 2043054 - DNA, 25 bp, Homo sapien
tagacacctcttccctacagtaaga

SEQ ID NO: 2043055 - DNA, 25 bp, Homo sapien
tcaaaaacatgcatagatgaagact

SEQ ID NO: 2043056 - DNA, 25 bp, Homo sapien
cactgactgaggcatttagacacca

SEQ ID NO: 2043057 - DNA, 25 bp, Homo sapien
tgcattgaatataagttttgatccc

SEQ ID NO: 2043058 - DNA, 25 bp, Homo sapien
cattcttggaatcagtcaactcaaa

SEQ ID NO: 2043059 - DNA, 25 bp, Homo sapien
tgaggatcaacgaacaaatgcacag

SEQ ID NO: 2043060 - DNA, 25 bp, Homo sapien
tcaagattccacagcatgttaggta

SEQ ID NO: 2043061 - DNA, 25 bp, Homo sapien
aaagtcattctatcaagcagcacgg

SEQ ID NO: 2043062 - DNA, 25 bp, Homo sapien
gcagcacggtgttggaaactcaaga

SEQ ID NO: 2043063 - DNA, 25 bp, Homo sapien
gcaaaagtgcctcaatccattgaag

SEQ ID NO: 2043064 - DNA, 25 bp, Homo sapien
cccgggagatgagttacaggacacc

SEQ ID NO: 2043065 - DNA, 25 bp, Homo sapien
ttgacttcgtgcacagagcgtagct

SEQ ID NO: 2043066 - DNA, 25 bp, Homo sapien
tccttgcttagtactgagaaccctg

SEQ ID NO: 2043067 - DNA, 25 bp, Homo sapien
tacgttcatttttggttagttctgc

SEQ ID NO: 2043068 - DNA, 25 bp, Homo sapien
tctttacttctcaggagacgcaata

SEQ ID NO: 2043069 - DNA, 25 bp, Homo sapien
tacttctcaggagacgcaatatacg

SEQ ID NO: 2043070 - DNA, 25 bp, Homo sapien
tcaggagacgcaatatacgttcatt

SEQ ID NO: 2043071 - DNA, 25 bp, Homo sapien
catcagagacattcttaagtacaac

SEQ ID NO: 2043072 - DNA, 25 bp, Homo sapien
taccattagagcaaatgtcagcaca

SEQ ID NO: 2043073 - DNA, 25 bp, Homo sapien
tgccagtacagtttagtgttcctgc

SEQ ID NO: 2043074 - DNA, 25 bp, Homo sapien
gctttgaggtgtactaaggccccaa

SEQ ID NO: 2043075 - DNA, 25 bp, Homo sapien
taggtgaaacttctgcagtccccat

SEQ ID NO: 2043076 - DNA, 25 bp, Homo sapien
acttgatcctaggtgaaacttctgc

SEQ ID NO: 2043077 - DNA, 25 bp, Homo sapien
agcagccaagcctggaaccccagtt

SEQ ID NO: 2043078 - DNA, 25 bp, Homo sapien
tatctggaaacttgatcctaggtga

SEQ ID NO: 2043079 - DNA, 25 bp, Homo sapien
gacaccacccagaccagtaatctgg

SEQ ID NO: 2043080 - DNA, 25 bp, Homo sapien
gatcagcgacaccacccagaccagt

SEQ ID NO: 2043081 - DNA, 25 bp, Homo sapien
cagaccagtaatctggcccaatcag

SEQ ID NO: 2043082 - DNA, 25 bp, Homo sapien
taatctggcccaatcagttctgcca

SEQ ID NO: 2043083 - DNA, 25 bp, Homo sapien
gtttacaggagtgggcctttgcgcc

SEQ ID NO: 2043084 - DNA, 25 bp, Homo sapien
tgcgcctggcgcatgcattctctca

SEQ ID NO: 2043085 - DNA, 25 bp, Homo sapien
caccgcgaagtttggcctaattgta

SEQ ID NO: 2043086 - DNA, 25 bp, Homo sapien
catgtgccagcttaagcagatgttg

SEQ ID NO: 2043087 - DNA, 25 bp, Homo sapien
catcaatgggcccaaacgagttaaa

SEQ ID NO: 2043088 - DNA, 25 bp, Homo sapien
cgagttaaaagattgcttagtgggt

SEQ ID NO: 2043089 - DNA, 25 bp, Homo sapien
ccaaacgagttaaaagattgcttag

SEQ ID NO: 2043090 - DNA, 25 bp, Homo sapien
ctaggaggacacatcaatgggccca

SEQ ID NO: 2043091 - DNA, 25 bp, Homo sapien
actgagcactgctgcatggagcgct

SEQ ID NO: 2043092 - DNA, 25 bp, Homo sapien
gagcactgctgcatggagcgctgat

SEQ ID NO: 2043093 - DNA, 25 bp, Homo sapien
tgctgcatggagcgctgatgtccca

SEQ ID NO: 2043094 - DNA, 25 bp, Homo sapien
ctgcatggagcgctgatgtcccatt

SEQ ID NO: 2043095 - DNA, 25 bp, Homo sapien
tagatggtttattcttactttacaa

SEQ ID NO: 2043096 - DNA, 25 bp, Homo sapien
ttgcaaagtccaagctttctaaagc

SEQ ID NO: 2043097 - DNA, 25 bp, Homo sapien
attcattttcatagatggtttattc

SEQ ID NO: 2043098 - DNA, 25 bp, Homo sapien
ttttaacaagtgcagctttctggct

SEQ ID NO: 2043099 - DNA, 25 bp, Homo sapien
aatttaagcaactcttttatgacat

SEQ ID NO: 2043100 - DNA, 25 bp, Homo sapien
tttaagcaactcttttatgacatca

SEQ ID NO: 2043101 - DNA, 25 bp, Homo sapien
taagcaactcttttatgacatcatt

SEQ ID NO: 2043102 - DNA, 25 bp, Homo sapien
gagtgggtgagaatttaagcaactc

SEQ ID NO: 2043103 - DNA, 25 bp, Homo sapien
tttggccgcgcgactcgggcactca

SEQ ID NO: 2043104 - DNA, 25 bp, Homo sapien
gttttctccacacaggcgcgccggg

SEQ ID NO: 2043105 - DNA, 25 bp, Homo sapien
tgcagactcagtcaagacccgtttt

SEQ ID NO: 2043106 - DNA, 25 bp, Homo sapien
cgccgggaggcttcgctctttggcc

SEQ ID NO: 2043107 - DNA, 25 bp, Homo sapien
tggcccatctgggacgcgatccaca

SEQ ID NO: 2043108 - DNA, 25 bp, Homo sapien
gacgcgatccacaggggcgctgtcc

SEQ ID NO: 2043109 - DNA, 25 bp, Homo sapien
ttccgcgcagcgtcgcggtcggctc

SEQ ID NO: 2043110 - DNA, 25 bp, Homo sapien
gcaccacctcgctgtggcccatctg

SEQ ID NO: 2043111 - DNA, 25 bp, Homo sapien
gcggcggccgccgtgactggggcgc

SEQ ID NO: 2043112 - DNA, 25 bp, Homo sapien
gcggccgccgtgactggggcgcccg

SEQ ID NO: 2043113 - DNA, 25 bp, Homo sapien
aggcggcggccgccgtgactggggc

SEQ ID NO: 2043114 - DNA, 25 bp, Homo sapien
ggaggcggcggccgccgtgactggg

SEQ ID NO: 2043115 - DNA, 25 bp, Homo sapien
gtgtgtgtagcccacggacgcagac

SEQ ID NO: 2043116 - DNA, 25 bp, Homo sapien
gagcagctgacctgtatacatacac

SEQ ID NO: 2043117 - DNA, 25 bp, Homo sapien
tacatacaccacagcagaaccaaat

SEQ ID NO: 2043118 - DNA, 25 bp, Homo sapien
gatgcgtgggaaccttgctttgaag

SEQ ID NO: 2043119 - DNA, 25 bp, Homo sapien
gaagcaggcacaagattgttgccca

SEQ ID NO: 2043120 - DNA, 25 bp, Homo sapien
aggatgaagacatctgagctgggtc

SEQ ID NO: 2043121 - DNA, 25 bp, Homo sapien
agtcacaggatgttgggacctgtct

SEQ ID NO: 2043122 - DNA, 25 bp, Homo sapien
ggaagctggtgacttgggagcccag

SEQ ID NO: 2043123 - DNA, 25 bp, Homo sapien
gaactaaaaccatcctcttctgtgg

SEQ ID NO: 2043124 - DNA, 25 bp, Homo sapien
tatggtcttatgtaggctcctgaga

SEQ ID NO: 2043125 - DNA, 25 bp, Homo sapien
tgggaatgagtatctgaagcggcac

SEQ ID NO: 2043126 - DNA, 25 bp, Homo sapien
gatttccagccgtcacacttgggtt

SEQ ID NO: 2043127 - DNA, 25 bp, Homo sapien
ttaggccagtcagaaagtcttgggg

SEQ ID NO: 2043128 - DNA, 25 bp, Homo sapien
ggttaggccagtcagaaagtcttgg

SEQ ID NO: 2043129 - DNA, 25 bp, Homo sapien
gggttaggccagtcagaaagtcttg

SEQ ID NO: 2043130 - DNA, 25 bp, Homo sapien
agggttaggccagtcagaaagtctt

SEQ ID NO: 2043131 - DNA, 25 bp, Homo sapien
gccatgtgctcgggcaaatgtcaac

SEQ ID NO: 2043132 - DNA, 25 bp, Homo sapien
gtgctcgggcaaatgtcaacagtgg

SEQ ID NO: 2043133 - DNA, 25 bp, Homo sapien
ctgccccatgcgccatgtgctcggg

SEQ ID NO: 2043134 - DNA, 25 bp, Homo sapien
catgtgctcgggcaaatgtcaacag

SEQ ID NO: 2043135 - DNA, 25 bp, Homo sapien
ccagcagtaatcgaataacatccaa

SEQ ID NO: 2043136 - DNA, 25 bp, Homo sapien
aaccaccttgggcagctaggaagag

SEQ ID NO: 2043137 - DNA, 25 bp, Homo sapien
taaccaccttgggcagctaggaaga

SEQ ID NO: 2043138 - DNA, 25 bp, Homo sapien
taatcgaataacatccaagtaacca

SEQ ID NO: 2043139 - DNA, 25 bp, Homo sapien
tcatggatgtttgctccgtgcttca

SEQ ID NO: 2043140 - DNA, 25 bp, Homo sapien
tttgctccgtgcttcagcaaggtct

SEQ ID NO: 2043141 - DNA, 25 bp, Homo sapien
ctgcatgtgcccgtactgactggca

SEQ ID NO: 2043142 - DNA, 25 bp, Homo sapien
tactgactggcagccaacagggcgg

SEQ ID NO: 2043143 - DNA, 25 bp, Homo sapien
ggtcctaaattcagtggatgctcca

SEQ ID NO: 2043144 - DNA, 25 bp, Homo sapien
aaagagaaatctcacgacatcatta

SEQ ID NO: 2043145 - DNA, 25 bp, Homo sapien
tttggtcctaaattcagtggatgct

SEQ ID NO: 2043146 - DNA, 25 bp, Homo sapien
atctcacgacatcattatggccttg

SEQ ID NO: 2043147 - DNA, 25 bp, Homo sapien
tgggcggcaaagaatagggcagttg

SEQ ID NO: 2043148 - DNA, 25 bp, Homo sapien
ctgggcggcaaagaatagggcagtt

SEQ ID NO: 2043149 - DNA, 25 bp, Homo sapien
ggcggcaaagaatagggcagttgta

SEQ ID NO: 2043150 - DNA, 25 bp, Homo sapien
gcggcaaagaatagggcagttgtac

SEQ ID NO: 2043151 - DNA, 25 bp, Homo sapien
gaaaacttcagatctctgagcctgg

SEQ ID NO: 2043152 - DNA, 25 bp, Homo sapien
taactgctagtacgttgctggacct

SEQ ID NO: 2043153 - DNA, 25 bp, Homo sapien
gaaaagcaatgatggctcttgtccc

SEQ ID NO: 2043154 - DNA, 25 bp, Homo sapien
atatgcccgacaggctacgctcaaa

SEQ ID NO: 2043155 - DNA, 25 bp, Homo sapien
tgcagaaccagttccctcacacagt

SEQ ID NO: 2043156 - DNA, 25 bp, Homo sapien
agattgatgtctgctccttgcagaa

SEQ ID NO: 2043157 - DNA, 25 bp, Homo sapien
tcacacagtctatgtggccagcgta

SEQ ID NO: 2043158 - DNA, 25 bp, Homo sapien
cagcaaccatcaggagtgtggtgcc

SEQ ID NO: 2043159 - DNA, 25 bp, Homo sapien
tcatgcagcctagatgggaaaaagc

SEQ ID NO: 2043160 - DNA, 25 bp, Homo sapien
tcccactgtgatgtaggaaccagcc

SEQ ID NO: 2043161 - DNA, 25 bp, Homo sapien
gatgatcaccaaagtctgtcccagc

SEQ ID NO: 2043162 - DNA, 25 bp, Homo sapien
gttaggccactgctatgtcagagag

SEQ ID NO: 2043163 - DNA, 25 bp, Homo sapien
catgctgggcatgcatctaccgaac

SEQ ID NO: 2043164 - DNA, 25 bp, Homo sapien
taagttcaccacagtaccttggatg

SEQ ID NO: 2043165 - DNA, 25 bp, Homo sapien
tgaagtgcctctttccctattgtgg

SEQ ID NO: 2043166 - DNA, 25 bp, Homo sapien
aaagctctctaagtggtatctgcca

SEQ ID NO: 2043167 - DNA, 25 bp, Homo sapien
gcttcagcagcgccaggtttcctct

SEQ ID NO: 2043168 - DNA, 25 bp, Homo sapien
tcctggctgcccagaatgcagcatt

SEQ ID NO: 2043169 - DNA, 25 bp, Homo sapien
gcagcattggcaagtggagtttcct

SEQ ID NO: 2043170 - DNA, 25 bp, Homo sapien
cagtccacgtccacccggccgctgt

SEQ ID NO: 2043171 - DNA, 25 bp, Homo sapien
aaggagcttctctcaggcttgctgg

SEQ ID NO: 2043172 - DNA, 25 bp, Homo sapien
gagacagtgcacgtgaaaatacatc

SEQ ID NO: 2043173 - DNA, 25 bp, Homo sapien
tccagctaagatggaaagtccccaa

SEQ ID NO: 2043174 - DNA, 25 bp, Homo sapien
tagcaaggagtaaggcagcagtgac

SEQ ID NO: 2043175 - DNA, 25 bp, Homo sapien
agggtcggggactccttctgctgca

SEQ ID NO: 2043176 - DNA, 25 bp, Homo sapien
gggaggaggcatccgtgggtgcagc

SEQ ID NO: 2043177 - DNA, 25 bp, Homo sapien
gggcacagactcagccgatccacag

SEQ ID NO: 2043178 - DNA, 25 bp, Homo sapien
gccccgtcgccgggcacagactcag

SEQ ID NO: 2043179 - DNA, 25 bp, Homo sapien
agaggggcggcctccgacgccgcgc

SEQ ID NO: 2043180 - DNA, 25 bp, Homo sapien
ggggctctcggcgttccgcagaggg

SEQ ID NO: 2043181 - DNA, 25 bp, Homo sapien
gcccttcactctcccggggctctcg

SEQ ID NO: 2043182 - DNA, 25 bp, Homo sapien
cgggagccggcgcgctttgggcccg

SEQ ID NO: 2043183 - DNA, 25 bp, Homo sapien
tgctaacagtcttgtaaatccttgc

SEQ ID NO: 2043184 - DNA, 25 bp, Homo sapien
ttgcttgctgaagcagtctcttctt

SEQ ID NO: 2043185 - DNA, 25 bp, Homo sapien
gcttggctttaagtgaaggttccac

SEQ ID NO: 2043186 - DNA, 25 bp, Homo sapien
gggcatccgaatgttgccacctggc

SEQ ID NO: 2043187 - DNA, 25 bp, Homo sapien
tcagtgggcacgattggctttgatg

SEQ ID NO: 2043188 - DNA, 25 bp, Homo sapien
gcacgattggctttgatgccttcta

SEQ ID NO: 2043189 - DNA, 25 bp, Homo sapien
gattggctttgatgccttctatgaa

SEQ ID NO: 2043190 - DNA, 25 bp, Homo sapien
tttgatgccttctatgaaggtgtag

SEQ ID NO: 2043191 - DNA, 25 bp, Homo sapien
ccaaatctgcccctaaactcaaatt

SEQ ID NO: 2043192 - DNA, 25 bp, Homo sapien
accaaatctgcccctaaactcaaat

SEQ ID NO: 2043193 - DNA, 25 bp, Homo sapien
acgaccaaatctgcccctaaactca

SEQ ID NO: 2043194 - DNA, 25 bp, Homo sapien
gaccaaatctgcccctaaactcaaa

SEQ ID NO: 2043195 - DNA, 25 bp, Homo sapien
ttggctttcttgtcggcaaccaggg

SEQ ID NO: 2043196 - DNA, 25 bp, Homo sapien
ctttcttgtcggcaaccagggggca

SEQ ID NO: 2043197 - DNA, 25 bp, Homo sapien
gccttggctttcttgtcggcaacca

SEQ ID NO: 2043198 - DNA, 25 bp, Homo sapien
cagccttggctttcttgtcggcaac

SEQ ID NO: 2043199 - DNA, 25 bp, Homo sapien
tctgtaggtaactctattgacttcc

SEQ ID NO: 2043200 - DNA, 25 bp, Homo sapien
gtaactctattgacttcccctcttg

SEQ ID NO: 2043201 - DNA, 25 bp, Homo sapien
taggtaactctattgacttcccctc

SEQ ID NO: 2043202 - DNA, 25 bp, Homo sapien
ctctgtctgtaggtaactctattga

SEQ ID NO: 2043203 - DNA, 25 bp, Homo sapien
tgcggcataggatggcaggcacagt

SEQ ID NO: 2043204 - DNA, 25 bp, Homo sapien
ctgcggcataggatggcaggcacag

SEQ ID NO: 2043205 - DNA, 25 bp, Homo sapien
ctccaggggaagatgaaggtaatca

SEQ ID NO: 2043206 - DNA, 25 bp, Homo sapien
gggaagatgaaggtaatcacagaga

SEQ ID NO: 2043207 - DNA, 25 bp, Homo sapien
gaagatgaaggtaatcacagagata

SEQ ID NO: 2043208 - DNA, 25 bp, Homo sapien
aggggaagatgaaggtaatcacaga

SEQ ID NO: 2043209 - DNA, 25 bp, Homo sapien
acacattcttgtctgcgagctctgg

SEQ ID NO: 2043210 - DNA, 25 bp, Homo sapien
cgagctctgggtgcctaggcatgtg

SEQ ID NO: 2043211 - DNA, 25 bp, Homo sapien
tcacgtagcctttggacttgagaga

SEQ ID NO: 2043212 - DNA, 25 bp, Homo sapien
ggacacattcttgtctgcgagctct

SEQ ID NO: 2043213 - DNA, 25 bp, Homo sapien
ggtggctgtagggtctggagttgag

SEQ ID NO: 2043214 - DNA, 25 bp, Homo sapien
gtggctgtagggtctggagttgagg

SEQ ID NO: 2043215 - DNA, 25 bp, Homo sapien
atcaacatctcggtggctgtagggt

SEQ ID NO: 2043216 - DNA, 25 bp, Homo sapien
catctcggtggctgtagggtctgga

SEQ ID NO: 2043217 - DNA, 25 bp, Homo sapien
gaagacaatggcctcatgaacacag

SEQ ID NO: 2043218 - DNA, 25 bp, Homo sapien
caaacctgatccttgttgttggaga

SEQ ID NO: 2043219 - DNA, 25 bp, Homo sapien
ggcattaatagtccaaatctgagca

SEQ ID NO: 2043220 - DNA, 25 bp, Homo sapien
gtctttgtaaccaacaatgtggcca

SEQ ID NO: 2043221 - DNA, 25 bp, Homo sapien
ctgtttgatttggtgtttgttggct

SEQ ID NO: 2043222 - DNA, 25 bp, Homo sapien
caggcctaatcagggtgttgacttt

SEQ ID NO: 2043223 - DNA, 25 bp, Homo sapien
gcctaatcagggtgttgactttggc

SEQ ID NO: 2043224 - DNA, 25 bp, Homo sapien
cacagcctgtttgatttggtgtttg

SEQ ID NO: 2043225 - DNA, 25 bp, Homo sapien
cctctggagtcgccgtgtcgtgggc

SEQ ID NO: 2043226 - DNA, 25 bp, Homo sapien
gctgcctctggagtcgccgtgtcgt

SEQ ID NO: 2043227 - DNA, 25 bp, Homo sapien
ctggagtcgccgtgtcgtgggccgc

SEQ ID NO: 2043228 - DNA, 25 bp, Homo sapien
ctgcctctggagtcgccgtgtcgtg

SEQ ID NO: 2043229 - DNA, 25 bp, Homo sapien
cttcagctttaggagggacaggagc

SEQ ID NO: 2043230 - DNA, 25 bp, Homo sapien
agcttccttcttcgccttcggcgcc

SEQ ID NO: 2043231 - DNA, 25 bp, Homo sapien
caaaaccttcgttttggcttcagct

SEQ ID NO: 2043232 - DNA, 25 bp, Homo sapien
ggagcttccttcttcgccttcggcg

SEQ ID NO: 2043233 - DNA, 25 bp, Homo sapien
tctgtccacttacgcctgttctgtg

SEQ ID NO: 2043234 - DNA, 25 bp, Homo sapien
gcccaagccctcttgtgacccagat

SEQ ID NO: 2043235 - DNA, 25 bp, Homo sapien
gagcttcagagctattcagatacat

SEQ ID NO: 2043236 - DNA, 25 bp, Homo sapien
gatttggtgatgtagttcaagatac

SEQ ID NO: 2043237 - DNA, 25 bp, Homo sapien
cctttagtcccggaatagttgtgct

SEQ ID NO: 2043238 - DNA, 25 bp, Homo sapien
tgacgctcccgtcctgtctgtgctg

SEQ ID NO: 2043239 - DNA, 25 bp, Homo sapien
tgatggcaatgtacgtgacgctccc

SEQ ID NO: 2043240 - DNA, 25 bp, Homo sapien
tccctctcgcaggatgctgtcatga

SEQ ID NO: 2043241 - DNA, 25 bp, Homo sapien
aaatgggatgtagatgaatacaagc

SEQ ID NO: 2043242 - DNA, 25 bp, Homo sapien
ggttccaacatttcatccctatctg

SEQ ID NO: 2043243 - DNA, 25 bp, Homo sapien
ttttgtgtgcaaacctcattacagg

SEQ ID NO: 2043244 - DNA, 25 bp, Homo sapien
tcttacttagaatacgctgtccggg

SEQ ID NO: 2043245 - DNA, 25 bp, Homo sapien
catggcatgaagaagacatacactt

SEQ ID NO: 2043246 - DNA, 25 bp, Homo sapien
tggcatgaagaagacatacacttca

SEQ ID NO: 2043247 - DNA, 25 bp, Homo sapien
cagtcatggcatgaagaagacatac

SEQ ID NO: 2043248 - DNA, 25 bp, Homo sapien
tggtgtgcagtcatggcatgaagaa

SEQ ID NO: 2043249 - DNA, 25 bp, Homo sapien
tcaggctcagggtattctgaatgtc

SEQ ID NO: 2043250 - DNA, 25 bp, Homo sapien
ggctcagggtattctgaatgtcctg

SEQ ID NO: 2043251 - DNA, 25 bp, Homo sapien
ctcctttcaggctcagggtattctg

SEQ ID NO: 2043252 - DNA, 25 bp, Homo sapien
ctttcaggctcagggtattctgaat

SEQ ID NO: 2043253 - DNA, 25 bp, Homo sapien
tactccatgtcccttctggggtagg

SEQ ID NO: 2043254 - DNA, 25 bp, Homo sapien
ccctggctcctgttgtactccatgt

SEQ ID NO: 2043255 - DNA, 25 bp, Homo sapien
ctccctggctcctgttgtactccat

SEQ ID NO: 2043256 - DNA, 25 bp, Homo sapien
tccatgtcccttctggggtaggctg

SEQ ID NO: 2043257 - DNA, 25 bp, Homo sapien
tagacgcataaaggaggcctctgag

SEQ ID NO: 2043258 - DNA, 25 bp, Homo sapien
gataaatcccacacatgtaaggcca

SEQ ID NO: 2043259 - DNA, 25 bp, Homo sapien
cagggatgccacgaccaagacgttt

SEQ ID NO: 2043260 - DNA, 25 bp, Homo sapien
ccgtggagctttctgtagtacatca

SEQ ID NO: 2043261 - DNA, 25 bp, Homo sapien
ggtacgggctatgctcgagttccaa

SEQ ID NO: 2043262 - DNA, 25 bp, Homo sapien
gacagacaattcagaccaccgtgga

SEQ ID NO: 2043263 - DNA, 25 bp, Homo sapien
caccgtggatagaggcttgctgttc

SEQ ID NO: 2043264 - DNA, 25 bp, Homo sapien
tgtcagagtatgagagcacatccag

SEQ ID NO: 2043265 - DNA, 25 bp, Homo sapien
cacgatgggtccaccattgttccat

SEQ ID NO: 2043266 - DNA, 25 bp, Homo sapien
ttccatcttcgttcagtggattggg

SEQ ID NO: 2043267 - DNA, 25 bp, Homo sapien
gattggggactggaaacagtgcatc

SEQ ID NO: 2043268 - DNA, 25 bp, Homo sapien
gggactggaaacagtgcatctccct

SEQ ID NO: 2043269 - DNA, 25 bp, Homo sapien
aagcaatcgtgggtctgcacgggcc

SEQ ID NO: 2043270 - DNA, 25 bp, Homo sapien
taaagcaatcgtgggtctgcacggg

SEQ ID NO: 2043271 - DNA, 25 bp, Homo sapien
tgtaaagcaatcgtgggtctgcacg

SEQ ID NO: 2043272 - DNA, 25 bp, Homo sapien
ctgtaaagcaatcgtgggtctgcac

SEQ ID NO: 2043273 - DNA, 25 bp, Homo sapien
gaatatgaacccaccaaagcttgcc

SEQ ID NO: 2043274 - DNA, 25 bp, Homo sapien
gatgggcagcagacatttacattca

SEQ ID NO: 2043275 - DNA, 25 bp, Homo sapien
taagtttgccttaatccctaatgcc

SEQ ID NO: 2043276 - DNA, 25 bp, Homo sapien
gaactaacactatcaggtcaaagga

SEQ ID NO: 2043277 - DNA, 25 bp, Homo sapien
tgtttagctctgaggggcgatcctg

SEQ ID NO: 2043278 - DNA, 25 bp, Homo sapien
gtttagctctgaggggcgatcctgc

SEQ ID NO: 2043279 - DNA, 25 bp, Homo sapien
tgggtgtttagctctgaggggcgat

SEQ ID NO: 2043280 - DNA, 25 bp, Homo sapien
ggtgtttagctctgaggggcgatcc

SEQ ID NO: 2043281 - DNA, 25 bp, Homo sapien
cacggacgcagccaggttttcagaa

SEQ ID NO: 2043282 - DNA, 25 bp, Homo sapien
tcaggcaggattaccaggatttcac

SEQ ID NO: 2043283 - DNA, 25 bp, Homo sapien
gctgaactctcttcgcagcactggg

SEQ ID NO: 2043284 - DNA, 25 bp, Homo sapien
gttttcagaatgcatcacactcgag

SEQ ID NO: 2043285 - DNA, 25 bp, Homo sapien
tgatcctaccatgacttgctgcctg

SEQ ID NO: 2043286 - DNA, 25 bp, Homo sapien
tctgatcctaccatgacttgctgcc

SEQ ID NO: 2043287 - DNA, 25 bp, Homo sapien
ccctcctctgatcctaccatgactt

SEQ ID NO: 2043288 - DNA, 25 bp, Homo sapien
cctctgatcctaccatgacttgctg

SEQ ID NO: 2043289 - DNA, 25 bp, Homo sapien
cctgagagctggtgctgtcaatgtt

SEQ ID NO: 2043290 - DNA, 25 bp, Homo sapien
caggcagggaaagccgtgaccacag

SEQ ID NO: 2043291 - DNA, 25 bp, Homo sapien
ctgagagctggtgctgtcaatgttg

SEQ ID NO: 2043292 - DNA, 25 bp, Homo sapien
gggaaagccgtgaccacagagcttg

SEQ ID NO: 2043293 - DNA, 25 bp, Homo sapien
gaggctgggctagccaacttgccga

SEQ ID NO: 2043294 - DNA, 25 bp, Homo sapien
aaggaggctgggctagccaacttgc

SEQ ID NO: 2043295 - DNA, 25 bp, Homo sapien
gctagccaacttgccgaatttctca

SEQ ID NO: 2043296 - DNA, 25 bp, Homo sapien
gctgggctagccaacttgccgaatt

SEQ ID NO: 2043297 - DNA, 25 bp, Homo sapien
ctgaccctgccactccacgtgcata

SEQ ID NO: 2043298 - DNA, 25 bp, Homo sapien
cgctgaccctgccactccacgtgca

SEQ ID NO: 2043299 - DNA, 25 bp, Homo sapien
ctgccactccacgtgcataatcatg

SEQ ID NO: 2043300 - DNA, 25 bp, Homo sapien
gccactccacgtgcataatcatggg

SEQ ID NO: 2043301 - DNA, 25 bp, Homo sapien
atgggtccagcaccgctaagccaca

SEQ ID NO: 2043302 - DNA, 25 bp, Homo sapien
gcaaggaatggtgcacgctggaccc

SEQ ID NO: 2043303 - DNA, 25 bp, Homo sapien
ctctccttatttcaccagggagtcc

SEQ ID NO: 2043304 - DNA, 25 bp, Homo sapien
agtcctgcagcaaggaatggtgcac

SEQ ID NO: 2043305 - DNA, 25 bp, Homo sapien
tagccactgtcagcactagcttcca

SEQ ID NO: 2043306 - DNA, 25 bp, Homo sapien
taggacttagctatccacgttgatc

SEQ ID NO: 2043307 - DNA, 25 bp, Homo sapien
ttaataggacttagctatccacgtt

SEQ ID NO: 2043308 - DNA, 25 bp, Homo sapien
acttagctatccacgttgatcccag

SEQ ID NO: 2043309 - DNA, 25 bp, Homo sapien
tccactcaggaatcgatgcagcaca

SEQ ID NO: 2043310 - DNA, 25 bp, Homo sapien
tgggctccgctctaatgctctgtga

SEQ ID NO: 2043311 - DNA, 25 bp, Homo sapien
tgcaaaggatttcccgagcaggcag

SEQ ID NO: 2043312 - DNA, 25 bp, Homo sapien
tgctcagcattagggacagaaggtg

SEQ ID NO: 2043313 - DNA, 25 bp, Homo sapien
cagcttctctcttcgggcaaagcta

SEQ ID NO: 2043314 - DNA, 25 bp, Homo sapien
cacagaggggcagcgatggacaaat

SEQ ID NO: 2043315 - DNA, 25 bp, Homo sapien
gacatcatggcaaccagctaacatg

SEQ ID NO: 2043316 - DNA, 25 bp, Homo sapien
tccttgtcagagtcggcctgtccag

SEQ ID NO: 2043317 - DNA, 25 bp, Homo sapien
gccagagcccgctgccaatgcttca

SEQ ID NO: 2043318 - DNA, 25 bp, Homo sapien
gcccgctgccaatgcttcaggccca

SEQ ID NO: 2043319 - DNA, 25 bp, Homo sapien
agagccagagcccgctgccaatgct

SEQ ID NO: 2043320 - DNA, 25 bp, Homo sapien
agcccgctgccaatgcttcaggccc

SEQ ID NO: 2043321 - DNA, 25 bp, Homo sapien
gagataaaatcaattgtagtaacca

SEQ ID NO: 2043322 - DNA, 25 bp, Homo sapien
ccaaaacctttgtgtgagagcccat

SEQ ID NO: 2043323 - DNA, 25 bp, Homo sapien
aaccaaaggaaatcagtctgtattt

SEQ ID NO: 2043324 - DNA, 25 bp, Homo sapien
tctgtcatgaactttaaagaccaag

SEQ ID NO: 2043325 - DNA, 25 bp, Homo sapien
ttaagccactcagttcacggtactt

SEQ ID NO: 2043326 - DNA, 25 bp, Homo sapien
ctcagttcacggtactttttaatag

SEQ ID NO: 2043327 - DNA, 25 bp, Homo sapien
cagttcacggtactttttaatagca

SEQ ID NO: 2043328 - DNA, 25 bp, Homo sapien
gccactcagttcacggtacttttta

SEQ ID NO: 2043329 - DNA, 25 bp, Homo sapien
gcagggcctcaagtataactcataa

SEQ ID NO: 2043330 - DNA, 25 bp, Homo sapien
agatccaaagttccagcagcctgta

SEQ ID NO: 2043331 - DNA, 25 bp, Homo sapien
cctgtctgcacaacggactgtgtga

SEQ ID NO: 2043332 - DNA, 25 bp, Homo sapien
gaactagccccacaaagagtgctct

SEQ ID NO: 2043333 - DNA, 25 bp, Homo sapien
tacaacgtactgtttcccaaggatg

SEQ ID NO: 2043334 - DNA, 25 bp, Homo sapien
taacttgggatctggcattcagtgc

SEQ ID NO: 2043335 - DNA, 25 bp, Homo sapien
ccatgaaggatggtgacactgctga

SEQ ID NO: 2043336 - DNA, 25 bp, Homo sapien
tacacatgacacttaaggagtggca

SEQ ID NO: 2043337 - DNA, 25 bp, Homo sapien
tggtcatatgaacgccaaagctttg

SEQ ID NO: 2043338 - DNA, 25 bp, Homo sapien
caaagctttgcaagaataattggca

SEQ ID NO: 2043339 - DNA, 25 bp, Homo sapien
tgagaatagaacacactttggcagc

SEQ ID NO: 2043340 - DNA, 25 bp, Homo sapien
tgccccactgcgcaaatgttggtgg

SEQ ID NO: 2043341 - DNA, 25 bp, Homo sapien
gacgataggagagtccacagatgca

SEQ ID NO: 2043342 - DNA, 25 bp, Homo sapien
cctggagaaactcaaaggcgcttgt

SEQ ID NO: 2043343 - DNA, 25 bp, Homo sapien
cagtggtgtgttggaaaaaggcatc

SEQ ID NO: 2043344 - DNA, 25 bp, Homo sapien
gatttctagacaagtcatctgctca

SEQ ID NO: 2043345 - DNA, 25 bp, Homo sapien
tcataagcagttgccagagctcctg

SEQ ID NO: 2043346 - DNA, 25 bp, Homo sapien
ggtgtgtctcttgacccaatttgag

SEQ ID NO: 2043347 - DNA, 25 bp, Homo sapien
cgatgggaagcaaagccgctgctga

SEQ ID NO: 2043348 - DNA, 25 bp, Homo sapien
caatttgaggtgctccagacaggcc

SEQ ID NO: 2043349 - DNA, 25 bp, Homo sapien
gtggcaaccgactcctgaggacagt

SEQ ID NO: 2043350 - DNA, 25 bp, Homo sapien
cctgaggacagtttcagagtaaggt

SEQ ID NO: 2043351 - DNA, 25 bp, Homo sapien
tcagagtaaggttgaaaaacaagat

SEQ ID NO: 2043352 - DNA, 25 bp, Homo sapien
tttataggatagttgagtggcaacc

SEQ ID NO: 2043353 - DNA, 25 bp, Homo sapien
aactagtttattgtatgtgccgagc

SEQ ID NO: 2043354 - DNA, 25 bp, Homo sapien
tacacttcttacttgtatcctgcct

SEQ ID NO: 2043355 - DNA, 25 bp, Homo sapien
gcttcagactagacatttgggatac

SEQ ID NO: 2043356 - DNA, 25 bp, Homo sapien
tactgattatatccacataaggcag

SEQ ID NO: 2043357 - DNA, 25 bp, Homo sapien
tcagccagctctgtaacatggaaag

SEQ ID NO: 2043358 - DNA, 25 bp, Homo sapien
caccctttggacctaggctagaggc

SEQ ID NO: 2043359 - DNA, 25 bp, Homo sapien
tattcatcaagtacccattgagggc

SEQ ID NO: 2043360 - DNA, 25 bp, Homo sapien
tgagggcattctgggtgctgaaccc

SEQ ID NO: 2043361 - DNA, 25 bp, Homo sapien
tctactgaaaatacacagttagctg

SEQ ID NO: 2043362 - DNA, 25 bp, Homo sapien
tgcttgaacccgggatgcgaaagtt

SEQ ID NO: 2043363 - DNA, 25 bp, Homo sapien
agcctgacctacatagtgaaatcct

SEQ ID NO: 2043364 - DNA, 25 bp, Homo sapien
ctgacctacatagtgaaatcctgtc

SEQ ID NO: 2043365 - DNA, 25 bp, Homo sapien
tccacctcaaaggctatgtggcctt

SEQ ID NO: 2043366 - DNA, 25 bp, Homo sapien
ccacctcaaaggctatgtggccttc

SEQ ID NO: 2043367 - DNA, 25 bp, Homo sapien
ctccacctcaaaggctatgtggcct

SEQ ID NO: 2043368 - DNA, 25 bp, Homo sapien
ggcacagggttaagagcaccccaca

SEQ ID NO: 2043369 - DNA, 25 bp, Homo sapien
caggcacagggttaagagcacccca

SEQ ID NO: 2043370 - DNA, 25 bp, Homo sapien
gcacagggttaagagcaccccacat

SEQ ID NO: 2043371 - DNA, 25 bp, Homo sapien
aggcacagggttaagagcaccccac

SEQ ID NO: 2043372 - DNA, 25 bp, Homo sapien
gattggtgcgtgtcttctgtggcta

SEQ ID NO: 2043373 - DNA, 25 bp, Homo sapien
cctggtcagcattcataaacggtga

SEQ ID NO: 2043374 - DNA, 25 bp, Homo sapien
gattgaatgctgcagtttcaacctt

SEQ ID NO: 2043375 - DNA, 25 bp, Homo sapien
tctgtggctacctggtcagcattca

SEQ ID NO: 2043376 - DNA, 25 bp, Homo sapien
cattggtgcccttgtttccccgagg

SEQ ID NO: 2043377 - DNA, 25 bp, Homo sapien
cctgcagtgacgtgctgaggagagg

SEQ ID NO: 2043378 - DNA, 25 bp, Homo sapien
tgaagatcacctgctgactcattgg

SEQ ID NO: 2043379 - DNA, 25 bp, Homo sapien
agtgttcccgagtcacaggctgtcc

SEQ ID NO: 2043380 - DNA, 25 bp, Homo sapien
cacctccctgcaagtgtagggcagt

SEQ ID NO: 2043381 - DNA, 25 bp, Homo sapien
gggagggaagtccacctccctgcaa

SEQ ID NO: 2043382 - DNA, 25 bp, Homo sapien
gcagtgagaggagccctggcaccag

SEQ ID NO: 2043383 - DNA, 25 bp, Homo sapien
ggaagtccacctccctgcaagtgta

SEQ ID NO: 2043384 - DNA, 25 bp, Homo sapien
catttgagagtttgctgggtcccag

SEQ ID NO: 2043385 - DNA, 25 bp, Homo sapien
tcactgggagtaagtagagcggaca

SEQ ID NO: 2043386 - DNA, 25 bp, Homo sapien
tagcgattgagagacttctgggcca

SEQ ID NO: 2043387 - DNA, 25 bp, Homo sapien
gagtgacatcttcagcggcgggaaa

SEQ ID NO: 2043388 - DNA, 25 bp, Homo sapien
atatatatgatctgaagggtaactg

SEQ ID NO: 2043389 - DNA, 25 bp, Homo sapien
cattacaagatcataaggaacttcg

SEQ ID NO: 2043390 - DNA, 25 bp, Homo sapien
cactgtatacctgagtctgaattca

SEQ ID NO: 2043391 - DNA, 25 bp, Homo sapien
tgacaaccaattgaatcagtgagct

SEQ ID NO: 2043392 - DNA, 25 bp, Homo sapien
agaaacactcttagtctttgggtgg

SEQ ID NO: 2043393 - DNA, 25 bp, Homo sapien
tgagtacactgtcccattaggttga

SEQ ID NO: 2043394 - DNA, 25 bp, Homo sapien
ggcctgcgtgccgtgacttatccaa

SEQ ID NO: 2043395 - DNA, 25 bp, Homo sapien
taatttgacacacttggaggcatgg

SEQ ID NO: 2043396 - DNA, 25 bp, Homo sapien
gaatctttaaaatacggctgttgcc

SEQ ID NO: 2043397 - DNA, 25 bp, Homo sapien
aatctggagaaaaggcgcaccctgc

SEQ ID NO: 2043398 - DNA, 25 bp, Homo sapien
tataaaaacgctcgcaagcgccaag

SEQ ID NO: 2043399 - DNA, 25 bp, Homo sapien
gaagctcttaagagcgcggccggaa

SEQ ID NO: 2043400 - DNA, 25 bp, Homo sapien
gacctagcgcaaaacgagcactgac

SEQ ID NO: 2043401 - DNA, 25 bp, Homo sapien
cagtaccctgaatctccatgagttg

SEQ ID NO: 2043402 - DNA, 25 bp, Homo sapien
tctcgtatctcttgttaggccctgc

SEQ ID NO: 2043403 - DNA, 25 bp, Homo sapien
ttgggcagttatgtacttcagtacc

SEQ ID NO: 2043404 - DNA, 25 bp, Homo sapien
taggccctgctgcttatacacttgt

SEQ ID NO: 2043405 - DNA, 25 bp, Homo sapien
tcttagtaggctcaaatgttcagga

SEQ ID NO: 2043406 - DNA, 25 bp, Homo sapien
tccaacttatgtgatgggcgacacc

SEQ ID NO: 2043407 - DNA, 25 bp, Homo sapien
cctaaggatccacagtttcagcagc

SEQ ID NO: 2043408 - DNA, 25 bp, Homo sapien
gacatgctgtcgtttcacagtcaga

SEQ ID NO: 2043409 - DNA, 25 bp, Homo sapien
cagctttgcagggtgcgcccaggct

SEQ ID NO: 2043410 - DNA, 25 bp, Homo sapien
tcagatgtaaactgacacctgagta

SEQ ID NO: 2043411 - DNA, 25 bp, Homo sapien
tattaggtagggtgttcaggctcag

SEQ ID NO: 2043412 - DNA, 25 bp, Homo sapien
cacctgagtatgagaagaagccagc

SEQ ID NO: 2043413 - DNA, 25 bp, Homo sapien
taccacaaggacttctttcgtagga

SEQ ID NO: 2043414 - DNA, 25 bp, Homo sapien
cactatgcatgccaggtaactggtt

SEQ ID NO: 2043415 - DNA, 25 bp, Homo sapien
gtaggacacgtctaacaatttagga

SEQ ID NO: 2043416 - DNA, 25 bp, Homo sapien
taggatagtattaagtggcaacatt

SEQ ID NO: 2043417 - DNA, 25 bp, Homo sapien
caattaaaatcacggactggcagct

SEQ ID NO: 2043418 - DNA, 25 bp, Homo sapien
cctgggagcagtatctcagtctggg

SEQ ID NO: 2043419 - DNA, 25 bp, Homo sapien
cactggaagtggaagcatttaacaa

SEQ ID NO: 2043420 - DNA, 25 bp, Homo sapien
tgtagattagccaaacaccctgact

SEQ ID NO: 2043421 - DNA, 25 bp, Homo sapien
gggattaggaccttgatggaaccac

SEQ ID NO: 2043422 - DNA, 25 bp, Homo sapien
taataaatgtcaggcaaattgaagt

SEQ ID NO: 2043423 - DNA, 25 bp, Homo sapien
cagtcctgtgctccattgtagggat

SEQ ID NO: 2043424 - DNA, 25 bp, Homo sapien
tcaggcaaattgaagtaatttctgt

SEQ ID NO: 2043425 - DNA, 25 bp, Homo sapien
gatttcccaccaggatctagcaagc

SEQ ID NO: 2043426 - DNA, 25 bp, Homo sapien
caagctacttgacagaagcagggtc

SEQ ID NO: 2043427 - DNA, 25 bp, Homo sapien
tgcaaaaggcatatggatttcccac

SEQ ID NO: 2043428 - DNA, 25 bp, Homo sapien
gaaactatggaaaatcacaggctgt

SEQ ID NO: 2043429 - DNA, 25 bp, Homo sapien
ggatccggcactcccactactgggt

SEQ ID NO: 2043430 - DNA, 25 bp, Homo sapien
aagggatacctgcatccccacgttt

SEQ ID NO: 2043431 - DNA, 25 bp, Homo sapien
aacttaactaccataggatccggca

SEQ ID NO: 2043432 - DNA, 25 bp, Homo sapien
gcatccccacgtttatgacagcaca

SEQ ID NO: 2043433 - DNA, 25 bp, Homo sapien
cacaccccctgactcaggcacgcac

SEQ ID NO: 2043434 - DNA, 25 bp, Homo sapien
ccacaccccctgactcaggcacgca

SEQ ID NO: 2043435 - DNA, 25 bp, Homo sapien
tgtttttgcgggctgctctttgttt

SEQ ID NO: 2043436 - DNA, 25 bp, Homo sapien
cttggacctgtttttgcgggctgct

SEQ ID NO: 2043437 - DNA, 25 bp, Homo sapien
tttgcgggctgctctttgtttttcc

SEQ ID NO: 2043438 - DNA, 25 bp, Homo sapien
cagtcctcttctgacttggacctgt

SEQ ID NO: 2043439 - DNA, 25 bp, Homo sapien
tctgtcttgggaatcacactctcca

SEQ ID NO: 2043440 - DNA, 25 bp, Homo sapien
ctgtcttgggaatcacactctccat

SEQ ID NO: 2043441 - DNA, 25 bp, Homo sapien
ggccgtaacctgcagtctgtcttgg

SEQ ID NO: 2043442 - DNA, 25 bp, Homo sapien
gtctgtcttgggaatcacactctcc

SEQ ID NO: 2043443 - DNA, 25 bp, Homo sapien
gaatccggcactggcatttcatcca

SEQ ID NO: 2043444 - DNA, 25 bp, Homo sapien
ggccgtggggctattcgccatagaa

SEQ ID NO: 2043445 - DNA, 25 bp, Homo sapien
agaacgcttccagggataatgaata

SEQ ID NO: 2043446 - DNA, 25 bp, Homo sapien
acactttcagaatccggcactggca

SEQ ID NO: 2043447 - DNA, 25 bp, Homo sapien
tcagccatccgcactctgtgaagag

SEQ ID NO: 2043448 - DNA, 25 bp, Homo sapien
ctcctattagcaggagctgccgcca

SEQ ID NO: 2043449 - DNA, 25 bp, Homo sapien
tcgtctttgtcaaggtgcctcctat

SEQ ID NO: 2043450 - DNA, 25 bp, Homo sapien
atttagggaatataaggaatgttct

SEQ ID NO: 2043451 - DNA, 25 bp, Homo sapien
aacattcagtccacttcccatagag

SEQ ID NO: 2043452 - DNA, 25 bp, Homo sapien
tggcagggtcaacactgtataaaca

SEQ ID NO: 2043453 - DNA, 25 bp, Homo sapien
gtccacttcccatagagggcacaga

SEQ ID NO: 2043454 - DNA, 25 bp, Homo sapien
tgtaagcgtcaaacgtggcagggtc

SEQ ID NO: 2043455 - DNA, 25 bp, Homo sapien
actgatgtttagttaacaaaccagt

SEQ ID NO: 2043456 - DNA, 25 bp, Homo sapien
ctgatgtttagttaacaaaccagtg

SEQ ID NO: 2043457 - DNA, 25 bp, Homo sapien
tcaggcgtgttcagggtggcatcgc

SEQ ID NO: 2043458 - DNA, 25 bp, Homo sapien
tccaagagcagatgagatcaggcgt

SEQ ID NO: 2043459 - DNA, 25 bp, Homo sapien
cttccaagagcagatgagatcaggc

SEQ ID NO: 2043460 - DNA, 25 bp, Homo sapien
cgtgttcagggtggcatcgccatag

SEQ ID NO: 2043461 - DNA, 25 bp, Homo sapien
gttttgctgcaattgaatattacta

SEQ ID NO: 2043462 - DNA, 25 bp, Homo sapien
tactataaaggtgtgtacgactcac

SEQ ID NO: 2043463 - DNA, 25 bp, Homo sapien
ggtgtgtacgactcacagagtctca

SEQ ID NO: 2043464 - DNA, 25 bp, Homo sapien
gcgccactacgcctgcctaattaaa

SEQ ID NO: 2043465 - DNA, 25 bp, Homo sapien
taccaaaaaggccacatggcttaaa

SEQ ID NO: 2043466 - DNA, 25 bp, Homo sapien
ttttatcttgaatgtagccttcaac

SEQ ID NO: 2043467 - DNA, 25 bp, Homo sapien
tcaactttgtgtaattccttaccaa

SEQ ID NO: 2043468 - DNA, 25 bp, Homo sapien
attcaacacacatttgtccccagtc

SEQ ID NO: 2043469 - DNA, 25 bp, Homo sapien
caatgatattatgcacacagcaggt

SEQ ID NO: 2043470 - DNA, 25 bp, Homo sapien
tgtccatgtatatgcctcattgtgt

SEQ ID NO: 2043471 - DNA, 25 bp, Homo sapien
ccacagtttacccacaatgatatta

SEQ ID NO: 2043472 - DNA, 25 bp, Homo sapien
ccacattgccatactgttcgatcca

SEQ ID NO: 2043473 - DNA, 25 bp, Homo sapien
aaagtacacttgttccaaatgccat

SEQ ID NO: 2043474 - DNA, 25 bp, Homo sapien
tactcagaataacaaaccaggctgc

SEQ ID NO: 2043475 - DNA, 25 bp, Homo sapien
gagataactacgttctaagccttta

SEQ ID NO: 2043476 - DNA, 25 bp, Homo sapien
tttctagagaaagtaccctccagct

SEQ ID NO: 2043477 - DNA, 25 bp, Homo sapien
tgaggcccttgtgtacccttctggg

SEQ ID NO: 2043478 - DNA, 25 bp, Homo sapien
cctgaatattgtaagactctgtcct

SEQ ID NO: 2043479 - DNA, 25 bp, Homo sapien
tgagcgtaggaactcataatgcagc

SEQ ID NO: 2043480 - DNA, 25 bp, Homo sapien
tcaaagcctctgtagtgctgctcag

SEQ ID NO: 2043481 - DNA, 25 bp, Homo sapien
aaggagctccaaggtgatggttcct

SEQ ID NO: 2043482 - DNA, 25 bp, Homo sapien
caaggagctccaaggtgatggttcc

SEQ ID NO: 2043483 - DNA, 25 bp, Homo sapien
tcaaggagctccaaggtgatggttc

SEQ ID NO: 2043484 - DNA, 25 bp, Homo sapien
taatgatgggtgcaagcccaccact

SEQ ID NO: 2043485 - DNA, 25 bp, Homo sapien
tgatgggtgcaagcccaccactgac

SEQ ID NO: 2043486 - DNA, 25 bp, Homo sapien
ctaatgatgggtgcaagcccaccac

SEQ ID NO: 2043487 - DNA, 25 bp, Homo sapien
aatgatgggtgcaagcccaccactg

SEQ ID NO: 2043488 - DNA, 25 bp, Homo sapien
ctaattcataagtctctcccagcag

SEQ ID NO: 2043489 - DNA, 25 bp, Homo sapien
cactaattcataagtctctcccagc

SEQ ID NO: 2043490 - DNA, 25 bp, Homo sapien
cgcactaattcataagtctctccca

SEQ ID NO: 2043491 - DNA, 25 bp, Homo sapien
gcactaattcataagtctctcccag

SEQ ID NO: 2043492 - DNA, 25 bp, Homo sapien
gcagatacagcaaacgcagctacac

SEQ ID NO: 2043493 - DNA, 25 bp, Homo sapien
ttttccagtccgttcccactgagaa

SEQ ID NO: 2043494 - DNA, 25 bp, Homo sapien
cagatacagcaaacgcagctacaca

SEQ ID NO: 2043495 - DNA, 25 bp, Homo sapien
gttttccagtccgttcccactgaga

SEQ ID NO: 2043496 - DNA, 25 bp, Homo sapien
tgtattcagttaggcgctgtaggaa

SEQ ID NO: 2043497 - DNA, 25 bp, Homo sapien
ttcagttaggcgctgtaggaagctc

SEQ ID NO: 2043498 - DNA, 25 bp, Homo sapien
agttaggcgctgtaggaagctcaga

SEQ ID NO: 2043499 - DNA, 25 bp, Homo sapien
tccatgtattcagttaggcgctgta

SEQ ID NO: 2043500 - DNA, 25 bp, Homo sapien
caatcttgcaactctaaagcaatgc

SEQ ID NO: 2043501 - DNA, 25 bp, Homo sapien
taaagcaatgctgcgtgcactgcca

SEQ ID NO: 2043502 - DNA, 25 bp, Homo sapien
agccaatgacaaagagggtggtgtg

SEQ ID NO: 2043503 - DNA, 25 bp, Homo sapien
ctagggatgcaatcttgcaactcta

SEQ ID NO: 2043504 - DNA, 25 bp, Homo sapien
gtgtttactgaaccacagtgtgggc

SEQ ID NO: 2043505 - DNA, 25 bp, Homo sapien
cagtgtgggcacctcagtgcaacca

SEQ ID NO: 2043506 - DNA, 25 bp, Homo sapien
gctggacaacacctacacaggaatg

SEQ ID NO: 2043507 - DNA, 25 bp, Homo sapien
ccagagtgaaagacacgcaggcaga

SEQ ID NO: 2043508 - DNA, 25 bp, Homo sapien
tacactggatggaatgctactcacg

SEQ ID NO: 2043509 - DNA, 25 bp, Homo sapien
tttgaacacacacaagggcagcacg

SEQ ID NO: 2043510 - DNA, 25 bp, Homo sapien
tattgagcgcaacgttaaaccagga

SEQ ID NO: 2043511 - DNA, 25 bp, Homo sapien
caaagtgggtatctctgcagcggac

SEQ ID NO: 2043512 - DNA, 25 bp, Homo sapien
cattccaatacattttctgaggatg

SEQ ID NO: 2043513 - DNA, 25 bp, Homo sapien
gatgctccagatactgaagtcattt

SEQ ID NO: 2043514 - DNA, 25 bp, Homo sapien
tccaatacattttctgaggatgctc

SEQ ID NO: 2043515 - DNA, 25 bp, Homo sapien
gaggatgctccagatactgaagtca

SEQ ID NO: 2043516 - DNA, 25 bp, Homo sapien
gaaaacataggagaaggcaaacttg

SEQ ID NO: 2043517 - DNA, 25 bp, Homo sapien
aaacataggagaaggcaaacttgtt

SEQ ID NO: 2043518 - DNA, 25 bp, Homo sapien
aaaacataggagaaggcaaacttgt

SEQ ID NO: 2043519 - DNA, 25 bp, Homo sapien
taagcagggctaatctagggttgca

SEQ ID NO: 2043520 - DNA, 25 bp, Homo sapien
gaccctgttgttggatttatggcac

SEQ ID NO: 2043521 - DNA, 25 bp, Homo sapien
gtgtcatcacagacagggctaagca

SEQ ID NO: 2043522 - DNA, 25 bp, Homo sapien
tcacgttatggcacatctgaccctg

SEQ ID NO: 2043523 - DNA, 25 bp, Homo sapien
ggtctgtgcagtggccctattccct

SEQ ID NO: 2043524 - DNA, 25 bp, Homo sapien
tctacataaagatagctaggtctct

SEQ ID NO: 2043525 - DNA, 25 bp, Homo sapien
tatccccaggctagctttaaagagt

SEQ ID NO: 2043526 - DNA, 25 bp, Homo sapien
tctatctcggttcaaaagacccttg

SEQ ID NO: 2043527 - DNA, 25 bp, Homo sapien
tgcgctcagcctcttatgtcactta

SEQ ID NO: 2043528 - DNA, 25 bp, Homo sapien
gatttcaacacatctgtaactacaa

SEQ ID NO: 2043529 - DNA, 25 bp, Homo sapien
tacagctattagatacttatcacct

SEQ ID NO: 2043530 - DNA, 25 bp, Homo sapien
atactgttatacgtgtgttttgcac

SEQ ID NO: 2043531 - DNA, 25 bp, Homo sapien
tcccttactataggcctgcttcaca

SEQ ID NO: 2043532 - DNA, 25 bp, Homo sapien
gattcccttactataggcctgcttc

SEQ ID NO: 2043533 - DNA, 25 bp, Homo sapien
tggattcccttactataggcctgct

SEQ ID NO: 2043534 - DNA, 25 bp, Homo sapien
cagctggattcccttactataggcc

SEQ ID NO: 2043535 - DNA, 25 bp, Homo sapien
caaacaacggtcaatgcagtagcaa

SEQ ID NO: 2043536 - DNA, 25 bp, Homo sapien
gcaaggcagctatcaaagacaatgg

SEQ ID NO: 2043537 - DNA, 25 bp, Homo sapien
tacctttgtaggatgctagggaacc

SEQ ID NO: 2043538 - DNA, 25 bp, Homo sapien
ttaccagagaaaccaatgagggtcc

SEQ ID NO: 2043539 - DNA, 25 bp, Homo sapien
gaagacaatgatcaaccactaaatc

SEQ ID NO: 2043540 - DNA, 25 bp, Homo sapien
cactaaatcattaggtgaaagactg

SEQ ID NO: 2043541 - DNA, 25 bp, Homo sapien
tactgttttgcagcacctaaagaaa

SEQ ID NO: 2043542 - DNA, 25 bp, Homo sapien
ggtgaaagactgtcaggcaacttta

SEQ ID NO: 2043543 - DNA, 25 bp, Homo sapien
cagttcaagtaatctactgtacaac

SEQ ID NO: 2043544 - DNA, 25 bp, Homo sapien
tagtactgtggtttagaagcaaaaa

SEQ ID NO: 2043545 - DNA, 25 bp, Homo sapien
gcaacacatatactaaacattgaaa

SEQ ID NO: 2043546 - DNA, 25 bp, Homo sapien
tgaaatgagtgcctgctttggcaac

SEQ ID NO: 2043547 - DNA, 25 bp, Homo sapien
cacacgtaatgagtggcctgctggc

SEQ ID NO: 2043548 - DNA, 25 bp, Homo sapien
tcacacgtaatgagtggcctgctgg

SEQ ID NO: 2043549 - DNA, 25 bp, Homo sapien
ggcctgctggcttttagtcctctgc

SEQ ID NO: 2043550 - DNA, 25 bp, Homo sapien
gcctgctggcttttagtcctctgct

SEQ ID NO: 2043551 - DNA, 25 bp, Homo sapien
tctgttccaggtgtccaatctccac

SEQ ID NO: 2043552 - DNA, 25 bp, Homo sapien
aatctgttccaggtgtccaatctcc

SEQ ID NO: 2043553 - DNA, 25 bp, Homo sapien
ttccaggtgtccaatctccactggc

SEQ ID NO: 2043554 - DNA, 25 bp, Homo sapien
tgccaatctgttccaggtgtccaat

SEQ ID NO: 2043555 - DNA, 25 bp, Homo sapien
ccgtggcaggactgccaacagtccg

SEQ ID NO: 2043556 - DNA, 25 bp, Homo sapien
cgtggcaggactgccaacagtccgc

SEQ ID NO: 2043557 - DNA, 25 bp, Homo sapien
ctgccgtggcaggactgccaacagt

SEQ ID NO: 2043558 - DNA, 25 bp, Homo sapien
tgccgtggcaggactgccaacagtc

SEQ ID NO: 2043559 - DNA, 25 bp, Homo sapien
gacaactgttatgttacactcctct

SEQ ID NO: 2043560 - DNA, 25 bp, Homo sapien
aatgcttcatgtgcagtgacaactg

SEQ ID NO: 2043561 - DNA, 25 bp, Homo sapien
attccttgtgtaaatgcttcatgtg

SEQ ID NO: 2043562 - DNA, 25 bp, Homo sapien
tgcagtgacaactgttatgttacac

SEQ ID NO: 2043563 - DNA, 25 bp, Homo sapien
ccattggagagagcatctccgccac

SEQ ID NO: 2043564 - DNA, 25 bp, Homo sapien
attggagagagcatctccgccacca

SEQ ID NO: 2043565 - DNA, 25 bp, Homo sapien
agcatctccgccaccacagtctttt

SEQ ID NO: 2043566 - DNA, 25 bp, Homo sapien
tctccgccaccacagtctttttctt

SEQ ID NO: 2043567 - DNA, 25 bp, Homo sapien
tttctactgcccaaatgctctcctt

SEQ ID NO: 2043568 - DNA, 25 bp, Homo sapien
tccaatctactcagggacctttcgg

SEQ ID NO: 2043569 - DNA, 25 bp, Homo sapien
ctgcttccaatctactcagggacct

SEQ ID NO: 2043570 - DNA, 25 bp, Homo sapien
ctcagggacctttcggactcggaat

SEQ ID NO: 2043571 - DNA, 25 bp, Homo sapien
taatgttatgggtcgacaatggccc

SEQ ID NO: 2043572 - DNA, 25 bp, Homo sapien
tctgtgcagccctgagtaatgacgg

SEQ ID NO: 2043573 - DNA, 25 bp, Homo sapien
gaattaagatcctgaccgctatgct

SEQ ID NO: 2043574 - DNA, 25 bp, Homo sapien
tctcttgcagtagggttaggccacg

SEQ ID NO: 2043575 - DNA, 25 bp, Homo sapien
ttccaatacaccaagatttcttgca

SEQ ID NO: 2043576 - DNA, 25 bp, Homo sapien
tccaatacaccaagatttcttgcat

SEQ ID NO: 2043577 - DNA, 25 bp, Homo sapien
tgttatgaatttgatccttcacttc

SEQ ID NO: 2043578 - DNA, 25 bp, Homo sapien
ctctctttcctgtcctgttatgaat

SEQ ID NO: 2043579 - DNA, 25 bp, Homo sapien
cagcgtctccagtgcttctgacaag

SEQ ID NO: 2043580 - DNA, 25 bp, Homo sapien
catgatgttcagtggccagcgtctc

SEQ ID NO: 2043581 - DNA, 25 bp, Homo sapien
tagaactcgtcctcgctaaggatgc

SEQ ID NO: 2043582 - DNA, 25 bp, Homo sapien
tggagagcctttcaccagagactgc

SEQ ID NO: 2043583 - DNA, 25 bp, Homo sapien
gtgcgatctcgactctgaaacctcc

SEQ ID NO: 2043584 - DNA, 25 bp, Homo sapien
ggcagaaaagcagggatccactggt

SEQ ID NO: 2043585 - DNA, 25 bp, Homo sapien
ggagccaatgtgcactatagacaga

SEQ ID NO: 2043586 - DNA, 25 bp, Homo sapien
taggtagcagcagcgtcttctcaga

SEQ ID NO: 2043587 - DNA, 25 bp, Homo sapien
tagcagcggaacctatttctcaact

SEQ ID NO: 2043588 - DNA, 25 bp, Homo sapien
gattttctgcactgaagataccttc

SEQ ID NO: 2043589 - DNA, 25 bp, Homo sapien
ttcaagcctaacaggattttctgca

SEQ ID NO: 2043590 - DNA, 25 bp, Homo sapien
taccttcttataaaatagccacaaa

SEQ ID NO: 2043591 - DNA, 25 bp, Homo sapien
catctttcaattgatctgagtgtac

SEQ ID NO: 2043592 - DNA, 25 bp, Homo sapien
agagtaattcaatctggcaaagaca

SEQ ID NO: 2043593 - DNA, 25 bp, Homo sapien
ggcagagtaattcaatctggcaaag

SEQ ID NO: 2043594 - DNA, 25 bp, Homo sapien
aggcagagtaattcaatctggcaaa

SEQ ID NO: 2043595 - DNA, 25 bp, Homo sapien
cagagtaattcaatctggcaaagac

SEQ ID NO: 2043596 - DNA, 25 bp, Homo sapien
tcttcgctagtgcatggatggctac

SEQ ID NO: 2043597 - DNA, 25 bp, Homo sapien
tgcaatcagccagttataagatagg

SEQ ID NO: 2043598 - DNA, 25 bp, Homo sapien
tacaattctgaccttgatgatcagt

SEQ ID NO: 2043599 - DNA, 25 bp, Homo sapien
ggtcagttcaacaggataagcctta

SEQ ID NO: 2043600 - DNA, 25 bp, Homo sapien
tgcaatcagcgttgtcatcagttta

SEQ ID NO: 2043601 - DNA, 25 bp, Homo sapien
ggaaatgcatttcacctacaaaggt

SEQ ID NO: 2043602 - DNA, 25 bp, Homo sapien
agaccccacaatctgttgcctacag

SEQ ID NO: 2043603 - DNA, 25 bp, Homo sapien
cagtagcctcaaatcgaaaaacata

SEQ ID NO: 2043604 - DNA, 25 bp, Homo sapien
tacacgaaatgttcaagacaggcaa

SEQ ID NO: 2043605 - DNA, 25 bp, Homo sapien
gctacaatgcgcatgaacctcaaaa

SEQ ID NO: 2043606 - DNA, 25 bp, Homo sapien
catgtacagaactctacgctcagca

SEQ ID NO: 2043607 - DNA, 25 bp, Homo sapien
tagaaacaccatctaacccaggaat

SEQ ID NO: 2043608 - DNA, 25 bp, Homo sapien
tggctaccaaatacaatggacatgc

SEQ ID NO: 2043609 - DNA, 25 bp, Homo sapien
gacctcaattaccatgttgacgtag

SEQ ID NO: 2043610 - DNA, 25 bp, Homo sapien
gacgtaggtgactcccaatgctaat

SEQ ID NO: 2043611 - DNA, 25 bp, Homo sapien
aaaaagattccaatgaccacctggc

SEQ ID NO: 2043612 - DNA, 25 bp, Homo sapien
cttaatccgctcatgcacttctcgt

SEQ ID NO: 2043613 - DNA, 25 bp, Homo sapien
tttctctccttaatccgctcatgca

SEQ ID NO: 2043614 - DNA, 25 bp, Homo sapien
tccctttctctccttaatccgctca

SEQ ID NO: 2043615 - DNA, 25 bp, Homo sapien
aatccgctcatgcacttctcgtatt

SEQ ID NO: 2043616 - DNA, 25 bp, Homo sapien
tcttcctgcaggaaccccacggcag

SEQ ID NO: 2043617 - DNA, 25 bp, Homo sapien
tcctcgcaagctccagcgcgaatgc

SEQ ID NO: 2043618 - DNA, 25 bp, Homo sapien
ggccagatccgaggaccccggctgg

SEQ ID NO: 2043619 - DNA, 25 bp, Homo sapien
tgcgctcctcgcaagctccagcgcg

SEQ ID NO: 2043620 - DNA, 25 bp, Homo sapien
gcgcgaatgcgctcggcctgctcct

SEQ ID NO: 2043621 - DNA, 25 bp, Homo sapien
ctccagtcgagccgaggcgagccga

SEQ ID NO: 2043622 - DNA, 25 bp, Homo sapien
ggtctccctaagtcacctttgcgca

SEQ ID NO: 2043623 - DNA, 25 bp, Homo sapien
gcccgggccgcagaggtctgcgctg

SEQ ID NO: 2043624 - DNA, 25 bp, Homo sapien
gccttccccagcgaggtcgggcaga

SEQ ID NO: 2043625 - DNA, 25 bp, Homo sapien
cctttgcgcagcctgcccctggctc

SEQ ID NO: 2043626 - DNA, 25 bp, Homo sapien
ctctacgtgagtgccgcgccgaggc

SEQ ID NO: 2043627 - DNA, 25 bp, Homo sapien
ctgcacggccctccgaggagaggtc

SEQ ID NO: 2043628 - DNA, 25 bp, Homo sapien
gcgcctgcgaggtcctagagctgct

SEQ ID NO: 2043629 - DNA, 25 bp, Homo sapien
ggcggaggcgcaggtagggaccgcc

SEQ ID NO: 2043630 - DNA, 25 bp, Homo sapien
aagcttctgagacaacttcaacttt

SEQ ID NO: 2043631 - DNA, 25 bp, Homo sapien
ttgtttggtgaagagattaaggcaa

SEQ ID NO: 2043632 - DNA, 25 bp, Homo sapien
cccttcttgtttggtgaagagatta

SEQ ID NO: 2043633 - DNA, 25 bp, Homo sapien
attaaggcaatcagtcaaagctaca

SEQ ID NO: 2043634 - DNA, 25 bp, Homo sapien
taatcccatcctaagaatcctgagt

SEQ ID NO: 2043635 - DNA, 25 bp, Homo sapien
tagacagcatttccgatcaaagaca

SEQ ID NO: 2043636 - DNA, 25 bp, Homo sapien
caaagacacaacgtttggtcaaggg

SEQ ID NO: 2043637 - DNA, 25 bp, Homo sapien
taggagtcatgggagagaataactg

SEQ ID NO: 2043638 - DNA, 25 bp, Homo sapien
aagtttgatttgtaggctatttatt

SEQ ID NO: 2043639 - DNA, 25 bp, Homo sapien
ggctatttatagtcaactcttgaga

SEQ ID NO: 2043640 - DNA, 25 bp, Homo sapien
cagccttgtaggctatttatagtca

SEQ ID NO: 2043641 - DNA, 25 bp, Homo sapien
gcgcccagccttgtaggctatttat

SEQ ID NO: 2043642 - DNA, 25 bp, Homo sapien
cacactccttaatcattttgagaaa

SEQ ID NO: 2043643 - DNA, 25 bp, Homo sapien
ctagtcgctgttggcatgactgtgc

SEQ ID NO: 2043644 - DNA, 25 bp, Homo sapien
tggaaatttccctatctagtcgctg

SEQ ID NO: 2043645 - DNA, 25 bp, Homo sapien
tagccatgtcacactccttaatcat

SEQ ID NO: 2043646 - DNA, 25 bp, Homo sapien
ctatgctgatattcctctagggata

SEQ ID NO: 2043647 - DNA, 25 bp, Homo sapien
tggtgtcacttcagaagacttctcc

SEQ ID NO: 2043648 - DNA, 25 bp, Homo sapien
gataaggcactggtgtcacttcaga

SEQ ID NO: 2043649 - DNA, 25 bp, Homo sapien
tattcctctagggataaggcactgg

SEQ ID NO: 2043650 - DNA, 25 bp, Homo sapien
tctgcagcagaaaccgtatcttcct

SEQ ID NO: 2043651 - DNA, 25 bp, Homo sapien
gcagcagaaaccgtatcttcctcct

SEQ ID NO: 2043652 - DNA, 25 bp, Homo sapien
tggtcctgggaacagtagtgagtgc

SEQ ID NO: 2043653 - DNA, 25 bp, Homo sapien
agtgagtgctgtaagcagaatgttc

SEQ ID NO: 2043654 - DNA, 25 bp, Homo sapien
gactgctgaaggctattcttaggaa

SEQ ID NO: 2043655 - DNA, 25 bp, Homo sapien
ccatgaatggtgtcatcaaagcatt

SEQ ID NO: 2043656 - DNA, 25 bp, Homo sapien
gaagaggcagctatcagtggatttt

SEQ ID NO: 2043657 - DNA, 25 bp, Homo sapien
taggaacccggaagccatgaatggt

SEQ ID NO: 2043658 - DNA, 25 bp, Homo sapien
gtttgcatccctggcgataaatatt

SEQ ID NO: 2043659 - DNA, 25 bp, Homo sapien
tgcatccctggcgataaatattatg

SEQ ID NO: 2043660 - DNA, 25 bp, Homo sapien
aggtgtttgcatccctggcgataaa

SEQ ID NO: 2043661 - DNA, 25 bp, Homo sapien
gcatccctggcgataaatattatga

SEQ ID NO: 2043662 - DNA, 25 bp, Homo sapien
tgtttcctataccatgaaaggactc

SEQ ID NO: 2043663 - DNA, 25 bp, Homo sapien
tataccatgaaaggactccatgctc

SEQ ID NO: 2043664 - DNA, 25 bp, Homo sapien
catgctctaacactacccagaataa

SEQ ID NO: 2043665 - DNA, 25 bp, Homo sapien
tgaaaggactccatgctctaacact

SEQ ID NO: 2043666 - DNA, 25 bp, Homo sapien
catatcgtttcaatgctttgtagat

SEQ ID NO: 2043667 - DNA, 25 bp, Homo sapien
gggccctcatatcgtttcaatgctt

SEQ ID NO: 2043668 - DNA, 25 bp, Homo sapien
atcgtttcaatgctttgtagatgac

SEQ ID NO: 2043669 - DNA, 25 bp, Homo sapien
agagagggccctcatatcgtttcaa

SEQ ID NO: 2043670 - DNA, 25 bp, Homo sapien
cctgggcaaggtcaagaggtttctg

SEQ ID NO: 2043671 - DNA, 25 bp, Homo sapien
tgggcaaggtcaagaggtttctgat

SEQ ID NO: 2043672 - DNA, 25 bp, Homo sapien
ccctgggcaaggtcaagaggtttct

SEQ ID NO: 2043673 - DNA, 25 bp, Homo sapien
ctgggcaaggtcaagaggtttctga

SEQ ID NO: 2043674 - DNA, 25 bp, Homo sapien
tatcagataaccttttaggccaggc

SEQ ID NO: 2043675 - DNA, 25 bp, Homo sapien
gacattctagcagaggaacagctga

SEQ ID NO: 2043676 - DNA, 25 bp, Homo sapien
taggccagacttttgtaagccagca

SEQ ID NO: 2043677 - DNA, 25 bp, Homo sapien
cataatgggtagcagagatggctca

SEQ ID NO: 2043678 - DNA, 25 bp, Homo sapien
gattagaaggatgccaaagtaactg

SEQ ID NO: 2043679 - DNA, 25 bp, Homo sapien
cccactttggaatatcatgagatga

SEQ ID NO: 2043680 - DNA, 25 bp, Homo sapien
tctgggttcctaacagttctctggt

SEQ ID NO: 2043681 - DNA, 25 bp, Homo sapien
gctagaagacatgatcagaccacgc

SEQ ID NO: 2043682 - DNA, 25 bp, Homo sapien
gggtgtatttcctaactgatccgaa

SEQ ID NO: 2043683 - DNA, 25 bp, Homo sapien
cagttaacatcaggaggattgggcc

SEQ ID NO: 2043684 - DNA, 25 bp, Homo sapien
gttcttcagattagggtctgctcca

SEQ ID NO: 2043685 - DNA, 25 bp, Homo sapien
ttatgggcccggtaagctgcacaat

SEQ ID NO: 2043686 - DNA, 25 bp, Homo sapien
tcaagctttctttgttgagtccttt

SEQ ID NO: 2043687 - DNA, 25 bp, Homo sapien
tcttcaagctttctttgttgagtcc

SEQ ID NO: 2043688 - DNA, 25 bp, Homo sapien
ttgctgctgctaaaagtaattcttc

SEQ ID NO: 2043689 - DNA, 25 bp, Homo sapien
cttcaagctttctttgttgagtcct

SEQ ID NO: 2043690 - DNA, 25 bp, Homo sapien
tctatggctgctgaactaggaactc

SEQ ID NO: 2043691 - DNA, 25 bp, Homo sapien
gggatgcactaccttcaatctttcc

SEQ ID NO: 2043692 - DNA, 25 bp, Homo sapien
agtgacatctcctatacctctcgta

SEQ ID NO: 2043693 - DNA, 25 bp, Homo sapien
gaagacagccaagactctctgtaga

SEQ ID NO: 2043694 - DNA, 25 bp, Homo sapien
ccaccactgcatgtatcaccctgac

SEQ ID NO: 2043695 - DNA, 25 bp, Homo sapien
tccaccactgcatgtatcaccctga

SEQ ID NO: 2043696 - DNA, 25 bp, Homo sapien
attaacaatagtagtatcagcatta

SEQ ID NO: 2043697 - DNA, 25 bp, Homo sapien
ttaacaatagtagtatcagcattat

SEQ ID NO: 2043698 - DNA, 25 bp, Homo sapien
ggcgatccgcccgtcttggcctctc

SEQ ID NO: 2043699 - DNA, 25 bp, Homo sapien
aggcgatccgcccgtcttggcctct

SEQ ID NO: 2043700 - DNA, 25 bp, Homo sapien
ccatcctggccaacagagcgacact

SEQ ID NO: 2043701 - DNA, 25 bp, Homo sapien
ctccatcctggccaacagagcgaca

SEQ ID NO: 2043702 - DNA, 25 bp, Homo sapien
actccatcctggccaacagagcgac

SEQ ID NO: 2043703 - DNA, 25 bp, Homo sapien
atcctggccaacagagcgacactcc

SEQ ID NO: 2043704 - DNA, 25 bp, Homo sapien
tctagacttttaggttacagagaaa

SEQ ID NO: 2043705 - DNA, 25 bp, Homo sapien
gccacacattgtagaacattaagac

SEQ ID NO: 2043706 - DNA, 25 bp, Homo sapien
tgcccaagaccacttatctagactt

SEQ ID NO: 2043707 - DNA, 25 bp, Homo sapien
tcccaattgggatgatatggtcaaa

SEQ ID NO: 2043708 - DNA, 25 bp, Homo sapien
gacatatctgatccagtgggtggga

SEQ ID NO: 2043709 - DNA, 25 bp, Homo sapien
cccataacagaagggagcacagtgc

SEQ ID NO: 2043710 - DNA, 25 bp, Homo sapien
tctgattcgtatgctagaaggcacc

SEQ ID NO: 2043711 - DNA, 25 bp, Homo sapien
tccacgaggctaggatgttcaaagc

SEQ ID NO: 2043712 - DNA, 25 bp, Homo sapien
gactgtcccagtgtataaaggcctg

SEQ ID NO: 2043713 - DNA, 25 bp, Homo sapien
ggtgtgatgccacgagcactccata

SEQ ID NO: 2043714 - DNA, 25 bp, Homo sapien
caacagggacaactttgaagcatca

SEQ ID NO: 2043715 - DNA, 25 bp, Homo sapien
gcttgagccggcagcactacttgac

SEQ ID NO: 2043716 - DNA, 25 bp, Homo sapien
aaacaagtctgaccagggcaggcct

SEQ ID NO: 2043717 - DNA, 25 bp, Homo sapien
taagactccatatctggttcacaag

SEQ ID NO: 2043718 - DNA, 25 bp, Homo sapien
cactgggagtctttagctttctagc

SEQ ID NO: 2043719 - DNA, 25 bp, Homo sapien
tggcaggaacttggaggaagaacac

SEQ ID NO: 2043720 - DNA, 25 bp, Homo sapien
cctaaaacttaatgagacaaccctg

SEQ ID NO: 2043721 - DNA, 25 bp, Homo sapien
tgtgattacaatgggcccaccgaga

SEQ ID NO: 2043722 - DNA, 25 bp, Homo sapien
cacacaggcaaatggcaaaacagcc

SEQ ID NO: 2043723 - DNA, 25 bp, Homo sapien
taccttaaggttagctgatgagcaa

SEQ ID NO: 2043724 - DNA, 25 bp, Homo sapien
tctaggcaatacaatgcaaaaagat

SEQ ID NO: 2043725 - DNA, 25 bp, Homo sapien
ccagcaaaggtatctaggcaataca

SEQ ID NO: 2043726 - DNA, 25 bp, Homo sapien
gccaggctggttaatacatttaaga

SEQ ID NO: 2043727 - DNA, 25 bp, Homo sapien
tattagctggccagactcagtccag

SEQ ID NO: 2043728 - DNA, 25 bp, Homo sapien
gggttgccagccatctttttgtaca

SEQ ID NO: 2043729 - DNA, 25 bp, Homo sapien
gctggagtacacaagcagaaacgga

SEQ ID NO: 2043730 - DNA, 25 bp, Homo sapien
ggctttcttcggttgctggtcagat

SEQ ID NO: 2043731 - DNA, 25 bp, Homo sapien
gaaacggaatgatctcctcacaggg

SEQ ID NO: 2043732 - DNA, 25 bp, Homo sapien
aacattgaacatagaatgattttca

SEQ ID NO: 2043733 - DNA, 25 bp, Homo sapien
acattgaacatagaatgattttcac

SEQ ID NO: 2043734 - DNA, 25 bp, Homo sapien
aaacattgaacatagaatgattttc

SEQ ID NO: 2043735 - DNA, 25 bp, Homo sapien
taaaggcagctcgatgaagcggcgt

SEQ ID NO: 2043736 - DNA, 25 bp, Homo sapien
ctttcgtcctgtaaaggcagctcga

SEQ ID NO: 2043737 - DNA, 25 bp, Homo sapien
cagctcgatgaagcggcgtgtctcc

SEQ ID NO: 2043738 - DNA, 25 bp, Homo sapien
tgaagcggcgtgtctcccatgtcat

SEQ ID NO: 2043739 - DNA, 25 bp, Homo sapien
tcaacacattcacttctgcaccagc

SEQ ID NO: 2043740 - DNA, 25 bp, Homo sapien
ttaatcaggctaacctaattcatgt

SEQ ID NO: 2043741 - DNA, 25 bp, Homo sapien
taattaatcaggctaacctaattca

SEQ ID NO: 2043742 - DNA, 25 bp, Homo sapien
agtcattatggctcaggtggctttt

SEQ ID NO: 2043743 - DNA, 25 bp, Homo sapien
cattatggctcaggtggcttttcta

SEQ ID NO: 2043744 - DNA, 25 bp, Homo sapien
ttgtctgtgtccaaaatagcatgcc

SEQ ID NO: 2043745 - DNA, 25 bp, Homo sapien
ggtgtccagcccaagttagacttac

SEQ ID NO: 2043746 - DNA, 25 bp, Homo sapien
tagcatgccagatgtagaggtgtcc

SEQ ID NO: 2043747 - DNA, 25 bp, Homo sapien
tgtagaggtgtccagcccaagttag

SEQ ID NO: 2043748 - DNA, 25 bp, Homo sapien
ggtgccaccttctgactcgatgtct

SEQ ID NO: 2043749 - DNA, 25 bp, Homo sapien
gtgccaccttctgactcgatgtctt

SEQ ID NO: 2043750 - DNA, 25 bp, Homo sapien
tggtgccaccttctgactcgatgtc

SEQ ID NO: 2043751 - DNA, 25 bp, Homo sapien
ctgccttgatggggctgttacagcc

SEQ ID NO: 2043752 - DNA, 25 bp, Homo sapien
ccttgatggggctgttacagcccaa

SEQ ID NO: 2043753 - DNA, 25 bp, Homo sapien
gccttgatggggctgttacagccca

SEQ ID NO: 2043754 - DNA, 25 bp, Homo sapien
tgccttgatggggctgttacagccc

SEQ ID NO: 2043755 - DNA, 25 bp, Homo sapien
tgggaaggagtaagaactctggtgt

SEQ ID NO: 2043756 - DNA, 25 bp, Homo sapien
aggagtaagaactctggtgtctccc

SEQ ID NO: 2043757 - DNA, 25 bp, Homo sapien
ttgcctgtcttcaacctctccccct

SEQ ID NO: 2043758 - DNA, 25 bp, Homo sapien
tccccctttagttgctgatgggaag

SEQ ID NO: 2043759 - DNA, 25 bp, Homo sapien
ctgtcgtcctccgtacacacactcg

SEQ ID NO: 2043760 - DNA, 25 bp, Homo sapien
tacacacactcgcaggaaccaccag

SEQ ID NO: 2043761 - DNA, 25 bp, Homo sapien
tccgtacacacactcgcaggaacca

SEQ ID NO: 2043762 - DNA, 25 bp, Homo sapien
tcctccgtacacacactcgcaggaa

SEQ ID NO: 2043763 - DNA, 25 bp, Homo sapien
cagcttccaatgcttaaggagcacc

SEQ ID NO: 2043764 - DNA, 25 bp, Homo sapien
aagccaagtcatagattcgaggaaa

SEQ ID NO: 2043765 - DNA, 25 bp, Homo sapien
tcatagattcgaggaaaacctgcct

SEQ ID NO: 2043766 - DNA, 25 bp, Homo sapien
tccaatgcttaaggagcaccaggaa

SEQ ID NO: 2043767 - DNA, 25 bp, Homo sapien
cattcctcgccatggtctctaatag

SEQ ID NO: 2043768 - DNA, 25 bp, Homo sapien
catttctggcgtgatggagaagctg

SEQ ID NO: 2043769 - DNA, 25 bp, Homo sapien
gctgttgctccgcttctgtgttcat

SEQ ID NO: 2043770 - DNA, 25 bp, Homo sapien
ttaatgtcagcaatcacttcattcc

SEQ ID NO: 2043771 - DNA, 25 bp, Homo sapien
ctgatgactgccaatttccagaata

SEQ ID NO: 2043772 - DNA, 25 bp, Homo sapien
cctgaagcccaagaaagcactgcac

SEQ ID NO: 2043773 - DNA, 25 bp, Homo sapien
agagctcctatctgatgactgccaa

SEQ ID NO: 2043774 - DNA, 25 bp, Homo sapien
ggccctgaagcccaagaaagcactg

SEQ ID NO: 2043775 - DNA, 25 bp, Homo sapien
tccatctccaatatcacctagagct

SEQ ID NO: 2043776 - DNA, 25 bp, Homo sapien
tctccatctccaatatcacctagag

SEQ ID NO: 2043777 - DNA, 25 bp, Homo sapien
tcacctagagctccttgataagtcc

SEQ ID NO: 2043778 - DNA, 25 bp, Homo sapien
ctagagctccttgataagtcctcat

SEQ ID NO: 2043779 - DNA, 25 bp, Homo sapien
tgcagccctgcgtcgccgcgccacg

SEQ ID NO: 2043780 - DNA, 25 bp, Homo sapien
tcctctgagacgcccgggacgggag

SEQ ID NO: 2043781 - DNA, 25 bp, Homo sapien
tgagacgcccgggacgggagcgccc

SEQ ID NO: 2043782 - DNA, 25 bp, Homo sapien
gccacgacccgaccatcctctgaga

SEQ ID NO: 2043783 - DNA, 25 bp, Homo sapien
agcccggcgggaacccgtcagcgcg

SEQ ID NO: 2043784 - DNA, 25 bp, Homo sapien
cagcccggcgggaacccgtcagcgc

SEQ ID NO: 2043785 - DNA, 25 bp, Homo sapien
caggcgtggacagccgcgagaaact

SEQ ID NO: 2043786 - DNA, 25 bp, Homo sapien
gcagcccggcgggaacccgtcagcg

SEQ ID NO: 2043787 - DNA, 25 bp, Homo sapien
gagcccgcgtaacgtctgtctccgg

SEQ ID NO: 2043788 - DNA, 25 bp, Homo sapien
ccgccccacgtcgaggaagtggtcg

SEQ ID NO: 2043789 - DNA, 25 bp, Homo sapien
ggtcgtcaccaactctggctggcac

SEQ ID NO: 2043790 - DNA, 25 bp, Homo sapien
gggaccacggcggagcgcgaggtgg

SEQ ID NO: 2043791 - DNA, 25 bp, Homo sapien
acgcagggagcgaccagaggcaggt

SEQ ID NO: 2043792 - DNA, 25 bp, Homo sapien
gccccggcggggtgctgtctctcca

SEQ ID NO: 2043793 - DNA, 25 bp, Homo sapien
ccccggcggggtgctgtctctccag

SEQ ID NO: 2043794 - DNA, 25 bp, Homo sapien
gggggacgcagggagcgaccagagg

SEQ ID NO: 2043795 - DNA, 25 bp, Homo sapien
cacgtgggcgatcataagtcttttc

SEQ ID NO: 2043796 - DNA, 25 bp, Homo sapien
tacgaaggaaccagtgagacaccca

SEQ ID NO: 2043797 - DNA, 25 bp, Homo sapien
ttaacacgcgactaagcagctctgg

SEQ ID NO: 2043798 - DNA, 25 bp, Homo sapien
cagctctgggccgaaggcaaaaacc

SEQ ID NO: 2043799 - DNA, 25 bp, Homo sapien
ttatgagccatgacctgttgatgca

SEQ ID NO: 2043800 - DNA, 25 bp, Homo sapien
gatgtacctgtaagactgcctgcct

SEQ ID NO: 2043801 - DNA, 25 bp, Homo sapien
aaatctcagttactaggccggtctg

SEQ ID NO: 2043802 - DNA, 25 bp, Homo sapien
taaacccttgggaacagaattgcat

SEQ ID NO: 2043803 - DNA, 25 bp, Homo sapien
caaatgggacattcgtagagtggga

SEQ ID NO: 2043804 - DNA, 25 bp, Homo sapien
cctggaagtacctttcttgtgatct

SEQ ID NO: 2043805 - DNA, 25 bp, Homo sapien
ccccagaaatgtgttggtgtaacat

SEQ ID NO: 2043806 - DNA, 25 bp, Homo sapien
tatggagtgtcagtagtctccttcc

SEQ ID NO: 2043807 - DNA, 25 bp, Homo sapien
tctacaatcagatctatgctgtggc

SEQ ID NO: 2043808 - DNA, 25 bp, Homo sapien
tctttacctaaagtcaattggctgg

SEQ ID NO: 2043809 - DNA, 25 bp, Homo sapien
tctgattccactatccagagatagc

SEQ ID NO: 2043810 - DNA, 25 bp, Homo sapien
tactttttagatgggaattgcagaa

SEQ ID NO: 2043811 - DNA, 25 bp, Homo sapien
gcttacttcttgattcttcagaaag

SEQ ID NO: 2043812 - DNA, 25 bp, Homo sapien
gttggcttctgtactgcttacttct

SEQ ID NO: 2043813 - DNA, 25 bp, Homo sapien
tgagttggcttctgtactgcttact

SEQ ID NO: 2043814 - DNA, 25 bp, Homo sapien
tgaggatgaagaccactctcagaag

SEQ ID NO: 2043815 - DNA, 25 bp, Homo sapien
ttacttggggattttagctcctgcc

SEQ ID NO: 2043816 - DNA, 25 bp, Homo sapien
atttacttggggattttagctcctg

SEQ ID NO: 2043817 - DNA, 25 bp, Homo sapien
ctctggcggcccaaaggatttactt

SEQ ID NO: 2043818 - DNA, 25 bp, Homo sapien
cacacattcctctggcggcccaaag

SEQ ID NO: 2043819 - DNA, 25 bp, Homo sapien
taactaacagcgtcagtgataaccc

SEQ ID NO: 2043820 - DNA, 25 bp, Homo sapien
gagggcatagaacccactcgagctt

SEQ ID NO: 2043821 - DNA, 25 bp, Homo sapien
tattacccatggtaagaagcaagcg

SEQ ID NO: 2043822 - DNA, 25 bp, Homo sapien
ccgggattgcgtggataaataacat

SEQ ID NO: 2043823 - DNA, 25 bp, Homo sapien
caggtaagagccctcgccaaggggc

SEQ ID NO: 2043824 - DNA, 25 bp, Homo sapien
tcataggtcaagaagccatgagtta

SEQ ID NO: 2043825 - DNA, 25 bp, Homo sapien
tgagttagagaagaccgcaggtaag

SEQ ID NO: 2043826 - DNA, 25 bp, Homo sapien
atcgatcgagtccaccaaggccttg

SEQ ID NO: 2043827 - DNA, 25 bp, Homo sapien
tactgcacggcagtcgtttgaagaa

SEQ ID NO: 2043828 - DNA, 25 bp, Homo sapien
ggaaatcgtgcagaccttccagaag

SEQ ID NO: 2043829 - DNA, 25 bp, Homo sapien
gaagtgaggcccaagtaggagctta

SEQ ID NO: 2043830 - DNA, 25 bp, Homo sapien
aagggaatgatgtaattggaaagca

SEQ ID NO: 2043831 - DNA, 25 bp, Homo sapien
catgttccctgttccaggggggttg

SEQ ID NO: 2043832 - DNA, 25 bp, Homo sapien
gttcttcgtgaagaatttgtgtggt

SEQ ID NO: 2043833 - DNA, 25 bp, Homo sapien
ctggaaaaggttcttcgtgaagaat

SEQ ID NO: 2043834 - DNA, 25 bp, Homo sapien
tcgtgaagaatttgtgtggtgaaga

SEQ ID NO: 2043835 - DNA, 25 bp, Homo sapien
tggccatccagagtgcccacaatgt

SEQ ID NO: 2043836 - DNA, 25 bp, Homo sapien
tttggagttccaggagtggccatcc

SEQ ID NO: 2043837 - DNA, 25 bp, Homo sapien
gaatcagatgggtcattccatcctg

SEQ ID NO: 2043838 - DNA, 25 bp, Homo sapien
cagcaatatgaatctgagttgaatc

SEQ ID NO: 2043839 - DNA, 25 bp, Homo sapien
tggacgagacaaaaccattcatcca

SEQ ID NO: 2043840 - DNA, 25 bp, Homo sapien
atccattcagcagccgcacaaagca

SEQ ID NO: 2043841 - DNA, 25 bp, Homo sapien
ctggacgagacaaaaccattcatcc

SEQ ID NO: 2043842 - DNA, 25 bp, Homo sapien
attcatccattcagcagccgcacaa

SEQ ID NO: 2043843 - DNA, 25 bp, Homo sapien
gagggacagccaaaggctctctcac

SEQ ID NO: 2043844 - DNA, 25 bp, Homo sapien
gtaggatttcccacacctgctgtac

SEQ ID NO: 2043845 - DNA, 25 bp, Homo sapien
gctgtacacataagggcttgctcca

SEQ ID NO: 2043846 - DNA, 25 bp, Homo sapien
ttggtgctgaacaaggcactccttg

SEQ ID NO: 2043847 - DNA, 25 bp, Homo sapien
ataaggactttctccaatatgggtt

SEQ ID NO: 2043848 - DNA, 25 bp, Homo sapien
tggtggtgaacaaggctggagctct

SEQ ID NO: 2043849 - DNA, 25 bp, Homo sapien
ctcataaggactttctccaatatgg

SEQ ID NO: 2043850 - DNA, 25 bp, Homo sapien
ggtggtgaacaaggctggagctctg

SEQ ID NO: 2043851 - DNA, 25 bp, Homo sapien
tacatggcactcctgcatggcttct

SEQ ID NO: 2043852 - DNA, 25 bp, Homo sapien
tgctgaatgagattggaacttcttg

SEQ ID NO: 2043853 - DNA, 25 bp, Homo sapien
tgttgagtatgaaacatgtccccat

SEQ ID NO: 2043854 - DNA, 25 bp, Homo sapien
ggccaggagtgtctttaggactgaa

SEQ ID NO: 2043855 - DNA, 25 bp, Homo sapien
gtggctcttcaacaagatggccctg

SEQ ID NO: 2043856 - DNA, 25 bp, Homo sapien
ttctggggctgatgaagatttgcac

SEQ ID NO: 2043857 - DNA, 25 bp, Homo sapien
ttccacggtgctcagctggctgtag

SEQ ID NO: 2043858 - DNA, 25 bp, Homo sapien
cagtttctgtgtagggtgtgttcca

SEQ ID NO: 2043859 - DNA, 25 bp, Homo sapien
tctgagtggaagcacctgccttggg

SEQ ID NO: 2043860 - DNA, 25 bp, Homo sapien
gggccttctgagtggaagcacctgc

SEQ ID NO: 2043861 - DNA, 25 bp, Homo sapien
agccacccacatcacaatggagggc

SEQ ID NO: 2043862 - DNA, 25 bp, Homo sapien
ctgccttgggagacctgacccgact

SEQ ID NO: 2043863 - DNA, 25 bp, Homo sapien
actacactcctgttccacaagacag

SEQ ID NO: 2043864 - DNA, 25 bp, Homo sapien
cctgctccagggacaacctttgacc

SEQ ID NO: 2043865 - DNA, 25 bp, Homo sapien
tgtagtctaggaacacttccaactg

SEQ ID NO: 2043866 - DNA, 25 bp, Homo sapien
gttccggcctgagtcctgcctcact

SEQ ID NO: 2043867 - DNA, 25 bp, Homo sapien
tcttcttagaaggaccctggtcatc

SEQ ID NO: 2043868 - DNA, 25 bp, Homo sapien
tatttccggatagggtcacatacac

SEQ ID NO: 2043869 - DNA, 25 bp, Homo sapien
gaggacacagttcaacctgcaacag

SEQ ID NO: 2043870 - DNA, 25 bp, Homo sapien
tgtcgtgaggttggcagaacagccc

SEQ ID NO: 2043871 - DNA, 25 bp, Homo sapien
ctcctccagcgcagtgcactcctgc

SEQ ID NO: 2043872 - DNA, 25 bp, Homo sapien
ctgctgctgttccacgctgccatcg

SEQ ID NO: 2043873 - DNA, 25 bp, Homo sapien
gattttcactccaccgcttgcgaac

SEQ ID NO: 2043874 - DNA, 25 bp, Homo sapien
tcgccaccgggacccaacatctctt

SEQ ID NO: 2043875 - DNA, 25 bp, Homo sapien
tacaaagttaatggccacagccttc

SEQ ID NO: 2043876 - DNA, 25 bp, Homo sapien
gttaatggccacagccttccagcca

SEQ ID NO: 2043877 - DNA, 25 bp, Homo sapien
gccacagccttccagccatatcgac

SEQ ID NO: 2043878 - DNA, 25 bp, Homo sapien
ttacaaagttaatggccacagcctt

SEQ ID NO: 2043879 - DNA, 25 bp, Homo sapien
tttgggcaggtcatagttaatgatg

SEQ ID NO: 2043880 - DNA, 25 bp, Homo sapien
ttttgggcaggtcatagttaatgat

SEQ ID NO: 2043881 - DNA, 25 bp, Homo sapien
tttttgggcaggtcatagttaatga

SEQ ID NO: 2043882 - DNA, 25 bp, Homo sapien
ttttttgggcaggtcatagttaatg

SEQ ID NO: 2043883 - DNA, 25 bp, Homo sapien
tccagagtcaattcaccaagatgtg

SEQ ID NO: 2043884 - DNA, 25 bp, Homo sapien
tactgacggactgtggccctttctg

SEQ ID NO: 2043885 - DNA, 25 bp, Homo sapien
catctgtggaaatgagccctgtgct

SEQ ID NO: 2043886 - DNA, 25 bp, Homo sapien
tctctgtgcatcgaggacacggtga

SEQ ID NO: 2043887 - DNA, 25 bp, Homo sapien
cgcgaggcagtgtaacactgatgag

SEQ ID NO: 2043888 - DNA, 25 bp, Homo sapien
ctaggatttcgcgaggcagtgtaac

SEQ ID NO: 2043889 - DNA, 25 bp, Homo sapien
tttcgcgaggcagtgtaacactgat

SEQ ID NO: 2043890 - DNA, 25 bp, Homo sapien
gatttcgcgaggcagtgtaacactg

SEQ ID NO: 2043891 - DNA, 25 bp, Homo sapien
caggaaggtacaaaacccacgcaca

SEQ ID NO: 2043892 - DNA, 25 bp, Homo sapien
aacccacgcacatggaaccactgtg

SEQ ID NO: 2043893 - DNA, 25 bp, Homo sapien
cagttatagcaacaggaaggtacaa

SEQ ID NO: 2043894 - DNA, 25 bp, Homo sapien
ggtacaaaacccacgcacatggaac

SEQ ID NO: 2043895 - DNA, 25 bp, Homo sapien
gtctctatttagtatcctgttttct

SEQ ID NO: 2043896 - DNA, 25 bp, Homo sapien
tctatttagtatcctgttttcttgt

SEQ ID NO: 2043897 - DNA, 25 bp, Homo sapien
ctctatttagtatcctgttttcttg

SEQ ID NO: 2043898 - DNA, 25 bp, Homo sapien
ctgtctctatttagtatcctgtttt

SEQ ID NO: 2043899 - DNA, 25 bp, Homo sapien
gttaggcaattggattttatgaaag

SEQ ID NO: 2043900 - DNA, 25 bp, Homo sapien
caattggattttatgaaagctatac

SEQ ID NO: 2043901 - DNA, 25 bp, Homo sapien
ggcaattggattttatgaaagctat

SEQ ID NO: 2043902 - DNA, 25 bp, Homo sapien
taggcaattggattttatgaaagct

SEQ ID NO: 2043903 - DNA, 25 bp, Homo sapien
catccagatgaggtgcatatagctt

SEQ ID NO: 2043904 - DNA, 25 bp, Homo sapien
gatgaggtgcatatagcttggtcca

SEQ ID NO: 2043905 - DNA, 25 bp, Homo sapien
ctcttcccagattaatgcacatcca

SEQ ID NO: 2043906 - DNA, 25 bp, Homo sapien
cttcccagattaatgcacatccaga

SEQ ID NO: 2043907 - DNA, 25 bp, Homo sapien
ggtaaatggcatgggttggcccaca

SEQ ID NO: 2043908 - DNA, 25 bp, Homo sapien
aaagatctgcctgacaccggattct

SEQ ID NO: 2043909 - DNA, 25 bp, Homo sapien
tctcgtcatggtcacgtggtaggcc

SEQ ID NO: 2043910 - DNA, 25 bp, Homo sapien
tttcactctgcacttcgaaggccag

SEQ ID NO: 2043911 - DNA, 25 bp, Homo sapien
ccaatttggcaggtagtttattgcc

SEQ ID NO: 2043912 - DNA, 25 bp, Homo sapien
tgagcgaagactgtctgcagacatg

SEQ ID NO: 2043913 - DNA, 25 bp, Homo sapien
tgaggcagtagagagctcttttttc

SEQ ID NO: 2043914 - DNA, 25 bp, Homo sapien
gtttattgcctgctccattttatag

SEQ ID NO: 2043915 - DNA, 25 bp, Homo sapien
tggacggctgctggacgctagaatt

SEQ ID NO: 2043916 - DNA, 25 bp, Homo sapien
gatgtcaccattgctccatataagt

SEQ ID NO: 2043917 - DNA, 25 bp, Homo sapien
aatttgcattatagtcaccccagag

SEQ ID NO: 2043918 - DNA, 25 bp, Homo sapien
tgtaacttaattgaccactggatgt

SEQ ID NO: 2043919 - DNA, 25 bp, Homo sapien
cagagtccactctaggagatccttc

SEQ ID NO: 2043920 - DNA, 25 bp, Homo sapien
taaagccccgatcctgatgaagaca

SEQ ID NO: 2043921 - DNA, 25 bp, Homo sapien
gatgaagacatttggatctggccca

SEQ ID NO: 2043922 - DNA, 25 bp, Homo sapien
catggcatgccagttttgatgggcg

SEQ ID NO: 2043923 - DNA, 25 bp, Homo sapien
caattggcatccctggtgcattaat

SEQ ID NO: 2043924 - DNA, 25 bp, Homo sapien
attaattcaagctgtagtgctagtg

SEQ ID NO: 2043925 - DNA, 25 bp, Homo sapien
ttggcatccctggtgcattaattca

SEQ ID NO: 2043926 - DNA, 25 bp, Homo sapien
gtagtgctagtgacttacatgtcat

SEQ ID NO: 2043927 - DNA, 25 bp, Homo sapien
ggaacaataataaacctcgaatatg

SEQ ID NO: 2043928 - DNA, 25 bp, Homo sapien
taataaacctcgaatatgtttgcag

SEQ ID NO: 2043929 - DNA, 25 bp, Homo sapien
caataataaacctcgaatatgtttg

SEQ ID NO: 2043930 - DNA, 25 bp, Homo sapien
aacctcgaatatgtttgcagtttgg

SEQ ID NO: 2043931 - DNA, 25 bp, Homo sapien
cgcccaatagtgccccatttaatct

SEQ ID NO: 2043932 - DNA, 25 bp, Homo sapien
ttcacctgtggttgctttgttctga

SEQ ID NO: 2043933 - DNA, 25 bp, Homo sapien
taatctgttcacctgtggttgcttt

SEQ ID NO: 2043934 - DNA, 25 bp, Homo sapien
gtgccccatttaatctgttcacctg

SEQ ID NO: 2043935 - DNA, 25 bp, Homo sapien
gagagaggctgatgattgcaaaccg

SEQ ID NO: 2043936 - DNA, 25 bp, Homo sapien
gaggctgatgattgcaaaccgttgg

SEQ ID NO: 2043937 - DNA, 25 bp, Homo sapien
aattggaatgctgccactgtctgaa

SEQ ID NO: 2043938 - DNA, 25 bp, Homo sapien
gctgatgattgcaaaccgttggttt

SEQ ID NO: 2043939 - DNA, 25 bp, Homo sapien
gctttctcgtctttcctctcttcca

SEQ ID NO: 2043940 - DNA, 25 bp, Homo sapien
tgtctgtacaaagctggcactcttg

SEQ ID NO: 2043941 - DNA, 25 bp, Homo sapien
gctggcactcttgctttctcgtctt

SEQ ID NO: 2043942 - DNA, 25 bp, Homo sapien
gtgagtgtgtctgtacaaagctggc

SEQ ID NO: 2043943 - DNA, 25 bp, Homo sapien
ttgcttccgacatgtctgggcagtg

SEQ ID NO: 2043944 - DNA, 25 bp, Homo sapien
tgcttccgacatgtctgggcagtgt

SEQ ID NO: 2043945 - DNA, 25 bp, Homo sapien
gtttgcttccgacatgtctgggcag

SEQ ID NO: 2043946 - DNA, 25 bp, Homo sapien
gcgtttgcttccgacatgtctgggc

SEQ ID NO: 2043947 - DNA, 25 bp, Homo sapien
tccctggtctccaaagttagtagca

SEQ ID NO: 2043948 - DNA, 25 bp, Homo sapien
caagagtcagacaagggttccattt

SEQ ID NO: 2043949 - DNA, 25 bp, Homo sapien
cagaggtggtaagagcaaaaaccca

SEQ ID NO: 2043950 - DNA, 25 bp, Homo sapien
aacccatacttgtgtaggaaggaag

SEQ ID NO: 2043951 - DNA, 25 bp, Homo sapien
caaagagcctggcatgcttgcgctg

SEQ ID NO: 2043952 - DNA, 25 bp, Homo sapien
gagcctggcatgcttgcgctgtctc

SEQ ID NO: 2043953 - DNA, 25 bp, Homo sapien
gcctgttcacatcatgaaggtcaaa

SEQ ID NO: 2043954 - DNA, 25 bp, Homo sapien
aggtcaaatgcaaagagcctggcat

SEQ ID NO: 2043955 - DNA, 25 bp, Homo sapien
ttccccctccatgcactatccatcg

SEQ ID NO: 2043956 - DNA, 25 bp, Homo sapien
gcatccggccgtatcttccctttcc

SEQ ID NO: 2043957 - DNA, 25 bp, Homo sapien
ccttccccctccatgcactatccat

SEQ ID NO: 2043958 - DNA, 25 bp, Homo sapien
caccgcatccggccgtatcttccct

SEQ ID NO: 2043959 - DNA, 25 bp, Homo sapien
tgtacaccatcttgcttaaaagcat

SEQ ID NO: 2043960 - DNA, 25 bp, Homo sapien
ccaagtcactagcatctctcattgg

SEQ ID NO: 2043961 - DNA, 25 bp, Homo sapien
tggacgaacaggctcggcttgctct

SEQ ID NO: 2043962 - DNA, 25 bp, Homo sapien
ggcttgctctgcctactggcttctg

SEQ ID NO: 2043963 - DNA, 25 bp, Homo sapien
aattaatcgactggttttgtccctg

SEQ ID NO: 2043964 - DNA, 25 bp, Homo sapien
ggtcagagcgtcatgactgaagtct

SEQ ID NO: 2043965 - DNA, 25 bp, Homo sapien
aatgggcataataagagtaccaccc

SEQ ID NO: 2043966 - DNA, 25 bp, Homo sapien
tgggtagctacttatcctccttgag

SEQ ID NO: 2043967 - DNA, 25 bp, Homo sapien
caggagaatccaggatttttcactg

SEQ ID NO: 2043968 - DNA, 25 bp, Homo sapien
taactctgatgggtgagtatggtcc

SEQ ID NO: 2043969 - DNA, 25 bp, Homo sapien
gagtatggtccggacaggagaatcc

SEQ ID NO: 2043970 - DNA, 25 bp, Homo sapien
gaagagaaaggcttgcaccaaccac

SEQ ID NO: 2043971 - DNA, 25 bp, Homo sapien
ttagtggagaatgtatgtatgtgga

SEQ ID NO: 2043972 - DNA, 25 bp, Homo sapien
tggatatggcaggaaggaacatggt

SEQ ID NO: 2043973 - DNA, 25 bp, Homo sapien
catggtgaaaccaattctggattca

SEQ ID NO: 2043974 - DNA, 25 bp, Homo sapien
tagtggagaatgtatgtatgtggat

SEQ ID NO: 2043975 - DNA, 25 bp, Homo sapien
gaagttagggcaggcaaaagctgtc

SEQ ID NO: 2043976 - DNA, 25 bp, Homo sapien
tcttctgcctagaggtagcaggtga

SEQ ID NO: 2043977 - DNA, 25 bp, Homo sapien
gcctgtaggatgttcaagtggaggg

SEQ ID NO: 2043978 - DNA, 25 bp, Homo sapien
aagctgtcggcgtcttctgcctaga

SEQ ID NO: 2043979 - DNA, 25 bp, Homo sapien
cagttggattaacgttatggagtgt

SEQ ID NO: 2043980 - DNA, 25 bp, Homo sapien
tgcaggagagagtgacatctgcttc

SEQ ID NO: 2043981 - DNA, 25 bp, Homo sapien
tccctctcacaagaaccgctgggct

SEQ ID NO: 2043982 - DNA, 25 bp, Homo sapien
ttattctgtatgtgagtcagttgga

SEQ ID NO: 2043983 - DNA, 25 bp, Homo sapien
ttctgttgctggtacccagaaaggc

SEQ ID NO: 2043984 - DNA, 25 bp, Homo sapien
tctgttgctggtacccagaaaggct

SEQ ID NO: 2043985 - DNA, 25 bp, Homo sapien
caccagacagtgcatctaaataatg

SEQ ID NO: 2043986 - DNA, 25 bp, Homo sapien
catacattgctgtgtttacttgatc

SEQ ID NO: 2043987 - DNA, 25 bp, Homo sapien
tctgaattcatggtggcgagtggca

SEQ ID NO: 2043988 - DNA, 25 bp, Homo sapien
tcaccttcttacgatgtccatacat

SEQ ID NO: 2043989 - DNA, 25 bp, Homo sapien
tgctgcacagaatttagcaagaagc

SEQ ID NO: 2043990 - DNA, 25 bp, Homo sapien
gctgcacagaatttagcaagaagca

SEQ ID NO: 2043991 - DNA, 25 bp, Homo sapien
ttcatcattggcaccaaagtcccgc

SEQ ID NO: 2043992 - DNA, 25 bp, Homo sapien
cgccactctcgggtaataaaggaca

SEQ ID NO: 2043993 - DNA, 25 bp, Homo sapien
gtaataaaggacacgaagatcaatc

SEQ ID NO: 2043994 - DNA, 25 bp, Homo sapien
cagcctgtgaatcggctttcatcat

SEQ ID NO: 2043995 - DNA, 25 bp, Homo sapien
gttccagaatgtccctttgtccaga

SEQ ID NO: 2043996 - DNA, 25 bp, Homo sapien
ggagaagactccagttccagaatgt

SEQ ID NO: 2043997 - DNA, 25 bp, Homo sapien
ctgagggagaagactccagttccag

SEQ ID NO: 2043998 - DNA, 25 bp, Homo sapien
agaatgtccctttgtccagaaacag

SEQ ID NO: 2043999 - DNA, 25 bp, Homo sapien
ctgtgtggaattcaagactatccaa

SEQ ID NO: 2044000 - DNA, 25 bp, Homo sapien
gactatccaaggatggaaagatcac

SEQ ID NO: 2044001 - DNA, 25 bp, Homo sapien
gaattcaagactatccaaggatgga

SEQ ID NO: 2044002 - DNA, 25 bp, Homo sapien
ggatggaaagatcacaggatctctt

SEQ ID NO: 2044003 - DNA, 25 bp, Homo sapien
tatttgagaaggagccccactttca

SEQ ID NO: 2044004 - DNA, 25 bp, Homo sapien
gtataaacaagtgtcgatctacaga

SEQ ID NO: 2044005 - DNA, 25 bp, Homo sapien
gcctggttggggaattgtataaaca

SEQ ID NO: 2044006 - DNA, 25 bp, Homo sapien
aatgccatatttgagaaggagcccc

SEQ ID NO: 2044007 - DNA, 25 bp, Homo sapien
gatctgcctacagcattgcttcatg

SEQ ID NO: 2044008 - DNA, 25 bp, Homo sapien
ccttgacctctcgtcctgtgttcat

SEQ ID NO: 2044009 - DNA, 25 bp, Homo sapien
ttttcttagcttgatctgcctacag

SEQ ID NO: 2044010 - DNA, 25 bp, Homo sapien
gcattgcttcatgaccttgacctct

SEQ ID NO: 2044011 - DNA, 25 bp, Homo sapien
tgttcatcatacctctccccaatct

SEQ ID NO: 2044012 - DNA, 25 bp, Homo sapien
aaggcttgttcatcatacctctccc

SEQ ID NO: 2044013 - DNA, 25 bp, Homo sapien
gcttgttcatcatacctctccccaa

SEQ ID NO: 2044014 - DNA, 25 bp, Homo sapien
tcatcatacctctccccaatcttga

SEQ ID NO: 2044015 - DNA, 25 bp, Homo sapien
ctcattcactgggtataactctgtg

SEQ ID NO: 2044016 - DNA, 25 bp, Homo sapien
tctgtgactagcctatcggcagtac

SEQ ID NO: 2044017 - DNA, 25 bp, Homo sapien
actgggtataactctgtgactagcc

SEQ ID NO: 2044018 - DNA, 25 bp, Homo sapien
tataactctgtgactagcctatcgg

SEQ ID NO: 2044019 - DNA, 25 bp, Homo sapien
agaccatttaaagaatgagaccatt

SEQ ID NO: 2044020 - DNA, 25 bp, Homo sapien
gaccatttaaagaatgagaccattg

SEQ ID NO: 2044021 - DNA, 25 bp, Homo sapien
catttaaagaatgagaccattgttg

SEQ ID NO: 2044022 - DNA, 25 bp, Homo sapien
ctggaagaccatttaaagaatgaga

SEQ ID NO: 2044023 - DNA, 25 bp, Homo sapien
tctcttccaaacagcaaggtgctta

SEQ ID NO: 2044024 - DNA, 25 bp, Homo sapien
caactctcttccaaacagcaaggtg

SEQ ID NO: 2044025 - DNA, 25 bp, Homo sapien
aactctcttccaaacagcaaggtgc

SEQ ID NO: 2044026 - DNA, 25 bp, Homo sapien
catgcaactctcttccaaacagcaa

SEQ ID NO: 2044027 - DNA, 25 bp, Homo sapien
tgtacttgccgtagaacactggata

SEQ ID NO: 2044028 - DNA, 25 bp, Homo sapien
ctatgttgtacttgccgtagaacac

SEQ ID NO: 2044029 - DNA, 25 bp, Homo sapien
gttgtacttgccgtagaacactgga

SEQ ID NO: 2044030 - DNA, 25 bp, Homo sapien
tacttgccgtagaacactggataaa

SEQ ID NO: 2044031 - DNA, 25 bp, Homo sapien
tgggcaccggcatctttcaggtgag

SEQ ID NO: 2044032 - DNA, 25 bp, Homo sapien
ggtaaaatacacatgtctcggcatt

SEQ ID NO: 2044033 - DNA, 25 bp, Homo sapien
tcctgccggcattatcatccctgtt

SEQ ID NO: 2044034 - DNA, 25 bp, Homo sapien
tcaggtgagtcttggacctcctaat

SEQ ID NO: 2044035 - DNA, 25 bp, Homo sapien
tagcgattggagaagatccacggac

SEQ ID NO: 2044036 - DNA, 25 bp, Homo sapien
ctagcgattggagaagatccacgga

SEQ ID NO: 2044037 - DNA, 25 bp, Homo sapien
tccatctcctgtgtcaaggggtcca

SEQ ID NO: 2044038 - DNA, 25 bp, Homo sapien
catcacgcagggctacttctctggg

SEQ ID NO: 2044039 - DNA, 25 bp, Homo sapien
ggtccaagctggcatcacgcagggc

SEQ ID NO: 2044040 - DNA, 25 bp, Homo sapien
ttctctgggcttgatcaggtggtcc

SEQ ID NO: 2044041 - DNA, 25 bp, Homo sapien
ccacgacagatcctccgagtcctgg

SEQ ID NO: 2044042 - DNA, 25 bp, Homo sapien
aggctctgccccacgacagatcctc

SEQ ID NO: 2044043 - DNA, 25 bp, Homo sapien
tctgccccacgacagatcctccgag

SEQ ID NO: 2044044 - DNA, 25 bp, Homo sapien
tgccccacgacagatcctccgagtc

SEQ ID NO: 2044045 - DNA, 25 bp, Homo sapien
cctgcatagtgctaattgctctaag

SEQ ID NO: 2044046 - DNA, 25 bp, Homo sapien
ttgctctaagctcataaagctgctg

SEQ ID NO: 2044047 - DNA, 25 bp, Homo sapien
catagtgctaattgctctaagctca

SEQ ID NO: 2044048 - DNA, 25 bp, Homo sapien
tgctaattgctctaagctcataaag

SEQ ID NO: 2044049 - DNA, 25 bp, Homo sapien
tcagaagcctgaggccactgagctt

SEQ ID NO: 2044050 - DNA, 25 bp, Homo sapien
agcctgaggccactgagctttgaac

SEQ ID NO: 2044051 - DNA, 25 bp, Homo sapien
gaagcctgaggccactgagctttga

SEQ ID NO: 2044052 - DNA, 25 bp, Homo sapien
cagaagcctgaggccactgagcttt

SEQ ID NO: 2044053 - DNA, 25 bp, Homo sapien
gaaccccaaactgaagtcattgagc

SEQ ID NO: 2044054 - DNA, 25 bp, Homo sapien
gcagccctggatggattcttttctt

SEQ ID NO: 2044055 - DNA, 25 bp, Homo sapien
gatccattataagccccaacaactg

SEQ ID NO: 2044056 - DNA, 25 bp, Homo sapien
ttgtgaatcctgagtcttagagcct

SEQ ID NO: 2044057 - DNA, 25 bp, Homo sapien
cagtttctgaggcattctcaactaa

SEQ ID NO: 2044058 - DNA, 25 bp, Homo sapien
taagacgatacatagggcaataacc

SEQ ID NO: 2044059 - DNA, 25 bp, Homo sapien
ggttgagaaccactccagtttctga

SEQ ID NO: 2044060 - DNA, 25 bp, Homo sapien
taggagttgaatccatcgttcctcc

SEQ ID NO: 2044061 - DNA, 25 bp, Homo sapien
ccctaggatggaaggtcttggaagt

SEQ ID NO: 2044062 - DNA, 25 bp, Homo sapien
aagcctctcagtagtgatgatccct

SEQ ID NO: 2044063 - DNA, 25 bp, Homo sapien
tctcagtagtgatgatccctaggat

SEQ ID NO: 2044064 - DNA, 25 bp, Homo sapien
gcctctcagtagtgatgatccctag

SEQ ID NO: 2044065 - DNA, 25 bp, Homo sapien
catgagaacgagagagattatcggc

SEQ ID NO: 2044066 - DNA, 25 bp, Homo sapien
atacttccctcatgagaacgagaga

SEQ ID NO: 2044067 - DNA, 25 bp, Homo sapien
cctcatgagaacgagagagattatc

SEQ ID NO: 2044068 - DNA, 25 bp, Homo sapien
cttccctcatgagaacgagagagat

SEQ ID NO: 2044069 - DNA, 25 bp, Homo sapien
gtcattaaactctgggtcctaacca

SEQ ID NO: 2044070 - DNA, 25 bp, Homo sapien
gcttgttctgagttagagaggtcat

SEQ ID NO: 2044071 - DNA, 25 bp, Homo sapien
caactctcctgcttgttctgagtta

SEQ ID NO: 2044072 - DNA, 25 bp, Homo sapien
gggtgtatctccagaacaactctcc

SEQ ID NO: 2044073 - DNA, 25 bp, Homo sapien
gatgccgcagcaatagaacatgatg

SEQ ID NO: 2044074 - DNA, 25 bp, Homo sapien
gaagcaggtcatacaaacaattttg

SEQ ID NO: 2044075 - DNA, 25 bp, Homo sapien
gatgggagcctaaatttacaagatg

SEQ ID NO: 2044076 - DNA, 25 bp, Homo sapien
gaacatgatgcaaatgatgggagcc

SEQ ID NO: 2044077 - DNA, 25 bp, Homo sapien
ctgctgtagagggcgccatgtgcac

SEQ ID NO: 2044078 - DNA, 25 bp, Homo sapien
ccagtaggttcgctgctgtagaggg

SEQ ID NO: 2044079 - DNA, 25 bp, Homo sapien
gagggcgccatgtgcaccgtgcacc

SEQ ID NO: 2044080 - DNA, 25 bp, Homo sapien
ggttcgctgctgtagagggcgccat

SEQ ID NO: 2044081 - DNA, 25 bp, Homo sapien
tccggagcccggtcctgctccgaag

SEQ ID NO: 2044082 - DNA, 25 bp, Homo sapien
tccgaccccacctcccatgggcagc

SEQ ID NO: 2044083 - DNA, 25 bp, Homo sapien
tccgaagcccggtcctgctccgacc

SEQ ID NO: 2044084 - DNA, 25 bp, Homo sapien
atgggcagcccctacccatggctcc

SEQ ID NO: 2044085 - DNA, 25 bp, Homo sapien
tctgatattcccagggaattgcact

SEQ ID NO: 2044086 - DNA, 25 bp, Homo sapien
ctgatcacaggaagatgagtctcag

SEQ ID NO: 2044087 - DNA, 25 bp, Homo sapien
tcagaggtaggcatagaaatgccag

SEQ ID NO: 2044088 - DNA, 25 bp, Homo sapien
gtctcagaggtaggcatagaaatgc

SEQ ID NO: 2044089 - DNA, 25 bp, Homo sapien
gtaggcatagaaatgccagagctct

SEQ ID NO: 2044090 - DNA, 25 bp, Homo sapien
ttttggtgttagtatggtaggcatg

SEQ ID NO: 2044091 - DNA, 25 bp, Homo sapien
aattttggtgttagtatggtaggca

SEQ ID NO: 2044092 - DNA, 25 bp, Homo sapien
cgtaattttggtgttagtatggtag

SEQ ID NO: 2044093 - DNA, 25 bp, Homo sapien
taattttggtgttagtatggtaggc

SEQ ID NO: 2044094 - DNA, 25 bp, Homo sapien
tctgcaaatagaggacccctccatg

SEQ ID NO: 2044095 - DNA, 25 bp, Homo sapien
aaagagggcctcaatatcctgcagg

SEQ ID NO: 2044096 - DNA, 25 bp, Homo sapien
tcctggtgcttacatcaatctgttg

SEQ ID NO: 2044097 - DNA, 25 bp, Homo sapien
gatgaatgggttactcagagttgga

SEQ ID NO: 2044098 - DNA, 25 bp, Homo sapien
gcatgggggccttacacccgatatt

SEQ ID NO: 2044099 - DNA, 25 bp, Homo sapien
catgcagttgtgcagcatgggggcc

SEQ ID NO: 2044100 - DNA, 25 bp, Homo sapien
acacccgatattctccaagaggacc

SEQ ID NO: 2044101 - DNA, 25 bp, Homo sapien
ggccttacacccgatattctccaag

SEQ ID NO: 2044102 - DNA, 25 bp, Homo sapien
gcctggatgatcagtgttaatgttc

SEQ ID NO: 2044103 - DNA, 25 bp, Homo sapien
tgtccatcttgatctgaaggcctgg

SEQ ID NO: 2044104 - DNA, 25 bp, Homo sapien
tgtttggatcctccatgtccatctt

SEQ ID NO: 2044105 - DNA, 25 bp, Homo sapien
tgttaatgttctggcttagctgctg

SEQ ID NO: 2044106 - DNA, 25 bp, Homo sapien
cagttaaaactttgggtgctgagtc

SEQ ID NO: 2044107 - DNA, 25 bp, Homo sapien
agttaacatagcaggtctggctgtt

SEQ ID NO: 2044108 - DNA, 25 bp, Homo sapien
gagtctggaatattggtacttgcca

SEQ ID NO: 2044109 - DNA, 25 bp, Homo sapien
aaaggcctgctgataaggttagcct

SEQ ID NO: 2044110 - DNA, 25 bp, Homo sapien
tcaagggccagagatatctcaccag

SEQ ID NO: 2044111 - DNA, 25 bp, Homo sapien
tatcccacattcttctcaagggcca

SEQ ID NO: 2044112 - DNA, 25 bp, Homo sapien
tcaatcaattgtctggaggaattcc

SEQ ID NO: 2044113 - DNA, 25 bp, Homo sapien
gatatctcaccagtggttgcatcca

SEQ ID NO: 2044114 - DNA, 25 bp, Homo sapien
caccagctgccgacactgtgtgtaa

SEQ ID NO: 2044115 - DNA, 25 bp, Homo sapien
actcaccagctgccgacactgtgtg

SEQ ID NO: 2044116 - DNA, 25 bp, Homo sapien
tgccgacactgtgtgtaatgagcaa

SEQ ID NO: 2044117 - DNA, 25 bp, Homo sapien
cagctgccgacactgtgtgtaatga

SEQ ID NO: 2044118 - DNA, 25 bp, Homo sapien
ccacgtaggcagatcggacggagaa

SEQ ID NO: 2044119 - DNA, 25 bp, Homo sapien
tcggacggagaagggcttggtgcct

SEQ ID NO: 2044120 - DNA, 25 bp, Homo sapien
cagatcggacggagaagggcttggt

SEQ ID NO: 2044121 - DNA, 25 bp, Homo sapien
cttccacgtaggcagatcggacgga

SEQ ID NO: 2044122 - DNA, 25 bp, Homo sapien
tgtggttcagacgtcctccatctgt

SEQ ID NO: 2044123 - DNA, 25 bp, Homo sapien
ttccttctcaggatgctcactaggt

SEQ ID NO: 2044124 - DNA, 25 bp, Homo sapien
caattaatttggagctggagacaag

SEQ ID NO: 2044125 - DNA, 25 bp, Homo sapien
ggtattatgtcctgtctccgtgtgg

SEQ ID NO: 2044126 - DNA, 25 bp, Homo sapien
ccctggcttgccattcagtctgtat

SEQ ID NO: 2044127 - DNA, 25 bp, Homo sapien
tccctggcttgccattcagtctgta

SEQ ID NO: 2044128 - DNA, 25 bp, Homo sapien
cagaggcagcgtccccactcagccc

SEQ ID NO: 2044129 - DNA, 25 bp, Homo sapien
tttccttaggtgtgcgccgcgcata

SEQ ID NO: 2044130 - DNA, 25 bp, Homo sapien
attttccttaggtgtgcgccgcgca

SEQ ID NO: 2044131 - DNA, 25 bp, Homo sapien
gccatccgagtagaatagactttca

SEQ ID NO: 2044132 - DNA, 25 bp, Homo sapien
cttggcctggccatccgagtagaat

SEQ ID NO: 2044133 - DNA, 25 bp, Homo sapien
ttttgcagttaaccgagatgcctgg

SEQ ID NO: 2044134 - DNA, 25 bp, Homo sapien
tatgatgtaattaacagagccgcag

SEQ ID NO: 2044135 - DNA, 25 bp, Homo sapien
ggtcacttggcacgtctgagccgaa

SEQ ID NO: 2044136 - DNA, 25 bp, Homo sapien
aacaggatggcaggcgatgcttcca

SEQ ID NO: 2044137 - DNA, 25 bp, Homo sapien
ctggaacaattcagcacctcacatt

SEQ ID NO: 2044138 - DNA, 25 bp, Homo sapien
ttcagcacctcacattgattttcca

SEQ ID NO: 2044139 - DNA, 25 bp, Homo sapien
caattcagcacctcacattgatttt

SEQ ID NO: 2044140 - DNA, 25 bp, Homo sapien
tcagcacctcacattgattttccat

SEQ ID NO: 2044141 - DNA, 25 bp, Homo sapien
caagtaccaagagtgcagcgcagct

SEQ ID NO: 2044142 - DNA, 25 bp, Homo sapien
gatattgaagtcagtaaaagtggcc

SEQ ID NO: 2044143 - DNA, 25 bp, Homo sapien
ttgaagtcagtaaaagtggcccctg

SEQ ID NO: 2044144 - DNA, 25 bp, Homo sapien
ttgtctctctgaccaagtaccaaga

SEQ ID NO: 2044145 - DNA, 25 bp, Homo sapien
tgttactcagagtcttgtgcagagc

SEQ ID NO: 2044146 - DNA, 25 bp, Homo sapien
tttgttggccaataccacaccaggg

SEQ ID NO: 2044147 - DNA, 25 bp, Homo sapien
caccagggtcaagtaggatgcagtt

SEQ ID NO: 2044148 - DNA, 25 bp, Homo sapien
gccccagatcccaggttgttgagcc

SEQ ID NO: 2044149 - DNA, 25 bp, Homo sapien
cagggaattgtctctccttgagcag

SEQ ID NO: 2044150 - DNA, 25 bp, Homo sapien
agctgctgaagcatcaggcacaggg

SEQ ID NO: 2044151 - DNA, 25 bp, Homo sapien
ttgaggtccgaagcagcattttttc

SEQ ID NO: 2044152 - DNA, 25 bp, Homo sapien
ggatagcttttgtgcaatgtaattg

SEQ ID NO: 2044153 - DNA, 25 bp, Homo sapien
actaccccatcacatttattaaagg

SEQ ID NO: 2044154 - DNA, 25 bp, Homo sapien
tccaaactaccccatcacatttatt

SEQ ID NO: 2044155 - DNA, 25 bp, Homo sapien
caaactaccccatcacatttattaa

SEQ ID NO: 2044156 - DNA, 25 bp, Homo sapien
taccccatcacatttattaaaggga

SEQ ID NO: 2044157 - DNA, 25 bp, Homo sapien
ttgcaagcggactgttaagcaatta

SEQ ID NO: 2044158 - DNA, 25 bp, Homo sapien
tctgcctgttcaacttgcaagcgga

SEQ ID NO: 2044159 - DNA, 25 bp, Homo sapien
ggttatgtttcatggaaagcttgtc

SEQ ID NO: 2044160 - DNA, 25 bp, Homo sapien
ctccttatctgcctgttcaacttgc

SEQ ID NO: 2044161 - DNA, 25 bp, Homo sapien
tttcctggtggcaagtgttcctgat

SEQ ID NO: 2044162 - DNA, 25 bp, Homo sapien
tccattctgccctctcaaacaccaa

SEQ ID NO: 2044163 - DNA, 25 bp, Homo sapien
tcctggtggcaagtgttcctgatgg

SEQ ID NO: 2044164 - DNA, 25 bp, Homo sapien
tgggaagtgaatcaggggtccattc

SEQ ID NO: 2044165 - DNA, 25 bp, Homo sapien
ggaaacgtgtcaccctctctgtgag

SEQ ID NO: 2044166 - DNA, 25 bp, Homo sapien
aggaaacgtgtcaccctctctgtga

SEQ ID NO: 2044167 - DNA, 25 bp, Homo sapien
gaaacgtgtcaccctctctgtgagt

SEQ ID NO: 2044168 - DNA, 25 bp, Homo sapien
catcaggaaacgtgtcaccctctct

SEQ ID NO: 2044169 - DNA, 25 bp, Homo sapien
gatggaagtgtagagcatatctctg

SEQ ID NO: 2044170 - DNA, 25 bp, Homo sapien
ccaccattgtgaatgctggcattgg

SEQ ID NO: 2044171 - DNA, 25 bp, Homo sapien
gccccaccattgtgaatgctggcat

SEQ ID NO: 2044172 - DNA, 25 bp, Homo sapien
aagtgtagagcatatctctgcactg

SEQ ID NO: 2044173 - DNA, 25 bp, Homo sapien
taggacaggaagtgtaatccatcat

SEQ ID NO: 2044174 - DNA, 25 bp, Homo sapien
taggatgatgggcatgttggaacat

SEQ ID NO: 2044175 - DNA, 25 bp, Homo sapien
gtttttccatccactgtaacactgg

SEQ ID NO: 2044176 - DNA, 25 bp, Homo sapien
tgtcatccagttgtatcccttgagc

SEQ ID NO: 2044177 - DNA, 25 bp, Homo sapien
caaccagccagtcttagcagcacaa

SEQ ID NO: 2044178 - DNA, 25 bp, Homo sapien
tggtgaacttcttgctaatcttgct

SEQ ID NO: 2044179 - DNA, 25 bp, Homo sapien
tgggagctgtttatgttgggtccac

SEQ ID NO: 2044180 - DNA, 25 bp, Homo sapien
gatgaaaggtgtatgcttaccaccc

SEQ ID NO: 2044181 - DNA, 25 bp, Homo sapien
gctatcagtgggtctactgttttgc

SEQ ID NO: 2044182 - DNA, 25 bp, Homo sapien
tgatattgctttcgtatctcgccat

SEQ ID NO: 2044183 - DNA, 25 bp, Homo sapien
actgttttgctcagaattgtcttca

SEQ ID NO: 2044184 - DNA, 25 bp, Homo sapien
tataaagggcgctggtagagtagca

SEQ ID NO: 2044185 - DNA, 25 bp, Homo sapien
ggcagctgctgtctggtgaaccgaa

SEQ ID NO: 2044186 - DNA, 25 bp, Homo sapien
ctgctgtctggtgaaccgaaacggg

SEQ ID NO: 2044187 - DNA, 25 bp, Homo sapien
ccgaaacggggcattcacaaggtgg

SEQ ID NO: 2044188 - DNA, 25 bp, Homo sapien
cagctgctgtctggtgaaccgaaac

SEQ ID NO: 2044189 - DNA, 25 bp, Homo sapien
tctaatccatgtaagagatcctggt

SEQ ID NO: 2044190 - DNA, 25 bp, Homo sapien
gagatcctggtcttttagcagaaat

SEQ ID NO: 2044191 - DNA, 25 bp, Homo sapien
taggctctaatccatgtaagagatc

SEQ ID NO: 2044192 - DNA, 25 bp, Homo sapien
tctcccggtcaggatttttaggctc

SEQ ID NO: 2044193 - DNA, 25 bp, Homo sapien
tgctctgtcacagcgtcattttggg

SEQ ID NO: 2044194 - DNA, 25 bp, Homo sapien
cttctttagcggttggctgggcaca

SEQ ID NO: 2044195 - DNA, 25 bp, Homo sapien
gagactgaactccttctttagcggt

SEQ ID NO: 2044196 - DNA, 25 bp, Homo sapien
ggttagttgtttgtctattctgtcc

SEQ ID NO: 2044197 - DNA, 25 bp, Homo sapien
aatacgaggtgactctcctgctcca

SEQ ID NO: 2044198 - DNA, 25 bp, Homo sapien
tagctgccagccatgaatacgaggt

SEQ ID NO: 2044199 - DNA, 25 bp, Homo sapien
ggaagaatagctgccagccatgaat

SEQ ID NO: 2044200 - DNA, 25 bp, Homo sapien
cagccatgaatacgaggtgactctc

SEQ ID NO: 2044201 - DNA, 25 bp, Homo sapien
gccaactctgaagtggcatttgctt

SEQ ID NO: 2044202 - DNA, 25 bp, Homo sapien
cttcctggactttggcttgcccctg

SEQ ID NO: 2044203 - DNA, 25 bp, Homo sapien
ctactggcatgttccctgataagag

SEQ ID NO: 2044204 - DNA, 25 bp, Homo sapien
atgccaactctgaagtggcatttgc

SEQ ID NO: 2044205 - DNA, 25 bp, Homo sapien
gatgtgagggaccacgctgatcctt

SEQ ID NO: 2044206 - DNA, 25 bp, Homo sapien
tgggctctatccaaggtcatcaaat

SEQ ID NO: 2044207 - DNA, 25 bp, Homo sapien
tctatccaaggtcatcaaatgttca

SEQ ID NO: 2044208 - DNA, 25 bp, Homo sapien
tcaaagtccaactcttggagaaccc

SEQ ID NO: 2044209 - DNA, 25 bp, Homo sapien
caactgtctccattcagggcggttg

SEQ ID NO: 2044210 - DNA, 25 bp, Homo sapien
gtctccattcagggcggttgtgtgc

SEQ ID NO: 2044211 - DNA, 25 bp, Homo sapien
tctccattcagggcggttgtgtgcc

SEQ ID NO: 2044212 - DNA, 25 bp, Homo sapien
aagtgtaccagggactgcatctact

SEQ ID NO: 2044213 - DNA, 25 bp, Homo sapien
tgtaccagggactgcatctacttcc

SEQ ID NO: 2044214 - DNA, 25 bp, Homo sapien
gtgtaccagggactgcatctacttc

SEQ ID NO: 2044215 - DNA, 25 bp, Homo sapien
taccagggactgcatctacttcctg

SEQ ID NO: 2044216 - DNA, 25 bp, Homo sapien
ggaaagcacagaggatgagaagaat

SEQ ID NO: 2044217 - DNA, 25 bp, Homo sapien
gaaagcacagaggatgagaagaatt

SEQ ID NO: 2044218 - DNA, 25 bp, Homo sapien
tggaaagcacagaggatgagaagaa

SEQ ID NO: 2044219 - DNA, 25 bp, Homo sapien
ctggaaagcacagaggatgagaaga

SEQ ID NO: 2044220 - DNA, 25 bp, Homo sapien
acttattcaatgcttgaacagctct

SEQ ID NO: 2044221 - DNA, 25 bp, Homo sapien
gacacatatcttaaatctctgcccc

SEQ ID NO: 2044222 - DNA, 25 bp, Homo sapien
gatttccgtcagtattattctgtca

SEQ ID NO: 2044223 - DNA, 25 bp, Homo sapien
gacagaaccagaacagcttttccac

SEQ ID NO: 2044224 - DNA, 25 bp, Homo sapien
aaatgaatgaccacttggtggctga

SEQ ID NO: 2044225 - DNA, 25 bp, Homo sapien
tcgtagcattcctggccatctgggc

SEQ ID NO: 2044226 - DNA, 25 bp, Homo sapien
gaattaagcggtgccaagtgctcag

SEQ ID NO: 2044227 - DNA, 25 bp, Homo sapien
tctccaccgggagcaaagttctctg

SEQ ID NO: 2044228 - DNA, 25 bp, Homo sapien
cagtgggcatgagtggtcatgaatt

SEQ ID NO: 2044229 - DNA, 25 bp, Homo sapien
cacaggagcaaaagggctccccgca

SEQ ID NO: 2044230 - DNA, 25 bp, Homo sapien
gctccccgcaatggcaaggtcaggc

SEQ ID NO: 2044231 - DNA, 25 bp, Homo sapien
aagggctccccgcaatggcaaggtc

SEQ ID NO: 2044232 - DNA, 25 bp, Homo sapien
agcaaaagggctccccgcaatggca

SEQ ID NO: 2044233 - DNA, 25 bp, Homo sapien
ccagctgtccgtgctgtcagcttgg

SEQ ID NO: 2044234 - DNA, 25 bp, Homo sapien
tgtcagcttgggatcccatttggct

SEQ ID NO: 2044235 - DNA, 25 bp, Homo sapien
gacctatgggagttggagggcccca

SEQ ID NO: 2044236 - DNA, 25 bp, Homo sapien
cttaagactcccagttcagttccca

SEQ ID NO: 2044237 - DNA, 25 bp, Homo sapien
cagactggaggcgttcatctgctgc

SEQ ID NO: 2044238 - DNA, 25 bp, Homo sapien
gttgccagactggaggcgttcatct

SEQ ID NO: 2044239 - DNA, 25 bp, Homo sapien
tctgctgcatgggatgactgagtga

SEQ ID NO: 2044240 - DNA, 25 bp, Homo sapien
ctgctgcatgggatgactgagtgac

SEQ ID NO: 2044241 - DNA, 25 bp, Homo sapien
aagggtgttttgcaggggaggtgca

SEQ ID NO: 2044242 - DNA, 25 bp, Homo sapien
aaagagtgatgaggaaaacatccag

SEQ ID NO: 2044243 - DNA, 25 bp, Homo sapien
atccagaggtgttgaaagggtgttt

SEQ ID NO: 2044244 - DNA, 25 bp, Homo sapien
gatgaggaaaacatccagaggtgtt

SEQ ID NO: 2044245 - DNA, 25 bp, Homo sapien
ctcctcgagggccatgaccagatct

SEQ ID NO: 2044246 - DNA, 25 bp, Homo sapien
tgaccagatctaagtcatctttgca

SEQ ID NO: 2044247 - DNA, 25 bp, Homo sapien
cttccagtcagtgggctcctcgagg

SEQ ID NO: 2044248 - DNA, 25 bp, Homo sapien
ccttccagtcagtgggctcctcgag

SEQ ID NO: 2044249 - DNA, 25 bp, Homo sapien
ggaacagaagaggctcacaacgcat

SEQ ID NO: 2044250 - DNA, 25 bp, Homo sapien
ctggaacagaagaggctcacaacgc

SEQ ID NO: 2044251 - DNA, 25 bp, Homo sapien
tggaacagaagaggctcacaacgca

SEQ ID NO: 2044252 - DNA, 25 bp, Homo sapien
cctcagccacctgaaattctctggg

SEQ ID NO: 2044253 - DNA, 25 bp, Homo sapien
tattcggtgccctcaagagctagtt

SEQ ID NO: 2044254 - DNA, 25 bp, Homo sapien
atctccaaagtgatcctagaaagtg

SEQ ID NO: 2044255 - DNA, 25 bp, Homo sapien
ctatagtgggtaggtgtgatacttc

SEQ ID NO: 2044256 - DNA, 25 bp, Homo sapien
tgaggaactttttgaatacgtagat

SEQ ID NO: 2044257 - DNA, 25 bp, Homo sapien
tggccagtaaagcatgcccggttcg

SEQ ID NO: 2044258 - DNA, 25 bp, Homo sapien
ccagaataatgagaatttcgattcc

SEQ ID NO: 2044259 - DNA, 25 bp, Homo sapien
gcccggttcgctgatggctttcaga

SEQ ID NO: 2044260 - DNA, 25 bp, Homo sapien
aattgtggactgtaatacttccaga

SEQ ID NO: 2044261 - DNA, 25 bp, Homo sapien
tgtactctttactgccattggcgct

SEQ ID NO: 2044262 - DNA, 25 bp, Homo sapien
cttggacagcgaagccgacttgttg

SEQ ID NO: 2044263 - DNA, 25 bp, Homo sapien
cattggcgctcattgcaacaactgc

SEQ ID NO: 2044264 - DNA, 25 bp, Homo sapien
tgccttgtgcccatttagggaactg

SEQ ID NO: 2044265 - DNA, 25 bp, Homo sapien
aacaggaccggtccgtggaacacag

SEQ ID NO: 2044266 - DNA, 25 bp, Homo sapien
cctggctgtcaaaggctgactgtaa

SEQ ID NO: 2044267 - DNA, 25 bp, Homo sapien
tattaacgtgcagtgcaaacaggac

SEQ ID NO: 2044268 - DNA, 25 bp, Homo sapien
catatgcatcctcgaaaggactggc

SEQ ID NO: 2044269 - DNA, 25 bp, Homo sapien
cttgcttcttgatgtgaaccctcat

SEQ ID NO: 2044270 - DNA, 25 bp, Homo sapien
aatctgcacgtgaccactgtctgga

SEQ ID NO: 2044271 - DNA, 25 bp, Homo sapien
tttggaatcctatgtcgggggtagc

SEQ ID NO: 2044272 - DNA, 25 bp, Homo sapien
aaaaccaggctgtcttccacttgcc

SEQ ID NO: 2044273 - DNA, 25 bp, Homo sapien
gcaaatctgcacgtgaccactgtct

SEQ ID NO: 2044274 - DNA, 25 bp, Homo sapien
tctctgcagggatctgtgtgcagcc

SEQ ID NO: 2044275 - DNA, 25 bp, Homo sapien
cttgctgtcttctggtcccttcaca

SEQ ID NO: 2044276 - DNA, 25 bp, Homo sapien
taagctcctccgtagcaatctggcc

SEQ ID NO: 2044277 - DNA, 25 bp, Homo sapien
acaccttggtatggcttgtcccagt

SEQ ID NO: 2044278 - DNA, 25 bp, Homo sapien
gttaaaaatggatctcctaaagatc

SEQ ID NO: 2044279 - DNA, 25 bp, Homo sapien
taaaaatggatctcctaaagatcat

SEQ ID NO: 2044280 - DNA, 25 bp, Homo sapien
ttaaaaatggatctcctaaagatca

SEQ ID NO: 2044281 - DNA, 25 bp, Homo sapien
gctgtgggtttgcagccatgtcttt

SEQ ID NO: 2044282 - DNA, 25 bp, Homo sapien
agtagccttccttccgaacacctgg

SEQ ID NO: 2044283 - DNA, 25 bp, Homo sapien
aagtagccttccttccgaacacctg

SEQ ID NO: 2044284 - DNA, 25 bp, Homo sapien
cttgtggttggtcctcttgccttca

SEQ ID NO: 2044285 - DNA, 25 bp, Homo sapien
tgccttcagacaggcaagaactttc

SEQ ID NO: 2044286 - DNA, 25 bp, Homo sapien
aaatggagcttacggctccttgggc

SEQ ID NO: 2044287 - DNA, 25 bp, Homo sapien
gaaaaacctgaccactgaacagctc

SEQ ID NO: 2044288 - DNA, 25 bp, Homo sapien
aggtgctccctgaccgtgaagtgtg

SEQ ID NO: 2044289 - DNA, 25 bp, Homo sapien
caaactaggtgctgaagagacgaag

SEQ ID NO: 2044290 - DNA, 25 bp, Homo sapien
gcggaaatttcacacagatgcaagt

SEQ ID NO: 2044291 - DNA, 25 bp, Homo sapien
catcagggtatttggcagcatcgtt

SEQ ID NO: 2044292 - DNA, 25 bp, Homo sapien
cagtttctggtatttagtttatgcc

SEQ ID NO: 2044293 - DNA, 25 bp, Homo sapien
catcaagatctgtcagtttccagct

SEQ ID NO: 2044294 - DNA, 25 bp, Homo sapien
atccgaaagactctcaagatcatca

SEQ ID NO: 2044295 - DNA, 25 bp, Homo sapien
tagtttatgcctcaaatccgaaaga

SEQ ID NO: 2044296 - DNA, 25 bp, Homo sapien
taacctgaattagtccctgaagcca

SEQ ID NO: 2044297 - DNA, 25 bp, Homo sapien
cctgtggctgagcaccccatctctt

SEQ ID NO: 2044298 - DNA, 25 bp, Homo sapien
ttaacctgaattagtccctgaagcc

SEQ ID NO: 2044299 - DNA, 25 bp, Homo sapien
aacctgaattagtccctgaagccag

SEQ ID NO: 2044300 - DNA, 25 bp, Homo sapien
tgactttgatcttctcctcgctcac

SEQ ID NO: 2044301 - DNA, 25 bp, Homo sapien
tcactgaattatgggagttccctgc

SEQ ID NO: 2044302 - DNA, 25 bp, Homo sapien
cgtgtatgtgggctagctgactgta

SEQ ID NO: 2044303 - DNA, 25 bp, Homo sapien
cagccatcagctgattgcaccttgc

SEQ ID NO: 2044304 - DNA, 25 bp, Homo sapien
tagtgggaacatggactcactgaat

SEQ ID NO: 2044305 - DNA, 25 bp, Homo sapien
ctgactccacaggacagggatgaag

SEQ ID NO: 2044306 - DNA, 25 bp, Homo sapien
ttggctgtcagcaagtccaaagttg

SEQ ID NO: 2044307 - DNA, 25 bp, Homo sapien
agcaatagtggaggaaatcagcggc

SEQ ID NO: 2044308 - DNA, 25 bp, Homo sapien
aaatcagcggctggtttaactgggt

SEQ ID NO: 2044309 - DNA, 25 bp, Homo sapien
catcaaggacatgagaggcagaagt

SEQ ID NO: 2044310 - DNA, 25 bp, Homo sapien
tgaagctctgtagcaaggcagcgcc

SEQ ID NO: 2044311 - DNA, 25 bp, Homo sapien
gccagaatgatttcctacatcaagg

SEQ ID NO: 2044312 - DNA, 25 bp, Homo sapien
agatttgacaggaagttggccagaa

SEQ ID NO: 2044313 - DNA, 25 bp, Homo sapien
gatccttttcaaacagcagtttctg

SEQ ID NO: 2044314 - DNA, 25 bp, Homo sapien
aagatatatttaagcatcagatcct

SEQ ID NO: 2044315 - DNA, 25 bp, Homo sapien
caaacagcagtttctgaagacaaat

SEQ ID NO: 2044316 - DNA, 25 bp, Homo sapien
gatatatttaagcatcagatccttt

SEQ ID NO: 2044317 - DNA, 25 bp, Homo sapien
aaattgacgttacagtagaagcaca

SEQ ID NO: 2044318 - DNA, 25 bp, Homo sapien
gaagctcaaaccacataaagggcaa

SEQ ID NO: 2044319 - DNA, 25 bp, Homo sapien
aagcttgcgtctccgggcggcagaa

SEQ ID NO: 2044320 - DNA, 25 bp, Homo sapien
attctctggcaagcttgcgtctccg

SEQ ID NO: 2044321 - DNA, 25 bp, Homo sapien
tttgtgccgtggatccatctgggct

SEQ ID NO: 2044322 - DNA, 25 bp, Homo sapien
tccgttctgaaacatcaagctccag

SEQ ID NO: 2044323 - DNA, 25 bp, Homo sapien
tcctgtattccctcaacatctgttc

SEQ ID NO: 2044324 - DNA, 25 bp, Homo sapien
tggagaacaattcacctaagacaga

SEQ ID NO: 2044325 - DNA, 25 bp, Homo sapien
tttctggaagttcgctctgatccaa

SEQ ID NO: 2044326 - DNA, 25 bp, Homo sapien
tctggaagttcgctctgatccaaaa

SEQ ID NO: 2044327 - DNA, 25 bp, Homo sapien
tggaagttcgctctgatccaaaatt

SEQ ID NO: 2044328 - DNA, 25 bp, Homo sapien
gtctttctggaagttcgctctgatc

SEQ ID NO: 2044329 - DNA, 25 bp, Homo sapien
actgagaggcatccgctccagcagc

SEQ ID NO: 2044330 - DNA, 25 bp, Homo sapien
gcactgagaggcatccgctccagca

SEQ ID NO: 2044331 - DNA, 25 bp, Homo sapien
cactgagaggcatccgctccagcag

SEQ ID NO: 2044332 - DNA, 25 bp, Homo sapien
gactctaagcttctgctcaatgagg

SEQ ID NO: 2044333 - DNA, 25 bp, Homo sapien
cttcccacagaaggagcaatggaga

SEQ ID NO: 2044334 - DNA, 25 bp, Homo sapien
tctctacagcataggcgggctacca

SEQ ID NO: 2044335 - DNA, 25 bp, Homo sapien
tgagccttggtccttgctagaagtt

SEQ ID NO: 2044336 - DNA, 25 bp, Homo sapien
tctggttcggataggaagactgcta

SEQ ID NO: 2044337 - DNA, 25 bp, Homo sapien
tagtcagggtcaggatcaggtcccc

SEQ ID NO: 2044338 - DNA, 25 bp, Homo sapien
gaaaggcagcacctaaccatgcagg

SEQ ID NO: 2044339 - DNA, 25 bp, Homo sapien
tttaattgatgtacgtgagcccagg

SEQ ID NO: 2044340 - DNA, 25 bp, Homo sapien
ctgaagcctctagaggagatgagga

SEQ ID NO: 2044341 - DNA, 25 bp, Homo sapien
tctagaggagatgaggaacccctca

SEQ ID NO: 2044342 - DNA, 25 bp, Homo sapien
ctgaagccactggatttcacatgtc

SEQ ID NO: 2044343 - DNA, 25 bp, Homo sapien
atttcacatgtctctgaagcctcta

SEQ ID NO: 2044344 - DNA, 25 bp, Homo sapien
ggtattacaggctcccaccaccacc

SEQ ID NO: 2044345 - DNA, 25 bp, Homo sapien
gcaatggcgtggtcttggctactgc

SEQ ID NO: 2044346 - DNA, 25 bp, Homo sapien
aatggcgtggtcttggctactgcaa

SEQ ID NO: 2044347 - DNA, 25 bp, Homo sapien
cctccacctcccagattcaagtgat

SEQ ID NO: 2044348 - DNA, 25 bp, Homo sapien
attttggtgttcctgcacagtgcca

SEQ ID NO: 2044349 - DNA, 25 bp, Homo sapien
taatagtgctattcaactactgggc

SEQ ID NO: 2044350 - DNA, 25 bp, Homo sapien
cattggatagcattgtaggcttccc

SEQ ID NO: 2044351 - DNA, 25 bp, Homo sapien
tgctattatttgttacaggccccaa

SEQ ID NO: 2044352 - DNA, 25 bp, Homo sapien
tcttgctgtagatgaggccttcatt

SEQ ID NO: 2044353 - DNA, 25 bp, Homo sapien
tgctgtagatgaggccttcattggc

SEQ ID NO: 2044354 - DNA, 25 bp, Homo sapien
tcattcttgctgtagatgaggcctt

SEQ ID NO: 2044355 - DNA, 25 bp, Homo sapien
attcttgctgtagatgaggccttca

SEQ ID NO: 2044356 - DNA, 25 bp, Homo sapien
gaaatagaatgtggaacctgtaccc

SEQ ID NO: 2044357 - DNA, 25 bp, Homo sapien
gcagtcaccaagataaccacagaaa

SEQ ID NO: 2044358 - DNA, 25 bp, Homo sapien
taacaacacgggaagtaagtgccac

SEQ ID NO: 2044359 - DNA, 25 bp, Homo sapien
tgacagagacctcttgtgcccaggt

SEQ ID NO: 2044360 - DNA, 25 bp, Homo sapien
cacaggagcaatggcctcatggtga

SEQ ID NO: 2044361 - DNA, 25 bp, Homo sapien
tattctttagagtagcaggacttct

SEQ ID NO: 2044362 - DNA, 25 bp, Homo sapien
tgtgaacggagctgatgacgtcacc

SEQ ID NO: 2044363 - DNA, 25 bp, Homo sapien
tccatcagtttcagtgactccagtc

SEQ ID NO: 2044364 - DNA, 25 bp, Homo sapien
gaaaggctgtatgcaccaggaatgg

SEQ ID NO: 2044365 - DNA, 25 bp, Homo sapien
ctcggcacactgtgggtgaacccat

SEQ ID NO: 2044366 - DNA, 25 bp, Homo sapien
ttctggctgttccaatagcgaaagg

SEQ ID NO: 2044367 - DNA, 25 bp, Homo sapien
gaatggtgctgccactcggcacact

SEQ ID NO: 2044368 - DNA, 25 bp, Homo sapien
ttcgcaacccgaagtgattccactt

SEQ ID NO: 2044369 - DNA, 25 bp, Homo sapien
cctggatgtgaacttagatgaggaa

SEQ ID NO: 2044370 - DNA, 25 bp, Homo sapien
aacccgaagtgattccacttcatca

SEQ ID NO: 2044371 - DNA, 25 bp, Homo sapien
gaatgacattcgcaacccgaagtga

SEQ ID NO: 2044372 - DNA, 25 bp, Homo sapien
ccttgtctggagagtggttcatttc

SEQ ID NO: 2044373 - DNA, 25 bp, Homo sapien
gggacagttatcatgctaagcctgt

SEQ ID NO: 2044374 - DNA, 25 bp, Homo sapien
taaagaatgggccaaacctctgcag

SEQ ID NO: 2044375 - DNA, 25 bp, Homo sapien
gaatgggccaaacctctgcagacat

SEQ ID NO: 2044376 - DNA, 25 bp, Homo sapien
aggagatggtccttacattcccaaa

SEQ ID NO: 2044377 - DNA, 25 bp, Homo sapien
gaggagatggtccttacattcccaa

SEQ ID NO: 2044378 - DNA, 25 bp, Homo sapien
ggaggagatggtccttacattccca

SEQ ID NO: 2044379 - DNA, 25 bp, Homo sapien
tgattggtcctggaaaagagaactt

SEQ ID NO: 2044380 - DNA, 25 bp, Homo sapien
tgtggtctggtgcttccctaacaag

SEQ ID NO: 2044381 - DNA, 25 bp, Homo sapien
caaaccaaggtggaaatacccagtg

SEQ ID NO: 2044382 - DNA, 25 bp, Homo sapien
agtgaaaagtcttcactgtgggagg

SEQ ID NO: 2044383 - DNA, 25 bp, Homo sapien
cagagggaatgattagggaagttca

SEQ ID NO: 2044384 - DNA, 25 bp, Homo sapien
gagggaatgattagggaagttcatc

SEQ ID NO: 2044385 - DNA, 25 bp, Homo sapien
tcagagggaatgattagggaagttc

SEQ ID NO: 2044386 - DNA, 25 bp, Homo sapien
agggaatgattagggaagttcatct

SEQ ID NO: 2044387 - DNA, 25 bp, Homo sapien
tgggtttggagcgctgacaaatgtc

SEQ ID NO: 2044388 - DNA, 25 bp, Homo sapien
tcatgggtttggagcgctgacaaat

SEQ ID NO: 2044389 - DNA, 25 bp, Homo sapien
atgggtttggagcgctgacaaatgt

SEQ ID NO: 2044390 - DNA, 25 bp, Homo sapien
catgggtttggagcgctgacaaatg

SEQ ID NO: 2044391 - DNA, 25 bp, Homo sapien
tgcagggtggtaaaaacaaggcctg

SEQ ID NO: 2044392 - DNA, 25 bp, Homo sapien
gcagggtggtaaaaacaaggcctga

SEQ ID NO: 2044393 - DNA, 25 bp, Homo sapien
tagctcgtctttgcctcgttcctga

SEQ ID NO: 2044394 - DNA, 25 bp, Homo sapien
caagcaagtcgattggctgtcggag

SEQ ID NO: 2044395 - DNA, 25 bp, Homo sapien
gattggctgtcggagtagctcgtct

SEQ ID NO: 2044396 - DNA, 25 bp, Homo sapien
gctggctcaagcaagtcgattggct

SEQ ID NO: 2044397 - DNA, 25 bp, Homo sapien
taaaaccgagaaatacggcactgtc

SEQ ID NO: 2044398 - DNA, 25 bp, Homo sapien
gctgtgcctttgagcccatgagtcg

SEQ ID NO: 2044399 - DNA, 25 bp, Homo sapien
tctgctcgcaggcagtcacacatgg

SEQ ID NO: 2044400 - DNA, 25 bp, Homo sapien
tgagtcgccgatgaacttcagtggc

SEQ ID NO: 2044401 - DNA, 25 bp, Homo sapien
tgtgtcaaaatatgttgtctggaag

SEQ ID NO: 2044402 - DNA, 25 bp, Homo sapien
tgtcaaaatatgttgtctggaaggg

SEQ ID NO: 2044403 - DNA, 25 bp, Homo sapien
gtcaaaatatgttgtctggaagggg

SEQ ID NO: 2044404 - DNA, 25 bp, Homo sapien
ctgtgtcaaaatatgttgtctggaa

SEQ ID NO: 2044405 - DNA, 25 bp, Homo sapien
tgttccaattctccagtcagctccc

SEQ ID NO: 2044406 - DNA, 25 bp, Homo sapien
gttccaattctccagtcagctcccc

SEQ ID NO: 2044407 - DNA, 25 bp, Homo sapien
tgccatgtgacatgctttagcctca

SEQ ID NO: 2044408 - DNA, 25 bp, Homo sapien
gccatgtgacatgctttagcctcat

SEQ ID NO: 2044409 - DNA, 25 bp, Homo sapien
ccgcattgatgttggcttgccatgt

SEQ ID NO: 2044410 - DNA, 25 bp, Homo sapien
ttgatgttggcttgccatgtgacat

SEQ ID NO: 2044411 - DNA, 25 bp, Homo sapien
ctgggtcatcattataaatgggaaa

SEQ ID NO: 2044412 - DNA, 25 bp, Homo sapien
tgattaagccccagacaacactact

SEQ ID NO: 2044413 - DNA, 25 bp, Homo sapien
gaattctgggtgctgcttggcctct

SEQ ID NO: 2044414 - DNA, 25 bp, Homo sapien
tgggaaatctcataggtaaggactg

SEQ ID NO: 2044415 - DNA, 25 bp, Homo sapien
tcatattgccactttctcggtgctg

SEQ ID NO: 2044416 - DNA, 25 bp, Homo sapien
tattgccactttctcggtgctggtc

SEQ ID NO: 2044417 - DNA, 25 bp, Homo sapien
gccactttctcggtgctggtcatgg

SEQ ID NO: 2044418 - DNA, 25 bp, Homo sapien
ctttctcggtgctggtcatggtgac

SEQ ID NO: 2044419 - DNA, 25 bp, Homo sapien
ggtagccacttccatccaaggtctg

SEQ ID NO: 2044420 - DNA, 25 bp, Homo sapien
tggatcactgtaagaccacgactgc

SEQ ID NO: 2044421 - DNA, 25 bp, Homo sapien
caaggtctgccaagcaataactcgg

SEQ ID NO: 2044422 - DNA, 25 bp, Homo sapien
agacatttttgcctactgtggtccc

SEQ ID NO: 2044423 - DNA, 25 bp, Homo sapien
gaaaggcaagcgctgaggctcccat

SEQ ID NO: 2044424 - DNA, 25 bp, Homo sapien
agcactgatgctgtgactcagtagc

SEQ ID NO: 2044425 - DNA, 25 bp, Homo sapien
tcagtagctctagaagaatcagatg

SEQ ID NO: 2044426 - DNA, 25 bp, Homo sapien
cgatagctacaagggattcaatgtg

SEQ ID NO: 2044427 - DNA, 25 bp, Homo sapien
cactgattcagtttaattgcccagg

SEQ ID NO: 2044428 - DNA, 25 bp, Homo sapien
ccaggctctctgtgatgaccggatt

SEQ ID NO: 2044429 - DNA, 25 bp, Homo sapien
tgtgatgaccggatttcttgtctct

SEQ ID NO: 2044430 - DNA, 25 bp, Homo sapien
agaagacatccgctgagacccggag

SEQ ID NO: 2044431 - DNA, 25 bp, Homo sapien
gatcagatgaactatccgggtgtct

SEQ ID NO: 2044432 - DNA, 25 bp, Homo sapien
gaatagaaatccatgtgatcagatg

SEQ ID NO: 2044433 - DNA, 25 bp, Homo sapien
gaactatccgggtgtcttgacagat

SEQ ID NO: 2044434 - DNA, 25 bp, Homo sapien
tggaatagaaatccatgtgatcaga

SEQ ID NO: 2044435 - DNA, 25 bp, Homo sapien
aaaacaaggcactgatgcagcccgc

SEQ ID NO: 2044436 - DNA, 25 bp, Homo sapien
cctggaatctgcaacacattgctgc

SEQ ID NO: 2044437 - DNA, 25 bp, Homo sapien
aaatagatggtgtcacctcctttaa

SEQ ID NO: 2044438 - DNA, 25 bp, Homo sapien
ccgcgatgagcaggaatgggaacct

SEQ ID NO: 2044439 - DNA, 25 bp, Homo sapien
tttctgcaagagagactgaattcag

SEQ ID NO: 2044440 - DNA, 25 bp, Homo sapien
tatggagattcaagcgtcttgtgcc

SEQ ID NO: 2044441 - DNA, 25 bp, Homo sapien
tgaaagcttttaggccagaccgtgc

SEQ ID NO: 2044442 - DNA, 25 bp, Homo sapien
gctgttgctgactttagtggaaaac

SEQ ID NO: 2044443 - DNA, 25 bp, Homo sapien
ttgagaatagttccctgaaggattt

SEQ ID NO: 2044444 - DNA, 25 bp, Homo sapien
gctcctgggatggaaaacggcttcc

SEQ ID NO: 2044445 - DNA, 25 bp, Homo sapien
tgcccagttgagcagggtgacttcg

SEQ ID NO: 2044446 - DNA, 25 bp, Homo sapien
caaagcaagttctctgtagggatga

SEQ ID NO: 2044447 - DNA, 25 bp, Homo sapien
gactgcacagttggataaagcaaca

SEQ ID NO: 2044448 - DNA, 25 bp, Homo sapien
ggaaagacacatgtcctgccaggca

SEQ ID NO: 2044449 - DNA, 25 bp, Homo sapien
gagggcagggatacattccactagt

SEQ ID NO: 2044450 - DNA, 25 bp, Homo sapien
gaacatctgggctgaccggaggttc

SEQ ID NO: 2044451 - DNA, 25 bp, Homo sapien
ttcacccctggacgcttgagatgtc

SEQ ID NO: 2044452 - DNA, 25 bp, Homo sapien
tctgagtgactctcgttgagcacca

SEQ ID NO: 2044453 - DNA, 25 bp, Homo sapien
cgtaagtttcacatgatcgtagggc

SEQ ID NO: 2044454 - DNA, 25 bp, Homo sapien
taaaatgacattacgaaggactgcg

SEQ ID NO: 2044455 - DNA, 25 bp, Homo sapien
aacacaggctgcttgatctcatagg

SEQ ID NO: 2044456 - DNA, 25 bp, Homo sapien
acgtgcagcgctctcctcggagtgt

SEQ ID NO: 2044457 - DNA, 25 bp, Homo sapien
tatctgtggcagtgccacgtgcagc

SEQ ID NO: 2044458 - DNA, 25 bp, Homo sapien
gaaagatgctattgctccgaggact

SEQ ID NO: 2044459 - DNA, 25 bp, Homo sapien
gcggtcatttgcacgtggaagtttc

SEQ ID NO: 2044460 - DNA, 25 bp, Homo sapien
tgtacacagtgttcctaaggtaggt

SEQ ID NO: 2044461 - DNA, 25 bp, Homo sapien
cccagctgaaatgtctcaggcagtc

SEQ ID NO: 2044462 - DNA, 25 bp, Homo sapien
ggcacaccatgtgaaacttctctgc

SEQ ID NO: 2044463 - DNA, 25 bp, Homo sapien
tacacatgggcctcttcgggaagag

SEQ ID NO: 2044464 - DNA, 25 bp, Homo sapien
gagttttcccgtcagcacataagtg

SEQ ID NO: 2044465 - DNA, 25 bp, Homo sapien
ataagtgagggcctcttgtgggccc

SEQ ID NO: 2044466 - DNA, 25 bp, Homo sapien
gcatccgctgcccttcacgttggct

SEQ ID NO: 2044467 - DNA, 25 bp, Homo sapien
tcacgttggctgagttttcccgtca

SEQ ID NO: 2044468 - DNA, 25 bp, Homo sapien
ctaatcccgtacaccttctctcgca

SEQ ID NO: 2044469 - DNA, 25 bp, Homo sapien
aatcccgtacaccttctctcgcaca

SEQ ID NO: 2044470 - DNA, 25 bp, Homo sapien
taatcccgtacaccttctctcgcac

SEQ ID NO: 2044471 - DNA, 25 bp, Homo sapien
atcccgtacaccttctctcgcacac

SEQ ID NO: 2044472 - DNA, 25 bp, Homo sapien
ggcttcgtgcacatgctcttgcatg

SEQ ID NO: 2044473 - DNA, 25 bp, Homo sapien
tgtatccaggcttcgtgcacatgct

SEQ ID NO: 2044474 - DNA, 25 bp, Homo sapien
tcttgcatgtaagcagctgcatctc

SEQ ID NO: 2044475 - DNA, 25 bp, Homo sapien
atgcatctgtgtatccaggcttcgt

SEQ ID NO: 2044476 - DNA, 25 bp, Homo sapien
acaaaaagatgaaagcaaattggaa

SEQ ID NO: 2044477 - DNA, 25 bp, Homo sapien
tgaaagcaaattggaaaaccagcaa

SEQ ID NO: 2044478 - DNA, 25 bp, Homo sapien
agatgaaagcaaattggaaaaccag

SEQ ID NO: 2044479 - DNA, 25 bp, Homo sapien
aagcaaattggaaaaccagcaagat

SEQ ID NO: 2044480 - DNA, 25 bp, Homo sapien
gatttctggtagtcgtctccccact

SEQ ID NO: 2044481 - DNA, 25 bp, Homo sapien
gacaagtctccgaagtggattcaga

SEQ ID NO: 2044482 - DNA, 25 bp, Homo sapien
tgggtatcggaaccccagggatctc

SEQ ID NO: 2044483 - DNA, 25 bp, Homo sapien
caagcttccaattatataatggccg

SEQ ID NO: 2044484 - DNA, 25 bp, Homo sapien
tttgtgggcagcgtacaaatgccag

SEQ ID NO: 2044485 - DNA, 25 bp, Homo sapien
cacaaataaagcctgagactgtaat

SEQ ID NO: 2044486 - DNA, 25 bp, Homo sapien
cctgagactgtaatgtagtatatgg

SEQ ID NO: 2044487 - DNA, 25 bp, Homo sapien
gacagcagtcatagcatattcacaa

SEQ ID NO: 2044488 - DNA, 25 bp, Homo sapien
catttgtttggccatcctctccatg

SEQ ID NO: 2044489 - DNA, 25 bp, Homo sapien
caaatcttgccgaaatttatcttaa

SEQ ID NO: 2044490 - DNA, 25 bp, Homo sapien
tggcatttgtttggccatcctctcc

SEQ ID NO: 2044491 - DNA, 25 bp, Homo sapien
aaccaaatcttgccgaaatttatct

SEQ ID NO: 2044492 - DNA, 25 bp, Homo sapien
tcctcctcaaggaccaaagtgtgct

SEQ ID NO: 2044493 - DNA, 25 bp, Homo sapien
tgtggggaacccctgtgtcctcctc

SEQ ID NO: 2044494 - DNA, 25 bp, Homo sapien
cctcctcaaggaccaaagtgtgctc

SEQ ID NO: 2044495 - DNA, 25 bp, Homo sapien
tgggctcctgtggggaacccctgtg

SEQ ID NO: 2044496 - DNA, 25 bp, Homo sapien
gagagcccgaaatcaacatccgcgg

SEQ ID NO: 2044497 - DNA, 25 bp, Homo sapien
gtatgttcttctccgtattctgcag

SEQ ID NO: 2044498 - DNA, 25 bp, Homo sapien
gtacacaaagagagagcccgaaatc

SEQ ID NO: 2044499 - DNA, 25 bp, Homo sapien
ggttgccctgagatagcatcaccca

SEQ ID NO: 2044500 - DNA, 25 bp, Homo sapien
tcacctgggaactccttaggcagtt

SEQ ID NO: 2044501 - DNA, 25 bp, Homo sapien
atttgccaccactccacttgattgc

SEQ ID NO: 2044502 - DNA, 25 bp, Homo sapien
tgctaacataatagggtaatttgcc

SEQ ID NO: 2044503 - DNA, 25 bp, Homo sapien
tgtattcaactaatttggaaacatg

SEQ ID NO: 2044504 - DNA, 25 bp, Homo sapien
tcagggttcacgttacacatagcaa

SEQ ID NO: 2044505 - DNA, 25 bp, Homo sapien
gaaggttgcccatgaataccaggtc

SEQ ID NO: 2044506 - DNA, 25 bp, Homo sapien
tacttattgaccgttggatggcagg

SEQ ID NO: 2044507 - DNA, 25 bp, Homo sapien
taaaggaactcccatcgggaggcag

SEQ ID NO: 2044508 - DNA, 25 bp, Homo sapien
gctcaagagcagatttcatatccaa

SEQ ID NO: 2044509 - DNA, 25 bp, Homo sapien
gagtgatgaatatccttccagatgc

SEQ ID NO: 2044510 - DNA, 25 bp, Homo sapien
tcatatccaagggtgcaggcaatta

SEQ ID NO: 2044511 - DNA, 25 bp, Homo sapien
ggtaatgcctgtgatatgctcaaga

SEQ ID NO: 2044512 - DNA, 25 bp, Homo sapien
ggtctatccggtgcgcaaaagttca

SEQ ID NO: 2044513 - DNA, 25 bp, Homo sapien
tatacgggccttatccagctgtggg

SEQ ID NO: 2044514 - DNA, 25 bp, Homo sapien
taatcttgcctgaatagggcccaag

SEQ ID NO: 2044515 - DNA, 25 bp, Homo sapien
taagaccattttagtatcagacgac

SEQ ID NO: 2044516 - DNA, 25 bp, Homo sapien
taactgctgtgttgggtcattgtat

SEQ ID NO: 2044517 - DNA, 25 bp, Homo sapien
ctaactgctgtgttgggtcattgta

SEQ ID NO: 2044518 - DNA, 25 bp, Homo sapien
tgctgtgttgggtcattgtatgatt

SEQ ID NO: 2044519 - DNA, 25 bp, Homo sapien
actgctgtgttgggtcattgtatga

SEQ ID NO: 2044520 - DNA, 25 bp, Homo sapien
tatgcctctgttccaatccctctga

SEQ ID NO: 2044521 - DNA, 25 bp, Homo sapien
gcccctgaatatgggtatgaaatgc

SEQ ID NO: 2044522 - DNA, 25 bp, Homo sapien
tgggctgtggtcataccgtggctca

SEQ ID NO: 2044523 - DNA, 25 bp, Homo sapien
tgtgctgtatattggtggtccctgc

SEQ ID NO: 2044524 - DNA, 25 bp, Homo sapien
cctggatgatggtcacagatctgca

SEQ ID NO: 2044525 - DNA, 25 bp, Homo sapien
caaattgtgagagggtaactgggat

SEQ ID NO: 2044526 - DNA, 25 bp, Homo sapien
ggatgaagagataacctggttcgcc

SEQ ID NO: 2044527 - DNA, 25 bp, Homo sapien
tgggaaagttgagctgaacctctgg

SEQ ID NO: 2044528 - DNA, 25 bp, Homo sapien
taaagctcacttcagtgccagtctg

SEQ ID NO: 2044529 - DNA, 25 bp, Homo sapien
cagtctgcgggagatggctttccac

SEQ ID NO: 2044530 - DNA, 25 bp, Homo sapien
tggtggtttaaagctcacttcagtg

SEQ ID NO: 2044531 - DNA, 25 bp, Homo sapien
gccagtctgcgggagatggctttcc

SEQ ID NO: 2044532 - DNA, 25 bp, Homo sapien
tgaagtcttggtgcctgtctcacag

SEQ ID NO: 2044533 - DNA, 25 bp, Homo sapien
tataactgagtatgggagtgaagtc

SEQ ID NO: 2044534 - DNA, 25 bp, Homo sapien
ttataaactcaaagcacagcaaagc

SEQ ID NO: 2044535 - DNA, 25 bp, Homo sapien
tatttaatggtatcacagtagcctt

SEQ ID NO: 2044536 - DNA, 25 bp, Homo sapien
tcgatcaagagcagcctatcaatct

SEQ ID NO: 2044537 - DNA, 25 bp, Homo sapien
ccaagctgtagattcgttgcaaata

SEQ ID NO: 2044538 - DNA, 25 bp, Homo sapien
tccttcatagctgcagggcagagcc

SEQ ID NO: 2044539 - DNA, 25 bp, Homo sapien
ggctctgaagctgcccggccttagc

SEQ ID NO: 2044540 - DNA, 25 bp, Homo sapien
gatcttccggtgctatggcagcagg

SEQ ID NO: 2044541 - DNA, 25 bp, Homo sapien
cagcaggctgtcttggcgacatgga

SEQ ID NO: 2044542 - DNA, 25 bp, Homo sapien
tttccttcctaatggaggcagatct

SEQ ID NO: 2044543 - DNA, 25 bp, Homo sapien
caaagcagaatgtggcagaggtgat

SEQ ID NO: 2044544 - DNA, 25 bp, Homo sapien
aaatgattcggttcctggagatccg

SEQ ID NO: 2044545 - DNA, 25 bp, Homo sapien
tggagatccgatcaaataaaagaga

SEQ ID NO: 2044546 - DNA, 25 bp, Homo sapien
caataaatcaatgcaaatgattcgg

SEQ ID NO: 2044547 - DNA, 25 bp, Homo sapien
tttaaccactgagcaaattaagtgg

SEQ ID NO: 2044548 - DNA, 25 bp, Homo sapien
aatagcaactgagttcaatcccagt

SEQ ID NO: 2044549 - DNA, 25 bp, Homo sapien
cctgtttactataagaatagcaact

SEQ ID NO: 2044550 - DNA, 25 bp, Homo sapien
tagcaactgagttcaatcccagtcc

SEQ ID NO: 2044551 - DNA, 25 bp, Homo sapien
cagatttaaaatgcccctgtttact

SEQ ID NO: 2044552 - DNA, 25 bp, Homo sapien
tggacattgtgtacagtcatagatc

SEQ ID NO: 2044553 - DNA, 25 bp, Homo sapien
tgctgcaacttgtttgcttgaacaa

SEQ ID NO: 2044554 - DNA, 25 bp, Homo sapien
agaaaaacttctgtggacattgtgt

SEQ ID NO: 2044555 - DNA, 25 bp, Homo sapien
gctgcaacttgtttgcttgaacaaa

SEQ ID NO: 2044556 - DNA, 25 bp, Homo sapien
cgaagctgtgctctatcaggtggca

SEQ ID NO: 2044557 - DNA, 25 bp, Homo sapien
ccatcccttcgaagctgtgctctat

SEQ ID NO: 2044558 - DNA, 25 bp, Homo sapien
tcaggtggcactggagtttggcagg

SEQ ID NO: 2044559 - DNA, 25 bp, Homo sapien
gactggacacttgaaggtgcctccc

SEQ ID NO: 2044560 - DNA, 25 bp, Homo sapien
gggcccccttatatcgtctgatcaa

SEQ ID NO: 2044561 - DNA, 25 bp, Homo sapien
tatcgtctgatcaacgctacagcca

SEQ ID NO: 2044562 - DNA, 25 bp, Homo sapien
ccccttatatcgtctgatcaacgct

SEQ ID NO: 2044563 - DNA, 25 bp, Homo sapien
tatatcgtctgatcaacgctacagc

SEQ ID NO: 2044564 - DNA, 25 bp, Homo sapien
gaccccatggttgaagtctcagaga

SEQ ID NO: 2044565 - DNA, 25 bp, Homo sapien
aaacatggaccccatggttgaagtc

SEQ ID NO: 2044566 - DNA, 25 bp, Homo sapien
catggaccccatggttgaagtctca

SEQ ID NO: 2044567 - DNA, 25 bp, Homo sapien
tggaccccatggttgaagtctcaga

SEQ ID NO: 2044568 - DNA, 25 bp, Homo sapien
aagtgacctatagggatgacctggc

SEQ ID NO: 2044569 - DNA, 25 bp, Homo sapien
tataaaggctgataatgactctcct

SEQ ID NO: 2044570 - DNA, 25 bp, Homo sapien
gaaagcagtagcaatgtttggttcc

SEQ ID NO: 2044571 - DNA, 25 bp, Homo sapien
caatctaagtagaagtctgatgcca

SEQ ID NO: 2044572 - DNA, 25 bp, Homo sapien
cattcattagcctttgcaactctca

SEQ ID NO: 2044573 - DNA, 25 bp, Homo sapien
tctaagaagagcacagatgtcaggc

SEQ ID NO: 2044574 - DNA, 25 bp, Homo sapien
caaggcacaggctcgagtcttctca

SEQ ID NO: 2044575 - DNA, 25 bp, Homo sapien
gctcgagtcttctcattagcactga

SEQ ID NO: 2044576 - DNA, 25 bp, Homo sapien
atctggctgatcagatgctgtttac

SEQ ID NO: 2044577 - DNA, 25 bp, Homo sapien
agtatctggctgatcagatgctgtt

SEQ ID NO: 2044578 - DNA, 25 bp, Homo sapien
ccagtatctggctgatcagatgctg

SEQ ID NO: 2044579 - DNA, 25 bp, Homo sapien
tatctggctgatcagatgctgttta

SEQ ID NO: 2044580 - DNA, 25 bp, Homo sapien
ttcataagcccgaggttttactgca

SEQ ID NO: 2044581 - DNA, 25 bp, Homo sapien
tttactgcatcttgagacgaggcag

SEQ ID NO: 2044582 - DNA, 25 bp, Homo sapien
gccctcctcggcgtggcggagtaat

SEQ ID NO: 2044583 - DNA, 25 bp, Homo sapien
gtaatggaatgcacaacaagctcac

SEQ ID NO: 2044584 - DNA, 25 bp, Homo sapien
aggacaaagggtccagactgcttct

SEQ ID NO: 2044585 - DNA, 25 bp, Homo sapien
ctaaaggacaaagggtccagactgc

SEQ ID NO: 2044586 - DNA, 25 bp, Homo sapien
aaggacaaagggtccagactgcttc

SEQ ID NO: 2044587 - DNA, 25 bp, Homo sapien
aaaggacaaagggtccagactgctt

SEQ ID NO: 2044588 - DNA, 25 bp, Homo sapien
ctggaaaccaaatctgcaggaggct

SEQ ID NO: 2044589 - DNA, 25 bp, Homo sapien
tggaaaccaaatctgcaggaggctc

SEQ ID NO: 2044590 - DNA, 25 bp, Homo sapien
tggccctacccagaagctgtgctaa

SEQ ID NO: 2044591 - DNA, 25 bp, Homo sapien
aaatgctcttatcagtggccctacc

SEQ ID NO: 2044592 - DNA, 25 bp, Homo sapien
taatgctctagctatcctggcctag

SEQ ID NO: 2044593 - DNA, 25 bp, Homo sapien
gaactgccattggaatagaatccag

SEQ ID NO: 2044594 - DNA, 25 bp, Homo sapien
gtggtaagaaacctggttcaggtca

SEQ ID NO: 2044595 - DNA, 25 bp, Homo sapien
tggtaagaaacctggttcaggtcat

SEQ ID NO: 2044596 - DNA, 25 bp, Homo sapien
cttcactctgcagtaagacactggc

SEQ ID NO: 2044597 - DNA, 25 bp, Homo sapien
ttcactctgcagtaagacactggca

SEQ ID NO: 2044598 - DNA, 25 bp, Homo sapien
tattttcaactgcaagagcgaggag

SEQ ID NO: 2044599 - DNA, 25 bp, Homo sapien
ttagttttaacaacagctgcagtcc

SEQ ID NO: 2044600 - DNA, 25 bp, Homo sapien
ataaatgacttaactgtgctgacag

SEQ ID NO: 2044601 - DNA, 25 bp, Homo sapien
tgaaaacaagaagccgacagaatgc

SEQ ID NO: 2044602 - DNA, 25 bp, Homo sapien
taattgccgcttagtcagtgatatc

SEQ ID NO: 2044603 - DNA, 25 bp, Homo sapien
aacagcaggacatgtgtgcggcatc

SEQ ID NO: 2044604 - DNA, 25 bp, Homo sapien
ggcatcagctgagttcccgaagcaa

SEQ ID NO: 2044605 - DNA, 25 bp, Homo sapien
taaatgccaggtcagtggacacagt

SEQ ID NO: 2044606 - DNA, 25 bp, Homo sapien
agtcatcaggcttcctaaagacttc

SEQ ID NO: 2044607 - DNA, 25 bp, Homo sapien
ctcttgtatcctaacagacggaatt

SEQ ID NO: 2044608 - DNA, 25 bp, Homo sapien
tgtatcctaacagacggaattttaa

SEQ ID NO: 2044609 - DNA, 25 bp, Homo sapien
agagtggctgcaagtacaagtcatc

SEQ ID NO: 2044610 - DNA, 25 bp, Homo sapien
ttgggctggagacggctccatgacc

SEQ ID NO: 2044611 - DNA, 25 bp, Homo sapien
caggtttgctacacaagccacagca

SEQ ID NO: 2044612 - DNA, 25 bp, Homo sapien
gacggctccatgaccaggtttgcta

SEQ ID NO: 2044613 - DNA, 25 bp, Homo sapien
tttccttctctggccataatgtttc

SEQ ID NO: 2044614 - DNA, 25 bp, Homo sapien
tcagcaggaaatcaagtccgtcttc

SEQ ID NO: 2044615 - DNA, 25 bp, Homo sapien
tctcgccggtaatggccaattcatt

SEQ ID NO: 2044616 - DNA, 25 bp, Homo sapien
tattatcaggatttgtctcgccggt

SEQ ID NO: 2044617 - DNA, 25 bp, Homo sapien
tggcggattcctctgacagttccta

SEQ ID NO: 2044618 - DNA, 25 bp, Homo sapien
tggacaagcagacagacagagcaca

SEQ ID NO: 2044619 - DNA, 25 bp, Homo sapien
cttatggacaagcagacagacagag

SEQ ID NO: 2044620 - DNA, 25 bp, Homo sapien
ggacaagcagacagacagagcacat

SEQ ID NO: 2044621 - DNA, 25 bp, Homo sapien
tatggacaagcagacagacagagca

SEQ ID NO: 2044622 - DNA, 25 bp, Homo sapien
gggagactgaggaaccagcaagccc

SEQ ID NO: 2044623 - DNA, 25 bp, Homo sapien
tagggcctccgctggtagaaccaga

SEQ ID NO: 2044624 - DNA, 25 bp, Homo sapien
atattaaaggcatctactctctcag

SEQ ID NO: 2044625 - DNA, 25 bp, Homo sapien
gggctgatacctcccagggattcaa

SEQ ID NO: 2044626 - DNA, 25 bp, Homo sapien
taacaggttatggtaattcagttcc

SEQ ID NO: 2044627 - DNA, 25 bp, Homo sapien
tcacacctgctagagatgttcatgt

SEQ ID NO: 2044628 - DNA, 25 bp, Homo sapien
caggagactgttatttaagagattc

SEQ ID NO: 2044629 - DNA, 25 bp, Homo sapien
taagagattcctatttcacatgtgt

SEQ ID NO: 2044630 - DNA, 25 bp, Homo sapien
agttcaccagcatgcaagagctctg

SEQ ID NO: 2044631 - DNA, 25 bp, Homo sapien
ctgtggaactcctccaagatcgcac

SEQ ID NO: 2044632 - DNA, 25 bp, Homo sapien
tgtggaactcctccaagatcgcacc

SEQ ID NO: 2044633 - DNA, 25 bp, Homo sapien
aagtaagttcaccagcatgcaagag

SEQ ID NO: 2044634 - DNA, 25 bp, Homo sapien
cttgacttttgtaaccagactgagg

SEQ ID NO: 2044635 - DNA, 25 bp, Homo sapien
ttccatactgtgcttgaagctaacc

SEQ ID NO: 2044636 - DNA, 25 bp, Homo sapien
tgcttgaagctaaccttgacttttg

SEQ ID NO: 2044637 - DNA, 25 bp, Homo sapien
gctaaccttgacttttgtaaccaga

SEQ ID NO: 2044638 - DNA, 25 bp, Homo sapien
tatgaaggcttgtgacgggagcacc

SEQ ID NO: 2044639 - DNA, 25 bp, Homo sapien
tcaaagcacctgatggaaggcaggc

SEQ ID NO: 2044640 - DNA, 25 bp, Homo sapien
gatgtggcatgagacctcctgaggc

SEQ ID NO: 2044641 - DNA, 25 bp, Homo sapien
tgtggcaagctaataaggtgaccct

SEQ ID NO: 2044642 - DNA, 25 bp, Homo sapien
agtgaaaatgactgccaatgatgct

SEQ ID NO: 2044643 - DNA, 25 bp, Homo sapien
gcttcagtgacaaaattcatatcca

SEQ ID NO: 2044644 - DNA, 25 bp, Homo sapien
catatccaactcaggcatggatttg

SEQ ID NO: 2044645 - DNA, 25 bp, Homo sapien
aaaatgactgccaatgatgcttcag

SEQ ID NO: 2044646 - DNA, 25 bp, Homo sapien
tattggtttggtccgacaccatccc

SEQ ID NO: 2044647 - DNA, 25 bp, Homo sapien
tggtttggtccgacaccatcccctg

SEQ ID NO: 2044648 - DNA, 25 bp, Homo sapien
ctattggtttggtccgacaccatcc

SEQ ID NO: 2044649 - DNA, 25 bp, Homo sapien
ggtttggtccgacaccatcccctgc

SEQ ID NO: 2044650 - DNA, 25 bp, Homo sapien
gaaattcccacaaatcacagattgc

SEQ ID NO: 2044651 - DNA, 25 bp, Homo sapien
cagattgcagtgctgttccgctccc

SEQ ID NO: 2044652 - DNA, 25 bp, Homo sapien
tagctaccattaagcaggcatttgg

SEQ ID NO: 2044653 - DNA, 25 bp, Homo sapien
caaactggagttatggattgctctg

SEQ ID NO: 2044654 - DNA, 25 bp, Homo sapien
tctggtgtccctgtggcccgtccct

SEQ ID NO: 2044655 - DNA, 25 bp, Homo sapien
cctctggtgtccctgtggcccgtcc

SEQ ID NO: 2044656 - DNA, 25 bp, Homo sapien
ctgcctctggtgtccctgtggcccg

SEQ ID NO: 2044657 - DNA, 25 bp, Homo sapien
tgcctctggtgtccctgtggcccgt

SEQ ID NO: 2044658 - DNA, 25 bp, Homo sapien
tgctgtggggatagcggctcctgaa

SEQ ID NO: 2044659 - DNA, 25 bp, Homo sapien
ctagggagcgaggtggagaataaaa

SEQ ID NO: 2044660 - DNA, 25 bp, Homo sapien
ggatagcggctcctgaaagccccag

SEQ ID NO: 2044661 - DNA, 25 bp, Homo sapien
tggggatagcggctcctgaaagccc

SEQ ID NO: 2044662 - DNA, 25 bp, Homo sapien
gagttggcaatgacctcacatccag

SEQ ID NO: 2044663 - DNA, 25 bp, Homo sapien
gcagctccaattgcaagaacactta

SEQ ID NO: 2044664 - DNA, 25 bp, Homo sapien
tacatgaccagactttttagctagg

SEQ ID NO: 2044665 - DNA, 25 bp, Homo sapien
taattgtaagctttctaccagcacc

SEQ ID NO: 2044666 - DNA, 25 bp, Homo sapien
tgttttcatgtatcgcagggtctgt

SEQ ID NO: 2044667 - DNA, 25 bp, Homo sapien
catcattccgaacaaagctcttgct

SEQ ID NO: 2044668 - DNA, 25 bp, Homo sapien
ggaaagccatgtcccatactcagga

SEQ ID NO: 2044669 - DNA, 25 bp, Homo sapien
tagacaacatgtgcgctattaagac

SEQ ID NO: 2044670 - DNA, 25 bp, Homo sapien
tcaaacctaccaacgtgatgacagt

SEQ ID NO: 2044671 - DNA, 25 bp, Homo sapien
gcaaataagatcagcaagccgtgtt

SEQ ID NO: 2044672 - DNA, 25 bp, Homo sapien
gcttctagaagagtcaaacacacat

SEQ ID NO: 2044673 - DNA, 25 bp, Homo sapien
tgctccagcatacccaaattaaagg

SEQ ID NO: 2044674 - DNA, 25 bp, Homo sapien
attatctgtgtaaatcgatgaacat

SEQ ID NO: 2044675 - DNA, 25 bp, Homo sapien
aattatctgtgtaaatcgatgaaca

SEQ ID NO: 2044676 - DNA, 25 bp, Homo sapien
atttgcaacatgaacctgaatatcc

SEQ ID NO: 2044677 - DNA, 25 bp, Homo sapien
tctgacacttgatgcattgataggt

SEQ ID NO: 2044678 - DNA, 25 bp, Homo sapien
cacttgatgcattgataggtcttct

SEQ ID NO: 2044679 - DNA, 25 bp, Homo sapien
tgtagaaaaccatctgacacttgat

SEQ ID NO: 2044680 - DNA, 25 bp, Homo sapien
aattcttatagcataaatgaagaaa

SEQ ID NO: 2044681 - DNA, 25 bp, Homo sapien
tgaagtagagcaagatttttattat

SEQ ID NO: 2044682 - DNA, 25 bp, Homo sapien
catattgcgaactgaatgtgctgaa

SEQ ID NO: 2044683 - DNA, 25 bp, Homo sapien
gcaacagtggccaatattccttgta

SEQ ID NO: 2044684 - DNA, 25 bp, Homo sapien
tctgacggtctttgtacattaggca

SEQ ID NO: 2044685 - DNA, 25 bp, Homo sapien
ggaagattgactacaccgagctgtt

SEQ ID NO: 2044686 - DNA, 25 bp, Homo sapien
cttgctgtatagttagttgtgtgac

SEQ ID NO: 2044687 - DNA, 25 bp, Homo sapien
ccagcagtcttagtaggagagaatc

SEQ ID NO: 2044688 - DNA, 25 bp, Homo sapien
cattaaatgaccctgagtttccttc

SEQ ID NO: 2044689 - DNA, 25 bp, Homo sapien
tctttctgtaatactaacttgctgt

SEQ ID NO: 2044690 - DNA, 25 bp, Homo sapien
tcttgctactaaccgctgccttctt

SEQ ID NO: 2044691 - DNA, 25 bp, Homo sapien
acaggactccaggaccgactctcca

SEQ ID NO: 2044692 - DNA, 25 bp, Homo sapien
tctccatcgccagttcttgctacta

SEQ ID NO: 2044693 - DNA, 25 bp, Homo sapien
tgcttgcaactcatcggggctcctc

SEQ ID NO: 2044694 - DNA, 25 bp, Homo sapien
gatagggagatgcttgggatggaga

SEQ ID NO: 2044695 - DNA, 25 bp, Homo sapien
gccttctagaatagttgatctccaa

SEQ ID NO: 2044696 - DNA, 25 bp, Homo sapien
gacggccttctagaatagttgatct

SEQ ID NO: 2044697 - DNA, 25 bp, Homo sapien
catagacggccttctagaatagttg

SEQ ID NO: 2044698 - DNA, 25 bp, Homo sapien
cattggtcaattaggccagaagagc

SEQ ID NO: 2044699 - DNA, 25 bp, Homo sapien
ttggagtcagctgcaataaagtgac

SEQ ID NO: 2044700 - DNA, 25 bp, Homo sapien
tcagctgcaataaagtgacgaatgc

SEQ ID NO: 2044701 - DNA, 25 bp, Homo sapien
tgtttctctaagtacaatgcattgg

SEQ ID NO: 2044702 - DNA, 25 bp, Homo sapien
tgtaggctgccccacaaatgtcgca

SEQ ID NO: 2044703 - DNA, 25 bp, Homo sapien
tcttactgagattcacgcagccggc

SEQ ID NO: 2044704 - DNA, 25 bp, Homo sapien
tactggacacggaggtatagcccac

SEQ ID NO: 2044705 - DNA, 25 bp, Homo sapien
tacagtttttggacgtgctggcccc

SEQ ID NO: 2044706 - DNA, 25 bp, Homo sapien
gaattgacacgggtatggaagccca

SEQ ID NO: 2044707 - DNA, 25 bp, Homo sapien
tgaggcggctaaacgacttgtcaca

SEQ ID NO: 2044708 - DNA, 25 bp, Homo sapien
tgtttgaacagcctactgcagtagg

SEQ ID NO: 2044709 - DNA, 25 bp, Homo sapien
gaagctggccaagagcaagtcggat

SEQ ID NO: 2044710 - DNA, 25 bp, Homo sapien
cagcctgaacttccttagctaaaca

SEQ ID NO: 2044711 - DNA, 25 bp, Homo sapien
agctaaacaggacctgcactttgag

SEQ ID NO: 2044712 - DNA, 25 bp, Homo sapien
tccttagctaaacaggacctgcact

SEQ ID NO: 2044713 - DNA, 25 bp, Homo sapien
aacttccttagctaaacaggacctg

SEQ ID NO: 2044714 - DNA, 25 bp, Homo sapien
tatttcctaatttcgctggctggcc

SEQ ID NO: 2044715 - DNA, 25 bp, Homo sapien
gacaggaatgcccatgattcagcag

SEQ ID NO: 2044716 - DNA, 25 bp, Homo sapien
tcagcagcctgagtaaataaaagag

SEQ ID NO: 2044717 - DNA, 25 bp, Homo sapien
gaaggcctgtctttgttagccagcc

SEQ ID NO: 2044718 - DNA, 25 bp, Homo sapien
gtgacgtgagccatcagcccctcgt

SEQ ID NO: 2044719 - DNA, 25 bp, Homo sapien
ctttgtgacgtgagccatcagcccc

SEQ ID NO: 2044720 - DNA, 25 bp, Homo sapien
acgtgagccatcagcccctcgtgtg

SEQ ID NO: 2044721 - DNA, 25 bp, Homo sapien
tttgtgacgtgagccatcagcccct

SEQ ID NO: 2044722 - DNA, 25 bp, Homo sapien
ggacgtgatttgatcctagctcctg

SEQ ID NO: 2044723 - DNA, 25 bp, Homo sapien
gactggacgtgatttgatcctagct

SEQ ID NO: 2044724 - DNA, 25 bp, Homo sapien
ctggacgtgatttgatcctagctcc

SEQ ID NO: 2044725 - DNA, 25 bp, Homo sapien
agagactggacgtgatttgatccta

SEQ ID NO: 2044726 - DNA, 25 bp, Homo sapien
agaacagtcatcctctctcgcacgg

SEQ ID NO: 2044727 - DNA, 25 bp, Homo sapien
aatgaattccatcttccgcagccaa

SEQ ID NO: 2044728 - DNA, 25 bp, Homo sapien
ctccctagtaaaaaagaggctcgct

SEQ ID NO: 2044729 - DNA, 25 bp, Homo sapien
tctcgcacggaaatcaagacattgt

SEQ ID NO: 2044730 - DNA, 25 bp, Homo sapien
cgtgactgagggtgttctaaaccgt

SEQ ID NO: 2044731 - DNA, 25 bp, Homo sapien
cacatctgtttacagtgccgtgact

SEQ ID NO: 2044732 - DNA, 25 bp, Homo sapien
ctcttggcgttcaataattggcaac

SEQ ID NO: 2044733 - DNA, 25 bp, Homo sapien
ttggcaactgtgtattacacatctg

SEQ ID NO: 2044734 - DNA, 25 bp, Homo sapien
ctcaaaactacagatcttaattctc

SEQ ID NO: 2044735 - DNA, 25 bp, Homo sapien
aaaactacagatcttaattctctgc

SEQ ID NO: 2044736 - DNA, 25 bp, Homo sapien
tcaaaactacagatcttaattctct

SEQ ID NO: 2044737 - DNA, 25 bp, Homo sapien
caaaactacagatcttaattctctg

SEQ ID NO: 2044738 - DNA, 25 bp, Homo sapien
gcatcagaaaccaacttgtccagca

SEQ ID NO: 2044739 - DNA, 25 bp, Homo sapien
caaggtctgatgctgtcacagagaa

SEQ ID NO: 2044740 - DNA, 25 bp, Homo sapien
tacaattttacagcgggaagcagca

SEQ ID NO: 2044741 - DNA, 25 bp, Homo sapien
ttcagcccagagaaattaagttctt

SEQ ID NO: 2044742 - DNA, 25 bp, Homo sapien
cttctccctggtaatttactagatc

SEQ ID NO: 2044743 - DNA, 25 bp, Homo sapien
agcttctataaacccaacctgaatg

SEQ ID NO: 2044744 - DNA, 25 bp, Homo sapien
taatttactagatcaaggtagcttc

SEQ ID NO: 2044745 - DNA, 25 bp, Homo sapien
gatttgtggttgtggctgatttaca

SEQ ID NO: 2044746 - DNA, 25 bp, Homo sapien
tccagtgtggaccagaaacacataa

SEQ ID NO: 2044747 - DNA, 25 bp, Homo sapien
tttaataatatgcagttgtagcata

SEQ ID NO: 2044748 - DNA, 25 bp, Homo sapien
ttttaataatatgcagttgtagcat

SEQ ID NO: 2044749 - DNA, 25 bp, Homo sapien
acctccagtgtggaccagaaacaca

SEQ ID NO: 2044750 - DNA, 25 bp, Homo sapien
tcagattagttcatctccaaagtag

SEQ ID NO: 2044751 - DNA, 25 bp, Homo sapien
ccaaagtagttggagagggcaccac

SEQ ID NO: 2044752 - DNA, 25 bp, Homo sapien
cttccaggagcagaggtaagaagag

SEQ ID NO: 2044753 - DNA, 25 bp, Homo sapien
gcgtaaacttccaggagcagaggta

SEQ ID NO: 2044754 - DNA, 25 bp, Homo sapien
gagggtctgagaggcaatttgcatc

SEQ ID NO: 2044755 - DNA, 25 bp, Homo sapien
tgcatctctgggaattcatgtccag

SEQ ID NO: 2044756 - DNA, 25 bp, Homo sapien
ttaaagtatgaaccggagggtctga

SEQ ID NO: 2044757 - DNA, 25 bp, Homo sapien
gtcctcctcagtttggccaacgtca

SEQ ID NO: 2044758 - DNA, 25 bp, Homo sapien
ctgctgtgcggaaggacttgggcat

SEQ ID NO: 2044759 - DNA, 25 bp, Homo sapien
cccctgctgtgcggaaggacttggg

SEQ ID NO: 2044760 - DNA, 25 bp, Homo sapien
ccctgctgtgcggaaggacttgggc

SEQ ID NO: 2044761 - DNA, 25 bp, Homo sapien
cctgctgtgcggaaggacttgggca

SEQ ID NO: 2044762 - DNA, 25 bp, Homo sapien
ccaaggtttagtgttctgcactggg

SEQ ID NO: 2044763 - DNA, 25 bp, Homo sapien
cagccaaggtttagtgttctgcact

SEQ ID NO: 2044764 - DNA, 25 bp, Homo sapien
tagtgttctgcactggggccaatgg

SEQ ID NO: 2044765 - DNA, 25 bp, Homo sapien
cccatcagccaaggtttagtgttct

SEQ ID NO: 2044766 - DNA, 25 bp, Homo sapien
catctgctaaaagacgtccagggaa

SEQ ID NO: 2044767 - DNA, 25 bp, Homo sapien
aaagtttggcaatcggccaccggca

SEQ ID NO: 2044768 - DNA, 25 bp, Homo sapien
tgagcaccagcatacgcagtgatcc

SEQ ID NO: 2044769 - DNA, 25 bp, Homo sapien
cctacgccacggagacaggaagctt

SEQ ID NO: 2044770 - DNA, 25 bp, Homo sapien
taaagcatgcggtcaaaaataacgg

SEQ ID NO: 2044771 - DNA, 25 bp, Homo sapien
caaaaataacggaaggaatcacagg

SEQ ID NO: 2044772 - DNA, 25 bp, Homo sapien
ggctagaataaagcatgcggtcaaa

SEQ ID NO: 2044773 - DNA, 25 bp, Homo sapien
aatcacaggcggtacttcatcagca

SEQ ID NO: 2044774 - DNA, 25 bp, Homo sapien
gacgtgtctgggcaaaatcacttca

SEQ ID NO: 2044775 - DNA, 25 bp, Homo sapien
gatgtacgacttaataacccagcag

SEQ ID NO: 2044776 - DNA, 25 bp, Homo sapien
tccaaaagtgctgccgtggcaacag

SEQ ID NO: 2044777 - DNA, 25 bp, Homo sapien
gaatactgaagagctctggcactga

SEQ ID NO: 2044778 - DNA, 25 bp, Homo sapien
ctccacagttgtacataagttaaga

SEQ ID NO: 2044779 - DNA, 25 bp, Homo sapien
taacctgactagcattaataactcc

SEQ ID NO: 2044780 - DNA, 25 bp, Homo sapien
tggattactgccagacatcagcctt

SEQ ID NO: 2044781 - DNA, 25 bp, Homo sapien
caggagtcaatgaggaataaagaat

SEQ ID NO: 2044782 - DNA, 25 bp, Homo sapien
tcttctattgctaaatgacaaaatg

SEQ ID NO: 2044783 - DNA, 25 bp, Homo sapien
ttccaattttactcgtactgtgagc

SEQ ID NO: 2044784 - DNA, 25 bp, Homo sapien
caattttactcgtactgtgagcttc

SEQ ID NO: 2044785 - DNA, 25 bp, Homo sapien
tgtgagcttctttggtgaagttgtc

SEQ ID NO: 2044786 - DNA, 25 bp, Homo sapien
cacccagctgatagtaagccatatt

SEQ ID NO: 2044787 - DNA, 25 bp, Homo sapien
ggctccagtgcagaattctaccaag

SEQ ID NO: 2044788 - DNA, 25 bp, Homo sapien
cacatgtggccataaataatgcacg

SEQ ID NO: 2044789 - DNA, 25 bp, Homo sapien
tgaggaaaggccagtaacggaacta

SEQ ID NO: 2044790 - DNA, 25 bp, Homo sapien
ttccatcatatctatacccagtttt

SEQ ID NO: 2044791 - DNA, 25 bp, Homo sapien
cagttttacggtgtttctggaatat

SEQ ID NO: 2044792 - DNA, 25 bp, Homo sapien
tttcttccatcatatctatacccag

SEQ ID NO: 2044793 - DNA, 25 bp, Homo sapien
catatctatacccagttttacggtg

SEQ ID NO: 2044794 - DNA, 25 bp, Homo sapien
tctgagaagaagagatccttcttta

SEQ ID NO: 2044795 - DNA, 25 bp, Homo sapien
aagaaatggtgccttaaacttcaca

SEQ ID NO: 2044796 - DNA, 25 bp, Homo sapien
taagtacttgtcagttgtagtctgg

SEQ ID NO: 2044797 - DNA, 25 bp, Homo sapien
tttattaggccaaactgcagtatct

SEQ ID NO: 2044798 - DNA, 25 bp, Homo sapien
tggtattgggaaaacacactactgg

SEQ ID NO: 2044799 - DNA, 25 bp, Homo sapien
gaagctccagttggaacaaagatgg

SEQ ID NO: 2044800 - DNA, 25 bp, Homo sapien
cacaatccctttaaactttgagaag

SEQ ID NO: 2044801 - DNA, 25 bp, Homo sapien
aagctccagttggaacaaagatggg

SEQ ID NO: 2044802 - DNA, 25 bp, Homo sapien
agaagctccagttggaacaaagatg

SEQ ID NO: 2044803 - DNA, 25 bp, Homo sapien
tgtgttctgtgatatcgctcagcga

SEQ ID NO: 2044804 - DNA, 25 bp, Homo sapien
tgtgcacagcttcgtcttccaactc

SEQ ID NO: 2044805 - DNA, 25 bp, Homo sapien
tccggcctcttcttacaatctagtg

SEQ ID NO: 2044806 - DNA, 25 bp, Homo sapien
tcagcgattcaaacacctggaggca

SEQ ID NO: 2044807 - DNA, 25 bp, Homo sapien
catttaatcttcttgctaccaaaaa

SEQ ID NO: 2044808 - DNA, 25 bp, Homo sapien
attttccttgaagttgcaataggag

SEQ ID NO: 2044809 - DNA, 25 bp, Homo sapien
tcaacactgtaagtatggggtttaa

SEQ ID NO: 2044810 - DNA, 25 bp, Homo sapien
aagttgcaataggagggcttcattg

SEQ ID NO: 2044811 - DNA, 25 bp, Homo sapien
ctacaggacccaccacatttgggtt

SEQ ID NO: 2044812 - DNA, 25 bp, Homo sapien
gtaaaactctgtcgctctctgctcc

SEQ ID NO: 2044813 - DNA, 25 bp, Homo sapien
tgtccatcgcaaaacaactgcctca

SEQ ID NO: 2044814 - DNA, 25 bp, Homo sapien
agtgtccatcgcaaaacaactgcct

SEQ ID NO: 2044815 - DNA, 25 bp, Homo sapien
gaatatttctgcagctcagtggtaa

SEQ ID NO: 2044816 - DNA, 25 bp, Homo sapien
ttcaggctacaaagagttaacaaga

SEQ ID NO: 2044817 - DNA, 25 bp, Homo sapien
accaaagggcgggatcattattttg

SEQ ID NO: 2044818 - DNA, 25 bp, Homo sapien
ccataagacgaaaacagatttaggg

SEQ ID NO: 2044819 - DNA, 25 bp, Homo sapien
tctgggctctagatatgcattctaa

SEQ ID NO: 2044820 - DNA, 25 bp, Homo sapien
gtctgtcccgcactcgcctgctggt

SEQ ID NO: 2044821 - DNA, 25 bp, Homo sapien
aatggcaagcagactctaatgaagg

SEQ ID NO: 2044822 - DNA, 25 bp, Homo sapien
cagactctaatgaaggaaggcagca

SEQ ID NO: 2044823 - DNA, 25 bp, Homo sapien
ggcaagcagactctaatgaaggaag

SEQ ID NO: 2044824 - DNA, 25 bp, Homo sapien
gatcccacttaggaagataagaaag

SEQ ID NO: 2044825 - DNA, 25 bp, Homo sapien
caaaacaactgccttggtaacatga

SEQ ID NO: 2044826 - DNA, 25 bp, Homo sapien
cttcagcagctccaaatggctgtca

SEQ ID NO: 2044827 - DNA, 25 bp, Homo sapien
tcaaactgggaatcaaactgccatt

SEQ ID NO: 2044828 - DNA, 25 bp, Homo sapien
cagtgacaggtcatgcccaattgcc

SEQ ID NO: 2044829 - DNA, 25 bp, Homo sapien
gaaaataatctggtcaattccgctg

SEQ ID NO: 2044830 - DNA, 25 bp, Homo sapien
gacctttgagtaacagcacggagaa

SEQ ID NO: 2044831 - DNA, 25 bp, Homo sapien
taaagtgccttaatctgccagtggg

SEQ ID NO: 2044832 - DNA, 25 bp, Homo sapien
ttcgacttatcaaacctgcccagcg

SEQ ID NO: 2044833 - DNA, 25 bp, Homo sapien
agcactgggaacaaacgcattcaca

SEQ ID NO: 2044834 - DNA, 25 bp, Homo sapien
tcagaagctgcgagtgaacaaaact

SEQ ID NO: 2044835 - DNA, 25 bp, Homo sapien
gacggattccctttactgcccataa

SEQ ID NO: 2044836 - DNA, 25 bp, Homo sapien
ggcgggcgcaccagccgccctttgt

SEQ ID NO: 2044837 - DNA, 25 bp, Homo sapien
cgggcgggcgcaccagccgcccttt

SEQ ID NO: 2044838 - DNA, 25 bp, Homo sapien
gggcgggcgcaccagccgccctttg

SEQ ID NO: 2044839 - DNA, 25 bp, Homo sapien
gcccgggcgggcgcaccagccgccc

SEQ ID NO: 2044840 - DNA, 25 bp, Homo sapien
gcgcgcacacgcctcgcagccacgc

SEQ ID NO: 2044841 - DNA, 25 bp, Homo sapien
gcgcacacgcctcgcagccacgcag

SEQ ID NO: 2044842 - DNA, 25 bp, Homo sapien
cctcgctccgctacccacagtgaca

SEQ ID NO: 2044843 - DNA, 25 bp, Homo sapien
agccacgcagccctcgctccgctac

SEQ ID NO: 2044844 - DNA, 25 bp, Homo sapien
gggatctcggtttcgcttgcttgcg

SEQ ID NO: 2044845 - DNA, 25 bp, Homo sapien
ctttgagggatctcggtttcgcttg

SEQ ID NO: 2044846 - DNA, 25 bp, Homo sapien
tctcggtttcgcttgcttgcggcga

SEQ ID NO: 2044847 - DNA, 25 bp, Homo sapien
tgagggatctcggtttcgcttgctt

SEQ ID NO: 2044848 - DNA, 25 bp, Homo sapien
ctcgtggccgcgcgcccctcgggcc

SEQ ID NO: 2044849 - DNA, 25 bp, Homo sapien
aagaaactatacttcctcgtggccg

SEQ ID NO: 2044850 - DNA, 25 bp, Homo sapien
cctcgtggccgcgcgcccctcgggc

SEQ ID NO: 2044851 - DNA, 25 bp, Homo sapien
gaaactatacttcctcgtggccgcg

SEQ ID NO: 2044852 - DNA, 25 bp, Homo sapien
caaagcgagtcgtgctcttttgtag

SEQ ID NO: 2044853 - DNA, 25 bp, Homo sapien
ttacaaagcgagtcgtgctcttttg

SEQ ID NO: 2044854 - DNA, 25 bp, Homo sapien
tacaaagcgagtcgtgctcttttgt

SEQ ID NO: 2044855 - DNA, 25 bp, Homo sapien
aaagcgagtcgtgctcttttgtagt

SEQ ID NO: 2044856 - DNA, 25 bp, Homo sapien
cgctctgtacgtaatcactgaggaa

SEQ ID NO: 2044857 - DNA, 25 bp, Homo sapien
cgctccggtagtccacataataatg

SEQ ID NO: 2044858 - DNA, 25 bp, Homo sapien
agggactcgctctgtacgtaatcac

SEQ ID NO: 2044859 - DNA, 25 bp, Homo sapien
tcttggactgcgctgtcgctccggt

SEQ ID NO: 2044860 - DNA, 25 bp, Homo sapien
tcacttgacatttttatgggcctca

SEQ ID NO: 2044861 - DNA, 25 bp, Homo sapien
cacttgacatttttatgggcctcac

SEQ ID NO: 2044862 - DNA, 25 bp, Homo sapien
ctctcttttttctcagatctctcca

SEQ ID NO: 2044863 - DNA, 25 bp, Homo sapien
tctcttttttctcagatctctccaa

SEQ ID NO: 2044864 - DNA, 25 bp, Homo sapien
ttctctcttttttctcagatctctc

SEQ ID NO: 2044865 - DNA, 25 bp, Homo sapien
ctcttttttctcagatctctccaac

SEQ ID NO: 2044866 - DNA, 25 bp, Homo sapien
ttgggagagaaggttgcactaaatg

SEQ ID NO: 2044867 - DNA, 25 bp, Homo sapien
aatgatcccctgtgctcgtttctct

SEQ ID NO: 2044868 - DNA, 25 bp, Homo sapien
atgatcccctgtgctcgtttctctg

SEQ ID NO: 2044869 - DNA, 25 bp, Homo sapien
agagaaggttgcactaaatgatccc

SEQ ID NO: 2044870 - DNA, 25 bp, Homo sapien
tgaacaaatattccattgttgctgc

SEQ ID NO: 2044871 - DNA, 25 bp, Homo sapien
aaatggtcccctggaattccctgca

SEQ ID NO: 2044872 - DNA, 25 bp, Homo sapien
ctctaacacacttttctcagattct

SEQ ID NO: 2044873 - DNA, 25 bp, Homo sapien
cagattctttgctgaagaaaagtga

SEQ ID NO: 2044874 - DNA, 25 bp, Homo sapien
ttgaactgggattctacggcccagt

SEQ ID NO: 2044875 - DNA, 25 bp, Homo sapien
actgggattctacggcccagtgctt

SEQ ID NO: 2044876 - DNA, 25 bp, Homo sapien
gtgtagatggcaacctgcgcagaca

SEQ ID NO: 2044877 - DNA, 25 bp, Homo sapien
caacctgcgcagacactgggttgga

SEQ ID NO: 2044878 - DNA, 25 bp, Homo sapien
gttgtccgattgattgagaaaaatc

SEQ ID NO: 2044879 - DNA, 25 bp, Homo sapien
tggttgtccgattgattgagaaaaa

SEQ ID NO: 2044880 - DNA, 25 bp, Homo sapien
ggttgtccgattgattgagaaaaat

SEQ ID NO: 2044881 - DNA, 25 bp, Homo sapien
gatatataggaacttctgaaacttg

SEQ ID NO: 2044882 - DNA, 25 bp, Homo sapien
ctctgtgatggccaatgatggctgc

SEQ ID NO: 2044883 - DNA, 25 bp, Homo sapien
ctgccagggggccattattgctcat

SEQ ID NO: 2044884 - DNA, 25 bp, Homo sapien
tctgaaacttgagttactctgtgat

SEQ ID NO: 2044885 - DNA, 25 bp, Homo sapien
tggagcaggtggacctgtgagagct

SEQ ID NO: 2044886 - DNA, 25 bp, Homo sapien
atgatggttgagaagcgtaagtgct

SEQ ID NO: 2044887 - DNA, 25 bp, Homo sapien
aagcgtaagtgctggcgcaaaccgc

SEQ ID NO: 2044888 - DNA, 25 bp, Homo sapien
tggcgcaaaccgctgagctggagca

SEQ ID NO: 2044889 - DNA, 25 bp, Homo sapien
gcctcttataataattcccttggga

SEQ ID NO: 2044890 - DNA, 25 bp, Homo sapien
ctttaacttggagcctcttataata

SEQ ID NO: 2044891 - DNA, 25 bp, Homo sapien
gagcctcttataataattcccttgg

SEQ ID NO: 2044892 - DNA, 25 bp, Homo sapien
cttggagcctcttataataattccc

SEQ ID NO: 2044893 - DNA, 25 bp, Homo sapien
ttttcgaggagctggcaaattggca

SEQ ID NO: 2044894 - DNA, 25 bp, Homo sapien
gattagccaagatgaagggaccagc

SEQ ID NO: 2044895 - DNA, 25 bp, Homo sapien
ggcagcttcccgtttatagcccagg

SEQ ID NO: 2044896 - DNA, 25 bp, Homo sapien
gaaggacttccagccggttgcagga

SEQ ID NO: 2044897 - DNA, 25 bp, Homo sapien
gagtaggaaacctacggagagctgt

SEQ ID NO: 2044898 - DNA, 25 bp, Homo sapien
cgagtaggaaacctacggagagctg

SEQ ID NO: 2044899 - DNA, 25 bp, Homo sapien
caatctcctccgaaaataatctttc

SEQ ID NO: 2044900 - DNA, 25 bp, Homo sapien
ctttccagatctagctcaaggggag

SEQ ID NO: 2044901 - DNA, 25 bp, Homo sapien
ctagctcaaggggagtacttcccaa

SEQ ID NO: 2044902 - DNA, 25 bp, Homo sapien
ttcccaatctcctccgaaaataatc

SEQ ID NO: 2044903 - DNA, 25 bp, Homo sapien
ccaaaacacacatagcaattatcat

SEQ ID NO: 2044904 - DNA, 25 bp, Homo sapien
ctccaaaacacacatagcaattatc

SEQ ID NO: 2044905 - DNA, 25 bp, Homo sapien
tccaaaacacacatagcaattatca

SEQ ID NO: 2044906 - DNA, 25 bp, Homo sapien
tggtacttcttttaatctccggaga

SEQ ID NO: 2044907 - DNA, 25 bp, Homo sapien
tctccggagacacaaagtttggttc

SEQ ID NO: 2044908 - DNA, 25 bp, Homo sapien
caagacggggatgagatttgcttct

SEQ ID NO: 2044909 - DNA, 25 bp, Homo sapien
tgtccaaatatattgccaggagagc

SEQ ID NO: 2044910 - DNA, 25 bp, Homo sapien
ttaagattgtcgctgcacacgtgca

SEQ ID NO: 2044911 - DNA, 25 bp, Homo sapien
gaaaggctgtaggatcaccatcatg

SEQ ID NO: 2044912 - DNA, 25 bp, Homo sapien
caccatcatgctctatctcaattgt

SEQ ID NO: 2044913 - DNA, 25 bp, Homo sapien
tcctcttctatttgtgcacttagca

SEQ ID NO: 2044914 - DNA, 25 bp, Homo sapien
gattgcttctaaactcatttcgctg

SEQ ID NO: 2044915 - DNA, 25 bp, Homo sapien
aactcatttcgctgttgatttttgt

SEQ ID NO: 2044916 - DNA, 25 bp, Homo sapien
gcttctaaactcatttcgctgttga

SEQ ID NO: 2044917 - DNA, 25 bp, Homo sapien
gtgggattgcttctaaactcatttc

SEQ ID NO: 2044918 - DNA, 25 bp, Homo sapien
tcattttaccataccagctttaccc

SEQ ID NO: 2044919 - DNA, 25 bp, Homo sapien
ttaaccacgttatacaggcctgtgc

SEQ ID NO: 2044920 - DNA, 25 bp, Homo sapien
tgaagctttgaataattggatccca

SEQ ID NO: 2044921 - DNA, 25 bp, Homo sapien
ggaattccacttgtcaaagtcctct

SEQ ID NO: 2044922 - DNA, 25 bp, Homo sapien
tggaatttcccataccttgagagtg

SEQ ID NO: 2044923 - DNA, 25 bp, Homo sapien
aaattgtgtccagacgcagccatgg

SEQ ID NO: 2044924 - DNA, 25 bp, Homo sapien
tgtcagtctgtgatactacattcca

SEQ ID NO: 2044925 - DNA, 25 bp, Homo sapien
gagtgacctccaatttgaccttaaa

SEQ ID NO: 2044926 - DNA, 25 bp, Homo sapien
ttttaggggctgttttttctgcagc

SEQ ID NO: 2044927 - DNA, 25 bp, Homo sapien
tatgatgagcaagagtgttttaggg

SEQ ID NO: 2044928 - DNA, 25 bp, Homo sapien
acaggaagagggcaatggttttgca

SEQ ID NO: 2044929 - DNA, 25 bp, Homo sapien
tgcagcaggtcaatgttctctgtaa

SEQ ID NO: 2044930 - DNA, 25 bp, Homo sapien
tgtactgctgttacccaaatatgag

SEQ ID NO: 2044931 - DNA, 25 bp, Homo sapien
caaatatgagctgtccctttgttct

SEQ ID NO: 2044932 - DNA, 25 bp, Homo sapien
gaattagttatgaagtgtactgctg

SEQ ID NO: 2044933 - DNA, 25 bp, Homo sapien
ccactgatacaaattcatgttagag

SEQ ID NO: 2044934 - DNA, 25 bp, Homo sapien
tgaccttatctggacaccatgcaaa

SEQ ID NO: 2044935 - DNA, 25 bp, Homo sapien
tttggactccagatcttcaggacct

SEQ ID NO: 2044936 - DNA, 25 bp, Homo sapien
cagtcctcggcaagtgatgacctta

SEQ ID NO: 2044937 - DNA, 25 bp, Homo sapien
gctagtctggtaagggtcagtcctc

SEQ ID NO: 2044938 - DNA, 25 bp, Homo sapien
tcagaaccttaattcccccagttca

SEQ ID NO: 2044939 - DNA, 25 bp, Homo sapien
cagaaccttaattcccccagttcag

SEQ ID NO: 2044940 - DNA, 25 bp, Homo sapien
agagctgccgaactgctacacccca

SEQ ID NO: 2044941 - DNA, 25 bp, Homo sapien
tgtacacagagctgccgaactgcta

SEQ ID NO: 2044942 - DNA, 25 bp, Homo sapien
gtacacagagctgccgaactgctac

SEQ ID NO: 2044943 - DNA, 25 bp, Homo sapien
tgccgaactgctacaccccagcaca

SEQ ID NO: 2044944 - DNA, 25 bp, Homo sapien
tgtcggcatcacagagttcatcctt

SEQ ID NO: 2044945 - DNA, 25 bp, Homo sapien
aaggcaataattagctctccgataa

SEQ ID NO: 2044946 - DNA, 25 bp, Homo sapien
gaacaccaaccagggctaaaagcaa

SEQ ID NO: 2044947 - DNA, 25 bp, Homo sapien
caagaaaaagccaagggatagtgca

SEQ ID NO: 2044948 - DNA, 25 bp, Homo sapien
gaagggattagcttcctgaacgtcc

SEQ ID NO: 2044949 - DNA, 25 bp, Homo sapien
tgaacgtcccccgatactgttgctt

SEQ ID NO: 2044950 - DNA, 25 bp, Homo sapien
catgaagggattagcttcctgaacg

SEQ ID NO: 2044951 - DNA, 25 bp, Homo sapien
cccatgaagggattagcttcctgaa

SEQ ID NO: 2044952 - DNA, 25 bp, Homo sapien
aagtgactgaagaacaggagctgca

SEQ ID NO: 2044953 - DNA, 25 bp, Homo sapien
catgatggcaccatgtggcttgatg

SEQ ID NO: 2044954 - DNA, 25 bp, Homo sapien
caaaatttctggaggcaatgctgct

SEQ ID NO: 2044955 - DNA, 25 bp, Homo sapien
gatactgggccatgggcaaagcttc

SEQ ID NO: 2044956 - DNA, 25 bp, Homo sapien
gaaggtaatgtactgtgtagtgcat

SEQ ID NO: 2044957 - DNA, 25 bp, Homo sapien
actacaatgtaaactgataatggca

SEQ ID NO: 2044958 - DNA, 25 bp, Homo sapien
catcatttgaatgggctttactaca

SEQ ID NO: 2044959 - DNA, 25 bp, Homo sapien
taacgagactcattaacatatgtaa

SEQ ID NO: 2044960 - DNA, 25 bp, Homo sapien
ggtgacaccaattcatcccagcgca

SEQ ID NO: 2044961 - DNA, 25 bp, Homo sapien
tgatttcctggtggagtcttgattg

SEQ ID NO: 2044962 - DNA, 25 bp, Homo sapien
gcatctctggtgcaatattatcagg

SEQ ID NO: 2044963 - DNA, 25 bp, Homo sapien
cattttacagcttaacagaaggttt

SEQ ID NO: 2044964 - DNA, 25 bp, Homo sapien
gggtcactctccttgttcctagtgc

SEQ ID NO: 2044965 - DNA, 25 bp, Homo sapien
tcctagtgcccaccaggtattcaga

SEQ ID NO: 2044966 - DNA, 25 bp, Homo sapien
gattatgcagattctcagtcagtac

SEQ ID NO: 2044967 - DNA, 25 bp, Homo sapien
gagtctacagcaccaatctgggtca

SEQ ID NO: 2044968 - DNA, 25 bp, Homo sapien
ccagctcatgtttgatacaagcagg

SEQ ID NO: 2044969 - DNA, 25 bp, Homo sapien
tccagctcatgtttgatacaagcag

SEQ ID NO: 2044970 - DNA, 25 bp, Homo sapien
aattacattatctctgacacccatg

SEQ ID NO: 2044971 - DNA, 25 bp, Homo sapien
tttaattacattatctctgacaccc

SEQ ID NO: 2044972 - DNA, 25 bp, Homo sapien
cctttaattacattatctctgacac

SEQ ID NO: 2044973 - DNA, 25 bp, Homo sapien
tacattatctctgacacccatgaaa

SEQ ID NO: 2044974 - DNA, 25 bp, Homo sapien
attggaattccaaactttccaccat

SEQ ID NO: 2044975 - DNA, 25 bp, Homo sapien
tggtactggtggggtgattttggat

SEQ ID NO: 2044976 - DNA, 25 bp, Homo sapien
aatctggtactggtggggtgatttt

SEQ ID NO: 2044977 - DNA, 25 bp, Homo sapien
tctggtactggtggggtgattttgg

SEQ ID NO: 2044978 - DNA, 25 bp, Homo sapien
tcgcttcaggaatccttgggctttg

SEQ ID NO: 2044979 - DNA, 25 bp, Homo sapien
tcatttccttccactcgcttcagga

SEQ ID NO: 2044980 - DNA, 25 bp, Homo sapien
ttgacagtgggaattgcaaaaccct

SEQ ID NO: 2044981 - DNA, 25 bp, Homo sapien
caggtccagtgaactgtttcagctg

SEQ ID NO: 2044982 - DNA, 25 bp, Homo sapien
gaggctataagtaattccgaacagg

SEQ ID NO: 2044983 - DNA, 25 bp, Homo sapien
gctggtgtccagaggctataagtaa

SEQ ID NO: 2044984 - DNA, 25 bp, Homo sapien
ctataagtaattccgaacaggccca

SEQ ID NO: 2044985 - DNA, 25 bp, Homo sapien
tgtccagaggctataagtaattccg

SEQ ID NO: 2044986 - DNA, 25 bp, Homo sapien
aataggtccttgtgcccctgagtcc

SEQ ID NO: 2044987 - DNA, 25 bp, Homo sapien
ttagttcccacttagatgccccagg

SEQ ID NO: 2044988 - DNA, 25 bp, Homo sapien
gagatttgcccactcaccagtcctg

SEQ ID NO: 2044989 - DNA, 25 bp, Homo sapien
gcacctaaggtcgactgccagacag

SEQ ID NO: 2044990 - DNA, 25 bp, Homo sapien
ttcatcatgaccaagaattctatca

SEQ ID NO: 2044991 - DNA, 25 bp, Homo sapien
tgaacttcatcatgaccaagaattc

SEQ ID NO: 2044992 - DNA, 25 bp, Homo sapien
gaacttcatcatgaccaagaattct

SEQ ID NO: 2044993 - DNA, 25 bp, Homo sapien
acttcatcatgaccaagaattctat

SEQ ID NO: 2044994 - DNA, 25 bp, Homo sapien
cacgcctggtggctttgagaatagc

SEQ ID NO: 2044995 - DNA, 25 bp, Homo sapien
tgagaatagctgtcgttttgagaat

SEQ ID NO: 2044996 - DNA, 25 bp, Homo sapien
aatagctgtcgttttgagaatagca

SEQ ID NO: 2044997 - DNA, 25 bp, Homo sapien
tctttgttcgggcaatagcacgcct

SEQ ID NO: 2044998 - DNA, 25 bp, Homo sapien
tcatcaatggtgattgtctgctggc

SEQ ID NO: 2044999 - DNA, 25 bp, Homo sapien
cacagatgggtgtcaagagaaatgg

SEQ ID NO: 2045000 - DNA, 25 bp, Homo sapien
ctaatgatatgtcccaccactctgg

SEQ ID NO: 2045001 - DNA, 25 bp, Homo sapien
aaatgaagtggccaacacagatggg

SEQ ID NO: 2045002 - DNA, 25 bp, Homo sapien
tcatgctaatcctgctccaatcaga

SEQ ID NO: 2045003 - DNA, 25 bp, Homo sapien
tgctaatcctgctccaatcagaatg

SEQ ID NO: 2045004 - DNA, 25 bp, Homo sapien
atgctaatcctgctccaatcagaat

SEQ ID NO: 2045005 - DNA, 25 bp, Homo sapien
catgctaatcctgctccaatcagaa

SEQ ID NO: 2045006 - DNA, 25 bp, Homo sapien
gagcccgaaagtgcctttctggaac

SEQ ID NO: 2045007 - DNA, 25 bp, Homo sapien
agcccgaaagtgcctttctggaact

SEQ ID NO: 2045008 - DNA, 25 bp, Homo sapien
ctgtcctctgatcagaagtgtgggt

SEQ ID NO: 2045009 - DNA, 25 bp, Homo sapien
ctttggtaactgacatggtcacagg

SEQ ID NO: 2045010 - DNA, 25 bp, Homo sapien
ttggtaactgacatggtcacaggaa

SEQ ID NO: 2045011 - DNA, 25 bp, Homo sapien
gctttggtaactgacatggtcacag

SEQ ID NO: 2045012 - DNA, 25 bp, Homo sapien
tgctttggtaactgacatggtcaca

SEQ ID NO: 2045013 - DNA, 25 bp, Homo sapien
caaggcccctgccgcgcacatgcat

SEQ ID NO: 2045014 - DNA, 25 bp, Homo sapien
cattctctatgtcacctttccctcc

SEQ ID NO: 2045015 - DNA, 25 bp, Homo sapien
attctctatgtcacctttccctcct

SEQ ID NO: 2045016 - DNA, 25 bp, Homo sapien
cccctgccgcgcacatgcatatgca

SEQ ID NO: 2045017 - DNA, 25 bp, Homo sapien
tctaagtgtcccctactgcgtgcat

SEQ ID NO: 2045018 - DNA, 25 bp, Homo sapien
cccctactgcgtgcattggtgctgg

SEQ ID NO: 2045019 - DNA, 25 bp, Homo sapien
tggccatctgaaccctgccactcat

SEQ ID NO: 2045020 - DNA, 25 bp, Homo sapien
gtgcattggtgctggccttcctgtt

SEQ ID NO: 2045021 - DNA, 25 bp, Homo sapien
ggaagaagttcagcactatgtggga

SEQ ID NO: 2045022 - DNA, 25 bp, Homo sapien
cttttgaatctgctgcacgaatatt

SEQ ID NO: 2045023 - DNA, 25 bp, Homo sapien
gaatattactaaaacctctcgccac

SEQ ID NO: 2045024 - DNA, 25 bp, Homo sapien
ctctcgccacccacggactggaaga

SEQ ID NO: 2045025 - DNA, 25 bp, Homo sapien
gaggctagttcagtgctacctgtga

SEQ ID NO: 2045026 - DNA, 25 bp, Homo sapien
ggcagctcctacaagaggaggctag

SEQ ID NO: 2045027 - DNA, 25 bp, Homo sapien
tacctgtgatcaagaggataagtcc

SEQ ID NO: 2045028 - DNA, 25 bp, Homo sapien
tgtcctccacactgtaagttgttga

SEQ ID NO: 2045029 - DNA, 25 bp, Homo sapien
aacagcgtacttagtgcttgtcaca

SEQ ID NO: 2045030 - DNA, 25 bp, Homo sapien
tgggctatactgaagggttgtactt

SEQ ID NO: 2045031 - DNA, 25 bp, Homo sapien
caatttcggatgttgctgctgtagc

SEQ ID NO: 2045032 - DNA, 25 bp, Homo sapien
gatatctctgggcaatttcggatgt

SEQ ID NO: 2045033 - DNA, 25 bp, Homo sapien
tcaataccatgagtgtcaatcaaag

SEQ ID NO: 2045034 - DNA, 25 bp, Homo sapien
tctcttgggttatttcaataccatg

SEQ ID NO: 2045035 - DNA, 25 bp, Homo sapien
tttgttgtgtctagaggcaagattt

SEQ ID NO: 2045036 - DNA, 25 bp, Homo sapien
catgagtgtcaatcaaagagccaca

SEQ ID NO: 2045037 - DNA, 25 bp, Homo sapien
cccacacgactacaaagtccttcct

SEQ ID NO: 2045038 - DNA, 25 bp, Homo sapien
tccccacacgactacaaagtccttc

SEQ ID NO: 2045039 - DNA, 25 bp, Homo sapien
ccacacgactacaaagtccttcctc

SEQ ID NO: 2045040 - DNA, 25 bp, Homo sapien
tgggctagctcacctcttcttaagc

SEQ ID NO: 2045041 - DNA, 25 bp, Homo sapien
cctgggctagctcacctcttcttaa

SEQ ID NO: 2045042 - DNA, 25 bp, Homo sapien
gggctagctcacctcttcttaagca

SEQ ID NO: 2045043 - DNA, 25 bp, Homo sapien
accatatcaatgccagattcagtgc

SEQ ID NO: 2045044 - DNA, 25 bp, Homo sapien
tgagctggctaacgttgaccaagtg

SEQ ID NO: 2045045 - DNA, 25 bp, Homo sapien
agtgagctggctaacgttgaccaag

SEQ ID NO: 2045046 - DNA, 25 bp, Homo sapien
gcagtgagctggctaacgttgacca

SEQ ID NO: 2045047 - DNA, 25 bp, Homo sapien
ctggctaacgttgaccaagtgtaac

SEQ ID NO: 2045048 - DNA, 25 bp, Homo sapien
caatctattgtgtactgtgacggca

SEQ ID NO: 2045049 - DNA, 25 bp, Homo sapien
tactgtgacggcataaaatccatcc

SEQ ID NO: 2045050 - DNA, 25 bp, Homo sapien
taaaatccatcctcagctttccttc

SEQ ID NO: 2045051 - DNA, 25 bp, Homo sapien
tttccaatctattgtgtactgtgac

SEQ ID NO: 2045052 - DNA, 25 bp, Homo sapien
gaaaaacacgcacacgcttgatagc

SEQ ID NO: 2045053 - DNA, 25 bp, Homo sapien
cagcagtgggctttgccagaaaaca

SEQ ID NO: 2045054 - DNA, 25 bp, Homo sapien
cactgcacacaatgctcaggcagca

SEQ ID NO: 2045055 - DNA, 25 bp, Homo sapien
caaggcaagccattactatgagcac

SEQ ID NO: 2045056 - DNA, 25 bp, Homo sapien
tgagaagttgagagaccctcagaat

SEQ ID NO: 2045057 - DNA, 25 bp, Homo sapien
ttatttgcatctgatgatgtcttga

SEQ ID NO: 2045058 - DNA, 25 bp, Homo sapien
atgatgtcttgagataggccattcc

SEQ ID NO: 2045059 - DNA, 25 bp, Homo sapien
ctgagaagttgagagaccctcagaa

SEQ ID NO: 2045060 - DNA, 25 bp, Homo sapien
ttcttttcccacacaccgtctcctc

SEQ ID NO: 2045061 - DNA, 25 bp, Homo sapien
accgtctcctctttgcctgacaggt

SEQ ID NO: 2045062 - DNA, 25 bp, Homo sapien
ttcccacacaccgtctcctctttgc

SEQ ID NO: 2045063 - DNA, 25 bp, Homo sapien
ctctttgcctgacaggtcaagtggc

SEQ ID NO: 2045064 - DNA, 25 bp, Homo sapien
tatttgcaatttcagaaacccacag

SEQ ID NO: 2045065 - DNA, 25 bp, Homo sapien
caatcaatttgcacagacagccgcc

SEQ ID NO: 2045066 - DNA, 25 bp, Homo sapien
ggcacttgtcatatgcagcacacac

SEQ ID NO: 2045067 - DNA, 25 bp, Homo sapien
caaaagcagacacatgggaggcact

SEQ ID NO: 2045068 - DNA, 25 bp, Homo sapien
ctctttcttagatgctgcaggataa

SEQ ID NO: 2045069 - DNA, 25 bp, Homo sapien
ttcttagatgctgcaggataaacat

SEQ ID NO: 2045070 - DNA, 25 bp, Homo sapien
gggcctctttcttagatgctgcagg

SEQ ID NO: 2045071 - DNA, 25 bp, Homo sapien
ctgggcctctttcttagatgctgca

SEQ ID NO: 2045072 - DNA, 25 bp, Homo sapien
tactatttcagcgacacagaaacac

SEQ ID NO: 2045073 - DNA, 25 bp, Homo sapien
gaatagcatctactatttcagcgac

SEQ ID NO: 2045074 - DNA, 25 bp, Homo sapien
tcctcctcccactagtggtattggg

SEQ ID NO: 2045075 - DNA, 25 bp, Homo sapien
ggtattgggatctgccgctagagct

SEQ ID NO: 2045076 - DNA, 25 bp, Homo sapien
tcagtgataacaggtaaccaggacc

SEQ ID NO: 2045077 - DNA, 25 bp, Homo sapien
ttgtcaatgagctaataaaaaccac

SEQ ID NO: 2045078 - DNA, 25 bp, Homo sapien
gaagcttagaaaaggagtgtggcca

SEQ ID NO: 2045079 - DNA, 25 bp, Homo sapien
tatgctgattgagccctgtgctgag

SEQ ID NO: 2045080 - DNA, 25 bp, Homo sapien
tttgagatagaatcttactctgttg

SEQ ID NO: 2045081 - DNA, 25 bp, Homo sapien
cagtggtgcaatcatagctctctac

SEQ ID NO: 2045082 - DNA, 25 bp, Homo sapien
tggtgcaatcatagctctctacagc

SEQ ID NO: 2045083 - DNA, 25 bp, Homo sapien
ttgagatagaatcttactctgttgc

SEQ ID NO: 2045084 - DNA, 25 bp, Homo sapien
tggatccagtgtcctgacaatctgt

SEQ ID NO: 2045085 - DNA, 25 bp, Homo sapien
gtacgtcccactcatttggatccag

SEQ ID NO: 2045086 - DNA, 25 bp, Homo sapien
ctatgtccccaggaaatttcccctg

SEQ ID NO: 2045087 - DNA, 25 bp, Homo sapien
gatcccagtggtccagactcatcca

SEQ ID NO: 2045088 - DNA, 25 bp, Homo sapien
aattgtaccaagctctctccagaac

SEQ ID NO: 2045089 - DNA, 25 bp, Homo sapien
ctttgtaatcctgtgctttttggca

SEQ ID NO: 2045090 - DNA, 25 bp, Homo sapien
tttggcatcttcaaattgtaccaag

SEQ ID NO: 2045091 - DNA, 25 bp, Homo sapien
tttctgatagccctttgtaatcctg

SEQ ID NO: 2045092 - DNA, 25 bp, Homo sapien
agtaaactcgtataagtcccctgag

SEQ ID NO: 2045093 - DNA, 25 bp, Homo sapien
cgtataagtcccctgagtagtactt

SEQ ID NO: 2045094 - DNA, 25 bp, Homo sapien
aaactcgtataagtcccctgagtag

SEQ ID NO: 2045095 - DNA, 25 bp, Homo sapien
tcccctgagtagtacttccagaggt

SEQ ID NO: 2045096 - DNA, 25 bp, Homo sapien
aacagttagcatgtccagatgtgga

SEQ ID NO: 2045097 - DNA, 25 bp, Homo sapien
gactcgagagttctgccctggagga

SEQ ID NO: 2045098 - DNA, 25 bp, Homo sapien
cccttctgctgattaggctgctctg

SEQ ID NO: 2045099 - DNA, 25 bp, Homo sapien
ccctggaggactgtcagcaaaacag

SEQ ID NO: 2045100 - DNA, 25 bp, Homo sapien
taacccagcgatgtgttcaatgaaa

SEQ ID NO: 2045101 - DNA, 25 bp, Homo sapien
gaaaagattaatctgtaatgcactg

SEQ ID NO: 2045102 - DNA, 25 bp, Homo sapien
ctgtaatgcactgaagtcagaaact

SEQ ID NO: 2045103 - DNA, 25 bp, Homo sapien
cagaaactaacccagcgatgtgttc

SEQ ID NO: 2045104 - DNA, 25 bp, Homo sapien
ccttcaggcgactgagatagtttat

SEQ ID NO: 2045105 - DNA, 25 bp, Homo sapien
tccttcaggcgactgagatagttta

SEQ ID NO: 2045106 - DNA, 25 bp, Homo sapien
cttcaggcgactgagatagtttatt

SEQ ID NO: 2045107 - DNA, 25 bp, Homo sapien
ccaccaatgcacttctggagtcttt

SEQ ID NO: 2045108 - DNA, 25 bp, Homo sapien
ggaagctggaaggtactcattcacc

SEQ ID NO: 2045109 - DNA, 25 bp, Homo sapien
cttagaaatgccgtggaagctggaa

SEQ ID NO: 2045110 - DNA, 25 bp, Homo sapien
gtactcattcaccaccaatgcactt

SEQ ID NO: 2045111 - DNA, 25 bp, Homo sapien
gcgtggcttcacctagcaaagttgt

SEQ ID NO: 2045112 - DNA, 25 bp, Homo sapien
gctgtgcgtggcttcacctagcaaa

SEQ ID NO: 2045113 - DNA, 25 bp, Homo sapien
gtggcttcacctagcaaagttgtcc

SEQ ID NO: 2045114 - DNA, 25 bp, Homo sapien
aagttgtcctgataaatacagctga

SEQ ID NO: 2045115 - DNA, 25 bp, Homo sapien
cagtgccagtggcggtgctctagaa

SEQ ID NO: 2045116 - DNA, 25 bp, Homo sapien
taccttagtttggtcagtgccagtg

SEQ ID NO: 2045117 - DNA, 25 bp, Homo sapien
ctaccttagtttggtcagtgccagt

SEQ ID NO: 2045118 - DNA, 25 bp, Homo sapien
gccagtggcggtgctctagaatatg

SEQ ID NO: 2045119 - DNA, 25 bp, Homo sapien
cagacaattcctgctctggtgttgg

SEQ ID NO: 2045120 - DNA, 25 bp, Homo sapien
ccagacaattcctgctctggtgttg

SEQ ID NO: 2045121 - DNA, 25 bp, Homo sapien
atgtccagtatcttccggaaggctt

SEQ ID NO: 2045122 - DNA, 25 bp, Homo sapien
tatcttccggaaggcttctgtgttg

SEQ ID NO: 2045123 - DNA, 25 bp, Homo sapien
gtatcttccggaaggcttctgtgtt

SEQ ID NO: 2045124 - DNA, 25 bp, Homo sapien
tccagtatcttccggaaggcttctg

SEQ ID NO: 2045125 - DNA, 25 bp, Homo sapien
aactaataccaccaacagttcctga

SEQ ID NO: 2045126 - DNA, 25 bp, Homo sapien
caccaagccaaacatgaaactcatc

SEQ ID NO: 2045127 - DNA, 25 bp, Homo sapien
tctccacttccctcactctgcacct

SEQ ID NO: 2045128 - DNA, 25 bp, Homo sapien
cccccagccacttctaactctgcct

SEQ ID NO: 2045129 - DNA, 25 bp, Homo sapien
ccaagccaaacatgaaactcatctt

SEQ ID NO: 2045130 - DNA, 25 bp, Homo sapien
ctctcatcattgcatccttaggctc

SEQ ID NO: 2045131 - DNA, 25 bp, Homo sapien
tctcatcattgcatccttaggctct

SEQ ID NO: 2045132 - DNA, 25 bp, Homo sapien
ctcatcattgcatccttaggctctt

SEQ ID NO: 2045133 - DNA, 25 bp, Homo sapien
catcattgcatccttaggctcttcc

SEQ ID NO: 2045134 - DNA, 25 bp, Homo sapien
tgacagcagcaactaaagctacttg

SEQ ID NO: 2045135 - DNA, 25 bp, Homo sapien
tagtactgatagtgacagcagcaac

SEQ ID NO: 2045136 - DNA, 25 bp, Homo sapien
gcaactaaagctacttgccaacctc

SEQ ID NO: 2045137 - DNA, 25 bp, Homo sapien
ctgattagtactgatagtgacagca

SEQ ID NO: 2045138 - DNA, 25 bp, Homo sapien
aacctgaactctgagcaccctgtct

SEQ ID NO: 2045139 - DNA, 25 bp, Homo sapien
tcaacctgaactctgagcaccctgt

SEQ ID NO: 2045140 - DNA, 25 bp, Homo sapien
cctgaactctgagcaccctgtctaa

SEQ ID NO: 2045141 - DNA, 25 bp, Homo sapien
ctgaactctgagcaccctgtctaac

SEQ ID NO: 2045142 - DNA, 25 bp, Homo sapien
ggtgtgtggatttctctagtcccct

SEQ ID NO: 2045143 - DNA, 25 bp, Homo sapien
ccttcccaaatggatcaggtgctgc

SEQ ID NO: 2045144 - DNA, 25 bp, Homo sapien
tgctaaaagccatcgacaacgctga

SEQ ID NO: 2045145 - DNA, 25 bp, Homo sapien
ccagggctgctgatgtgtctttgtt

SEQ ID NO: 2045146 - DNA, 25 bp, Homo sapien
tggtggtccagaacttgggagtagg

SEQ ID NO: 2045147 - DNA, 25 bp, Homo sapien
aggtggcacctattgttttgtaatc

SEQ ID NO: 2045148 - DNA, 25 bp, Homo sapien
tcagtgccagaactgatcacatttt

SEQ ID NO: 2045149 - DNA, 25 bp, Homo sapien
gtgccagaactgatcacatttttta

SEQ ID NO: 2045150 - DNA, 25 bp, Homo sapien
ttccttttgtatattcagttcgtgg

SEQ ID NO: 2045151 - DNA, 25 bp, Homo sapien
cacagtggatggaattactgtggtt

SEQ ID NO: 2045152 - DNA, 25 bp, Homo sapien
ttgccacagtggatggaattactgt

SEQ ID NO: 2045153 - DNA, 25 bp, Homo sapien
cttttgtatattcagttcgtggttg

SEQ ID NO: 2045154 - DNA, 25 bp, Homo sapien
aggtgacttcgcatgcactggagtg

SEQ ID NO: 2045155 - DNA, 25 bp, Homo sapien
cgaggtgacttcgcatgcactggag

SEQ ID NO: 2045156 - DNA, 25 bp, Homo sapien
gtgacttcgcatgcactggagtggc

SEQ ID NO: 2045157 - DNA, 25 bp, Homo sapien
gacttcgcatgcactggagtggcac

SEQ ID NO: 2045158 - DNA, 25 bp, Homo sapien
tatctgcatgaagttcattgcctta

SEQ ID NO: 2045159 - DNA, 25 bp, Homo sapien
gcatgaagttcattgccttatgttc

SEQ ID NO: 2045160 - DNA, 25 bp, Homo sapien
ctatctgcatgaagttcattgcctt

SEQ ID NO: 2045161 - DNA, 25 bp, Homo sapien
tctgcatgaagttcattgccttatg

SEQ ID NO: 2045162 - DNA, 25 bp, Homo sapien
ccttgtgagaccttatgatagcagc

SEQ ID NO: 2045163 - DNA, 25 bp, Homo sapien
caccatctgaatgggtagcaggaac

SEQ ID NO: 2045164 - DNA, 25 bp, Homo sapien
caggaacaagggatgtgtagttcaa

SEQ ID NO: 2045165 - DNA, 25 bp, Homo sapien
gtttcaaagaggtacagatggatgg

SEQ ID NO: 2045166 - DNA, 25 bp, Homo sapien
ttcccacattctgacttctgtgcca

SEQ ID NO: 2045167 - DNA, 25 bp, Homo sapien
acttttcccacattctgacttctgt

SEQ ID NO: 2045168 - DNA, 25 bp, Homo sapien
tcacttttcccacattctgacttct

SEQ ID NO: 2045169 - DNA, 25 bp, Homo sapien
aatcctcacttttcccacattctga

SEQ ID NO: 2045170 - DNA, 25 bp, Homo sapien
cagctgtcctcctagtgtcctgtct

SEQ ID NO: 2045171 - DNA, 25 bp, Homo sapien
gctgtcctcctagtgtcctgtcttt

SEQ ID NO: 2045172 - DNA, 25 bp, Homo sapien
tgtcctcctagtgtcctgtctttct

SEQ ID NO: 2045173 - DNA, 25 bp, Homo sapien
gacagctgtcctcctagtgtcctgt

SEQ ID NO: 2045174 - DNA, 25 bp, Homo sapien
atgcacacatggtattacgtagagc

SEQ ID NO: 2045175 - DNA, 25 bp, Homo sapien
gcacacatggtattacgtagagcca

SEQ ID NO: 2045176 - DNA, 25 bp, Homo sapien
cacacatggtattacgtagagccac

SEQ ID NO: 2045177 - DNA, 25 bp, Homo sapien
tgcacacatggtattacgtagagcc

SEQ ID NO: 2045178 - DNA, 25 bp, Homo sapien
gtatccatttctcatcgtcatcacc

SEQ ID NO: 2045179 - DNA, 25 bp, Homo sapien
cagtatccatttctcatcgtcatca

SEQ ID NO: 2045180 - DNA, 25 bp, Homo sapien
agtatccatttctcatcgtcatcac

SEQ ID NO: 2045181 - DNA, 25 bp, Homo sapien
gatgccattcagaaccaccttggaa

SEQ ID NO: 2045182 - DNA, 25 bp, Homo sapien
cagaaccaccttggaatcatctgaa

SEQ ID NO: 2045183 - DNA, 25 bp, Homo sapien
cttgggagacacagtagactgatgt

SEQ ID NO: 2045184 - DNA, 25 bp, Homo sapien
gacacagtagactgatgtctgactc

SEQ ID NO: 2045185 - DNA, 25 bp, Homo sapien
tctattgagcgtatccaaatacata

SEQ ID NO: 2045186 - DNA, 25 bp, Homo sapien
aacagataaataggcagacatgaac

SEQ ID NO: 2045187 - DNA, 25 bp, Homo sapien
ttcaactcatactaataaccaaaga

SEQ ID NO: 2045188 - DNA, 25 bp, Homo sapien
tctgtgagattaacgaagacttact

SEQ ID NO: 2045189 - DNA, 25 bp, Homo sapien
tctaatgtattaacatgcaataaca

SEQ ID NO: 2045190 - DNA, 25 bp, Homo sapien
accctgaggtagttaagtatactat

SEQ ID NO: 2045191 - DNA, 25 bp, Homo sapien
acattacaactcatagcctcctggg

SEQ ID NO: 2045192 - DNA, 25 bp, Homo sapien
aataggtcatgttccagcccatgga

SEQ ID NO: 2045193 - DNA, 25 bp, Homo sapien
gtcatatgaccacaccaagctgcaa

SEQ ID NO: 2045194 - DNA, 25 bp, Homo sapien
tgtctctaggtaggcaaccatgcac

SEQ ID NO: 2045195 - DNA, 25 bp, Homo sapien
ttagttggggggagtcataagccaa

SEQ ID NO: 2045196 - DNA, 25 bp, Homo sapien
tagttggggggagtcataagccaaa

SEQ ID NO: 2045197 - DNA, 25 bp, Homo sapien
gttagttggggggagtcataagcca

SEQ ID NO: 2045198 - DNA, 25 bp, Homo sapien
tatagcttataaaagctttgtttct

SEQ ID NO: 2045199 - DNA, 25 bp, Homo sapien
atatagcttataaaagctttgtttc

SEQ ID NO: 2045200 - DNA, 25 bp, Homo sapien
tagcttataaaagctttgtttctac

SEQ ID NO: 2045201 - DNA, 25 bp, Homo sapien
atagcttataaaagctttgtttcta

SEQ ID NO: 2045202 - DNA, 25 bp, Homo sapien
acaacataggttggcttattgtgta

SEQ ID NO: 2045203 - DNA, 25 bp, Homo sapien
tataaattgggttaacattacatgg

SEQ ID NO: 2045204 - DNA, 25 bp, Homo sapien
gaagtttcgccatgagttgctaagt

SEQ ID NO: 2045205 - DNA, 25 bp, Homo sapien
tatacgtacaaattctcagatggtt

SEQ ID NO: 2045206 - DNA, 25 bp, Homo sapien
gccacctgaataatgctacagaata

SEQ ID NO: 2045207 - DNA, 25 bp, Homo sapien
acaatgtgccacctgaataatgcta

SEQ ID NO: 2045208 - DNA, 25 bp, Homo sapien
aacacacttagcatattttgaaatg

SEQ ID NO: 2045209 - DNA, 25 bp, Homo sapien
aacagaactaacacacttagcatat

SEQ ID NO: 2045210 - DNA, 25 bp, Homo sapien
cttgcaaatgcactagtctccagga

SEQ ID NO: 2045211 - DNA, 25 bp, Homo sapien
tgtcaaatctagtagacagctactg

SEQ ID NO: 2045212 - DNA, 25 bp, Homo sapien
ctacaccaggttgggttcagtacaa

SEQ ID NO: 2045213 - DNA, 25 bp, Homo sapien
cagaagatgggttggcaagacaaat

SEQ ID NO: 2045214 - DNA, 25 bp, Homo sapien
tatggacttcattttcggagaaaga

SEQ ID NO: 2045215 - DNA, 25 bp, Homo sapien
tatagccttatggacttcattttcg

SEQ ID NO: 2045216 - DNA, 25 bp, Homo sapien
ccttatggacttcattttcggagaa

SEQ ID NO: 2045217 - DNA, 25 bp, Homo sapien
tgattatagccttatggacttcatt

SEQ ID NO: 2045218 - DNA, 25 bp, Homo sapien
tatagtctgcttatactggactaac

SEQ ID NO: 2045219 - DNA, 25 bp, Homo sapien
catgctgattactgaacggttaatt

SEQ ID NO: 2045220 - DNA, 25 bp, Homo sapien
gtaacaaacagcctacacaacatgc

SEQ ID NO: 2045221 - DNA, 25 bp, Homo sapien
aattctaattaacttgggcatggca

SEQ ID NO: 2045222 - DNA, 25 bp, Homo sapien
aatacatcttattccctgggcatag

SEQ ID NO: 2045223 - DNA, 25 bp, Homo sapien
tgaaaatagcaacttacctttgggc

SEQ ID NO: 2045224 - DNA, 25 bp, Homo sapien
gttatctagaatgcaacctcggtgc

SEQ ID NO: 2045225 - DNA, 25 bp, Homo sapien
aaaattggcacagaacctacaagca

SEQ ID NO: 2045226 - DNA, 25 bp, Homo sapien
acagtgcccttgattatctaataga

SEQ ID NO: 2045227 - DNA, 25 bp, Homo sapien
tgactggatcaatgttgactcttct

SEQ ID NO: 2045228 - DNA, 25 bp, Homo sapien
ttttgagaccaaaacaatcaagcat

SEQ ID NO: 2045229 - DNA, 25 bp, Homo sapien
acagaacagtggacatatggtgtgc

SEQ ID NO: 2045230 - DNA, 25 bp, Homo sapien
tgttccagtccacattaacagagga

SEQ ID NO: 2045231 - DNA, 25 bp, Homo sapien
tccacattaacagaggatttctgat

SEQ ID NO: 2045232 - DNA, 25 bp, Homo sapien
gtagtgtaccgccttgcatattcac

SEQ ID NO: 2045233 - DNA, 25 bp, Homo sapien
ttctgatgctgtccagtgcgtagtg

SEQ ID NO: 2045234 - DNA, 25 bp, Homo sapien
tgaaacagccacttatccacaaggt

SEQ ID NO: 2045235 - DNA, 25 bp, Homo sapien
gatggaatggaaggatctcttcaca

SEQ ID NO: 2045236 - DNA, 25 bp, Homo sapien
cacaaaggctgcttactgatgaaac

SEQ ID NO: 2045237 - DNA, 25 bp, Homo sapien
ctgaggtgacaatatggctgctaat

SEQ ID NO: 2045238 - DNA, 25 bp, Homo sapien
tcactgctggtaatttccatactgt

SEQ ID NO: 2045239 - DNA, 25 bp, Homo sapien
cactgctggtaatttccatactgtc

SEQ ID NO: 2045240 - DNA, 25 bp, Homo sapien
actgctggtaatttccatactgtcc

SEQ ID NO: 2045241 - DNA, 25 bp, Homo sapien
tacaaacgaatcatttctaacactg

SEQ ID NO: 2045242 - DNA, 25 bp, Homo sapien
tgtcataccacaaaaaagcagccgt

SEQ ID NO: 2045243 - DNA, 25 bp, Homo sapien
aagcagccgtacctacaataaacaa

SEQ ID NO: 2045244 - DNA, 25 bp, Homo sapien
gataatagtttgaccataacaggca

SEQ ID NO: 2045245 - DNA, 25 bp, Homo sapien
gaattagggattttatgggccaggc

SEQ ID NO: 2045246 - DNA, 25 bp, Homo sapien
cctcaggatgacaggatgagacaga

SEQ ID NO: 2045247 - DNA, 25 bp, Homo sapien
taataaggtagacttgaagaccctc

SEQ ID NO: 2045248 - DNA, 25 bp, Homo sapien
catgatgaagcagcacgaagggaca

SEQ ID NO: 2045249 - DNA, 25 bp, Homo sapien
gaaaatagagggcagtatgattcag

SEQ ID NO: 2045250 - DNA, 25 bp, Homo sapien
aaaatagagggcagtatgattcaga

SEQ ID NO: 2045251 - DNA, 25 bp, Homo sapien
aatagagggcagtatgattcagagg

SEQ ID NO: 2045252 - DNA, 25 bp, Homo sapien
aaatagagggcagtatgattcagag

SEQ ID NO: 2045253 - DNA, 25 bp, Homo sapien
cataaaacgatgactgtggtacaag

SEQ ID NO: 2045254 - DNA, 25 bp, Homo sapien
ataaaacgatgactgtggtacaagt

SEQ ID NO: 2045255 - DNA, 25 bp, Homo sapien
tcataaaacgatgactgtggtacaa

SEQ ID NO: 2045256 - DNA, 25 bp, Homo sapien
aatacagtcatcctaggatgagata

SEQ ID NO: 2045257 - DNA, 25 bp, Homo sapien
atacagtcatcctaggatgagatac

SEQ ID NO: 2045258 - DNA, 25 bp, Homo sapien
tacagtcatcctaggatgagataca

SEQ ID NO: 2045259 - DNA, 25 bp, Homo sapien
taggatgagatacacttctacatat

SEQ ID NO: 2045260 - DNA, 25 bp, Homo sapien
catactgctgaccttgtccctgtgg

SEQ ID NO: 2045261 - DNA, 25 bp, Homo sapien
aggacctggaccaccctgtgaagga

SEQ ID NO: 2045262 - DNA, 25 bp, Homo sapien
aggctgtgttggtctatatcctcca

SEQ ID NO: 2045263 - DNA, 25 bp, Homo sapien
ccctgtgggtagttaggatactgag

SEQ ID NO: 2045264 - DNA, 25 bp, Homo sapien
gaggtggtccctggtatgcatcttg

SEQ ID NO: 2045265 - DNA, 25 bp, Homo sapien
cttgctgttggccatactgtgaatt

SEQ ID NO: 2045266 - DNA, 25 bp, Homo sapien
ggtggtccctggtatgcatcttgct

SEQ ID NO: 2045267 - DNA, 25 bp, Homo sapien
ctgctggggtggatatccctgttgt

SEQ ID NO: 2045268 - DNA, 25 bp, Homo sapien
tttcagcgtctctgccatacgagca

SEQ ID NO: 2045269 - DNA, 25 bp, Homo sapien
caattttgcaaggttgaactgcagc

SEQ ID NO: 2045270 - DNA, 25 bp, Homo sapien
gcacacactagctacacgagatcag

SEQ ID NO: 2045271 - DNA, 25 bp, Homo sapien
aggatttcggccaaacaaactgcag

SEQ ID NO: 2045272 - DNA, 25 bp, Homo sapien
aggcctatcgtagccttgttcagga

SEQ ID NO: 2045273 - DNA, 25 bp, Homo sapien
agtaatgttgtgaggaatcctcata

SEQ ID NO: 2045274 - DNA, 25 bp, Homo sapien
tgaggaatcctcataaggcctatcg

SEQ ID NO: 2045275 - DNA, 25 bp, Homo sapien
tgctgataaccgtaatcattatgac

SEQ ID NO: 2045276 - DNA, 25 bp, Homo sapien
gacaggaagaaacgttaatggccac

SEQ ID NO: 2045277 - DNA, 25 bp, Homo sapien
tacctgcgagataattggactctag

SEQ ID NO: 2045278 - DNA, 25 bp, Homo sapien
tacatcaattcgacaagagacagga

SEQ ID NO: 2045279 - DNA, 25 bp, Homo sapien
tacctacatgaagggttggcaaact

SEQ ID NO: 2045280 - DNA, 25 bp, Homo sapien
catgggctgctagtcaatggctgct

SEQ ID NO: 2045281 - DNA, 25 bp, Homo sapien
cctgatggtactaatggaacaccta

SEQ ID NO: 2045282 - DNA, 25 bp, Homo sapien
tgaataaggcttttggcaaacccta

SEQ ID NO: 2045283 - DNA, 25 bp, Homo sapien
tatcttcttgctagcttacatgggc

SEQ ID NO: 2045284 - DNA, 25 bp, Homo sapien
attgctggttcatgccttctggagg

SEQ ID NO: 2045285 - DNA, 25 bp, Homo sapien
catcagggtaatattgctggttcat

SEQ ID NO: 2045286 - DNA, 25 bp, Homo sapien
gaggaccttgtccaccatgactgta

SEQ ID NO: 2045287 - DNA, 25 bp, Homo sapien
attggtccccgtaatagtcttcctg

SEQ ID NO: 2045288 - DNA, 25 bp, Homo sapien
tgtccttggtaatgctgtccgcctc

SEQ ID NO: 2045289 - DNA, 25 bp, Homo sapien
tgtctctgacccatcatatgattgc

SEQ ID NO: 2045290 - DNA, 25 bp, Homo sapien
gccttggttaacttgacccatcatt

SEQ ID NO: 2045291 - DNA, 25 bp, Homo sapien
ccgcctccctgtggcatattgtatt

SEQ ID NO: 2045292 - DNA, 25 bp, Homo sapien
ttttagccaaggaatctaaaaatca

SEQ ID NO: 2045293 - DNA, 25 bp, Homo sapien
ctcctaacaattaccagaggtaagg

SEQ ID NO: 2045294 - DNA, 25 bp, Homo sapien
gaagagaacttaatactgaaggtac

SEQ ID NO: 2045295 - DNA, 25 bp, Homo sapien
ttcacagtcatttcctacaaactcc

SEQ ID NO: 2045296 - DNA, 25 bp, Homo sapien
ttcatattgttaggaacttactagc

SEQ ID NO: 2045297 - DNA, 25 bp, Homo sapien
taaaaccttatagtgttcactttgc

SEQ ID NO: 2045298 - DNA, 25 bp, Homo sapien
catatcaatgaccatgcaagcagaa

SEQ ID NO: 2045299 - DNA, 25 bp, Homo sapien
tcactttgcatagtaggatcagacc

SEQ ID NO: 2045300 - DNA, 25 bp, Homo sapien
tattgagttgattgggtccaggtcc

SEQ ID NO: 2045301 - DNA, 25 bp, Homo sapien
tggatccatggctacttgaaggcat

SEQ ID NO: 2045302 - DNA, 25 bp, Homo sapien
tccaggtccctgcataggcatatgg

SEQ ID NO: 2045303 - DNA, 25 bp, Homo sapien
tggttgtaacctcccatggatccat

SEQ ID NO: 2045304 - DNA, 25 bp, Homo sapien
tagactaacagatcgattgaacaga

SEQ ID NO: 2045305 - DNA, 25 bp, Homo sapien
ttttgaagtcaggagcactctgaaa

SEQ ID NO: 2045306 - DNA, 25 bp, Homo sapien
gacccaaatacatagctgagtaaat

SEQ ID NO: 2045307 - DNA, 25 bp, Homo sapien
gaaggaaggactagcttcttcataa

SEQ ID NO: 2045308 - DNA, 25 bp, Homo sapien
catatgaagtaagtaaaagaccacc

SEQ ID NO: 2045309 - DNA, 25 bp, Homo sapien
aactatgagaccgaactttcacctc

SEQ ID NO: 2045310 - DNA, 25 bp, Homo sapien
ttcaaataaagtagttgtccctcag

SEQ ID NO: 2045311 - DNA, 25 bp, Homo sapien
caaaggacataatgagggaatgact

SEQ ID NO: 2045312 - DNA, 25 bp, Homo sapien
ggccgttcatctggttctgcatgtg

SEQ ID NO: 2045313 - DNA, 25 bp, Homo sapien
ccccacctaccattccatctgaagg

SEQ ID NO: 2045314 - DNA, 25 bp, Homo sapien
atctggccgttcatctggttctgca

SEQ ID NO: 2045315 - DNA, 25 bp, Homo sapien
catctggttctgcatgtgcggtgca

SEQ ID NO: 2045316 - DNA, 25 bp, Homo sapien
ttgtgagagcgtggaggtgggggag

SEQ ID NO: 2045317 - DNA, 25 bp, Homo sapien
gttgtgagagcgtggaggtggggga

SEQ ID NO: 2045318 - DNA, 25 bp, Homo sapien
ccttggtgttctaaccataacaaag

SEQ ID NO: 2045319 - DNA, 25 bp, Homo sapien
gcatgtgttccttcaccttacttga

SEQ ID NO: 2045320 - DNA, 25 bp, Homo sapien
caaaatgttccacagctctaagcat

SEQ ID NO: 2045321 - DNA, 25 bp, Homo sapien
caaggtacagaacagggtacacggc

SEQ ID NO: 2045322 - DNA, 25 bp, Homo sapien
aaggaaactctgtaagaccaaatgt

SEQ ID NO: 2045323 - DNA, 25 bp, Homo sapien
aaaggaaactctgtaagaccaaatg

SEQ ID NO: 2045324 - DNA, 25 bp, Homo sapien
ggaaactctgtaagaccaaatgtta

SEQ ID NO: 2045325 - DNA, 25 bp, Homo sapien
aggaaactctgtaagaccaaatgtt

SEQ ID NO: 2045326 - DNA, 25 bp, Homo sapien
catctttactaaagcgtgtggaaga

SEQ ID NO: 2045327 - DNA, 25 bp, Homo sapien
catgctacccaagggctctgctcag

SEQ ID NO: 2045328 - DNA, 25 bp, Homo sapien
tgtaagactacatagcctcaatcaa

SEQ ID NO: 2045329 - DNA, 25 bp, Homo sapien
cttaacagatgctttgccaggacag

SEQ ID NO: 2045330 - DNA, 25 bp, Homo sapien
gctattgtagcaaggtataccaagt

SEQ ID NO: 2045331 - DNA, 25 bp, Homo sapien
tgctggtaaaagagactgcatattt

SEQ ID NO: 2045332 - DNA, 25 bp, Homo sapien
tagaatctgctattgtagcaaggta

SEQ ID NO: 2045333 - DNA, 25 bp, Homo sapien
caaggtataccaagtttgtgtgcaa

SEQ ID NO: 2045334 - DNA, 25 bp, Homo sapien
taaatataatgagctcagagatctt

SEQ ID NO: 2045335 - DNA, 25 bp, Homo sapien
ttttcttcctacctgcctaagtaca

SEQ ID NO: 2045336 - DNA, 25 bp, Homo sapien
taagtacaaacagcactataatcat

SEQ ID NO: 2045337 - DNA, 25 bp, Homo sapien
tgttacccgaacatcaatagcactt

SEQ ID NO: 2045338 - DNA, 25 bp, Homo sapien
tatggttgcacgacatgagattttc

SEQ ID NO: 2045339 - DNA, 25 bp, Homo sapien
ggctattccctcatataacaggaca

SEQ ID NO: 2045340 - DNA, 25 bp, Homo sapien
taatgctttgcgtcacatggacact

SEQ ID NO: 2045341 - DNA, 25 bp, Homo sapien
gcactaacagggaccactagctgga

SEQ ID NO: 2045342 - DNA, 25 bp, Homo sapien
tcaaggttcaaagatgaacattaac

SEQ ID NO: 2045343 - DNA, 25 bp, Homo sapien
gatgactcaaggttcaaagatgaac

SEQ ID NO: 2045344 - DNA, 25 bp, Homo sapien
gactcaaggttcaaagatgaacatt

SEQ ID NO: 2045345 - DNA, 25 bp, Homo sapien
ctaagatgactcaaggttcaaagat

SEQ ID NO: 2045346 - DNA, 25 bp, Homo sapien
agttatcttccaaactacagattta

SEQ ID NO: 2045347 - DNA, 25 bp, Homo sapien
caactcttttaaattacgatgaatg

SEQ ID NO: 2045348 - DNA, 25 bp, Homo sapien
gatgaatgatcgacactaatttttt

SEQ ID NO: 2045349 - DNA, 25 bp, Homo sapien
aactctggaatagtttggactcacc

SEQ ID NO: 2045350 - DNA, 25 bp, Homo sapien
aagacatatcaagaagccagcttga

SEQ ID NO: 2045351 - DNA, 25 bp, Homo sapien
acatatcaagaagccagcttgaggg

SEQ ID NO: 2045352 - DNA, 25 bp, Homo sapien
gcctagaacattttgtggtataaga

SEQ ID NO: 2045353 - DNA, 25 bp, Homo sapien
aaaaaaccaggatgagcctagaaca

SEQ ID NO: 2045354 - DNA, 25 bp, Homo sapien
aggttggtgggaattatctgcctga

SEQ ID NO: 2045355 - DNA, 25 bp, Homo sapien
aaggttggtgggaattatctgcctg

SEQ ID NO: 2045356 - DNA, 25 bp, Homo sapien
tagagggtaaatcaaatgacagcaa

SEQ ID NO: 2045357 - DNA, 25 bp, Homo sapien
taaatagagggtaaatcaaatgaca

SEQ ID NO: 2045358 - DNA, 25 bp, Homo sapien
cagatgcatcccaaaacaagggtga

SEQ ID NO: 2045359 - DNA, 25 bp, Homo sapien
gacacgggcatctgggactttggta

SEQ ID NO: 2045360 - DNA, 25 bp, Homo sapien
tggttgttactgaacatgtaggctt

SEQ ID NO: 2045361 - DNA, 25 bp, Homo sapien
cgtgagtaggtgatatgcaaatcct

SEQ ID NO: 2045362 - DNA, 25 bp, Homo sapien
taccacatcagattctattagggca

SEQ ID NO: 2045363 - DNA, 25 bp, Homo sapien
gaaagtttggcccttatgaatgaca

SEQ ID NO: 2045364 - DNA, 25 bp, Homo sapien
aatgaagatctaactttcccacaga

SEQ ID NO: 2045365 - DNA, 25 bp, Homo sapien
gaaacgaagtgatacccaatctcct

SEQ ID NO: 2045366 - DNA, 25 bp, Homo sapien
tatacactgaataagatggttattg

SEQ ID NO: 2045367 - DNA, 25 bp, Homo sapien
tacactgaataagatggttattgtc

SEQ ID NO: 2045368 - DNA, 25 bp, Homo sapien
tgaataagatggttattgtcatcca

SEQ ID NO: 2045369 - DNA, 25 bp, Homo sapien
taagatggttattgtcatccaacat

SEQ ID NO: 2045370 - DNA, 25 bp, Homo sapien
gcggtaagggcctggcatccgcaac

SEQ ID NO: 2045371 - DNA, 25 bp, Homo sapien
cttttgtgtctgtagaaaaacgcgt

SEQ ID NO: 2045372 - DNA, 25 bp, Homo sapien
tcccagaggcggtaagggcctggca

SEQ ID NO: 2045373 - DNA, 25 bp, Homo sapien
tgcgtgaaagactccgagaaaaacc

SEQ ID NO: 2045374 - DNA, 25 bp, Homo sapien
cttctgaatcgcagcgggagtgatc

SEQ ID NO: 2045375 - DNA, 25 bp, Homo sapien
ggccgcgaaagccacagacatgttg

SEQ ID NO: 2045376 - DNA, 25 bp, Homo sapien
atgttgccgccgtcaccactatcgg

SEQ ID NO: 2045377 - DNA, 25 bp, Homo sapien
gtcaccactatcggcaagtcccgag

SEQ ID NO: 2045378 - DNA, 25 bp, Homo sapien
gcaaactgggggagagacgccggcc

SEQ ID NO: 2045379 - DNA, 25 bp, Homo sapien
ggcaaactgggggagagacgccggc

SEQ ID NO: 2045380 - DNA, 25 bp, Homo sapien
tgctccggggccaagcggacgggcg

SEQ ID NO: 2045381 - DNA, 25 bp, Homo sapien
gatgctccggggccaagcggacggg

SEQ ID NO: 2045382 - DNA, 25 bp, Homo sapien
atgctccggggccaagcggacgggc

SEQ ID NO: 2045383 - DNA, 25 bp, Homo sapien
cctggcaagagtggccgccccgagt

SEQ ID NO: 2045384 - DNA, 25 bp, Homo sapien
agttgtcccggcagcccggagaggg

SEQ ID NO: 2045385 - DNA, 25 bp, Homo sapien
agggaggtcaagactcgggagttcg

SEQ ID NO: 2045386 - DNA, 25 bp, Homo sapien
gagggaggtcaagactcgggagttc

SEQ ID NO: 2045387 - DNA, 25 bp, Homo sapien
agtctcgcacgcacgcacaaagtcg

SEQ ID NO: 2045388 - DNA, 25 bp, Homo sapien
tgctcaggggcaatcggccagcttg

SEQ ID NO: 2045389 - DNA, 25 bp, Homo sapien
acaccaaggttgtgtccagtgctca

SEQ ID NO: 2045390 - DNA, 25 bp, Homo sapien
aaagtcgtgcctaacaattggaaag

SEQ ID NO: 2045391 - DNA, 25 bp, Homo sapien
cggacagagaagagctcgcctcttg

SEQ ID NO: 2045392 - DNA, 25 bp, Homo sapien
agaagagctcgcctcttgggacaaa

SEQ ID NO: 2045393 - DNA, 25 bp, Homo sapien
aagagctcgcctcttgggacaaacc

SEQ ID NO: 2045394 - DNA, 25 bp, Homo sapien
cagagaagagctcgcctcttgggac

SEQ ID NO: 2045395 - DNA, 25 bp, Homo sapien
ctttatattggccaattctcccatt

SEQ ID NO: 2045396 - DNA, 25 bp, Homo sapien
aggcatgattgtgttctgaaacatg

SEQ ID NO: 2045397 - DNA, 25 bp, Homo sapien
ggcatgattgtgttctgaaacatga

SEQ ID NO: 2045398 - DNA, 25 bp, Homo sapien
ccatggagactgtagcccctttata

SEQ ID NO: 2045399 - DNA, 25 bp, Homo sapien
tgaagacctcatttttaagccctaa

SEQ ID NO: 2045400 - DNA, 25 bp, Homo sapien
taacaagagttaacctgagagagag

SEQ ID NO: 2045401 - DNA, 25 bp, Homo sapien
gctctattttgctcacaaggcagaa

SEQ ID NO: 2045402 - DNA, 25 bp, Homo sapien
tttaacggaccatttgctcatctgc

SEQ ID NO: 2045403 - DNA, 25 bp, Homo sapien
ttagattacccctgtaatacagaac

SEQ ID NO: 2045404 - DNA, 25 bp, Homo sapien
taaacaccaatacctatgtcaaaat

SEQ ID NO: 2045405 - DNA, 25 bp, Homo sapien
tatcacacttgactacaaagcaatt

SEQ ID NO: 2045406 - DNA, 25 bp, Homo sapien
gattacccctgtaatacagaaccaa

SEQ ID NO: 2045407 - DNA, 25 bp, Homo sapien
ttagttttccccgtgtctgcatggg

SEQ ID NO: 2045408 - DNA, 25 bp, Homo sapien
tgtgtatgagcaaagcctatgatgg

SEQ ID NO: 2045409 - DNA, 25 bp, Homo sapien
tgccttgtaccctgaactgctgcaa

SEQ ID NO: 2045410 - DNA, 25 bp, Homo sapien
cgaaggccactctatatggagtttg

SEQ ID NO: 2045411 - DNA, 25 bp, Homo sapien
gagcagctggactatgttccgccca

SEQ ID NO: 2045412 - DNA, 25 bp, Homo sapien
gggcgggatcaatactccagctttc

SEQ ID NO: 2045413 - DNA, 25 bp, Homo sapien
ggcacatggaggtaacccctgagtc

SEQ ID NO: 2045414 - DNA, 25 bp, Homo sapien
tatcaatgagaacctgctcgctgac

SEQ ID NO: 2045415 - DNA, 25 bp, Homo sapien
cgctcgttacagcagaacgcgcggt

SEQ ID NO: 2045416 - DNA, 25 bp, Homo sapien
accaacatgtgaaaagcccgacaat

SEQ ID NO: 2045417 - DNA, 25 bp, Homo sapien
ggagaagcacttagttatagcaaga

SEQ ID NO: 2045418 - DNA, 25 bp, Homo sapien
tatctgatagagacaagagtagtgg

SEQ ID NO: 2045419 - DNA, 25 bp, Homo sapien
tatccgagtgcacttttttcagttc

SEQ ID NO: 2045420 - DNA, 25 bp, Homo sapien
cttattggcccctcccacgttctgt

SEQ ID NO: 2045421 - DNA, 25 bp, Homo sapien
caagtctgcagtcaacccaggaagt

SEQ ID NO: 2045422 - DNA, 25 bp, Homo sapien
cacgttctgtttctttcctatccga

SEQ ID NO: 2045423 - DNA, 25 bp, Homo sapien
ttgctttgtggtcttcaaaatttag

SEQ ID NO: 2045424 - DNA, 25 bp, Homo sapien
gctttgtggtcttcaaaatttagat

SEQ ID NO: 2045425 - DNA, 25 bp, Homo sapien
tttgtggtcttcaaaatttagatgg

SEQ ID NO: 2045426 - DNA, 25 bp, Homo sapien
tgtggtcttcaaaatttagatggtt

SEQ ID NO: 2045427 - DNA, 25 bp, Homo sapien
ctagtatgtgagatctaaaaaggaa

SEQ ID NO: 2045428 - DNA, 25 bp, Homo sapien
agtatgtgagatctaaaaaggaaac

SEQ ID NO: 2045429 - DNA, 25 bp, Homo sapien
atgtgagatctaaaaaggaaacaac

SEQ ID NO: 2045430 - DNA, 25 bp, Homo sapien
gtatgtgagatctaaaaaggaaaca

SEQ ID NO: 2045431 - DNA, 25 bp, Homo sapien
tgtatctgagccgtcatctgactgg

SEQ ID NO: 2045432 - DNA, 25 bp, Homo sapien
tctgtatctgagccgtcatctgact

SEQ ID NO: 2045433 - DNA, 25 bp, Homo sapien
tatctgagccgtcatctgactggtt

SEQ ID NO: 2045434 - DNA, 25 bp, Homo sapien
ctctgtatctgagccgtcatctgac

SEQ ID NO: 2045435 - DNA, 25 bp, Homo sapien
tgggaggcactggaggtggtactgt

SEQ ID NO: 2045436 - DNA, 25 bp, Homo sapien
tgagcatcagaattacgatgtttaa

SEQ ID NO: 2045437 - DNA, 25 bp, Homo sapien
atcagaattacgatgtttaaattcc

SEQ ID NO: 2045438 - DNA, 25 bp, Homo sapien
actggaggtggtactgtgagcatca

SEQ ID NO: 2045439 - DNA, 25 bp, Homo sapien
ctgatatggttgctctttatcttgt

SEQ ID NO: 2045440 - DNA, 25 bp, Homo sapien
tatggttgctctttatcttgttccc

SEQ ID NO: 2045441 - DNA, 25 bp, Homo sapien
ctttatcttgttcccagatagagtc

SEQ ID NO: 2045442 - DNA, 25 bp, Homo sapien
ttactgatatggttgctctttatct

SEQ ID NO: 2045443 - DNA, 25 bp, Homo sapien
tggtttcaatgtagtctttagactg

SEQ ID NO: 2045444 - DNA, 25 bp, Homo sapien
caatgtagtctttagactgggtcca

SEQ ID NO: 2045445 - DNA, 25 bp, Homo sapien
ttcaatgtagtctttagactgggtc

SEQ ID NO: 2045446 - DNA, 25 bp, Homo sapien
tttggtttcaatgtagtctttagac

SEQ ID NO: 2045447 - DNA, 25 bp, Homo sapien
ccaaaagcagccgttccacgcgcaa

SEQ ID NO: 2045448 - DNA, 25 bp, Homo sapien
caaaagcagccgttccacgcgcaat

SEQ ID NO: 2045449 - DNA, 25 bp, Homo sapien
aaagcagccgttccacgcgcaataa

SEQ ID NO: 2045450 - DNA, 25 bp, Homo sapien
aaaagcagccgttccacgcgcaata

SEQ ID NO: 2045451 - DNA, 25 bp, Homo sapien
aaacttctctagtaaagaactatag

SEQ ID NO: 2045452 - DNA, 25 bp, Homo sapien
acagtgctctacatgttcagagaaa

SEQ ID NO: 2045453 - DNA, 25 bp, Homo sapien
ttctctagtaaagaactatagaaat

SEQ ID NO: 2045454 - DNA, 25 bp, Homo sapien
ctagtaaagaactatagaaatgatc

SEQ ID NO: 2045455 - DNA, 25 bp, Homo sapien
aggcctctgcatagcaactgtagaa

SEQ ID NO: 2045456 - DNA, 25 bp, Homo sapien
gccttaatattggatctcactggag

SEQ ID NO: 2045457 - DNA, 25 bp, Homo sapien
tggttaagcttttactcccagaggc

SEQ ID NO: 2045458 - DNA, 25 bp, Homo sapien
cacacagttcatgtttagctgcagg

SEQ ID NO: 2045459 - DNA, 25 bp, Homo sapien
gaccatcaatatatgcttaatcttg

SEQ ID NO: 2045460 - DNA, 25 bp, Homo sapien
gccacctcacctggacaggaccatc

SEQ ID NO: 2045461 - DNA, 25 bp, Homo sapien
tgtcacctcttacccacccgagtag

SEQ ID NO: 2045462 - DNA, 25 bp, Homo sapien
gcaatcctgtcacctcttacccacc

SEQ ID NO: 2045463 - DNA, 25 bp, Homo sapien
tcttcagagaaggtggtagtagcga

SEQ ID NO: 2045464 - DNA, 25 bp, Homo sapien
cagtatgtagcaagatagggcttcc

SEQ ID NO: 2045465 - DNA, 25 bp, Homo sapien
acttgtggtggtcttctcgaactca

SEQ ID NO: 2045466 - DNA, 25 bp, Homo sapien
catgtgtgtctataccaggtaagag

SEQ ID NO: 2045467 - DNA, 25 bp, Homo sapien
aatttgcttgttatcttgtgcaggg

SEQ ID NO: 2045468 - DNA, 25 bp, Homo sapien
tgaatttgcttgttatcttgtgcag

SEQ ID NO: 2045469 - DNA, 25 bp, Homo sapien
catgaatttgcttgttatcttgtgc

SEQ ID NO: 2045470 - DNA, 25 bp, Homo sapien
ttgcttgttatcttgtgcagggacc

SEQ ID NO: 2045471 - DNA, 25 bp, Homo sapien
gtccaagaatcacgagaatctgcct

SEQ ID NO: 2045472 - DNA, 25 bp, Homo sapien
agccaccaaacagttgcatcgtcca

SEQ ID NO: 2045473 - DNA, 25 bp, Homo sapien
tattctcgagctctatacctggccc

SEQ ID NO: 2045474 - DNA, 25 bp, Homo sapien
tattttgtatggaacaggaacggga

SEQ ID NO: 2045475 - DNA, 25 bp, Homo sapien
tacagcatgcattgagatgcaggag

SEQ ID NO: 2045476 - DNA, 25 bp, Homo sapien
ggcatctgcctatctgtgcattaaa

SEQ ID NO: 2045477 - DNA, 25 bp, Homo sapien
tctcatgggactcttacagactcag

SEQ ID NO: 2045478 - DNA, 25 bp, Homo sapien
ttgtagcaggtgaggtgtccttccc

SEQ ID NO: 2045479 - DNA, 25 bp, Homo sapien
caagttatatgtgttcacctgagga

SEQ ID NO: 2045480 - DNA, 25 bp, Homo sapien
tcccattgggactgttatggccata

SEQ ID NO: 2045481 - DNA, 25 bp, Homo sapien
tgaggaagaagctgacggacaaagc

SEQ ID NO: 2045482 - DNA, 25 bp, Homo sapien
tccacgtgtgtggaatacagccggt

SEQ ID NO: 2045483 - DNA, 25 bp, Homo sapien
agaagcaggtgattgataacgcgca

SEQ ID NO: 2045484 - DNA, 25 bp, Homo sapien
aacgcgcaaattcaaagccccttgg

SEQ ID NO: 2045485 - DNA, 25 bp, Homo sapien
gagcagttggtttcgttgtcttaat

SEQ ID NO: 2045486 - DNA, 25 bp, Homo sapien
tcaaattccttagtgagcagttggt

SEQ ID NO: 2045487 - DNA, 25 bp, Homo sapien
taacgactctgaatcagtctgtggg

SEQ ID NO: 2045488 - DNA, 25 bp, Homo sapien
ggcttgaaaagcggcattcaggagg

SEQ ID NO: 2045489 - DNA, 25 bp, Homo sapien
cgtaacgactctgaatcagtctgtg

SEQ ID NO: 2045490 - DNA, 25 bp, Homo sapien
ggggcttgaaaagcggcattcagga

SEQ ID NO: 2045491 - DNA, 25 bp, Homo sapien
cacccccacatgtgtgtttcacaca

SEQ ID NO: 2045492 - DNA, 25 bp, Homo sapien
gcaatggaaactgtaaggagactgt

SEQ ID NO: 2045493 - DNA, 25 bp, Homo sapien
tggtccctgcctaaagaaagacgtg

SEQ ID NO: 2045494 - DNA, 25 bp, Homo sapien
ttatttgtcagaggcctcggaaggc

SEQ ID NO: 2045495 - DNA, 25 bp, Homo sapien
gagactgtgtcctcaccactcatgg

SEQ ID NO: 2045496 - DNA, 25 bp, Homo sapien
gatatcactattccaattgttccca

SEQ ID NO: 2045497 - DNA, 25 bp, Homo sapien
ttttttacaccttgaggatatcact

SEQ ID NO: 2045498 - DNA, 25 bp, Homo sapien
catatgaatacaggtgtggtctcta

SEQ ID NO: 2045499 - DNA, 25 bp, Homo sapien
ccaattgttcccatatgaatacagg

SEQ ID NO: 2045500 - DNA, 25 bp, Homo sapien
tgtcttttattcgattttacgtcca

SEQ ID NO: 2045501 - DNA, 25 bp, Homo sapien
cttggtttgctgtcccaactgcaca

SEQ ID NO: 2045502 - DNA, 25 bp, Homo sapien
tttgtttgagttattggttgtgtgt

SEQ ID NO: 2045503 - DNA, 25 bp, Homo sapien
caactgcacataaatgtcccttttt

SEQ ID NO: 2045504 - DNA, 25 bp, Homo sapien
tcagttcccgccgaaggacgtattc

SEQ ID NO: 2045505 - DNA, 25 bp, Homo sapien
gtccagaggctcttgctttatccgg

SEQ ID NO: 2045506 - DNA, 25 bp, Homo sapien
gctgaactgggacgagtctactcct

SEQ ID NO: 2045507 - DNA, 25 bp, Homo sapien
ttatccggatgacggagggtacacg

SEQ ID NO: 2045508 - DNA, 25 bp, Homo sapien
tgctccagtgatagccagggcaggc

SEQ ID NO: 2045509 - DNA, 25 bp, Homo sapien
taaatgctaacaggaggaaatcgct

SEQ ID NO: 2045510 - DNA, 25 bp, Homo sapien
caagattcctgggtttggcactaca

SEQ ID NO: 2045511 - DNA, 25 bp, Homo sapien
tacaaagacgaagaacagctccctc

SEQ ID NO: 2045512 - DNA, 25 bp, Homo sapien
ctccgcacaggtgagaacgcgaatc

SEQ ID NO: 2045513 - DNA, 25 bp, Homo sapien
gaacgcgaatctcgtcctcgggaac

SEQ ID NO: 2045514 - DNA, 25 bp, Homo sapien
cacaggtgagaacgcgaatctcgtc

SEQ ID NO: 2045515 - DNA, 25 bp, Homo sapien
ggtgagaacgcgaatctcgtcctcg

SEQ ID NO: 2045516 - DNA, 25 bp, Homo sapien
gcctgggagcatgtgccttccgcta

SEQ ID NO: 2045517 - DNA, 25 bp, Homo sapien
cccgccgcctgggagcatgtgcctt

SEQ ID NO: 2045518 - DNA, 25 bp, Homo sapien
tgccttccgctagcatgcttaggga

SEQ ID NO: 2045519 - DNA, 25 bp, Homo sapien
gggagcatgtgccttccgctagcat

SEQ ID NO: 2045520 - DNA, 25 bp, Homo sapien
tgtcaaaaatcttagtcatcccggg

SEQ ID NO: 2045521 - DNA, 25 bp, Homo sapien
taacgaggctctccgtgatctgtcc

SEQ ID NO: 2045522 - DNA, 25 bp, Homo sapien
tagtggaacaatcctcaagaggcag

SEQ ID NO: 2045523 - DNA, 25 bp, Homo sapien
tgtgtcacacggagctggaatcgag

SEQ ID NO: 2045524 - DNA, 25 bp, Homo sapien
gagttacacatcacgtcgccgatct

SEQ ID NO: 2045525 - DNA, 25 bp, Homo sapien
tgacgtgcgtcgagtcgtgattcca

SEQ ID NO: 2045526 - DNA, 25 bp, Homo sapien
ccagcctgcattgacagagttacac

SEQ ID NO: 2045527 - DNA, 25 bp, Homo sapien
tagtggaaacctgatgacgtgcgtc

SEQ ID NO: 2045528 - DNA, 25 bp, Homo sapien
ccactgaatgggaagacaaaagaga

SEQ ID NO: 2045529 - DNA, 25 bp, Homo sapien
caaaagagaatgagggggaggcagc

SEQ ID NO: 2045530 - DNA, 25 bp, Homo sapien
agacaaaagagaatgagggggaggc

SEQ ID NO: 2045531 - DNA, 25 bp, Homo sapien
ataagccactgaatgggaagacaaa

SEQ ID NO: 2045532 - DNA, 25 bp, Homo sapien
gcatttgtgccttccgtccatgggc

SEQ ID NO: 2045533 - DNA, 25 bp, Homo sapien
acattttaatcagctgacacaggca

SEQ ID NO: 2045534 - DNA, 25 bp, Homo sapien
caaacatgtggtccgagtgcctcaa

SEQ ID NO: 2045535 - DNA, 25 bp, Homo sapien
gcatgacagccaatgttgcaaacat

SEQ ID NO: 2045536 - DNA, 25 bp, Homo sapien
atcttccttgcacatgttctacctg

SEQ ID NO: 2045537 - DNA, 25 bp, Homo sapien
tcttccttgcacatgttctacctgc

SEQ ID NO: 2045538 - DNA, 25 bp, Homo sapien
aatcttccttgcacatgttctacct

SEQ ID NO: 2045539 - DNA, 25 bp, Homo sapien
tcatcttttccagcgtccagaggct

SEQ ID NO: 2045540 - DNA, 25 bp, Homo sapien
ggctgcgagaattccttggcccatg

SEQ ID NO: 2045541 - DNA, 25 bp, Homo sapien
tgcctccctcaaataaggaccgctg

SEQ ID NO: 2045542 - DNA, 25 bp, Homo sapien
gtcccctttgccatgcaaagcattg

SEQ ID NO: 2045543 - DNA, 25 bp, Homo sapien
tgggatcctgctcttgggaccctcg

SEQ ID NO: 2045544 - DNA, 25 bp, Homo sapien
acagcaaccaagtagtggtcatcat

SEQ ID NO: 2045545 - DNA, 25 bp, Homo sapien
caggcagggcacctatgtatcaggg

SEQ ID NO: 2045546 - DNA, 25 bp, Homo sapien
tgccagatgccgtggaaggcaccgt

SEQ ID NO: 2045547 - DNA, 25 bp, Homo sapien
aattgccctggccttgtaatactcc

SEQ ID NO: 2045548 - DNA, 25 bp, Homo sapien
cagtgtttagggtactaaagctctt

SEQ ID NO: 2045549 - DNA, 25 bp, Homo sapien
agtggccactgcagttttttcagtg

SEQ ID NO: 2045550 - DNA, 25 bp, Homo sapien
aaagctcttaattgccctggccttg

SEQ ID NO: 2045551 - DNA, 25 bp, Homo sapien
ggcagtaccagacagcgctagtcac

SEQ ID NO: 2045552 - DNA, 25 bp, Homo sapien
gagaaaagaggtcatgggcagtacc

SEQ ID NO: 2045553 - DNA, 25 bp, Homo sapien
gaggtcatgggcagtaccagacagc

SEQ ID NO: 2045554 - DNA, 25 bp, Homo sapien
tcatgggcagtaccagacagcgcta

SEQ ID NO: 2045555 - DNA, 25 bp, Homo sapien
tgtcctgagtaggcactcccgcagg

SEQ ID NO: 2045556 - DNA, 25 bp, Homo sapien
cctgagtaggcactcccgcaggtac

SEQ ID NO: 2045557 - DNA, 25 bp, Homo sapien
gaggccgtggtctggggcatgtcct

SEQ ID NO: 2045558 - DNA, 25 bp, Homo sapien
ctgaggccgtggtctggggcatgtc

SEQ ID NO: 2045559 - DNA, 25 bp, Homo sapien
ggggcctatccaggtcgccactctg

SEQ ID NO: 2045560 - DNA, 25 bp, Homo sapien
gggggcctatccaggtcgccactct

SEQ ID NO: 2045561 - DNA, 25 bp, Homo sapien
tgggggcctatccaggtcgccactc

SEQ ID NO: 2045562 - DNA, 25 bp, Homo sapien
gggcctatccaggtcgccactctgc

SEQ ID NO: 2045563 - DNA, 25 bp, Homo sapien
tacgggtgaagaaactctggcgagt

SEQ ID NO: 2045564 - DNA, 25 bp, Homo sapien
tatccaggtcgccactctgctttct

SEQ ID NO: 2045565 - DNA, 25 bp, Homo sapien
ccgcaggtacgggtgaagaaactct

SEQ ID NO: 2045566 - DNA, 25 bp, Homo sapien
ggcctatccaggtcgccactctgct

SEQ ID NO: 2045567 - DNA, 25 bp, Homo sapien
tgattggctaaagtacaggcatgga

SEQ ID NO: 2045568 - DNA, 25 bp, Homo sapien
tggcacatgttaatggcacctcctg

SEQ ID NO: 2045569 - DNA, 25 bp, Homo sapien
tcagatggtgtctctgtaggaccaa

SEQ ID NO: 2045570 - DNA, 25 bp, Homo sapien
ctgggcttgctgagactggcacatg

SEQ ID NO: 2045571 - DNA, 25 bp, Homo sapien
catttccaattctactgcctttcct

SEQ ID NO: 2045572 - DNA, 25 bp, Homo sapien
aatgaggagtttggatgttcgtaga

SEQ ID NO: 2045573 - DNA, 25 bp, Homo sapien
gaggagtttggatgttcgtagaaaa

SEQ ID NO: 2045574 - DNA, 25 bp, Homo sapien
ggatgttcgtagaaaattcaagata

SEQ ID NO: 2045575 - DNA, 25 bp, Homo sapien
gagtttggatgttcgtagaaaattc

SEQ ID NO: 2045576 - DNA, 25 bp, Homo sapien
tgtctgcaaagtgttggtccccgct

SEQ ID NO: 2045577 - DNA, 25 bp, Homo sapien
caaaggtagcacttttgaagatggc

SEQ ID NO: 2045578 - DNA, 25 bp, Homo sapien
ggtccccgcttgataaatatctcag

SEQ ID NO: 2045579 - DNA, 25 bp, Homo sapien
caattgttcgggcactaggactaag

SEQ ID NO: 2045580 - DNA, 25 bp, Homo sapien
caaggcatgtaactcgacaccaggc

SEQ ID NO: 2045581 - DNA, 25 bp, Homo sapien
gaagaggctgccaattctgccgaag

SEQ ID NO: 2045582 - DNA, 25 bp, Homo sapien
gaggccagcaggttaatcctttcaa

SEQ ID NO: 2045583 - DNA, 25 bp, Homo sapien
caccaggcctggctttaccgagagg

SEQ ID NO: 2045584 - DNA, 25 bp, Homo sapien
ggactatatggctgaacatgggaaa

SEQ ID NO: 2045585 - DNA, 25 bp, Homo sapien
gctgaagggctcacatgggtaaccc

SEQ ID NO: 2045586 - DNA, 25 bp, Homo sapien
tgttcacggcaggaagtgactggcc

SEQ ID NO: 2045587 - DNA, 25 bp, Homo sapien
cctgctccagaccaataaaattggg

SEQ ID NO: 2045588 - DNA, 25 bp, Homo sapien
gaactgaatgaatagagcctctctc

SEQ ID NO: 2045589 - DNA, 25 bp, Homo sapien
taaagcgctcaatagctgtacgtgg

SEQ ID NO: 2045590 - DNA, 25 bp, Homo sapien
ggagacccacctagttacaatgagc

SEQ ID NO: 2045591 - DNA, 25 bp, Homo sapien
caagtgataccagggagcttcccag

SEQ ID NO: 2045592 - DNA, 25 bp, Homo sapien
acaggatctggacatagcccccaaa

SEQ ID NO: 2045593 - DNA, 25 bp, Homo sapien
tacaggatctggacatagcccccaa

SEQ ID NO: 2045594 - DNA, 25 bp, Homo sapien
ttacaggatctggacatagccccca

SEQ ID NO: 2045595 - DNA, 25 bp, Homo sapien
caggatctggacatagcccccaaat

SEQ ID NO: 2045596 - DNA, 25 bp, Homo sapien
cgcccacatcaatgtggacaggcgc

SEQ ID NO: 2045597 - DNA, 25 bp, Homo sapien
ccgcccacatcaatgtggacaggcg

SEQ ID NO: 2045598 - DNA, 25 bp, Homo sapien
gccgcccacatcaatgtggacaggc

SEQ ID NO: 2045599 - DNA, 25 bp, Homo sapien
cattcagcatggctctaacactgcc

SEQ ID NO: 2045600 - DNA, 25 bp, Homo sapien
cagcatggctctaacactgccaggt

SEQ ID NO: 2045601 - DNA, 25 bp, Homo sapien
tcagcatggctctaacactgccagg

SEQ ID NO: 2045602 - DNA, 25 bp, Homo sapien
tcattcagcatggctctaacactgc

SEQ ID NO: 2045603 - DNA, 25 bp, Homo sapien
gaagactatttcgatttctgcgcat

SEQ ID NO: 2045604 - DNA, 25 bp, Homo sapien
cacactgctgaagaaacaactcaga

SEQ ID NO: 2045605 - DNA, 25 bp, Homo sapien
tttaaccagaaagagtgcaagggac

SEQ ID NO: 2045606 - DNA, 25 bp, Homo sapien
caagggacttggatgtgccgtcaca

SEQ ID NO: 2045607 - DNA, 25 bp, Homo sapien
ccaaggttgagggataatgcgggag

SEQ ID NO: 2045608 - DNA, 25 bp, Homo sapien
taaaagttcaatatagcgtcgcaac

SEQ ID NO: 2045609 - DNA, 25 bp, Homo sapien
tatgttgatctgtggtctgagaacc

SEQ ID NO: 2045610 - DNA, 25 bp, Homo sapien
tgaagcccaccataacatccttgtg

SEQ ID NO: 2045611 - DNA, 25 bp, Homo sapien
gaaaaaacagcactcaatggcccaa

SEQ ID NO: 2045612 - DNA, 25 bp, Homo sapien
caagggagctcgtattcagctgaca

SEQ ID NO: 2045613 - DNA, 25 bp, Homo sapien
gaaatatgtatctgagaagctccct

SEQ ID NO: 2045614 - DNA, 25 bp, Homo sapien
ttattagattaccaagctgaggcca

SEQ ID NO: 2045615 - DNA, 25 bp, Homo sapien
gagagggccttcgagtctgaaatca

SEQ ID NO: 2045616 - DNA, 25 bp, Homo sapien
tacatgctctgacattccctggagg

SEQ ID NO: 2045617 - DNA, 25 bp, Homo sapien
caaaggttggcaatgaaacagcgtc

SEQ ID NO: 2045618 - DNA, 25 bp, Homo sapien
tgtacccagataaggttgccactct

SEQ ID NO: 2045619 - DNA, 25 bp, Homo sapien
tgttgataggcatgctccaggccta

SEQ ID NO: 2045620 - DNA, 25 bp, Homo sapien
taggcatgctccaggcctagcagtt

SEQ ID NO: 2045621 - DNA, 25 bp, Homo sapien
tgtcctgttgataggcatgctccag

SEQ ID NO: 2045622 - DNA, 25 bp, Homo sapien
tcatgtgtcctgttgataggcatgc

SEQ ID NO: 2045623 - DNA, 25 bp, Homo sapien
tgggctgtccagttcttagttacat

SEQ ID NO: 2045624 - DNA, 25 bp, Homo sapien
taggtgacatctggcattcactggg

SEQ ID NO: 2045625 - DNA, 25 bp, Homo sapien
gccagacctggtattagcacaggag

SEQ ID NO: 2045626 - DNA, 25 bp, Homo sapien
tatttggaccaatagtgcctgcagc

SEQ ID NO: 2045627 - DNA, 25 bp, Homo sapien
tattttggagaggatagtggttgat

SEQ ID NO: 2045628 - DNA, 25 bp, Homo sapien
tttggagaggatagtggttgatgaa

SEQ ID NO: 2045629 - DNA, 25 bp, Homo sapien
tggagaggatagtggttgatgaaac

SEQ ID NO: 2045630 - DNA, 25 bp, Homo sapien
aatattttggagaggatagtggttg

SEQ ID NO: 2045631 - DNA, 25 bp, Homo sapien
ccttttgtatgagagaagtttggaa

SEQ ID NO: 2045632 - DNA, 25 bp, Homo sapien
ctgcaagtgggcccttttgtatgag

SEQ ID NO: 2045633 - DNA, 25 bp, Homo sapien
tgcaagtgggcccttttgtatgaga

SEQ ID NO: 2045634 - DNA, 25 bp, Homo sapien
cccaaagtcgctaagccttctcatg

SEQ ID NO: 2045635 - DNA, 25 bp, Homo sapien
gcccaaagtcgctaagccttctcat

SEQ ID NO: 2045636 - DNA, 25 bp, Homo sapien
tcatttgttagaggcacgactttta

SEQ ID NO: 2045637 - DNA, 25 bp, Homo sapien
tctcatagaaaacccagccaatact

SEQ ID NO: 2045638 - DNA, 25 bp, Homo sapien
tatatgtactgcctggatgaactcc

SEQ ID NO: 2045639 - DNA, 25 bp, Homo sapien
gcagggcagaatgatccaaacagca

SEQ ID NO: 2045640 - DNA, 25 bp, Homo sapien
tagtgatgcgtaaacagtggagctg

SEQ ID NO: 2045641 - DNA, 25 bp, Homo sapien
tctgcctgggacattatcatcagca

SEQ ID NO: 2045642 - DNA, 25 bp, Homo sapien
gggccatacacatcctcacggactg

SEQ ID NO: 2045643 - DNA, 25 bp, Homo sapien
gctctttagggacagaaatttactc

SEQ ID NO: 2045644 - DNA, 25 bp, Homo sapien
tggctctggctttacgcagtgcctt

SEQ ID NO: 2045645 - DNA, 25 bp, Homo sapien
tacgcagtgccttattgtgattatg

SEQ ID NO: 2045646 - DNA, 25 bp, Homo sapien
tgccctacctaacaacaggttgagg

SEQ ID NO: 2045647 - DNA, 25 bp, Homo sapien
gattatgttggcatgagtggtcagt

SEQ ID NO: 2045648 - DNA, 25 bp, Homo sapien
ctcctatacttttttctactgtctt

SEQ ID NO: 2045649 - DNA, 25 bp, Homo sapien
caccaaagtattctttatctcttgt

SEQ ID NO: 2045650 - DNA, 25 bp, Homo sapien
tactctcatcaccaaagtattcttt

SEQ ID NO: 2045651 - DNA, 25 bp, Homo sapien
attttcccttttactctcatcacca

SEQ ID NO: 2045652 - DNA, 25 bp, Homo sapien
ggtgactccaagacagcagaatctt

SEQ ID NO: 2045653 - DNA, 25 bp, Homo sapien
gaagtcaggtgactccaagacagca

SEQ ID NO: 2045654 - DNA, 25 bp, Homo sapien
gacctacatgtctgtgattttcact

SEQ ID NO: 2045655 - DNA, 25 bp, Homo sapien
gcaaaagacctacatgtctgtgatt

SEQ ID NO: 2045656 - DNA, 25 bp, Homo sapien
tctgcactgacccactgaagaaatg

SEQ ID NO: 2045657 - DNA, 25 bp, Homo sapien
aaacagaggactggtcccagcgagc

SEQ ID NO: 2045658 - DNA, 25 bp, Homo sapien
taagactgtagctttcagccactga

SEQ ID NO: 2045659 - DNA, 25 bp, Homo sapien
gagcaagtcttcaactgccaaacag

SEQ ID NO: 2045660 - DNA, 25 bp, Homo sapien
gacttgccctaggtattccactgta

SEQ ID NO: 2045661 - DNA, 25 bp, Homo sapien
aagttcctaccttgcacaccgtaag

SEQ ID NO: 2045662 - DNA, 25 bp, Homo sapien
gggctgacctgggaacactcatcaa

SEQ ID NO: 2045663 - DNA, 25 bp, Homo sapien
tcttggctcacgtcccaagaggtgg

SEQ ID NO: 2045664 - DNA, 25 bp, Homo sapien
taccctttgctgtagtgtatctcga

SEQ ID NO: 2045665 - DNA, 25 bp, Homo sapien
ggccatctagaagctcatgctgtca

SEQ ID NO: 2045666 - DNA, 25 bp, Homo sapien
cagaaagatgctcagttaacagtgg

SEQ ID NO: 2045667 - DNA, 25 bp, Homo sapien
gcttcctgtagtgctagtgtgggca

SEQ ID NO: 2045668 - DNA, 25 bp, Homo sapien
tatagcacctgagtggattccctga

SEQ ID NO: 2045669 - DNA, 25 bp, Homo sapien
caatgagactacttgccaggtggaa

SEQ ID NO: 2045670 - DNA, 25 bp, Homo sapien
tctaggttagggtcaagcaagtgca

SEQ ID NO: 2045671 - DNA, 25 bp, Homo sapien
tctgctaactataaggaccaacggc

SEQ ID NO: 2045672 - DNA, 25 bp, Homo sapien
tcagctaggcattaagccccaggaa

SEQ ID NO: 2045673 - DNA, 25 bp, Homo sapien
cagtgtgtgacctgtctgttatcga

SEQ ID NO: 2045674 - DNA, 25 bp, Homo sapien
tttcctgcggattaatgaccagcca

SEQ ID NO: 2045675 - DNA, 25 bp, Homo sapien
gaagagttgatgacccaaagcaatg

SEQ ID NO: 2045676 - DNA, 25 bp, Homo sapien
cattgttatcccaaggccatgcacg

SEQ ID NO: 2045677 - DNA, 25 bp, Homo sapien
gaggcttgcccattagctggtaaac

SEQ ID NO: 2045678 - DNA, 25 bp, Homo sapien
ttgaaagggtcagtgtgtccagaac

SEQ ID NO: 2045679 - DNA, 25 bp, Homo sapien
tacagaagacacatagcctacaggt

SEQ ID NO: 2045680 - DNA, 25 bp, Homo sapien
ttcagacctgcaaaattcctacttc

SEQ ID NO: 2045681 - DNA, 25 bp, Homo sapien
tcagacctgcaaaattcctacttct

SEQ ID NO: 2045682 - DNA, 25 bp, Homo sapien
aagacccctggtttctgactcctag

SEQ ID NO: 2045683 - DNA, 25 bp, Homo sapien
aatagaacacagtgtccaaagaccc

SEQ ID NO: 2045684 - DNA, 25 bp, Homo sapien
tagaacacagtgtccaaagacccct

SEQ ID NO: 2045685 - DNA, 25 bp, Homo sapien
ctgcagaatagaacacagtgtccaa

SEQ ID NO: 2045686 - DNA, 25 bp, Homo sapien
ccttctaaggtcatggcgaatacgt

SEQ ID NO: 2045687 - DNA, 25 bp, Homo sapien
gactcagctgctgggatagcactct

SEQ ID NO: 2045688 - DNA, 25 bp, Homo sapien
ttatggaaattgcaccccacactgc

SEQ ID NO: 2045689 - DNA, 25 bp, Homo sapien
gaagaatctaacactagaggcccca

SEQ ID NO: 2045690 - DNA, 25 bp, Homo sapien
cggctgcaagagtgagctaatcctt

SEQ ID NO: 2045691 - DNA, 25 bp, Homo sapien
gagctaatccttttgttcggcgaac

SEQ ID NO: 2045692 - DNA, 25 bp, Homo sapien
gatttgttaggtagcatgccctctc

SEQ ID NO: 2045693 - DNA, 25 bp, Homo sapien
gtttttcgccttactgcacagcagt

SEQ ID NO: 2045694 - DNA, 25 bp, Homo sapien
taagggtgaaacgaaatccgattca

SEQ ID NO: 2045695 - DNA, 25 bp, Homo sapien
ggtgaaacgaaatccgattcagtac

SEQ ID NO: 2045696 - DNA, 25 bp, Homo sapien
gaaatccgattcagtacattaccta

SEQ ID NO: 2045697 - DNA, 25 bp, Homo sapien
gaaacgaaatccgattcagtacatt

SEQ ID NO: 2045698 - DNA, 25 bp, Homo sapien
agcacaaaagttagtcccgaagtgg

SEQ ID NO: 2045699 - DNA, 25 bp, Homo sapien
gcattagcacaaaagttagtcccga

SEQ ID NO: 2045700 - DNA, 25 bp, Homo sapien
catgcatagagtttggtttggttac

SEQ ID NO: 2045701 - DNA, 25 bp, Homo sapien
tttcatgcatagagtttggtttggt

SEQ ID NO: 2045702 - DNA, 25 bp, Homo sapien
gatgtaagtgttccccagcgagggc

SEQ ID NO: 2045703 - DNA, 25 bp, Homo sapien
ccgaacacagactcgtacagggcgc

SEQ ID NO: 2045704 - DNA, 25 bp, Homo sapien
tggagagcatctgcatccgagtgcc

SEQ ID NO: 2045705 - DNA, 25 bp, Homo sapien
tccgagtgcctagcaagttcttgcc

SEQ ID NO: 2045706 - DNA, 25 bp, Homo sapien
cgcggccgcgggtacagaagtacat

SEQ ID NO: 2045707 - DNA, 25 bp, Homo sapien
tcgaaccagaccttgttgagcagcc

SEQ ID NO: 2045708 - DNA, 25 bp, Homo sapien
ttgtccatggtctcgaagtccgggc

SEQ ID NO: 2045709 - DNA, 25 bp, Homo sapien
gaagtacatgcacgtctcgaaccag

SEQ ID NO: 2045710 - DNA, 25 bp, Homo sapien
tattgatcatatggaccggctcggg

SEQ ID NO: 2045711 - DNA, 25 bp, Homo sapien
ggcgcatgcgctatattggaccgca

SEQ ID NO: 2045712 - DNA, 25 bp, Homo sapien
tgccgcccgcgctggtgttacagtc

SEQ ID NO: 2045713 - DNA, 25 bp, Homo sapien
gcgcggcgctctggtccatattgat

SEQ ID NO: 2045714 - DNA, 25 bp, Homo sapien
cctctggcggagaattgcgcgggcc

SEQ ID NO: 2045715 - DNA, 25 bp, Homo sapien
taagtaatgcccgaggagcagtgcc

SEQ ID NO: 2045716 - DNA, 25 bp, Homo sapien
gtgctgccgcgggaaacccgtgtct

SEQ ID NO: 2045717 - DNA, 25 bp, Homo sapien
gacggtctcgtttctctaagtaatg

SEQ ID NO: 2045718 - DNA, 25 bp, Homo sapien
aactccctttccgactcttgcaaag

SEQ ID NO: 2045719 - DNA, 25 bp, Homo sapien
tgtcattaaagacctggggcgctcc

SEQ ID NO: 2045720 - DNA, 25 bp, Homo sapien
tcttgcaaaggagcgaaacacgccc

SEQ ID NO: 2045721 - DNA, 25 bp, Homo sapien
ccacctacttgctggcggcgaggcg

SEQ ID NO: 2045722 - DNA, 25 bp, Homo sapien
tcaaagtttgccaaccgccattcgt

SEQ ID NO: 2045723 - DNA, 25 bp, Homo sapien
tttgccaaccgccattcgttcgccc

SEQ ID NO: 2045724 - DNA, 25 bp, Homo sapien
ccgccattcgttcgccctccgggct

SEQ ID NO: 2045725 - DNA, 25 bp, Homo sapien
caaccgccattcgttcgccctccgg

SEQ ID NO: 2045726 - DNA, 25 bp, Homo sapien
aggccactctcggagctcgtgctgc

SEQ ID NO: 2045727 - DNA, 25 bp, Homo sapien
cgtgtgtaccctggcgcgcgggcca

SEQ ID NO: 2045728 - DNA, 25 bp, Homo sapien
tcgtgctgcatcctaactttcacct

SEQ ID NO: 2045729 - DNA, 25 bp, Homo sapien
ctcccgcagcccgtgtgtaccctgg

SEQ ID NO: 2045730 - DNA, 25 bp, Homo sapien
ctggtcctccgcgtgcctgcccggc

SEQ ID NO: 2045731 - DNA, 25 bp, Homo sapien
gttgacgatgtctttttctgcagcg

SEQ ID NO: 2045732 - DNA, 25 bp, Homo sapien
ttctgcagcgaacgctgctggtcct

SEQ ID NO: 2045733 - DNA, 25 bp, Homo sapien
gtgggagttgacgatgtctttttct

SEQ ID NO: 2045734 - DNA, 25 bp, Homo sapien
ggcaggggaccaggcccacgctgca

SEQ ID NO: 2045735 - DNA, 25 bp, Homo sapien
gcgaccctcgccataagcgcaggga

SEQ ID NO: 2045736 - DNA, 25 bp, Homo sapien
ctcgccataagcgcagggacccggg

SEQ ID NO: 2045737 - DNA, 25 bp, Homo sapien
tgttcccccgcgaccctcgccataa

SEQ ID NO: 2045738 - DNA, 25 bp, Homo sapien
tggttgtaagttacaagttctcgga

SEQ ID NO: 2045739 - DNA, 25 bp, Homo sapien
agtgcccttcagtggagcactctcc

SEQ ID NO: 2045740 - DNA, 25 bp, Homo sapien
tagctcagcagtggttgctaaactc

SEQ ID NO: 2045741 - DNA, 25 bp, Homo sapien
tcttgtcttggtagaagctgaaccc

SEQ ID NO: 2045742 - DNA, 25 bp, Homo sapien
tcagtgcctaacacagaccctagca

SEQ ID NO: 2045743 - DNA, 25 bp, Homo sapien
cacagtagggaccagtttgttgaac

SEQ ID NO: 2045744 - DNA, 25 bp, Homo sapien
caggctctgagttggttaacaattc

SEQ ID NO: 2045745 - DNA, 25 bp, Homo sapien
ggtctgtccaaggatcctagcactg

SEQ ID NO: 2045746 - DNA, 25 bp, Homo sapien
gcactgcagaggcacgggaccagtt

SEQ ID NO: 2045747 - DNA, 25 bp, Homo sapien
taacaattcgctgagaagacagctc

SEQ ID NO: 2045748 - DNA, 25 bp, Homo sapien
tgatctatgtatctgttcatttcca

SEQ ID NO: 2045749 - DNA, 25 bp, Homo sapien
ttatgatctatgtatctgttcattt

SEQ ID NO: 2045750 - DNA, 25 bp, Homo sapien
gatctatgtatctgttcatttccag

SEQ ID NO: 2045751 - DNA, 25 bp, Homo sapien
tatgatctatgtatctgttcatttc

SEQ ID NO: 2045752 - DNA, 25 bp, Homo sapien
cttggctgcaagtggctctctggga

SEQ ID NO: 2045753 - DNA, 25 bp, Homo sapien
tgttccctgagacaaacgagcaggg

SEQ ID NO: 2045754 - DNA, 25 bp, Homo sapien
gctgttccctgagacaaacgagcag

SEQ ID NO: 2045755 - DNA, 25 bp, Homo sapien
tcagggatttgtgccccagtgtccc

SEQ ID NO: 2045756 - DNA, 25 bp, Homo sapien
cagtcttcccttgacactagttgcc

SEQ ID NO: 2045757 - DNA, 25 bp, Homo sapien
caaactgtgtaacaaccactctgga

SEQ ID NO: 2045758 - DNA, 25 bp, Homo sapien
aaagggagtaactctgagaggctcc

SEQ ID NO: 2045759 - DNA, 25 bp, Homo sapien
taaagagctatagccaaacaccacc

SEQ ID NO: 2045760 - DNA, 25 bp, Homo sapien
gggtgcacattgccttgattctcat

SEQ ID NO: 2045761 - DNA, 25 bp, Homo sapien
tttgggacacaaatcaggcaggtgg

SEQ ID NO: 2045762 - DNA, 25 bp, Homo sapien
tgcggggtgcacattgccttgattc

SEQ ID NO: 2045763 - DNA, 25 bp, Homo sapien
cttgcaaagcatttgggacacaaat

SEQ ID NO: 2045764 - DNA, 25 bp, Homo sapien
ttgaaaatgcagagcgccgcgccaa

SEQ ID NO: 2045765 - DNA, 25 bp, Homo sapien
gatacgcgtgcagacttgaaaatgc

SEQ ID NO: 2045766 - DNA, 25 bp, Homo sapien
ccagcaaagcatcgccgagtcgtgg

SEQ ID NO: 2045767 - DNA, 25 bp, Homo sapien
gtcgtggcaactcggatacgcgtgc

SEQ ID NO: 2045768 - DNA, 25 bp, Homo sapien
tttgtggatgttagaacacctacac

SEQ ID NO: 2045769 - DNA, 25 bp, Homo sapien
gtggatgttagaacacctacacact

SEQ ID NO: 2045770 - DNA, 25 bp, Homo sapien
ctttgtggatgttagaacacctaca

SEQ ID NO: 2045771 - DNA, 25 bp, Homo sapien
tgtggatgttagaacacctacacac

SEQ ID NO: 2045772 - DNA, 25 bp, Homo sapien
tttgctcttctataaatcactttta

SEQ ID NO: 2045773 - DNA, 25 bp, Homo sapien
cagtaatatcaatgtccttctataa

SEQ ID NO: 2045774 - DNA, 25 bp, Homo sapien
actattgttagtatttgctcctatt

SEQ ID NO: 2045775 - DNA, 25 bp, Homo sapien
aactctatcaaggatttgaaattgc

SEQ ID NO: 2045776 - DNA, 25 bp, Homo sapien
cgtgggtctgtggaaaacatgaacc

SEQ ID NO: 2045777 - DNA, 25 bp, Homo sapien
catgaaccagctgttgcagtctgcc

SEQ ID NO: 2045778 - DNA, 25 bp, Homo sapien
cagattttgggatctctgctggcca

SEQ ID NO: 2045779 - DNA, 25 bp, Homo sapien
cagtggtctgggataagtcatcccc

SEQ ID NO: 2045780 - DNA, 25 bp, Homo sapien
ttattttgagtcaacatgggctgtc

SEQ ID NO: 2045781 - DNA, 25 bp, Homo sapien
gggctgtctacaatcgagggtctta

SEQ ID NO: 2045782 - DNA, 25 bp, Homo sapien
caagtccttatagcttctcacctga

SEQ ID NO: 2045783 - DNA, 25 bp, Homo sapien
agagacaacaaattagttacaacca

SEQ ID NO: 2045784 - DNA, 25 bp, Homo sapien
gtagctgagacgataggtgcaagcc

SEQ ID NO: 2045785 - DNA, 25 bp, Homo sapien
gagacgataggtgcaagccaccaag

SEQ ID NO: 2045786 - DNA, 25 bp, Homo sapien
gttgccaaggctggtaactttggcc

SEQ ID NO: 2045787 - DNA, 25 bp, Homo sapien
ccaaggctggtaactttggcctcaa

SEQ ID NO: 2045788 - DNA, 25 bp, Homo sapien
gatgaatgtggtcgggtcctctgat

SEQ ID NO: 2045789 - DNA, 25 bp, Homo sapien
ttgaggcggcggaattcgtcttagc

SEQ ID NO: 2045790 - DNA, 25 bp, Homo sapien
cctgctatacgggaagctcggcact

SEQ ID NO: 2045791 - DNA, 25 bp, Homo sapien
tacctgatggtgcacgtttcctgct

SEQ ID NO: 2045792 - DNA, 25 bp, Homo sapien
cttgaggagaaaaagctagtgacgg

SEQ ID NO: 2045793 - DNA, 25 bp, Homo sapien
gatttgcctttattcatctgcaccc

SEQ ID NO: 2045794 - DNA, 25 bp, Homo sapien
accctccgtcccagttggtgtgcag

SEQ ID NO: 2045795 - DNA, 25 bp, Homo sapien
gaaaaagctagtgacgggagctgta

SEQ ID NO: 2045796 - DNA, 25 bp, Homo sapien
aatttgctaaaacaatccaagcatg

SEQ ID NO: 2045797 - DNA, 25 bp, Homo sapien
gctgccagcttagttgattgaaaac

SEQ ID NO: 2045798 - DNA, 25 bp, Homo sapien
aagcatgcttggtacccagagggta

SEQ ID NO: 2045799 - DNA, 25 bp, Homo sapien
ttctcaaataaacttgtatctctag

SEQ ID NO: 2045800 - DNA, 25 bp, Homo sapien
gaaacattgaagcacaaagtctctc

SEQ ID NO: 2045801 - DNA, 25 bp, Homo sapien
cggctcgccacaccagagagaaatg

SEQ ID NO: 2045802 - DNA, 25 bp, Homo sapien
cttttccgatttctctcccagcgat

SEQ ID NO: 2045803 - DNA, 25 bp, Homo sapien
tcccagcgatctgctcggctcgcca

SEQ ID NO: 2045804 - DNA, 25 bp, Homo sapien
cactaaggtcgcacaacttgttgag

SEQ ID NO: 2045805 - DNA, 25 bp, Homo sapien
gttacactaaggtcgcacaacttgt

SEQ ID NO: 2045806 - DNA, 25 bp, Homo sapien
gctgttacactaaggtcgcacaact

SEQ ID NO: 2045807 - DNA, 25 bp, Homo sapien
attgctgttacactaaggtcgcaca

SEQ ID NO: 2045808 - DNA, 25 bp, Homo sapien
cagtctttaatcactaaccacagcg

SEQ ID NO: 2045809 - DNA, 25 bp, Homo sapien
tccagccaaagctcgttaatacaat

SEQ ID NO: 2045810 - DNA, 25 bp, Homo sapien
tctgtttaatatggttaccagggga

SEQ ID NO: 2045811 - DNA, 25 bp, Homo sapien
aagctcgttaatacaattttggtca

SEQ ID NO: 2045812 - DNA, 25 bp, Homo sapien
tgctcaagaggagaatcagtttccc

SEQ ID NO: 2045813 - DNA, 25 bp, Homo sapien
acaagccaggtatcaggtgtgtcct

SEQ ID NO: 2045814 - DNA, 25 bp, Homo sapien
taagcctgggctttgataactagac

SEQ ID NO: 2045815 - DNA, 25 bp, Homo sapien
gaatctgctcagtaacgtgactggg

SEQ ID NO: 2045816 - DNA, 25 bp, Homo sapien
ttcacacgtgtggagagcaccctga

SEQ ID NO: 2045817 - DNA, 25 bp, Homo sapien
aggaaagcaacacccacagccggtt

SEQ ID NO: 2045818 - DNA, 25 bp, Homo sapien
tctcacaaccaactatagaaacaat

SEQ ID NO: 2045819 - DNA, 25 bp, Homo sapien
ggtttcccgtgctctgcaagttcag

SEQ ID NO: 2045820 - DNA, 25 bp, Homo sapien
catatcagagtgaaaaaggacccag

SEQ ID NO: 2045821 - DNA, 25 bp, Homo sapien
gaagtgctgggacaacgtagctgaa

SEQ ID NO: 2045822 - DNA, 25 bp, Homo sapien
gatgttggaatcagacaatcctggt

SEQ ID NO: 2045823 - DNA, 25 bp, Homo sapien
taatgaacaacatgcaaggagtagc

SEQ ID NO: 2045824 - DNA, 25 bp, Homo sapien
agtcttatcttgaattctagttccc

SEQ ID NO: 2045825 - DNA, 25 bp, Homo sapien
tcctgccgctgtgtgaagaggtgcc

SEQ ID NO: 2045826 - DNA, 25 bp, Homo sapien
cagaagagagttgatttggtttggc

SEQ ID NO: 2045827 - DNA, 25 bp, Homo sapien
ttctgttcttgtgataacgagttct

SEQ ID NO: 2045828 - DNA, 25 bp, Homo sapien
tctggaccggccaaattgtggtgga

SEQ ID NO: 2045829 - DNA, 25 bp, Homo sapien
aaacatccgcagagttataggagac

SEQ ID NO: 2045830 - DNA, 25 bp, Homo sapien
gaagcagagggcatgtataaacatc

SEQ ID NO: 2045831 - DNA, 25 bp, Homo sapien
ggcccggcaagataagtagagcgtt

SEQ ID NO: 2045832 - DNA, 25 bp, Homo sapien
ttctctaaaagtggtcttcaggtct

SEQ ID NO: 2045833 - DNA, 25 bp, Homo sapien
agcttggtagctcctattttctcta

SEQ ID NO: 2045834 - DNA, 25 bp, Homo sapien
taatttgttgccctgcatttggctg

SEQ ID NO: 2045835 - DNA, 25 bp, Homo sapien
aaaaatataccgcattagagcttgg

SEQ ID NO: 2045836 - DNA, 25 bp, Homo sapien
atagctgggaagactgttgggtgat

SEQ ID NO: 2045837 - DNA, 25 bp, Homo sapien
ttccctctgggtatgaggctcatcc

SEQ ID NO: 2045838 - DNA, 25 bp, Homo sapien
tcttggatctttgaactttgcttct

SEQ ID NO: 2045839 - DNA, 25 bp, Homo sapien
taaatattgtaaaaccacccatgtc

SEQ ID NO: 2045840 - DNA, 25 bp, Homo sapien
cgtggatgtccagatgaagcactcc

SEQ ID NO: 2045841 - DNA, 25 bp, Homo sapien
tcttcccgtggatgtccagatgaag

SEQ ID NO: 2045842 - DNA, 25 bp, Homo sapien
tgtccagatgaagcactccacactc

SEQ ID NO: 2045843 - DNA, 25 bp, Homo sapien
ttccttcttcccgtggatgtccaga

SEQ ID NO: 2045844 - DNA, 25 bp, Homo sapien
gagtaactgtaggtcatgttgccat

SEQ ID NO: 2045845 - DNA, 25 bp, Homo sapien
taacgatcaactcaggcctgaaaaa

SEQ ID NO: 2045846 - DNA, 25 bp, Homo sapien
gaaagcagagacaataaagttttgg

SEQ ID NO: 2045847 - DNA, 25 bp, Homo sapien
tgcttagtccagaggtttcatcaag

SEQ ID NO: 2045848 - DNA, 25 bp, Homo sapien
gactgtggcctgataaccgaaatct

SEQ ID NO: 2045849 - DNA, 25 bp, Homo sapien
ggtttcaaactgacagactgtggcc

SEQ ID NO: 2045850 - DNA, 25 bp, Homo sapien
tggagaaaccgcaaaacagcatgac

SEQ ID NO: 2045851 - DNA, 25 bp, Homo sapien
tctcatagggacaaaaggttcgtgt

SEQ ID NO: 2045852 - DNA, 25 bp, Homo sapien
cattgcattggaagtcctctgagga

SEQ ID NO: 2045853 - DNA, 25 bp, Homo sapien
atatcttgatcacaactgccctctt

SEQ ID NO: 2045854 - DNA, 25 bp, Homo sapien
tctttcagctgaacaggataagcca

SEQ ID NO: 2045855 - DNA, 25 bp, Homo sapien
tgacacaacataaggaatgtcactc

SEQ ID NO: 2045856 - DNA, 25 bp, Homo sapien
gaaactagcagggtctacacagcac

SEQ ID NO: 2045857 - DNA, 25 bp, Homo sapien
ggtggactaagcacacacagtgttc

SEQ ID NO: 2045858 - DNA, 25 bp, Homo sapien
cccatggaccataaactgtgaggaa

SEQ ID NO: 2045859 - DNA, 25 bp, Homo sapien
cagcttctagaataggcacaggaaa

SEQ ID NO: 2045860 - DNA, 25 bp, Homo sapien
gcactacagaagaacaggagctgac

SEQ ID NO: 2045861 - DNA, 25 bp, Homo sapien
tcagcactacagaagaacaggagct

SEQ ID NO: 2045862 - DNA, 25 bp, Homo sapien
tccatcctcagcactacagaagaac

SEQ ID NO: 2045863 - DNA, 25 bp, Homo sapien
tctccttccatcctcagcactacag

SEQ ID NO: 2045864 - DNA, 25 bp, Homo sapien
gttgcccacatctgttctgctggct

SEQ ID NO: 2045865 - DNA, 25 bp, Homo sapien
tcgtttttgaaagttgcccacatct

SEQ ID NO: 2045866 - DNA, 25 bp, Homo sapien
cgtttttgaaagttgcccacatctg

SEQ ID NO: 2045867 - DNA, 25 bp, Homo sapien
acattcatcttgtgagtatataaat

SEQ ID NO: 2045868 - DNA, 25 bp, Homo sapien
aacagaccatattttgtggatggga

SEQ ID NO: 2045869 - DNA, 25 bp, Homo sapien
gttttatgggctttgatatcttcag

SEQ ID NO: 2045870 - DNA, 25 bp, Homo sapien
tatgggctttgatatcttcaggaaa

SEQ ID NO: 2045871 - DNA, 25 bp, Homo sapien
gttctactcctgaacttcaacctgg

SEQ ID NO: 2045872 - DNA, 25 bp, Homo sapien
ttcaatgttgttggccatccataga

SEQ ID NO: 2045873 - DNA, 25 bp, Homo sapien
cgaaccccgggcctcttcaatgttg

SEQ ID NO: 2045874 - DNA, 25 bp, Homo sapien
caacctggtgtctcggtccctggaa

SEQ ID NO: 2045875 - DNA, 25 bp, Homo sapien
tgtgtataccacctggcactctggt

SEQ ID NO: 2045876 - DNA, 25 bp, Homo sapien
ttgacacccactaaaaagccaaaga

SEQ ID NO: 2045877 - DNA, 25 bp, Homo sapien
gtttatctgatgaatgtgtatacca

SEQ ID NO: 2045878 - DNA, 25 bp, Homo sapien
actctggttgacacccactaaaaag

SEQ ID NO: 2045879 - DNA, 25 bp, Homo sapien
gctgggtgagcctatgagctggtgt

SEQ ID NO: 2045880 - DNA, 25 bp, Homo sapien
ggtcagtgtgacttcagcataactg

SEQ ID NO: 2045881 - DNA, 25 bp, Homo sapien
tgagcctatgagctggtgtcgtggg

SEQ ID NO: 2045882 - DNA, 25 bp, Homo sapien
tcagcataactggtagagcactgtg

SEQ ID NO: 2045883 - DNA, 25 bp, Homo sapien
tgtcaccgaggctgggagtacagtg

SEQ ID NO: 2045884 - DNA, 25 bp, Homo sapien
attacatgtgcctgccactacgctt

SEQ ID NO: 2045885 - DNA, 25 bp, Homo sapien
acagtggcttgatctcggctcactg

SEQ ID NO: 2045886 - DNA, 25 bp, Homo sapien
tgagattacatgtgcctgccactac

SEQ ID NO: 2045887 - DNA, 25 bp, Homo sapien
aaaccatctaacaacatttcaggga

SEQ ID NO: 2045888 - DNA, 25 bp, Homo sapien
ccatctaacaacatttcagggatga

SEQ ID NO: 2045889 - DNA, 25 bp, Homo sapien
atctaacaacatttcagggatgaat

SEQ ID NO: 2045890 - DNA, 25 bp, Homo sapien
atgatttcttgtggtcctgtttagt

SEQ ID NO: 2045891 - DNA, 25 bp, Homo sapien
ctcttggctccttcaagctgttccc

SEQ ID NO: 2045892 - DNA, 25 bp, Homo sapien
tcttggctccttcaagctgttccct

SEQ ID NO: 2045893 - DNA, 25 bp, Homo sapien
ggctccttcaagctgttccctgtac

SEQ ID NO: 2045894 - DNA, 25 bp, Homo sapien
ttggctccttcaagctgttccctgt

SEQ ID NO: 2045895 - DNA, 25 bp, Homo sapien
taagtcctagtcaaatggtgggcgg

SEQ ID NO: 2045896 - DNA, 25 bp, Homo sapien
gccactcacctaaaatgatgatgca

SEQ ID NO: 2045897 - DNA, 25 bp, Homo sapien
gggtgaaatatatttgacctacaga

SEQ ID NO: 2045898 - DNA, 25 bp, Homo sapien
tgtttgcaggcttaatgaagaacca

SEQ ID NO: 2045899 - DNA, 25 bp, Homo sapien
tgtctcaagtcctctattatgtgtt

SEQ ID NO: 2045900 - DNA, 25 bp, Homo sapien
ttgtctttgtatgtgtgtctcattg

SEQ ID NO: 2045901 - DNA, 25 bp, Homo sapien
tcaagtcctctattatgtgttggag

SEQ ID NO: 2045902 - DNA, 25 bp, Homo sapien
tctttgtatgtgtgtctcattgtct

SEQ ID NO: 2045903 - DNA, 25 bp, Homo sapien
caggttactccctttcatagaagga

SEQ ID NO: 2045904 - DNA, 25 bp, Homo sapien
ctacagcctgtgtgagtattgtggc

SEQ ID NO: 2045905 - DNA, 25 bp, Homo sapien
catagaaggattaacgctggctacc

SEQ ID NO: 2045906 - DNA, 25 bp, Homo sapien
ttatgggaactggtgtctacagcct

SEQ ID NO: 2045907 - DNA, 25 bp, Homo sapien
tgttcccaggaccagattctcttat

SEQ ID NO: 2045908 - DNA, 25 bp, Homo sapien
gatgtgtgggtaaaattggaccata

SEQ ID NO: 2045909 - DNA, 25 bp, Homo sapien
ggagcatgctccctgttgaattgga

SEQ ID NO: 2045910 - DNA, 25 bp, Homo sapien
cagattctcttatccctggagcatg

SEQ ID NO: 2045911 - DNA, 25 bp, Homo sapien
taatcacatcgtgcttcctgtttct

SEQ ID NO: 2045912 - DNA, 25 bp, Homo sapien
taatatgcgttttcacattaccata

SEQ ID NO: 2045913 - DNA, 25 bp, Homo sapien
ctactggtcattaatatgcgttttc

SEQ ID NO: 2045914 - DNA, 25 bp, Homo sapien
gcgttttcacattaccataatcaca

SEQ ID NO: 2045915 - DNA, 25 bp, Homo sapien
cagtatttgttgcagctctgattca

SEQ ID NO: 2045916 - DNA, 25 bp, Homo sapien
tgattcactaagaactgcagggcat

SEQ ID NO: 2045917 - DNA, 25 bp, Homo sapien
ccctcgaggagttgcaaacttagtc

SEQ ID NO: 2045918 - DNA, 25 bp, Homo sapien
cagatgtgataagatggtctgtgcc

SEQ ID NO: 2045919 - DNA, 25 bp, Homo sapien
ggcatcactttcttcggtggtgagc

SEQ ID NO: 2045920 - DNA, 25 bp, Homo sapien
cactttcttcggtggtgagcttggt

SEQ ID NO: 2045921 - DNA, 25 bp, Homo sapien
tcggtggtgagcttggttgatatct

SEQ ID NO: 2045922 - DNA, 25 bp, Homo sapien
tcttcggtggtgagcttggttgata

SEQ ID NO: 2045923 - DNA, 25 bp, Homo sapien
ttcttcagagtcctcaggatatctg

SEQ ID NO: 2045924 - DNA, 25 bp, Homo sapien
agagtcctcaggatatctggatgac

SEQ ID NO: 2045925 - DNA, 25 bp, Homo sapien
actgctttcagttgtcacatttttg

SEQ ID NO: 2045926 - DNA, 25 bp, Homo sapien
gatgactgctttcagttgtcacatt

SEQ ID NO: 2045927 - DNA, 25 bp, Homo sapien
ttcttcagggcatttttaccaactc

SEQ ID NO: 2045928 - DNA, 25 bp, Homo sapien
catagttcttcagggcatttttacc

SEQ ID NO: 2045929 - DNA, 25 bp, Homo sapien
taagagatatgcaaataaatcacaa

SEQ ID NO: 2045930 - DNA, 25 bp, Homo sapien
ggcatttttaccaactcctcttaca

SEQ ID NO: 2045931 - DNA, 25 bp, Homo sapien
ctgttgggtcattagcaaatacttg

SEQ ID NO: 2045932 - DNA, 25 bp, Homo sapien
ccaggccatttttacgtgaatatct

SEQ ID NO: 2045933 - DNA, 25 bp, Homo sapien
gagggcatggctgcaaaatcttgcc

SEQ ID NO: 2045934 - DNA, 25 bp, Homo sapien
gggcacagcctaggctctgaggaac

SEQ ID NO: 2045935 - DNA, 25 bp, Homo sapien
gtttttaatgaagcaagccgaaata

SEQ ID NO: 2045936 - DNA, 25 bp, Homo sapien
tttaatgaagcaagccgaaatatac

SEQ ID NO: 2045937 - DNA, 25 bp, Homo sapien
ttgtagtgcctagagttgtttttaa

SEQ ID NO: 2045938 - DNA, 25 bp, Homo sapien
tttgtagtgcctagagttgttttta

SEQ ID NO: 2045939 - DNA, 25 bp, Homo sapien
ttctgccccgaaaagaaagatgaga

SEQ ID NO: 2045940 - DNA, 25 bp, Homo sapien
ggcttctgccccgaaaagaaagatg

SEQ ID NO: 2045941 - DNA, 25 bp, Homo sapien
cactgatgcataagggtgggttggg

SEQ ID NO: 2045942 - DNA, 25 bp, Homo sapien
gatgagagaggcttggttagtaatt

SEQ ID NO: 2045943 - DNA, 25 bp, Homo sapien
tgttcttctgatgttacccctggat

SEQ ID NO: 2045944 - DNA, 25 bp, Homo sapien
tggaacaccctctcaccaattatct

SEQ ID NO: 2045945 - DNA, 25 bp, Homo sapien
gatgttacccctggatggaacaccc

SEQ ID NO: 2045946 - DNA, 25 bp, Homo sapien
cttctgatgttacccctggatggaa

SEQ ID NO: 2045947 - DNA, 25 bp, Homo sapien
aaagcagtaactcttagcagaggag

SEQ ID NO: 2045948 - DNA, 25 bp, Homo sapien
tgattgggaagatcacaagcaagga

SEQ ID NO: 2045949 - DNA, 25 bp, Homo sapien
cagaggaggaacttgtatgccatct

SEQ ID NO: 2045950 - DNA, 25 bp, Homo sapien
agaggaggaacttgtatgccatctg

SEQ ID NO: 2045951 - DNA, 25 bp, Homo sapien
ggccatgtgaagcttcagtttctta

SEQ ID NO: 2045952 - DNA, 25 bp, Homo sapien
taataagtacaactggaatgactgg

SEQ ID NO: 2045953 - DNA, 25 bp, Homo sapien
cattggctctcacagacaagtgaca

SEQ ID NO: 2045954 - DNA, 25 bp, Homo sapien
gacacctacacagcatcattggcca

SEQ ID NO: 2045955 - DNA, 25 bp, Homo sapien
gaggtgaggaggcaattgcctccag

SEQ ID NO: 2045956 - DNA, 25 bp, Homo sapien
ggctcctcccttcagtgccagtaac

SEQ ID NO: 2045957 - DNA, 25 bp, Homo sapien
gataattcttaggtacctctaaaga

SEQ ID NO: 2045958 - DNA, 25 bp, Homo sapien
gaaatcttgagtaacagggtattct

SEQ ID NO: 2045959 - DNA, 25 bp, Homo sapien
ttttccaatcagccaacagtcctca

SEQ ID NO: 2045960 - DNA, 25 bp, Homo sapien
tttccaatcagccaacagtcctcac

SEQ ID NO: 2045961 - DNA, 25 bp, Homo sapien
atgcatttctgatgaaaggtgtctt

SEQ ID NO: 2045962 - DNA, 25 bp, Homo sapien
atccagtctgttgccagagccggag

SEQ ID NO: 2045963 - DNA, 25 bp, Homo sapien
ccatccagtctgttgccagagccgg

SEQ ID NO: 2045964 - DNA, 25 bp, Homo sapien
cagtctgttgccagagccggagaag

SEQ ID NO: 2045965 - DNA, 25 bp, Homo sapien
gatcttttcattacagttgatggca

SEQ ID NO: 2045966 - DNA, 25 bp, Homo sapien
tcagagtccacgtttgtgtcacact

SEQ ID NO: 2045967 - DNA, 25 bp, Homo sapien
tcctaagtgcgttgtctaatacagc

SEQ ID NO: 2045968 - DNA, 25 bp, Homo sapien
cacgcagttcgagttcatagatctt

SEQ ID NO: 2045969 - DNA, 25 bp, Homo sapien
tggaatttggagtaggtggccactt

SEQ ID NO: 2045970 - DNA, 25 bp, Homo sapien
atttggagtaggtggccacttgaag

SEQ ID NO: 2045971 - DNA, 25 bp, Homo sapien
ggagtaggtggccacttgaaggttg

SEQ ID NO: 2045972 - DNA, 25 bp, Homo sapien
gaatttggagtaggtggccacttga

SEQ ID NO: 2045973 - DNA, 25 bp, Homo sapien
cttcttccaagagcaagttctgcat

SEQ ID NO: 2045974 - DNA, 25 bp, Homo sapien
caggctgccttcttccaagagcaag

SEQ ID NO: 2045975 - DNA, 25 bp, Homo sapien
cttccaagagcaagttctgcatcat

SEQ ID NO: 2045976 - DNA, 25 bp, Homo sapien
ctgccttcttccaagagcaagttct

SEQ ID NO: 2045977 - DNA, 25 bp, Homo sapien
cagcatgggataggtaatgttaagt

SEQ ID NO: 2045978 - DNA, 25 bp, Homo sapien
gaacagcatgggataggtaatgtta

SEQ ID NO: 2045979 - DNA, 25 bp, Homo sapien
agtttgaacagcatgggataggtaa

SEQ ID NO: 2045980 - DNA, 25 bp, Homo sapien
tgtggagaagcggttttggaagacc

SEQ ID NO: 2045981 - DNA, 25 bp, Homo sapien
gaacatgatggacaccacctcacag

SEQ ID NO: 2045982 - DNA, 25 bp, Homo sapien
acaaaggcaccctgccgaccgctgt

SEQ ID NO: 2045983 - DNA, 25 bp, Homo sapien
acctcacagacaccgcttctctcag

SEQ ID NO: 2045984 - DNA, 25 bp, Homo sapien
ctctcagggaatgcgacaaaggcac

SEQ ID NO: 2045985 - DNA, 25 bp, Homo sapien
cttgtccatagctgaatgagctgct

SEQ ID NO: 2045986 - DNA, 25 bp, Homo sapien
cagcgtgaaagagtagggagagagc

SEQ ID NO: 2045987 - DNA, 25 bp, Homo sapien
gtccagcgtgaaagagtagggagag

SEQ ID NO: 2045988 - DNA, 25 bp, Homo sapien
ccttcttgtccatagctgaatgagc

SEQ ID NO: 2045989 - DNA, 25 bp, Homo sapien
catatgttcagtctattctccccag

SEQ ID NO: 2045990 - DNA, 25 bp, Homo sapien
tccaaatattagacgttacagttta

SEQ ID NO: 2045991 - DNA, 25 bp, Homo sapien
gcttagtagtacaagatgcaacata

SEQ ID NO: 2045992 - DNA, 25 bp, Homo sapien
cattagctctaatgttggaataaca

SEQ ID NO: 2045993 - DNA, 25 bp, Homo sapien
taacgtgaggttggtgtcaacatgc

SEQ ID NO: 2045994 - DNA, 25 bp, Homo sapien
cacaggctataggtagtcatttgca

SEQ ID NO: 2045995 - DNA, 25 bp, Homo sapien
gctgcaatcagaggccttctaggat

SEQ ID NO: 2045996 - DNA, 25 bp, Homo sapien
ttgtttgataaggttgtctgtgccc

SEQ ID NO: 2045997 - DNA, 25 bp, Homo sapien
gctctttggaatcagatctctgata

SEQ ID NO: 2045998 - DNA, 25 bp, Homo sapien
ctgtgctctttggaatcagatctct

SEQ ID NO: 2045999 - DNA, 25 bp, Homo sapien
acagtattctgtgctctttggaatc

SEQ ID NO: 2046000 - DNA, 25 bp, Homo sapien
cagtattctgtgctctttggaatca

SEQ ID NO: 2046001 - DNA, 25 bp, Homo sapien
cactggtgtgacgactctctgggaa

SEQ ID NO: 2046002 - DNA, 25 bp, Homo sapien
tagtttctataggtgccgtcccagc

SEQ ID NO: 2046003 - DNA, 25 bp, Homo sapien
tttggtgccatccacaaggcgatag

SEQ ID NO: 2046004 - DNA, 25 bp, Homo sapien
catgcttgagagaagacagcccttg

SEQ ID NO: 2046005 - DNA, 25 bp, Homo sapien
cttgacacacggttaaaattggttg

SEQ ID NO: 2046006 - DNA, 25 bp, Homo sapien
tgtcaggcaagacttaaccaaatct

SEQ ID NO: 2046007 - DNA, 25 bp, Homo sapien
tataccaatattccagtagagaagg

SEQ ID NO: 2046008 - DNA, 25 bp, Homo sapien
cgtgtctttgagttctgtcaggcaa

SEQ ID NO: 2046009 - DNA, 25 bp, Homo sapien
gtttagactgagtaatatgacatga

SEQ ID NO: 2046010 - DNA, 25 bp, Homo sapien
tagactgagtaatatgacatgaaac

SEQ ID NO: 2046011 - DNA, 25 bp, Homo sapien
tattgtttagactgagtaatatgac

SEQ ID NO: 2046012 - DNA, 25 bp, Homo sapien
gtctgctttcagtgcgatcttctag

SEQ ID NO: 2046013 - DNA, 25 bp, Homo sapien
gaggacagctcctatgatgggccca

SEQ ID NO: 2046014 - DNA, 25 bp, Homo sapien
gcaccactccaggttttagaatcag

SEQ ID NO: 2046015 - DNA, 25 bp, Homo sapien
ataaaggccaccagcgaggacagct

SEQ ID NO: 2046016 - DNA, 25 bp, Homo sapien
tagaatcaggtcatccgtctctacc

SEQ ID NO: 2046017 - DNA, 25 bp, Homo sapien
taacttgttccacataggcaacctc

SEQ ID NO: 2046018 - DNA, 25 bp, Homo sapien
gaaaagactattattggaggcctag

SEQ ID NO: 2046019 - DNA, 25 bp, Homo sapien
gaggcctagaaccttcagttagaga

SEQ ID NO: 2046020 - DNA, 25 bp, Homo sapien
gctgcaatctgttagatacagtgtc

SEQ ID NO: 2046021 - DNA, 25 bp, Homo sapien
aatttcccatgataactgcaggtcc

SEQ ID NO: 2046022 - DNA, 25 bp, Homo sapien
ttcatgctggcaccagtataattga

SEQ ID NO: 2046023 - DNA, 25 bp, Homo sapien
tcccaatttcccatgataactgcag

SEQ ID NO: 2046024 - DNA, 25 bp, Homo sapien
ctgcaggtccaaaggatcgggcggg

SEQ ID NO: 2046025 - DNA, 25 bp, Homo sapien
catcagtccgtttggaatcacagct

SEQ ID NO: 2046026 - DNA, 25 bp, Homo sapien
agaccatgaccagcggtaagatttc

SEQ ID NO: 2046027 - DNA, 25 bp, Homo sapien
ccaattgctaaagctattgagccag

SEQ ID NO: 2046028 - DNA, 25 bp, Homo sapien
cacagctggcaaagatagtaaacac

SEQ ID NO: 2046029 - DNA, 25 bp, Homo sapien
gccaccaaggcattatttagcaaag

SEQ ID NO: 2046030 - DNA, 25 bp, Homo sapien
ttttagggatgtgcctcatgccacc

SEQ ID NO: 2046031 - DNA, 25 bp, Homo sapien
gagtaaattagctattttagggatg

SEQ ID NO: 2046032 - DNA, 25 bp, Homo sapien
ccaaggcattatttagcaaagagtt

SEQ ID NO: 2046033 - DNA, 25 bp, Homo sapien
tgagaaccatgtcgaccggtaaagg

SEQ ID NO: 2046034 - DNA, 25 bp, Homo sapien
tgcgatgtagaagacagacttggcg

SEQ ID NO: 2046035 - DNA, 25 bp, Homo sapien
gacttggcgatgctgatcttcctgg

SEQ ID NO: 2046036 - DNA, 25 bp, Homo sapien
aataagcatggccagaaattccgct

SEQ ID NO: 2046037 - DNA, 25 bp, Homo sapien
ctctctggtacacaaaggtccacac

SEQ ID NO: 2046038 - DNA, 25 bp, Homo sapien
tctggtacacaaaggtccacactta

SEQ ID NO: 2046039 - DNA, 25 bp, Homo sapien
tctctggtacacaaaggtccacact

SEQ ID NO: 2046040 - DNA, 25 bp, Homo sapien
ctctggtacacaaaggtccacactt

SEQ ID NO: 2046041 - DNA, 25 bp, Homo sapien
taaagctccttcatgaatagtcaag

SEQ ID NO: 2046042 - DNA, 25 bp, Homo sapien
caaggcctgccatcttcgggtactg

SEQ ID NO: 2046043 - DNA, 25 bp, Homo sapien
attatccaaactgtccctagaaagg

SEQ ID NO: 2046044 - DNA, 25 bp, Homo sapien
tgccaggcgtgatttgcacaccaag

SEQ ID NO: 2046045 - DNA, 25 bp, Homo sapien
cggcccgtggcaggctcccgggcgg

SEQ ID NO: 2046046 - DNA, 25 bp, Homo sapien
cccagatctgggagcgcggcacggg

SEQ ID NO: 2046047 - DNA, 25 bp, Homo sapien
gccaggtgcacacgcagaagcggcc

SEQ ID NO: 2046048 - DNA, 25 bp, Homo sapien
gagcctggagcacctctcagagggc

SEQ ID NO: 2046049 - DNA, 25 bp, Homo sapien
cctgcttggcctgtcatgcacctgt

SEQ ID NO: 2046050 - DNA, 25 bp, Homo sapien
tgggcaggaaacgtccttttcagcc

SEQ ID NO: 2046051 - DNA, 25 bp, Homo sapien
ggcaaaatgcgatcataggtgctgt

SEQ ID NO: 2046052 - DNA, 25 bp, Homo sapien
tgcacctgtttacctctccagaggt

SEQ ID NO: 2046053 - DNA, 25 bp, Homo sapien
tatagctagattcacctccataggg

SEQ ID NO: 2046054 - DNA, 25 bp, Homo sapien
gagcgtctgggtgagtaatttttcc

SEQ ID NO: 2046055 - DNA, 25 bp, Homo sapien
caaagcgggtttgttgatgtactga

SEQ ID NO: 2046056 - DNA, 25 bp, Homo sapien
cttcttttgccccagaacaaagcgg

SEQ ID NO: 2046057 - DNA, 25 bp, Homo sapien
accgccttgctgtgggtctgtcact

SEQ ID NO: 2046058 - DNA, 25 bp, Homo sapien
ccgccttgctgtgggtctgtcactc

SEQ ID NO: 2046059 - DNA, 25 bp, Homo sapien
gccttgctgtgggtctgtcactcat

SEQ ID NO: 2046060 - DNA, 25 bp, Homo sapien
caccgccttgctgtgggtctgtcac

SEQ ID NO: 2046061 - DNA, 25 bp, Homo sapien
gattacggccacttgtctgattggg

SEQ ID NO: 2046062 - DNA, 25 bp, Homo sapien
tgggagtcagattacggccacttgt

SEQ ID NO: 2046063 - DNA, 25 bp, Homo sapien
cggccacttgtctgattgggttttt

SEQ ID NO: 2046064 - DNA, 25 bp, Homo sapien
ggagtcagattacggccacttgtct

SEQ ID NO: 2046065 - DNA, 25 bp, Homo sapien
cttggctagtttgtgggtatagaac

SEQ ID NO: 2046066 - DNA, 25 bp, Homo sapien
ggtatagaacaatcttaactcggac

SEQ ID NO: 2046067 - DNA, 25 bp, Homo sapien
ctcggacatcgtggaagtcagtgag

SEQ ID NO: 2046068 - DNA, 25 bp, Homo sapien
cttaactcggacatcgtggaagtca

SEQ ID NO: 2046069 - DNA, 25 bp, Homo sapien
taggtccactgtgatttctggttgc

SEQ ID NO: 2046070 - DNA, 25 bp, Homo sapien
tgaaagtgcctacttcagggtcttc

SEQ ID NO: 2046071 - DNA, 25 bp, Homo sapien
ctgatgcctgtcattgttctggcat

SEQ ID NO: 2046072 - DNA, 25 bp, Homo sapien
ctgagctgtctgtaggtccactgtg

SEQ ID NO: 2046073 - DNA, 25 bp, Homo sapien
tctgtggtggcttgtctaccattcc

SEQ ID NO: 2046074 - DNA, 25 bp, Homo sapien
ccctgagggctccttaggtccattg

SEQ ID NO: 2046075 - DNA, 25 bp, Homo sapien
gtggcttgtctaccattccctggag

SEQ ID NO: 2046076 - DNA, 25 bp, Homo sapien
actgagagctgtcttgggctctatt

SEQ ID NO: 2046077 - DNA, 25 bp, Homo sapien
attccacctctgaccgctccaaaat

SEQ ID NO: 2046078 - DNA, 25 bp, Homo sapien
ccacctctgaccgctccaaaatctc

SEQ ID NO: 2046079 - DNA, 25 bp, Homo sapien
ttcagttacctctcatcaggttcct

SEQ ID NO: 2046080 - DNA, 25 bp, Homo sapien
tagcatggagataactgcctccaag

SEQ ID NO: 2046081 - DNA, 25 bp, Homo sapien
aaatacatccagtccgaatgggaga

SEQ ID NO: 2046082 - DNA, 25 bp, Homo sapien
catccagtccgaatgggagaaattg

SEQ ID NO: 2046083 - DNA, 25 bp, Homo sapien
tcaaattagttatttcctatataca

SEQ ID NO: 2046084 - DNA, 25 bp, Homo sapien
cctacaagcctgttaaatcaaaatc

SEQ ID NO: 2046085 - DNA, 25 bp, Homo sapien
tagagggacaagctgagtagaccca

SEQ ID NO: 2046086 - DNA, 25 bp, Homo sapien
caatctctcatagtactcagggcag

SEQ ID NO: 2046087 - DNA, 25 bp, Homo sapien
taaagcaatttcagaggtcccaaca

SEQ ID NO: 2046088 - DNA, 25 bp, Homo sapien
tgaggatacggaattcaaacccagt

SEQ ID NO: 2046089 - DNA, 25 bp, Homo sapien
gagagtggaagagagtccccaagca

SEQ ID NO: 2046090 - DNA, 25 bp, Homo sapien
tcagcctaatggtggagctaaagca

SEQ ID NO: 2046091 - DNA, 25 bp, Homo sapien
gaagctccagtgagacatctagatg

SEQ ID NO: 2046092 - DNA, 25 bp, Homo sapien
tagtcttgagagattgaggccaggc

SEQ ID NO: 2046093 - DNA, 25 bp, Homo sapien
ttcaaaaagtttgggcagtgcccag

SEQ ID NO: 2046094 - DNA, 25 bp, Homo sapien
ggttaattctgatacaggtcgtcca

SEQ ID NO: 2046095 - DNA, 25 bp, Homo sapien
ttgcacttggcagacttcggacgcc

SEQ ID NO: 2046096 - DNA, 25 bp, Homo sapien
ttcggacgccaagtttctgcttcag

SEQ ID NO: 2046097 - DNA, 25 bp, Homo sapien
gcagtttacttactccttaggagac

SEQ ID NO: 2046098 - DNA, 25 bp, Homo sapien
tattcataagggtgacacatggacc

SEQ ID NO: 2046099 - DNA, 25 bp, Homo sapien
cagcttaagtgtatggtctagaggc

SEQ ID NO: 2046100 - DNA, 25 bp, Homo sapien
ggaatctactctacatggtgcagca

SEQ ID NO: 2046101 - DNA, 25 bp, Homo sapien
caagaggctgctttagctaatgcaa

SEQ ID NO: 2046102 - DNA, 25 bp, Homo sapien
tttgattaatatgccacagactgct

SEQ ID NO: 2046103 - DNA, 25 bp, Homo sapien
gctggctaggttattgcttcaacaa

SEQ ID NO: 2046104 - DNA, 25 bp, Homo sapien
tcaggatatagacatacactcatgc

SEQ ID NO: 2046105 - DNA, 25 bp, Homo sapien
tctctcagttctagtcagatccttt

SEQ ID NO: 2046106 - DNA, 25 bp, Homo sapien
tacaaaaatggagttgtataattaa

SEQ ID NO: 2046107 - DNA, 25 bp, Homo sapien
agttctagtcagatcctttaaatac

SEQ ID NO: 2046108 - DNA, 25 bp, Homo sapien
aagtcatagattaattgtctctcag

SEQ ID NO: 2046109 - DNA, 25 bp, Homo sapien
aacacggatagcagagtttgctgac

SEQ ID NO: 2046110 - DNA, 25 bp, Homo sapien
tcctttggagcaccgatcatctgta

SEQ ID NO: 2046111 - DNA, 25 bp, Homo sapien
tcatcggaagagtgcctatccttaa

SEQ ID NO: 2046112 - DNA, 25 bp, Homo sapien
caaaatcatagttgatcaaacacgg

SEQ ID NO: 2046113 - DNA, 25 bp, Homo sapien
gatgatgactcaccccaccgtattt

SEQ ID NO: 2046114 - DNA, 25 bp, Homo sapien
ttggaacagccagccttaggtacct

SEQ ID NO: 2046115 - DNA, 25 bp, Homo sapien
tgttgtatgcagaggaagccaatcc

SEQ ID NO: 2046116 - DNA, 25 bp, Homo sapien
tgggatcacgaacaaacacagcttt

SEQ ID NO: 2046117 - DNA, 25 bp, Homo sapien
caacttctctgttggtgaccctgtg

SEQ ID NO: 2046118 - DNA, 25 bp, Homo sapien
ccctgtggacttacttaaagcttga

SEQ ID NO: 2046119 - DNA, 25 bp, Homo sapien
gcctagtagatctctcagaattgag

SEQ ID NO: 2046120 - DNA, 25 bp, Homo sapien
gaatgactggtctttgttaagagcc

SEQ ID NO: 2046121 - DNA, 25 bp, Homo sapien
gtttaatgtccattaaatgaactga

SEQ ID NO: 2046122 - DNA, 25 bp, Homo sapien
tgtgccaagttaacacagctattgc

SEQ ID NO: 2046123 - DNA, 25 bp, Homo sapien
cagaagagtagatgcagataagctc

SEQ ID NO: 2046124 - DNA, 25 bp, Homo sapien
aaagcaccaggcatatgcctgttac

SEQ ID NO: 2046125 - DNA, 25 bp, Homo sapien
cttgaggtagccaaatgtgccggag

SEQ ID NO: 2046126 - DNA, 25 bp, Homo sapien
gaatgaatgaggacatcatcccacc

SEQ ID NO: 2046127 - DNA, 25 bp, Homo sapien
tggaatgaccaaagtactaggctct

SEQ ID NO: 2046128 - DNA, 25 bp, Homo sapien
tcatcccacctttggttgcttcagc

SEQ ID NO: 2046129 - DNA, 25 bp, Homo sapien
ggacaacaatgatataagtcagcac

SEQ ID NO: 2046130 - DNA, 25 bp, Homo sapien
tggacaacaatgatataagtcagca

SEQ ID NO: 2046131 - DNA, 25 bp, Homo sapien
ctggacaacaatgatataagtcagc

SEQ ID NO: 2046132 - DNA, 25 bp, Homo sapien
ccttcaggtggttgtctccaaaata

SEQ ID NO: 2046133 - DNA, 25 bp, Homo sapien
ttccacagctgcaaaaaatctggga

SEQ ID NO: 2046134 - DNA, 25 bp, Homo sapien
aaatctgggagaacaagccagcact

SEQ ID NO: 2046135 - DNA, 25 bp, Homo sapien
tcaaaacgatggaagcaaagcattc

SEQ ID NO: 2046136 - DNA, 25 bp, Homo sapien
gcacttttctcttcagcgtcttctt

SEQ ID NO: 2046137 - DNA, 25 bp, Homo sapien
ggcacttttctcttcagcgtcttct

SEQ ID NO: 2046138 - DNA, 25 bp, Homo sapien
tcactgatggttggctgtttcaaac

SEQ ID NO: 2046139 - DNA, 25 bp, Homo sapien
aagccttccacgatccttccctgaa

SEQ ID NO: 2046140 - DNA, 25 bp, Homo sapien
agtgtcaccacattgtgtttcctgc

SEQ ID NO: 2046141 - DNA, 25 bp, Homo sapien
tgaatcaagtctacatcacttcggt

SEQ ID NO: 2046142 - DNA, 25 bp, Homo sapien
gctcaggtgtggtaaaatagccgtg

SEQ ID NO: 2046143 - DNA, 25 bp, Homo sapien
acaggctggatattggccagcaggc

SEQ ID NO: 2046144 - DNA, 25 bp, Homo sapien
taaaatagccgtgggctaaaagcac

SEQ ID NO: 2046145 - DNA, 25 bp, Homo sapien
cactcctgatttctcacgttggtga

SEQ ID NO: 2046146 - DNA, 25 bp, Homo sapien
tgttcctggattttttctgtactca

SEQ ID NO: 2046147 - DNA, 25 bp, Homo sapien
tatgttcctggattttttctgtact

SEQ ID NO: 2046148 - DNA, 25 bp, Homo sapien
ctggttggtgatatgttcctggatt

SEQ ID NO: 2046149 - DNA, 25 bp, Homo sapien
gatatgttcctggattttttctgta

SEQ ID NO: 2046150 - DNA, 25 bp, Homo sapien
ctgggcaattgggacatcaacaatt

SEQ ID NO: 2046151 - DNA, 25 bp, Homo sapien
tcctgggcaattgggacatcaacaa

SEQ ID NO: 2046152 - DNA, 25 bp, Homo sapien
gggcaattgggacatcaacaattgt

SEQ ID NO: 2046153 - DNA, 25 bp, Homo sapien
tgggcaattgggacatcaacaattg

SEQ ID NO: 2046154 - DNA, 25 bp, Homo sapien
taacgacaatagcaatcacaatcat

SEQ ID NO: 2046155 - DNA, 25 bp, Homo sapien
ttaataacgacaatagcaatcacaa

SEQ ID NO: 2046156 - DNA, 25 bp, Homo sapien
tcaccactatcagagaatcttcttc

SEQ ID NO: 2046157 - DNA, 25 bp, Homo sapien
aaatgacaattttcaccactatcag

SEQ ID NO: 2046158 - DNA, 25 bp, Homo sapien
tgctgggagctggtagagtaaaggc

SEQ ID NO: 2046159 - DNA, 25 bp, Homo sapien
gcttcaggcagtatctccgcaggtg

SEQ ID NO: 2046160 - DNA, 25 bp, Homo sapien
tcgcctggggtagtttgcttatcac

SEQ ID NO: 2046161 - DNA, 25 bp, Homo sapien
ggtggcatcaccatcgcctggggta

SEQ ID NO: 2046162 - DNA, 25 bp, Homo sapien
gatgtgcactttccgctaagcttgg

SEQ ID NO: 2046163 - DNA, 25 bp, Homo sapien
caaactcctaaactctgtgtcctgg

SEQ ID NO: 2046164 - DNA, 25 bp, Homo sapien
ccatttcctggaaccatgggctgct

SEQ ID NO: 2046165 - DNA, 25 bp, Homo sapien
gcttggcaggatctccaaactccta

SEQ ID NO: 2046166 - DNA, 25 bp, Homo sapien
aagggtcacttcacccttagtcaca

SEQ ID NO: 2046167 - DNA, 25 bp, Homo sapien
tcatgaaagacgtttccaatactga

SEQ ID NO: 2046168 - DNA, 25 bp, Homo sapien
ggcaaaaatcaaaagggtcacttca

SEQ ID NO: 2046169 - DNA, 25 bp, Homo sapien
actgagagagtgtaaggcaaaaatc

SEQ ID NO: 2046170 - DNA, 25 bp, Homo sapien
aaactgcgagtaaccaaaagaggtg

SEQ ID NO: 2046171 - DNA, 25 bp, Homo sapien
gcaacactttctctagtcactatca

SEQ ID NO: 2046172 - DNA, 25 bp, Homo sapien
ctgcgagtaaccaaaagaggtgaat

SEQ ID NO: 2046173 - DNA, 25 bp, Homo sapien
tgcaacactttctctagtcactatc

SEQ ID NO: 2046174 - DNA, 25 bp, Homo sapien
gatgtagtgatcaattgcttccagg

SEQ ID NO: 2046175 - DNA, 25 bp, Homo sapien
tagataaggttctcctgagccaaga

SEQ ID NO: 2046176 - DNA, 25 bp, Homo sapien
cagaaattgtgcagtagtgatgtca

SEQ ID NO: 2046177 - DNA, 25 bp, Homo sapien
caagcatgggtcttttgataacaca

SEQ ID NO: 2046178 - DNA, 25 bp, Homo sapien
taaggcaagcagtcctatcagtgct

SEQ ID NO: 2046179 - DNA, 25 bp, Homo sapien
tgtcctaaatcccagtgcagaaaga

SEQ ID NO: 2046180 - DNA, 25 bp, Homo sapien
tactggtagtgctgtctaaggcaag

SEQ ID NO: 2046181 - DNA, 25 bp, Homo sapien
ttagggtttaccacttcagcatgca

SEQ ID NO: 2046182 - DNA, 25 bp, Homo sapien
agtctccatttactgtaccttgttc

SEQ ID NO: 2046183 - DNA, 25 bp, Homo sapien
tctccatttactgtaccttgttcca

SEQ ID NO: 2046184 - DNA, 25 bp, Homo sapien
aagtctccatttactgtaccttgtt

SEQ ID NO: 2046185 - DNA, 25 bp, Homo sapien
ctccatttactgtaccttgttccat

SEQ ID NO: 2046186 - DNA, 25 bp, Homo sapien
gaatgggtctggtccaatatctgag

SEQ ID NO: 2046187 - DNA, 25 bp, Homo sapien
tataagccaggaatgggtctggtcc

SEQ ID NO: 2046188 - DNA, 25 bp, Homo sapien
tctggtccaatatctgagtccatca

SEQ ID NO: 2046189 - DNA, 25 bp, Homo sapien
tgtcttataagccaggaatgggtct

SEQ ID NO: 2046190 - DNA, 25 bp, Homo sapien
ttctcatggtgctcaggcacctgcc

SEQ ID NO: 2046191 - DNA, 25 bp, Homo sapien
tttgtttctcatggtgctcaggcac

SEQ ID NO: 2046192 - DNA, 25 bp, Homo sapien
gatttgtttctcatggtgctcaggc

SEQ ID NO: 2046193 - DNA, 25 bp, Homo sapien
tgtttctcatggtgctcaggcacct

SEQ ID NO: 2046194 - DNA, 25 bp, Homo sapien
tctgtaatcaacaggaggagcagtg

SEQ ID NO: 2046195 - DNA, 25 bp, Homo sapien
cagtgtcaacagtcctagccagctg

SEQ ID NO: 2046196 - DNA, 25 bp, Homo sapien
tctgacttagctctctccgttgtgc

SEQ ID NO: 2046197 - DNA, 25 bp, Homo sapien
tattgtggcacctatatcgctggat

SEQ ID NO: 2046198 - DNA, 25 bp, Homo sapien
aatataacagagttggtagtagtaa

SEQ ID NO: 2046199 - DNA, 25 bp, Homo sapien
aaatataacagagttggtagtagta

SEQ ID NO: 2046200 - DNA, 25 bp, Homo sapien
ataacagagttggtagtagtaaagt

SEQ ID NO: 2046201 - DNA, 25 bp, Homo sapien
tataacagagttggtagtagtaaag

SEQ ID NO: 2046202 - DNA, 25 bp, Homo sapien
agcagcttgatgatgtgcacattca

SEQ ID NO: 2046203 - DNA, 25 bp, Homo sapien
gacagtgtgtaatgatgcaaagcca

SEQ ID NO: 2046204 - DNA, 25 bp, Homo sapien
tatttagtagctggttataaagcac

SEQ ID NO: 2046205 - DNA, 25 bp, Homo sapien
caagagaaccacgtaataaaaatgc

SEQ ID NO: 2046206 - DNA, 25 bp, Homo sapien
gcaacatggaagcaagctcctcctc

SEQ ID NO: 2046207 - DNA, 25 bp, Homo sapien
tcttttggtgcacaggcccacatgt

SEQ ID NO: 2046208 - DNA, 25 bp, Homo sapien
cactggatccgaagtttagattgct

SEQ ID NO: 2046209 - DNA, 25 bp, Homo sapien
tggtgattcctgacaattccctgca

SEQ ID NO: 2046210 - DNA, 25 bp, Homo sapien
ggaatatttccctactttctaggca

SEQ ID NO: 2046211 - DNA, 25 bp, Homo sapien
tccctactttctaggcatgtgaaac

SEQ ID NO: 2046212 - DNA, 25 bp, Homo sapien
atcaacttagtttatcaagtatgat

SEQ ID NO: 2046213 - DNA, 25 bp, Homo sapien
ctaggcatgtgaaacatttttagaa

SEQ ID NO: 2046214 - DNA, 25 bp, Homo sapien
taaatctgagcagtagcgtcagggc

SEQ ID NO: 2046215 - DNA, 25 bp, Homo sapien
caaactaatgctgaggccggagaac

SEQ ID NO: 2046216 - DNA, 25 bp, Homo sapien
gaacagggcctctaaacttctgaga

SEQ ID NO: 2046217 - DNA, 25 bp, Homo sapien
gtgtggctgtacctgcaaactcatg

SEQ ID NO: 2046218 - DNA, 25 bp, Homo sapien
gggtacaggccgcaagtacttcact

SEQ ID NO: 2046219 - DNA, 25 bp, Homo sapien
ttctgggtacaggccgcaagtactt

SEQ ID NO: 2046220 - DNA, 25 bp, Homo sapien
tacaggccgcaagtacttcactggt

SEQ ID NO: 2046221 - DNA, 25 bp, Homo sapien
aggccgcaagtacttcactggtccc

SEQ ID NO: 2046222 - DNA, 25 bp, Homo sapien
tgaagttactttttgttctcttctc

SEQ ID NO: 2046223 - DNA, 25 bp, Homo sapien
tgttctcttctcttctccactctcc

SEQ ID NO: 2046224 - DNA, 25 bp, Homo sapien
ctgaagttactttttgttctcttct

SEQ ID NO: 2046225 - DNA, 25 bp, Homo sapien
ttttgttctcttctcttctccactc

SEQ ID NO: 2046226 - DNA, 25 bp, Homo sapien
gatgaatgttgactcaacagctttt

SEQ ID NO: 2046227 - DNA, 25 bp, Homo sapien
cattatgtataagtgtggctgttag

SEQ ID NO: 2046228 - DNA, 25 bp, Homo sapien
taggatgaatgttgactcaacagct

SEQ ID NO: 2046229 - DNA, 25 bp, Homo sapien
taagtgtggctgttaggatgaatgt

SEQ ID NO: 2046230 - DNA, 25 bp, Homo sapien
catgatgaacattgaagacagacca

SEQ ID NO: 2046231 - DNA, 25 bp, Homo sapien
gaagttgtaggcttgcgtgtccaca

SEQ ID NO: 2046232 - DNA, 25 bp, Homo sapien
cagatgtgcagcctcacttggaccc

SEQ ID NO: 2046233 - DNA, 25 bp, Homo sapien
catgatttgttagctccagtggact

SEQ ID NO: 2046234 - DNA, 25 bp, Homo sapien
catttgccagcatcaattacctaca

SEQ ID NO: 2046235 - DNA, 25 bp, Homo sapien
cacagagctgaaacccgagtagcca

SEQ ID NO: 2046236 - DNA, 25 bp, Homo sapien
ttagactgtaccagaaacactttgt

SEQ ID NO: 2046237 - DNA, 25 bp, Homo sapien
ctcgtatgtactgtgtaagaatgac

SEQ ID NO: 2046238 - DNA, 25 bp, Homo sapien
caatttcaagacaataggctctctg

SEQ ID NO: 2046239 - DNA, 25 bp, Homo sapien
tgcctgaccagtaagcaaatcctgg

SEQ ID NO: 2046240 - DNA, 25 bp, Homo sapien
caaatcctggtataggtgtgggcca

SEQ ID NO: 2046241 - DNA, 25 bp, Homo sapien
tagtgtatacccgaatgagtccaga

SEQ ID NO: 2046242 - DNA, 25 bp, Homo sapien
gtgtaagctttgaatcctatgcatc

SEQ ID NO: 2046243 - DNA, 25 bp, Homo sapien
ccaccatcaggccaataaagtgttt

SEQ ID NO: 2046244 - DNA, 25 bp, Homo sapien
cagaaagcttaggacagaggttgtt

SEQ ID NO: 2046245 - DNA, 25 bp, Homo sapien
ggttttcctctgcataaccttgagg

SEQ ID NO: 2046246 - DNA, 25 bp, Homo sapien
ccatgagcaatgtcctgtgcatgct

SEQ ID NO: 2046247 - DNA, 25 bp, Homo sapien
taaagccatgagcaatgtcctgtgc

SEQ ID NO: 2046248 - DNA, 25 bp, Homo sapien
gagcaatgtcctgtgcatgcttggg

SEQ ID NO: 2046249 - DNA, 25 bp, Homo sapien
aaagccatgagcaatgtcctgtgca

SEQ ID NO: 2046250 - DNA, 25 bp, Homo sapien
ctgtgtaaagaaggcataggtggcc

SEQ ID NO: 2046251 - DNA, 25 bp, Homo sapien
ctggatgcccaagcagagacggtaa

SEQ ID NO: 2046252 - DNA, 25 bp, Homo sapien
gcagctcaactgtcaagcctgggta

SEQ ID NO: 2046253 - DNA, 25 bp, Homo sapien
ggttcaacctgcgtatctccacaag

SEQ ID NO: 2046254 - DNA, 25 bp, Homo sapien
ccatattcttgctcctcgtggtgca

SEQ ID NO: 2046255 - DNA, 25 bp, Homo sapien
tcaaaccagtttgggaaataagcca

SEQ ID NO: 2046256 - DNA, 25 bp, Homo sapien
tggagaatacgcaattcagcccctt

SEQ ID NO: 2046257 - DNA, 25 bp, Homo sapien
tcatgtgagccgaggaatagatacg

SEQ ID NO: 2046258 - DNA, 25 bp, Homo sapien
tggggctccctttatataactctgc

SEQ ID NO: 2046259 - DNA, 25 bp, Homo sapien
ttctcttgctctaagcctagaatct

SEQ ID NO: 2046260 - DNA, 25 bp, Homo sapien
ttgctctaagcctagaatcttcagc

SEQ ID NO: 2046261 - DNA, 25 bp, Homo sapien
ctcttgctctaagcctagaatcttc

SEQ ID NO: 2046262 - DNA, 25 bp, Homo sapien
gtagcccagctactccaaatatcag

SEQ ID NO: 2046263 - DNA, 25 bp, Homo sapien
agctactccaaatatcagcacagag

SEQ ID NO: 2046264 - DNA, 25 bp, Homo sapien
ccagctactccaaatatcagcacag

SEQ ID NO: 2046265 - DNA, 25 bp, Homo sapien
agcccagctactccaaatatcagca

SEQ ID NO: 2046266 - DNA, 25 bp, Homo sapien
ttgttctctaagagcccaattccat

SEQ ID NO: 2046267 - DNA, 25 bp, Homo sapien
aaatattcactatctcaacaaggct

SEQ ID NO: 2046268 - DNA, 25 bp, Homo sapien
tctcaaatacggcataaatattcac

SEQ ID NO: 2046269 - DNA, 25 bp, Homo sapien
ttaattctcaaatacggcataaata

SEQ ID NO: 2046270 - DNA, 25 bp, Homo sapien
tcaaatacggcataaatattcacta

SEQ ID NO: 2046271 - DNA, 25 bp, Homo sapien
gcaagagagttagcctggagattag

SEQ ID NO: 2046272 - DNA, 25 bp, Homo sapien
gacattggtactagtgcaggcaaga

SEQ ID NO: 2046273 - DNA, 25 bp, Homo sapien
tggagattagctggttttccagcac

SEQ ID NO: 2046274 - DNA, 25 bp, Homo sapien
tctgagtctggttctctaagcctag

SEQ ID NO: 2046275 - DNA, 25 bp, Homo sapien
catcttgaacttcctatggagaggg

SEQ ID NO: 2046276 - DNA, 25 bp, Homo sapien
tcaatgtaaagggagattaccctgg

SEQ ID NO: 2046277 - DNA, 25 bp, Homo sapien
gtcctctaggagttgaagtcatcag

SEQ ID NO: 2046278 - DNA, 25 bp, Homo sapien
tagcccgttcaaagagggtccagga

SEQ ID NO: 2046279 - DNA, 25 bp, Homo sapien
gaaattcttagtggtatgagtgtcc

SEQ ID NO: 2046280 - DNA, 25 bp, Homo sapien
taatcagtacttcttaagaacatgc

SEQ ID NO: 2046281 - DNA, 25 bp, Homo sapien
tcaaattctgtatggaagtccacct

SEQ ID NO: 2046282 - DNA, 25 bp, Homo sapien
caaggcacagtcttttacacggatt

SEQ ID NO: 2046283 - DNA, 25 bp, Homo sapien
cattttctggaggacggtactgtaa

SEQ ID NO: 2046284 - DNA, 25 bp, Homo sapien
gattgaagctcttacaccctttgag

SEQ ID NO: 2046285 - DNA, 25 bp, Homo sapien
ctgttaagcatccacggcgttttga

SEQ ID NO: 2046286 - DNA, 25 bp, Homo sapien
gaagtcacagggctttttaatgcac

SEQ ID NO: 2046287 - DNA, 25 bp, Homo sapien
cctgtgaacttagttggaaataact

SEQ ID NO: 2046288 - DNA, 25 bp, Homo sapien
ttgccatcgctttcaaaacgctggg

SEQ ID NO: 2046289 - DNA, 25 bp, Homo sapien
tattcaggcacagtatgtttgtggg

SEQ ID NO: 2046290 - DNA, 25 bp, Homo sapien
cctgcagctctagacttagcacctg

SEQ ID NO: 2046291 - DNA, 25 bp, Homo sapien
tctccccgcaacccacttggagccc

SEQ ID NO: 2046292 - DNA, 25 bp, Homo sapien
aaacacaccattccttctccccgca

SEQ ID NO: 2046293 - DNA, 25 bp, Homo sapien
agcccctcctcagatcgcccctccc

SEQ ID NO: 2046294 - DNA, 25 bp, Homo sapien
ctgctctggccacgatcgcacctgg

SEQ ID NO: 2046295 - DNA, 25 bp, Homo sapien
gaaactaaagactgttcctgccgtc

SEQ ID NO: 2046296 - DNA, 25 bp, Homo sapien
gagatgctcgtctttctgccacaca

SEQ ID NO: 2046297 - DNA, 25 bp, Homo sapien
acaccctggaggacccgacagactg

SEQ ID NO: 2046298 - DNA, 25 bp, Homo sapien
ttgagactgacgcaaaggaggcacc

SEQ ID NO: 2046299 - DNA, 25 bp, Homo sapien
ctgacaagttcaggcggccgtcctt

SEQ ID NO: 2046300 - DNA, 25 bp, Homo sapien
tcaggtagctgacaagttcaggcgg

SEQ ID NO: 2046301 - DNA, 25 bp, Homo sapien
ctgaccccggaatcctggagtccag

SEQ ID NO: 2046302 - DNA, 25 bp, Homo sapien
tcaaagtcaggatcccctcctgctc

SEQ ID NO: 2046303 - DNA, 25 bp, Homo sapien
tcccgccatgcgtccactgaagtga

SEQ ID NO: 2046304 - DNA, 25 bp, Homo sapien
tcccgcatctccagcggcgaagcac

SEQ ID NO: 2046305 - DNA, 25 bp, Homo sapien
ctgaagtgaagggaagtgggttgga

SEQ ID NO: 2046306 - DNA, 25 bp, Homo sapien
aaaaaggaagaagcctcccgcatct

SEQ ID NO: 2046307 - DNA, 25 bp, Homo sapien
ccgcccaccagagcccgctcccggc

SEQ ID NO: 2046308 - DNA, 25 bp, Homo sapien
aggtgagggcgcacgtccccgccca

SEQ ID NO: 2046309 - DNA, 25 bp, Homo sapien
cgctcccggcgcgggtacccagcag

SEQ ID NO: 2046310 - DNA, 25 bp, Homo sapien
gcgcgggtacccagcagcgcgccat

SEQ ID NO: 2046311 - DNA, 25 bp, Homo sapien
cgctgccgggcgcttgcaggtgctg

SEQ ID NO: 2046312 - DNA, 25 bp, Homo sapien
gacagctcggagtcgggcgctcacc

SEQ ID NO: 2046313 - DNA, 25 bp, Homo sapien
gaggtggctgagagcggagcgccgc

SEQ ID NO: 2046314 - DNA, 25 bp, Homo sapien
cagcttcggaggaaacttccccgcg

SEQ ID NO: 2046315 - DNA, 25 bp, Homo sapien
ggatctctcactaccccttcaaaaa

SEQ ID NO: 2046316 - DNA, 25 bp, Homo sapien
ctaccccttcaaaaatgtctataca

SEQ ID NO: 2046317 - DNA, 25 bp, Homo sapien
tgatctggatctctcactacccctt

SEQ ID NO: 2046318 - DNA, 25 bp, Homo sapien
gcattctgatctggatctctcacta

SEQ ID NO: 2046319 - DNA, 25 bp, Homo sapien
agggaaaactctgactcaacacagc

SEQ ID NO: 2046320 - DNA, 25 bp, Homo sapien
ttagggaaaactctgactcaacaca

SEQ ID NO: 2046321 - DNA, 25 bp, Homo sapien
tcaaagggagctgctaccatattca

SEQ ID NO: 2046322 - DNA, 25 bp, Homo sapien
caaagggagctgctaccatattcag

SEQ ID NO: 2046323 - DNA, 25 bp, Homo sapien
ctcttgccgatcacctaaaatatct

SEQ ID NO: 2046324 - DNA, 25 bp, Homo sapien
tcctcttgccgatcacctaaaatat

SEQ ID NO: 2046325 - DNA, 25 bp, Homo sapien
ttcctcttgccgatcacctaaaata

SEQ ID NO: 2046326 - DNA, 25 bp, Homo sapien
cttgccgatcacctaaaatatcttt

SEQ ID NO: 2046327 - DNA, 25 bp, Homo sapien
gcctgagaacattcgaagaacgttc

SEQ ID NO: 2046328 - DNA, 25 bp, Homo sapien
cattcgaagaacgttcaggtccact

SEQ ID NO: 2046329 - DNA, 25 bp, Homo sapien
aagaacgttcaggtccactattggc

SEQ ID NO: 2046330 - DNA, 25 bp, Homo sapien
tctggggtcttcagtatcctgttga

SEQ ID NO: 2046331 - DNA, 25 bp, Homo sapien
ctgggagctgtgttcaacctggaat

SEQ ID NO: 2046332 - DNA, 25 bp, Homo sapien
cttctatgagctctatttcctcttt

SEQ ID NO: 2046333 - DNA, 25 bp, Homo sapien
ctttgtgcaatagctgggagctgtg

SEQ ID NO: 2046334 - DNA, 25 bp, Homo sapien
tgggagctgtgttcaacctggaatt

SEQ ID NO: 2046335 - DNA, 25 bp, Homo sapien
ctatatttcatcaacataaataatt

SEQ ID NO: 2046336 - DNA, 25 bp, Homo sapien
acgaattgctttatttggtctacag

SEQ ID NO: 2046337 - DNA, 25 bp, Homo sapien
aatgtattctgagtatctaagcaaa

SEQ ID NO: 2046338 - DNA, 25 bp, Homo sapien
ggacccgatcctagaccaatgtatt

SEQ ID NO: 2046339 - DNA, 25 bp, Homo sapien
tctcagaaataatacagtagttttg

SEQ ID NO: 2046340 - DNA, 25 bp, Homo sapien
tcaatcttcatatgtccccacactg

SEQ ID NO: 2046341 - DNA, 25 bp, Homo sapien
tcctttctagatggacatcctcctc

SEQ ID NO: 2046342 - DNA, 25 bp, Homo sapien
ccaactgtatggatgctttcttcaa

SEQ ID NO: 2046343 - DNA, 25 bp, Homo sapien
gagccaggttgcccaactgtatgga

SEQ ID NO: 2046344 - DNA, 25 bp, Homo sapien
gtgttggccaccctcatatactgaa

SEQ ID NO: 2046345 - DNA, 25 bp, Homo sapien
tggccaccctcatatactgaaacag

SEQ ID NO: 2046346 - DNA, 25 bp, Homo sapien
gccaccctcatatactgaaacagtc

SEQ ID NO: 2046347 - DNA, 25 bp, Homo sapien
cctgtgttggccaccctcatatact

SEQ ID NO: 2046348 - DNA, 25 bp, Homo sapien
tccctcgagggttgagaatgaagca

SEQ ID NO: 2046349 - DNA, 25 bp, Homo sapien
taaactggtgtaataatacttgccc

SEQ ID NO: 2046350 - DNA, 25 bp, Homo sapien
gcagttatctgaccttagacatttg

SEQ ID NO: 2046351 - DNA, 25 bp, Homo sapien
acagcttgtgacagggcttcctgag

SEQ ID NO: 2046352 - DNA, 25 bp, Homo sapien
gggtgactggagattgtatcctact

SEQ ID NO: 2046353 - DNA, 25 bp, Homo sapien
ggcgtacgtcttgattttctgtaac

SEQ ID NO: 2046354 - DNA, 25 bp, Homo sapien
tgtaacactgtagaatcaagaccac

SEQ ID NO: 2046355 - DNA, 25 bp, Homo sapien
gttctgcccaaagattgatctggcg

SEQ ID NO: 2046356 - DNA, 25 bp, Homo sapien
gatgccattttcattggtggccctt

SEQ ID NO: 2046357 - DNA, 25 bp, Homo sapien
gctgacagtgctattataaggtcca

SEQ ID NO: 2046358 - DNA, 25 bp, Homo sapien
ttcccaaggtggctgacagtgctat

SEQ ID NO: 2046359 - DNA, 25 bp, Homo sapien
tgctattataaggtccattcagaga

SEQ ID NO: 2046360 - DNA, 25 bp, Homo sapien
taggatatagttgaccacatcataa

SEQ ID NO: 2046361 - DNA, 25 bp, Homo sapien
ttaggatatagttgaccacatcata

SEQ ID NO: 2046362 - DNA, 25 bp, Homo sapien
accacatcataaagacctgggttct

SEQ ID NO: 2046363 - DNA, 25 bp, Homo sapien
gaccacatcataaagacctgggttc

SEQ ID NO: 2046364 - DNA, 25 bp, Homo sapien
caaaagctgatacagtgagttctgc

SEQ ID NO: 2046365 - DNA, 25 bp, Homo sapien
cctacctcaaaagctgatacagtga

SEQ ID NO: 2046366 - DNA, 25 bp, Homo sapien
agctgatacagtgagttctgcttta

SEQ ID NO: 2046367 - DNA, 25 bp, Homo sapien
tgctggtgccttcctacctcaaaag

SEQ ID NO: 2046368 - DNA, 25 bp, Homo sapien
gctggcctcgtgatatgaatttgga

SEQ ID NO: 2046369 - DNA, 25 bp, Homo sapien
caacgttacgatgaacagaagtcga

SEQ ID NO: 2046370 - DNA, 25 bp, Homo sapien
cagaagtcgagagagtgagcattat

SEQ ID NO: 2046371 - DNA, 25 bp, Homo sapien
tctaggttgaggttctgtcttcata

SEQ ID NO: 2046372 - DNA, 25 bp, Homo sapien
gaggtcagtctctctagagcctgcc

SEQ ID NO: 2046373 - DNA, 25 bp, Homo sapien
ccatctgcagaggtcagtctctcta

SEQ ID NO: 2046374 - DNA, 25 bp, Homo sapien
tgtgaactgtggacccttgagcttc

SEQ ID NO: 2046375 - DNA, 25 bp, Homo sapien
tgcacaggcctgattggcagccctg

SEQ ID NO: 2046376 - DNA, 25 bp, Homo sapien
ccagaaaggataagccgtgactgcc

SEQ ID NO: 2046377 - DNA, 25 bp, Homo sapien
gaagaggaggtcaggtaaattccag

SEQ ID NO: 2046378 - DNA, 25 bp, Homo sapien
ggagccagaaaggataagccgtgac

SEQ ID NO: 2046379 - DNA, 25 bp, Homo sapien
agaggaggtcaggtaaattccagga

SEQ ID NO: 2046380 - DNA, 25 bp, Homo sapien
tctgaaaggtttttctgggtcttca

SEQ ID NO: 2046381 - DNA, 25 bp, Homo sapien
tttctcctttcttgacagatatcat

SEQ ID NO: 2046382 - DNA, 25 bp, Homo sapien
tcaccttctaatggggacttttctc

SEQ ID NO: 2046383 - DNA, 25 bp, Homo sapien
ttctgggtcttcaccttctaatggg

SEQ ID NO: 2046384 - DNA, 25 bp, Homo sapien
tttacaggcactagacaagacaagt

SEQ ID NO: 2046385 - DNA, 25 bp, Homo sapien
ttacaggcactagacaagacaagta

SEQ ID NO: 2046386 - DNA, 25 bp, Homo sapien
gtttacaggcactagacaagacaag

SEQ ID NO: 2046387 - DNA, 25 bp, Homo sapien
tcttgctctgagcatagggtaccat

SEQ ID NO: 2046388 - DNA, 25 bp, Homo sapien
atcttgctctgagcatagggtacca

SEQ ID NO: 2046389 - DNA, 25 bp, Homo sapien
ctgatggtgccactaggttcaactt

SEQ ID NO: 2046390 - DNA, 25 bp, Homo sapien
tgccactaggttcaacttggaggct

SEQ ID NO: 2046391 - DNA, 25 bp, Homo sapien
gatggtcttgcctgtcagaatcttc

SEQ ID NO: 2046392 - DNA, 25 bp, Homo sapien
taggttcaacttggaggctgatggt

SEQ ID NO: 2046393 - DNA, 25 bp, Homo sapien
caactgaaaactgaataagcatcat

SEQ ID NO: 2046394 - DNA, 25 bp, Homo sapien
taggttcatcagtagtgtttaagac

SEQ ID NO: 2046395 - DNA, 25 bp, Homo sapien
cacataggttcatcagtagtgttta

SEQ ID NO: 2046396 - DNA, 25 bp, Homo sapien
gcaatcacataggttcatcagtagt

SEQ ID NO: 2046397 - DNA, 25 bp, Homo sapien
caggcagcaatcacataggttcatc

SEQ ID NO: 2046398 - DNA, 25 bp, Homo sapien
attggaacccaggaatccgcagaga

SEQ ID NO: 2046399 - DNA, 25 bp, Homo sapien
gaacccaggaatccgcagagaaaac

SEQ ID NO: 2046400 - DNA, 25 bp, Homo sapien
ctagactaccacggcagattggaac

SEQ ID NO: 2046401 - DNA, 25 bp, Homo sapien
gactaccacggcagattggaaccca

SEQ ID NO: 2046402 - DNA, 25 bp, Homo sapien
caggagacctgactcagagaagaga

SEQ ID NO: 2046403 - DNA, 25 bp, Homo sapien
gcaccaggacaccaggagacctgac

SEQ ID NO: 2046404 - DNA, 25 bp, Homo sapien
gacaccaggagacctgactcagaga

SEQ ID NO: 2046405 - DNA, 25 bp, Homo sapien
caggacaccaggagacctgactcag

SEQ ID NO: 2046406 - DNA, 25 bp, Homo sapien
cagatactaagctgcagggacatac

SEQ ID NO: 2046407 - DNA, 25 bp, Homo sapien
tcagatactaagctgcagggacata

SEQ ID NO: 2046408 - DNA, 25 bp, Homo sapien
caaaagggagagaagcatagccaat

SEQ ID NO: 2046409 - DNA, 25 bp, Homo sapien
agcaataactgggtttatcacgtcc

SEQ ID NO: 2046410 - DNA, 25 bp, Homo sapien
cctgttcagcactgagactctttct

SEQ ID NO: 2046411 - DNA, 25 bp, Homo sapien
ggagagaagcatagccaatatccat

SEQ ID NO: 2046412 - DNA, 25 bp, Homo sapien
tacttaggtagacacccttgctgca

SEQ ID NO: 2046413 - DNA, 25 bp, Homo sapien
taggtagacacccttgctgcaggct

SEQ ID NO: 2046414 - DNA, 25 bp, Homo sapien
ggaggtggaaatacttaggtagaca

SEQ ID NO: 2046415 - DNA, 25 bp, Homo sapien
gaaatacttaggtagacacccttgc

SEQ ID NO: 2046416 - DNA, 25 bp, Homo sapien
ctgagtacttgctgtgtatggtgta

SEQ ID NO: 2046417 - DNA, 25 bp, Homo sapien
ttcagctaagttgctgccttcaggt

SEQ ID NO: 2046418 - DNA, 25 bp, Homo sapien
tgtactcttctaggtctttgggaaa

SEQ ID NO: 2046419 - DNA, 25 bp, Homo sapien
tgttttcagctaagttgctgccttc

SEQ ID NO: 2046420 - DNA, 25 bp, Homo sapien
tggagtggagccaaaagtaggaaaa

SEQ ID NO: 2046421 - DNA, 25 bp, Homo sapien
cagtttgaatcagaagtaaggtcca

SEQ ID NO: 2046422 - DNA, 25 bp, Homo sapien
cagaagtaaggtccacaactgtgtt

SEQ ID NO: 2046423 - DNA, 25 bp, Homo sapien
gtttgaatcagaagtaaggtccaca

SEQ ID NO: 2046424 - DNA, 25 bp, Homo sapien
gaatcagaagtaaggtccacaactg

SEQ ID NO: 2046425 - DNA, 25 bp, Homo sapien
gcttgagtctaagtcattgctatca

SEQ ID NO: 2046426 - DNA, 25 bp, Homo sapien
ctatcataagtctggtggtttcgca

SEQ ID NO: 2046427 - DNA, 25 bp, Homo sapien
gggccaaagcttgagtctaagtcat

SEQ ID NO: 2046428 - DNA, 25 bp, Homo sapien
gtcattgctatcataagtctggtgg

SEQ ID NO: 2046429 - DNA, 25 bp, Homo sapien
caaaaatcccaagtgtacgtatatc

SEQ ID NO: 2046430 - DNA, 25 bp, Homo sapien
gtgtacgtatatcttctgggctggt

SEQ ID NO: 2046431 - DNA, 25 bp, Homo sapien
tcccaagtgtacgtatatcttctgg

SEQ ID NO: 2046432 - DNA, 25 bp, Homo sapien
ctcaaaaatcccaagtgtacgtata

SEQ ID NO: 2046433 - DNA, 25 bp, Homo sapien
gatattacgggcaaaagcccagaat

SEQ ID NO: 2046434 - DNA, 25 bp, Homo sapien
atcagagagatattacgggcaaaag

SEQ ID NO: 2046435 - DNA, 25 bp, Homo sapien
agtataggaagatgcacaatgaaca

SEQ ID NO: 2046436 - DNA, 25 bp, Homo sapien
tataggaagatgcacaatgaacact

SEQ ID NO: 2046437 - DNA, 25 bp, Homo sapien
acatatctgaacacattcagatgcc

SEQ ID NO: 2046438 - DNA, 25 bp, Homo sapien
catatctgaacacattcagatgcca

SEQ ID NO: 2046439 - DNA, 25 bp, Homo sapien
cccatagagaaccagagcagtgata

SEQ ID NO: 2046440 - DNA, 25 bp, Homo sapien
catagagaaccagagcagtgataac

SEQ ID NO: 2046441 - DNA, 25 bp, Homo sapien
ccttttttcccatagagaaccagag

SEQ ID NO: 2046442 - DNA, 25 bp, Homo sapien
tttttcccatagagaaccagagcag

SEQ ID NO: 2046443 - DNA, 25 bp, Homo sapien
cttcttgaaatgagcaggtggtcca

SEQ ID NO: 2046444 - DNA, 25 bp, Homo sapien
ccagtcgggtagaatgtgtgtagcc

SEQ ID NO: 2046445 - DNA, 25 bp, Homo sapien
cagtagattgatcctggagccttct

SEQ ID NO: 2046446 - DNA, 25 bp, Homo sapien
gcctgcagccattgacagtcaattt

SEQ ID NO: 2046447 - DNA, 25 bp, Homo sapien
gtgatagccttatcctctggtggat

SEQ ID NO: 2046448 - DNA, 25 bp, Homo sapien
tgatagccttatcctctggtggatc

SEQ ID NO: 2046449 - DNA, 25 bp, Homo sapien
cttggttatttggatatctgggttt

SEQ ID NO: 2046450 - DNA, 25 bp, Homo sapien
gctgtaggtgtggaaacgcagagag

SEQ ID NO: 2046451 - DNA, 25 bp, Homo sapien
ttcctgctgtaggtgtggaaacgca

SEQ ID NO: 2046452 - DNA, 25 bp, Homo sapien
tgctgtaggtgtggaaacgcagaga

SEQ ID NO: 2046453 - DNA, 25 bp, Homo sapien
cctgctgtaggtgtggaaacgcaga

SEQ ID NO: 2046454 - DNA, 25 bp, Homo sapien
ttttattgatatgcgtagcaagaga

SEQ ID NO: 2046455 - DNA, 25 bp, Homo sapien
tgttttttattgatatgcgtagcaa

SEQ ID NO: 2046456 - DNA, 25 bp, Homo sapien
tcttttccattgaagtaatatctaa

SEQ ID NO: 2046457 - DNA, 25 bp, Homo sapien
ttgatatgcgtagcaagagatccat

SEQ ID NO: 2046458 - DNA, 25 bp, Homo sapien
tcagactccacatggagaatgtcat

SEQ ID NO: 2046459 - DNA, 25 bp, Homo sapien
gaaacatgaccgtcatcccataaag

SEQ ID NO: 2046460 - DNA, 25 bp, Homo sapien
tttggaaacatgaccgtcatcccat

SEQ ID NO: 2046461 - DNA, 25 bp, Homo sapien
cagatatctctaacagtatatttgg

SEQ ID NO: 2046462 - DNA, 25 bp, Homo sapien
gaacagatatctctaacagtatatt

SEQ ID NO: 2046463 - DNA, 25 bp, Homo sapien
ccattatttctagcagaattatgag

SEQ ID NO: 2046464 - DNA, 25 bp, Homo sapien
cagaattatgagtcttgttaaggaa

SEQ ID NO: 2046465 - DNA, 25 bp, Homo sapien
cattttgagcatctgcactgcagtt

SEQ ID NO: 2046466 - DNA, 25 bp, Homo sapien
gtcttgttaaggaaatgccagctat

SEQ ID NO: 2046467 - DNA, 25 bp, Homo sapien
tgatgacaggtctatagcactggag

SEQ ID NO: 2046468 - DNA, 25 bp, Homo sapien
gatcctgggcttaaagaccttatag

SEQ ID NO: 2046469 - DNA, 25 bp, Homo sapien
ggcggcttccaattgacacagctgt

SEQ ID NO: 2046470 - DNA, 25 bp, Homo sapien
tgctgtatagctaagggatcctggg

SEQ ID NO: 2046471 - DNA, 25 bp, Homo sapien
agctagtcctgcttctgtgatgcac

SEQ ID NO: 2046472 - DNA, 25 bp, Homo sapien
gctagtcctgcttctgtgatgcact

SEQ ID NO: 2046473 - DNA, 25 bp, Homo sapien
agagctagtcctgcttctgtgatgc

SEQ ID NO: 2046474 - DNA, 25 bp, Homo sapien
gagctagtcctgcttctgtgatgca

SEQ ID NO: 2046475 - DNA, 25 bp, Homo sapien
cttctgtgcgggctccctactgggt

SEQ ID NO: 2046476 - DNA, 25 bp, Homo sapien
taatagcccatggtgtgaatgcttc

SEQ ID NO: 2046477 - DNA, 25 bp, Homo sapien
cactgccttccgggtcatgccgtaa

SEQ ID NO: 2046478 - DNA, 25 bp, Homo sapien
tgcgggctccctactgggtctctca

SEQ ID NO: 2046479 - DNA, 25 bp, Homo sapien
gttaggcaaagcgtctctttcacca

SEQ ID NO: 2046480 - DNA, 25 bp, Homo sapien
cagagggaacccctgacctatgcct

SEQ ID NO: 2046481 - DNA, 25 bp, Homo sapien
agagggaacccctgacctatgcctc

SEQ ID NO: 2046482 - DNA, 25 bp, Homo sapien
ctgagtggcagttaggcaaagcgtc

SEQ ID NO: 2046483 - DNA, 25 bp, Homo sapien
tctttgggttagcatagtatttcat

SEQ ID NO: 2046484 - DNA, 25 bp, Homo sapien
gtggtcccaggcgtagaagaactgc

SEQ ID NO: 2046485 - DNA, 25 bp, Homo sapien
gctggtggtcccaggcgtagaagaa

SEQ ID NO: 2046486 - DNA, 25 bp, Homo sapien
tggtggtcccaggcgtagaagaact

SEQ ID NO: 2046487 - DNA, 25 bp, Homo sapien
ctgctggtggtcccaggcgtagaag

SEQ ID NO: 2046488 - DNA, 25 bp, Homo sapien
tctgtaggagggtctttagctctgg

SEQ ID NO: 2046489 - DNA, 25 bp, Homo sapien
tgtaggagggtctttagctctggat

SEQ ID NO: 2046490 - DNA, 25 bp, Homo sapien
ttgaagaactctgtaggagggtctt

SEQ ID NO: 2046491 - DNA, 25 bp, Homo sapien
aagaactctgtaggagggtctttag

SEQ ID NO: 2046492 - DNA, 25 bp, Homo sapien
accactggttatcagcatggagcca

SEQ ID NO: 2046493 - DNA, 25 bp, Homo sapien
tcaaagggaccactggttatcagca

SEQ ID NO: 2046494 - DNA, 25 bp, Homo sapien
caggctcaaagggaccactggttat

SEQ ID NO: 2046495 - DNA, 25 bp, Homo sapien
ggaccactggttatcagcatggagc

SEQ ID NO: 2046496 - DNA, 25 bp, Homo sapien
tgtaaatttaaactggtcaacagat

SEQ ID NO: 2046497 - DNA, 25 bp, Homo sapien
aatttaaactggtcaacagattcac

SEQ ID NO: 2046498 - DNA, 25 bp, Homo sapien
ctgtaaatttaaactggtcaacaga

SEQ ID NO: 2046499 - DNA, 25 bp, Homo sapien
taaatttaaactggtcaacagattc

SEQ ID NO: 2046500 - DNA, 25 bp, Homo sapien
tttttttcatacagaacattaaata

SEQ ID NO: 2046501 - DNA, 25 bp, Homo sapien
tttttcatacagaacattaaatagt

SEQ ID NO: 2046502 - DNA, 25 bp, Homo sapien
ttttttcatacagaacattaaatag

SEQ ID NO: 2046503 - DNA, 25 bp, Homo sapien
tcttaaagtaaacaacaaagcatta

SEQ ID NO: 2046504 - DNA, 25 bp, Homo sapien
caaatgctcttaaagtaaacaacaa

SEQ ID NO: 2046505 - DNA, 25 bp, Homo sapien
gctcttaaagtaaacaacaaagcat

SEQ ID NO: 2046506 - DNA, 25 bp, Homo sapien
aatgctcttaaagtaaacaacaaag

SEQ ID NO: 2046507 - DNA, 25 bp, Homo sapien
ccatattatttagaggggtctcctt

SEQ ID NO: 2046508 - DNA, 25 bp, Homo sapien
gtgaagtttgcatttgtagtccata

SEQ ID NO: 2046509 - DNA, 25 bp, Homo sapien
tttgtagtccatattatttagaggg

SEQ ID NO: 2046510 - DNA, 25 bp, Homo sapien
tgcatttgtagtccatattatttag

SEQ ID NO: 2046511 - DNA, 25 bp, Homo sapien
tcaaaggagagaagtgacccacaca

SEQ ID NO: 2046512 - DNA, 25 bp, Homo sapien
cactcttcaaaggagagaagtgacc

SEQ ID NO: 2046513 - DNA, 25 bp, Homo sapien
ggagagaagtgacccacacagttat

SEQ ID NO: 2046514 - DNA, 25 bp, Homo sapien
ctttgtcactcttcaaaggagagaa

SEQ ID NO: 2046515 - DNA, 25 bp, Homo sapien
atcatggcatcaccttcctcacaca

SEQ ID NO: 2046516 - DNA, 25 bp, Homo sapien
aatcatggcatcaccttcctcacac

SEQ ID NO: 2046517 - DNA, 25 bp, Homo sapien
tcatggcatcaccttcctcacacag

SEQ ID NO: 2046518 - DNA, 25 bp, Homo sapien
agtcagctgagcatgcaagcaccga

SEQ ID NO: 2046519 - DNA, 25 bp, Homo sapien
tttgcaatgagtgtaaaatgttcgg

SEQ ID NO: 2046520 - DNA, 25 bp, Homo sapien
aatgttcggattatctgttgtaaag

SEQ ID NO: 2046521 - DNA, 25 bp, Homo sapien
accgaactgcagttatgaatttgca

SEQ ID NO: 2046522 - DNA, 25 bp, Homo sapien
cggccatgtggtgcagagagcattt

SEQ ID NO: 2046523 - DNA, 25 bp, Homo sapien
tgtgaagcattgaactcagttttgt

SEQ ID NO: 2046524 - DNA, 25 bp, Homo sapien
tggcagcggccagcggccatgtggt

SEQ ID NO: 2046525 - DNA, 25 bp, Homo sapien
aagaagagcgcagcaattgtgaagc

SEQ ID NO: 2046526 - DNA, 25 bp, Homo sapien
cactaccacttgttctgagaaaaga

SEQ ID NO: 2046527 - DNA, 25 bp, Homo sapien
cagtctgagctacatgaagtttgca

SEQ ID NO: 2046528 - DNA, 25 bp, Homo sapien
cagggactttcaaagagtagaacat

SEQ ID NO: 2046529 - DNA, 25 bp, Homo sapien
gcagtatttatcaggcctagagaga

SEQ ID NO: 2046530 - DNA, 25 bp, Homo sapien
aaatggcagtagatctgaataaatc

SEQ ID NO: 2046531 - DNA, 25 bp, Homo sapien
ctattcagggattgattggtaaatg

SEQ ID NO: 2046532 - DNA, 25 bp, Homo sapien
aaatgacttgaaatggcagtagatc

SEQ ID NO: 2046533 - DNA, 25 bp, Homo sapien
ggattgattggtaaatgacttgaaa

SEQ ID NO: 2046534 - DNA, 25 bp, Homo sapien
gcaattcgaattgcatggttcacca

SEQ ID NO: 2046535 - DNA, 25 bp, Homo sapien
cgacagctctgttaatatcattggt

SEQ ID NO: 2046536 - DNA, 25 bp, Homo sapien
caggtttgtgtaatctatcactggg

SEQ ID NO: 2046537 - DNA, 25 bp, Homo sapien
aaattttgtgcatttccgacagctc

SEQ ID NO: 2046538 - DNA, 25 bp, Homo sapien
tctctcagaagcttcggattctttg

SEQ ID NO: 2046539 - DNA, 25 bp, Homo sapien
ttctctcagaagcttcggattcttt

SEQ ID NO: 2046540 - DNA, 25 bp, Homo sapien
agaacttctaagaaaacaaccatgg

SEQ ID NO: 2046541 - DNA, 25 bp, Homo sapien
agggagacgccaacactagcagaga

SEQ ID NO: 2046542 - DNA, 25 bp, Homo sapien
gacagatctaataccatcatttgaa

SEQ ID NO: 2046543 - DNA, 25 bp, Homo sapien
agaaaacaaccatggtgcttcaagc

SEQ ID NO: 2046544 - DNA, 25 bp, Homo sapien
tactgatagtttgccagtgagagct

SEQ ID NO: 2046545 - DNA, 25 bp, Homo sapien
tctactgatagtttgccagtgagag

SEQ ID NO: 2046546 - DNA, 25 bp, Homo sapien
ttcttctactgatagtttgccagtg

SEQ ID NO: 2046547 - DNA, 25 bp, Homo sapien
ctgatagtttgccagtgagagctca

SEQ ID NO: 2046548 - DNA, 25 bp, Homo sapien
ggaatagcctcaccgtcttaccagg

SEQ ID NO: 2046549 - DNA, 25 bp, Homo sapien
aagctcagggattgaataactgggt

SEQ ID NO: 2046550 - DNA, 25 bp, Homo sapien
cactactgttgggatgactgttcct

SEQ ID NO: 2046551 - DNA, 25 bp, Homo sapien
gcaaaaagtggatttaccagaacca

SEQ ID NO: 2046552 - DNA, 25 bp, Homo sapien
tagaagcagtagtggctccttgaat

SEQ ID NO: 2046553 - DNA, 25 bp, Homo sapien
ctccttgaatgttaagggcttcaca

SEQ ID NO: 2046554 - DNA, 25 bp, Homo sapien
tgcaaatggaccagaagtggcaact

SEQ ID NO: 2046555 - DNA, 25 bp, Homo sapien
tggcaactggtagactagaatcaaa

SEQ ID NO: 2046556 - DNA, 25 bp, Homo sapien
gatgaataatttgtttgaagctctt

SEQ ID NO: 2046557 - DNA, 25 bp, Homo sapien
ctgtaaacgtaaaatgtttaatgat

SEQ ID NO: 2046558 - DNA, 25 bp, Homo sapien
atttgtttgaagctcttcttactcc

SEQ ID NO: 2046559 - DNA, 25 bp, Homo sapien
atgatgaataatttgtttgaagctc

SEQ ID NO: 2046560 - DNA, 25 bp, Homo sapien
ctgggcctaaaggacggttctccat

SEQ ID NO: 2046561 - DNA, 25 bp, Homo sapien
tctgggcctaaaggacggttctcca

SEQ ID NO: 2046562 - DNA, 25 bp, Homo sapien
gctctctgggcctaaaggacggttc

SEQ ID NO: 2046563 - DNA, 25 bp, Homo sapien
tctctgggcctaaaggacggttctc

SEQ ID NO: 2046564 - DNA, 25 bp, Homo sapien
aaaagcagaagcatattggatctgg

SEQ ID NO: 2046565 - DNA, 25 bp, Homo sapien
ttgactactaggtcaacttccccag

SEQ ID NO: 2046566 - DNA, 25 bp, Homo sapien
gctcaactacatcaacagcatcgag

SEQ ID NO: 2046567 - DNA, 25 bp, Homo sapien
cagaagcatattggatctggaactg

SEQ ID NO: 2046568 - DNA, 25 bp, Homo sapien
tcaggcaattgcgaagctgtgagat

SEQ ID NO: 2046569 - DNA, 25 bp, Homo sapien
gccattctgggactgtgctgcattt

SEQ ID NO: 2046570 - DNA, 25 bp, Homo sapien
tctcttcgtggcagtttcaggcaat

SEQ ID NO: 2046571 - DNA, 25 bp, Homo sapien
tgagatgcctcttcgttaccagaaa

SEQ ID NO: 2046572 - DNA, 25 bp, Homo sapien
cagatggctttctgccaaagtccct

SEQ ID NO: 2046573 - DNA, 25 bp, Homo sapien
ggctttctgccaaagtccctcagca

SEQ ID NO: 2046574 - DNA, 25 bp, Homo sapien
gctttctgccaaagtccctcagcat

SEQ ID NO: 2046575 - DNA, 25 bp, Homo sapien
atggctttctgccaaagtccctcag

SEQ ID NO: 2046576 - DNA, 25 bp, Homo sapien
tagtttagcagtgtgcagtccgctg

SEQ ID NO: 2046577 - DNA, 25 bp, Homo sapien
tccaacagtagacccagacatatgc

SEQ ID NO: 2046578 - DNA, 25 bp, Homo sapien
gacaaggtagttgcactgctcagcc

SEQ ID NO: 2046579 - DNA, 25 bp, Homo sapien
gatggtgtcacacttccaaatagtt

SEQ ID NO: 2046580 - DNA, 25 bp, Homo sapien
gctgtttgcactttagctctgggtc

SEQ ID NO: 2046581 - DNA, 25 bp, Homo sapien
cattattgcatgtctggatttgggc

SEQ ID NO: 2046582 - DNA, 25 bp, Homo sapien
agttctgcctcttcgtgcttattgg

SEQ ID NO: 2046583 - DNA, 25 bp, Homo sapien
agctgcgacacattcctcagattgg

SEQ ID NO: 2046584 - DNA, 25 bp, Homo sapien
tcttggctgtacagctggactcagc

SEQ ID NO: 2046585 - DNA, 25 bp, Homo sapien
cagggatcacagcatttttgtgctc

SEQ ID NO: 2046586 - DNA, 25 bp, Homo sapien
gcttgttagcagagaccgtgtcacc

SEQ ID NO: 2046587 - DNA, 25 bp, Homo sapien
gacgccacatggtctaacatgacaa

SEQ ID NO: 2046588 - DNA, 25 bp, Homo sapien
aaatgaatggcagtttgcagagcag

SEQ ID NO: 2046589 - DNA, 25 bp, Homo sapien
cagagagggtgttgcctttttcctc

SEQ ID NO: 2046590 - DNA, 25 bp, Homo sapien
gcagagagggtgttgcctttttcct

SEQ ID NO: 2046591 - DNA, 25 bp, Homo sapien
atgaatggcagtttgcagagcagag

SEQ ID NO: 2046592 - DNA, 25 bp, Homo sapien
cctgcccgggttctcttacagcatg

SEQ ID NO: 2046593 - DNA, 25 bp, Homo sapien
tgtcctgcccgggttctcttacagc

SEQ ID NO: 2046594 - DNA, 25 bp, Homo sapien
ttacgatagactccttcatgctttc

SEQ ID NO: 2046595 - DNA, 25 bp, Homo sapien
cttacagcatgtttacgatagactc

SEQ ID NO: 2046596 - DNA, 25 bp, Homo sapien
tattggccacgcctcagtcagagct

SEQ ID NO: 2046597 - DNA, 25 bp, Homo sapien
cactgtttaaagtgacatgtggttc

SEQ ID NO: 2046598 - DNA, 25 bp, Homo sapien
gaagtgtttagagtgaaattaccac

SEQ ID NO: 2046599 - DNA, 25 bp, Homo sapien
tatagcccagctgctagttgctgtc

SEQ ID NO: 2046600 - DNA, 25 bp, Homo sapien
aacagtttcccaagtgccctcaaga

SEQ ID NO: 2046601 - DNA, 25 bp, Homo sapien
gaggccagaggtcggaaatcacatg

SEQ ID NO: 2046602 - DNA, 25 bp, Homo sapien
tgagcacgccagactttaacaggtg

SEQ ID NO: 2046603 - DNA, 25 bp, Homo sapien
ggtgcacctactccatgagggacag

SEQ ID NO: 2046604 - DNA, 25 bp, Homo sapien
caaatgttaacttggtagttgaatt

SEQ ID NO: 2046605 - DNA, 25 bp, Homo sapien
tcaaatgttaacttggtagttgaat

SEQ ID NO: 2046606 - DNA, 25 bp, Homo sapien
ttaacttggtagttgaatttcagaa

SEQ ID NO: 2046607 - DNA, 25 bp, Homo sapien
acttggtagttgaatttcagaatct

SEQ ID NO: 2046608 - DNA, 25 bp, Homo sapien
caaagaatctgatgccgggtaactg

SEQ ID NO: 2046609 - DNA, 25 bp, Homo sapien
agaaatctacagtcagtgcaaagaa

SEQ ID NO: 2046610 - DNA, 25 bp, Homo sapien
gccgggtaactgctgtttcaaagca

SEQ ID NO: 2046611 - DNA, 25 bp, Homo sapien
tcagtgcaaagaatctgatgccggg

SEQ ID NO: 2046612 - DNA, 25 bp, Homo sapien
gagcagactcttgaattgttaccca

SEQ ID NO: 2046613 - DNA, 25 bp, Homo sapien
agagcagactcttgaattgttaccc

SEQ ID NO: 2046614 - DNA, 25 bp, Homo sapien
cagagcagactcttgaattgttacc

SEQ ID NO: 2046615 - DNA, 25 bp, Homo sapien
gcagactcttgaattgttacccaaa

SEQ ID NO: 2046616 - DNA, 25 bp, Homo sapien
tggaatgcagcactaacagaaactt

SEQ ID NO: 2046617 - DNA, 25 bp, Homo sapien
ggtgtttgcctctcatacagttaga

SEQ ID NO: 2046618 - DNA, 25 bp, Homo sapien
ggtcaaaactgactgctctatggtc

SEQ ID NO: 2046619 - DNA, 25 bp, Homo sapien
ctctatggtcaagtgggtgtttgcc

SEQ ID NO: 2046620 - DNA, 25 bp, Homo sapien
tgggtgggagagtccactgggagtt

SEQ ID NO: 2046621 - DNA, 25 bp, Homo sapien
tgggagagtccactgggagttcttt

SEQ ID NO: 2046622 - DNA, 25 bp, Homo sapien
gtgttttaagctatctttgttgctg

SEQ ID NO: 2046623 - DNA, 25 bp, Homo sapien
atgtgttttaagctatctttgttgc

SEQ ID NO: 2046624 - DNA, 25 bp, Homo sapien
ctccaggagattcggcatctgccat

SEQ ID NO: 2046625 - DNA, 25 bp, Homo sapien
ctggctgcccacaactgtgtttgaa

SEQ ID NO: 2046626 - DNA, 25 bp, Homo sapien
gctgcccacaactgtgtttgaagct

SEQ ID NO: 2046627 - DNA, 25 bp, Homo sapien
ttgctgactgcagccgaccacgctg

SEQ ID NO: 2046628 - DNA, 25 bp, Homo sapien
catgtccttgctgactgcagccgac

SEQ ID NO: 2046629 - DNA, 25 bp, Homo sapien
aggtgtttcccaggcttcgtttgca

SEQ ID NO: 2046630 - DNA, 25 bp, Homo sapien
gtgggtctcggttcccagcatgtta

SEQ ID NO: 2046631 - DNA, 25 bp, Homo sapien
ggttcccagcatgttatcacccttt

SEQ ID NO: 2046632 - DNA, 25 bp, Homo sapien
tcgtttgcattccatacacacttca

SEQ ID NO: 2046633 - DNA, 25 bp, Homo sapien
tctgaggggacaggtttcgacaagt

SEQ ID NO: 2046634 - DNA, 25 bp, Homo sapien
caagtgaagagtctttctggtcctc

SEQ ID NO: 2046635 - DNA, 25 bp, Homo sapien
tggtcctctattgggttgtcaccac

SEQ ID NO: 2046636 - DNA, 25 bp, Homo sapien
tcctctattgggttgtcaccacttg

SEQ ID NO: 2046637 - DNA, 25 bp, Homo sapien
tcacggtaggcccgcctttttcagc

SEQ ID NO: 2046638 - DNA, 25 bp, Homo sapien
atctcccaaaatctgccctgagttc

SEQ ID NO: 2046639 - DNA, 25 bp, Homo sapien
tcagcaccatctcccaaaatctgcc

SEQ ID NO: 2046640 - DNA, 25 bp, Homo sapien
cacggtaggcccgcctttttcagca

SEQ ID NO: 2046641 - DNA, 25 bp, Homo sapien
gcttcctatgaaagcttcccctttc

SEQ ID NO: 2046642 - DNA, 25 bp, Homo sapien
tttcttctagcctgcgtggaaggct

SEQ ID NO: 2046643 - DNA, 25 bp, Homo sapien
ggaaggcttcctatgaaagcttccc

SEQ ID NO: 2046644 - DNA, 25 bp, Homo sapien
tctagcctgcgtggaaggcttccta

SEQ ID NO: 2046645 - DNA, 25 bp, Homo sapien
aaatattaattgttgaccctggcac

SEQ ID NO: 2046646 - DNA, 25 bp, Homo sapien
catactcattaggtccaaaggcagg

SEQ ID NO: 2046647 - DNA, 25 bp, Homo sapien
caaggtcataggtgtaagctctcta

SEQ ID NO: 2046648 - DNA, 25 bp, Homo sapien
cattgctgagatcatggtgcccacg

SEQ ID NO: 2046649 - DNA, 25 bp, Homo sapien
gatggttctgctaacatagctgagt

SEQ ID NO: 2046650 - DNA, 25 bp, Homo sapien
aagtccacaaggaaaatctccagag

SEQ ID NO: 2046651 - DNA, 25 bp, Homo sapien
taggatctatcacttccaggcaatt

SEQ ID NO: 2046652 - DNA, 25 bp, Homo sapien
ctgggaccagaaatcaagtacaatt

SEQ ID NO: 2046653 - DNA, 25 bp, Homo sapien
gctgtgggaacaaccagtgagagcc

SEQ ID NO: 2046654 - DNA, 25 bp, Homo sapien
ggactgatgttttaccaatccactg

SEQ ID NO: 2046655 - DNA, 25 bp, Homo sapien
cagggtccattaacacgctggtgac

SEQ ID NO: 2046656 - DNA, 25 bp, Homo sapien
cctggagataccctgaagagctgtg

SEQ ID NO: 2046657 - DNA, 25 bp, Homo sapien
tgctttttggaaggactagaaacta

SEQ ID NO: 2046658 - DNA, 25 bp, Homo sapien
gcagttaaaaagaggtaggtgtaca

SEQ ID NO: 2046659 - DNA, 25 bp, Homo sapien
tcaaccagctaaacagaagttcctt

SEQ ID NO: 2046660 - DNA, 25 bp, Homo sapien
gaaaaattaccaagatacactcagt

SEQ ID NO: 2046661 - DNA, 25 bp, Homo sapien
taaaggccagtcaaatctaagtgtg

SEQ ID NO: 2046662 - DNA, 25 bp, Homo sapien
gaaaggcctgtcagtcaacagaaca

SEQ ID NO: 2046663 - DNA, 25 bp, Homo sapien
gaagtttcccttatggtggtggctc

SEQ ID NO: 2046664 - DNA, 25 bp, Homo sapien
gatttttctatcaccaccagtaggg

SEQ ID NO: 2046665 - DNA, 25 bp, Homo sapien
tgcacttctccatagactatgccaa

SEQ ID NO: 2046666 - DNA, 25 bp, Homo sapien
caatacagaggcaaagctgttgtca

SEQ ID NO: 2046667 - DNA, 25 bp, Homo sapien
ttagcattttattcagaacgctggg

SEQ ID NO: 2046668 - DNA, 25 bp, Homo sapien
ttagtagtgccaccagtgtcaggcc

SEQ ID NO: 2046669 - DNA, 25 bp, Homo sapien
gtctcatcccccaagataataaaat

SEQ ID NO: 2046670 - DNA, 25 bp, Homo sapien
tcatcccccaagataataaaatcgc

SEQ ID NO: 2046671 - DNA, 25 bp, Homo sapien
ccccaagataataaaatcgctccat

SEQ ID NO: 2046672 - DNA, 25 bp, Homo sapien
caagataataaaatcgctccatgag

SEQ ID NO: 2046673 - DNA, 25 bp, Homo sapien
gactacaaagttaaagcctagcttc

SEQ ID NO: 2046674 - DNA, 25 bp, Homo sapien
taacaaaagcgtgttgaagcatatc

SEQ ID NO: 2046675 - DNA, 25 bp, Homo sapien
tctgagcccaaattggtttgcagcc

SEQ ID NO: 2046676 - DNA, 25 bp, Homo sapien
caagcactgtgctagtagactacaa

SEQ ID NO: 2046677 - DNA, 25 bp, Homo sapien
cagcaagtttcttgaaccgtggccc

SEQ ID NO: 2046678 - DNA, 25 bp, Homo sapien
taacagggagtcatatggtggagct

SEQ ID NO: 2046679 - DNA, 25 bp, Homo sapien
ccaccactacttgaggaattaaggg

SEQ ID NO: 2046680 - DNA, 25 bp, Homo sapien
ccagtcgttcaggtaatcatagtcc

SEQ ID NO: 2046681 - DNA, 25 bp, Homo sapien
taatccaatatctgtacacggtata

SEQ ID NO: 2046682 - DNA, 25 bp, Homo sapien
aacaatcgtttgctttttccacact

SEQ ID NO: 2046683 - DNA, 25 bp, Homo sapien
gaggaggactcctgtcaatctaaaa

SEQ ID NO: 2046684 - DNA, 25 bp, Homo sapien
tagagtctctatgctctgcaaaact

SEQ ID NO: 2046685 - DNA, 25 bp, Homo sapien
aggcttggctgtctgactggctttg

SEQ ID NO: 2046686 - DNA, 25 bp, Homo sapien
gccaatgcaatgtaagtagctgtga

SEQ ID NO: 2046687 - DNA, 25 bp, Homo sapien
gccctcagtgattcactgctctttt

SEQ ID NO: 2046688 - DNA, 25 bp, Homo sapien
aaagtacccgcttcaagaactctat

SEQ ID NO: 2046689 - DNA, 25 bp, Homo sapien
tcaagagttcttagacaagccagct

SEQ ID NO: 2046690 - DNA, 25 bp, Homo sapien
gacagtaacaggcacgaaatctgag

SEQ ID NO: 2046691 - DNA, 25 bp, Homo sapien
gagagaccactgtgctatgctagag

SEQ ID NO: 2046692 - DNA, 25 bp, Homo sapien
tatgctagagcacggcacattgcct

SEQ ID NO: 2046693 - DNA, 25 bp, Homo sapien
agattgtgacatccctttctacaga

SEQ ID NO: 2046694 - DNA, 25 bp, Homo sapien
gatgacactagattgtgacatccct

SEQ ID NO: 2046695 - DNA, 25 bp, Homo sapien
aggttgctgaagtcggtctcaaact

SEQ ID NO: 2046696 - DNA, 25 bp, Homo sapien
cttgtttggatgacactagattgtg

SEQ ID NO: 2046697 - DNA, 25 bp, Homo sapien
cacacactcgtggatttagttgcca

SEQ ID NO: 2046698 - DNA, 25 bp, Homo sapien
gaagatatttgattgctcctctcct

SEQ ID NO: 2046699 - DNA, 25 bp, Homo sapien
ggcttaggccttctgacttacatta

SEQ ID NO: 2046700 - DNA, 25 bp, Homo sapien
ttcgaattcatggatttaggccagg

SEQ ID NO: 2046701 - DNA, 25 bp, Homo sapien
ctcttatagagaaaacgagtgtctc

SEQ ID NO: 2046702 - DNA, 25 bp, Homo sapien
aatgaaaactcttatagagaaaacg

SEQ ID NO: 2046703 - DNA, 25 bp, Homo sapien
agagaaaacgagtgtctctctgtac

SEQ ID NO: 2046704 - DNA, 25 bp, Homo sapien
tgaaaactcttatagagaaaacgag

SEQ ID NO: 2046705 - DNA, 25 bp, Homo sapien
taatgaagtccccaatgtctccagg

SEQ ID NO: 2046706 - DNA, 25 bp, Homo sapien
cacaggcttgatggcatcaggctcc

SEQ ID NO: 2046707 - DNA, 25 bp, Homo sapien
tcatccattcgtcggattcccacag

SEQ ID NO: 2046708 - DNA, 25 bp, Homo sapien
gctcggcgtggatgggtctttcatc

SEQ ID NO: 2046709 - DNA, 25 bp, Homo sapien
caacattctttcaattcaaaactga

SEQ ID NO: 2046710 - DNA, 25 bp, Homo sapien
cattctttcaattcaaaactgacat

SEQ ID NO: 2046711 - DNA, 25 bp, Homo sapien
acattctttcaattcaaaactgaca

SEQ ID NO: 2046712 - DNA, 25 bp, Homo sapien
tctttcaattcaaaactgacatttg

SEQ ID NO: 2046713 - DNA, 25 bp, Homo sapien
cccacattaggtctggttcccgaga

SEQ ID NO: 2046714 - DNA, 25 bp, Homo sapien
aatgtgctaacccaatccctagtga

SEQ ID NO: 2046715 - DNA, 25 bp, Homo sapien
acagagatcccctggctcaagaaga

SEQ ID NO: 2046716 - DNA, 25 bp, Homo sapien
cactaatgtgtaccctggccacgag

SEQ ID NO: 2046717 - DNA, 25 bp, Homo sapien
agttgtttggcctggcgttctttat

SEQ ID NO: 2046718 - DNA, 25 bp, Homo sapien
tctttatcccggcgtttcatccata

SEQ ID NO: 2046719 - DNA, 25 bp, Homo sapien
ttatcccggcgtttcatccatacca

SEQ ID NO: 2046720 - DNA, 25 bp, Homo sapien
gttgtttggcctggcgttctttatc

SEQ ID NO: 2046721 - DNA, 25 bp, Homo sapien
tgatgggaacttcatagataccagc

SEQ ID NO: 2046722 - DNA, 25 bp, Homo sapien
gtgcagtccccgttggagtcacact

SEQ ID NO: 2046723 - DNA, 25 bp, Homo sapien
tggcaatgatggcaccggtgccaag

SEQ ID NO: 2046724 - DNA, 25 bp, Homo sapien
tatttgatttgggaggattacccga

SEQ ID NO: 2046725 - DNA, 25 bp, Homo sapien
cattaagccgagtgatggtccaatt

SEQ ID NO: 2046726 - DNA, 25 bp, Homo sapien
tctggagtttcgcaagtctctgcct

SEQ ID NO: 2046727 - DNA, 25 bp, Homo sapien
gcagcgttcctgttccactcatagg

SEQ ID NO: 2046728 - DNA, 25 bp, Homo sapien
tatcaagtaaatagatctgcagcgt

SEQ ID NO: 2046729 - DNA, 25 bp, Homo sapien
aacatacaagaaaaaacagcgaaca

SEQ ID NO: 2046730 - DNA, 25 bp, Homo sapien
caacatacaagaaaaaacagcgaac

SEQ ID NO: 2046731 - DNA, 25 bp, Homo sapien
atcaacatacaagaaaaaacagcga

SEQ ID NO: 2046732 - DNA, 25 bp, Homo sapien
catacaagaaaaaacagcgaacata

SEQ ID NO: 2046733 - DNA, 25 bp, Homo sapien
gccaattggcaggatcagataattt

SEQ ID NO: 2046734 - DNA, 25 bp, Homo sapien
caggatctatttttagccaattggc

SEQ ID NO: 2046735 - DNA, 25 bp, Homo sapien
tgtagttatttgtccattcacagga

SEQ ID NO: 2046736 - DNA, 25 bp, Homo sapien
tgattctcggtccaaaacagcaatt

SEQ ID NO: 2046737 - DNA, 25 bp, Homo sapien
gctgaattcccttggctaatggcac

SEQ ID NO: 2046738 - DNA, 25 bp, Homo sapien
taatggcacttgattttctgcagca

SEQ ID NO: 2046739 - DNA, 25 bp, Homo sapien
taacagacacggttgcagttgactg

SEQ ID NO: 2046740 - DNA, 25 bp, Homo sapien
catggtaccggcatgaagcccttct

SEQ ID NO: 2046741 - DNA, 25 bp, Homo sapien
gatggcgaaccgtccagtaggatct

SEQ ID NO: 2046742 - DNA, 25 bp, Homo sapien
tatcggtcacagttagattagctac

SEQ ID NO: 2046743 - DNA, 25 bp, Homo sapien
ggatctccgccactgattctgtaca

SEQ ID NO: 2046744 - DNA, 25 bp, Homo sapien
tctgtacactgcgttccaggctggt

SEQ ID NO: 2046745 - DNA, 25 bp, Homo sapien
cgtcatggcagtaaactctggagga

SEQ ID NO: 2046746 - DNA, 25 bp, Homo sapien
tcactgtgatgacggccgtggctgt

SEQ ID NO: 2046747 - DNA, 25 bp, Homo sapien
ggccatatgtgggattgccttccat

SEQ ID NO: 2046748 - DNA, 25 bp, Homo sapien
tgccttccatgtctgtagcttgaat

SEQ ID NO: 2046749 - DNA, 25 bp, Homo sapien
tgagggcattgggatcgtcagcatc

SEQ ID NO: 2046750 - DNA, 25 bp, Homo sapien
caattgctgttacggtcatcacata

SEQ ID NO: 2046751 - DNA, 25 bp, Homo sapien
tgattgtaaacatgttgggtgaagg

SEQ ID NO: 2046752 - DNA, 25 bp, Homo sapien
tgcttggagcctgagacacgattct

SEQ ID NO: 2046753 - DNA, 25 bp, Homo sapien
caggctttgatccctcaggaactgt

SEQ ID NO: 2046754 - DNA, 25 bp, Homo sapien
tccctcaggaactgtcccattccaa

SEQ ID NO: 2046755 - DNA, 25 bp, Homo sapien
gctttgatccctcaggaactgtccc

SEQ ID NO: 2046756 - DNA, 25 bp, Homo sapien
ccctcaggaactgtcccattccaaa

SEQ ID NO: 2046757 - DNA, 25 bp, Homo sapien
ctggtgtaagaactcaggtctgttg

SEQ ID NO: 2046758 - DNA, 25 bp, Homo sapien
aggtctgttgtcattcatgtcaata

SEQ ID NO: 2046759 - DNA, 25 bp, Homo sapien
ctcaggtctgttgtcattcatgtca

SEQ ID NO: 2046760 - DNA, 25 bp, Homo sapien
tggtgtaagaactcaggtctgttgt

SEQ ID NO: 2046761 - DNA, 25 bp, Homo sapien
gtcaatggggttctccacttgattt

SEQ ID NO: 2046762 - DNA, 25 bp, Homo sapien
aatggggttctccacttgatttcca

SEQ ID NO: 2046763 - DNA, 25 bp, Homo sapien
caatgtcaatggggttctccacttg

SEQ ID NO: 2046764 - DNA, 25 bp, Homo sapien
aatgtcaatggggttctccacttga

SEQ ID NO: 2046765 - DNA, 25 bp, Homo sapien
gtcaccgacagctgacccgagatgg

SEQ ID NO: 2046766 - DNA, 25 bp, Homo sapien
tacactgtaccgcagtgaaaggttt

SEQ ID NO: 2046767 - DNA, 25 bp, Homo sapien
tgaaaccgggctatctgctcgcgat

SEQ ID NO: 2046768 - DNA, 25 bp, Homo sapien
ggtttttatctctatcagacctgat

SEQ ID NO: 2046769 - DNA, 25 bp, Homo sapien
cccctggagttttctggcaagttga

SEQ ID NO: 2046770 - DNA, 25 bp, Homo sapien
tcttctgcctttgtaggtggccact

SEQ ID NO: 2046771 - DNA, 25 bp, Homo sapien
gcaagttgattggagggatgaccca

SEQ ID NO: 2046772 - DNA, 25 bp, Homo sapien
aattgtcttgggaacactatttctt

SEQ ID NO: 2046773 - DNA, 25 bp, Homo sapien
ctttacattaaaatagaagacattc

SEQ ID NO: 2046774 - DNA, 25 bp, Homo sapien
tacattaaaatagaagacattcctg

SEQ ID NO: 2046775 - DNA, 25 bp, Homo sapien
ttaaaatagaagacattcctgagta

SEQ ID NO: 2046776 - DNA, 25 bp, Homo sapien
cattaaaatagaagacattcctgag

SEQ ID NO: 2046777 - DNA, 25 bp, Homo sapien
tgtcttgggcatatatcaggaactt

SEQ ID NO: 2046778 - DNA, 25 bp, Homo sapien
gaaagcttctcacggcatacaccat

SEQ ID NO: 2046779 - DNA, 25 bp, Homo sapien
tcaggaacttggcatgctcagaaga

SEQ ID NO: 2046780 - DNA, 25 bp, Homo sapien
tcagttaaggttggcttcaggctca

SEQ ID NO: 2046781 - DNA, 25 bp, Homo sapien
ctggctcatgattatatgcttcttc

SEQ ID NO: 2046782 - DNA, 25 bp, Homo sapien
gattatatgcttcttccatgtgaat

SEQ ID NO: 2046783 - DNA, 25 bp, Homo sapien
tatatgcttcttccatgtgaatcat

SEQ ID NO: 2046784 - DNA, 25 bp, Homo sapien
tgattatatgcttcttccatgtgaa

SEQ ID NO: 2046785 - DNA, 25 bp, Homo sapien
ttaatgaaagttatgctattttaac

SEQ ID NO: 2046786 - DNA, 25 bp, Homo sapien
gaaagttatgctattttaacagaca

SEQ ID NO: 2046787 - DNA, 25 bp, Homo sapien
tatgctattttaacagacacatata

SEQ ID NO: 2046788 - DNA, 25 bp, Homo sapien
tttaacagacacatataaacagtta

SEQ ID NO: 2046789 - DNA, 25 bp, Homo sapien
gatcctctggattaattaagtctat

SEQ ID NO: 2046790 - DNA, 25 bp, Homo sapien
ctcagataatctcaagtagaaactc

SEQ ID NO: 2046791 - DNA, 25 bp, Homo sapien
actccagaatatcataacatgggaa

SEQ ID NO: 2046792 - DNA, 25 bp, Homo sapien
gaaaatacgcttccttagacaactg

SEQ ID NO: 2046793 - DNA, 25 bp, Homo sapien
gatacacacataacgccttaataaa

SEQ ID NO: 2046794 - DNA, 25 bp, Homo sapien
gaagatacacacataacgccttaat

SEQ ID NO: 2046795 - DNA, 25 bp, Homo sapien
cagtgaagatacacacataacgcct

SEQ ID NO: 2046796 - DNA, 25 bp, Homo sapien
gtgaagatacacacataacgcctta

SEQ ID NO: 2046797 - DNA, 25 bp, Homo sapien
tcagggcagggtgctacacaggaac

SEQ ID NO: 2046798 - DNA, 25 bp, Homo sapien
tcctgtgtttgaggtcagggcaggg

SEQ ID NO: 2046799 - DNA, 25 bp, Homo sapien
ctgtgtttgaggtcagggcagggtg

SEQ ID NO: 2046800 - DNA, 25 bp, Homo sapien
cctgtgtttgaggtcagggcagggt

SEQ ID NO: 2046801 - DNA, 25 bp, Homo sapien
caactgtgtttttaacggataagtg

SEQ ID NO: 2046802 - DNA, 25 bp, Homo sapien
tgcaaagatgaacagtcagcaggca

SEQ ID NO: 2046803 - DNA, 25 bp, Homo sapien
atgtgcaaagatgaacagtcagcag

SEQ ID NO: 2046804 - DNA, 25 bp, Homo sapien
tgtgtttttaacggataagtgtcca

SEQ ID NO: 2046805 - DNA, 25 bp, Homo sapien
caattctctcatcatggtcttgtaa

SEQ ID NO: 2046806 - DNA, 25 bp, Homo sapien
aagtcaattctctcatcatggtctt

SEQ ID NO: 2046807 - DNA, 25 bp, Homo sapien
ggccacagcctaaaagtcaattctc

SEQ ID NO: 2046808 - DNA, 25 bp, Homo sapien
gtggccacagcctaaaagtcaattc

SEQ ID NO: 2046809 - DNA, 25 bp, Homo sapien
actttaaggcctccagtgtatcgac

SEQ ID NO: 2046810 - DNA, 25 bp, Homo sapien
tgtaatgcaagtaggctcctcccaa

SEQ ID NO: 2046811 - DNA, 25 bp, Homo sapien
aaagtccactttaaggcctccagtg

SEQ ID NO: 2046812 - DNA, 25 bp, Homo sapien
cagtgtatcgacctccataagaagc

SEQ ID NO: 2046813 - DNA, 25 bp, Homo sapien
ccagacgacaaagccttctggaata

SEQ ID NO: 2046814 - DNA, 25 bp, Homo sapien
ggacgcttcactaaaccagacgaca

SEQ ID NO: 2046815 - DNA, 25 bp, Homo sapien
ttcctgggctggacgcttcactaaa

SEQ ID NO: 2046816 - DNA, 25 bp, Homo sapien
cactgtgaaggcagtatgcccactc

SEQ ID NO: 2046817 - DNA, 25 bp, Homo sapien
cagactaataagtgctgctgagcaa

SEQ ID NO: 2046818 - DNA, 25 bp, Homo sapien
caggtgcgtactagtcagaaggtca

SEQ ID NO: 2046819 - DNA, 25 bp, Homo sapien
gaaaatacgtatgtgccggttccta

SEQ ID NO: 2046820 - DNA, 25 bp, Homo sapien
taatgatttgtgtctcggttctgcc

SEQ ID NO: 2046821 - DNA, 25 bp, Homo sapien
ggtgtgttcctaggcaccctggatg

SEQ ID NO: 2046822 - DNA, 25 bp, Homo sapien
ctgtccacaacactagccttatgtg

SEQ ID NO: 2046823 - DNA, 25 bp, Homo sapien
tttcctaatcacctacctgtccaca

SEQ ID NO: 2046824 - DNA, 25 bp, Homo sapien
gccataaaaagccctttcctaatca

SEQ ID NO: 2046825 - DNA, 25 bp, Homo sapien
tccttcaggtcatggactctgttaa

SEQ ID NO: 2046826 - DNA, 25 bp, Homo sapien
taatcatgcacttgttaactatctg

SEQ ID NO: 2046827 - DNA, 25 bp, Homo sapien
cttttccttaccaccatctgtaatc

SEQ ID NO: 2046828 - DNA, 25 bp, Homo sapien
ggactctgttaaacacttgtatcct

SEQ ID NO: 2046829 - DNA, 25 bp, Homo sapien
gctgttggttccttaagtcttcagg

SEQ ID NO: 2046830 - DNA, 25 bp, Homo sapien
taagaccctaacatgtccacacaat

SEQ ID NO: 2046831 - DNA, 25 bp, Homo sapien
caaattcgtgctaacttagaaaggg

SEQ ID NO: 2046832 - DNA, 25 bp, Homo sapien
taactctgtacctagcaacttagta

SEQ ID NO: 2046833 - DNA, 25 bp, Homo sapien
caggacactgtcctaaaaccacgga

SEQ ID NO: 2046834 - DNA, 25 bp, Homo sapien
tctagcatgtgtagtgggtcactgc

SEQ ID NO: 2046835 - DNA, 25 bp, Homo sapien
catcacggtaatgccctatggtgga

SEQ ID NO: 2046836 - DNA, 25 bp, Homo sapien
aaaccacggaactgcatcatcacgg

SEQ ID NO: 2046837 - DNA, 25 bp, Homo sapien
tacaccacaggaattagttacacag

SEQ ID NO: 2046838 - DNA, 25 bp, Homo sapien
tgagcccctagctatgggatcaaga

SEQ ID NO: 2046839 - DNA, 25 bp, Homo sapien
taatattactgagcaccgtggatcc

SEQ ID NO: 2046840 - DNA, 25 bp, Homo sapien
aaatgattaaactctcggtcttggc

SEQ ID NO: 2046841 - DNA, 25 bp, Homo sapien
tcacagtcaacgaaagtagcagagt

SEQ ID NO: 2046842 - DNA, 25 bp, Homo sapien
ggctggattgtaccaactagaaggt

SEQ ID NO: 2046843 - DNA, 25 bp, Homo sapien
ggatacattccttcactagagacat

SEQ ID NO: 2046844 - DNA, 25 bp, Homo sapien
cataacaaagattggccagcctaac

SEQ ID NO: 2046845 - DNA, 25 bp, Homo sapien
tgcaattgagaagttgatacaatta

SEQ ID NO: 2046846 - DNA, 25 bp, Homo sapien
ttgcaattgagaagttgatacaatt

SEQ ID NO: 2046847 - DNA, 25 bp, Homo sapien
gggacaacctaatctggcactgatt

SEQ ID NO: 2046848 - DNA, 25 bp, Homo sapien
gaggaagaccacaagatgagctact

SEQ ID NO: 2046849 - DNA, 25 bp, Homo sapien
tatgatgtcacatgtaaccactgaa

SEQ ID NO: 2046850 - DNA, 25 bp, Homo sapien
ttatagatataagcaaggaaagtca

SEQ ID NO: 2046851 - DNA, 25 bp, Homo sapien
ggaagataaatggcctcatttgctt

SEQ ID NO: 2046852 - DNA, 25 bp, Homo sapien
cagataggtgttgagagggcatgga

SEQ ID NO: 2046853 - DNA, 25 bp, Homo sapien
atcccattaacagataggtgttgag

SEQ ID NO: 2046854 - DNA, 25 bp, Homo sapien
taacagataggtgttgagagggcat

SEQ ID NO: 2046855 - DNA, 25 bp, Homo sapien
tatcagctaacgtgactggaggccc

SEQ ID NO: 2046856 - DNA, 25 bp, Homo sapien
cacaggattaccacttttgcagggc

SEQ ID NO: 2046857 - DNA, 25 bp, Homo sapien
aaaattgctcagaacccgtcagggt

SEQ ID NO: 2046858 - DNA, 25 bp, Homo sapien
tagaaccagaggtggacttagcccc

SEQ ID NO: 2046859 - DNA, 25 bp, Homo sapien
gaagtcccgcatctacatcaaaggc

SEQ ID NO: 2046860 - DNA, 25 bp, Homo sapien
ccagataacgttgaagctaggacct

SEQ ID NO: 2046861 - DNA, 25 bp, Homo sapien
gatatgcttgctctgtgtgacgcca

SEQ ID NO: 2046862 - DNA, 25 bp, Homo sapien
taacaggagccaacagaatgacgca

SEQ ID NO: 2046863 - DNA, 25 bp, Homo sapien
ttgctaacaaaatgggacaaaggcc

SEQ ID NO: 2046864 - DNA, 25 bp, Homo sapien
tagaggcacagttaagcagaatctg

SEQ ID NO: 2046865 - DNA, 25 bp, Homo sapien
tcttcaaagagtggatgtattcatg

SEQ ID NO: 2046866 - DNA, 25 bp, Homo sapien
tagcagcactacatataagagagga

SEQ ID NO: 2046867 - DNA, 25 bp, Homo sapien
aatcaatggctgctagtgacacacc

SEQ ID NO: 2046868 - DNA, 25 bp, Homo sapien
tcatacaagttctagggtgccaagt

SEQ ID NO: 2046869 - DNA, 25 bp, Homo sapien
tgacgatttcaagagatcaggagcc

SEQ ID NO: 2046870 - DNA, 25 bp, Homo sapien
taggagttacgattccaacagggtc

SEQ ID NO: 2046871 - DNA, 25 bp, Homo sapien
tgcacatccttcgataagactgcac

SEQ ID NO: 2046872 - DNA, 25 bp, Homo sapien
tgcataatgcgatttcaccagaagc

SEQ ID NO: 2046873 - DNA, 25 bp, Homo sapien
tcatgcacatccttcgataagactg

SEQ ID NO: 2046874 - DNA, 25 bp, Homo sapien
tccagtcttgcataatgcgatttca

SEQ ID NO: 2046875 - DNA, 25 bp, Homo sapien
gaattagaggactgccaaataactt

SEQ ID NO: 2046876 - DNA, 25 bp, Homo sapien
ttagaggactgccaaataacttgat

SEQ ID NO: 2046877 - DNA, 25 bp, Homo sapien
caaataacttgatgagaaagttata

SEQ ID NO: 2046878 - DNA, 25 bp, Homo sapien
tagaggactgccaaataacttgatg

SEQ ID NO: 2046879 - DNA, 25 bp, Homo sapien
cacggagcggggtaatccacaccac

SEQ ID NO: 2046880 - DNA, 25 bp, Homo sapien
aggccctgacccgtgaagaccacgg

SEQ ID NO: 2046881 - DNA, 25 bp, Homo sapien
gccctgacccgtgaagaccacggag

SEQ ID NO: 2046882 - DNA, 25 bp, Homo sapien
ctgacccgtgaagaccacggagcgg

SEQ ID NO: 2046883 - DNA, 25 bp, Homo sapien
cggagaccgacttgggaccagggca

SEQ ID NO: 2046884 - DNA, 25 bp, Homo sapien
tccgagctgcgtccgcacttttcgg

SEQ ID NO: 2046885 - DNA, 25 bp, Homo sapien
attttcctgccccgcggcgagggtg

SEQ ID NO: 2046886 - DNA, 25 bp, Homo sapien
cccttgccccgagggcgacaggcag

SEQ ID NO: 2046887 - DNA, 25 bp, Homo sapien
ctctcccgagggtatgaaaagtacg

SEQ ID NO: 2046888 - DNA, 25 bp, Homo sapien
gaaaagtacggaaggctccaggcaa

SEQ ID NO: 2046889 - DNA, 25 bp, Homo sapien
cctgccgcggaggagcctcttagta

SEQ ID NO: 2046890 - DNA, 25 bp, Homo sapien
gattaaatgaaaaggctcgctggct

SEQ ID NO: 2046891 - DNA, 25 bp, Homo sapien
ggacgaacacagaatattgtgaggg

SEQ ID NO: 2046892 - DNA, 25 bp, Homo sapien
attgtgagggcaagagaagaagaaa

SEQ ID NO: 2046893 - DNA, 25 bp, Homo sapien
tcctccgggcaagagggccagattt

SEQ ID NO: 2046894 - DNA, 25 bp, Homo sapien
ctttccaggtgggacgaacacagaa

SEQ ID NO: 2046895 - DNA, 25 bp, Homo sapien
agcggcagcagggtccgcagcgctc

SEQ ID NO: 2046896 - DNA, 25 bp, Homo sapien
agcagcggcagcagggtccgcagcg

SEQ ID NO: 2046897 - DNA, 25 bp, Homo sapien
tgaagcagggccgccagcagcggca

SEQ ID NO: 2046898 - DNA, 25 bp, Homo sapien
ctgaagcagggccgccagcagcggc

SEQ ID NO: 2046899 - DNA, 25 bp, Homo sapien
ggagaaacggctccaggcagtttcc

SEQ ID NO: 2046900 - DNA, 25 bp, Homo sapien
gcagcaccaacagcggcgcggagaa

SEQ ID NO: 2046901 - DNA, 25 bp, Homo sapien
gctccccgccaatggagagcgagct

SEQ ID NO: 2046902 - DNA, 25 bp, Homo sapien
ctgatgacaaatagcgggccgcgga

SEQ ID NO: 2046903 - DNA, 25 bp, Homo sapien
aacagacccagagatcaaggagctg

SEQ ID NO: 2046904 - DNA, 25 bp, Homo sapien
tcgggctcgtggttttgcttcctcc

SEQ ID NO: 2046905 - DNA, 25 bp, Homo sapien
tcgtgcgtgctgcacccacaaagag

SEQ ID NO: 2046906 - DNA, 25 bp, Homo sapien
ccccggcgagttggagactgttctc

SEQ ID NO: 2046907 - DNA, 25 bp, Homo sapien
gaggatgtactggaacagcccaagt

SEQ ID NO: 2046908 - DNA, 25 bp, Homo sapien
tgtactggaacagcccaagtttttg

SEQ ID NO: 2046909 - DNA, 25 bp, Homo sapien
agctcccacccttgaggatgtactg

SEQ ID NO: 2046910 - DNA, 25 bp, Homo sapien
cacccttgaggatgtactggaacag

SEQ ID NO: 2046911 - DNA, 25 bp, Homo sapien
ttcagaattgtggtttctttgtctg

SEQ ID NO: 2046912 - DNA, 25 bp, Homo sapien
cagtttctgtatttgttacccaagg

SEQ ID NO: 2046913 - DNA, 25 bp, Homo sapien
tttgtctgaacaaagtgaaaagatc

SEQ ID NO: 2046914 - DNA, 25 bp, Homo sapien
ggtttctttgtctgaacaaagtgaa

SEQ ID NO: 2046915 - DNA, 25 bp, Homo sapien
cttcagaagacgtgtaagcactggg

SEQ ID NO: 2046916 - DNA, 25 bp, Homo sapien
cagttagcaatactgaaagtccaat

SEQ ID NO: 2046917 - DNA, 25 bp, Homo sapien
cagttgatcgcattcaggaacaggt

SEQ ID NO: 2046918 - DNA, 25 bp, Homo sapien
tactgattggtatcatggcaacttc

SEQ ID NO: 2046919 - DNA, 25 bp, Homo sapien
catggagttactgtatccgacccga

SEQ ID NO: 2046920 - DNA, 25 bp, Homo sapien
agaccaaagtcccatggagttactg

SEQ ID NO: 2046921 - DNA, 25 bp, Homo sapien
ttactgtatccgacccgaagtgcag

SEQ ID NO: 2046922 - DNA, 25 bp, Homo sapien
ccgacccgaagtgcaggatctgtga

SEQ ID NO: 2046923 - DNA, 25 bp, Homo sapien
taagtcattcaccagggctcctagc

SEQ ID NO: 2046924 - DNA, 25 bp, Homo sapien
gggtgatttattgacccctaagtca

SEQ ID NO: 2046925 - DNA, 25 bp, Homo sapien
ccacaagcatgtgtggccaaagtgt

SEQ ID NO: 2046926 - DNA, 25 bp, Homo sapien
cctggatccactctctgaggaattg

SEQ ID NO: 2046927 - DNA, 25 bp, Homo sapien
cccagtggactcagcaattgtattg

SEQ ID NO: 2046928 - DNA, 25 bp, Homo sapien
gacatagggctatccaagaaccata

SEQ ID NO: 2046929 - DNA, 25 bp, Homo sapien
taaatctaaccagacatatgcccag

SEQ ID NO: 2046930 - DNA, 25 bp, Homo sapien
gggttcttaacttctgactgcaatg

SEQ ID NO: 2046931 - DNA, 25 bp, Homo sapien
tcttccatcacttaatgaatgtaca

SEQ ID NO: 2046932 - DNA, 25 bp, Homo sapien
cacaagggtccgtagtaggatctcc

SEQ ID NO: 2046933 - DNA, 25 bp, Homo sapien
caagggtccgtagtaggatctccat

SEQ ID NO: 2046934 - DNA, 25 bp, Homo sapien
tccatcacttaatgaatgtacattt

SEQ ID NO: 2046935 - DNA, 25 bp, Homo sapien
ctcgcactgagatgtcaagctcctg

SEQ ID NO: 2046936 - DNA, 25 bp, Homo sapien
tcagctcgcactgagatgtcaagct

SEQ ID NO: 2046937 - DNA, 25 bp, Homo sapien
ctaccgatcagctcgcactgagatg

SEQ ID NO: 2046938 - DNA, 25 bp, Homo sapien
ccgatcagctcgcactgagatgtca

SEQ ID NO: 2046939 - DNA, 25 bp, Homo sapien
catatcagtccatgtggcagcagtt

SEQ ID NO: 2046940 - DNA, 25 bp, Homo sapien
cttggattcatatcagtccatgtgg

SEQ ID NO: 2046941 - DNA, 25 bp, Homo sapien
tacagtcttggattcatatcagtcc

SEQ ID NO: 2046942 - DNA, 25 bp, Homo sapien
ctggtgtacagtcttggattcatat

SEQ ID NO: 2046943 - DNA, 25 bp, Homo sapien
ttcctgtttcaagggaagaatgctc

SEQ ID NO: 2046944 - DNA, 25 bp, Homo sapien
tgtgttcctgtttcaagggaagaat

SEQ ID NO: 2046945 - DNA, 25 bp, Homo sapien
ctttcaactgtgttcctgtttcaag

SEQ ID NO: 2046946 - DNA, 25 bp, Homo sapien
caactgtgttcctgtttcaagggaa

SEQ ID NO: 2046947 - DNA, 25 bp, Homo sapien
gactgctggttaaaaagagcctcca

SEQ ID NO: 2046948 - DNA, 25 bp, Homo sapien
tgaaacttggcctgggttcaacaca

SEQ ID NO: 2046949 - DNA, 25 bp, Homo sapien
gagaggcagtaaaaaccaatgtagc

SEQ ID NO: 2046950 - DNA, 25 bp, Homo sapien
taaggacttagcaactaggaacatc

SEQ ID NO: 2046951 - DNA, 25 bp, Homo sapien
ttctcttgatgttgattttaaccac

SEQ ID NO: 2046952 - DNA, 25 bp, Homo sapien
ttttctcttgatgttgattttaacc

SEQ ID NO: 2046953 - DNA, 25 bp, Homo sapien
ctcttgatgttgattttaaccacat

SEQ ID NO: 2046954 - DNA, 25 bp, Homo sapien
cctccttcttctcattagaatctat

SEQ ID NO: 2046955 - DNA, 25 bp, Homo sapien
tactttcttgaactctgaaggaacg

SEQ ID NO: 2046956 - DNA, 25 bp, Homo sapien
actattagctcacttgaggatctgc

SEQ ID NO: 2046957 - DNA, 25 bp, Homo sapien
gaaggaacgcttttcagcttgctcc

SEQ ID NO: 2046958 - DNA, 25 bp, Homo sapien
gcttctacaatatgattttcccagg

SEQ ID NO: 2046959 - DNA, 25 bp, Homo sapien
cagaaaacgcagacttaaggtggct

SEQ ID NO: 2046960 - DNA, 25 bp, Homo sapien
ggatgaaggtaaagcacctctacca

SEQ ID NO: 2046961 - DNA, 25 bp, Homo sapien
ttcatcagtccactgcaaggaactg

SEQ ID NO: 2046962 - DNA, 25 bp, Homo sapien
tctcgttttacttgggatgaaggta

SEQ ID NO: 2046963 - DNA, 25 bp, Homo sapien
ctttgtacgggcacaacttggcagc

SEQ ID NO: 2046964 - DNA, 25 bp, Homo sapien
gcaactgcctctggggaggctttac

SEQ ID NO: 2046965 - DNA, 25 bp, Homo sapien
ttggcagcccacttacggggcccag

SEQ ID NO: 2046966 - DNA, 25 bp, Homo sapien
gccaatggtgcacaatgtcctcagg

SEQ ID NO: 2046967 - DNA, 25 bp, Homo sapien
gtttcaattcactaatatgcagatg

SEQ ID NO: 2046968 - DNA, 25 bp, Homo sapien
tgcactgtccaattggggaatcagc

SEQ ID NO: 2046969 - DNA, 25 bp, Homo sapien
taatatgcagatgattgcactgtcc

SEQ ID NO: 2046970 - DNA, 25 bp, Homo sapien
gaattctaagtttcaattcactaat

SEQ ID NO: 2046971 - DNA, 25 bp, Homo sapien
tcctgttcattagaacttatagcaa

SEQ ID NO: 2046972 - DNA, 25 bp, Homo sapien
tttcctgttcattagaacttatagc

SEQ ID NO: 2046973 - DNA, 25 bp, Homo sapien
actaattcatttgctgcagattctt

SEQ ID NO: 2046974 - DNA, 25 bp, Homo sapien
ttcctgttcattagaacttatagca

SEQ ID NO: 2046975 - DNA, 25 bp, Homo sapien
ctttccaaaagacatcaagcatcca

SEQ ID NO: 2046976 - DNA, 25 bp, Homo sapien
aaagacatcaagcatccaaggttcc

SEQ ID NO: 2046977 - DNA, 25 bp, Homo sapien
gacatcaagcatccaaggttcccga

SEQ ID NO: 2046978 - DNA, 25 bp, Homo sapien
agcatccaaggttcccgagttctcc

SEQ ID NO: 2046979 - DNA, 25 bp, Homo sapien
tcctgttcacatgggaaattgtaaa

SEQ ID NO: 2046980 - DNA, 25 bp, Homo sapien
gaaaaaggctgtgattttaacatcc

SEQ ID NO: 2046981 - DNA, 25 bp, Homo sapien
ttaacatcctgaacccgagtcaagt

SEQ ID NO: 2046982 - DNA, 25 bp, Homo sapien
caaggttgaaagctctgacagaagg

SEQ ID NO: 2046983 - DNA, 25 bp, Homo sapien
cttgccttccaaggcggtcctctca

SEQ ID NO: 2046984 - DNA, 25 bp, Homo sapien
tccaaggcggtcctctcaggctcag

SEQ ID NO: 2046985 - DNA, 25 bp, Homo sapien
ttgccttccaaggcggtcctctcag

SEQ ID NO: 2046986 - DNA, 25 bp, Homo sapien
atctactttgaggagagttaagtta

SEQ ID NO: 2046987 - DNA, 25 bp, Homo sapien
tactttgaggagagttaagttaggc

SEQ ID NO: 2046988 - DNA, 25 bp, Homo sapien
cctccaggggaatatctactttgag

SEQ ID NO: 2046989 - DNA, 25 bp, Homo sapien
cctcctccaggggaatatctacttt

SEQ ID NO: 2046990 - DNA, 25 bp, Homo sapien
ctacggagaaatgtcatcaggggcc

SEQ ID NO: 2046991 - DNA, 25 bp, Homo sapien
cagtattggttttggtgcaaggata

SEQ ID NO: 2046992 - DNA, 25 bp, Homo sapien
ttttgtagcagcttgctagcctcat

SEQ ID NO: 2046993 - DNA, 25 bp, Homo sapien
ttttgagagacgacgaacgtcagta

SEQ ID NO: 2046994 - DNA, 25 bp, Homo sapien
tggagagaggcagcattttgagaga

SEQ ID NO: 2046995 - DNA, 25 bp, Homo sapien
aacatctttattacatcctactaac

SEQ ID NO: 2046996 - DNA, 25 bp, Homo sapien
ctagatatcaacatctttattacat

SEQ ID NO: 2046997 - DNA, 25 bp, Homo sapien
tcaacatctttattacatcctacta

SEQ ID NO: 2046998 - DNA, 25 bp, Homo sapien
agatatcaacatctttattacatcc

SEQ ID NO: 2046999 - DNA, 25 bp, Homo sapien
cttgtagacagttgtaaggctcttt

SEQ ID NO: 2047000 - DNA, 25 bp, Homo sapien
tgtagacagttgtaaggctctttga

SEQ ID NO: 2047001 - DNA, 25 bp, Homo sapien
tagacagttgtaaggctctttgaaa

SEQ ID NO: 2047002 - DNA, 25 bp, Homo sapien
agacagttgtaaggctctttgaaat

SEQ ID NO: 2047003 - DNA, 25 bp, Homo sapien
ttagcttatgtcctcttctcctgac

SEQ ID NO: 2047004 - DNA, 25 bp, Homo sapien
ttttagctcctcatcacaagtgtga

SEQ ID NO: 2047005 - DNA, 25 bp, Homo sapien
gtgtgatttgagtatctcttgcttc

SEQ ID NO: 2047006 - DNA, 25 bp, Homo sapien
tgccctggggtttctctgataatcc

SEQ ID NO: 2047007 - DNA, 25 bp, Homo sapien
cagatctgcacaggttttgacctcc

SEQ ID NO: 2047008 - DNA, 25 bp, Homo sapien
agtctgctggttctcagatctccag

SEQ ID NO: 2047009 - DNA, 25 bp, Homo sapien
gctgctcgggggtcaggggtcaggg

SEQ ID NO: 2047010 - DNA, 25 bp, Homo sapien
gtagctcaatgtaatttgatcgtct

SEQ ID NO: 2047011 - DNA, 25 bp, Homo sapien
gtcctcccgtagctcaatgtaattt

SEQ ID NO: 2047012 - DNA, 25 bp, Homo sapien
tatctgtgtttcgtagtttccttaa

SEQ ID NO: 2047013 - DNA, 25 bp, Homo sapien
catcatggactttcgataggagatc

SEQ ID NO: 2047014 - DNA, 25 bp, Homo sapien
tccttaaaatgaaggcactgaatgt

SEQ ID NO: 2047015 - DNA, 25 bp, Homo sapien
tgaccaggaagttctcattcagttc

SEQ ID NO: 2047016 - DNA, 25 bp, Homo sapien
ccagccggcgacattccccacaaat

SEQ ID NO: 2047017 - DNA, 25 bp, Homo sapien
cagccggcgacattccccacaaatc

SEQ ID NO: 2047018 - DNA, 25 bp, Homo sapien
gccagccggcgacattccccacaaa

SEQ ID NO: 2047019 - DNA, 25 bp, Homo sapien
caaatctcccggaaatgtttcccat

SEQ ID NO: 2047020 - DNA, 25 bp, Homo sapien
gttcttcacaaccaagggcattcaa

SEQ ID NO: 2047021 - DNA, 25 bp, Homo sapien
cttcaatcttagtttttgagatata

SEQ ID NO: 2047022 - DNA, 25 bp, Homo sapien
gagatataaaagtgagtcagttctt

SEQ ID NO: 2047023 - DNA, 25 bp, Homo sapien
gtcagttcttcacaaccaagggcat

SEQ ID NO: 2047024 - DNA, 25 bp, Homo sapien
cttataatcatccatacacttgtaa

SEQ ID NO: 2047025 - DNA, 25 bp, Homo sapien
tttgcttcatgatttctcctgccat

SEQ ID NO: 2047026 - DNA, 25 bp, Homo sapien
tgtcattttgcttcatgatttctcc

SEQ ID NO: 2047027 - DNA, 25 bp, Homo sapien
ctttgctgtcattttgcttcatgat

SEQ ID NO: 2047028 - DNA, 25 bp, Homo sapien
gctgtcattttgcttcatgatttct

SEQ ID NO: 2047029 - DNA, 25 bp, Homo sapien
tctgacttgtaccacttcaaggaca

SEQ ID NO: 2047030 - DNA, 25 bp, Homo sapien
tcaggcataattttactctggcggg

SEQ ID NO: 2047031 - DNA, 25 bp, Homo sapien
caacaggcgtgtcaatttttagtgc

SEQ ID NO: 2047032 - DNA, 25 bp, Homo sapien
ttagtgctttggtatcaaagccatc

SEQ ID NO: 2047033 - DNA, 25 bp, Homo sapien
tgggtatgacaaaaatgactgactt

SEQ ID NO: 2047034 - DNA, 25 bp, Homo sapien
atgacaaaaatgactgactttccaa

SEQ ID NO: 2047035 - DNA, 25 bp, Homo sapien
acaaaaatgactgactttccaacat

SEQ ID NO: 2047036 - DNA, 25 bp, Homo sapien
ctgggtatgacaaaaatgactgact

SEQ ID NO: 2047037 - DNA, 25 bp, Homo sapien
aaatgatgaccatttgggtgagatt

SEQ ID NO: 2047038 - DNA, 25 bp, Homo sapien
ttgggtgagattctgttgcctgatg

SEQ ID NO: 2047039 - DNA, 25 bp, Homo sapien
tgcctgatgaagacgttggattccg

SEQ ID NO: 2047040 - DNA, 25 bp, Homo sapien
acgttggattccgtgattgattccc

SEQ ID NO: 2047041 - DNA, 25 bp, Homo sapien
ttcagatacagacaccgatatttga

SEQ ID NO: 2047042 - DNA, 25 bp, Homo sapien
acactttccactgaagaagttttag

SEQ ID NO: 2047043 - DNA, 25 bp, Homo sapien
cacactttccactgaagaagtttta

SEQ ID NO: 2047044 - DNA, 25 bp, Homo sapien
atacagacaccgatatttgaggttc

SEQ ID NO: 2047045 - DNA, 25 bp, Homo sapien
gagttgactatctgtatgatctgcc

SEQ ID NO: 2047046 - DNA, 25 bp, Homo sapien
taagtgatactaaagactcagtcat

SEQ ID NO: 2047047 - DNA, 25 bp, Homo sapien
gatctgccagcccattaagtgatac

SEQ ID NO: 2047048 - DNA, 25 bp, Homo sapien
gactatctgtatgatctgccagccc

SEQ ID NO: 2047049 - DNA, 25 bp, Homo sapien
caaaattggccctgtgaggatacag

SEQ ID NO: 2047050 - DNA, 25 bp, Homo sapien
ccatagaggaattcactttttggtc

SEQ ID NO: 2047051 - DNA, 25 bp, Homo sapien
agtcttcttggaccatagaggaatt

SEQ ID NO: 2047052 - DNA, 25 bp, Homo sapien
tttgctgtcatgtagaggaaggaca

SEQ ID NO: 2047053 - DNA, 25 bp, Homo sapien
ttgctgtcatgtagaggaaggacat

SEQ ID NO: 2047054 - DNA, 25 bp, Homo sapien
gatgtccgtggacatgaatagccag

SEQ ID NO: 2047055 - DNA, 25 bp, Homo sapien
tacctgggagtagccagcaatgtgg

SEQ ID NO: 2047056 - DNA, 25 bp, Homo sapien
gggctgatgcctttgatcctgagga

SEQ ID NO: 2047057 - DNA, 25 bp, Homo sapien
tactaatgcacttgagaaagcggta

SEQ ID NO: 2047058 - DNA, 25 bp, Homo sapien
ttgcgcgaaagaaaaacctactctc

SEQ ID NO: 2047059 - DNA, 25 bp, Homo sapien
tgctcgttgaggctcgagttcagcc

SEQ ID NO: 2047060 - DNA, 25 bp, Homo sapien
accagttttgccgtagctgcttgga

SEQ ID NO: 2047061 - DNA, 25 bp, Homo sapien
cagtgtgtatgcagtttgcgcgaaa

SEQ ID NO: 2047062 - DNA, 25 bp, Homo sapien
tgcaatcggtgcaacgaggtcttct

SEQ ID NO: 2047063 - DNA, 25 bp, Homo sapien
caaatgtaaacacgacttctgctgg

SEQ ID NO: 2047064 - DNA, 25 bp, Homo sapien
tgttcgggtacaggagcctagagct

SEQ ID NO: 2047065 - DNA, 25 bp, Homo sapien
gaagagtcattactagctccagctg

SEQ ID NO: 2047066 - DNA, 25 bp, Homo sapien
gaacaatctggggacatggattgac

SEQ ID NO: 2047067 - DNA, 25 bp, Homo sapien
gagaagattcaggagagggtcatga

SEQ ID NO: 2047068 - DNA, 25 bp, Homo sapien
ggtcatgaacaatctggggacatgg

SEQ ID NO: 2047069 - DNA, 25 bp, Homo sapien
agagggtcatgaacaatctggggac

SEQ ID NO: 2047070 - DNA, 25 bp, Homo sapien
gatctgaattagttgaggcagccat

SEQ ID NO: 2047071 - DNA, 25 bp, Homo sapien
ctttccgttgggatctgaattagtt

SEQ ID NO: 2047072 - DNA, 25 bp, Homo sapien
tgggatctgaattagttgaggcagc

SEQ ID NO: 2047073 - DNA, 25 bp, Homo sapien
cgttgggatctgaattagttgaggc

SEQ ID NO: 2047074 - DNA, 25 bp, Homo sapien
tatctgttcctactttcttcccgaa

SEQ ID NO: 2047075 - DNA, 25 bp, Homo sapien
aatatctgttcctactttcttcccg

SEQ ID NO: 2047076 - DNA, 25 bp, Homo sapien
gcaatatctgttcctactttcttcc

SEQ ID NO: 2047077 - DNA, 25 bp, Homo sapien
atatctgttcctactttcttcccga

SEQ ID NO: 2047078 - DNA, 25 bp, Homo sapien
cttttagtgcccccaagattttcat

SEQ ID NO: 2047079 - DNA, 25 bp, Homo sapien
tttggaagcggacatatccataggg

SEQ ID NO: 2047080 - DNA, 25 bp, Homo sapien
acagccaaatggttagggtcctact

SEQ ID NO: 2047081 - DNA, 25 bp, Homo sapien
gaggcttctcccatcactatacagc

SEQ ID NO: 2047082 - DNA, 25 bp, Homo sapien
gatgtgtagagatgtctgaggcttc

SEQ ID NO: 2047083 - DNA, 25 bp, Homo sapien
aatttagacactaaaatatgctcaa

SEQ ID NO: 2047084 - DNA, 25 bp, Homo sapien
gcttttgaaaatagaccatcgctaa

SEQ ID NO: 2047085 - DNA, 25 bp, Homo sapien
gctgcattgatacttcccagatgct

SEQ ID NO: 2047086 - DNA, 25 bp, Homo sapien
atatggctgcattgatacttcccag

SEQ ID NO: 2047087 - DNA, 25 bp, Homo sapien
tgaaagttcaagttactccaggctg

SEQ ID NO: 2047088 - DNA, 25 bp, Homo sapien
tatcactctagacttattggagtag

SEQ ID NO: 2047089 - DNA, 25 bp, Homo sapien
aatcccactggagcatttatcactc

SEQ ID NO: 2047090 - DNA, 25 bp, Homo sapien
tagatacactttcagtttgatattc

SEQ ID NO: 2047091 - DNA, 25 bp, Homo sapien
tagctatcttcggatgagcagcaat

SEQ ID NO: 2047092 - DNA, 25 bp, Homo sapien
tctctgagcttatcagaaatcttgg

SEQ ID NO: 2047093 - DNA, 25 bp, Homo sapien
cagcaatctggtccaagccacagct

SEQ ID NO: 2047094 - DNA, 25 bp, Homo sapien
ggagtcattgccacgcatcataatt

SEQ ID NO: 2047095 - DNA, 25 bp, Homo sapien
aagacctgacactctactggcagca

SEQ ID NO: 2047096 - DNA, 25 bp, Homo sapien
caggtgtgatttccataaaactacc

SEQ ID NO: 2047097 - DNA, 25 bp, Homo sapien
aaagtatcctgcataccagacctgg

SEQ ID NO: 2047098 - DNA, 25 bp, Homo sapien
tcccagcctgacagtatctctgatg

SEQ ID NO: 2047099 - DNA, 25 bp, Homo sapien
tcattgtcccatcactaacatatcc

SEQ ID NO: 2047100 - DNA, 25 bp, Homo sapien
tcactaacatatcccatgattttca

SEQ ID NO: 2047101 - DNA, 25 bp, Homo sapien
gtcccatcactaacatatcccatga

SEQ ID NO: 2047102 - DNA, 25 bp, Homo sapien
tcacctcattgtcccatcactaaca

SEQ ID NO: 2047103 - DNA, 25 bp, Homo sapien
ggtcagaattcacagatgcctgcat

SEQ ID NO: 2047104 - DNA, 25 bp, Homo sapien
tcagctgatccagtgatatacagac

SEQ ID NO: 2047105 - DNA, 25 bp, Homo sapien
attcaatcatggattgatcagctga

SEQ ID NO: 2047106 - DNA, 25 bp, Homo sapien
tatacagactacagcttgctcttgc

SEQ ID NO: 2047107 - DNA, 25 bp, Homo sapien
caatcatggattgatcagctgatcc

SEQ ID NO: 2047108 - DNA, 25 bp, Homo sapien
gaaccacttgcttgtgtgctgccat

SEQ ID NO: 2047109 - DNA, 25 bp, Homo sapien
gcatctgggatagttggaaccactt

SEQ ID NO: 2047110 - DNA, 25 bp, Homo sapien
tgagaggtagacaggagtcttgatc

SEQ ID NO: 2047111 - DNA, 25 bp, Homo sapien
tcctctccagcaaagtataaataat

SEQ ID NO: 2047112 - DNA, 25 bp, Homo sapien
gagtggtcactgtgaggtggttttg

SEQ ID NO: 2047113 - DNA, 25 bp, Homo sapien
tgagtggtcactgtgaggtggtttt

SEQ ID NO: 2047114 - DNA, 25 bp, Homo sapien
aattccacacctgagtggtcactgt

SEQ ID NO: 2047115 - DNA, 25 bp, Homo sapien
tattgtgctatttcgatttttacgc

SEQ ID NO: 2047116 - DNA, 25 bp, Homo sapien
gctgcccttgtccatagtgaactcc

SEQ ID NO: 2047117 - DNA, 25 bp, Homo sapien
tccgggaagattttgtgtagcacct

SEQ ID NO: 2047118 - DNA, 25 bp, Homo sapien
acattcagggccatctccgggaaga

SEQ ID NO: 2047119 - DNA, 25 bp, Homo sapien
tttttccagatgacaagctgccagt

SEQ ID NO: 2047120 - DNA, 25 bp, Homo sapien
acatgatcagctcacagtagttgat

SEQ ID NO: 2047121 - DNA, 25 bp, Homo sapien
catttactttatgcacacctttgta

SEQ ID NO: 2047122 - DNA, 25 bp, Homo sapien
tttgcagaaccaaagaacatcattt

SEQ ID NO: 2047123 - DNA, 25 bp, Homo sapien
ctccccactcgtggacttaacagat

SEQ ID NO: 2047124 - DNA, 25 bp, Homo sapien
gatgttatcatgatcataagaatca

SEQ ID NO: 2047125 - DNA, 25 bp, Homo sapien
tccccactcgtggacttaacagatg

SEQ ID NO: 2047126 - DNA, 25 bp, Homo sapien
cttaacagatgttatcatgatcata

SEQ ID NO: 2047127 - DNA, 25 bp, Homo sapien
ccataagaaaggtctgtttatacac

SEQ ID NO: 2047128 - DNA, 25 bp, Homo sapien
attccataagaaaggtctgtttata

SEQ ID NO: 2047129 - DNA, 25 bp, Homo sapien
tccataagaaaggtctgtttataca

SEQ ID NO: 2047130 - DNA, 25 bp, Homo sapien
ataagaaaggtctgtttatacacat

SEQ ID NO: 2047131 - DNA, 25 bp, Homo sapien
tcactacaagtttactggaatgttc

SEQ ID NO: 2047132 - DNA, 25 bp, Homo sapien
tgatattccttcactacaagtttac

SEQ ID NO: 2047133 - DNA, 25 bp, Homo sapien
atgccttgatattccttcactacaa

SEQ ID NO: 2047134 - DNA, 25 bp, Homo sapien
tattccttcactacaagtttactgg

SEQ ID NO: 2047135 - DNA, 25 bp, Homo sapien
ctttctgaatgatgtgcaagtgcta

SEQ ID NO: 2047136 - DNA, 25 bp, Homo sapien
actgataaatggtcctcacgtcttt

SEQ ID NO: 2047137 - DNA, 25 bp, Homo sapien
ggtatcaacttcctgccgttggcac

SEQ ID NO: 2047138 - DNA, 25 bp, Homo sapien
gctaaatgacacttgatctatggta

SEQ ID NO: 2047139 - DNA, 25 bp, Homo sapien
aaacacctaaacattcgtgggctga

SEQ ID NO: 2047140 - DNA, 25 bp, Homo sapien
cacctaaacattcgtgggctgaatt

SEQ ID NO: 2047141 - DNA, 25 bp, Homo sapien
cagcaggaacgacacaaacacctaa

SEQ ID NO: 2047142 - DNA, 25 bp, Homo sapien
tacaatatgagagcttctgatacca

SEQ ID NO: 2047143 - DNA, 25 bp, Homo sapien
gtctaaacaaaaacgcctgtcaatg

SEQ ID NO: 2047144 - DNA, 25 bp, Homo sapien
gagtcgtttacacaaacgagacaga

SEQ ID NO: 2047145 - DNA, 25 bp, Homo sapien
gggcctaaggctcaagataattata

SEQ ID NO: 2047146 - DNA, 25 bp, Homo sapien
ttcacgcatattgtggtctcagtgc

SEQ ID NO: 2047147 - DNA, 25 bp, Homo sapien
gattatgctatcaagttcctgtaac

SEQ ID NO: 2047148 - DNA, 25 bp, Homo sapien
caaatgcctcgagttaaattgacga

SEQ ID NO: 2047149 - DNA, 25 bp, Homo sapien
taagtgacatcttgtctagcatgga

SEQ ID NO: 2047150 - DNA, 25 bp, Homo sapien
ttgacaagtacctcacatcacattg

SEQ ID NO: 2047151 - DNA, 25 bp, Homo sapien
tcatttatttttgccaatccgatat

SEQ ID NO: 2047152 - DNA, 25 bp, Homo sapien
atttatttttgccaatccgatatct

SEQ ID NO: 2047153 - DNA, 25 bp, Homo sapien
catttatttttgccaatccgatatc

SEQ ID NO: 2047154 - DNA, 25 bp, Homo sapien
ggcagaggtaaatcacccacatctc

SEQ ID NO: 2047155 - DNA, 25 bp, Homo sapien
tggcagaggtaaatcacccacatct

SEQ ID NO: 2047156 - DNA, 25 bp, Homo sapien
gcagaggtaaatcacccacatctct

SEQ ID NO: 2047157 - DNA, 25 bp, Homo sapien
atggcagaggtaaatcacccacatc

SEQ ID NO: 2047158 - DNA, 25 bp, Homo sapien
tgctcgatgctcagcattgaagccc

SEQ ID NO: 2047159 - DNA, 25 bp, Homo sapien
tcagcattgaagccctttaccccag

SEQ ID NO: 2047160 - DNA, 25 bp, Homo sapien
ttatgctcgatgctcagcattgaag

SEQ ID NO: 2047161 - DNA, 25 bp, Homo sapien
tatgctcgatgctcagcattgaagc

SEQ ID NO: 2047162 - DNA, 25 bp, Homo sapien
ggaacacattcatgtcatgctcatc

SEQ ID NO: 2047163 - DNA, 25 bp, Homo sapien
gggaacacattcatgtcatgctcat

SEQ ID NO: 2047164 - DNA, 25 bp, Homo sapien
gaacacattcatgtcatgctcatct

SEQ ID NO: 2047165 - DNA, 25 bp, Homo sapien
ctgtcctgtgttgctgggacacagg

SEQ ID NO: 2047166 - DNA, 25 bp, Homo sapien
cctctgtcctgtgttgctgggacac

SEQ ID NO: 2047167 - DNA, 25 bp, Homo sapien
ctcctacctctgtcctgtgttgctg

SEQ ID NO: 2047168 - DNA, 25 bp, Homo sapien
acacaggggcaggaaatggatgcat

SEQ ID NO: 2047169 - DNA, 25 bp, Homo sapien
catttactgactgattaggtgaagg

SEQ ID NO: 2047170 - DNA, 25 bp, Homo sapien
taggtgaagggacagatataatctc

SEQ ID NO: 2047171 - DNA, 25 bp, Homo sapien
gaagggacagatataatctctctat

SEQ ID NO: 2047172 - DNA, 25 bp, Homo sapien
ctctctatgcctgatggacgcaatc

SEQ ID NO: 2047173 - DNA, 25 bp, Homo sapien
ttcttctatagtaacataagcttgt

SEQ ID NO: 2047174 - DNA, 25 bp, Homo sapien
tcattcttctatagtaacataagct

SEQ ID NO: 2047175 - DNA, 25 bp, Homo sapien
cttctatagtaacataagcttgttt

SEQ ID NO: 2047176 - DNA, 25 bp, Homo sapien
cattcttctatagtaacataagctt

SEQ ID NO: 2047177 - DNA, 25 bp, Homo sapien
tcgctgtcttttctatccagaagcc

SEQ ID NO: 2047178 - DNA, 25 bp, Homo sapien
tggaaatctcttcttttagcttttg

SEQ ID NO: 2047179 - DNA, 25 bp, Homo sapien
ggaaatctcttcttttagcttttgc

SEQ ID NO: 2047180 - DNA, 25 bp, Homo sapien
gaaatctcttcttttagcttttgca

SEQ ID NO: 2047181 - DNA, 25 bp, Homo sapien
tctggttcatcaatctgttgttgta

SEQ ID NO: 2047182 - DNA, 25 bp, Homo sapien
ggtgtctaaagaagtgattgtccct

SEQ ID NO: 2047183 - DNA, 25 bp, Homo sapien
tatctatatggggagatatagccat

SEQ ID NO: 2047184 - DNA, 25 bp, Homo sapien
tactactatattctaaacatagctc

SEQ ID NO: 2047185 - DNA, 25 bp, Homo sapien
caagctctcacactgcaggttgtac

SEQ ID NO: 2047186 - DNA, 25 bp, Homo sapien
tgctatcttcttagcaaacttagcc

SEQ ID NO: 2047187 - DNA, 25 bp, Homo sapien
ttcttagcaaacttagccatcctcc

SEQ ID NO: 2047188 - DNA, 25 bp, Homo sapien
aagctctcacactgcaggttgtaca

SEQ ID NO: 2047189 - DNA, 25 bp, Homo sapien
acttttatgccttaactgttctgcc

SEQ ID NO: 2047190 - DNA, 25 bp, Homo sapien
ttctacttttatgccttaactgttc

SEQ ID NO: 2047191 - DNA, 25 bp, Homo sapien
cttttatgccttaactgttctgcct

SEQ ID NO: 2047192 - DNA, 25 bp, Homo sapien
ctacttttatgccttaactgttctg

SEQ ID NO: 2047193 - DNA, 25 bp, Homo sapien
ttctgcctcttcaacttcccttttc

SEQ ID NO: 2047194 - DNA, 25 bp, Homo sapien
tcaacttcccttttctcttcggtca

SEQ ID NO: 2047195 - DNA, 25 bp, Homo sapien
caacttcccttttctcttcggtcat

SEQ ID NO: 2047196 - DNA, 25 bp, Homo sapien
tgcctcttcaacttcccttttctct

SEQ ID NO: 2047197 - DNA, 25 bp, Homo sapien
gatcaggatagaaggcctagaaaca

SEQ ID NO: 2047198 - DNA, 25 bp, Homo sapien
gaaagaagactcatgcctaggactg

SEQ ID NO: 2047199 - DNA, 25 bp, Homo sapien
ttcgcagaagctggcaaaaacttat

SEQ ID NO: 2047200 - DNA, 25 bp, Homo sapien
gagaggacataacgatcaatatcag

SEQ ID NO: 2047201 - DNA, 25 bp, Homo sapien
ccttttgtgtggttctgcgtgaacg

SEQ ID NO: 2047202 - DNA, 25 bp, Homo sapien
tgtcagacaaattgactctgtgtag

SEQ ID NO: 2047203 - DNA, 25 bp, Homo sapien
tgcgtgaacggtcagtccacagtgg

SEQ ID NO: 2047204 - DNA, 25 bp, Homo sapien
tgctctgctggatgagttaattgcc

SEQ ID NO: 2047205 - DNA, 25 bp, Homo sapien
tggcccccactactttacaataaca

SEQ ID NO: 2047206 - DNA, 25 bp, Homo sapien
gagtcacaaagtctcttcattatgt

SEQ ID NO: 2047207 - DNA, 25 bp, Homo sapien
acagcaactctggcccccactactt

SEQ ID NO: 2047208 - DNA, 25 bp, Homo sapien
cagagtcacaaagtctcttcattat

SEQ ID NO: 2047209 - DNA, 25 bp, Homo sapien
tgaagttgcaacctcttgatgcccc

SEQ ID NO: 2047210 - DNA, 25 bp, Homo sapien
gaagttgcaacctcttgatgcccca

SEQ ID NO: 2047211 - DNA, 25 bp, Homo sapien
aagttgcaacctcttgatgccccat

SEQ ID NO: 2047212 - DNA, 25 bp, Homo sapien
ctgaagttgcaacctcttgatgccc

SEQ ID NO: 2047213 - DNA, 25 bp, Homo sapien
tgactttgcaggaaccagagacttt

SEQ ID NO: 2047214 - DNA, 25 bp, Homo sapien
tatcaagagggtgtacctgtctgca

SEQ ID NO: 2047215 - DNA, 25 bp, Homo sapien
tgatttcactgggactgcatggcca

SEQ ID NO: 2047216 - DNA, 25 bp, Homo sapien
cagggctttttctataatcgggcaa

SEQ ID NO: 2047217 - DNA, 25 bp, Homo sapien
gctctgcaagtaacataactacctg

SEQ ID NO: 2047218 - DNA, 25 bp, Homo sapien
acccgggctgaagcataagtagcat

SEQ ID NO: 2047219 - DNA, 25 bp, Homo sapien
tcctttaattagactggcccactca

SEQ ID NO: 2047220 - DNA, 25 bp, Homo sapien
ggcccactcagctattctaggataa

SEQ ID NO: 2047221 - DNA, 25 bp, Homo sapien
gggagaaagaatcaagcaattgtcc

SEQ ID NO: 2047222 - DNA, 25 bp, Homo sapien
gagcctaaacttgcaactcaggaaa

SEQ ID NO: 2047223 - DNA, 25 bp, Homo sapien
gaactgtttacagccaagagcctaa

SEQ ID NO: 2047224 - DNA, 25 bp, Homo sapien
cagtgcttagaaggaagtctgtgtc

SEQ ID NO: 2047225 - DNA, 25 bp, Homo sapien
taatttaaggaagtgaaacaacaga

SEQ ID NO: 2047226 - DNA, 25 bp, Homo sapien
tatatgtatcaggaaggccctgttt

SEQ ID NO: 2047227 - DNA, 25 bp, Homo sapien
tgtagctgatcccatgaaattttgt

SEQ ID NO: 2047228 - DNA, 25 bp, Homo sapien
catagaactatgtgcaaaagataat

SEQ ID NO: 2047229 - DNA, 25 bp, Homo sapien
gggccatcgcatctcatcagtagtg

SEQ ID NO: 2047230 - DNA, 25 bp, Homo sapien
gaatcacttttctggtagctcagga

SEQ ID NO: 2047231 - DNA, 25 bp, Homo sapien
tgtcttcatactaccagcagggcca

SEQ ID NO: 2047232 - DNA, 25 bp, Homo sapien
gagggacaagtgttacagtaatact

SEQ ID NO: 2047233 - DNA, 25 bp, Homo sapien
gcaggtactgaatttactttaagac

SEQ ID NO: 2047234 - DNA, 25 bp, Homo sapien
ctatttacccatggtaatggttggg

SEQ ID NO: 2047235 - DNA, 25 bp, Homo sapien
aatggttggggtcgctgtatgtaaa

SEQ ID NO: 2047236 - DNA, 25 bp, Homo sapien
ggtaatgctcttgtgcatggtcttc

SEQ ID NO: 2047237 - DNA, 25 bp, Homo sapien
tgaacacctgttatctagggagaat

SEQ ID NO: 2047238 - DNA, 25 bp, Homo sapien
cttctgaacacctgttatctaggga

SEQ ID NO: 2047239 - DNA, 25 bp, Homo sapien
cacctgttatctagggagaatttgt

SEQ ID NO: 2047240 - DNA, 25 bp, Homo sapien
tctgaacacctgttatctagggaga

SEQ ID NO: 2047241 - DNA, 25 bp, Homo sapien
gagaaaaatgtcctgcgcctttttg

SEQ ID NO: 2047242 - DNA, 25 bp, Homo sapien
gattggcaacaatgatgccagtcat

SEQ ID NO: 2047243 - DNA, 25 bp, Homo sapien
tgtaagtttttctagagtcaatatg

SEQ ID NO: 2047244 - DNA, 25 bp, Homo sapien
aatgtcctgcgcctttttgtaagtt

SEQ ID NO: 2047245 - DNA, 25 bp, Homo sapien
catagctatggaataaccttctgca

SEQ ID NO: 2047246 - DNA, 25 bp, Homo sapien
cagcccgaggtacaattttattttg

SEQ ID NO: 2047247 - DNA, 25 bp, Homo sapien
tctgcatctctaggttcagaaggtg

SEQ ID NO: 2047248 - DNA, 25 bp, Homo sapien
ggtgtttcattagtcagcccgaggt

SEQ ID NO: 2047249 - DNA, 25 bp, Homo sapien
gctgatcaaacttgtatgtaatagc

SEQ ID NO: 2047250 - DNA, 25 bp, Homo sapien
aaaagctgatcaaacttgtatgtaa

SEQ ID NO: 2047251 - DNA, 25 bp, Homo sapien
agctgatcaaacttgtatgtaatag

SEQ ID NO: 2047252 - DNA, 25 bp, Homo sapien
gatcaaacttgtatgtaatagctat

SEQ ID NO: 2047253 - DNA, 25 bp, Homo sapien
gcctgaaatccattttatcgtcatt

SEQ ID NO: 2047254 - DNA, 25 bp, Homo sapien
tttctatatcttcctgaattctcat

SEQ ID NO: 2047255 - DNA, 25 bp, Homo sapien
acagcctgaaatccattttatcgtc

SEQ ID NO: 2047256 - DNA, 25 bp, Homo sapien
tttttctatatcttcctgaattctc

SEQ ID NO: 2047257 - DNA, 25 bp, Homo sapien
ctgttttcgacattaatcacttgat

SEQ ID NO: 2047258 - DNA, 25 bp, Homo sapien
gacattaatcacttgatccagcttc

SEQ ID NO: 2047259 - DNA, 25 bp, Homo sapien
gttttcgacattaatcacttgatcc

SEQ ID NO: 2047260 - DNA, 25 bp, Homo sapien
tcgacattaatcacttgatccagct

SEQ ID NO: 2047261 - DNA, 25 bp, Homo sapien
tagggggctgttgtgctgaactgcc

SEQ ID NO: 2047262 - DNA, 25 bp, Homo sapien
gggggctgttgtgctgaactgccat

SEQ ID NO: 2047263 - DNA, 25 bp, Homo sapien
tgcttagggggctgttgtgctgaac

SEQ ID NO: 2047264 - DNA, 25 bp, Homo sapien
ttagggggctgttgtgctgaactgc

SEQ ID NO: 2047265 - DNA, 25 bp, Homo sapien
tatcggtactgtatattgacatatt

SEQ ID NO: 2047266 - DNA, 25 bp, Homo sapien
ttactgtggctgatatttgattgaa

SEQ ID NO: 2047267 - DNA, 25 bp, Homo sapien
tttttatcagtagagaatgttactg

SEQ ID NO: 2047268 - DNA, 25 bp, Homo sapien
gagaatgttactgtggctgatattt

SEQ ID NO: 2047269 - DNA, 25 bp, Homo sapien
tcttgggggcatgctcctctatttc

SEQ ID NO: 2047270 - DNA, 25 bp, Homo sapien
agccacggcctgtacttgctcagac

SEQ ID NO: 2047271 - DNA, 25 bp, Homo sapien
aaatggaaaagtggagcagccacgg

SEQ ID NO: 2047272 - DNA, 25 bp, Homo sapien
gccaataaattcattcttgggggca

SEQ ID NO: 2047273 - DNA, 25 bp, Homo sapien
tggatgcaggagctagggccactcc

SEQ ID NO: 2047274 - DNA, 25 bp, Homo sapien
tgcaggagctagggccactcctcac

SEQ ID NO: 2047275 - DNA, 25 bp, Homo sapien
gatgcaggagctagggccactcctc

SEQ ID NO: 2047276 - DNA, 25 bp, Homo sapien
ggatgcaggagctagggccactcct

SEQ ID NO: 2047277 - DNA, 25 bp, Homo sapien
catgcacccactccttagacactgg

SEQ ID NO: 2047278 - DNA, 25 bp, Homo sapien
tgcacccactccttagacactggag

SEQ ID NO: 2047279 - DNA, 25 bp, Homo sapien
atgtacaagatctgagtcttgcatc

SEQ ID NO: 2047280 - DNA, 25 bp, Homo sapien
acccactccttagacactggagcca

SEQ ID NO: 2047281 - DNA, 25 bp, Homo sapien
ccccagtgtcaatgtagctctgcat

SEQ ID NO: 2047282 - DNA, 25 bp, Homo sapien
ctgaccccagtgtcaatgtagctct

SEQ ID NO: 2047283 - DNA, 25 bp, Homo sapien
gaccccagtgtcaatgtagctctgc

SEQ ID NO: 2047284 - DNA, 25 bp, Homo sapien
tcctgaccccagtgtcaatgtagct

SEQ ID NO: 2047285 - DNA, 25 bp, Homo sapien
tgcccactctttggaccctggctcc

SEQ ID NO: 2047286 - DNA, 25 bp, Homo sapien
gtgcccactctttggaccctggctc

SEQ ID NO: 2047287 - DNA, 25 bp, Homo sapien
tggctccctggctgttccacaagca

SEQ ID NO: 2047288 - DNA, 25 bp, Homo sapien
gaccctggctccctggctgttccac

SEQ ID NO: 2047289 - DNA, 25 bp, Homo sapien
catagatgaaggctattggagctcc

SEQ ID NO: 2047290 - DNA, 25 bp, Homo sapien
ggagctcctgttaacccatttgtta

SEQ ID NO: 2047291 - DNA, 25 bp, Homo sapien
gagtagatttatgcctgcttcatca

SEQ ID NO: 2047292 - DNA, 25 bp, Homo sapien
aagggtttacccgatctctgtccag

SEQ ID NO: 2047293 - DNA, 25 bp, Homo sapien
tgtttcaggatcttttctggtaccc

SEQ ID NO: 2047294 - DNA, 25 bp, Homo sapien
tttcaggatcttttctggtacccat

SEQ ID NO: 2047295 - DNA, 25 bp, Homo sapien
gtttcaggatcttttctggtaccca

SEQ ID NO: 2047296 - DNA, 25 bp, Homo sapien
ctgtttcaggatcttttctggtacc

SEQ ID NO: 2047297 - DNA, 25 bp, Homo sapien
ttttgtagaacaggattagaagttc

SEQ ID NO: 2047298 - DNA, 25 bp, Homo sapien
tctgcgagtgcattatctcctccga

SEQ ID NO: 2047299 - DNA, 25 bp, Homo sapien
tatgtctcaaatatgttctccgtgg

SEQ ID NO: 2047300 - DNA, 25 bp, Homo sapien
tctcctccgattttcatatatgtct

SEQ ID NO: 2047301 - DNA, 25 bp, Homo sapien
caagcagcatctttgagatatacag

SEQ ID NO: 2047302 - DNA, 25 bp, Homo sapien
tcaagcagcatctttgagatataca

SEQ ID NO: 2047303 - DNA, 25 bp, Homo sapien
gccccgtctggccagattatatgtt

SEQ ID NO: 2047304 - DNA, 25 bp, Homo sapien
ctataggaatatgagaataggcccc

SEQ ID NO: 2047305 - DNA, 25 bp, Homo sapien
cacaaaggcccctacagcttgaaaa

SEQ ID NO: 2047306 - DNA, 25 bp, Homo sapien
tagcagagttaattgcctacaacat

SEQ ID NO: 2047307 - DNA, 25 bp, Homo sapien
gcttacatcctatgactcactaagg

SEQ ID NO: 2047308 - DNA, 25 bp, Homo sapien
ctaaataatgacgtctgaagtactt

SEQ ID NO: 2047309 - DNA, 25 bp, Homo sapien
aaatattccatatgcagttggcatc

SEQ ID NO: 2047310 - DNA, 25 bp, Homo sapien
caataccatagtgtgcagggattta

SEQ ID NO: 2047311 - DNA, 25 bp, Homo sapien
aacatgagactccaaggaattgcac

SEQ ID NO: 2047312 - DNA, 25 bp, Homo sapien
tcaacatgagactccaaggaattgc

SEQ ID NO: 2047313 - DNA, 25 bp, Homo sapien
ttcaacatgagactccaaggaattg

SEQ ID NO: 2047314 - DNA, 25 bp, Homo sapien
caacatgagactccaaggaattgca

SEQ ID NO: 2047315 - DNA, 25 bp, Homo sapien
ggtggaagagtcaagagtgatcttt

SEQ ID NO: 2047316 - DNA, 25 bp, Homo sapien
tggggatagtgctgtatctttttgc

SEQ ID NO: 2047317 - DNA, 25 bp, Homo sapien
agtatagatcaaacagagtccactg

SEQ ID NO: 2047318 - DNA, 25 bp, Homo sapien
gctggtactcagtatagatcaaaca

SEQ ID NO: 2047319 - DNA, 25 bp, Homo sapien
tactcagtatagatcaaacagagtc

SEQ ID NO: 2047320 - DNA, 25 bp, Homo sapien
tccaactggtgtgggcatgactcat

SEQ ID NO: 2047321 - DNA, 25 bp, Homo sapien
ctttgacttggaatagcaccctaga

SEQ ID NO: 2047322 - DNA, 25 bp, Homo sapien
cagtgtgtccatgccatatgtacta

SEQ ID NO: 2047323 - DNA, 25 bp, Homo sapien
cagtatccagtattgcagtgcttgt

SEQ ID NO: 2047324 - DNA, 25 bp, Homo sapien
gaaaaagccctaggcctgacactaa

SEQ ID NO: 2047325 - DNA, 25 bp, Homo sapien
cactgctgaaacaagtgattgctta

SEQ ID NO: 2047326 - DNA, 25 bp, Homo sapien
tatttggcagcacaaactgtttggc

SEQ ID NO: 2047327 - DNA, 25 bp, Homo sapien
ttctagcaggagagtctgacccatg

SEQ ID NO: 2047328 - DNA, 25 bp, Homo sapien
gatataccagagcttgacgttcagt

SEQ ID NO: 2047329 - DNA, 25 bp, Homo sapien
gttgatataccagagcttgacgttc

SEQ ID NO: 2047330 - DNA, 25 bp, Homo sapien
attcaagttgatataccagagcttg

SEQ ID NO: 2047331 - DNA, 25 bp, Homo sapien
ccagagcttgacgttcagtaaaaaa

SEQ ID NO: 2047332 - DNA, 25 bp, Homo sapien
tgtcaatgctctgttccaagtaatc

SEQ ID NO: 2047333 - DNA, 25 bp, Homo sapien
ccaagtaatcaatattccaagccat

SEQ ID NO: 2047334 - DNA, 25 bp, Homo sapien
gctctgttccaagtaatcaatattc

SEQ ID NO: 2047335 - DNA, 25 bp, Homo sapien
gttccaagtaatcaatattccaagc

SEQ ID NO: 2047336 - DNA, 25 bp, Homo sapien
aagttgcctcgttctcctaatgtga

SEQ ID NO: 2047337 - DNA, 25 bp, Homo sapien
caaacattgttctatcattgttcca

SEQ ID NO: 2047338 - DNA, 25 bp, Homo sapien
caatcaggaaatgggatgactacat

SEQ ID NO: 2047339 - DNA, 25 bp, Homo sapien
aagttggttcactaagctaaactga

SEQ ID NO: 2047340 - DNA, 25 bp, Homo sapien
gagtccggttttgcctttatgacac

SEQ ID NO: 2047341 - DNA, 25 bp, Homo sapien
tattcaaatcctcacaggagtccgg

SEQ ID NO: 2047342 - DNA, 25 bp, Homo sapien
caggatatcccctactattcaaatc

SEQ ID NO: 2047343 - DNA, 25 bp, Homo sapien
ctgtgcttgattgtaattgttcgta

SEQ ID NO: 2047344 - DNA, 25 bp, Homo sapien
ttatacgaccacatctaaaaagatt

SEQ ID NO: 2047345 - DNA, 25 bp, Homo sapien
caggtttgcggaattctacccattt

SEQ ID NO: 2047346 - DNA, 25 bp, Homo sapien
tacgaccacatctaaaaagattttc

SEQ ID NO: 2047347 - DNA, 25 bp, Homo sapien
tcagctgcaggtttgcggaattcta

SEQ ID NO: 2047348 - DNA, 25 bp, Homo sapien
gcaggaggaatttccccctctacat

SEQ ID NO: 2047349 - DNA, 25 bp, Homo sapien
tcagatcggatttattctcagcaca

SEQ ID NO: 2047350 - DNA, 25 bp, Homo sapien
tctttaccttcagtccagaaaactc

SEQ ID NO: 2047351 - DNA, 25 bp, Homo sapien
tacgctgtctggttctgttaaatca

SEQ ID NO: 2047352 - DNA, 25 bp, Homo sapien
aagatttcgcacctttgttatattc

SEQ ID NO: 2047353 - DNA, 25 bp, Homo sapien
tgcaaaagatttcgcacctttgtta

SEQ ID NO: 2047354 - DNA, 25 bp, Homo sapien
caaaagatttcgcacctttgttata

SEQ ID NO: 2047355 - DNA, 25 bp, Homo sapien
gctgcaaaagatttcgcacctttgt

SEQ ID NO: 2047356 - DNA, 25 bp, Homo sapien
cactatacaaagcactggagggtca

SEQ ID NO: 2047357 - DNA, 25 bp, Homo sapien
cagaggccccacttataaataccgt

SEQ ID NO: 2047358 - DNA, 25 bp, Homo sapien
tatagtcacctaagaactgctgcta

SEQ ID NO: 2047359 - DNA, 25 bp, Homo sapien
tcttattgacgtgaaaatgtctcct

SEQ ID NO: 2047360 - DNA, 25 bp, Homo sapien
ctaggtacgagttaggccatcggct

SEQ ID NO: 2047361 - DNA, 25 bp, Homo sapien
ggtaggacccagtgtagctttcttc

SEQ ID NO: 2047362 - DNA, 25 bp, Homo sapien
taggccatcggctgtttgggctcca

SEQ ID NO: 2047363 - DNA, 25 bp, Homo sapien
gctccagaggtaggacccagtgtag

SEQ ID NO: 2047364 - DNA, 25 bp, Homo sapien
cgtgtttgctagagtcagaagaaaa

SEQ ID NO: 2047365 - DNA, 25 bp, Homo sapien
aggctgcgtgtttgctagagtcaga

SEQ ID NO: 2047366 - DNA, 25 bp, Homo sapien
gtttgctagagtcagaagaaaatat

SEQ ID NO: 2047367 - DNA, 25 bp, Homo sapien
gctgcgtgtttgctagagtcagaag

SEQ ID NO: 2047368 - DNA, 25 bp, Homo sapien
tagcttccaggctccagccagccat

SEQ ID NO: 2047369 - DNA, 25 bp, Homo sapien
ctagcttccaggctccagccagcca

SEQ ID NO: 2047370 - DNA, 25 bp, Homo sapien
ttgactagcttccaggctccagcca

SEQ ID NO: 2047371 - DNA, 25 bp, Homo sapien
gactagcttccaggctccagccagc

SEQ ID NO: 2047372 - DNA, 25 bp, Homo sapien
tcaggtgaaaggacaggatcaacca

SEQ ID NO: 2047373 - DNA, 25 bp, Homo sapien
agatcaggtgaaaggacaggatcaa

SEQ ID NO: 2047374 - DNA, 25 bp, Homo sapien
caggtgaaaggacaggatcaaccat

SEQ ID NO: 2047375 - DNA, 25 bp, Homo sapien
atcaggtgaaaggacaggatcaacc

SEQ ID NO: 2047376 - DNA, 25 bp, Homo sapien
tgcattgtgttctctgtaacaacag

SEQ ID NO: 2047377 - DNA, 25 bp, Homo sapien
ccttccacaaccttaaccttcaatg

SEQ ID NO: 2047378 - DNA, 25 bp, Homo sapien
aaccttcaaaatcattcctttgcat

SEQ ID NO: 2047379 - DNA, 25 bp, Homo sapien
aaccttcaatgctctcgaaccttca

SEQ ID NO: 2047380 - DNA, 25 bp, Homo sapien
cacagatgtgaggactctgattgac

SEQ ID NO: 2047381 - DNA, 25 bp, Homo sapien
tgattgacagatgactcttcttgta

SEQ ID NO: 2047382 - DNA, 25 bp, Homo sapien
acggcgatcgtcaacagcttcacag

SEQ ID NO: 2047383 - DNA, 25 bp, Homo sapien
cttcttgtattgacagtgacttcat

SEQ ID NO: 2047384 - DNA, 25 bp, Homo sapien
taatagagaccaatgtaaaaagttg

SEQ ID NO: 2047385 - DNA, 25 bp, Homo sapien
tctgaaataaaggtactcatatggc

SEQ ID NO: 2047386 - DNA, 25 bp, Homo sapien
cctctttattgtcaagtcttgtgaa

SEQ ID NO: 2047387 - DNA, 25 bp, Homo sapien
taaaggtactcatatggctacaaat

SEQ ID NO: 2047388 - DNA, 25 bp, Homo sapien
agcttgcaagtaggaatagtgcaca

SEQ ID NO: 2047389 - DNA, 25 bp, Homo sapien
aaggataatcgaaggcatagcttgc

SEQ ID NO: 2047390 - DNA, 25 bp, Homo sapien
cacaataacccatagggtttatcac

SEQ ID NO: 2047391 - DNA, 25 bp, Homo sapien
tatcactaacaaatccttgttgaag

SEQ ID NO: 2047392 - DNA, 25 bp, Homo sapien
acctccttcagattcagctccaggg

SEQ ID NO: 2047393 - DNA, 25 bp, Homo sapien
tccttcagattcagctccagggcca

SEQ ID NO: 2047394 - DNA, 25 bp, Homo sapien
ctacctccttcagattcagctccag

SEQ ID NO: 2047395 - DNA, 25 bp, Homo sapien
ttttcatctacctccttcagattca

SEQ ID NO: 2047396 - DNA, 25 bp, Homo sapien
tcatcttttagcgtgtcctttgaga

SEQ ID NO: 2047397 - DNA, 25 bp, Homo sapien
tagcgtgtcctttgagaggtaatat

SEQ ID NO: 2047398 - DNA, 25 bp, Homo sapien
taatcatcttttagcgtgtcctttg

SEQ ID NO: 2047399 - DNA, 25 bp, Homo sapien
tcttttagcgtgtcctttgagaggt

SEQ ID NO: 2047400 - DNA, 25 bp, Homo sapien
tggctacacgggtaataaggctggt

SEQ ID NO: 2047401 - DNA, 25 bp, Homo sapien
tgtactagctttgtgaacctgaggg

SEQ ID NO: 2047402 - DNA, 25 bp, Homo sapien
catagggataaggatcaactggcta

SEQ ID NO: 2047403 - DNA, 25 bp, Homo sapien
gctaagtctacattgagtggcggca

SEQ ID NO: 2047404 - DNA, 25 bp, Homo sapien
tcacactgagacctgataattcaat

SEQ ID NO: 2047405 - DNA, 25 bp, Homo sapien
attcaatattaaagcaggatctctg

SEQ ID NO: 2047406 - DNA, 25 bp, Homo sapien
cttgtctctgaaggtgaattgttac

SEQ ID NO: 2047407 - DNA, 25 bp, Homo sapien
caggaaaacatagtcgccatagaac

SEQ ID NO: 2047408 - DNA, 25 bp, Homo sapien
gattaatatccaccttgctaagcca

SEQ ID NO: 2047409 - DNA, 25 bp, Homo sapien
tgaacttagtgaagaacgtgtcctc

SEQ ID NO: 2047410 - DNA, 25 bp, Homo sapien
cagatcccagagagtatgatgccct

SEQ ID NO: 2047411 - DNA, 25 bp, Homo sapien
gaaagagtagttagtcagatcccag

SEQ ID NO: 2047412 - DNA, 25 bp, Homo sapien
ttcagatagtgttggtgctctaccc

SEQ ID NO: 2047413 - DNA, 25 bp, Homo sapien
ccacttttgttgacgtttcagatag

SEQ ID NO: 2047414 - DNA, 25 bp, Homo sapien
tgctctacccggagagcctcgaata

SEQ ID NO: 2047415 - DNA, 25 bp, Homo sapien
ggagagcctcgaatatcttttttcc

SEQ ID NO: 2047416 - DNA, 25 bp, Homo sapien
tatcctggacgtgcatattgaccag

SEQ ID NO: 2047417 - DNA, 25 bp, Homo sapien
ctatcctggacgtgcatattgacca

SEQ ID NO: 2047418 - DNA, 25 bp, Homo sapien
ttttggcatgtgttataacttggca

SEQ ID NO: 2047419 - DNA, 25 bp, Homo sapien
catgtgcgttttggcatgtgttata

SEQ ID NO: 2047420 - DNA, 25 bp, Homo sapien
ccatttggggatgtgtacttttttg

SEQ ID NO: 2047421 - DNA, 25 bp, Homo sapien
ttcttcacatgtgcgttttggcatg

SEQ ID NO: 2047422 - DNA, 25 bp, Homo sapien
ctgttgtctctgttataaaatcttt

SEQ ID NO: 2047423 - DNA, 25 bp, Homo sapien
aaatctttattgactctgattccgc

SEQ ID NO: 2047424 - DNA, 25 bp, Homo sapien
ctttattgactctgattccgctcct

SEQ ID NO: 2047425 - DNA, 25 bp, Homo sapien
taaaatctttattgactctgattcc

SEQ ID NO: 2047426 - DNA, 25 bp, Homo sapien
cagtatgtgttaggcaatcgattgc

SEQ ID NO: 2047427 - DNA, 25 bp, Homo sapien
cttgtagagtgcaataatttcacct

SEQ ID NO: 2047428 - DNA, 25 bp, Homo sapien
aatgtcctcgctggcttccaacctg

SEQ ID NO: 2047429 - DNA, 25 bp, Homo sapien
gcttccaacctgcaatgtagccata

SEQ ID NO: 2047430 - DNA, 25 bp, Homo sapien
ctccttcagggtttcagttctcgta

SEQ ID NO: 2047431 - DNA, 25 bp, Homo sapien
taaactggatgctttaacatctgcc

SEQ ID NO: 2047432 - DNA, 25 bp, Homo sapien
gagtcaccttggctcggtctcctgc

SEQ ID NO: 2047433 - DNA, 25 bp, Homo sapien
cacgcaggacatcccttgttgtgga

SEQ ID NO: 2047434 - DNA, 25 bp, Homo sapien
ctttatccttgagtacatcatttac

SEQ ID NO: 2047435 - DNA, 25 bp, Homo sapien
attgatgccactccaggtgaatttc

SEQ ID NO: 2047436 - DNA, 25 bp, Homo sapien
tgagtacatcatttacccgaaagta

SEQ ID NO: 2047437 - DNA, 25 bp, Homo sapien
tgatgccactccaggtgaatttctg

SEQ ID NO: 2047438 - DNA, 25 bp, Homo sapien
caaaaataatatttctccacttctt

SEQ ID NO: 2047439 - DNA, 25 bp, Homo sapien
tcctttatcctcttctctcttgatc

SEQ ID NO: 2047440 - DNA, 25 bp, Homo sapien
tatttctccacttcttcctttatcc

SEQ ID NO: 2047441 - DNA, 25 bp, Homo sapien
ttcctttatcctcttctctcttgat

SEQ ID NO: 2047442 - DNA, 25 bp, Homo sapien
ccagttcctgtcttaagtgatgaca

SEQ ID NO: 2047443 - DNA, 25 bp, Homo sapien
ggccagttcctgtcttaagtgatga

SEQ ID NO: 2047444 - DNA, 25 bp, Homo sapien
gccagttcctgtcttaagtgatgac

SEQ ID NO: 2047445 - DNA, 25 bp, Homo sapien
gcaggactttgttgtatcctgaaag

SEQ ID NO: 2047446 - DNA, 25 bp, Homo sapien
agcaggactttgttgtatcctgaaa

SEQ ID NO: 2047447 - DNA, 25 bp, Homo sapien
caggactttgttgtatcctgaaagc

SEQ ID NO: 2047448 - DNA, 25 bp, Homo sapien
gaggtccttccgagataatcaagta

SEQ ID NO: 2047449 - DNA, 25 bp, Homo sapien
cattggcaccttgcatgtaatagcc

SEQ ID NO: 2047450 - DNA, 25 bp, Homo sapien
aatagccactgctgcatgaagagtc

SEQ ID NO: 2047451 - DNA, 25 bp, Homo sapien
gaagagtccataaattcaattctct

SEQ ID NO: 2047452 - DNA, 25 bp, Homo sapien
aatattagtggcaatatcattagtg

SEQ ID NO: 2047453 - DNA, 25 bp, Homo sapien
tattagtggcaatatcattagtgat

SEQ ID NO: 2047454 - DNA, 25 bp, Homo sapien
aaatgataatattagtggcaatatc

SEQ ID NO: 2047455 - DNA, 25 bp, Homo sapien
gataatattagtggcaatatcatta

SEQ ID NO: 2047456 - DNA, 25 bp, Homo sapien
gattctgggtacctcctactcaggg

SEQ ID NO: 2047457 - DNA, 25 bp, Homo sapien
tcatctgctcaaataattgggtggg

SEQ ID NO: 2047458 - DNA, 25 bp, Homo sapien
cactctggataatctggcctgtgca

SEQ ID NO: 2047459 - DNA, 25 bp, Homo sapien
tcagagcctttaccagttatccctg

SEQ ID NO: 2047460 - DNA, 25 bp, Homo sapien
tcagcttatcaaaactatggcaact

SEQ ID NO: 2047461 - DNA, 25 bp, Homo sapien
ttcagcttatcaaaactatggcaac

SEQ ID NO: 2047462 - DNA, 25 bp, Homo sapien
tagagacttcacattgaacaccttg

SEQ ID NO: 2047463 - DNA, 25 bp, Homo sapien
gacttcacattgaacaccttgtttc

SEQ ID NO: 2047464 - DNA, 25 bp, Homo sapien
gagacttcacattgaacaccttgtt

SEQ ID NO: 2047465 - DNA, 25 bp, Homo sapien
acttcacattgaacaccttgtttca

SEQ ID NO: 2047466 - DNA, 25 bp, Homo sapien
tcaatggagacagctgatgtcgccc

SEQ ID NO: 2047467 - DNA, 25 bp, Homo sapien
tgagcctcctccatcgtgaaaatat

SEQ ID NO: 2047468 - DNA, 25 bp, Homo sapien
gggctctcaatggagacagctgatg

SEQ ID NO: 2047469 - DNA, 25 bp, Homo sapien
cctccatcgtgaaaatataaactgt

SEQ ID NO: 2047470 - DNA, 25 bp, Homo sapien
aatgtccttgataagtgccctgtga

SEQ ID NO: 2047471 - DNA, 25 bp, Homo sapien
tgccctgtgaaaggcgtatccaagt

SEQ ID NO: 2047472 - DNA, 25 bp, Homo sapien
tttctgatgcaaaccatttgttttc

SEQ ID NO: 2047473 - DNA, 25 bp, Homo sapien
tgcatctaatactctctccaagctc

SEQ ID NO: 2047474 - DNA, 25 bp, Homo sapien
aaaaggggtgagaggctacctggca

SEQ ID NO: 2047475 - DNA, 25 bp, Homo sapien
gaggctacctggcacctctccttat

SEQ ID NO: 2047476 - DNA, 25 bp, Homo sapien
gggtgagaggctacctggcacctct

SEQ ID NO: 2047477 - DNA, 25 bp, Homo sapien
aggcagaaagacttcggagaaaaag

SEQ ID NO: 2047478 - DNA, 25 bp, Homo sapien
ctatccacttgctacaatcaaaatc

SEQ ID NO: 2047479 - DNA, 25 bp, Homo sapien
gaatttcagacatatcttttccagt

SEQ ID NO: 2047480 - DNA, 25 bp, Homo sapien
tccacttgctacaatcaaaatctgt

SEQ ID NO: 2047481 - DNA, 25 bp, Homo sapien
cacttgctacaatcaaaatctgttt

SEQ ID NO: 2047482 - DNA, 25 bp, Homo sapien
tttctgagttggagctaacttgttt

SEQ ID NO: 2047483 - DNA, 25 bp, Homo sapien
tggagctaacttgtttgttataaca

SEQ ID NO: 2047484 - DNA, 25 bp, Homo sapien
ttataacataagaaagagctgactc

SEQ ID NO: 2047485 - DNA, 25 bp, Homo sapien
atttaatttctgagttggagctaac

SEQ ID NO: 2047486 - DNA, 25 bp, Homo sapien
ctaaatggttgaagctgaagtgcat

SEQ ID NO: 2047487 - DNA, 25 bp, Homo sapien
cacaaatgctaaagcttcttccatt

SEQ ID NO: 2047488 - DNA, 25 bp, Homo sapien
tctgtgctgctaaatggttgaagct

SEQ ID NO: 2047489 - DNA, 25 bp, Homo sapien
gttgaagctgaagtgcataatctat

SEQ ID NO: 2047490 - DNA, 25 bp, Homo sapien
cctgtctttccgatacaaatgtgtg

SEQ ID NO: 2047491 - DNA, 25 bp, Homo sapien
tctttccgatacaaatgtgtgtctg

SEQ ID NO: 2047492 - DNA, 25 bp, Homo sapien
ttttatcctgtctttccgatacaaa

SEQ ID NO: 2047493 - DNA, 25 bp, Homo sapien
tccgatacaaatgtgtgtctgtatg

SEQ ID NO: 2047494 - DNA, 25 bp, Homo sapien
ttctctgtgtgtagtaggccaccag

SEQ ID NO: 2047495 - DNA, 25 bp, Homo sapien
ggaagttagttatatccatgagaca

SEQ ID NO: 2047496 - DNA, 25 bp, Homo sapien
cagaaattatctgccaggaagttag

SEQ ID NO: 2047497 - DNA, 25 bp, Homo sapien
gccaccagatggtagctctccacag

SEQ ID NO: 2047498 - DNA, 25 bp, Homo sapien
gggccataaaaaccatgatgcgttc

SEQ ID NO: 2047499 - DNA, 25 bp, Homo sapien
gacccttcgggtggcatttctctaa

SEQ ID NO: 2047500 - DNA, 25 bp, Homo sapien
cagtcttgtgtccagctgaaaaaca

SEQ ID NO: 2047501 - DNA, 25 bp, Homo sapien
acagtggcgtctatcttgggctaca

SEQ ID NO: 2047502 - DNA, 25 bp, Homo sapien
taagttgtgttatcaatttcagtct

SEQ ID NO: 2047503 - DNA, 25 bp, Homo sapien
cagtaagttgtgttatcaatttcag

SEQ ID NO: 2047504 - DNA, 25 bp, Homo sapien
gttgtgttatcaatttcagtcttat

SEQ ID NO: 2047505 - DNA, 25 bp, Homo sapien
gcagtaagttgtgttatcaatttca

SEQ ID NO: 2047506 - DNA, 25 bp, Homo sapien
gtatatacccagtatatacttggtt

SEQ ID NO: 2047507 - DNA, 25 bp, Homo sapien
ccagtatatacttggttctaagtct

SEQ ID NO: 2047508 - DNA, 25 bp, Homo sapien
tacccagtatatacttggttctaag

SEQ ID NO: 2047509 - DNA, 25 bp, Homo sapien
tatacccagtatatacttggttcta

SEQ ID NO: 2047510 - DNA, 25 bp, Homo sapien
ttctgattttccttgacagctacga

SEQ ID NO: 2047511 - DNA, 25 bp, Homo sapien
cagagcctgagatgacttctctctg

SEQ ID NO: 2047512 - DNA, 25 bp, Homo sapien
gattttccttgacagctacgagtct

SEQ ID NO: 2047513 - DNA, 25 bp, Homo sapien
tctctgtcggcacagttttctgatt

SEQ ID NO: 2047514 - DNA, 25 bp, Homo sapien
ttccttctctgtcataaagaagggc

SEQ ID NO: 2047515 - DNA, 25 bp, Homo sapien
ttgctcaaatacacgagctgccact

SEQ ID NO: 2047516 - DNA, 25 bp, Homo sapien
tttggagctttgctcaaatacacga

SEQ ID NO: 2047517 - DNA, 25 bp, Homo sapien
ctgtctttgtttggaacatctgctg

SEQ ID NO: 2047518 - DNA, 25 bp, Homo sapien
tgtaaacctgtttctgtgccctgct

SEQ ID NO: 2047519 - DNA, 25 bp, Homo sapien
tctgaatgccatactaaacgcaggc

SEQ ID NO: 2047520 - DNA, 25 bp, Homo sapien
gctcccatgtctcctttacaggttg

SEQ ID NO: 2047521 - DNA, 25 bp, Homo sapien
tgtaattcagcttcctcattggtgg

SEQ ID NO: 2047522 - DNA, 25 bp, Homo sapien
ttttggagcgttctgaactaaatcc

SEQ ID NO: 2047523 - DNA, 25 bp, Homo sapien
tctgaactaaatccttagggcactc

SEQ ID NO: 2047524 - DNA, 25 bp, Homo sapien
caaattgttttggagcgttctgaac

SEQ ID NO: 2047525 - DNA, 25 bp, Homo sapien
gagcgttctgaactaaatccttagg

SEQ ID NO: 2047526 - DNA, 25 bp, Homo sapien
ctgtaagagaggaacgctgtatttc

SEQ ID NO: 2047527 - DNA, 25 bp, Homo sapien
tgtaagagaggaacgctgtatttcc

SEQ ID NO: 2047528 - DNA, 25 bp, Homo sapien
ggatggctccagcacatccagactc

SEQ ID NO: 2047529 - DNA, 25 bp, Homo sapien
ccaggatggctccagcacatccaga

SEQ ID NO: 2047530 - DNA, 25 bp, Homo sapien
cactacctttagctgtagaggtttt

SEQ ID NO: 2047531 - DNA, 25 bp, Homo sapien
ttcactacctttagctgtagaggtt

SEQ ID NO: 2047532 - DNA, 25 bp, Homo sapien
cattcactacctttagctgtagagg

SEQ ID NO: 2047533 - DNA, 25 bp, Homo sapien
cttcattcactacctttagctgtag

SEQ ID NO: 2047534 - DNA, 25 bp, Homo sapien
ttatgcggccatcttcttagaagga

SEQ ID NO: 2047535 - DNA, 25 bp, Homo sapien
tacagtttgggcagctacaagcttg

SEQ ID NO: 2047536 - DNA, 25 bp, Homo sapien
tcttcctagaccctggtagttgctg

SEQ ID NO: 2047537 - DNA, 25 bp, Homo sapien
catttcttgtcttgtagatgcggca

SEQ ID NO: 2047538 - DNA, 25 bp, Homo sapien
cacttcacatcggaaaatcagaaca

SEQ ID NO: 2047539 - DNA, 25 bp, Homo sapien
cggaaaatcagaacagcatatctat

SEQ ID NO: 2047540 - DNA, 25 bp, Homo sapien
tcacatcggaaaatcagaacagcat

SEQ ID NO: 2047541 - DNA, 25 bp, Homo sapien
attacacacttcacatcggaaaatc

SEQ ID NO: 2047542 - DNA, 25 bp, Homo sapien
tcaaggttcctcctcttctcccagc

SEQ ID NO: 2047543 - DNA, 25 bp, Homo sapien
tcctcctcttctcccagcctctttt

SEQ ID NO: 2047544 - DNA, 25 bp, Homo sapien
ttcctcctcttctcccagcctcttt

SEQ ID NO: 2047545 - DNA, 25 bp, Homo sapien
tcctcttctcccagcctctttttac

SEQ ID NO: 2047546 - DNA, 25 bp, Homo sapien
tctctgttccgaatgacattcaggg

SEQ ID NO: 2047547 - DNA, 25 bp, Homo sapien
tgcattgtgctaaaatgtctgtctc

SEQ ID NO: 2047548 - DNA, 25 bp, Homo sapien
tagatgcttgtactggaggaatttc

SEQ ID NO: 2047549 - DNA, 25 bp, Homo sapien
ctcctcccttaatgtttctaacctg

SEQ ID NO: 2047550 - DNA, 25 bp, Homo sapien
agaattggcacataccatgccccag

SEQ ID NO: 2047551 - DNA, 25 bp, Homo sapien
ttagaattggcacataccatgcccc

SEQ ID NO: 2047552 - DNA, 25 bp, Homo sapien
aattagaattggcacataccatgcc

SEQ ID NO: 2047553 - DNA, 25 bp, Homo sapien
ccagaattagaattggcacatacca

SEQ ID NO: 2047554 - DNA, 25 bp, Homo sapien
aatcagataatagagttctgtgtga

SEQ ID NO: 2047555 - DNA, 25 bp, Homo sapien
catcataattagaatcagataatag

SEQ ID NO: 2047556 - DNA, 25 bp, Homo sapien
agataatagagttctgtgtgaggca

SEQ ID NO: 2047557 - DNA, 25 bp, Homo sapien
taattagaatcagataatagagttc

SEQ ID NO: 2047558 - DNA, 25 bp, Homo sapien
gcgtcctttagaaaatcaagcggat

SEQ ID NO: 2047559 - DNA, 25 bp, Homo sapien
caagcggattgtaattaagaattga

SEQ ID NO: 2047560 - DNA, 25 bp, Homo sapien
cagtagcgtcctttagaaaatcaag

SEQ ID NO: 2047561 - DNA, 25 bp, Homo sapien
cctttagaaaatcaagcggattgta

SEQ ID NO: 2047562 - DNA, 25 bp, Homo sapien
cagctggagctccaaaaggacattt

SEQ ID NO: 2047563 - DNA, 25 bp, Homo sapien
gcagctggagctccaaaaggacatt

SEQ ID NO: 2047564 - DNA, 25 bp, Homo sapien
ggtaaattgacttgattgattcaaa

SEQ ID NO: 2047565 - DNA, 25 bp, Homo sapien
gacatttgactggtaaattgacttg

SEQ ID NO: 2047566 - DNA, 25 bp, Homo sapien
acagttcctatgtccacacattata

SEQ ID NO: 2047567 - DNA, 25 bp, Homo sapien
cagttcctatgtccacacattatag

SEQ ID NO: 2047568 - DNA, 25 bp, Homo sapien
gacagttcctatgtccacacattat

SEQ ID NO: 2047569 - DNA, 25 bp, Homo sapien
aaagaaggttctgagattcaaacct

SEQ ID NO: 2047570 - DNA, 25 bp, Homo sapien
agaagcccgtaaacatgttctgaat

SEQ ID NO: 2047571 - DNA, 25 bp, Homo sapien
ataaactgtctaagctggtattaac

SEQ ID NO: 2047572 - DNA, 25 bp, Homo sapien
caaaataaactgtcgaatacagaag

SEQ ID NO: 2047573 - DNA, 25 bp, Homo sapien
cgttatctatcctgtaagtggcaga

SEQ ID NO: 2047574 - DNA, 25 bp, Homo sapien
actgaaggacacgtgaaatgtatcc

SEQ ID NO: 2047575 - DNA, 25 bp, Homo sapien
cagaagtaagtgacagatccaggat

SEQ ID NO: 2047576 - DNA, 25 bp, Homo sapien
tatgtgcaggcagtgttctatgtac

SEQ ID NO: 2047577 - DNA, 25 bp, Homo sapien
gataaaactggcttctggatacagc

SEQ ID NO: 2047578 - DNA, 25 bp, Homo sapien
aattcgggcatacatgcagaccagg

SEQ ID NO: 2047579 - DNA, 25 bp, Homo sapien
gcaactaggcttacagagaattcca

SEQ ID NO: 2047580 - DNA, 25 bp, Homo sapien
cacagtgggtgtttcagtagccgtt

SEQ ID NO: 2047581 - DNA, 25 bp, Homo sapien
tgccttcagactcatcatgcagtca

SEQ ID NO: 2047582 - DNA, 25 bp, Homo sapien
ctccaaataaggtgagccatagaga

SEQ ID NO: 2047583 - DNA, 25 bp, Homo sapien
ccatagagaagaggttggctgatcc

SEQ ID NO: 2047584 - DNA, 25 bp, Homo sapien
tcagactcatcatgcagtcagctct

SEQ ID NO: 2047585 - DNA, 25 bp, Homo sapien
gactcaaatggcagttgccattggc

SEQ ID NO: 2047586 - DNA, 25 bp, Homo sapien
cggactcaaatggcagttgccattg

SEQ ID NO: 2047587 - DNA, 25 bp, Homo sapien
ggactcaaatggcagttgccattgg

SEQ ID NO: 2047588 - DNA, 25 bp, Homo sapien
tattgtaggacaaactataccccag

SEQ ID NO: 2047589 - DNA, 25 bp, Homo sapien
cacttaagggaatctctgctggagg

SEQ ID NO: 2047590 - DNA, 25 bp, Homo sapien
gaaattttgtagctcccagacctga

SEQ ID NO: 2047591 - DNA, 25 bp, Homo sapien
taaggacaatcaatctccccagggt

SEQ ID NO: 2047592 - DNA, 25 bp, Homo sapien
tgcatgcttctgctaatgtaataaa

SEQ ID NO: 2047593 - DNA, 25 bp, Homo sapien
ttgggatggcatgcggtcttcattc

SEQ ID NO: 2047594 - DNA, 25 bp, Homo sapien
tccctcatagttataagtgaggaca

SEQ ID NO: 2047595 - DNA, 25 bp, Homo sapien
agtgaggacataatcttgggatggc

SEQ ID NO: 2047596 - DNA, 25 bp, Homo sapien
taaccagtgtgtcctctaatggatt

SEQ ID NO: 2047597 - DNA, 25 bp, Homo sapien
aaccagtgtgtcctctaatggattc

SEQ ID NO: 2047598 - DNA, 25 bp, Homo sapien
ttaaccagtgtgtcctctaatggat

SEQ ID NO: 2047599 - DNA, 25 bp, Homo sapien
gtgccactccgagtaagtgtatctg

SEQ ID NO: 2047600 - DNA, 25 bp, Homo sapien
ctgtgccactccgagtaagtgtatc

SEQ ID NO: 2047601 - DNA, 25 bp, Homo sapien
aactgtgccactccgagtaagtgta

SEQ ID NO: 2047602 - DNA, 25 bp, Homo sapien
tgtgccactccgagtaagtgtatct

SEQ ID NO: 2047603 - DNA, 25 bp, Homo sapien
tccagggtatgatgatgcccagccc

SEQ ID NO: 2047604 - DNA, 25 bp, Homo sapien
cattcctgatcccatagtaccacaa

SEQ ID NO: 2047605 - DNA, 25 bp, Homo sapien
tgggtcataaatccattggcagagc

SEQ ID NO: 2047606 - DNA, 25 bp, Homo sapien
tcatttcaatggtttcctgccctcc

SEQ ID NO: 2047607 - DNA, 25 bp, Homo sapien
ctttagttgcaccaaaaactccaca

SEQ ID NO: 2047608 - DNA, 25 bp, Homo sapien
cactctatcgtctccaggtgcttct

SEQ ID NO: 2047609 - DNA, 25 bp, Homo sapien
tataattaagttttgctgtgctaaa

SEQ ID NO: 2047610 - DNA, 25 bp, Homo sapien
tgatataattaagttttgctgtgct

SEQ ID NO: 2047611 - DNA, 25 bp, Homo sapien
tatattttaacttcaagaaagtgaa

SEQ ID NO: 2047612 - DNA, 25 bp, Homo sapien
catcttttcccacacctagattttt

SEQ ID NO: 2047613 - DNA, 25 bp, Homo sapien
aacatcttttcccacacctagattt

SEQ ID NO: 2047614 - DNA, 25 bp, Homo sapien
ttaaacatcttttcccacacctaga

SEQ ID NO: 2047615 - DNA, 25 bp, Homo sapien
tacccagtaatattgcaaggattgc

SEQ ID NO: 2047616 - DNA, 25 bp, Homo sapien
aaaagagcagtgctatacccagtaa

SEQ ID NO: 2047617 - DNA, 25 bp, Homo sapien
cagtgctatacccagtaatattgca

SEQ ID NO: 2047618 - DNA, 25 bp, Homo sapien
tccaagtattactcctgtactcctt

SEQ ID NO: 2047619 - DNA, 25 bp, Homo sapien
ggccctgtcttttacagtaatagga

SEQ ID NO: 2047620 - DNA, 25 bp, Homo sapien
cactgagttggatgagtacattcac

SEQ ID NO: 2047621 - DNA, 25 bp, Homo sapien
tcacacagattaactctcaataatt

SEQ ID NO: 2047622 - DNA, 25 bp, Homo sapien
cagtaataggaatggtatattcttg

SEQ ID NO: 2047623 - DNA, 25 bp, Homo sapien
cattgaccttctagtatttgcgcac

SEQ ID NO: 2047624 - DNA, 25 bp, Homo sapien
aataatttggcattggagtagccca

SEQ ID NO: 2047625 - DNA, 25 bp, Homo sapien
tgtaattccttagaagggagcccta

SEQ ID NO: 2047626 - DNA, 25 bp, Homo sapien
gagtagcccagtagtattccagtaa

SEQ ID NO: 2047627 - DNA, 25 bp, Homo sapien
atttctggagaagtattgggcaaac

SEQ ID NO: 2047628 - DNA, 25 bp, Homo sapien
tgatttctggagaagtattgggcaa

SEQ ID NO: 2047629 - DNA, 25 bp, Homo sapien
gatttctggagaagtattgggcaaa

SEQ ID NO: 2047630 - DNA, 25 bp, Homo sapien
tcaggatcaacagctaaaatgtcgg

SEQ ID NO: 2047631 - DNA, 25 bp, Homo sapien
catattcttgaagtatttctggtgg

SEQ ID NO: 2047632 - DNA, 25 bp, Homo sapien
gctccatggacaggttcatcaggat

SEQ ID NO: 2047633 - DNA, 25 bp, Homo sapien
gcaagtgttccagtacatgatctat

SEQ ID NO: 2047634 - DNA, 25 bp, Homo sapien
gtctattgccaggactgtaatatta

SEQ ID NO: 2047635 - DNA, 25 bp, Homo sapien
tgtctattgccaggactgtaatatt

SEQ ID NO: 2047636 - DNA, 25 bp, Homo sapien
ctttgtctattgccaggactgtaat

SEQ ID NO: 2047637 - DNA, 25 bp, Homo sapien
tcatcaatggtgatccaacctttag

SEQ ID NO: 2047638 - DNA, 25 bp, Homo sapien
taatccgcacatattgggctgcagg

SEQ ID NO: 2047639 - DNA, 25 bp, Homo sapien
tgggaatatctctagcaaatggcgc

SEQ ID NO: 2047640 - DNA, 25 bp, Homo sapien
cacatgaactgtaaccaaggctctg

SEQ ID NO: 2047641 - DNA, 25 bp, Homo sapien
tatagccgttgatctttgaccccac

SEQ ID NO: 2047642 - DNA, 25 bp, Homo sapien
aataaagtccatgtatatcagtgtc

SEQ ID NO: 2047643 - DNA, 25 bp, Homo sapien
taaagtccatgtatatcagtgtcag

SEQ ID NO: 2047644 - DNA, 25 bp, Homo sapien
aagtccatgtatatcagtgtcagtg

SEQ ID NO: 2047645 - DNA, 25 bp, Homo sapien
tccatgtatatcagtgtcagtgtaa

SEQ ID NO: 2047646 - DNA, 25 bp, Homo sapien
tcaagcccatatgcgtcactgctgc

SEQ ID NO: 2047647 - DNA, 25 bp, Homo sapien
aatgagtttacccagaacacagcaa

SEQ ID NO: 2047648 - DNA, 25 bp, Homo sapien
actgctgctgctccaatggacagaa

SEQ ID NO: 2047649 - DNA, 25 bp, Homo sapien
gaataatactatcctcactcaagcc

SEQ ID NO: 2047650 - DNA, 25 bp, Homo sapien
gaattggaacagatacaaaaactaa

SEQ ID NO: 2047651 - DNA, 25 bp, Homo sapien
gtaagagtggcatggaacactgcaa

SEQ ID NO: 2047652 - DNA, 25 bp, Homo sapien
caataatacagcagcatatagatgc

SEQ ID NO: 2047653 - DNA, 25 bp, Homo sapien
gattcatatcacaattgttctagga

SEQ ID NO: 2047654 - DNA, 25 bp, Homo sapien
ccaattggcagtgttaattaaatcc

SEQ ID NO: 2047655 - DNA, 25 bp, Homo sapien
ctataggtattcgtaagatttccac

SEQ ID NO: 2047656 - DNA, 25 bp, Homo sapien
gtctgtgctgattttgaaatgtcca

SEQ ID NO: 2047657 - DNA, 25 bp, Homo sapien
ggtaaaattgactctccaattggca

SEQ ID NO: 2047658 - DNA, 25 bp, Homo sapien
tgtgcctatcaatccaaaaaactgg

SEQ ID NO: 2047659 - DNA, 25 bp, Homo sapien
cattttgtctgaaagtgggtgcatt

SEQ ID NO: 2047660 - DNA, 25 bp, Homo sapien
tgggtgcattatcatttgaatctgt

SEQ ID NO: 2047661 - DNA, 25 bp, Homo sapien
tatgatacaagttgatgtgcctatc

SEQ ID NO: 2047662 - DNA, 25 bp, Homo sapien
tggtgattacgcctgtgctgggatg

SEQ ID NO: 2047663 - DNA, 25 bp, Homo sapien
atgctgtatttcaggcgcgtatgca

SEQ ID NO: 2047664 - DNA, 25 bp, Homo sapien
gtccggttcatctctgtctgtggca

SEQ ID NO: 2047665 - DNA, 25 bp, Homo sapien
tcaggcgcgtatgcattgtgtccgg

SEQ ID NO: 2047666 - DNA, 25 bp, Homo sapien
cctctaccctgatgggtagtgggag

SEQ ID NO: 2047667 - DNA, 25 bp, Homo sapien
tgcttctgtgaaaacagggtggttg

SEQ ID NO: 2047668 - DNA, 25 bp, Homo sapien
ctgcagttgacgcataagcaatcaa

SEQ ID NO: 2047669 - DNA, 25 bp, Homo sapien
tgaatatccatctgcagttgacgca

SEQ ID NO: 2047670 - DNA, 25 bp, Homo sapien
tgggaatgacacatgacctcacagc

SEQ ID NO: 2047671 - DNA, 25 bp, Homo sapien
caaagagctgaccaagtattccaaa

SEQ ID NO: 2047672 - DNA, 25 bp, Homo sapien
tgaggaaaaggtgccagcaaccagt

SEQ ID NO: 2047673 - DNA, 25 bp, Homo sapien
caggcttacctaacagcagttgaga

SEQ ID NO: 2047674 - DNA, 25 bp, Homo sapien
tccacgtccacttattgagtagaag

SEQ ID NO: 2047675 - DNA, 25 bp, Homo sapien
catcatattcttcacgatccacagg

SEQ ID NO: 2047676 - DNA, 25 bp, Homo sapien
cagtatagttctgtgctgcatcaga

SEQ ID NO: 2047677 - DNA, 25 bp, Homo sapien
caggccgagtgcaaaatagatttcc

SEQ ID NO: 2047678 - DNA, 25 bp, Homo sapien
cttgcatagagcaaggaataggtgc

SEQ ID NO: 2047679 - DNA, 25 bp, Homo sapien
gagcaaggaataggtgcccatctcc

SEQ ID NO: 2047680 - DNA, 25 bp, Homo sapien
tgcatagagcaaggaataggtgccc

SEQ ID NO: 2047681 - DNA, 25 bp, Homo sapien
tagagcaaggaataggtgcccatct

SEQ ID NO: 2047682 - DNA, 25 bp, Homo sapien
tttctctagtgtgtcttgtcttcga

SEQ ID NO: 2047683 - DNA, 25 bp, Homo sapien
ttctctagtgtgtcttgtcttcgat

SEQ ID NO: 2047684 - DNA, 25 bp, Homo sapien
ctctagtgtgtcttgtcttcgatac

SEQ ID NO: 2047685 - DNA, 25 bp, Homo sapien
tctctagtgtgtcttgtcttcgata

SEQ ID NO: 2047686 - DNA, 25 bp, Homo sapien
tgacccatcatttagaactctgaaa

SEQ ID NO: 2047687 - DNA, 25 bp, Homo sapien
agccctggctgtgtacactgaccca

SEQ ID NO: 2047688 - DNA, 25 bp, Homo sapien
gatcttttcttatcagacagcgcaa

SEQ ID NO: 2047689 - DNA, 25 bp, Homo sapien
gaaatcaggatcacttgaccggatg

SEQ ID NO: 2047690 - DNA, 25 bp, Homo sapien
atgcaagtaaaaatttccaagttgt

SEQ ID NO: 2047691 - DNA, 25 bp, Homo sapien
tgcaagtaaaaatttccaagttgta

SEQ ID NO: 2047692 - DNA, 25 bp, Homo sapien
aggcttcaccagcacgactgaagat

SEQ ID NO: 2047693 - DNA, 25 bp, Homo sapien
cagatactcaaaaacctcaaagttc

SEQ ID NO: 2047694 - DNA, 25 bp, Homo sapien
cagatgcaggcagacggctccgcgc

SEQ ID NO: 2047695 - DNA, 25 bp, Homo sapien
aggcagacggctccgcgcacggagc

SEQ ID NO: 2047696 - DNA, 25 bp, Homo sapien
gatgcaggcagacggctccgcgcac

SEQ ID NO: 2047697 - DNA, 25 bp, Homo sapien
gacggctccgcgcacggagcgccgg

SEQ ID NO: 2047698 - DNA, 25 bp, Homo sapien
tgcccgggagcaacttcacttctga

SEQ ID NO: 2047699 - DNA, 25 bp, Homo sapien
cgggaggtgcttttctcgccgctgc

SEQ ID NO: 2047700 - DNA, 25 bp, Homo sapien
tctctcaggcttgcctgcccgggag

SEQ ID NO: 2047701 - DNA, 25 bp, Homo sapien
tcacttctgaaaccggattggaccc

SEQ ID NO: 2047702 - DNA, 25 bp, Homo sapien
gaccgctctgttaggttgcatggag

SEQ ID NO: 2047703 - DNA, 25 bp, Homo sapien
tactacaggagaaataaggagcagc

SEQ ID NO: 2047704 - DNA, 25 bp, Homo sapien
ggtttgtggtagagcccagatctga

SEQ ID NO: 2047705 - DNA, 25 bp, Homo sapien
ttactgacgacaaatcctaagtgcg

SEQ ID NO: 2047706 - DNA, 25 bp, Homo sapien
tgcctgggagttttccaattggccc

SEQ ID NO: 2047707 - DNA, 25 bp, Homo sapien
gacaaacatccttgcatgtgagtag

SEQ ID NO: 2047708 - DNA, 25 bp, Homo sapien
taagctgaaaagtctcgtctctacc

SEQ ID NO: 2047709 - DNA, 25 bp, Homo sapien
ggttaactcatgtccttggtgcctg

SEQ ID NO: 2047710 - DNA, 25 bp, Homo sapien
tacaagacccagtcatcaggtgatc

SEQ ID NO: 2047711 - DNA, 25 bp, Homo sapien
gacctcccaggcaagtgactgctaa

SEQ ID NO: 2047712 - DNA, 25 bp, Homo sapien
gagccggaatttgcatcaagacact

SEQ ID NO: 2047713 - DNA, 25 bp, Homo sapien
ggttactatgacgactgccaaacag

SEQ ID NO: 2047714 - DNA, 25 bp, Homo sapien
tattattatcaggagtgccttttag

SEQ ID NO: 2047715 - DNA, 25 bp, Homo sapien
ggtggaccgctctgtatgactctca

SEQ ID NO: 2047716 - DNA, 25 bp, Homo sapien
tattatcaggagtgccttttaggtg

SEQ ID NO: 2047717 - DNA, 25 bp, Homo sapien
tgccttttaggtggaccgctctgta

SEQ ID NO: 2047718 - DNA, 25 bp, Homo sapien
ctctgattcagggagtgcgaaatcc

SEQ ID NO: 2047719 - DNA, 25 bp, Homo sapien
tcaagtgacttacaatggccctagg

SEQ ID NO: 2047720 - DNA, 25 bp, Homo sapien
ccaatcttgtgaattgaagacaggc

SEQ ID NO: 2047721 - DNA, 25 bp, Homo sapien
tacaaacacacagatatgactagcc

SEQ ID NO: 2047722 - DNA, 25 bp, Homo sapien
tggctgttgtcattatacccaaatg

SEQ ID NO: 2047723 - DNA, 25 bp, Homo sapien
atgtgcatttgaccaaagagattcc

SEQ ID NO: 2047724 - DNA, 25 bp, Homo sapien
ggctttcagagacttattagaacac

SEQ ID NO: 2047725 - DNA, 25 bp, Homo sapien
taatttctctgtagacctccttgga

SEQ ID NO: 2047726 - DNA, 25 bp, Homo sapien
gcatgcttctgctagtgtcctaaat

SEQ ID NO: 2047727 - DNA, 25 bp, Homo sapien
tcatcttgattacacagatacactt

SEQ ID NO: 2047728 - DNA, 25 bp, Homo sapien
caggacatagtcttgggcatgcttg

SEQ ID NO: 2047729 - DNA, 25 bp, Homo sapien
catcttcttcttgtcgttcactgca

SEQ ID NO: 2047730 - DNA, 25 bp, Homo sapien
atttactaacataaaagtaattgct

SEQ ID NO: 2047731 - DNA, 25 bp, Homo sapien
taacataaaagtaattgctttgatt

SEQ ID NO: 2047732 - DNA, 25 bp, Homo sapien
tactaacataaaagtaattgctttg

SEQ ID NO: 2047733 - DNA, 25 bp, Homo sapien
cataaaagtaattgctttgatttac

SEQ ID NO: 2047734 - DNA, 25 bp, Homo sapien
tttttaatcagagtgtgtcctctaa

SEQ ID NO: 2047735 - DNA, 25 bp, Homo sapien
aatcagagtgtgtcctctaatggat

SEQ ID NO: 2047736 - DNA, 25 bp, Homo sapien
ttaatcagagtgtgtcctctaatgg

SEQ ID NO: 2047737 - DNA, 25 bp, Homo sapien
taatttttaatcagagtgtgtcctc

SEQ ID NO: 2047738 - DNA, 25 bp, Homo sapien
tgtggcagcaagtatacaggtgttc

SEQ ID NO: 2047739 - DNA, 25 bp, Homo sapien
tagtgatagtacatgctggtcttgc

SEQ ID NO: 2047740 - DNA, 25 bp, Homo sapien
cagatgggaaatattagcacaaagc

SEQ ID NO: 2047741 - DNA, 25 bp, Homo sapien
tgtttctaaaagtcacgcatgtggc

SEQ ID NO: 2047742 - DNA, 25 bp, Homo sapien
gtctcctgacctccgtttttgattc

SEQ ID NO: 2047743 - DNA, 25 bp, Homo sapien
attcctgatcccacggtgccacaaa

SEQ ID NO: 2047744 - DNA, 25 bp, Homo sapien
tttcaccatttcgatggtctcctga

SEQ ID NO: 2047745 - DNA, 25 bp, Homo sapien
tttgattcctgatcccacggtgcca

SEQ ID NO: 2047746 - DNA, 25 bp, Homo sapien
ttggttgtttagacgtcccagaagc

SEQ ID NO: 2047747 - DNA, 25 bp, Homo sapien
tggttgtttagacgtcccagaagcc

SEQ ID NO: 2047748 - DNA, 25 bp, Homo sapien
ccccacagaccagcgtaaacaggat

SEQ ID NO: 2047749 - DNA, 25 bp, Homo sapien
gccccacagaccagcgtaaacagga

SEQ ID NO: 2047750 - DNA, 25 bp, Homo sapien
caacaatattgcaaggatggcccac

SEQ ID NO: 2047751 - DNA, 25 bp, Homo sapien
aatccttggatctacacgatgtgtg

SEQ ID NO: 2047752 - DNA, 25 bp, Homo sapien
cattttcggtaatgcagtcacacag

SEQ ID NO: 2047753 - DNA, 25 bp, Homo sapien
tctgataggaaagacgtgctgctgt

SEQ ID NO: 2047754 - DNA, 25 bp, Homo sapien
tcacgtcttgaagtataatgcccag

SEQ ID NO: 2047755 - DNA, 25 bp, Homo sapien
gactaaagtcaaagggtgggccatg

SEQ ID NO: 2047756 - DNA, 25 bp, Homo sapien
ggatcaaccgcaacaatctccgcag

SEQ ID NO: 2047757 - DNA, 25 bp, Homo sapien
tctccgcagatgacatggtgggttt

SEQ ID NO: 2047758 - DNA, 25 bp, Homo sapien
attagttaaagacaaatcaataatg

SEQ ID NO: 2047759 - DNA, 25 bp, Homo sapien
aactggaatacataaatcatcttcc

SEQ ID NO: 2047760 - DNA, 25 bp, Homo sapien
gagaactggaatacataaatcatct

SEQ ID NO: 2047761 - DNA, 25 bp, Homo sapien
taatgattacaacttcagcaattta

SEQ ID NO: 2047762 - DNA, 25 bp, Homo sapien
cagctgaaacaagttttactaaaat

SEQ ID NO: 2047763 - DNA, 25 bp, Homo sapien
cacccagctgaaacaagttttacta

SEQ ID NO: 2047764 - DNA, 25 bp, Homo sapien
cacacccagctgaaacaagttttac

SEQ ID NO: 2047765 - DNA, 25 bp, Homo sapien
accacacccagctgaaacaagtttt

SEQ ID NO: 2047766 - DNA, 25 bp, Homo sapien
ggtgacccaccctgttggatcagtt

SEQ ID NO: 2047767 - DNA, 25 bp, Homo sapien
tctgaaaactttgattgatcctgta

SEQ ID NO: 2047768 - DNA, 25 bp, Homo sapien
caatggtgacccaccctgttggatc

SEQ ID NO: 2047769 - DNA, 25 bp, Homo sapien
tatatgccatttttgatggtctctg

SEQ ID NO: 2047770 - DNA, 25 bp, Homo sapien
aacagtctgtattggagggttacac

SEQ ID NO: 2047771 - DNA, 25 bp, Homo sapien
tgctcatggctgatcttggactagc

SEQ ID NO: 2047772 - DNA, 25 bp, Homo sapien
cattttctttcatgcgaacagtctg

SEQ ID NO: 2047773 - DNA, 25 bp, Homo sapien
gcctctctggaaaatggagcttcat

SEQ ID NO: 2047774 - DNA, 25 bp, Homo sapien
gaaatatgttaagtgtcatgttggg

SEQ ID NO: 2047775 - DNA, 25 bp, Homo sapien
tggcaatgctaacgagtatatataa

SEQ ID NO: 2047776 - DNA, 25 bp, Homo sapien
gaggcctacctagtcatgcctccta

SEQ ID NO: 2047777 - DNA, 25 bp, Homo sapien
gaataaccacgagaatatgaaacat

SEQ ID NO: 2047778 - DNA, 25 bp, Homo sapien
caaagaactccttcattggttttgg

SEQ ID NO: 2047779 - DNA, 25 bp, Homo sapien
caacagtaactcgtaagatttccac

SEQ ID NO: 2047780 - DNA, 25 bp, Homo sapien
tccagttagcagtattcactaagtc

SEQ ID NO: 2047781 - DNA, 25 bp, Homo sapien
tttaaaatggtataattagctctcc

SEQ ID NO: 2047782 - DNA, 25 bp, Homo sapien
tgttggcaagtggtcatttacatca

SEQ ID NO: 2047783 - DNA, 25 bp, Homo sapien
ggcaagtggtcatttacatcatcaa

SEQ ID NO: 2047784 - DNA, 25 bp, Homo sapien
tattttcaactggtacttgtcaatt

SEQ ID NO: 2047785 - DNA, 25 bp, Homo sapien
caagttgaagttgtctgtagaccaa

SEQ ID NO: 2047786 - DNA, 25 bp, Homo sapien
ggtgatcacgcctgtagttggatgc

SEQ ID NO: 2047787 - DNA, 25 bp, Homo sapien
gatgttgtggtgatcacgcctgtag

SEQ ID NO: 2047788 - DNA, 25 bp, Homo sapien
tctagctgagatgatgttgtggtga

SEQ ID NO: 2047789 - DNA, 25 bp, Homo sapien
cctgtagttggatgcatagaaaata

SEQ ID NO: 2047790 - DNA, 25 bp, Homo sapien
gtagcacacacttgtcccacagtag

SEQ ID NO: 2047791 - DNA, 25 bp, Homo sapien
tacttcaggcgtgtgtgcatcgtgt

SEQ ID NO: 2047792 - DNA, 25 bp, Homo sapien
ctgcccaatgatggagtacttcagg

SEQ ID NO: 2047793 - DNA, 25 bp, Homo sapien
tgtgtgcatcgtgtcaggctcatct

SEQ ID NO: 2047794 - DNA, 25 bp, Homo sapien
ttgattattaggggcagtggaagtt

SEQ ID NO: 2047795 - DNA, 25 bp, Homo sapien
aaattgggtagttatcattttcatc

SEQ ID NO: 2047796 - DNA, 25 bp, Homo sapien
attgtaaaagtataagtttcttctg

SEQ ID NO: 2047797 - DNA, 25 bp, Homo sapien
ctggagttgttgcaaaggcaattat

SEQ ID NO: 2047798 - DNA, 25 bp, Homo sapien
tgctcacgatctacaggacgagtac

SEQ ID NO: 2047799 - DNA, 25 bp, Homo sapien
cgaggttcttggtcaactccaggac

SEQ ID NO: 2047800 - DNA, 25 bp, Homo sapien
tagttttgggccgtgtcagattgaa

SEQ ID NO: 2047801 - DNA, 25 bp, Homo sapien
ggacgagtacaatacaagtttccag

SEQ ID NO: 2047802 - DNA, 25 bp, Homo sapien
tttctagcatcgaacaaggaattgg

SEQ ID NO: 2047803 - DNA, 25 bp, Homo sapien
ggagttttctagcatcgaacaagga

SEQ ID NO: 2047804 - DNA, 25 bp, Homo sapien
tagcatcgaacaaggaattggagcc

SEQ ID NO: 2047805 - DNA, 25 bp, Homo sapien
tcgaacaaggaattggagcccatct

SEQ ID NO: 2047806 - DNA, 25 bp, Homo sapien
tctttagtatgtcttttctttagga

SEQ ID NO: 2047807 - DNA, 25 bp, Homo sapien
cagagccagggaaccaacagagaga

SEQ ID NO: 2047808 - DNA, 25 bp, Homo sapien
gaattagatttgcagctgtaaagca

SEQ ID NO: 2047809 - DNA, 25 bp, Homo sapien
tgttgtatagactgaaccatcctcc

SEQ ID NO: 2047810 - DNA, 25 bp, Homo sapien
ccaaaatttggaagtcaggatcact

SEQ ID NO: 2047811 - DNA, 25 bp, Homo sapien
tcttctccgaggacaatagaatagt

SEQ ID NO: 2047812 - DNA, 25 bp, Homo sapien
tctcggcatctagtttggagggaac

SEQ ID NO: 2047813 - DNA, 25 bp, Homo sapien
caagtttctcggcatctagtttgga

SEQ ID NO: 2047814 - DNA, 25 bp, Homo sapien
ctctaccaacaagtttctcggcatc

SEQ ID NO: 2047815 - DNA, 25 bp, Homo sapien
taccaacaagtttctcggcatctag

SEQ ID NO: 2047816 - DNA, 25 bp, Homo sapien
tgtaatgtcacatttttgcaggcat

SEQ ID NO: 2047817 - DNA, 25 bp, Homo sapien
caggcatcactggcaaatattaaga

SEQ ID NO: 2047818 - DNA, 25 bp, Homo sapien
gtcacatttttgcaggcatcactgg

SEQ ID NO: 2047819 - DNA, 25 bp, Homo sapien
aggcatcactggcaaatattaagat

SEQ ID NO: 2047820 - DNA, 25 bp, Homo sapien
gctgctcccggcattggctttttgc

SEQ ID NO: 2047821 - DNA, 25 bp, Homo sapien
caacgagatcccatcggtcaagcct

SEQ ID NO: 2047822 - DNA, 25 bp, Homo sapien
tccaatcggactttttatatcccca

SEQ ID NO: 2047823 - DNA, 25 bp, Homo sapien
caaataaggccaaccacttaggctc

SEQ ID NO: 2047824 - DNA, 25 bp, Homo sapien
gagccggaggggcgggctgcctcca

SEQ ID NO: 2047825 - DNA, 25 bp, Homo sapien
aggagccggaggggcgggctgcctc

SEQ ID NO: 2047826 - DNA, 25 bp, Homo sapien
agccggaggggcgggctgcctccat

SEQ ID NO: 2047827 - DNA, 25 bp, Homo sapien
caggagccggaggggcgggctgcct

SEQ ID NO: 2047828 - DNA, 25 bp, Homo sapien
gggctcggggcaggtcgcgggccga

SEQ ID NO: 2047829 - DNA, 25 bp, Homo sapien
ggggcaggtcgcgggccgagcgtcg

SEQ ID NO: 2047830 - DNA, 25 bp, Homo sapien
ctcggggcaggtcgcgggccgagcg

SEQ ID NO: 2047831 - DNA, 25 bp, Homo sapien
gggcaggtcgcgggccgagcgtcgg

SEQ ID NO: 2047832 - DNA, 25 bp, Homo sapien
gacgcgtccaaaagacaccgatcgg

SEQ ID NO: 2047833 - DNA, 25 bp, Homo sapien
tcttagcttctctgaagcgcctgcc

SEQ ID NO: 2047834 - DNA, 25 bp, Homo sapien
cgatcggcccctccttgttgtctat

SEQ ID NO: 2047835 - DNA, 25 bp, Homo sapien
tgcctctcatccaaggggcttttcc

SEQ ID NO: 2047836 - DNA, 25 bp, Homo sapien
aggcgagattaacagccggccctgc

SEQ ID NO: 2047837 - DNA, 25 bp, Homo sapien
ggtgtttctcaccagcggacgccac

SEQ ID NO: 2047838 - DNA, 25 bp, Homo sapien
tgtccgctccgccaggcgagattaa

SEQ ID NO: 2047839 - DNA, 25 bp, Homo sapien
gccacccttttacctgcgcaaggtg

SEQ ID NO: 2047840 - DNA, 25 bp, Homo sapien
aagacagtcaaagtttctctgagat

SEQ ID NO: 2047841 - DNA, 25 bp, Homo sapien
ttttggagtatcttctcttgctgac

SEQ ID NO: 2047842 - DNA, 25 bp, Homo sapien
taagcaatctgatagagtgtcacat

SEQ ID NO: 2047843 - DNA, 25 bp, Homo sapien
tgattttgaattgcctaagtaaacc

SEQ ID NO: 2047844 - DNA, 25 bp, Homo sapien
gaacattttgtacctacattcaaga

SEQ ID NO: 2047845 - DNA, 25 bp, Homo sapien
gaacaaaaattgcatgaccacaaaa

SEQ ID NO: 2047846 - DNA, 25 bp, Homo sapien
tatatgttatggataccttataaaa

SEQ ID NO: 2047847 - DNA, 25 bp, Homo sapien
attatcagagcaacctgtacatcag

SEQ ID NO: 2047848 - DNA, 25 bp, Homo sapien
tacagtacagtcgtgaaaagggcaa

SEQ ID NO: 2047849 - DNA, 25 bp, Homo sapien
tgagcataagtcaacccatggacct

SEQ ID NO: 2047850 - DNA, 25 bp, Homo sapien
ggcaggcctatgtcaaactcaagag

SEQ ID NO: 2047851 - DNA, 25 bp, Homo sapien
cttggagatggcaggtggcaaccac

SEQ ID NO: 2047852 - DNA, 25 bp, Homo sapien
gccttcatagttatacgaacaaacg

SEQ ID NO: 2047853 - DNA, 25 bp, Homo sapien
tactgagccggccagagaacctttg

SEQ ID NO: 2047854 - DNA, 25 bp, Homo sapien
gatgcatgtctttgctaatgtccta

SEQ ID NO: 2047855 - DNA, 25 bp, Homo sapien
cgatcgctgcagcaacctactgagc

SEQ ID NO: 2047856 - DNA, 25 bp, Homo sapien
aatcagagtgtgtcctctaatggat

SEQ ID NO: 2047857 - DNA, 25 bp, Homo sapien
ttaatcagagtgtgtcctctaatgg

SEQ ID NO: 2047858 - DNA, 25 bp, Homo sapien
tttttaatcagagtgtgtcctctaa

SEQ ID NO: 2047859 - DNA, 25 bp, Homo sapien
taatttttaatcagagtgtgtcctc

SEQ ID NO: 2047860 - DNA, 25 bp, Homo sapien
gaaactctgccagtccgtgtacgca

SEQ ID NO: 2047861 - DNA, 25 bp, Homo sapien
gacggactccaaggtctgatgtcca

SEQ ID NO: 2047862 - DNA, 25 bp, Homo sapien
tgttggaatccaaagtgtagcctcc

SEQ ID NO: 2047863 - DNA, 25 bp, Homo sapien
ccaagccgaggttgggtgaaactct

SEQ ID NO: 2047864 - DNA, 25 bp, Homo sapien
cttcttctccaggtccttcagtatt

SEQ ID NO: 2047865 - DNA, 25 bp, Homo sapien
gttacttcttctccaggtccttcag

SEQ ID NO: 2047866 - DNA, 25 bp, Homo sapien
cgttacttcttctccaggtccttca

SEQ ID NO: 2047867 - DNA, 25 bp, Homo sapien
cttctccaggtccttcagtatttga

SEQ ID NO: 2047868 - DNA, 25 bp, Homo sapien
aattaaattttgctgggctatgtct

SEQ ID NO: 2047869 - DNA, 25 bp, Homo sapien
gactgttctcttagcagtgacacag

SEQ ID NO: 2047870 - DNA, 25 bp, Homo sapien
tggaaaacatttcttgactgttctc

SEQ ID NO: 2047871 - DNA, 25 bp, Homo sapien
ttgctgggctatgtcttctggaaaa

SEQ ID NO: 2047872 - DNA, 25 bp, Homo sapien
tgtgttgcaactaaaccatgcctgt

SEQ ID NO: 2047873 - DNA, 25 bp, Homo sapien
gatggagttgaacagtcacatactc

SEQ ID NO: 2047874 - DNA, 25 bp, Homo sapien
gaacccaacaccatagcaagaatag

SEQ ID NO: 2047875 - DNA, 25 bp, Homo sapien
ccgttgacgaagaatggcagtttta

SEQ ID NO: 2047876 - DNA, 25 bp, Homo sapien
taatgttccagtgcaagatcggcca

SEQ ID NO: 2047877 - DNA, 25 bp, Homo sapien
tgcgtgatcgttgtaatcatccaaa

SEQ ID NO: 2047878 - DNA, 25 bp, Homo sapien
ggatctacaggtttcagaacagcaa

SEQ ID NO: 2047879 - DNA, 25 bp, Homo sapien
aaaggtggtccattttcaggtccat

SEQ ID NO: 2047880 - DNA, 25 bp, Homo sapien
tctctatctagtacttttagagttc

SEQ ID NO: 2047881 - DNA, 25 bp, Homo sapien
agtcgccagtgtgttgattaatttc

SEQ ID NO: 2047882 - DNA, 25 bp, Homo sapien
gagttctcaagtcgccagtgtgttg

SEQ ID NO: 2047883 - DNA, 25 bp, Homo sapien
cttttagagttctcaagtcgccagt

SEQ ID NO: 2047884 - DNA, 25 bp, Homo sapien
gaattgtgcctcgttaatgacacca

SEQ ID NO: 2047885 - DNA, 25 bp, Homo sapien
gatatttccgggtccagtgctttgt

SEQ ID NO: 2047886 - DNA, 25 bp, Homo sapien
gggaagccatcttgactctgaataa

SEQ ID NO: 2047887 - DNA, 25 bp, Homo sapien
gagtttgtgagctcgctgctttaga

SEQ ID NO: 2047888 - DNA, 25 bp, Homo sapien
tttggatctgtgctaattatgaagt

SEQ ID NO: 2047889 - DNA, 25 bp, Homo sapien
tgtatacagcctttgagtgaggagt

SEQ ID NO: 2047890 - DNA, 25 bp, Homo sapien
cctgatcctgtaccttcattcgtaa

SEQ ID NO: 2047891 - DNA, 25 bp, Homo sapien
gtaaaatctccacgtcaattctgtt

SEQ ID NO: 2047892 - DNA, 25 bp, Homo sapien
ccattattaactggtaagtatcaca

SEQ ID NO: 2047893 - DNA, 25 bp, Homo sapien
aaaccgaaaggctgaccacccatgt

SEQ ID NO: 2047894 - DNA, 25 bp, Homo sapien
cccatgtctcgcacttccattatta

SEQ ID NO: 2047895 - DNA, 25 bp, Homo sapien
ctgtgaaagatggtggattgtcatt

SEQ ID NO: 2047896 - DNA, 25 bp, Homo sapien
ccggtatctgggtgtatggagaaat

SEQ ID NO: 2047897 - DNA, 25 bp, Homo sapien
tagttgtggtgatgacaccggtatc

SEQ ID NO: 2047898 - DNA, 25 bp, Homo sapien
tctctatccagaaaaggtgtagttg

SEQ ID NO: 2047899 - DNA, 25 bp, Homo sapien
aggtctgtggcggtcacttttccca

SEQ ID NO: 2047900 - DNA, 25 bp, Homo sapien
agtcactctgtgttcaaaatatggg

SEQ ID NO: 2047901 - DNA, 25 bp, Homo sapien
cggatcggcaattttcaggcacagt

SEQ ID NO: 2047902 - DNA, 25 bp, Homo sapien
tcaaagggagtggatattctggtgc

SEQ ID NO: 2047903 - DNA, 25 bp, Homo sapien
caggcacagtaaagatagtcactct

SEQ ID NO: 2047904 - DNA, 25 bp, Homo sapien
agtcttcaataaatagctctttgca

SEQ ID NO: 2047905 - DNA, 25 bp, Homo sapien
ctggcccacttatggaataaaagat

SEQ ID NO: 2047906 - DNA, 25 bp, Homo sapien
tgttcatatttctcacggtcaatgc

SEQ ID NO: 2047907 - DNA, 25 bp, Homo sapien
cacggtcaatgctccttgtacaaaa

SEQ ID NO: 2047908 - DNA, 25 bp, Homo sapien
ccttgtacaaaagatatccccagtg

SEQ ID NO: 2047909 - DNA, 25 bp, Homo sapien
taggagcccatcgtctcttgctgcg

SEQ ID NO: 2047910 - DNA, 25 bp, Homo sapien
gtctttggtatgtctcttcttagga

SEQ ID NO: 2047911 - DNA, 25 bp, Homo sapien
tgtggaaatggacccaacgagttct

SEQ ID NO: 2047912 - DNA, 25 bp, Homo sapien
tcaatgaagctggaataggagccca

SEQ ID NO: 2047913 - DNA, 25 bp, Homo sapien
tcccgtctctgaccatctgaaagga

SEQ ID NO: 2047914 - DNA, 25 bp, Homo sapien
ttaggctggccgacttgagacactc

SEQ ID NO: 2047915 - DNA, 25 bp, Homo sapien
tctcttgctgacagtacaactttta

SEQ ID NO: 2047916 - DNA, 25 bp, Homo sapien
catgtgttgtgtaaattgagccatc

SEQ ID NO: 2047917 - DNA, 25 bp, Homo sapien
gatgagaaggaactcgaagataaac

SEQ ID NO: 2047918 - DNA, 25 bp, Homo sapien
caagcatcgcaaagtaatgttaaaa

SEQ ID NO: 2047919 - DNA, 25 bp, Homo sapien
agataaactttctgacaagcatcgc

SEQ ID NO: 2047920 - DNA, 25 bp, Homo sapien
aaggaactcgaagataaactttctg

SEQ ID NO: 2047921 - DNA, 25 bp, Homo sapien
agaaaaggagctgcttacagaagat

SEQ ID NO: 2047922 - DNA, 25 bp, Homo sapien
gaaaaggagctgcttacagaagatg

SEQ ID NO: 2047923 - DNA, 25 bp, Homo sapien
aaaggagctgcttacagaagatgct

SEQ ID NO: 2047924 - DNA, 25 bp, Homo sapien
aaaaggagctgcttacagaagatgc

SEQ ID NO: 2047925 - DNA, 25 bp, Homo sapien
tgataaacagtaggaggagcaacgg

SEQ ID NO: 2047926 - DNA, 25 bp, Homo sapien
cagaagcagtcccaatggccaggga

SEQ ID NO: 2047927 - DNA, 25 bp, Homo sapien
tgcacagagcggctaagaagacgct

SEQ ID NO: 2047928 - DNA, 25 bp, Homo sapien
cagtccggaggcaagtgataaacag

SEQ ID NO: 2047929 - DNA, 25 bp, Homo sapien
gaagggcatattgggtggagagtga

SEQ ID NO: 2047930 - DNA, 25 bp, Homo sapien
tgaagggcatattgggtggagagtg

SEQ ID NO: 2047931 - DNA, 25 bp, Homo sapien
ctgaagggcatattgggtggagagt

SEQ ID NO: 2047932 - DNA, 25 bp, Homo sapien
gcacctttgtcgacgtctctttttc

SEQ ID NO: 2047933 - DNA, 25 bp, Homo sapien
gaaaagcacctttgtcgacgtctct

SEQ ID NO: 2047934 - DNA, 25 bp, Homo sapien
atgaaaagcacctttgtcgacgtct

SEQ ID NO: 2047935 - DNA, 25 bp, Homo sapien
ccaaacaaatattgacttcagcaaa

SEQ ID NO: 2047936 - DNA, 25 bp, Homo sapien
cttctcccactattgcacatctttg

SEQ ID NO: 2047937 - DNA, 25 bp, Homo sapien
gtgtcttctcccactattgcacatc

SEQ ID NO: 2047938 - DNA, 25 bp, Homo sapien
tatctacctgtctccggagacactc

SEQ ID NO: 2047939 - DNA, 25 bp, Homo sapien
tctttggccacatctattatctacc

SEQ ID NO: 2047940 - DNA, 25 bp, Homo sapien
ccagcggtctcggtgagtaatgcag

SEQ ID NO: 2047941 - DNA, 25 bp, Homo sapien
cagtcaactgctccggtgtcactcg

SEQ ID NO: 2047942 - DNA, 25 bp, Homo sapien
tgtcactcgctcctcaagtggcctg

SEQ ID NO: 2047943 - DNA, 25 bp, Homo sapien
tgctcaagcgaaacacagtcaactg

SEQ ID NO: 2047944 - DNA, 25 bp, Homo sapien
cagaaaacctcattttgatcacatc

SEQ ID NO: 2047945 - DNA, 25 bp, Homo sapien
tctttttcagtgtctatgaagttca

SEQ ID NO: 2047946 - DNA, 25 bp, Homo sapien
ctcagaaaacctcattttgatcaca

SEQ ID NO: 2047947 - DNA, 25 bp, Homo sapien
aaacctcattttgatcacatctttt

SEQ ID NO: 2047948 - DNA, 25 bp, Homo sapien
gagaaaggagttagtgtcctgagct

SEQ ID NO: 2047949 - DNA, 25 bp, Homo sapien
tgcaccagctcttggctagtctgct

SEQ ID NO: 2047950 - DNA, 25 bp, Homo sapien
tgatcagaataacctcctgagaagg

SEQ ID NO: 2047951 - DNA, 25 bp, Homo sapien
gaaggccgtcccaatggagaaagga

SEQ ID NO: 2047952 - DNA, 25 bp, Homo sapien
acagtgatagacagaggagtgagaa

SEQ ID NO: 2047953 - DNA, 25 bp, Homo sapien
aacagtgatagacagaggagtgaga

SEQ ID NO: 2047954 - DNA, 25 bp, Homo sapien
ggaacagtgatagacagaggagtga

SEQ ID NO: 2047955 - DNA, 25 bp, Homo sapien
tatggaacagtgatagacagaggag

SEQ ID NO: 2047956 - DNA, 25 bp, Homo sapien
gatccaggggtgagttttagcagat

SEQ ID NO: 2047957 - DNA, 25 bp, Homo sapien
ggtctttttagtgatccaggggtga

SEQ ID NO: 2047958 - DNA, 25 bp, Homo sapien
tgatccaggggtgagttttagcaga

SEQ ID NO: 2047959 - DNA, 25 bp, Homo sapien
aaggatggtctttttagtgatccag

SEQ ID NO: 2047960 - DNA, 25 bp, Homo sapien
caagctagttataccattatcttca

SEQ ID NO: 2047961 - DNA, 25 bp, Homo sapien
gatcgcctgctctcccaagctagtt

SEQ ID NO: 2047962 - DNA, 25 bp, Homo sapien
tggacaccctgaggcgatcgcctgc

SEQ ID NO: 2047963 - DNA, 25 bp, Homo sapien
tcgcccagtggacaccctgaggcga

SEQ ID NO: 2047964 - DNA, 25 bp, Homo sapien
caacttgtgctgaggaggaaaagct

SEQ ID NO: 2047965 - DNA, 25 bp, Homo sapien
tcaacttgtgctgaggaggaaaagc

SEQ ID NO: 2047966 - DNA, 25 bp, Homo sapien
acttgtgctgaggaggaaaagctta

SEQ ID NO: 2047967 - DNA, 25 bp, Homo sapien
aacttgtgctgaggaggaaaagctt

SEQ ID NO: 2047968 - DNA, 25 bp, Homo sapien
actgggaaagcagcactcggccttc

SEQ ID NO: 2047969 - DNA, 25 bp, Homo sapien
cagagcatccgaagatgccttgcag

SEQ ID NO: 2047970 - DNA, 25 bp, Homo sapien
tgccttgcaggtgagtaacgtaaac

SEQ ID NO: 2047971 - DNA, 25 bp, Homo sapien
accaactgttgaaggagcactggga

SEQ ID NO: 2047972 - DNA, 25 bp, Homo sapien
gagcaggccagtgatgattgcaaag

SEQ ID NO: 2047973 - DNA, 25 bp, Homo sapien
tgatgattgcaaagccacctgctag

SEQ ID NO: 2047974 - DNA, 25 bp, Homo sapien
tctggcaaccctttttgcagcagag

SEQ ID NO: 2047975 - DNA, 25 bp, Homo sapien
tgtccaaattgtctctggcaaccct

SEQ ID NO: 2047976 - DNA, 25 bp, Homo sapien
ttgcagcagagggattagcactacg

SEQ ID NO: 2047977 - DNA, 25 bp, Homo sapien
tagcactacgtttttcgacttccat

SEQ ID NO: 2047978 - DNA, 25 bp, Homo sapien
cttcccactaactctaagtccaaag

SEQ ID NO: 2047979 - DNA, 25 bp, Homo sapien
aactctaagtccaaagttctgtgac

SEQ ID NO: 2047980 - DNA, 25 bp, Homo sapien
acaagtttgactgcttgcatgtgca

SEQ ID NO: 2047981 - DNA, 25 bp, Homo sapien
ctgtgactcacaatatacaagtttg

SEQ ID NO: 2047982 - DNA, 25 bp, Homo sapien
tgaacccagggtaagtgccacattc

SEQ ID NO: 2047983 - DNA, 25 bp, Homo sapien
cattcatgggcagtagaaggaccac

SEQ ID NO: 2047984 - DNA, 25 bp, Homo sapien
gcctgttcccgaatgttcagatgga

SEQ ID NO: 2047985 - DNA, 25 bp, Homo sapien
gaaatagccgttggtagtcactgaa

SEQ ID NO: 2047986 - DNA, 25 bp, Homo sapien
aatttgcgtatcatcctgtgcaggg

SEQ ID NO: 2047987 - DNA, 25 bp, Homo sapien
aaaaagatgaaacacttgaccaatt

SEQ ID NO: 2047988 - DNA, 25 bp, Homo sapien
gaaacacttgaccaatttgcgtatc

SEQ ID NO: 2047989 - DNA, 25 bp, Homo sapien
tgaccaatttgcgtatcatcctgtg

SEQ ID NO: 2047990 - DNA, 25 bp, Homo sapien
tattttttaaaagtgtctttgatca

SEQ ID NO: 2047991 - DNA, 25 bp, Homo sapien
tgaaaaagtcatgttgcaataaacc

SEQ ID NO: 2047992 - DNA, 25 bp, Homo sapien
gaaaaagtcatgttgcaataaacct

SEQ ID NO: 2047993 - DNA, 25 bp, Homo sapien
agaacagacccagagtcaaattttc

SEQ ID NO: 2047994 - DNA, 25 bp, Homo sapien
attttgtagaacagacccagagtca

SEQ ID NO: 2047995 - DNA, 25 bp, Homo sapien
tgtagcttcattggagaagacctgg

SEQ ID NO: 2047996 - DNA, 25 bp, Homo sapien
tgaaggacgcccatctaatgactgt

SEQ ID NO: 2047997 - DNA, 25 bp, Homo sapien
aaggtgtaggttcccctgctggctc

SEQ ID NO: 2047998 - DNA, 25 bp, Homo sapien
gaagacctggatgacagcttcttgg

SEQ ID NO: 2047999 - DNA, 25 bp, Homo sapien
aactagcaatgcctgagcctgaacc

SEQ ID NO: 2048000 - DNA, 25 bp, Homo sapien
cctaccttaattattgcactagaga

SEQ ID NO: 2048001 - DNA, 25 bp, Homo sapien
aagccatcaagcactcctaccttaa

SEQ ID NO: 2048002 - DNA, 25 bp, Homo sapien
caataggatgaggtttcttcagggt

SEQ ID NO: 2048003 - DNA, 25 bp, Homo sapien
tttgaagaacattaaggagcaagcc

SEQ ID NO: 2048004 - DNA, 25 bp, Homo sapien
ccaagcagtggtgacatgacagtga

SEQ ID NO: 2048005 - DNA, 25 bp, Homo sapien
ccatgtggctatctggatacaggac

SEQ ID NO: 2048006 - DNA, 25 bp, Homo sapien
gcaaatggtattcactctgcatgag

SEQ ID NO: 2048007 - DNA, 25 bp, Homo sapien
taattccctgcgtctgctgcaaagg

SEQ ID NO: 2048008 - DNA, 25 bp, Homo sapien
tcagttaataactaagggccacttc

SEQ ID NO: 2048009 - DNA, 25 bp, Homo sapien
caggagctggccctttgggtgcgtg

SEQ ID NO: 2048010 - DNA, 25 bp, Homo sapien
cttgagatagttaattccctgcgtc

SEQ ID NO: 2048011 - DNA, 25 bp, Homo sapien
tcagatagcatattaggaagccatt

SEQ ID NO: 2048012 - DNA, 25 bp, Homo sapien
tagcatattaggaagccatttagcc

SEQ ID NO: 2048013 - DNA, 25 bp, Homo sapien
ggaagcaaacatatcgtttattcat

SEQ ID NO: 2048014 - DNA, 25 bp, Homo sapien
tctggaagcaaacatatcgtttatt

SEQ ID NO: 2048015 - DNA, 25 bp, Homo sapien
tgagacaccaggtggctcgttcact

SEQ ID NO: 2048016 - DNA, 25 bp, Homo sapien
accaggtggctcgttcactgaggtg

SEQ ID NO: 2048017 - DNA, 25 bp, Homo sapien
gacaccaggtggctcgttcactgag

SEQ ID NO: 2048018 - DNA, 25 bp, Homo sapien
ctgaggtggagagcctagtgtttgt

SEQ ID NO: 2048019 - DNA, 25 bp, Homo sapien
aaacaaagtccagagcatcagtacg

SEQ ID NO: 2048020 - DNA, 25 bp, Homo sapien
catcacaggctacctccaaaaacaa

SEQ ID NO: 2048021 - DNA, 25 bp, Homo sapien
tctccaaggcatcagctcttttctg

SEQ ID NO: 2048022 - DNA, 25 bp, Homo sapien
atcagtacggcactgggcttccccg

SEQ ID NO: 2048023 - DNA, 25 bp, Homo sapien
ccattgtaatcgttactaaggagag

SEQ ID NO: 2048024 - DNA, 25 bp, Homo sapien
tctaggcccattgtaatcgttacta

SEQ ID NO: 2048025 - DNA, 25 bp, Homo sapien
ctactctaggcccattgtaatcgtt

SEQ ID NO: 2048026 - DNA, 25 bp, Homo sapien
ggcccattgtaatcgttactaagga

SEQ ID NO: 2048027 - DNA, 25 bp, Homo sapien
tgcagcagcctggtaagtcctgagg

SEQ ID NO: 2048028 - DNA, 25 bp, Homo sapien
ggtgctgctgcaacaaggctttcaa

SEQ ID NO: 2048029 - DNA, 25 bp, Homo sapien
tgtggtcctgaaggaaagaggtccc

SEQ ID NO: 2048030 - DNA, 25 bp, Homo sapien
gagaagctagatcctgtgcagcagc

SEQ ID NO: 2048031 - DNA, 25 bp, Homo sapien
cgtgttctccactggcgtctgaact

SEQ ID NO: 2048032 - DNA, 25 bp, Homo sapien
cagccgtgttctccactggcgtctg

SEQ ID NO: 2048033 - DNA, 25 bp, Homo sapien
agcagaggaagaacagccgtgttct

SEQ ID NO: 2048034 - DNA, 25 bp, Homo sapien
tcttccttggttccccctgcaagga

SEQ ID NO: 2048035 - DNA, 25 bp, Homo sapien
gcagaagcgtctcttggtccatcta

SEQ ID NO: 2048036 - DNA, 25 bp, Homo sapien
gaataggaccatgggtctttctcca

SEQ ID NO: 2048037 - DNA, 25 bp, Homo sapien
caagatcctgactccaaatgttggt

SEQ ID NO: 2048038 - DNA, 25 bp, Homo sapien
catgccttgacttccatggaatagg

SEQ ID NO: 2048039 - DNA, 25 bp, Homo sapien
tcatgccaaacaacttgttacgata

SEQ ID NO: 2048040 - DNA, 25 bp, Homo sapien
aggctgttgcttcccggtgtggtgg

SEQ ID NO: 2048041 - DNA, 25 bp, Homo sapien
tgttccttgagtccagtcgggaagg

SEQ ID NO: 2048042 - DNA, 25 bp, Homo sapien
gagctagggtcccagaccatgagga

SEQ ID NO: 2048043 - DNA, 25 bp, Homo sapien
ttctcgcacagaacaataggctcgt

SEQ ID NO: 2048044 - DNA, 25 bp, Homo sapien
tttaacatctcacctcgcaatcacg

SEQ ID NO: 2048045 - DNA, 25 bp, Homo sapien
tcttggaagtttcgtaatccggtgc

SEQ ID NO: 2048046 - DNA, 25 bp, Homo sapien
taggctcgtccattactttcagtcg

SEQ ID NO: 2048047 - DNA, 25 bp, Homo sapien
tcagggtgctacttttgctaccagc

SEQ ID NO: 2048048 - DNA, 25 bp, Homo sapien
tgaaaaactgctgtgatcagggtgc

SEQ ID NO: 2048049 - DNA, 25 bp, Homo sapien
gctgtgatcagggtgctacttttgc

SEQ ID NO: 2048050 - DNA, 25 bp, Homo sapien
aaaactgctgtgatcagggtgctac

SEQ ID NO: 2048051 - DNA, 25 bp, Homo sapien
aatgttttggatggagatgagagga

SEQ ID NO: 2048052 - DNA, 25 bp, Homo sapien
cacacctgactgtggattattttca

SEQ ID NO: 2048053 - DNA, 25 bp, Homo sapien
gagaggagatgagaccgttcagatt

SEQ ID NO: 2048054 - DNA, 25 bp, Homo sapien
tcagatttccctcggtctaaaacac

SEQ ID NO: 2048055 - DNA, 25 bp, Homo sapien
ttttcctcgtcagtcttaaagtcat

SEQ ID NO: 2048056 - DNA, 25 bp, Homo sapien
tactgctgatgtgccattgcggaaa

SEQ ID NO: 2048057 - DNA, 25 bp, Homo sapien
tagtcttggtattccactcagcagc

SEQ ID NO: 2048058 - DNA, 25 bp, Homo sapien
catacctggcaccatagagatgctg

SEQ ID NO: 2048059 - DNA, 25 bp, Homo sapien
gaatctgtaagactccctcatcctg

SEQ ID NO: 2048060 - DNA, 25 bp, Homo sapien
ttggtcgcatagagtaaaggagctg

SEQ ID NO: 2048061 - DNA, 25 bp, Homo sapien
ggaggttgaaatgccattggtcgca

SEQ ID NO: 2048062 - DNA, 25 bp, Homo sapien
tttattttgggtggccatggatcca

SEQ ID NO: 2048063 - DNA, 25 bp, Homo sapien
aaggtatcaaactgtagagggaggt

SEQ ID NO: 2048064 - DNA, 25 bp, Homo sapien
ccaaggaagccacgatgaaaggaag

SEQ ID NO: 2048065 - DNA, 25 bp, Homo sapien
cagctgctgttgcactgaacgaaga

SEQ ID NO: 2048066 - DNA, 25 bp, Homo sapien
tctaccaaggatgaaggattccctc

SEQ ID NO: 2048067 - DNA, 25 bp, Homo sapien
ttccattgtcaaagggcaacatgag

SEQ ID NO: 2048068 - DNA, 25 bp, Homo sapien
tcttcatatcaagatgcacactgag

SEQ ID NO: 2048069 - DNA, 25 bp, Homo sapien
ggaagctgccgtccttgtgacccaa

SEQ ID NO: 2048070 - DNA, 25 bp, Homo sapien
gagagcagattgtacctgggaagct

SEQ ID NO: 2048071 - DNA, 25 bp, Homo sapien
gtcggaaagttgcatccctctgcag

SEQ ID NO: 2048072 - DNA, 25 bp, Homo sapien
gaaactgaatcgctgaatgcttcta

SEQ ID NO: 2048073 - DNA, 25 bp, Homo sapien
cgcttcttagatgatttgggactta

SEQ ID NO: 2048074 - DNA, 25 bp, Homo sapien
caaagattgccttctggtttattct

SEQ ID NO: 2048075 - DNA, 25 bp, Homo sapien
tattgaaggagagctagatgaccgc

SEQ ID NO: 2048076 - DNA, 25 bp, Homo sapien
gagcaaactatggttaattcagaga

SEQ ID NO: 2048077 - DNA, 25 bp, Homo sapien
aaatctttgcaagaagccaatgcag

SEQ ID NO: 2048078 - DNA, 25 bp, Homo sapien
tactcctctggcagtagcttcccag

SEQ ID NO: 2048079 - DNA, 25 bp, Homo sapien
gaaattgagcagagacaaaaacctg

SEQ ID NO: 2048080 - DNA, 25 bp, Homo sapien
gttcatcagccgtccagtaaagcaa

SEQ ID NO: 2048081 - DNA, 25 bp, Homo sapien
tcactgatatgcaaaggaccacact

SEQ ID NO: 2048082 - DNA, 25 bp, Homo sapien
catagagagtcaatctggcttctga

SEQ ID NO: 2048083 - DNA, 25 bp, Homo sapien
aaaaatagcattatactggccaggg

SEQ ID NO: 2048084 - DNA, 25 bp, Homo sapien
ggtcttaagcttccaccttgagcag

SEQ ID NO: 2048085 - DNA, 25 bp, Homo sapien
aaggatttatatagtgtgctcccac

SEQ ID NO: 2048086 - DNA, 25 bp, Homo sapien
tagcttaaatggaggttactcttcc

SEQ ID NO: 2048087 - DNA, 25 bp, Homo sapien
gctcccactaactgtacagatcagg

SEQ ID NO: 2048088 - DNA, 25 bp, Homo sapien
catattctagtcgacactgccggta

SEQ ID NO: 2048089 - DNA, 25 bp, Homo sapien
cccagtggcacatggagctaattct

SEQ ID NO: 2048090 - DNA, 25 bp, Homo sapien
tgtctacagtaggacgttgctaacc

SEQ ID NO: 2048091 - DNA, 25 bp, Homo sapien
gacaatggcacatcagaacatccta

SEQ ID NO: 2048092 - DNA, 25 bp, Homo sapien
tcaacgggcactgcttgctgcctct

SEQ ID NO: 2048093 - DNA, 25 bp, Homo sapien
tctggcttttagatgggcttggcca

SEQ ID NO: 2048094 - DNA, 25 bp, Homo sapien
cctctggcttttagatgggcttggc

SEQ ID NO: 2048095 - DNA, 25 bp, Homo sapien
gatgtttcaacgggcactgcttgct

SEQ ID NO: 2048096 - DNA, 25 bp, Homo sapien
aaaagaggcaaagtcaatctatcaa

SEQ ID NO: 2048097 - DNA, 25 bp, Homo sapien
ccatgtgtttctacacttaagagat

SEQ ID NO: 2048098 - DNA, 25 bp, Homo sapien
gtggcataactatgagtgttatatg

SEQ ID NO: 2048099 - DNA, 25 bp, Homo sapien
cacaagatggcactatgcacgcagt

SEQ ID NO: 2048100 - DNA, 25 bp, Homo sapien
gatacgcttcagagttgcctgagaa

SEQ ID NO: 2048101 - DNA, 25 bp, Homo sapien
cactttggaggaaatgacgctggcc

SEQ ID NO: 2048102 - DNA, 25 bp, Homo sapien
tgcctgagaaacgagacctggatta

SEQ ID NO: 2048103 - DNA, 25 bp, Homo sapien
tgtgaccctctcagataaagtgtga

SEQ ID NO: 2048104 - DNA, 25 bp, Homo sapien
cctccagaggctcacaatatagtgg

SEQ ID NO: 2048105 - DNA, 25 bp, Homo sapien
tatagttaggatacggtcccctcca

SEQ ID NO: 2048106 - DNA, 25 bp, Homo sapien
tcttagacaggtgggctttcgatga

SEQ ID NO: 2048107 - DNA, 25 bp, Homo sapien
caaggctgattggagagattaattc

SEQ ID NO: 2048108 - DNA, 25 bp, Homo sapien
gaaataggatagagggcaatgccag

SEQ ID NO: 2048109 - DNA, 25 bp, Homo sapien
cgatcagtggatggaacaaggagca

SEQ ID NO: 2048110 - DNA, 25 bp, Homo sapien
agtctggctcagttgggcacacgca

SEQ ID NO: 2048111 - DNA, 25 bp, Homo sapien
ggcacacgcaatcaagaacatggga

SEQ ID NO: 2048112 - DNA, 25 bp, Homo sapien
tagccacggtgggattgaagttgtc

SEQ ID NO: 2048113 - DNA, 25 bp, Homo sapien
gattgagggtactggcgaatttagc

SEQ ID NO: 2048114 - DNA, 25 bp, Homo sapien
agagagcacttagggcactgattga

SEQ ID NO: 2048115 - DNA, 25 bp, Homo sapien
ctaagacgaagtacagagagcactt

SEQ ID NO: 2048116 - DNA, 25 bp, Homo sapien
taatattccgtaagaaatcctgcag

SEQ ID NO: 2048117 - DNA, 25 bp, Homo sapien
aaatgctaaagcataagtaagaatc

SEQ ID NO: 2048118 - DNA, 25 bp, Homo sapien
cacacaggccagaatgactaatata

SEQ ID NO: 2048119 - DNA, 25 bp, Homo sapien
ttctctctctggcataactgtgtag

SEQ ID NO: 2048120 - DNA, 25 bp, Homo sapien
ttcacagacagcttccgagatccca

SEQ ID NO: 2048121 - DNA, 25 bp, Homo sapien
agcttccgagatcccaaagtcactt

SEQ ID NO: 2048122 - DNA, 25 bp, Homo sapien
ctcttcacagacagcttccgagatc

SEQ ID NO: 2048123 - DNA, 25 bp, Homo sapien
cagacagcttccgagatcccaaagt

SEQ ID NO: 2048124 - DNA, 25 bp, Homo sapien
ccacctcatcaactgtttcctgttg

SEQ ID NO: 2048125 - DNA, 25 bp, Homo sapien
tcaactgtttcctgttgactgggca

SEQ ID NO: 2048126 - DNA, 25 bp, Homo sapien
caactgtttcctgttgactgggcat

SEQ ID NO: 2048127 - DNA, 25 bp, Homo sapien
catccacctcatcaactgtttcctg

SEQ ID NO: 2048128 - DNA, 25 bp, Homo sapien
tcttagtttcaacagggtgcagtgc

SEQ ID NO: 2048129 - DNA, 25 bp, Homo sapien
tcatagaaggtcatccgggaaacgg

SEQ ID NO: 2048130 - DNA, 25 bp, Homo sapien
gaaaaggctctctatccaggttctg

SEQ ID NO: 2048131 - DNA, 25 bp, Homo sapien
tacaaacgagttggccgagtatctg

SEQ ID NO: 2048132 - DNA, 25 bp, Homo sapien
taaactctaagggtctaagactcca

SEQ ID NO: 2048133 - DNA, 25 bp, Homo sapien
cattcctagttatggtctcaactac

SEQ ID NO: 2048134 - DNA, 25 bp, Homo sapien
taagactccattcctagttatggtc

SEQ ID NO: 2048135 - DNA, 25 bp, Homo sapien
taagggtctaagactccattcctag

SEQ ID NO: 2048136 - DNA, 25 bp, Homo sapien
ggtcaaatgacctattaagaatatt

SEQ ID NO: 2048137 - DNA, 25 bp, Homo sapien
tcatagaacgaatgttccgatgctc

SEQ ID NO: 2048138 - DNA, 25 bp, Homo sapien
tgttttggtgacctaactggtcaaa

SEQ ID NO: 2048139 - DNA, 25 bp, Homo sapien
atatttcatagaacgaatgttccga

SEQ ID NO: 2048140 - DNA, 25 bp, Homo sapien
tgtatgtaacaagagatgcaccatt

SEQ ID NO: 2048141 - DNA, 25 bp, Homo sapien
ccagaccccacgtagagtgtatgta

SEQ ID NO: 2048142 - DNA, 25 bp, Homo sapien
gaaataatagtttatgaggcagccc

SEQ ID NO: 2048143 - DNA, 25 bp, Homo sapien
tactcagtgtaccacagaaatgtcc

SEQ ID NO: 2048144 - DNA, 25 bp, Homo sapien
aatgtttacaattaaggcccaggct

SEQ ID NO: 2048145 - DNA, 25 bp, Homo sapien
gctatgcctcgcattatgccccagg

SEQ ID NO: 2048146 - DNA, 25 bp, Homo sapien
ccctgcctatggtgaggatcttcaa

SEQ ID NO: 2048147 - DNA, 25 bp, Homo sapien
caaacagttatacatggacccagtc

SEQ ID NO: 2048148 - DNA, 25 bp, Homo sapien
ttagacaatgttaccagggaaacaa

SEQ ID NO: 2048149 - DNA, 25 bp, Homo sapien
taccctcgagtaatagatctgccta

SEQ ID NO: 2048150 - DNA, 25 bp, Homo sapien
aagacattgcccctagagtctcagc

SEQ ID NO: 2048151 - DNA, 25 bp, Homo sapien
gagccccatctaccaaggagcatgt

SEQ ID NO: 2048152 - DNA, 25 bp, Homo sapien
cacaggtcatgatttttgcaaaggc

SEQ ID NO: 2048153 - DNA, 25 bp, Homo sapien
catgagaggttcaaacggcgaatac

SEQ ID NO: 2048154 - DNA, 25 bp, Homo sapien
caaggctttaggtgagcagttcctc

SEQ ID NO: 2048155 - DNA, 25 bp, Homo sapien
aatttggaagaagcccgcaggaggt

SEQ ID NO: 2048156 - DNA, 25 bp, Homo sapien
gattactaattgttgtactaatgaa

SEQ ID NO: 2048157 - DNA, 25 bp, Homo sapien
tatttaagctgtggttaccttatgc

SEQ ID NO: 2048158 - DNA, 25 bp, Homo sapien
aggaataaggtgatctccacctgta

SEQ ID NO: 2048159 - DNA, 25 bp, Homo sapien
gcaaccctattgtcaaccaagatat

SEQ ID NO: 2048160 - DNA, 25 bp, Homo sapien
tctctacagacaggcccattagtca

SEQ ID NO: 2048161 - DNA, 25 bp, Homo sapien
ttagccctaggtccacatatacggg

SEQ ID NO: 2048162 - DNA, 25 bp, Homo sapien
cagtatcttggctggcaaaagggta

SEQ ID NO: 2048163 - DNA, 25 bp, Homo sapien
taattttcccagttagtgccatagg

SEQ ID NO: 2048164 - DNA, 25 bp, Homo sapien
tgtggtctaccttgccacgacagcc

SEQ ID NO: 2048165 - DNA, 25 bp, Homo sapien
gagcgcgctccaagtttatgatcca

SEQ ID NO: 2048166 - DNA, 25 bp, Homo sapien
tataaccgattacatgcaaaactgc

SEQ ID NO: 2048167 - DNA, 25 bp, Homo sapien
taagtagtggcttcccgtttctgcg

SEQ ID NO: 2048168 - DNA, 25 bp, Homo sapien
tgtttgtatacaacctatcaaccag

SEQ ID NO: 2048169 - DNA, 25 bp, Homo sapien
tcttcgattggagctaactctggca

SEQ ID NO: 2048170 - DNA, 25 bp, Homo sapien
taaattgttcagtccatcgatgtac

SEQ ID NO: 2048171 - DNA, 25 bp, Homo sapien
tgtactgacgctccttggaatacct

SEQ ID NO: 2048172 - DNA, 25 bp, Homo sapien
tgaggaattgacttgtattttccta

SEQ ID NO: 2048173 - DNA, 25 bp, Homo sapien
ttttcctaagtctccctctggtctg

SEQ ID NO: 2048174 - DNA, 25 bp, Homo sapien
tttcctaagtctccctctggtctgg

SEQ ID NO: 2048175 - DNA, 25 bp, Homo sapien
attttcctaagtctccctctggtct

SEQ ID NO: 2048176 - DNA, 25 bp, Homo sapien
tccccagaaggcattaggaaaacca

SEQ ID NO: 2048177 - DNA, 25 bp, Homo sapien
tgtcagcccacttacaccaccaaaa

SEQ ID NO: 2048178 - DNA, 25 bp, Homo sapien
gttccaaaggtcatcatcttctcct

SEQ ID NO: 2048179 - DNA, 25 bp, Homo sapien
accattgatctttctaaattgttcc

SEQ ID NO: 2048180 - DNA, 25 bp, Homo sapien
gaaaatgtaaagtacaccaagacat

SEQ ID NO: 2048181 - DNA, 25 bp, Homo sapien
gatgttcctaaactagtaacactga

SEQ ID NO: 2048182 - DNA, 25 bp, Homo sapien
tctgtaaggctcaaaacccagtgcc

SEQ ID NO: 2048183 - DNA, 25 bp, Homo sapien
aatggtcaatgcatgtcagatgttc

SEQ ID NO: 2048184 - DNA, 25 bp, Homo sapien
gtttaggtatagattggctttctga

SEQ ID NO: 2048185 - DNA, 25 bp, Homo sapien
cctagacctgcaatcctgaatatat

SEQ ID NO: 2048186 - DNA, 25 bp, Homo sapien
tggctttctgacatttaggcagcat

SEQ ID NO: 2048187 - DNA, 25 bp, Homo sapien
tgacatttaggcagcatccctagac

SEQ ID NO: 2048188 - DNA, 25 bp, Homo sapien
gaagaagataaacagcagaagagag

SEQ ID NO: 2048189 - DNA, 25 bp, Homo sapien
ggctttgtggccctccaaaccatca

SEQ ID NO: 2048190 - DNA, 25 bp, Homo sapien
gaagataaacagcagaagagagggc

SEQ ID NO: 2048191 - DNA, 25 bp, Homo sapien
cagaagagagggctttgtggccctc

SEQ ID NO: 2048192 - DNA, 25 bp, Homo sapien
ttcaggtagatgatccacatcgtgg

SEQ ID NO: 2048193 - DNA, 25 bp, Homo sapien
aatagttccggtcattttcaggtag

SEQ ID NO: 2048194 - DNA, 25 bp, Homo sapien
ggaagattacacagtcccagacact

SEQ ID NO: 2048195 - DNA, 25 bp, Homo sapien
gctttgcagcaaaatgacgtggcat

SEQ ID NO: 2048196 - DNA, 25 bp, Homo sapien
ctttgaagcccacattgaaaagcat

SEQ ID NO: 2048197 - DNA, 25 bp, Homo sapien
ggcctctttgaagcccacattgaaa

SEQ ID NO: 2048198 - DNA, 25 bp, Homo sapien
ctctttgaagcccacattgaaaagc

SEQ ID NO: 2048199 - DNA, 25 bp, Homo sapien
gcctctttgaagcccacattgaaaa

SEQ ID NO: 2048200 - DNA, 25 bp, Homo sapien
cgcacggttaaaaggttgtgtgcca

SEQ ID NO: 2048201 - DNA, 25 bp, Homo sapien
cacggttaaaaggttgtgtgccagt

SEQ ID NO: 2048202 - DNA, 25 bp, Homo sapien
gcacggttaaaaggttgtgtgccag

SEQ ID NO: 2048203 - DNA, 25 bp, Homo sapien
cacattgtagtcatcatcagagcac

SEQ ID NO: 2048204 - DNA, 25 bp, Homo sapien
tggaagtgactcaacagtgaccctt

SEQ ID NO: 2048205 - DNA, 25 bp, Homo sapien
tagtccattggtacatcagcacatt

SEQ ID NO: 2048206 - DNA, 25 bp, Homo sapien
gtcctaggccttgcactaacttgag

SEQ ID NO: 2048207 - DNA, 25 bp, Homo sapien
ggagcattggaatcagatgtaagaa

SEQ ID NO: 2048208 - DNA, 25 bp, Homo sapien
tgttcatggcgattacggaaaggaa

SEQ ID NO: 2048209 - DNA, 25 bp, Homo sapien
gacataaaacgcaaattccagccgc

SEQ ID NO: 2048210 - DNA, 25 bp, Homo sapien
tacggaaaggaatgagaactgccac

SEQ ID NO: 2048211 - DNA, 25 bp, Homo sapien
aaacaaaatagtcatgtatgtaaat

SEQ ID NO: 2048212 - DNA, 25 bp, Homo sapien
tcatcaaaactgacttcgcttacat

SEQ ID NO: 2048213 - DNA, 25 bp, Homo sapien
cttacattgacattgaggaatcctc

SEQ ID NO: 2048214 - DNA, 25 bp, Homo sapien
caatgaccccctggctcaatatcta

SEQ ID NO: 2048215 - DNA, 25 bp, Homo sapien
ctcaatatctaaatccttggagaag

SEQ ID NO: 2048216 - DNA, 25 bp, Homo sapien
gattgacctggtggcatgctaccca

SEQ ID NO: 2048217 - DNA, 25 bp, Homo sapien
tcattgaaggctaaagattgacctg

SEQ ID NO: 2048218 - DNA, 25 bp, Homo sapien
gttgccctttgctctgaaatcctag

SEQ ID NO: 2048219 - DNA, 25 bp, Homo sapien
gataagagcaacatcgctatactgg

SEQ ID NO: 2048220 - DNA, 25 bp, Homo sapien
gttgttgcccgtcggcttcctgcag

SEQ ID NO: 2048221 - DNA, 25 bp, Homo sapien
tcaactggtcgccacatctggccaa

SEQ ID NO: 2048222 - DNA, 25 bp, Homo sapien
tggtcgccacatctggccaatggca

SEQ ID NO: 2048223 - DNA, 25 bp, Homo sapien
tcattggtctcctgctgatcccagt

SEQ ID NO: 2048224 - DNA, 25 bp, Homo sapien
tatggtgagtatgtgaagttttccg

SEQ ID NO: 2048225 - DNA, 25 bp, Homo sapien
cacttgaattattgccttcgggata

SEQ ID NO: 2048226 - DNA, 25 bp, Homo sapien
cgggagatacgttgttgtttgaaca

SEQ ID NO: 2048227 - DNA, 25 bp, Homo sapien
taatcacttgaattattgccttcgg

SEQ ID NO: 2048228 - DNA, 25 bp, Homo sapien
aaactaccgtctgtctcctggatca

SEQ ID NO: 2048229 - DNA, 25 bp, Homo sapien
gaagctaaaccctctgaccataggg

SEQ ID NO: 2048230 - DNA, 25 bp, Homo sapien
ctatgagcgattagagatgagcacc

SEQ ID NO: 2048231 - DNA, 25 bp, Homo sapien
gatgctgcctaggagtcaggacagt

SEQ ID NO: 2048232 - DNA, 25 bp, Homo sapien
ggtagcagcaagtgcaataagcatg

SEQ ID NO: 2048233 - DNA, 25 bp, Homo sapien
aagtcagagcaatctcccagaaaga

SEQ ID NO: 2048234 - DNA, 25 bp, Homo sapien
ttatcttcaatattcctggaaagga

SEQ ID NO: 2048235 - DNA, 25 bp, Homo sapien
tcttatttgagggagacagtaacag

SEQ ID NO: 2048236 - DNA, 25 bp, Homo sapien
ggcatgctgggttatttccaacaaa

SEQ ID NO: 2048237 - DNA, 25 bp, Homo sapien
tacccatcaaatgaggaggcatgct

SEQ ID NO: 2048238 - DNA, 25 bp, Homo sapien
tgttagaaaccgatgagagtcctag

SEQ ID NO: 2048239 - DNA, 25 bp, Homo sapien
gctctgtgggctacatggcaccatc

SEQ ID NO: 2048240 - DNA, 25 bp, Homo sapien
tgtaatcattcctcctaatcaagct

SEQ ID NO: 2048241 - DNA, 25 bp, Homo sapien
aaaattgacctactattcagaagac

SEQ ID NO: 2048242 - DNA, 25 bp, Homo sapien
gcacaaatcctacagaagcttttaa

SEQ ID NO: 2048243 - DNA, 25 bp, Homo sapien
cataccccagggaaaacaagctgat

SEQ ID NO: 2048244 - DNA, 25 bp, Homo sapien
tagaagggtctaaaactatcaccca

SEQ ID NO: 2048245 - DNA, 25 bp, Homo sapien
cataaagggtacaacaactgacaac

SEQ ID NO: 2048246 - DNA, 25 bp, Homo sapien
gcctattagattttaacctcctgga

SEQ ID NO: 2048247 - DNA, 25 bp, Homo sapien
tggcaaccctgccataaacgagcat

SEQ ID NO: 2048248 - DNA, 25 bp, Homo sapien
cacgttcatacatcctaaaataggt

SEQ ID NO: 2048249 - DNA, 25 bp, Homo sapien
tcatctttaacaggaagttacctga

SEQ ID NO: 2048250 - DNA, 25 bp, Homo sapien
aaataatctaccaggacgcttaggg

SEQ ID NO: 2048251 - DNA, 25 bp, Homo sapien
tgtctgtacaaaacctcatcacttt

SEQ ID NO: 2048252 - DNA, 25 bp, Homo sapien
tctctcaacattatacctcgagctt

SEQ ID NO: 2048253 - DNA, 25 bp, Homo sapien
gcttgtaccataaagagatatgtgt

SEQ ID NO: 2048254 - DNA, 25 bp, Homo sapien
ctgtaccgttgagcgtactgttttt

SEQ ID NO: 2048255 - DNA, 25 bp, Homo sapien
ccgttgagcgtactgtttttatttg

SEQ ID NO: 2048256 - DNA, 25 bp, Homo sapien
gaaagaatgtcataacacagtaagc

SEQ ID NO: 2048257 - DNA, 25 bp, Homo sapien
gaatgtcataacacagtaagctttt

SEQ ID NO: 2048258 - DNA, 25 bp, Homo sapien
gagaaagaatgtcataacacagtaa

SEQ ID NO: 2048259 - DNA, 25 bp, Homo sapien
aagaatgtcataacacagtaagctt

SEQ ID NO: 2048260 - DNA, 25 bp, Homo sapien
ggcagaggctcactatcatggcaaa

SEQ ID NO: 2048261 - DNA, 25 bp, Homo sapien
gacactctccaaagatgaatgctga

SEQ ID NO: 2048262 - DNA, 25 bp, Homo sapien
tcgttttcacaaggcaggtgtgcaa

SEQ ID NO: 2048263 - DNA, 25 bp, Homo sapien
cccaattctgttagtgctgtgcata

SEQ ID NO: 2048264 - DNA, 25 bp, Homo sapien
tttttgtatatttgctgccagagca

SEQ ID NO: 2048265 - DNA, 25 bp, Homo sapien
cccatttttgtatatttgctgccag

SEQ ID NO: 2048266 - DNA, 25 bp, Homo sapien
catttttgtatatttgctgccagag

SEQ ID NO: 2048267 - DNA, 25 bp, Homo sapien
tgttcccatttttgtatatttgctg

SEQ ID NO: 2048268 - DNA, 25 bp, Homo sapien
aaaccagcatgagaatggttccaat

SEQ ID NO: 2048269 - DNA, 25 bp, Homo sapien
ggctgttaaccggaagaaagtgcta

SEQ ID NO: 2048270 - DNA, 25 bp, Homo sapien
taatggtcctcatgggtttaatccc

SEQ ID NO: 2048271 - DNA, 25 bp, Homo sapien
tcacagggttgcaagacacactaaa

SEQ ID NO: 2048272 - DNA, 25 bp, Homo sapien
tcccagaagtaacatcggataacag

SEQ ID NO: 2048273 - DNA, 25 bp, Homo sapien
taacatcggataacagcctgcgctg

SEQ ID NO: 2048274 - DNA, 25 bp, Homo sapien
tttctgcgggcccctgtttgaacag

SEQ ID NO: 2048275 - DNA, 25 bp, Homo sapien
ccctgaagcagtttgacacgtctga

SEQ ID NO: 2048276 - DNA, 25 bp, Homo sapien
aggagagagcgattggaaacccgca

SEQ ID NO: 2048277 - DNA, 25 bp, Homo sapien
gagcgattggaaacccgcatcatcc

SEQ ID NO: 2048278 - DNA, 25 bp, Homo sapien
gaagatgaaggcgaggagagagcga

SEQ ID NO: 2048279 - DNA, 25 bp, Homo sapien
tggaaacccgcatcatccgcctgag

SEQ ID NO: 2048280 - DNA, 25 bp, Homo sapien
aggccggactcggggccactgtcca

SEQ ID NO: 2048281 - DNA, 25 bp, Homo sapien
ctgagaaccccgagactgcagcggg

SEQ ID NO: 2048282 - DNA, 25 bp, Homo sapien
gggagcggacggaatgaatgggagg

SEQ ID NO: 2048283 - DNA, 25 bp, Homo sapien
gagagggcccgagcggaaaagagga

SEQ ID NO: 2048284 - DNA, 25 bp, Homo sapien
atgtgctgagaaccccgagactgca

SEQ ID NO: 2048285 - DNA, 25 bp, Homo sapien
ggctgcaggtgggaggaggcgcagg

SEQ ID NO: 2048286 - DNA, 25 bp, Homo sapien
gccaagcagcggcgggaggaggggc

SEQ ID NO: 2048287 - DNA, 25 bp, Homo sapien
aagcagcggcgggaggaggggctgc

SEQ ID NO: 2048288 - DNA, 25 bp, Homo sapien
caggtgggaggaggcgcaggctgcg

SEQ ID NO: 2048289 - DNA, 25 bp, Homo sapien
cgcgaagccccgtgcttaaggtccg

SEQ ID NO: 2048290 - DNA, 25 bp, Homo sapien
gtcccgccgcgaagccccgtgctta

SEQ ID NO: 2048291 - DNA, 25 bp, Homo sapien
gggccgcccgcgtccgctcggcagg

SEQ ID NO: 2048292 - DNA, 25 bp, Homo sapien
gccgcctcctactccgggccgcggc

SEQ ID NO: 2048293 - DNA, 25 bp, Homo sapien
cgcaaccagcgcgcgccacgcgcgg

SEQ ID NO: 2048294 - DNA, 25 bp, Homo sapien
gggccgcaaccagcgcgcgccacgc

SEQ ID NO: 2048295 - DNA, 25 bp, Homo sapien
gcgccggggccgcaaccagcgcgcg

SEQ ID NO: 2048296 - DNA, 25 bp, Homo sapien
gccggggccgcaaccagcgcgcgcc

SEQ ID NO: 2048297 - DNA, 25 bp, Homo sapien
tgcgagccccggatacattgtaccc

SEQ ID NO: 2048298 - DNA, 25 bp, Homo sapien
ttcagtaggcaaacggacgggtgtc

SEQ ID NO: 2048299 - DNA, 25 bp, Homo sapien
ttcaggcggcgctgcaaaggcttct

SEQ ID NO: 2048300 - DNA, 25 bp, Homo sapien
tcaacgctgaaggtgaaccctgggt

SEQ ID NO: 2048301 - DNA, 25 bp, Homo sapien
tactttcttgcacctattggtttgg

SEQ ID NO: 2048302 - DNA, 25 bp, Homo sapien
attttaactacatggaaagttgttg

SEQ ID NO: 2048303 - DNA, 25 bp, Homo sapien
gcaagacactgtcaatggtagtata

SEQ ID NO: 2048304 - DNA, 25 bp, Homo sapien
taatacgctataatggcaagacact

SEQ ID NO: 2048305 - DNA, 25 bp, Homo sapien
aaaggtaggtgtcagtaccaccgca

SEQ ID NO: 2048306 - DNA, 25 bp, Homo sapien
ggatgacagttcagcttcctcccag

SEQ ID NO: 2048307 - DNA, 25 bp, Homo sapien
caccgcactttgtgattgtaccaga

SEQ ID NO: 2048308 - DNA, 25 bp, Homo sapien
cgctgtagcttctagggtaaaggct

SEQ ID NO: 2048309 - DNA, 25 bp, Homo sapien
cgtctccaggtgtcccatgtgagaa

SEQ ID NO: 2048310 - DNA, 25 bp, Homo sapien
tcaccttctactaagtgcacagact

SEQ ID NO: 2048311 - DNA, 25 bp, Homo sapien
gaatgtatctcatggacctgcttgt

SEQ ID NO: 2048312 - DNA, 25 bp, Homo sapien
tcccgatgttctagatggctgaata

SEQ ID NO: 2048313 - DNA, 25 bp, Homo sapien
gatgccacaagaactctaggaacct

SEQ ID NO: 2048314 - DNA, 25 bp, Homo sapien
ctcggatgccacaagaactctagga

SEQ ID NO: 2048315 - DNA, 25 bp, Homo sapien
tccctcggatgccacaagaactcta

SEQ ID NO: 2048316 - DNA, 25 bp, Homo sapien
cggatgccacaagaactctaggaac

SEQ ID NO: 2048317 - DNA, 25 bp, Homo sapien
tgtccgatcaaagccacctgtggtc

SEQ ID NO: 2048318 - DNA, 25 bp, Homo sapien
taattccaggtgaacatttgccatt

SEQ ID NO: 2048319 - DNA, 25 bp, Homo sapien
agactccacatgtccgatcaaagcc

SEQ ID NO: 2048320 - DNA, 25 bp, Homo sapien
aataattccaggtgaacatttgcca

SEQ ID NO: 2048321 - DNA, 25 bp, Homo sapien
ggtaaagcaagccatagtatgaggg

SEQ ID NO: 2048322 - DNA, 25 bp, Homo sapien
ctttgaggggtaaagcaagccatag

SEQ ID NO: 2048323 - DNA, 25 bp, Homo sapien
aagcaagccatagtatgagggatgt

SEQ ID NO: 2048324 - DNA, 25 bp, Homo sapien
tgaggggtaaagcaagccatagtat

SEQ ID NO: 2048325 - DNA, 25 bp, Homo sapien
gcagcatctggcgctcctgaggtag

SEQ ID NO: 2048326 - DNA, 25 bp, Homo sapien
agcatctggcgctcctgaggtagct

SEQ ID NO: 2048327 - DNA, 25 bp, Homo sapien
cagcatctggcgctcctgaggtagc

SEQ ID NO: 2048328 - DNA, 25 bp, Homo sapien
tcactccctgaggtagtggtcctct

SEQ ID NO: 2048329 - DNA, 25 bp, Homo sapien
tctgtaatgccacctattcctctca

SEQ ID NO: 2048330 - DNA, 25 bp, Homo sapien
tttctctctgtaatgccacctattc

SEQ ID NO: 2048331 - DNA, 25 bp, Homo sapien
cacgcatttcgtttacaacatagaa

SEQ ID NO: 2048332 - DNA, 25 bp, Homo sapien
cacatcacgtatcttctcattaatg

SEQ ID NO: 2048333 - DNA, 25 bp, Homo sapien
cctcttgggagagtaatctgcgtaa

SEQ ID NO: 2048334 - DNA, 25 bp, Homo sapien
catcatctgctgacatgacacaaag

SEQ ID NO: 2048335 - DNA, 25 bp, Homo sapien
gatgagggttgtatgattgaagcac

SEQ ID NO: 2048336 - DNA, 25 bp, Homo sapien
tatcattctaacataataggaggaa

SEQ ID NO: 2048337 - DNA, 25 bp, Homo sapien
tacatatcaggaggtaccatgcaca

SEQ ID NO: 2048338 - DNA, 25 bp, Homo sapien
tatagagctttaggcaagttttctg

SEQ ID NO: 2048339 - DNA, 25 bp, Homo sapien
ctggagctgaaactaactcttcaag

SEQ ID NO: 2048340 - DNA, 25 bp, Homo sapien
caactggaaggtcataactctaaag

SEQ ID NO: 2048341 - DNA, 25 bp, Homo sapien
tttaacattcaccaatacagaccca

SEQ ID NO: 2048342 - DNA, 25 bp, Homo sapien
tttttaacattcaccaatacagacc

SEQ ID NO: 2048343 - DNA, 25 bp, Homo sapien
taacattcaccaatacagacccaca

SEQ ID NO: 2048344 - DNA, 25 bp, Homo sapien
aatacagacccacaggggccctgag

SEQ ID NO: 2048345 - DNA, 25 bp, Homo sapien
tctgagaaagagaccagaattcctg

SEQ ID NO: 2048346 - DNA, 25 bp, Homo sapien
tgttacaaaatcaagaatttgcccg

SEQ ID NO: 2048347 - DNA, 25 bp, Homo sapien
cctgctctgattcctaagataactg

SEQ ID NO: 2048348 - DNA, 25 bp, Homo sapien
aatttgcccgggagtgatgatgacc

SEQ ID NO: 2048349 - DNA, 25 bp, Homo sapien
gaaaggcaagttccgcatgatctca

SEQ ID NO: 2048350 - DNA, 25 bp, Homo sapien
ggagatgttggcttaaggacacgaa

SEQ ID NO: 2048351 - DNA, 25 bp, Homo sapien
gacaacataagtgaccctggaagac

SEQ ID NO: 2048352 - DNA, 25 bp, Homo sapien
gccttgcccatgacaaaaggttgat

SEQ ID NO: 2048353 - DNA, 25 bp, Homo sapien
tcatataaattttaacaagaactca

SEQ ID NO: 2048354 - DNA, 25 bp, Homo sapien
caagaactcataagttgcattgatt

SEQ ID NO: 2048355 - DNA, 25 bp, Homo sapien
tgcattgattatgccccaagagatg

SEQ ID NO: 2048356 - DNA, 25 bp, Homo sapien
caagagatgagggaccgatggtaat

SEQ ID NO: 2048357 - DNA, 25 bp, Homo sapien
tggagcacggacatgcttccggaga

SEQ ID NO: 2048358 - DNA, 25 bp, Homo sapien
agcacggacatgcttccggagaagg

SEQ ID NO: 2048359 - DNA, 25 bp, Homo sapien
ctctggagcacggacatgcttccgg

SEQ ID NO: 2048360 - DNA, 25 bp, Homo sapien
gagcacggacatgcttccggagaag

SEQ ID NO: 2048361 - DNA, 25 bp, Homo sapien
ttgaagatgtaagtattggtggcct

SEQ ID NO: 2048362 - DNA, 25 bp, Homo sapien
ttttgaagatgtaagtattggtggc

SEQ ID NO: 2048363 - DNA, 25 bp, Homo sapien
ttgttttgaagatgtaagtattggt

SEQ ID NO: 2048364 - DNA, 25 bp, Homo sapien
tgttttgaagatgtaagtattggtg

SEQ ID NO: 2048365 - DNA, 25 bp, Homo sapien
gttgcttaagatctttctcatgaag

SEQ ID NO: 2048366 - DNA, 25 bp, Homo sapien
cttaagatctttctcatgaagggca

SEQ ID NO: 2048367 - DNA, 25 bp, Homo sapien
tgcttaagatctttctcatgaaggg

SEQ ID NO: 2048368 - DNA, 25 bp, Homo sapien
ttaagatctttctcatgaagggcat

SEQ ID NO: 2048369 - DNA, 25 bp, Homo sapien
ctcttcccgagtccattttgataac

SEQ ID NO: 2048370 - DNA, 25 bp, Homo sapien
ttaggttctctcttcccgagtccat

SEQ ID NO: 2048371 - DNA, 25 bp, Homo sapien
caggactgcgagcaagccgggacct

SEQ ID NO: 2048372 - DNA, 25 bp, Homo sapien
ccggcgccccgcaggactgcgagca

SEQ ID NO: 2048373 - DNA, 25 bp, Homo sapien
gacctgagaatgacagatgcccacc

SEQ ID NO: 2048374 - DNA, 25 bp, Homo sapien
actagaggctggtttcagaaacaac

SEQ ID NO: 2048375 - DNA, 25 bp, Homo sapien
tagccgagggtaggaaacaagaatg

SEQ ID NO: 2048376 - DNA, 25 bp, Homo sapien
tcttcgtgacatggaactagaggct

SEQ ID NO: 2048377 - DNA, 25 bp, Homo sapien
caaatgaagggcaccgtgatgttct

SEQ ID NO: 2048378 - DNA, 25 bp, Homo sapien
tatgcaaatgaagggcaccgtgatg

SEQ ID NO: 2048379 - DNA, 25 bp, Homo sapien
gggcaccgtgatgttctacacacat

SEQ ID NO: 2048380 - DNA, 25 bp, Homo sapien
tgaagggcaccgtgatgttctacac

SEQ ID NO: 2048381 - DNA, 25 bp, Homo sapien
gaagtagtacgcatctggatctcac

SEQ ID NO: 2048382 - DNA, 25 bp, Homo sapien
tagtagagactacatgtatcggccc

SEQ ID NO: 2048383 - DNA, 25 bp, Homo sapien
ggatctcactgggttactgggaaat

SEQ ID NO: 2048384 - DNA, 25 bp, Homo sapien
taggcaggctgggattgtcaacccc

SEQ ID NO: 2048385 - DNA, 25 bp, Homo sapien
catggtagctgtcaatggcacaagg

SEQ ID NO: 2048386 - DNA, 25 bp, Homo sapien
gatccagaagcataagcagcagttg

SEQ ID NO: 2048387 - DNA, 25 bp, Homo sapien
tgagactggaacaaaccatggtagc

SEQ ID NO: 2048388 - DNA, 25 bp, Homo sapien
cagtctgctccgattagtgccgaga

SEQ ID NO: 2048389 - DNA, 25 bp, Homo sapien
ttctaatcaacagatactaatacgc

SEQ ID NO: 2048390 - DNA, 25 bp, Homo sapien
caaagtattttgcagggatcagata

SEQ ID NO: 2048391 - DNA, 25 bp, Homo sapien
taatggcttaacaggagtactgcca

SEQ ID NO: 2048392 - DNA, 25 bp, Homo sapien
tgaaatagcgcactctatactgaga

SEQ ID NO: 2048393 - DNA, 25 bp, Homo sapien
catagggaccaccaaatactgaaat

SEQ ID NO: 2048394 - DNA, 25 bp, Homo sapien
cattactgatgatgatcagggcagg

SEQ ID NO: 2048395 - DNA, 25 bp, Homo sapien
gaatgatccatggatttccagtgct

SEQ ID NO: 2048396 - DNA, 25 bp, Homo sapien
gataacttggcaaataccctaggag

SEQ ID NO: 2048397 - DNA, 25 bp, Homo sapien
tgcagactgtgaatctcctggcttt

SEQ ID NO: 2048398 - DNA, 25 bp, Homo sapien
ccagcctaccaacataatgaagccc

SEQ ID NO: 2048399 - DNA, 25 bp, Homo sapien
cagcctaccaacataatgaagcccc

SEQ ID NO: 2048400 - DNA, 25 bp, Homo sapien
agcctaccaacataatgaagccccg

SEQ ID NO: 2048401 - DNA, 25 bp, Homo sapien
actatgacatctacatcagccttag

SEQ ID NO: 2048402 - DNA, 25 bp, Homo sapien
aagagtgactggtactaaacaaagg

SEQ ID NO: 2048403 - DNA, 25 bp, Homo sapien
catcagccttagaacaattggaaag

SEQ ID NO: 2048404 - DNA, 25 bp, Homo sapien
cttgttgttttatgccgaagatcaa

SEQ ID NO: 2048405 - DNA, 25 bp, Homo sapien
aagactatgtaacagagcataagct

SEQ ID NO: 2048406 - DNA, 25 bp, Homo sapien
aaaacaaaatctcaacttagatcaa

SEQ ID NO: 2048407 - DNA, 25 bp, Homo sapien
aacagagcataagctccttaaaaac

SEQ ID NO: 2048408 - DNA, 25 bp, Homo sapien
tcaacttagatcaatgaagaaaaag

SEQ ID NO: 2048409 - DNA, 25 bp, Homo sapien
ttccagtgaagagcacccccatcta

SEQ ID NO: 2048410 - DNA, 25 bp, Homo sapien
gtgaacatgtggatatctcctggtc

SEQ ID NO: 2048411 - DNA, 25 bp, Homo sapien
aatgtgaacatgtggatatctcctg

SEQ ID NO: 2048412 - DNA, 25 bp, Homo sapien
attccagtgaagagcacccccatct

SEQ ID NO: 2048413 - DNA, 25 bp, Homo sapien
cacacatctctggaacctggttact

SEQ ID NO: 2048414 - DNA, 25 bp, Homo sapien
tccataggtctggagtgtggcccaa

SEQ ID NO: 2048415 - DNA, 25 bp, Homo sapien
caagagcctcttaattagcaccaca

SEQ ID NO: 2048416 - DNA, 25 bp, Homo sapien
aaacattgcattcctaggctgggca

SEQ ID NO: 2048417 - DNA, 25 bp, Homo sapien
tatcggtcaagcagaggcatacacc

SEQ ID NO: 2048418 - DNA, 25 bp, Homo sapien
cagtgacagtaactcagtacagcga

SEQ ID NO: 2048419 - DNA, 25 bp, Homo sapien
taacataatactcggtcaccccact

SEQ ID NO: 2048420 - DNA, 25 bp, Homo sapien
caacttcactgtctaggtatatgac

SEQ ID NO: 2048421 - DNA, 25 bp, Homo sapien
taagaccatgacaaagacttaggac

SEQ ID NO: 2048422 - DNA, 25 bp, Homo sapien
tgaaccctgcatacatctgtatcag

SEQ ID NO: 2048423 - DNA, 25 bp, Homo sapien
gaacaaagcatgagtactgggcaac

SEQ ID NO: 2048424 - DNA, 25 bp, Homo sapien
gtgaaggtatcaagcagaaggaatt

SEQ ID NO: 2048425 - DNA, 25 bp, Homo sapien
tgaaaggatggtcaacgcggtatct

SEQ ID NO: 2048426 - DNA, 25 bp, Homo sapien
gaaggtcccttctttagcgcaaagc

SEQ ID NO: 2048427 - DNA, 25 bp, Homo sapien
tgctattctaccctctatacagtgg

SEQ ID NO: 2048428 - DNA, 25 bp, Homo sapien
ctacataacgtgtaagaaggtccct

SEQ ID NO: 2048429 - DNA, 25 bp, Homo sapien
tcaatagttccatttctggtggctc

SEQ ID NO: 2048430 - DNA, 25 bp, Homo sapien
ctgatggccttgaggaaactgtaat

SEQ ID NO: 2048431 - DNA, 25 bp, Homo sapien
aaatgattctgggtagtgaagactc

SEQ ID NO: 2048432 - DNA, 25 bp, Homo sapien
ttttaatgagactagaaagctgctc

SEQ ID NO: 2048433 - DNA, 25 bp, Homo sapien
caattggcaaaccatagcccatggg

SEQ ID NO: 2048434 - DNA, 25 bp, Homo sapien
catagtcaatctggtgagcaaaacc

SEQ ID NO: 2048435 - DNA, 25 bp, Homo sapien
catttgtcaacatactgtctatggc

SEQ ID NO: 2048436 - DNA, 25 bp, Homo sapien
gaccccttatctacacagttgcaaa

SEQ ID NO: 2048437 - DNA, 25 bp, Homo sapien
cagaaatgtgattaaggggaaacca

SEQ ID NO: 2048438 - DNA, 25 bp, Homo sapien
acagttctattttgaactactgtgc

SEQ ID NO: 2048439 - DNA, 25 bp, Homo sapien
gatacaatgtaatagcctttacatg

SEQ ID NO: 2048440 - DNA, 25 bp, Homo sapien
tatctgatacaatgtaatagccttt

SEQ ID NO: 2048441 - DNA, 25 bp, Homo sapien
tgccttcaggtccacggtgaaataa

SEQ ID NO: 2048442 - DNA, 25 bp, Homo sapien
gggccctgaaaattaagatctgtta

SEQ ID NO: 2048443 - DNA, 25 bp, Homo sapien
ttagggacagagtgacaggatgcct

SEQ ID NO: 2048444 - DNA, 25 bp, Homo sapien
cagggccattgtttgaattactaga

SEQ ID NO: 2048445 - DNA, 25 bp, Homo sapien
taagctgtttactgtcttccacaac

SEQ ID NO: 2048446 - DNA, 25 bp, Homo sapien
aaggcttcttttcctatagtgcgaa

SEQ ID NO: 2048447 - DNA, 25 bp, Homo sapien
tagtgcgaagaataacatgatgttg

SEQ ID NO: 2048448 - DNA, 25 bp, Homo sapien
gatgttgaccttccaaaataagctg

SEQ ID NO: 2048449 - DNA, 25 bp, Homo sapien
tttcttccaatatagtgagctgact

SEQ ID NO: 2048450 - DNA, 25 bp, Homo sapien
gaactgtgctataacacaagctgtt

SEQ ID NO: 2048451 - DNA, 25 bp, Homo sapien
ctagggtttatcacacagctgagca

SEQ ID NO: 2048452 - DNA, 25 bp, Homo sapien
aacacagttggcctggatatttgag

SEQ ID NO: 2048453 - DNA, 25 bp, Homo sapien
gatcacctagtatgaacatgtctct

SEQ ID NO: 2048454 - DNA, 25 bp, Homo sapien
ttcgggtgattattcttggacaaga

SEQ ID NO: 2048455 - DNA, 25 bp, Homo sapien
aaccttgtcacaaagttcgggtgat

SEQ ID NO: 2048456 - DNA, 25 bp, Homo sapien
taggtagtacatgcatatgatacaa

SEQ ID NO: 2048457 - DNA, 25 bp, Homo sapien
agtttaataccacctgctttcagag

SEQ ID NO: 2048458 - DNA, 25 bp, Homo sapien
tggaaatgccccgaacagtttaata

SEQ ID NO: 2048459 - DNA, 25 bp, Homo sapien
gagccaaggtagtggatttccagag

SEQ ID NO: 2048460 - DNA, 25 bp, Homo sapien
aagactcctttgcagtatagttcag

SEQ ID NO: 2048461 - DNA, 25 bp, Homo sapien
ataatatgacaatattcaaatctac

SEQ ID NO: 2048462 - DNA, 25 bp, Homo sapien
ccataatatgacaatattcaaatct

SEQ ID NO: 2048463 - DNA, 25 bp, Homo sapien
tccataatatgacaatattcaaatc

SEQ ID NO: 2048464 - DNA, 25 bp, Homo sapien
cttccataatatgacaatattcaaa

SEQ ID NO: 2048465 - DNA, 25 bp, Homo sapien
atgcacaggcaagtgagcttgtggt

SEQ ID NO: 2048466 - DNA, 25 bp, Homo sapien
gataaaagaagtctgcacatgggct

SEQ ID NO: 2048467 - DNA, 25 bp, Homo sapien
tgtttttctgtatgcacaggcaagt

SEQ ID NO: 2048468 - DNA, 25 bp, Homo sapien
gcatttttgaatcaatctcacagca

SEQ ID NO: 2048469 - DNA, 25 bp, Homo sapien
ccaaagatgatatctgcaaaggtat

SEQ ID NO: 2048470 - DNA, 25 bp, Homo sapien
ctgttcatttccaaagatgatatct

SEQ ID NO: 2048471 - DNA, 25 bp, Homo sapien
gatgatatctgcaaaggtatatttt

SEQ ID NO: 2048472 - DNA, 25 bp, Homo sapien
ttccaaagatgatatctgcaaaggt

SEQ ID NO: 2048473 - DNA, 25 bp, Homo sapien
ttctccctactggcaagtttggtat

SEQ ID NO: 2048474 - DNA, 25 bp, Homo sapien
atcttattgccttaaagcaaaactt

SEQ ID NO: 2048475 - DNA, 25 bp, Homo sapien
tacttgatacttgcactatgtggaa

SEQ ID NO: 2048476 - DNA, 25 bp, Homo sapien
ggaattccttaacgcctgcttcact

SEQ ID NO: 2048477 - DNA, 25 bp, Homo sapien
ccagtgtttgctactacttgatact

SEQ ID NO: 2048478 - DNA, 25 bp, Homo sapien
tgcactatgtggaattccttaacgc

SEQ ID NO: 2048479 - DNA, 25 bp, Homo sapien
gacagtggcccgtacatttaaagac

SEQ ID NO: 2048480 - DNA, 25 bp, Homo sapien
tttccacatccacaaagactagcat

SEQ ID NO: 2048481 - DNA, 25 bp, Homo sapien
aaagaccgactggtacaaataattg

SEQ ID NO: 2048482 - DNA, 25 bp, Homo sapien
agagaattacttctgcagacagtgg

SEQ ID NO: 2048483 - DNA, 25 bp, Homo sapien
aaaggatgactgagacgaccaggca

SEQ ID NO: 2048484 - DNA, 25 bp, Homo sapien
tggaggacaacggtataatcacggc

SEQ ID NO: 2048485 - DNA, 25 bp, Homo sapien
tgtcttcatacataaatgacgccct

SEQ ID NO: 2048486 - DNA, 25 bp, Homo sapien
tataggtcatagatcctggatgagc

SEQ ID NO: 2048487 - DNA, 25 bp, Homo sapien
ttcatcaggcccacgtaaccacatt

SEQ ID NO: 2048488 - DNA, 25 bp, Homo sapien
catcaggcccacgtaaccacattgg

SEQ ID NO: 2048489 - DNA, 25 bp, Homo sapien
caggcccacgtaaccacattggcag

SEQ ID NO: 2048490 - DNA, 25 bp, Homo sapien
tcaggcccacgtaaccacattggca

SEQ ID NO: 2048491 - DNA, 25 bp, Homo sapien
ggtagcatctgtcacaacagtcttg

SEQ ID NO: 2048492 - DNA, 25 bp, Homo sapien
gatgatatgagtgctgtacacacag

SEQ ID NO: 2048493 - DNA, 25 bp, Homo sapien
tgtaagcactacaattctcagaagc

SEQ ID NO: 2048494 - DNA, 25 bp, Homo sapien
tgttagaacagcagtattaccaccg

SEQ ID NO: 2048495 - DNA, 25 bp, Homo sapien
ctgtaggaaaatgtataaagaacac

SEQ ID NO: 2048496 - DNA, 25 bp, Homo sapien
tactatcagtacacaagagggctaa

SEQ ID NO: 2048497 - DNA, 25 bp, Homo sapien
tgtcaactaaagaagcagctcaact

SEQ ID NO: 2048498 - DNA, 25 bp, Homo sapien
agaagaatgttactctgccactcag

SEQ ID NO: 2048499 - DNA, 25 bp, Homo sapien
cacaacttggtagattatggaccag

SEQ ID NO: 2048500 - DNA, 25 bp, Homo sapien
tatagtcgagctaaaacttgtggag

SEQ ID NO: 2048501 - DNA, 25 bp, Homo sapien
tagtcagtgtcaagcttatagtcga

SEQ ID NO: 2048502 - DNA, 25 bp, Homo sapien
tgaagacactgactctctgtactga

SEQ ID NO: 2048503 - DNA, 25 bp, Homo sapien
taataaagttatagctggcagtcac

SEQ ID NO: 2048504 - DNA, 25 bp, Homo sapien
taaatcctgcttccctcggactgac

SEQ ID NO: 2048505 - DNA, 25 bp, Homo sapien
tcggactgacatactcaaggaatat

SEQ ID NO: 2048506 - DNA, 25 bp, Homo sapien
tgtgttgttaagtcgaggaccttga

SEQ ID NO: 2048507 - DNA, 25 bp, Homo sapien
tctaaacgtcgatcagggccatatt

SEQ ID NO: 2048508 - DNA, 25 bp, Homo sapien
tccgggaagagcaccaatgccatct

SEQ ID NO: 2048509 - DNA, 25 bp, Homo sapien
tagagccctgaatagtgccaagatt

SEQ ID NO: 2048510 - DNA, 25 bp, Homo sapien
gaatatgcagctcccctatgtgatg

SEQ ID NO: 2048511 - DNA, 25 bp, Homo sapien
tgccatctactgtcatagagccctg

SEQ ID NO: 2048512 - DNA, 25 bp, Homo sapien
tcttcgccattaattaagaactctg

SEQ ID NO: 2048513 - DNA, 25 bp, Homo sapien
ttgattcttcgccattaattaagaa

SEQ ID NO: 2048514 - DNA, 25 bp, Homo sapien
tcgccattaattaagaactctgaaa

SEQ ID NO: 2048515 - DNA, 25 bp, Homo sapien
cacttttgattcttcgccattaatt

SEQ ID NO: 2048516 - DNA, 25 bp, Homo sapien
ataaagaaactatttggccacatca

SEQ ID NO: 2048517 - DNA, 25 bp, Homo sapien
taaagcatttagcaaggtagtataa

SEQ ID NO: 2048518 - DNA, 25 bp, Homo sapien
cataaaggacttattagacacggaa

SEQ ID NO: 2048519 - DNA, 25 bp, Homo sapien
gcaagttatatgatagatactggtg

SEQ ID NO: 2048520 - DNA, 25 bp, Homo sapien
tatgaaaccagcagggcactacaat

SEQ ID NO: 2048521 - DNA, 25 bp, Homo sapien
aaagtgcaccacagtattaccgtga

SEQ ID NO: 2048522 - DNA, 25 bp, Homo sapien
gacactttgatatcagaatacgcct

SEQ ID NO: 2048523 - DNA, 25 bp, Homo sapien
tacacagtatgaaggaatcccaaat

SEQ ID NO: 2048524 - DNA, 25 bp, Homo sapien
tattatgaagacagatggtttcact

SEQ ID NO: 2048525 - DNA, 25 bp, Homo sapien
cattgaaatgttactacagcatttg

SEQ ID NO: 2048526 - DNA, 25 bp, Homo sapien
accaaaaagaagtatagctcactga

SEQ ID NO: 2048527 - DNA, 25 bp, Homo sapien
gagtacattgaaatgttactacagc

SEQ ID NO: 2048528 - DNA, 25 bp, Homo sapien
gcaatgacaaatcagtcaacaaaag

SEQ ID NO: 2048529 - DNA, 25 bp, Homo sapien
agcaatgacaaatcagtcaacaaaa

SEQ ID NO: 2048530 - DNA, 25 bp, Homo sapien
cttcattatcctttccactgaaatc

SEQ ID NO: 2048531 - DNA, 25 bp, Homo sapien
aatgacaaatcagtcaacaaaagta

SEQ ID NO: 2048532 - DNA, 25 bp, Homo sapien
cagaaacaacttgttcctcaagttc

SEQ ID NO: 2048533 - DNA, 25 bp, Homo sapien
gttcaaacagtattgtgtgggatga

SEQ ID NO: 2048534 - DNA, 25 bp, Homo sapien
taaccacagaaacaacttgttcctc

SEQ ID NO: 2048535 - DNA, 25 bp, Homo sapien
ttcaaacagtattgtgtgggatgaa

SEQ ID NO: 2048536 - DNA, 25 bp, Homo sapien
caaatattcaactatacatcgtttt

SEQ ID NO: 2048537 - DNA, 25 bp, Homo sapien
aaattgtcattaggtaattaggcta

SEQ ID NO: 2048538 - DNA, 25 bp, Homo sapien
ttaaattgtcattaggtaattaggc

SEQ ID NO: 2048539 - DNA, 25 bp, Homo sapien
ttttcaaatattcaactatacatcg

SEQ ID NO: 2048540 - DNA, 25 bp, Homo sapien
catccgctggtcgtctgtcatggcc

SEQ ID NO: 2048541 - DNA, 25 bp, Homo sapien
gctggtcgtctgtcatggccaaaaa

SEQ ID NO: 2048542 - DNA, 25 bp, Homo sapien
tgttaatatacggtaaaggaagctg

SEQ ID NO: 2048543 - DNA, 25 bp, Homo sapien
tatacggtaaaggaagctgtggcaa

SEQ ID NO: 2048544 - DNA, 25 bp, Homo sapien
ggttactcagctaattacctggatg

SEQ ID NO: 2048545 - DNA, 25 bp, Homo sapien
gaatgtccatctccaaaggatggta

SEQ ID NO: 2048546 - DNA, 25 bp, Homo sapien
tatagccaaaaagcctagcctgcca

SEQ ID NO: 2048547 - DNA, 25 bp, Homo sapien
tctccattgcaccataatagcctgt

SEQ ID NO: 2048548 - DNA, 25 bp, Homo sapien
tttaatatctattcctgaatgaaaa

SEQ ID NO: 2048549 - DNA, 25 bp, Homo sapien
tatctattcctgaatgaaaataagc

SEQ ID NO: 2048550 - DNA, 25 bp, Homo sapien
ctattcctgaatgaaaataagcagt

SEQ ID NO: 2048551 - DNA, 25 bp, Homo sapien
taatatctattcctgaatgaaaata

SEQ ID NO: 2048552 - DNA, 25 bp, Homo sapien
gcattatccagctgtctaagagtat

SEQ ID NO: 2048553 - DNA, 25 bp, Homo sapien
aagagtataggactggcgcccaata

SEQ ID NO: 2048554 - DNA, 25 bp, Homo sapien
ttgacaataacagcgtaaagcatgc

SEQ ID NO: 2048555 - DNA, 25 bp, Homo sapien
gttgagcagcagattgtttactttc

SEQ ID NO: 2048556 - DNA, 25 bp, Homo sapien
tcactgtgtagcccaggctggagtg

SEQ ID NO: 2048557 - DNA, 25 bp, Homo sapien
ggagcctcactgtgtagcccaggct

SEQ ID NO: 2048558 - DNA, 25 bp, Homo sapien
cctgttccaaaagaagtgcacttcg

SEQ ID NO: 2048559 - DNA, 25 bp, Homo sapien
tataaagcaatgtgctgcctgttcc

SEQ ID NO: 2048560 - DNA, 25 bp, Homo sapien
gctttactaaatcgatggcctgcca

SEQ ID NO: 2048561 - DNA, 25 bp, Homo sapien
tgcatattttctaaccatgggactt

SEQ ID NO: 2048562 - DNA, 25 bp, Homo sapien
taaattctcattccagcccattaat

SEQ ID NO: 2048563 - DNA, 25 bp, Homo sapien
ccaaacagctggttagatatcacaa

SEQ ID NO: 2048564 - DNA, 25 bp, Homo sapien
gaatttcacttaggcctcaacagag

SEQ ID NO: 2048565 - DNA, 25 bp, Homo sapien
gcctgtgtgtgtgttaccctggttt

SEQ ID NO: 2048566 - DNA, 25 bp, Homo sapien
caaccgtattaggagagctgcagcc

SEQ ID NO: 2048567 - DNA, 25 bp, Homo sapien
agcaacacacatctttcagccaaca

SEQ ID NO: 2048568 - DNA, 25 bp, Homo sapien
ttaaaagttcagcactaagcaacac

SEQ ID NO: 2048569 - DNA, 25 bp, Homo sapien
ctcactggtcaaccgtattaggaga

SEQ ID NO: 2048570 - DNA, 25 bp, Homo sapien
tccatgtaatgagcaggatatggcc

SEQ ID NO: 2048571 - DNA, 25 bp, Homo sapien
gatatggcctaggtgctcctggttg

SEQ ID NO: 2048572 - DNA, 25 bp, Homo sapien
tgtctgaattgctgtatccatgtaa

SEQ ID NO: 2048573 - DNA, 25 bp, Homo sapien
tctgtatgtctgaattgctgtatcc

SEQ ID NO: 2048574 - DNA, 25 bp, Homo sapien
gtaacacagttttggttgtggtatc

SEQ ID NO: 2048575 - DNA, 25 bp, Homo sapien
cctctgatatgctgagatgtaacac

SEQ ID NO: 2048576 - DNA, 25 bp, Homo sapien
ccatgggcctctgatatgctgagat

SEQ ID NO: 2048577 - DNA, 25 bp, Homo sapien
gggcctctgatatgctgagatgtaa

SEQ ID NO: 2048578 - DNA, 25 bp, Homo sapien
gatagcaactgtaagccaaatcata

SEQ ID NO: 2048579 - DNA, 25 bp, Homo sapien
atttgaagttctggtgcttccggcg

SEQ ID NO: 2048580 - DNA, 25 bp, Homo sapien
tgctgcaccaaaaaacataagtcag

SEQ ID NO: 2048581 - DNA, 25 bp, Homo sapien
taaagcattgcttgatcattaagaa

SEQ ID NO: 2048582 - DNA, 25 bp, Homo sapien
tagttgcagaaaatagagatcgact

SEQ ID NO: 2048583 - DNA, 25 bp, Homo sapien
ttttcaggtcattaatgctcttttc

SEQ ID NO: 2048584 - DNA, 25 bp, Homo sapien
aatagagatcgactcaaaccttttc

SEQ ID NO: 2048585 - DNA, 25 bp, Homo sapien
tttctggaactttactgccactaaa

SEQ ID NO: 2048586 - DNA, 25 bp, Homo sapien
gggtcactggattgctccaactgaa

SEQ ID NO: 2048587 - DNA, 25 bp, Homo sapien
tcaatactgttagaagggtcactgg

SEQ ID NO: 2048588 - DNA, 25 bp, Homo sapien
caactgaagtgggtgagctctaaag

SEQ ID NO: 2048589 - DNA, 25 bp, Homo sapien
caaaaggccccgaaatgtgaactct

SEQ ID NO: 2048590 - DNA, 25 bp, Homo sapien
gaaaacagtgctaatactaccatac

SEQ ID NO: 2048591 - DNA, 25 bp, Homo sapien
aaacagtgctaatactaccatactg

SEQ ID NO: 2048592 - DNA, 25 bp, Homo sapien
agaaaacagtgctaatactaccata

SEQ ID NO: 2048593 - DNA, 25 bp, Homo sapien
aaaacagtgctaatactaccatact

SEQ ID NO: 2048594 - DNA, 25 bp, Homo sapien
taatccatccaatgaaagcaagtta

SEQ ID NO: 2048595 - DNA, 25 bp, Homo sapien
tatttgaagttatagtacaagggcc

SEQ ID NO: 2048596 - DNA, 25 bp, Homo sapien
gcaagttattatcagaattcttatt

SEQ ID NO: 2048597 - DNA, 25 bp, Homo sapien
agttatagtacaagggccatcttca

SEQ ID NO: 2048598 - DNA, 25 bp, Homo sapien
atactatttttctggagatactgac

SEQ ID NO: 2048599 - DNA, 25 bp, Homo sapien
taagtaaatagcaaccctgagttcc

SEQ ID NO: 2048600 - DNA, 25 bp, Homo sapien
catctgatgctcgattagatgttcg

SEQ ID NO: 2048601 - DNA, 25 bp, Homo sapien
aaggatctggtatctgttcatctga

SEQ ID NO: 2048602 - DNA, 25 bp, Homo sapien
tcatgtaaaagtacatagtatttaa

SEQ ID NO: 2048603 - DNA, 25 bp, Homo sapien
agtgtatttggtataaaccacttgg

SEQ ID NO: 2048604 - DNA, 25 bp, Homo sapien
gtgacaactttgaaaactgttccac

SEQ ID NO: 2048605 - DNA, 25 bp, Homo sapien
tgttgtgctgaattcgatgctgttc

SEQ ID NO: 2048606 - DNA, 25 bp, Homo sapien
tgctggcatcgactgaagaaaggtt

SEQ ID NO: 2048607 - DNA, 25 bp, Homo sapien
tgatccaatgctggcatcgactgaa

SEQ ID NO: 2048608 - DNA, 25 bp, Homo sapien
tcagaaattcatgatccaatgctgg

SEQ ID NO: 2048609 - DNA, 25 bp, Homo sapien
taagactcaaaccatggagtagtgg

SEQ ID NO: 2048610 - DNA, 25 bp, Homo sapien
agtgcaacggtgggatctcggctta

SEQ ID NO: 2048611 - DNA, 25 bp, Homo sapien
aacctccgcctcaagcagctgggat

SEQ ID NO: 2048612 - DNA, 25 bp, Homo sapien
gcaacggtgggatctcggcttactg

SEQ ID NO: 2048613 - DNA, 25 bp, Homo sapien
acctccgcctcaagcagctgggatt

SEQ ID NO: 2048614 - DNA, 25 bp, Homo sapien
tatgataggtaatccctctctgtgc

SEQ ID NO: 2048615 - DNA, 25 bp, Homo sapien
gattaacacgtttgtctccctacca

SEQ ID NO: 2048616 - DNA, 25 bp, Homo sapien
gcataccaggtatgccacagctcta

SEQ ID NO: 2048617 - DNA, 25 bp, Homo sapien
tgggatgaccccttgagctcaagag

SEQ ID NO: 2048618 - DNA, 25 bp, Homo sapien
tgatgttaaggtcataatctcctgc

SEQ ID NO: 2048619 - DNA, 25 bp, Homo sapien
attagctactaatccttctgcaggc

SEQ ID NO: 2048620 - DNA, 25 bp, Homo sapien
ggtgacaatgttgcttactgctatc

SEQ ID NO: 2048621 - DNA, 25 bp, Homo sapien
cattcaaaagcttccggatggctcc

SEQ ID NO: 2048622 - DNA, 25 bp, Homo sapien
tgcaccaattacttaacgacctagg

SEQ ID NO: 2048623 - DNA, 25 bp, Homo sapien
tcgctatggccgtggagaacagtct

SEQ ID NO: 2048624 - DNA, 25 bp, Homo sapien
tcaatgccgttctcgaagactcacg

SEQ ID NO: 2048625 - DNA, 25 bp, Homo sapien
gaccctgtcggtctaagaggcagca

SEQ ID NO: 2048626 - DNA, 25 bp, Homo sapien
gactgcgctgtcttgacaacctcac

SEQ ID NO: 2048627 - DNA, 25 bp, Homo sapien
ggactgcgctgtcttgacaacctca

SEQ ID NO: 2048628 - DNA, 25 bp, Homo sapien
ttaggactgcgctgtcttgacaacc

SEQ ID NO: 2048629 - DNA, 25 bp, Homo sapien
taggactgcgctgtcttgacaacct

SEQ ID NO: 2048630 - DNA, 25 bp, Homo sapien
gctccaggacgtaaacactgccctt

SEQ ID NO: 2048631 - DNA, 25 bp, Homo sapien
cgcaacttccttctcccgaccacgg

SEQ ID NO: 2048632 - DNA, 25 bp, Homo sapien
ttctcccgaccacggctttgcggga

SEQ ID NO: 2048633 - DNA, 25 bp, Homo sapien
agccccagacgccacggtaccggct

SEQ ID NO: 2048634 - DNA, 25 bp, Homo sapien
ctggaaaagggaggataccacatac

SEQ ID NO: 2048635 - DNA, 25 bp, Homo sapien
agaagggcttaagcagctccgcgaa

SEQ ID NO: 2048636 - DNA, 25 bp, Homo sapien
tgcactgattgtacacactgggcca

SEQ ID NO: 2048637 - DNA, 25 bp, Homo sapien
gagtccgggattagctcctgcactg

SEQ ID NO: 2048638 - DNA, 25 bp, Homo sapien
ttgagacgagtgagccgctcggctt

SEQ ID NO: 2048639 - DNA, 25 bp, Homo sapien
cctgcgaggttatcctgcggctgca

SEQ ID NO: 2048640 - DNA, 25 bp, Homo sapien
gcgaggttatcctgcggctgcagca

SEQ ID NO: 2048641 - DNA, 25 bp, Homo sapien
caccctgcgaggttatcctgcggct

SEQ ID NO: 2048642 - DNA, 25 bp, Homo sapien
cgccctccggcccaccctgcgaggt

SEQ ID NO: 2048643 - DNA, 25 bp, Homo sapien
caccacttagtccttcggacggcaa

SEQ ID NO: 2048644 - DNA, 25 bp, Homo sapien
tgctcgcattccaccccgataggtg

SEQ ID NO: 2048645 - DNA, 25 bp, Homo sapien
agacgccgccgcttcggtttctggg

SEQ ID NO: 2048646 - DNA, 25 bp, Homo sapien
ccggaaccgccatgttgaggccgaa

SEQ ID NO: 2048647 - DNA, 25 bp, Homo sapien
actttgaaatggctctgcgaagctc

SEQ ID NO: 2048648 - DNA, 25 bp, Homo sapien
catactttgaaatggctctgcgaag

SEQ ID NO: 2048649 - DNA, 25 bp, Homo sapien
atactttgaaatggctctgcgaagc

SEQ ID NO: 2048650 - DNA, 25 bp, Homo sapien
ccatactttgaaatggctctgcgaa

SEQ ID NO: 2048651 - DNA, 25 bp, Homo sapien
cttaaagagattaactagaatctaa

SEQ ID NO: 2048652 - DNA, 25 bp, Homo sapien
tcttaaagagattaactagaatcta

SEQ ID NO: 2048653 - DNA, 25 bp, Homo sapien
atcttaaagagattaactagaatct

SEQ ID NO: 2048654 - DNA, 25 bp, Homo sapien
tggcccatgaagctaggtcctccat

SEQ ID NO: 2048655 - DNA, 25 bp, Homo sapien
ggtggcccatgaagctaggtcctcc

SEQ ID NO: 2048656 - DNA, 25 bp, Homo sapien
gcccaaattgaaggtggcccatgaa

SEQ ID NO: 2048657 - DNA, 25 bp, Homo sapien
tcagtttggcccaaattgaaggtgg

SEQ ID NO: 2048658 - DNA, 25 bp, Homo sapien
cattgccctgtcctctcgatattag

SEQ ID NO: 2048659 - DNA, 25 bp, Homo sapien
catggcacggttcagcacattgccc

SEQ ID NO: 2048660 - DNA, 25 bp, Homo sapien
tattagcacacagtgcaggttcagg

SEQ ID NO: 2048661 - DNA, 25 bp, Homo sapien
ttttgctgattgcacactcatggca

SEQ ID NO: 2048662 - DNA, 25 bp, Homo sapien
tggtgttgaccatgcagacaaactt

SEQ ID NO: 2048663 - DNA, 25 bp, Homo sapien
gacagattaggtgctggtcgcctga

SEQ ID NO: 2048664 - DNA, 25 bp, Homo sapien
taattcagagcgatacaaaaggcac

SEQ ID NO: 2048665 - DNA, 25 bp, Homo sapien
gcaattctgactcctgtgcctggat

SEQ ID NO: 2048666 - DNA, 25 bp, Homo sapien
actaaagatatggttccaggcagac

SEQ ID NO: 2048667 - DNA, 25 bp, Homo sapien
gattgtgaatctacactaaagatat

SEQ ID NO: 2048668 - DNA, 25 bp, Homo sapien
attgattgtgaatctacactaaaga

SEQ ID NO: 2048669 - DNA, 25 bp, Homo sapien
gaatctacactaaagatatggttcc

SEQ ID NO: 2048670 - DNA, 25 bp, Homo sapien
ccaagtgtctttcatttggaagtga

SEQ ID NO: 2048671 - DNA, 25 bp, Homo sapien
tactgggtgccaagtgtctttcatt

SEQ ID NO: 2048672 - DNA, 25 bp, Homo sapien
gaagtgaacttactccagttattga

SEQ ID NO: 2048673 - DNA, 25 bp, Homo sapien
ccttactgtcttcagtgatgtttaa

SEQ ID NO: 2048674 - DNA, 25 bp, Homo sapien
ctcctgtgtgttttcgtctttgctt

SEQ ID NO: 2048675 - DNA, 25 bp, Homo sapien
gttttcgtctttgcttcttcatggt

SEQ ID NO: 2048676 - DNA, 25 bp, Homo sapien
tgaaaccaaactggcaggatgggag

SEQ ID NO: 2048677 - DNA, 25 bp, Homo sapien
gtgtgttttcgtctttgcttcttca

SEQ ID NO: 2048678 - DNA, 25 bp, Homo sapien
tgcacgtcaaatctggggctaatca

SEQ ID NO: 2048679 - DNA, 25 bp, Homo sapien
cacgtcaaatctggggctaatcact

SEQ ID NO: 2048680 - DNA, 25 bp, Homo sapien
gagttgcacgtcaaatctggggcta

SEQ ID NO: 2048681 - DNA, 25 bp, Homo sapien
gtcaaatctggggctaatcactcta

SEQ ID NO: 2048682 - DNA, 25 bp, Homo sapien
aatcttcccagctctgatcatcaat

SEQ ID NO: 2048683 - DNA, 25 bp, Homo sapien
atcatcaatgatttcagactcgcca

SEQ ID NO: 2048684 - DNA, 25 bp, Homo sapien
caatgatttcagactcgccaatgta

SEQ ID NO: 2048685 - DNA, 25 bp, Homo sapien
atcaatgatttcagactcgccaatg

SEQ ID NO: 2048686 - DNA, 25 bp, Homo sapien
agcatggcccaataagaacctggtg

SEQ ID NO: 2048687 - DNA, 25 bp, Homo sapien
cagccaggacatttatgcgcaccat

SEQ ID NO: 2048688 - DNA, 25 bp, Homo sapien
ctttggagcatggcccaataagaac

SEQ ID NO: 2048689 - DNA, 25 bp, Homo sapien
tggagcatggcccaataagaacctg

SEQ ID NO: 2048690 - DNA, 25 bp, Homo sapien
tcaatttagcagccctgctgacctg

SEQ ID NO: 2048691 - DNA, 25 bp, Homo sapien
gcctccagtgtgatactggaactaa

SEQ ID NO: 2048692 - DNA, 25 bp, Homo sapien
cagtgtgatactggaactaatcttg

SEQ ID NO: 2048693 - DNA, 25 bp, Homo sapien
gatactggaactaatcttgttatag

SEQ ID NO: 2048694 - DNA, 25 bp, Homo sapien
ttttgcctccagtgtgatactggaa

SEQ ID NO: 2048695 - DNA, 25 bp, Homo sapien
gaaccagagggagaaccacaaagga

SEQ ID NO: 2048696 - DNA, 25 bp, Homo sapien
ccagagagcctgctaaggagcctgc

SEQ ID NO: 2048697 - DNA, 25 bp, Homo sapien
gagaaccacaaaggatgtcatagac

SEQ ID NO: 2048698 - DNA, 25 bp, Homo sapien
gacagtagttgtgttgagagccaga

SEQ ID NO: 2048699 - DNA, 25 bp, Homo sapien
tacgcaggttggaccatcttataga

SEQ ID NO: 2048700 - DNA, 25 bp, Homo sapien
gcttctacggcatttctcttcaaag

SEQ ID NO: 2048701 - DNA, 25 bp, Homo sapien
tgtacagataattgcactccggcct

SEQ ID NO: 2048702 - DNA, 25 bp, Homo sapien
aaaagccacgtccatgcttctacgg

SEQ ID NO: 2048703 - DNA, 25 bp, Homo sapien
ggccgggtctctacgaacacgtgaa

SEQ ID NO: 2048704 - DNA, 25 bp, Homo sapien
cggttgctatacaggccgcacttca

SEQ ID NO: 2048705 - DNA, 25 bp, Homo sapien
gaaggaaaagcagctccgtccacaa

SEQ ID NO: 2048706 - DNA, 25 bp, Homo sapien
taggcagcgcaatgccaagacagag

SEQ ID NO: 2048707 - DNA, 25 bp, Homo sapien
tattatagaaaggttcccaggagac

SEQ ID NO: 2048708 - DNA, 25 bp, Homo sapien
gattgtctggtaaagatctgcagta

SEQ ID NO: 2048709 - DNA, 25 bp, Homo sapien
accgcccttaagcacttcatgttga

SEQ ID NO: 2048710 - DNA, 25 bp, Homo sapien
taggcgtcttccctactcagttgaa

SEQ ID NO: 2048711 - DNA, 25 bp, Homo sapien
gaggtaatatagcacagtctggaga

SEQ ID NO: 2048712 - DNA, 25 bp, Homo sapien
taatgaaagatgaaccgggaactca

SEQ ID NO: 2048713 - DNA, 25 bp, Homo sapien
gcacaacctgtctattgaggcctca

SEQ ID NO: 2048714 - DNA, 25 bp, Homo sapien
gggaactcattcctgcgcagtagca

SEQ ID NO: 2048715 - DNA, 25 bp, Homo sapien
taatgtaacggtgaaagagaatccc

SEQ ID NO: 2048716 - DNA, 25 bp, Homo sapien
catctttgtacctgcaagtgccatc

SEQ ID NO: 2048717 - DNA, 25 bp, Homo sapien
cagctagatgaagaaacccaatacc

SEQ ID NO: 2048718 - DNA, 25 bp, Homo sapien
gggaaactacatgaagtcaccgtta

SEQ ID NO: 2048719 - DNA, 25 bp, Homo sapien
gaggccgaggcgagcggatggcttg

SEQ ID NO: 2048720 - DNA, 25 bp, Homo sapien
gaccagtctgggcaatgtgataaaa

SEQ ID NO: 2048721 - DNA, 25 bp, Homo sapien
cagtctgggcaatgtgataaaaccc

SEQ ID NO: 2048722 - DNA, 25 bp, Homo sapien
cgaggcgagcggatggcttgagctc

SEQ ID NO: 2048723 - DNA, 25 bp, Homo sapien
ccttgagtatgtggcagggctggtc

SEQ ID NO: 2048724 - DNA, 25 bp, Homo sapien
gtttgatattcaatccaccttgagt

SEQ ID NO: 2048725 - DNA, 25 bp, Homo sapien
ccggccaatgtcacgaattttaaag

SEQ ID NO: 2048726 - DNA, 25 bp, Homo sapien
ccaatgtcacgaattttaaagtgac

SEQ ID NO: 2048727 - DNA, 25 bp, Homo sapien
cagcagcaccaacgatcacacaggt

SEQ ID NO: 2048728 - DNA, 25 bp, Homo sapien
tgcgatcagtatgcctgaataggct

SEQ ID NO: 2048729 - DNA, 25 bp, Homo sapien
tccctacttctggactgcgatcagt

SEQ ID NO: 2048730 - DNA, 25 bp, Homo sapien
tacagggtctgcatcttacataaca

SEQ ID NO: 2048731 - DNA, 25 bp, Homo sapien
tctctggccccttttgtggaacaac

SEQ ID NO: 2048732 - DNA, 25 bp, Homo sapien
tcctgtaacgccctggaggtccata

SEQ ID NO: 2048733 - DNA, 25 bp, Homo sapien
tgtataaacatcctacctctctggc

SEQ ID NO: 2048734 - DNA, 25 bp, Homo sapien
tagcaatgcccaatacacagtagga

SEQ ID NO: 2048735 - DNA, 25 bp, Homo sapien
aattgtactataggtttttgtactg

SEQ ID NO: 2048736 - DNA, 25 bp, Homo sapien
tcttgaactctatcccctcctccat

SEQ ID NO: 2048737 - DNA, 25 bp, Homo sapien
caagaaaagcacacgcaaaaaaatt

SEQ ID NO: 2048738 - DNA, 25 bp, Homo sapien
gattctctctggtagtatattttaa

SEQ ID NO: 2048739 - DNA, 25 bp, Homo sapien
ggtgcgcacatccttataattttgt

SEQ ID NO: 2048740 - DNA, 25 bp, Homo sapien
gaaaggagaaagagaccgtgattta

SEQ ID NO: 2048741 - DNA, 25 bp, Homo sapien
ttagaaccgtgacattacgcatcga

SEQ ID NO: 2048742 - DNA, 25 bp, Homo sapien
gaccattcaaagaccgaacagcggg

SEQ ID NO: 2048743 - DNA, 25 bp, Homo sapien
gtttatcaagtaaatttgatctcaa

SEQ ID NO: 2048744 - DNA, 25 bp, Homo sapien
gctcctttatggtagcctctatata

SEQ ID NO: 2048745 - DNA, 25 bp, Homo sapien
gtagagtagctcctttatggtagcc

SEQ ID NO: 2048746 - DNA, 25 bp, Homo sapien
aaaaatgagtatgtagagtagctcc

SEQ ID NO: 2048747 - DNA, 25 bp, Homo sapien
caaatactaactgggactgaccctt

SEQ ID NO: 2048748 - DNA, 25 bp, Homo sapien
gcacccaatattcccgggctggctc

SEQ ID NO: 2048749 - DNA, 25 bp, Homo sapien
ggattcagggtggtaaggatgtaga

SEQ ID NO: 2048750 - DNA, 25 bp, Homo sapien
ccgggctggctctcatccaaatact

SEQ ID NO: 2048751 - DNA, 25 bp, Homo sapien
cagaagtcctcagtcattgaacagc

SEQ ID NO: 2048752 - DNA, 25 bp, Homo sapien
ctagggttcccacagtgcatatgta

SEQ ID NO: 2048753 - DNA, 25 bp, Homo sapien
aacagctgagtattatcatagatcc

SEQ ID NO: 2048754 - DNA, 25 bp, Homo sapien
ggccacatggagcaaagtcaacaat

SEQ ID NO: 2048755 - DNA, 25 bp, Homo sapien
actctccaagtctttttggctgaga

SEQ ID NO: 2048756 - DNA, 25 bp, Homo sapien
aatgaagaggatgccattgatgcct

SEQ ID NO: 2048757 - DNA, 25 bp, Homo sapien
tccaagtctttttggctgagaggaa

SEQ ID NO: 2048758 - DNA, 25 bp, Homo sapien
ccattgatgcctttgaactgctcca

SEQ ID NO: 2048759 - DNA, 25 bp, Homo sapien
cggtagatctcatgcatggcgcgcc

SEQ ID NO: 2048760 - DNA, 25 bp, Homo sapien
gtagatctcatgcatggcgcgccgc

SEQ ID NO: 2048761 - DNA, 25 bp, Homo sapien
gttgcggtagatctcatgcatggcg

SEQ ID NO: 2048762 - DNA, 25 bp, Homo sapien
gatctcatgcatggcgcgccgcagg

SEQ ID NO: 2048763 - DNA, 25 bp, Homo sapien
tgctctcatagaccgaggtgatgag

SEQ ID NO: 2048764 - DNA, 25 bp, Homo sapien
tctcatagaccgaggtgatgaggtg

SEQ ID NO: 2048765 - DNA, 25 bp, Homo sapien
catagaccgaggtgatgaggtggtg

SEQ ID NO: 2048766 - DNA, 25 bp, Homo sapien
ttgctctcatagaccgaggtgatga

SEQ ID NO: 2048767 - DNA, 25 bp, Homo sapien
cttgagagctttgggcccttggtac

SEQ ID NO: 2048768 - DNA, 25 bp, Homo sapien
ggccagcgcgttgtccaggaagcac

SEQ ID NO: 2048769 - DNA, 25 bp, Homo sapien
ggaagcacagcgacaggtcgtactc

SEQ ID NO: 2048770 - DNA, 25 bp, Homo sapien
cccttggtacttggtgctgacggcc

SEQ ID NO: 2048771 - DNA, 25 bp, Homo sapien
tgtgcagcacccgcctgatgttgtc

SEQ ID NO: 2048772 - DNA, 25 bp, Homo sapien
accctgtgcagcacccgcctgatgt

SEQ ID NO: 2048773 - DNA, 25 bp, Homo sapien
cagcgcatgaggtagtgggcgccct

SEQ ID NO: 2048774 - DNA, 25 bp, Homo sapien
atgttgtccagcacgccacctcggg

SEQ ID NO: 2048775 - DNA, 25 bp, Homo sapien
tcagggcctctgcgtacttgcccat

SEQ ID NO: 2048776 - DNA, 25 bp, Homo sapien
gcacgctcatcagcactgccttctg

SEQ ID NO: 2048777 - DNA, 25 bp, Homo sapien
agcactgccttctgctggcttctca

SEQ ID NO: 2048778 - DNA, 25 bp, Homo sapien
tgctggcttctcagggcctctgcgt

SEQ ID NO: 2048779 - DNA, 25 bp, Homo sapien
ggctcccatctttcacgtcactagg

SEQ ID NO: 2048780 - DNA, 25 bp, Homo sapien
atctgatacagcccgttcctcctgg

SEQ ID NO: 2048781 - DNA, 25 bp, Homo sapien
tcctggcaggctcccatctttcacg

SEQ ID NO: 2048782 - DNA, 25 bp, Homo sapien
tgatacagcccgttcctcctggtca

SEQ ID NO: 2048783 - DNA, 25 bp, Homo sapien
gctgtcatgagggtgtttttcagtg

SEQ ID NO: 2048784 - DNA, 25 bp, Homo sapien
gagggtcactactgcttgtgctgcc

SEQ ID NO: 2048785 - DNA, 25 bp, Homo sapien
tttttcagtggagggtcactactgc

SEQ ID NO: 2048786 - DNA, 25 bp, Homo sapien
tgcagctgtgtcgtggtggataatc

SEQ ID NO: 2048787 - DNA, 25 bp, Homo sapien
ctccaagcgacatacacaaaatggg

SEQ ID NO: 2048788 - DNA, 25 bp, Homo sapien
gcactttctcattacctccaagcga

SEQ ID NO: 2048789 - DNA, 25 bp, Homo sapien
ttttaatatactcatgtctgtggat

SEQ ID NO: 2048790 - DNA, 25 bp, Homo sapien
tctgtggatgcttggtataaagact

SEQ ID NO: 2048791 - DNA, 25 bp, Homo sapien
gatattattagctaggatgatggcc

SEQ ID NO: 2048792 - DNA, 25 bp, Homo sapien
tcatcagctgaaaatgtaggtactg

SEQ ID NO: 2048793 - DNA, 25 bp, Homo sapien
ttcatgatctttgccacatcatcag

SEQ ID NO: 2048794 - DNA, 25 bp, Homo sapien
tgtgtctttgctcgtcagtgtgata

SEQ ID NO: 2048795 - DNA, 25 bp, Homo sapien
tgctttgaggcaaatctagcagaat

SEQ ID NO: 2048796 - DNA, 25 bp, Homo sapien
aaagctaggaaaagtgagtgccttg

SEQ ID NO: 2048797 - DNA, 25 bp, Homo sapien
tagcagaatgcatgtggttgttaac

SEQ ID NO: 2048798 - DNA, 25 bp, Homo sapien
aaacctaatagaggcaaatgtttca

SEQ ID NO: 2048799 - DNA, 25 bp, Homo sapien
ccagtcctcctggacgatttttgta

SEQ ID NO: 2048800 - DNA, 25 bp, Homo sapien
tttaggactctgcaaatacagttgg

SEQ ID NO: 2048801 - DNA, 25 bp, Homo sapien
tgctctcttggatctttaggactct

SEQ ID NO: 2048802 - DNA, 25 bp, Homo sapien
tttgtaagcaacgtgtgctctcttg

SEQ ID NO: 2048803 - DNA, 25 bp, Homo sapien
ctgatggtgaacgatcagttgagac

SEQ ID NO: 2048804 - DNA, 25 bp, Homo sapien
tggtgaacgatcagttgagacaact

SEQ ID NO: 2048805 - DNA, 25 bp, Homo sapien
gttgagacaactatctttggaccag

SEQ ID NO: 2048806 - DNA, 25 bp, Homo sapien
gatcagttgagacaactatctttgg

SEQ ID NO: 2048807 - DNA, 25 bp, Homo sapien
gatctgtgagtgtctgaattctgcc

SEQ ID NO: 2048808 - DNA, 25 bp, Homo sapien
ttatcttgaggtacacattgggccc

SEQ ID NO: 2048809 - DNA, 25 bp, Homo sapien
cttgctaggcacgatgagtagtgac

SEQ ID NO: 2048810 - DNA, 25 bp, Homo sapien
cacagacaggtgctcagcttaggaa

SEQ ID NO: 2048811 - DNA, 25 bp, Homo sapien
caaggagtctctgcgttgccaatca

SEQ ID NO: 2048812 - DNA, 25 bp, Homo sapien
ctgtagcataagtgaatcaaaggcc

SEQ ID NO: 2048813 - DNA, 25 bp, Homo sapien
taaagacaggacacacgtaattctc

SEQ ID NO: 2048814 - DNA, 25 bp, Homo sapien
tgttctgtaccccttaatagaggct

SEQ ID NO: 2048815 - DNA, 25 bp, Homo sapien
aaaggccggtgcgtctgatttctca

SEQ ID NO: 2048816 - DNA, 25 bp, Homo sapien
gctgtccgcacatctggaatctggg

SEQ ID NO: 2048817 - DNA, 25 bp, Homo sapien
ttacatgcaaaaaccagccctgcgg

SEQ ID NO: 2048818 - DNA, 25 bp, Homo sapien
cactgtgtgcacctcggtcatgggc

SEQ ID NO: 2048819 - DNA, 25 bp, Homo sapien
aatatcataccttctcacataaacc

SEQ ID NO: 2048820 - DNA, 25 bp, Homo sapien
agtgacgtacaaggcacacctccaa

SEQ ID NO: 2048821 - DNA, 25 bp, Homo sapien
cataaacctacttgggtaagaatga

SEQ ID NO: 2048822 - DNA, 25 bp, Homo sapien
tgtttgttgagtgacgtacaaggca

SEQ ID NO: 2048823 - DNA, 25 bp, Homo sapien
tcaaaaacgtaatctgcatagtaag

SEQ ID NO: 2048824 - DNA, 25 bp, Homo sapien
aaacatgaaattgtgtcccagccca

SEQ ID NO: 2048825 - DNA, 25 bp, Homo sapien
caaaatagcctgttcaccattcaaa

SEQ ID NO: 2048826 - DNA, 25 bp, Homo sapien
cccttctagcacacgcattgatcag

SEQ ID NO: 2048827 - DNA, 25 bp, Homo sapien
cagccattaatgaattgcattatct

SEQ ID NO: 2048828 - DNA, 25 bp, Homo sapien
ccagccattaatgaattgcattatc

SEQ ID NO: 2048829 - DNA, 25 bp, Homo sapien
cattaatgaattgcattatcttctt

SEQ ID NO: 2048830 - DNA, 25 bp, Homo sapien
gccattaatgaattgcattatcttc

SEQ ID NO: 2048831 - DNA, 25 bp, Homo sapien
caatgaaccgtagtgacttggacac

SEQ ID NO: 2048832 - DNA, 25 bp, Homo sapien
gcaggttcccatcaatcttttcagt

SEQ ID NO: 2048833 - DNA, 25 bp, Homo sapien
tgatatgacatcttcggacaaacca

SEQ ID NO: 2048834 - DNA, 25 bp, Homo sapien
gagaggatttcttccgttagctgaa

SEQ ID NO: 2048835 - DNA, 25 bp, Homo sapien
taacaaaatactggtcctccgagag

SEQ ID NO: 2048836 - DNA, 25 bp, Homo sapien
gacttgggacaaccagagacgctgc

SEQ ID NO: 2048837 - DNA, 25 bp, Homo sapien
catgagagccgagaggacacagctt

SEQ ID NO: 2048838 - DNA, 25 bp, Homo sapien
cactcggttacatggatagcaggaa

SEQ ID NO: 2048839 - DNA, 25 bp, Homo sapien
gcttgtgctacagtgacatgatggc

SEQ ID NO: 2048840 - DNA, 25 bp, Homo sapien
tagtaaatgagtggcgcatgcttgc

SEQ ID NO: 2048841 - DNA, 25 bp, Homo sapien
gcaccaacaggtgccatgattgatg

SEQ ID NO: 2048842 - DNA, 25 bp, Homo sapien
tcacgtgtaggctctgcaccaacag

SEQ ID NO: 2048843 - DNA, 25 bp, Homo sapien
gaaggtgctgtctgctcgtgtcaaa

SEQ ID NO: 2048844 - DNA, 25 bp, Homo sapien
tcagagtagatagccaatgggaccc

SEQ ID NO: 2048845 - DNA, 25 bp, Homo sapien
ccaggagaatctagttggcctttac

SEQ ID NO: 2048846 - DNA, 25 bp, Homo sapien
cactcaacagtgatggtcaaaaggg

SEQ ID NO: 2048847 - DNA, 25 bp, Homo sapien
ttgccgcgctggcttgactgtgcga

SEQ ID NO: 2048848 - DNA, 25 bp, Homo sapien
agcgagtctgttgccgcgctggctt

SEQ ID NO: 2048849 - DNA, 25 bp, Homo sapien
cttgactgtgcgaggagggatggag

SEQ ID NO: 2048850 - DNA, 25 bp, Homo sapien
ccctgaagaatagtaggacaaggtg

SEQ ID NO: 2048851 - DNA, 25 bp, Homo sapien
gggcgttcaggagccggcattcttc

SEQ ID NO: 2048852 - DNA, 25 bp, Homo sapien
cgttcaggagccggcattcttctct

SEQ ID NO: 2048853 - DNA, 25 bp, Homo sapien
tcaggagccggcattcttctctgac

SEQ ID NO: 2048854 - DNA, 25 bp, Homo sapien
ggtggggcgttcaggagccggcatt

SEQ ID NO: 2048855 - DNA, 25 bp, Homo sapien
cacactggagaggatctagctgatc

SEQ ID NO: 2048856 - DNA, 25 bp, Homo sapien
acactggagaggatctagctgatct

SEQ ID NO: 2048857 - DNA, 25 bp, Homo sapien
tctagctgatctgtgctgtccatgg

SEQ ID NO: 2048858 - DNA, 25 bp, Homo sapien
taaaaaggtggtggatgactgcaga

SEQ ID NO: 2048859 - DNA, 25 bp, Homo sapien
tagccaggcgggtcttcttaagagg

SEQ ID NO: 2048860 - DNA, 25 bp, Homo sapien
tgttagtgaactgcacggtagccag

SEQ ID NO: 2048861 - DNA, 25 bp, Homo sapien
tgtgagacgataaggactctgtcag

SEQ ID NO: 2048862 - DNA, 25 bp, Homo sapien
ggtggccgctccgatgatggcctat

SEQ ID NO: 2048863 - DNA, 25 bp, Homo sapien
caacttgttgctgcatgggtggccg

SEQ ID NO: 2048864 - DNA, 25 bp, Homo sapien
gagtggcttgcactacgccaggcag

SEQ ID NO: 2048865 - DNA, 25 bp, Homo sapien
tacatgctatggtgggctgtatgcg

SEQ ID NO: 2048866 - DNA, 25 bp, Homo sapien
ttatcaggaatgaacctccaaccct

SEQ ID NO: 2048867 - DNA, 25 bp, Homo sapien
tatcaggaatgaacctccaaccctc

SEQ ID NO: 2048868 - DNA, 25 bp, Homo sapien
atcaggaatgaacctccaaccctca

SEQ ID NO: 2048869 - DNA, 25 bp, Homo sapien
tgaagagctggcgttctgttttgag

SEQ ID NO: 2048870 - DNA, 25 bp, Homo sapien
tgaggtgggtgttaccgtccattgc

SEQ ID NO: 2048871 - DNA, 25 bp, Homo sapien
gatgacggtgatctctgcctatgtg

SEQ ID NO: 2048872 - DNA, 25 bp, Homo sapien
ggttatgagtaccttgactattcac

SEQ ID NO: 2048873 - DNA, 25 bp, Homo sapien
agtggtgttcgtgagggcagatcac

SEQ ID NO: 2048874 - DNA, 25 bp, Homo sapien
aggaggtaagagtggtgttcgtgag

SEQ ID NO: 2048875 - DNA, 25 bp, Homo sapien
tggtgttcgtgagggcagatcactc

SEQ ID NO: 2048876 - DNA, 25 bp, Homo sapien
taagagtggtgttcgtgagggcaga

SEQ ID NO: 2048877 - DNA, 25 bp, Homo sapien
caatgagggctctttatggacagct

SEQ ID NO: 2048878 - DNA, 25 bp, Homo sapien
tgctgacataaacccaagggccaag

SEQ ID NO: 2048879 - DNA, 25 bp, Homo sapien
tcctgtaaggatcaagggcaagtcc

SEQ ID NO: 2048880 - DNA, 25 bp, Homo sapien
tctcaggaaagctctgcagcaatga

SEQ ID NO: 2048881 - DNA, 25 bp, Homo sapien
catttggatcggacagaacctctaa

SEQ ID NO: 2048882 - DNA, 25 bp, Homo sapien
ggtagggcagtatctgaagacttca

SEQ ID NO: 2048883 - DNA, 25 bp, Homo sapien
aagaggagaagtcgcacatttggat

SEQ ID NO: 2048884 - DNA, 25 bp, Homo sapien
cacatctgttcttctcgctcagaga

SEQ ID NO: 2048885 - DNA, 25 bp, Homo sapien
ccatacacacagaccgagagtcggt

SEQ ID NO: 2048886 - DNA, 25 bp, Homo sapien
gactttcccgggatgcctgctgatt

SEQ ID NO: 2048887 - DNA, 25 bp, Homo sapien
cagtcggttttcacatcacggacag

SEQ ID NO: 2048888 - DNA, 25 bp, Homo sapien
caggtccctgcaaccatgaaggttc

SEQ ID NO: 2048889 - DNA, 25 bp, Homo sapien
ggaccagggtttcgggccagctctc

SEQ ID NO: 2048890 - DNA, 25 bp, Homo sapien
tgtcgaactgttcttggcagatacc

SEQ ID NO: 2048891 - DNA, 25 bp, Homo sapien
gaggatcttgttgttccgcagcaca

SEQ ID NO: 2048892 - DNA, 25 bp, Homo sapien
cagatacctagccagtgatggacca

SEQ ID NO: 2048893 - DNA, 25 bp, Homo sapien
gctaatgctttcgttggtccggtga

SEQ ID NO: 2048894 - DNA, 25 bp, Homo sapien
tgattcatacaaatgaggcacggca

SEQ ID NO: 2048895 - DNA, 25 bp, Homo sapien
ggacttcgggtgctaaatctgccct

SEQ ID NO: 2048896 - DNA, 25 bp, Homo sapien
caatgttgcggatggtgtgttcgcc

SEQ ID NO: 2048897 - DNA, 25 bp, Homo sapien
cccattagagtgagttcatccccag

SEQ ID NO: 2048898 - DNA, 25 bp, Homo sapien
gctgatggaattgagcttcccaatc

SEQ ID NO: 2048899 - DNA, 25 bp, Homo sapien
tttgaagattgtgttgagtcgtgac

SEQ ID NO: 2048900 - DNA, 25 bp, Homo sapien
gaagattgtgttgagtcgtgacttt

SEQ ID NO: 2048901 - DNA, 25 bp, Homo sapien
aaattttaagcttgtggacgcgcac

SEQ ID NO: 2048902 - DNA, 25 bp, Homo sapien
tgattatatctagccaggagcggtg

SEQ ID NO: 2048903 - DNA, 25 bp, Homo sapien
tcctgagtggctaaccgggtctaaa

SEQ ID NO: 2048904 - DNA, 25 bp, Homo sapien
cctgattgagaacctgagtgggcac

SEQ ID NO: 2048905 - DNA, 25 bp, Homo sapien
ttagtgagtataaatatttggtgct

SEQ ID NO: 2048906 - DNA, 25 bp, Homo sapien
tataaatatttggtgcttcaagagc

SEQ ID NO: 2048907 - DNA, 25 bp, Homo sapien
tatttggtgcttcaagagctactac

SEQ ID NO: 2048908 - DNA, 25 bp, Homo sapien
gtgagtataaatatttggtgcttca

SEQ ID NO: 2048909 - DNA, 25 bp, Homo sapien
gatatcctccatgacgtacacgcgt

SEQ ID NO: 2048910 - DNA, 25 bp, Homo sapien
tgcactggctcctttatatctcggt

SEQ ID NO: 2048911 - DNA, 25 bp, Homo sapien
cacactgttgaaatattgcactggc

SEQ ID NO: 2048912 - DNA, 25 bp, Homo sapien
cgttcaggaaatgccttagccacct

SEQ ID NO: 2048913 - DNA, 25 bp, Homo sapien
ctcatattcctggttagaacaatat

SEQ ID NO: 2048914 - DNA, 25 bp, Homo sapien
tattcctggttagaacaatatgcag

SEQ ID NO: 2048915 - DNA, 25 bp, Homo sapien
ttcctctcaaccactgagcctgccg

SEQ ID NO: 2048916 - DNA, 25 bp, Homo sapien
aatatgcaggtaatgtctagggctc

SEQ ID NO: 2048917 - DNA, 25 bp, Homo sapien
ctgagcaattctccatgcaatgaca

SEQ ID NO: 2048918 - DNA, 25 bp, Homo sapien
tgagcaattctccatgcaatgacac

SEQ ID NO: 2048919 - DNA, 25 bp, Homo sapien
tgtaaggtacctgaaatcacattct

SEQ ID NO: 2048920 - DNA, 25 bp, Homo sapien
ttgtaaggtacctgaaatcacattc

SEQ ID NO: 2048921 - DNA, 25 bp, Homo sapien
gtaaggtacctgaaatcacattcta

SEQ ID NO: 2048922 - DNA, 25 bp, Homo sapien
aaggtacctgaaatcacattctaag

SEQ ID NO: 2048923 - DNA, 25 bp, Homo sapien
catttggagattgttgaaacatctg

SEQ ID NO: 2048924 - DNA, 25 bp, Homo sapien
aaaacatttggagattgttgaaaca

SEQ ID NO: 2048925 - DNA, 25 bp, Homo sapien
gtctccattgtaagagctgttccat

SEQ ID NO: 2048926 - DNA, 25 bp, Homo sapien
tccattgtaagagctgttccatctg

SEQ ID NO: 2048927 - DNA, 25 bp, Homo sapien
cactttgtaatggtattactgcttc

SEQ ID NO: 2048928 - DNA, 25 bp, Homo sapien
tgtaatggtattactgcttcagatt

SEQ ID NO: 2048929 - DNA, 25 bp, Homo sapien
tgcttcagattttaagcccgtttcc

SEQ ID NO: 2048930 - DNA, 25 bp, Homo sapien
cttcagattttaagcccgtttccat

SEQ ID NO: 2048931 - DNA, 25 bp, Homo sapien
tgcttggcacttgaggcttcagaga

SEQ ID NO: 2048932 - DNA, 25 bp, Homo sapien
gctcttaaagctggtccctcctgtc

SEQ ID NO: 2048933 - DNA, 25 bp, Homo sapien
gacactgtcgggattaaacgtagta

SEQ ID NO: 2048934 - DNA, 25 bp, Homo sapien
gaagagttcagtgcagtgcttggca

SEQ ID NO: 2048935 - DNA, 25 bp, Homo sapien
gctttgttcacactacatttctgtt

SEQ ID NO: 2048936 - DNA, 25 bp, Homo sapien
ccaagacagccaggtttggggcctt

SEQ ID NO: 2048937 - DNA, 25 bp, Homo sapien
gaatataaactttccccaagacagc

SEQ ID NO: 2048938 - DNA, 25 bp, Homo sapien
tctgctttgttcacactacatttct

SEQ ID NO: 2048939 - DNA, 25 bp, Homo sapien
taaatggactttgccattctagaga

SEQ ID NO: 2048940 - DNA, 25 bp, Homo sapien
tttgccattctagagaagcagtttt

SEQ ID NO: 2048941 - DNA, 25 bp, Homo sapien
cctaaatggactttgccattctaga

SEQ ID NO: 2048942 - DNA, 25 bp, Homo sapien
atggactttgccattctagagaagc

SEQ ID NO: 2048943 - DNA, 25 bp, Homo sapien
gatagaatcagtgggatttttaatc

SEQ ID NO: 2048944 - DNA, 25 bp, Homo sapien
gaagatagaatcagtgggattttta

SEQ ID NO: 2048945 - DNA, 25 bp, Homo sapien
aagatagaatcagtgggatttttaa

SEQ ID NO: 2048946 - DNA, 25 bp, Homo sapien
atagaatcagtgggatttttaatca

SEQ ID NO: 2048947 - DNA, 25 bp, Homo sapien
tccactcctgaccaatttaactcac

SEQ ID NO: 2048948 - DNA, 25 bp, Homo sapien
ttctcatcctccactcctgaccaat

SEQ ID NO: 2048949 - DNA, 25 bp, Homo sapien
ctcatcctccactcctgaccaattt

SEQ ID NO: 2048950 - DNA, 25 bp, Homo sapien
atcctccactcctgaccaatttaac

SEQ ID NO: 2048951 - DNA, 25 bp, Homo sapien
tcagcataaacaagggccccgagac

SEQ ID NO: 2048952 - DNA, 25 bp, Homo sapien
agcataaacaagggccccgagacac

SEQ ID NO: 2048953 - DNA, 25 bp, Homo sapien
caccagctttaggtaaccaactggg

SEQ ID NO: 2048954 - DNA, 25 bp, Homo sapien
gacaccagctttaggtaaccaactg

SEQ ID NO: 2048955 - DNA, 25 bp, Homo sapien
tccaagggctaaacctggcaataaa

SEQ ID NO: 2048956 - DNA, 25 bp, Homo sapien
tcaatcatatcaagactcctgggtc

SEQ ID NO: 2048957 - DNA, 25 bp, Homo sapien
aatagattcttggagacaaaatata

SEQ ID NO: 2048958 - DNA, 25 bp, Homo sapien
tgggtctccattttacacggtaatc

SEQ ID NO: 2048959 - DNA, 25 bp, Homo sapien
ttctctcgctgcctcatcttggccc

SEQ ID NO: 2048960 - DNA, 25 bp, Homo sapien
ctgcctcatcttggcccttggagga

SEQ ID NO: 2048961 - DNA, 25 bp, Homo sapien
tctcgctgcctcatcttggcccttg

SEQ ID NO: 2048962 - DNA, 25 bp, Homo sapien
cgctgcctcatcttggcccttggag

SEQ ID NO: 2048963 - DNA, 25 bp, Homo sapien
ctgcataatgtaccggaatctctat

SEQ ID NO: 2048964 - DNA, 25 bp, Homo sapien
tctttggcccaatgacatagtgacc

SEQ ID NO: 2048965 - DNA, 25 bp, Homo sapien
cagatagtcattttcccgcagccct

SEQ ID NO: 2048966 - DNA, 25 bp, Homo sapien
gtccactggcggcaggaatgaatca

SEQ ID NO: 2048967 - DNA, 25 bp, Homo sapien
cagcaggagaacctaatgtcagcat

SEQ ID NO: 2048968 - DNA, 25 bp, Homo sapien
atcagcaggagaacctaatgtcagc

SEQ ID NO: 2048969 - DNA, 25 bp, Homo sapien
tcagcaggagaacctaatgtcagca

SEQ ID NO: 2048970 - DNA, 25 bp, Homo sapien
catcagcaggagaacctaatgtcag

SEQ ID NO: 2048971 - DNA, 25 bp, Homo sapien
ataaccattccatgactttgtttgg

SEQ ID NO: 2048972 - DNA, 25 bp, Homo sapien
ccattccatgactttgtttgggtaa

SEQ ID NO: 2048973 - DNA, 25 bp, Homo sapien
ttttataaccattccatgactttgt

SEQ ID NO: 2048974 - DNA, 25 bp, Homo sapien
aaccattccatgactttgtttgggt

SEQ ID NO: 2048975 - DNA, 25 bp, Homo sapien
aatctacattaaaacgctttgttgg

SEQ ID NO: 2048976 - DNA, 25 bp, Homo sapien
tctacattaaaacgctttgttggaa

SEQ ID NO: 2048977 - DNA, 25 bp, Homo sapien
aaatctacattaaaacgctttgttg

SEQ ID NO: 2048978 - DNA, 25 bp, Homo sapien
acattaaaacgctttgttggaatgc

SEQ ID NO: 2048979 - DNA, 25 bp, Homo sapien
acagtcctcgagttttttgcccata

SEQ ID NO: 2048980 - DNA, 25 bp, Homo sapien
atacacatgagtatttgtctaaaac

SEQ ID NO: 2048981 - DNA, 25 bp, Homo sapien
agtcctcgagttttttgcccataca

SEQ ID NO: 2048982 - DNA, 25 bp, Homo sapien
tgcccatacacatgagtatttgtct

SEQ ID NO: 2048983 - DNA, 25 bp, Homo sapien
atctgttgtaacctgtggcttccct

SEQ ID NO: 2048984 - DNA, 25 bp, Homo sapien
acaaatctgttgtaacctgtggctt

SEQ ID NO: 2048985 - DNA, 25 bp, Homo sapien
aaatctgttgtaacctgtggcttcc

SEQ ID NO: 2048986 - DNA, 25 bp, Homo sapien
tgttgtaacctgtggcttccctgtc

SEQ ID NO: 2048987 - DNA, 25 bp, Homo sapien
tttgcaaagtactggcctccaccgc

SEQ ID NO: 2048988 - DNA, 25 bp, Homo sapien
gccaccatatctaccaccagcacgg

SEQ ID NO: 2048989 - DNA, 25 bp, Homo sapien
caccatatctaccaccagcacggct

SEQ ID NO: 2048990 - DNA, 25 bp, Homo sapien
ccatatctaccaccagcacggctgc

SEQ ID NO: 2048991 - DNA, 25 bp, Homo sapien
tttggctggatgaagcactagccat

SEQ ID NO: 2048992 - DNA, 25 bp, Homo sapien
ctctttggctggatgaagcactagc

SEQ ID NO: 2048993 - DNA, 25 bp, Homo sapien
ctttggctggatgaagcactagcca

SEQ ID NO: 2048994 - DNA, 25 bp, Homo sapien
tctttggctggatgaagcactagcc

SEQ ID NO: 2048995 - DNA, 25 bp, Homo sapien
tcttgctttgacagggcttttctaa

SEQ ID NO: 2048996 - DNA, 25 bp, Homo sapien
cttgctttgacagggcttttctaac

SEQ ID NO: 2048997 - DNA, 25 bp, Homo sapien
ctcttgctttgacagggcttttcta

SEQ ID NO: 2048998 - DNA, 25 bp, Homo sapien
atcttatccacggagtcatggtcgt

SEQ ID NO: 2048999 - DNA, 25 bp, Homo sapien
tgacaatcttatccacggagtcatg

SEQ ID NO: 2049000 - DNA, 25 bp, Homo sapien
caatcttatccacggagtcatggtc

SEQ ID NO: 2049001 - DNA, 25 bp, Homo sapien
ttcaatttttccatactgttcaaaa

SEQ ID NO: 2049002 - DNA, 25 bp, Homo sapien
tcttaggtgatgttcttcagtgtct

SEQ ID NO: 2049003 - DNA, 25 bp, Homo sapien
cttaggtgatgttcttcagtgtctt

SEQ ID NO: 2049004 - DNA, 25 bp, Homo sapien
ctcttaggtgatgttcttcagtgtc

SEQ ID NO: 2049005 - DNA, 25 bp, Homo sapien
tatctttttcacagttaagtgggca

SEQ ID NO: 2049006 - DNA, 25 bp, Homo sapien
atctttttcacagttaagtgggcac

SEQ ID NO: 2049007 - DNA, 25 bp, Homo sapien
atatctttttcacagttaagtgggc

SEQ ID NO: 2049008 - DNA, 25 bp, Homo sapien
aaatatctttttcacagttaagtgg

SEQ ID NO: 2049009 - DNA, 25 bp, Homo sapien
attaccacacagtccgtgagcgttc

SEQ ID NO: 2049010 - DNA, 25 bp, Homo sapien
acacagtccgtgagcgttccccatt

SEQ ID NO: 2049011 - DNA, 25 bp, Homo sapien
ttaccacacagtccgtgagcgttcc

SEQ ID NO: 2049012 - DNA, 25 bp, Homo sapien
tccgtgagcgttccccattgctcaa

SEQ ID NO: 2049013 - DNA, 25 bp, Homo sapien
tctttaggagactctgacttagaca

SEQ ID NO: 2049014 - DNA, 25 bp, Homo sapien
ctgttcgggctctttaggagactct

SEQ ID NO: 2049015 - DNA, 25 bp, Homo sapien
ctttaggagactctgacttagacat

SEQ ID NO: 2049016 - DNA, 25 bp, Homo sapien
ggctctttaggagactctgacttag

SEQ ID NO: 2049017 - DNA, 25 bp, Homo sapien
gtccacgggcagaaaggccagaaaa

SEQ ID NO: 2049018 - DNA, 25 bp, Homo sapien
cacgggcagaaaggccagaaaaata

SEQ ID NO: 2049019 - DNA, 25 bp, Homo sapien
gcgtccacgggcagaaaggccagaa

SEQ ID NO: 2049020 - DNA, 25 bp, Homo sapien
tccacgggcagaaaggccagaaaaa

SEQ ID NO: 2049021 - DNA, 25 bp, Homo sapien
ttccagcaggtgatataaacaaact

SEQ ID NO: 2049022 - DNA, 25 bp, Homo sapien
caagctagaaattggagagtctcct

SEQ ID NO: 2049023 - DNA, 25 bp, Homo sapien
taatgcctaggatactcccaaatcc

SEQ ID NO: 2049024 - DNA, 25 bp, Homo sapien
ttcccaagctagacacaagttacct

SEQ ID NO: 2049025 - DNA, 25 bp, Homo sapien
gtatattaccacctcacaactgtgt

SEQ ID NO: 2049026 - DNA, 25 bp, Homo sapien
tcagtgaggcgcagaatctttaagt

SEQ ID NO: 2049027 - DNA, 25 bp, Homo sapien
gactacaggtctcatacaagcttaa

SEQ ID NO: 2049028 - DNA, 25 bp, Homo sapien
caggcagctgcttatgtattccaac

SEQ ID NO: 2049029 - DNA, 25 bp, Homo sapien
gtgttagcccaggatagtctcggtc

SEQ ID NO: 2049030 - DNA, 25 bp, Homo sapien
tgttagcccaggatagtctcggtct

SEQ ID NO: 2049031 - DNA, 25 bp, Homo sapien
gttagcccaggatagtctcggtctc

SEQ ID NO: 2049032 - DNA, 25 bp, Homo sapien
taaatgcttcaactctccagacaca

SEQ ID NO: 2049033 - DNA, 25 bp, Homo sapien
tccagacacagttgattggctcaag

SEQ ID NO: 2049034 - DNA, 25 bp, Homo sapien
tcaagaatgagtatgtggaatcatc

SEQ ID NO: 2049035 - DNA, 25 bp, Homo sapien
gggccccagacacaacatttaatac

SEQ ID NO: 2049036 - DNA, 25 bp, Homo sapien
ccctgaattccctgatagtcctcta

SEQ ID NO: 2049037 - DNA, 25 bp, Homo sapien
ccctgatagtcctctattctccttt

SEQ ID NO: 2049038 - DNA, 25 bp, Homo sapien
tctcattcagtagttcaagtttttt

SEQ ID NO: 2049039 - DNA, 25 bp, Homo sapien
tttctcattcagtagttcaagtttt

SEQ ID NO: 2049040 - DNA, 25 bp, Homo sapien
caaagccttagcaaaatttacagtt

SEQ ID NO: 2049041 - DNA, 25 bp, Homo sapien
ctgcaaagccttagcaaaatttaca

SEQ ID NO: 2049042 - DNA, 25 bp, Homo sapien
gcaaagccttagcaaaatttacagt

SEQ ID NO: 2049043 - DNA, 25 bp, Homo sapien
caagtaaaacaataaggaagagaga

SEQ ID NO: 2049044 - DNA, 25 bp, Homo sapien
aagagagaaggcctacgatatacaa

SEQ ID NO: 2049045 - DNA, 25 bp, Homo sapien
gctgccattcctactccaagtaaaa

SEQ ID NO: 2049046 - DNA, 25 bp, Homo sapien
ttcagctgccattcctactccaagt

SEQ ID NO: 2049047 - DNA, 25 bp, Homo sapien
caaaggcgagtcaagaacaagtgca

SEQ ID NO: 2049048 - DNA, 25 bp, Homo sapien
ggaggctgtgatccacaggaactaa

SEQ ID NO: 2049049 - DNA, 25 bp, Homo sapien
tctgtgatgacagctagcgctcctc

SEQ ID NO: 2049050 - DNA, 25 bp, Homo sapien
gctgaacccactgtcaaactgactg

SEQ ID NO: 2049051 - DNA, 25 bp, Homo sapien
aatgaaggtgaatgaaggtgccagc

SEQ ID NO: 2049052 - DNA, 25 bp, Homo sapien
tctggtaagaatacgagaggtcatt

SEQ ID NO: 2049053 - DNA, 25 bp, Homo sapien
ggcactcttgcacagtttctgcaca

SEQ ID NO: 2049054 - DNA, 25 bp, Homo sapien
taagggcaatgttgggtactgagcc

SEQ ID NO: 2049055 - DNA, 25 bp, Homo sapien
tttgctgttatatgtcaccttccac

SEQ ID NO: 2049056 - DNA, 25 bp, Homo sapien
ttgctgttatatgtcaccttccacc

SEQ ID NO: 2049057 - DNA, 25 bp, Homo sapien
gctgttatatgtcaccttccacccc

SEQ ID NO: 2049058 - DNA, 25 bp, Homo sapien
tgctgttatatgtcaccttccaccc

SEQ ID NO: 2049059 - DNA, 25 bp, Homo sapien
caaaataattgttttccgatttcat

SEQ ID NO: 2049060 - DNA, 25 bp, Homo sapien
tcttggaacacagcccaaggtagtc

SEQ ID NO: 2049061 - DNA, 25 bp, Homo sapien
attaactttatgtgttcttggaaca

SEQ ID NO: 2049062 - DNA, 25 bp, Homo sapien
tacaacttcacttctttaggaacaa

SEQ ID NO: 2049063 - DNA, 25 bp, Homo sapien
tacatttggattatgtaggtgggct

SEQ ID NO: 2049064 - DNA, 25 bp, Homo sapien
tatgtaatagcgatgtaggattctg

SEQ ID NO: 2049065 - DNA, 25 bp, Homo sapien
taggattctgtgagtatgaagaaga

SEQ ID NO: 2049066 - DNA, 25 bp, Homo sapien
gatatgaagaacatgcactggactg

SEQ ID NO: 2049067 - DNA, 25 bp, Homo sapien
taaaacatggatccgagaaagacct

SEQ ID NO: 2049068 - DNA, 25 bp, Homo sapien
tgtttttgctcctagaggccagtaa

SEQ ID NO: 2049069 - DNA, 25 bp, Homo sapien
tctgagcacaaagtaaggaccaaat

SEQ ID NO: 2049070 - DNA, 25 bp, Homo sapien
gaaagacctctgatgtttacaaaca

SEQ ID NO: 2049071 - DNA, 25 bp, Homo sapien
cgagctccacttcacatccttgagg

SEQ ID NO: 2049072 - DNA, 25 bp, Homo sapien
ctgaccaggaggtcgagcggcacgg

SEQ ID NO: 2049073 - DNA, 25 bp, Homo sapien
cacttcacatccttgaggctgcagc

SEQ ID NO: 2049074 - DNA, 25 bp, Homo sapien
agccggtaagtgctgaccaggaggt

SEQ ID NO: 2049075 - DNA, 25 bp, Homo sapien
cttccccgaagcctcctgtcccgcg

SEQ ID NO: 2049076 - DNA, 25 bp, Homo sapien
ccgccgccgccaccggcaccacccg

SEQ ID NO: 2049077 - DNA, 25 bp, Homo sapien
tcccccgccgccgccaccggcacca

SEQ ID NO: 2049078 - DNA, 25 bp, Homo sapien
cgccgccgccaccggcaccacccgc

SEQ ID NO: 2049079 - DNA, 25 bp, Homo sapien
aatggtggaatttatctgacgagcc

SEQ ID NO: 2049080 - DNA, 25 bp, Homo sapien
tatctgacgagccacagtctagaac

SEQ ID NO: 2049081 - DNA, 25 bp, Homo sapien
tctcaatggtaccactggaaagtcc

SEQ ID NO: 2049082 - DNA, 25 bp, Homo sapien
tgagggatgccatctcaatggtacc

SEQ ID NO: 2049083 - DNA, 25 bp, Homo sapien
atccttgccagcatcaagaatgctt

SEQ ID NO: 2049084 - DNA, 25 bp, Homo sapien
tttagcaaacaaccttgcaagtctt

SEQ ID NO: 2049085 - DNA, 25 bp, Homo sapien
gatttagcaaacaaccttgcaagtc

SEQ ID NO: 2049086 - DNA, 25 bp, Homo sapien
aacaaccttgcaagtcttttgtggt

SEQ ID NO: 2049087 - DNA, 25 bp, Homo sapien
gcaaacaaccttgcaagtcttttgt

SEQ ID NO: 2049088 - DNA, 25 bp, Homo sapien
tcaaagatccaactgagacccactt

SEQ ID NO: 2049089 - DNA, 25 bp, Homo sapien
cccaaacagagcaatctggtggagt

SEQ ID NO: 2049090 - DNA, 25 bp, Homo sapien
tgatggtagatcgtcttctctgggt

SEQ ID NO: 2049091 - DNA, 25 bp, Homo sapien
gataattgtcttattgggtacagca

SEQ ID NO: 2049092 - DNA, 25 bp, Homo sapien
tctatttcagcgtggataaatacag

SEQ ID NO: 2049093 - DNA, 25 bp, Homo sapien
aatacaggaagcaccaagacagctg

SEQ ID NO: 2049094 - DNA, 25 bp, Homo sapien
tagaagtcaatggtcatggggcttg

SEQ ID NO: 2049095 - DNA, 25 bp, Homo sapien
gggcttggagagaccggtgagtaat

SEQ ID NO: 2049096 - DNA, 25 bp, Homo sapien
cagtgagtcaccaacagctaccagt

SEQ ID NO: 2049097 - DNA, 25 bp, Homo sapien
atcagtgagtcaccaacagctacca

SEQ ID NO: 2049098 - DNA, 25 bp, Homo sapien
tccttggagggtccacaagcttggt

SEQ ID NO: 2049099 - DNA, 25 bp, Homo sapien
caacagctaccagtgtgctttgcat

SEQ ID NO: 2049100 - DNA, 25 bp, Homo sapien
gctgcctgattcaactaaatagaaa

SEQ ID NO: 2049101 - DNA, 25 bp, Homo sapien
gaagacatattgtagttgtgctgcc

SEQ ID NO: 2049102 - DNA, 25 bp, Homo sapien
gcagagtggtaaggataaatgtcac

SEQ ID NO: 2049103 - DNA, 25 bp, Homo sapien
ggcaaaggctgtgaaaggcagtcac

SEQ ID NO: 2049104 - DNA, 25 bp, Homo sapien
agctagttgctgtccgatgatccaa

SEQ ID NO: 2049105 - DNA, 25 bp, Homo sapien
gtcatgtagtatatccctggtatca

SEQ ID NO: 2049106 - DNA, 25 bp, Homo sapien
tgatattttgagagagctagttgct

SEQ ID NO: 2049107 - DNA, 25 bp, Homo sapien
gagagctagttgctgtccgatgatc

SEQ ID NO: 2049108 - DNA, 25 bp, Homo sapien
tatcagactgtcaagttgcagattc

SEQ ID NO: 2049109 - DNA, 25 bp, Homo sapien
cagagccaagttacatccacctggg

SEQ ID NO: 2049110 - DNA, 25 bp, Homo sapien
tgtttatcagactgtcaagttgcag

SEQ ID NO: 2049111 - DNA, 25 bp, Homo sapien
acaacattaatgtggctttggacac

SEQ ID NO: 2049112 - DNA, 25 bp, Homo sapien
tgacttggcatgtccctgatcatct

SEQ ID NO: 2049113 - DNA, 25 bp, Homo sapien
ccgatatgacttggcatgtccctga

SEQ ID NO: 2049114 - DNA, 25 bp, Homo sapien
gatatgacttggcatgtccctgatc

SEQ ID NO: 2049115 - DNA, 25 bp, Homo sapien
cttccgatatgacttggcatgtccc

SEQ ID NO: 2049116 - DNA, 25 bp, Homo sapien
attatatcctctcggacatccaagg

SEQ ID NO: 2049117 - DNA, 25 bp, Homo sapien
tcctctcggacatccaaggttccaa

SEQ ID NO: 2049118 - DNA, 25 bp, Homo sapien
tatcctctcggacatccaaggttcc

SEQ ID NO: 2049119 - DNA, 25 bp, Homo sapien
tctcggacatccaaggttccaaaaa

SEQ ID NO: 2049120 - DNA, 25 bp, Homo sapien
tttaggactaagaatgtcccaagag

SEQ ID NO: 2049121 - DNA, 25 bp, Homo sapien
aggccaactttgaagccagcatttg

SEQ ID NO: 2049122 - DNA, 25 bp, Homo sapien
ctaagaatgtcccaagaggccaact

SEQ ID NO: 2049123 - DNA, 25 bp, Homo sapien
gatttttaggactaagaatgtccca

SEQ ID NO: 2049124 - DNA, 25 bp, Homo sapien
ttgtctctggggtagattgacttga

SEQ ID NO: 2049125 - DNA, 25 bp, Homo sapien
tgttgtctctggggtagattgactt

SEQ ID NO: 2049126 - DNA, 25 bp, Homo sapien
tgtctctggggtagattgacttgat

SEQ ID NO: 2049127 - DNA, 25 bp, Homo sapien
gtctctggggtagattgacttgatg

SEQ ID NO: 2049128 - DNA, 25 bp, Homo sapien
tctttggtgaaccatcctctaatct

SEQ ID NO: 2049129 - DNA, 25 bp, Homo sapien
tctaatctcatatgaccacaggctc

SEQ ID NO: 2049130 - DNA, 25 bp, Homo sapien
tccttagaccgaagctcccagacat

SEQ ID NO: 2049131 - DNA, 25 bp, Homo sapien
cttcagtgagtcttgctcaaaactc

SEQ ID NO: 2049132 - DNA, 25 bp, Homo sapien
gaaattgaaaccaatctttgtgaca

SEQ ID NO: 2049133 - DNA, 25 bp, Homo sapien
gaaatgaaggaaattgaaaccaatc

SEQ ID NO: 2049134 - DNA, 25 bp, Homo sapien
tgaaggaaattgaaaccaatctttg

SEQ ID NO: 2049135 - DNA, 25 bp, Homo sapien
catactatttttatttggtcgctca

SEQ ID NO: 2049136 - DNA, 25 bp, Homo sapien
ggttcattctgagtgcacttgtttc

SEQ ID NO: 2049137 - DNA, 25 bp, Homo sapien
tctttccgccactttctcttttctg

SEQ ID NO: 2049138 - DNA, 25 bp, Homo sapien
gagaaatcagtgttgtcaggtagtt

SEQ ID NO: 2049139 - DNA, 25 bp, Homo sapien
gtagtttgctagcagaggcattggt

SEQ ID NO: 2049140 - DNA, 25 bp, Homo sapien
tttatcaattttgtttgacttttca

SEQ ID NO: 2049141 - DNA, 25 bp, Homo sapien
atgggtaatgtagaactgggtgtca

SEQ ID NO: 2049142 - DNA, 25 bp, Homo sapien
agaatcccctcagttttaagtctcg

SEQ ID NO: 2049143 - DNA, 25 bp, Homo sapien
gagtcaagtcccttcatgcatgcaa

SEQ ID NO: 2049144 - DNA, 25 bp, Homo sapien
gatcataggcccatcgtatgcatga

SEQ ID NO: 2049145 - DNA, 25 bp, Homo sapien
tcttgacgtgctctgccatgaaagc

SEQ ID NO: 2049146 - DNA, 25 bp, Homo sapien
taagtcaagtgtctagaggcacccg

SEQ ID NO: 2049147 - DNA, 25 bp, Homo sapien
tctgtcaggtgctataattggctcc

SEQ ID NO: 2049148 - DNA, 25 bp, Homo sapien
cactttactgtagaaacggcatcgg

SEQ ID NO: 2049149 - DNA, 25 bp, Homo sapien
tgtatggtacacaagagggcagaat

SEQ ID NO: 2049150 - DNA, 25 bp, Homo sapien
cctttctctggacaatagcatattg

SEQ ID NO: 2049151 - DNA, 25 bp, Homo sapien
atattgtagatgacttgtaggcccc

SEQ ID NO: 2049152 - DNA, 25 bp, Homo sapien
acatctccttcgagttctgtccagg

SEQ ID NO: 2049153 - DNA, 25 bp, Homo sapien
agggcctgccaacggttctgctaca

SEQ ID NO: 2049154 - DNA, 25 bp, Homo sapien
caagcattacatcaaggtgggagaa

SEQ ID NO: 2049155 - DNA, 25 bp, Homo sapien
tgtagcctcccacaaggtaaatgct

SEQ ID NO: 2049156 - DNA, 25 bp, Homo sapien
gccacttcgaccctccaaaatggga

SEQ ID NO: 2049157 - DNA, 25 bp, Homo sapien
caccttttgggtcatagcattccac

SEQ ID NO: 2049158 - DNA, 25 bp, Homo sapien
gcgatcattcattacagccaaagtg

SEQ ID NO: 2049159 - DNA, 25 bp, Homo sapien
tcatagcaatatagccatgggacat

SEQ ID NO: 2049160 - DNA, 25 bp, Homo sapien
gatttcctccaattgcatacaagcg

SEQ ID NO: 2049161 - DNA, 25 bp, Homo sapien
catatcttgttttcgagcccagaca

SEQ ID NO: 2049162 - DNA, 25 bp, Homo sapien
acatagacatacaagtcaagagagt

SEQ ID NO: 2049163 - DNA, 25 bp, Homo sapien
aataaacatagacatacaagtcaag

SEQ ID NO: 2049164 - DNA, 25 bp, Homo sapien
ataaacatagacatacaagtcaaga

SEQ ID NO: 2049165 - DNA, 25 bp, Homo sapien
gaaatgtatattttcccattgtgca

SEQ ID NO: 2049166 - DNA, 25 bp, Homo sapien
ctgaaatgtatattttcccattgtg

SEQ ID NO: 2049167 - DNA, 25 bp, Homo sapien
tgaaatgtatattttcccattgtgc

SEQ ID NO: 2049168 - DNA, 25 bp, Homo sapien
aaatgtatattttcccattgtgcac

SEQ ID NO: 2049169 - DNA, 25 bp, Homo sapien
gacaagtagccagtttcattccttc

SEQ ID NO: 2049170 - DNA, 25 bp, Homo sapien
caaagaggacacatagcgccattca

SEQ ID NO: 2049171 - DNA, 25 bp, Homo sapien
gtccaaccgacatgcatagaaactg

SEQ ID NO: 2049172 - DNA, 25 bp, Homo sapien
tatagcactccacgctggacaagta

SEQ ID NO: 2049173 - DNA, 25 bp, Homo sapien
gtcagtaaattcatagccagcaggc

SEQ ID NO: 2049174 - DNA, 25 bp, Homo sapien
ctgggactcaatctgtcagcactga

SEQ ID NO: 2049175 - DNA, 25 bp, Homo sapien
tacaaatgccccgtcaatcttgcag

SEQ ID NO: 2049176 - DNA, 25 bp, Homo sapien
cctaggtaggctatcctgggactca

SEQ ID NO: 2049177 - DNA, 25 bp, Homo sapien
gtgttttcattattctcaattggtt

SEQ ID NO: 2049178 - DNA, 25 bp, Homo sapien
tattctcaattggtttggtgatttc

SEQ ID NO: 2049179 - DNA, 25 bp, Homo sapien
cagcatagtggaagagggtaggcgg

SEQ ID NO: 2049180 - DNA, 25 bp, Homo sapien
ttcagcagtttggtagcagcatagt

SEQ ID NO: 2049181 - DNA, 25 bp, Homo sapien
tttcaaacatgtattgatagttgtt

SEQ ID NO: 2049182 - DNA, 25 bp, Homo sapien
ctcccaagccaaaggcatgaaggtt

SEQ ID NO: 2049183 - DNA, 25 bp, Homo sapien
tagttttgattaaagggcaaagtga

SEQ ID NO: 2049184 - DNA, 25 bp, Homo sapien
ggttaattatcacggtgtacagccc

SEQ ID NO: 2049185 - DNA, 25 bp, Homo sapien
tcctgcatgggtggaagttgaatcc

SEQ ID NO: 2049186 - DNA, 25 bp, Homo sapien
ttcctgcatgggtggaagttgaatc

SEQ ID NO: 2049187 - DNA, 25 bp, Homo sapien
ctttcctgcatgggtggaagttgaa

SEQ ID NO: 2049188 - DNA, 25 bp, Homo sapien
ctgcatgggtggaagttgaatccag

SEQ ID NO: 2049189 - DNA, 25 bp, Homo sapien
ggctgacaaaatttgtactgtgttt

SEQ ID NO: 2049190 - DNA, 25 bp, Homo sapien
tcggctgacaaaatttgtactgtgt

SEQ ID NO: 2049191 - DNA, 25 bp, Homo sapien
atcggctgacaaaatttgtactgtg

SEQ ID NO: 2049192 - DNA, 25 bp, Homo sapien
ctgacaaaatttgtactgtgttttc

SEQ ID NO: 2049193 - DNA, 25 bp, Homo sapien
taggcactgcttcttaggacttttg

SEQ ID NO: 2049194 - DNA, 25 bp, Homo sapien
catgaaggttgctggtggcctcaac

SEQ ID NO: 2049195 - DNA, 25 bp, Homo sapien
tggaaagtccttgagcaggcaagaa

SEQ ID NO: 2049196 - DNA, 25 bp, Homo sapien
caaagttcggacacactggaaagtc

SEQ ID NO: 2049197 - DNA, 25 bp, Homo sapien
ctgatggctttaaacccaactgctg

SEQ ID NO: 2049198 - DNA, 25 bp, Homo sapien
gatggctttaaacccaactgctgtt

SEQ ID NO: 2049199 - DNA, 25 bp, Homo sapien
tgatggctttaaacccaactgctgt

SEQ ID NO: 2049200 - DNA, 25 bp, Homo sapien
gcaagccacagggttcttgtgttcg

SEQ ID NO: 2049201 - DNA, 25 bp, Homo sapien
gtcacaattatctctgttacacaga

SEQ ID NO: 2049202 - DNA, 25 bp, Homo sapien
cacagaaggctacaactgcaactcc

SEQ ID NO: 2049203 - DNA, 25 bp, Homo sapien
tcttgtgttcgatttgggacgtgcg

SEQ ID NO: 2049204 - DNA, 25 bp, Homo sapien
tccaattaagttgttcaatagttac

SEQ ID NO: 2049205 - DNA, 25 bp, Homo sapien
cctccaattaagttgttcaatagtt

SEQ ID NO: 2049206 - DNA, 25 bp, Homo sapien
ctccaattaagttgttcaatagtta

SEQ ID NO: 2049207 - DNA, 25 bp, Homo sapien
ctctccacccaacacgaacaagaag

SEQ ID NO: 2049208 - DNA, 25 bp, Homo sapien
agaagttttccacctccacaacgca

SEQ ID NO: 2049209 - DNA, 25 bp, Homo sapien
tttccacctccacaacgcagtggtg

SEQ ID NO: 2049210 - DNA, 25 bp, Homo sapien
ctccacaacgcagtggtgggcactg

SEQ ID NO: 2049211 - DNA, 25 bp, Homo sapien
gatgctctgcccaacgtggtttgct

SEQ ID NO: 2049212 - DNA, 25 bp, Homo sapien
gaagtaaccctgaatacacttggag

SEQ ID NO: 2049213 - DNA, 25 bp, Homo sapien
gcaatctttccataaacagactcag

SEQ ID NO: 2049214 - DNA, 25 bp, Homo sapien
acttggagccattaagatgctctgc

SEQ ID NO: 2049215 - DNA, 25 bp, Homo sapien
cggaaggcattggtgtgtaaacctc

SEQ ID NO: 2049216 - DNA, 25 bp, Homo sapien
gaaggcattggtgtgtaaacctcca

SEQ ID NO: 2049217 - DNA, 25 bp, Homo sapien
aggcattggtgtgtaaacctccaat

SEQ ID NO: 2049218 - DNA, 25 bp, Homo sapien
ggaaggcattggtgtgtaaacctcc

SEQ ID NO: 2049219 - DNA, 25 bp, Homo sapien
agatgtgcccaaggtggatggtcag

SEQ ID NO: 2049220 - DNA, 25 bp, Homo sapien
ttaggagatgtgcccaaggtggatg

SEQ ID NO: 2049221 - DNA, 25 bp, Homo sapien
tcagggccatgatgaggcctagagt

SEQ ID NO: 2049222 - DNA, 25 bp, Homo sapien
atgaggcctagagtcatctttccag

SEQ ID NO: 2049223 - DNA, 25 bp, Homo sapien
cagcggtagaagctgcaactcccct

SEQ ID NO: 2049224 - DNA, 25 bp, Homo sapien
agttatacacagaaagcagcggtag

SEQ ID NO: 2049225 - DNA, 25 bp, Homo sapien
ttttgcaagtgaggaagttatacac

SEQ ID NO: 2049226 - DNA, 25 bp, Homo sapien
aactcccctggaagtgatcgcctca

SEQ ID NO: 2049227 - DNA, 25 bp, Homo sapien
tgagagtcatttagggctactgtcc

SEQ ID NO: 2049228 - DNA, 25 bp, Homo sapien
tactgtccttagcatactaatgcag

SEQ ID NO: 2049229 - DNA, 25 bp, Homo sapien
tgtgtacataataattgctctccaa

SEQ ID NO: 2049230 - DNA, 25 bp, Homo sapien
attttgatggggatatgtgtacata

SEQ ID NO: 2049231 - DNA, 25 bp, Homo sapien
cattccgggtcaagaggagtctcaa

SEQ ID NO: 2049232 - DNA, 25 bp, Homo sapien
gaggtcctccacaatgagcttgatg

SEQ ID NO: 2049233 - DNA, 25 bp, Homo sapien
cacggtgcattatgtgtgagggacc

SEQ ID NO: 2049234 - DNA, 25 bp, Homo sapien
aggtgagagcgctttgagcacagca

SEQ ID NO: 2049235 - DNA, 25 bp, Homo sapien
aactctggtgagcttgcactttcct

SEQ ID NO: 2049236 - DNA, 25 bp, Homo sapien
actctggtgagcttgcactttcctg

SEQ ID NO: 2049237 - DNA, 25 bp, Homo sapien
cctgcttccctgaaatggggtgtgg

SEQ ID NO: 2049238 - DNA, 25 bp, Homo sapien
tctggtgagcttgcactttcctgct

SEQ ID NO: 2049239 - DNA, 25 bp, Homo sapien
gaatggagagctctccaatgctgcc

SEQ ID NO: 2049240 - DNA, 25 bp, Homo sapien
aatcggtccacagggaataaaaatg

SEQ ID NO: 2049241 - DNA, 25 bp, Homo sapien
aataaaaatggaatggagagctctc

SEQ ID NO: 2049242 - DNA, 25 bp, Homo sapien
cttgcccatcagtaaagaaatcggt

SEQ ID NO: 2049243 - DNA, 25 bp, Homo sapien
ttttgattccatgagtgagtccgat

SEQ ID NO: 2049244 - DNA, 25 bp, Homo sapien
taagttccaaatctcagtgcccaag

SEQ ID NO: 2049245 - DNA, 25 bp, Homo sapien
cataaccgatataacaataagttcc

SEQ ID NO: 2049246 - DNA, 25 bp, Homo sapien
gagtccgattgggaatcataaccga

SEQ ID NO: 2049247 - DNA, 25 bp, Homo sapien
tcttcttttcatcgtcgtaatactg

SEQ ID NO: 2049248 - DNA, 25 bp, Homo sapien
gcagccctccaaccaataacagcat

SEQ ID NO: 2049249 - DNA, 25 bp, Homo sapien
cgtaatactgaaccaaattgctggg

SEQ ID NO: 2049250 - DNA, 25 bp, Homo sapien
ggagccggtccggtccaggaggcag

SEQ ID NO: 2049251 - DNA, 25 bp, Homo sapien
tactcctagaaagcaatacacgtga

SEQ ID NO: 2049252 - DNA, 25 bp, Homo sapien
tcagttttccaagccagtatcaata

SEQ ID NO: 2049253 - DNA, 25 bp, Homo sapien
tcaacgtggtaggtataactctcca

SEQ ID NO: 2049254 - DNA, 25 bp, Homo sapien
gactctcaaaacagctcaacgtggt

SEQ ID NO: 2049255 - DNA, 25 bp, Homo sapien
gccagaactttgattgcataagcaa

SEQ ID NO: 2049256 - DNA, 25 bp, Homo sapien
ttttattgcttagaagccttgcaga

SEQ ID NO: 2049257 - DNA, 25 bp, Homo sapien
ccttgcagataccatatgttacact

SEQ ID NO: 2049258 - DNA, 25 bp, Homo sapien
aaatcactggacttcctacaatggt

SEQ ID NO: 2049259 - DNA, 25 bp, Homo sapien
gccagctgcctctgttagggtagtc

SEQ ID NO: 2049260 - DNA, 25 bp, Homo sapien
caatattcaagtcaccgaatttcat

SEQ ID NO: 2049261 - DNA, 25 bp, Homo sapien
aaatcttacaatattcaagtcaccg

SEQ ID NO: 2049262 - DNA, 25 bp, Homo sapien
tctgttagggtagtcaccaaatctt

SEQ ID NO: 2049263 - DNA, 25 bp, Homo sapien
cttccattttcttgctatattctat

SEQ ID NO: 2049264 - DNA, 25 bp, Homo sapien
gctatattctatagtttctagagct

SEQ ID NO: 2049265 - DNA, 25 bp, Homo sapien
ggtatccttgactcttccattttct

SEQ ID NO: 2049266 - DNA, 25 bp, Homo sapien
tcttgctatattctatagtttctag

SEQ ID NO: 2049267 - DNA, 25 bp, Homo sapien
ccgtgtcggaatccacttggtgata

SEQ ID NO: 2049268 - DNA, 25 bp, Homo sapien
catgactgaaaatcccgtgctttgc

SEQ ID NO: 2049269 - DNA, 25 bp, Homo sapien
gaacgttttaaactgagagctgctg

SEQ ID NO: 2049270 - DNA, 25 bp, Homo sapien
tgatatgtgtggtgaagccctccat

SEQ ID NO: 2049271 - DNA, 25 bp, Homo sapien
caactcttctaacattgaaccttag

SEQ ID NO: 2049272 - DNA, 25 bp, Homo sapien
agccagcaggcactagctggtgtgc

SEQ ID NO: 2049273 - DNA, 25 bp, Homo sapien
ttttgaaagtcaactcttctaacat

SEQ ID NO: 2049274 - DNA, 25 bp, Homo sapien
ggcactagctggtgtgctgaatctt

SEQ ID NO: 2049275 - DNA, 25 bp, Homo sapien
gaccgggtcggttcgcatgaaatcc

SEQ ID NO: 2049276 - DNA, 25 bp, Homo sapien
ttcatgaggtcaggcgcatactgca

SEQ ID NO: 2049277 - DNA, 25 bp, Homo sapien
tctggtcgttgaggaactgcacgca

SEQ ID NO: 2049278 - DNA, 25 bp, Homo sapien
agggcgcgcatctcctcgaagttga

SEQ ID NO: 2049279 - DNA, 25 bp, Homo sapien
gctgctgctggtccttgggggcccc

SEQ ID NO: 2049280 - DNA, 25 bp, Homo sapien
gcccccaggccgtcctggccgccga

SEQ ID NO: 2049281 - DNA, 25 bp, Homo sapien
gctgctggtccttgggggcccccag

SEQ ID NO: 2049282 - DNA, 25 bp, Homo sapien
ggctgctgctggtccttgggggccc

SEQ ID NO: 2049283 - DNA, 25 bp, Homo sapien
gctggagaagagcgatcggaagtac

SEQ ID NO: 2049284 - DNA, 25 bp, Homo sapien
ggctggagaagagcgatcggaagta

SEQ ID NO: 2049285 - DNA, 25 bp, Homo sapien
gtcagggtcacgtcgcaaaacagct

SEQ ID NO: 2049286 - DNA, 25 bp, Homo sapien
ttgaggccgtgcagcaggttgtcgc

SEQ ID NO: 2049287 - DNA, 25 bp, Homo sapien
gtcacgtcgcaaaacagctgcttcc

SEQ ID NO: 2049288 - DNA, 25 bp, Homo sapien
gggccgtcagggtcacgtcgcaaaa

SEQ ID NO: 2049289 - DNA, 25 bp, Homo sapien
tgactcggtgcacctggctttaaac

SEQ ID NO: 2049290 - DNA, 25 bp, Homo sapien
gactcggtgcacctggctttaaacc

SEQ ID NO: 2049291 - DNA, 25 bp, Homo sapien
agcgacggcaaagtggcggctgagg

SEQ ID NO: 2049292 - DNA, 25 bp, Homo sapien
cagcagcgacggcaaagtggcggct

SEQ ID NO: 2049293 - DNA, 25 bp, Homo sapien
gaggcacctcgtgggctcgtgtcca

SEQ ID NO: 2049294 - DNA, 25 bp, Homo sapien
gcggctgaggccgaggcacctcgtg

SEQ ID NO: 2049295 - DNA, 25 bp, Homo sapien
gggtgtgcgaatcttagctctccaa

SEQ ID NO: 2049296 - DNA, 25 bp, Homo sapien
gcttttcgcagttggcccagtttgg

SEQ ID NO: 2049297 - DNA, 25 bp, Homo sapien
aggttccaggtcaacttgtgcccga

SEQ ID NO: 2049298 - DNA, 25 bp, Homo sapien
ctgaaagctcagaggcgaccgacgg

SEQ ID NO: 2049299 - DNA, 25 bp, Homo sapien
ggctgagcagaaagggaccctctgc

SEQ ID NO: 2049300 - DNA, 25 bp, Homo sapien
tctgcttgcatcccgcccgcgcgcc

SEQ ID NO: 2049301 - DNA, 25 bp, Homo sapien
gaaagggaccctctgcttgcatccc

SEQ ID NO: 2049302 - DNA, 25 bp, Homo sapien
tgagcagaaagggaccctctgcttg

SEQ ID NO: 2049303 - DNA, 25 bp, Homo sapien
aaagtcaaggctcacttaagctccc

SEQ ID NO: 2049304 - DNA, 25 bp, Homo sapien
tgatcaccatgaattagcaacagca

SEQ ID NO: 2049305 - DNA, 25 bp, Homo sapien
ttctcaaccagctgcaaagtcaagg

SEQ ID NO: 2049306 - DNA, 25 bp, Homo sapien
aacacatcattatccttgggcctgg

SEQ ID NO: 2049307 - DNA, 25 bp, Homo sapien
ctataggcgaaaaagcaggacatac

SEQ ID NO: 2049308 - DNA, 25 bp, Homo sapien
tctgccagcctataggcgaaaaagc

SEQ ID NO: 2049309 - DNA, 25 bp, Homo sapien
tcctctgccagcctataggcgaaaa

SEQ ID NO: 2049310 - DNA, 25 bp, Homo sapien
cagcctataggcgaaaaagcaggac

SEQ ID NO: 2049311 - DNA, 25 bp, Homo sapien
caacaatttaggtggtcaagttctc

SEQ ID NO: 2049312 - DNA, 25 bp, Homo sapien
tgtcatcaacactcagaatctgagg

SEQ ID NO: 2049313 - DNA, 25 bp, Homo sapien
tgaaatctacagagacctgggaact

SEQ ID NO: 2049314 - DNA, 25 bp, Homo sapien
tcatgatggcaacctagctatcccc

SEQ ID NO: 2049315 - DNA, 25 bp, Homo sapien
ctcccttactagtaagtccctctga

SEQ ID NO: 2049316 - DNA, 25 bp, Homo sapien
cacaggaagtgactctcccttacta

SEQ ID NO: 2049317 - DNA, 25 bp, Homo sapien
gatccacaggaagtgactctccctt

SEQ ID NO: 2049318 - DNA, 25 bp, Homo sapien
aagtgactctcccttactagtaagt

SEQ ID NO: 2049319 - DNA, 25 bp, Homo sapien
ggcagtgatttcaaggtgattcaga

SEQ ID NO: 2049320 - DNA, 25 bp, Homo sapien
aggtgattcagaaacagaggctgtc

SEQ ID NO: 2049321 - DNA, 25 bp, Homo sapien
tgatttcaaggtgattcagaaacag

SEQ ID NO: 2049322 - DNA, 25 bp, Homo sapien
ctggaaggcagtgatttcaaggtga

SEQ ID NO: 2049323 - DNA, 25 bp, Homo sapien
ttgatgtggccgtgatgatacgata

SEQ ID NO: 2049324 - DNA, 25 bp, Homo sapien
tttgatgtggccgtgatgatacgat

SEQ ID NO: 2049325 - DNA, 25 bp, Homo sapien
tgatgtggccgtgatgatacgatac

SEQ ID NO: 2049326 - DNA, 25 bp, Homo sapien
tcactaatgcaaacatgtgggggct

SEQ ID NO: 2049327 - DNA, 25 bp, Homo sapien
cccttggctgtttgttcagttgtgt

SEQ ID NO: 2049328 - DNA, 25 bp, Homo sapien
tgtggtgccgttgttccagcagaag

SEQ ID NO: 2049329 - DNA, 25 bp, Homo sapien
gaaggcagtccattttgaaatcctc

SEQ ID NO: 2049330 - DNA, 25 bp, Homo sapien
agaggagagtcgctgctgcatcaga

SEQ ID NO: 2049331 - DNA, 25 bp, Homo sapien
gctggagagctggtttggcagctga

SEQ ID NO: 2049332 - DNA, 25 bp, Homo sapien
gaggagagtcgctgctgcatcagaa

SEQ ID NO: 2049333 - DNA, 25 bp, Homo sapien
taggaacataggcctgaagccattt

SEQ ID NO: 2049334 - DNA, 25 bp, Homo sapien
aatataggaacataggcctgaagcc

SEQ ID NO: 2049335 - DNA, 25 bp, Homo sapien
tataggaacataggcctgaagccat

SEQ ID NO: 2049336 - DNA, 25 bp, Homo sapien
atataggaacataggcctgaagcca

SEQ ID NO: 2049337 - DNA, 25 bp, Homo sapien
gccccactggttgacttggcattgg

SEQ ID NO: 2049338 - DNA, 25 bp, Homo sapien
cctctggccccactggttgacttgg

SEQ ID NO: 2049339 - DNA, 25 bp, Homo sapien
tctcaagatctctcaagcctatttc

SEQ ID NO: 2049340 - DNA, 25 bp, Homo sapien
tttacatgtcttctctcaagatctc

SEQ ID NO: 2049341 - DNA, 25 bp, Homo sapien
tttgcagtgcactcagagacacgca

SEQ ID NO: 2049342 - DNA, 25 bp, Homo sapien
agaatagcccctggtcctgttgatt

SEQ ID NO: 2049343 - DNA, 25 bp, Homo sapien
gagacacgcatccatctgatttcat

SEQ ID NO: 2049344 - DNA, 25 bp, Homo sapien
ttcatttccctggactaagtccaga

SEQ ID NO: 2049345 - DNA, 25 bp, Homo sapien
tctgaaggcacaattgtcagaagtc

SEQ ID NO: 2049346 - DNA, 25 bp, Homo sapien
ctctgaaggcacaattgtcagaagt

SEQ ID NO: 2049347 - DNA, 25 bp, Homo sapien
ctgaaggcacaattgtcagaagtca

SEQ ID NO: 2049348 - DNA, 25 bp, Homo sapien
tgaaggcacaattgtcagaagtcat

SEQ ID NO: 2049349 - DNA, 25 bp, Homo sapien
ttgtagacaaggcatgcttttctgg

SEQ ID NO: 2049350 - DNA, 25 bp, Homo sapien
ctgaagggagttagtcttgtagaca

SEQ ID NO: 2049351 - DNA, 25 bp, Homo sapien
tgtagacaaggcatgcttttctggc

SEQ ID NO: 2049352 - DNA, 25 bp, Homo sapien
gtcttgtagacaaggcatgcttttc

SEQ ID NO: 2049353 - DNA, 25 bp, Homo sapien
cccatccaaactgagtgtgaaagac

SEQ ID NO: 2049354 - DNA, 25 bp, Homo sapien
catctgtagagggttgctttccttt

SEQ ID NO: 2049355 - DNA, 25 bp, Homo sapien
atctcccatatcccagatttcactg

SEQ ID NO: 2049356 - DNA, 25 bp, Homo sapien
ccagatttcactgagtcccatccaa

SEQ ID NO: 2049357 - DNA, 25 bp, Homo sapien
cactccggaaaagaggagggtgcca

SEQ ID NO: 2049358 - DNA, 25 bp, Homo sapien
aatgctttctgtgtcgtgtccgtcc

SEQ ID NO: 2049359 - DNA, 25 bp, Homo sapien
tacaactgtgtcatgggaaaaccca

SEQ ID NO: 2049360 - DNA, 25 bp, Homo sapien
gacacccagaggaaccgagtggtat

SEQ ID NO: 2049361 - DNA, 25 bp, Homo sapien
tgaagtgtagtaggaactcagtttc

SEQ ID NO: 2049362 - DNA, 25 bp, Homo sapien
aagtgtagtaggaactcagtttcat

SEQ ID NO: 2049363 - DNA, 25 bp, Homo sapien
ctgaagtgtagtaggaactcagttt

SEQ ID NO: 2049364 - DNA, 25 bp, Homo sapien
gaagtgtagtaggaactcagtttca

SEQ ID NO: 2049365 - DNA, 25 bp, Homo sapien
tatgaaaggaaaggattgtgttatt

SEQ ID NO: 2049366 - DNA, 25 bp, Homo sapien
ccttctcgggtatggaagcagtctc

SEQ ID NO: 2049367 - DNA, 25 bp, Homo sapien
acagccccacgccatgaagaggaag

SEQ ID NO: 2049368 - DNA, 25 bp, Homo sapien
aggaaggcccactgtgactccaagc

SEQ ID NO: 2049369 - DNA, 25 bp, Homo sapien
ctcagctttgtctgtggcaggtctg

SEQ ID NO: 2049370 - DNA, 25 bp, Homo sapien
tgccagatgttttacttgtcccttt

SEQ ID NO: 2049371 - DNA, 25 bp, Homo sapien
tctctttttctgacggcttttgatg

SEQ ID NO: 2049372 - DNA, 25 bp, Homo sapien
ctctttttctgacggcttttgatgg

SEQ ID NO: 2049373 - DNA, 25 bp, Homo sapien
ggaactgccagatgttttacttgtc

SEQ ID NO: 2049374 - DNA, 25 bp, Homo sapien
cactctcatgataaaattcgaagct

SEQ ID NO: 2049375 - DNA, 25 bp, Homo sapien
gataaaattcgaagctataatccaa

SEQ ID NO: 2049376 - DNA, 25 bp, Homo sapien
tcacactctcatgataaaattcgaa

SEQ ID NO: 2049377 - DNA, 25 bp, Homo sapien
tctcatgataaaattcgaagctata

SEQ ID NO: 2049378 - DNA, 25 bp, Homo sapien
cagggtattgcaatgacgtatccat

SEQ ID NO: 2049379 - DNA, 25 bp, Homo sapien
tgcagggtattgcaatgacgtatcc

SEQ ID NO: 2049380 - DNA, 25 bp, Homo sapien
ttgcagggtattgcaatgacgtatc

SEQ ID NO: 2049381 - DNA, 25 bp, Homo sapien
gcagggtattgcaatgacgtatcca

SEQ ID NO: 2049382 - DNA, 25 bp, Homo sapien
gcttcactaaagggctggcaatagc

SEQ ID NO: 2049383 - DNA, 25 bp, Homo sapien
tcaccaagccgtgttccgctgcgtt

SEQ ID NO: 2049384 - DNA, 25 bp, Homo sapien
tggcaatagcttcaccaagccgtgt

SEQ ID NO: 2049385 - DNA, 25 bp, Homo sapien
tccgctgcgtttggtcaccgtagtc

SEQ ID NO: 2049386 - DNA, 25 bp, Homo sapien
ctaggtgcatggaagggtttctcgc

SEQ ID NO: 2049387 - DNA, 25 bp, Homo sapien
gtttctcgcaaggatcttgacctgg

SEQ ID NO: 2049388 - DNA, 25 bp, Homo sapien
aagggtttctcgcaaggatcttgac

SEQ ID NO: 2049389 - DNA, 25 bp, Homo sapien
catggaagggtttctcgcaaggatc

SEQ ID NO: 2049390 - DNA, 25 bp, Homo sapien
ataaatctgatactgccatcccttc

SEQ ID NO: 2049391 - DNA, 25 bp, Homo sapien
tgcagaagtcttccagataaacctt

SEQ ID NO: 2049392 - DNA, 25 bp, Homo sapien
gttcttgcaggtacattctgaattt

SEQ ID NO: 2049393 - DNA, 25 bp, Homo sapien
gattctagatcatgagacctcatca

SEQ ID NO: 2049394 - DNA, 25 bp, Homo sapien
tcaatgaacattctgagcacatgca

SEQ ID NO: 2049395 - DNA, 25 bp, Homo sapien
ttatggaattgaagagtcagggagt

SEQ ID NO: 2049396 - DNA, 25 bp, Homo sapien
cttgggcttgtactgaatctgtgca

SEQ ID NO: 2049397 - DNA, 25 bp, Homo sapien
gaatctgtgcatggaagttatggaa

SEQ ID NO: 2049398 - DNA, 25 bp, Homo sapien
gggccatggtatccctcatactgta

SEQ ID NO: 2049399 - DNA, 25 bp, Homo sapien
tcatactgtattccctgaaggaaag

SEQ ID NO: 2049400 - DNA, 25 bp, Homo sapien
caggtctggctgtcttccactggaa

SEQ ID NO: 2049401 - DNA, 25 bp, Homo sapien
tgagagcagggccatggtatccctc

SEQ ID NO: 2049402 - DNA, 25 bp, Homo sapien
tgtcacatgggcatagatattgtta

SEQ ID NO: 2049403 - DNA, 25 bp, Homo sapien
cagagtgtctcaaagtgtcacatgg

SEQ ID NO: 2049404 - DNA, 25 bp, Homo sapien
taatcattcatctccagctcattga

SEQ ID NO: 2049405 - DNA, 25 bp, Homo sapien
taagatagaacattgaggagtgatt

SEQ ID NO: 2049406 - DNA, 25 bp, Homo sapien
ggcaaacaggtgaatgtccaattac

SEQ ID NO: 2049407 - DNA, 25 bp, Homo sapien
aaattagatcgttcctgacagcagc

SEQ ID NO: 2049408 - DNA, 25 bp, Homo sapien
gccaattgcaatcagtcacccagag

SEQ ID NO: 2049409 - DNA, 25 bp, Homo sapien
tgggccaagacgatagggaaatctg

SEQ ID NO: 2049410 - DNA, 25 bp, Homo sapien
ctgtcaaagtctggaagaaacctaa

SEQ ID NO: 2049411 - DNA, 25 bp, Homo sapien
ttaaccatcgttttcgcatgtgcca

SEQ ID NO: 2049412 - DNA, 25 bp, Homo sapien
cgttttcgcatgtgccatctgtcaa

SEQ ID NO: 2049413 - DNA, 25 bp, Homo sapien
gaaacctaagatgtgttgcattaaa

SEQ ID NO: 2049414 - DNA, 25 bp, Homo sapien
gatatcacaggagcatcccttttta

SEQ ID NO: 2049415 - DNA, 25 bp, Homo sapien
gtaatcctactgaaataattctgcc

SEQ ID NO: 2049416 - DNA, 25 bp, Homo sapien
tgcttgaaggtaatatgctggtatg

SEQ ID NO: 2049417 - DNA, 25 bp, Homo sapien
taattctgccttaagggataatctg

SEQ ID NO: 2049418 - DNA, 25 bp, Homo sapien
ttattctttttccaaatcatactgg

SEQ ID NO: 2049419 - DNA, 25 bp, Homo sapien
tattctttttccaaatcatactggt

SEQ ID NO: 2049420 - DNA, 25 bp, Homo sapien
attctttttccaaatcatactggtt

SEQ ID NO: 2049421 - DNA, 25 bp, Homo sapien
tagttggttttgtcaagatcataag

SEQ ID NO: 2049422 - DNA, 25 bp, Homo sapien
gttggttttgtcaagatcataagca

SEQ ID NO: 2049423 - DNA, 25 bp, Homo sapien
ctagttggttttgtcaagatcataa

SEQ ID NO: 2049424 - DNA, 25 bp, Homo sapien
agttggttttgtcaagatcataagc

SEQ ID NO: 2049425 - DNA, 25 bp, Homo sapien
ggaccaccagtttgaagtgctcctg

SEQ ID NO: 2049426 - DNA, 25 bp, Homo sapien
ccacagtgtgtgcatccttctctgc

SEQ ID NO: 2049427 - DNA, 25 bp, Homo sapien
tgccacagtgtgtgcatccttctct

SEQ ID NO: 2049428 - DNA, 25 bp, Homo sapien
gctgaagaggaccaccagtttgaag

SEQ ID NO: 2049429 - DNA, 25 bp, Homo sapien
acagtctcttgatttttcagcccac

SEQ ID NO: 2049430 - DNA, 25 bp, Homo sapien
tctcttgatttttcagcccactcat

SEQ ID NO: 2049431 - DNA, 25 bp, Homo sapien
gtctcttgatttttcagcccactca

SEQ ID NO: 2049432 - DNA, 25 bp, Homo sapien
aggaatttcacagtctcttgatttt

SEQ ID NO: 2049433 - DNA, 25 bp, Homo sapien
tctgtagcaatctgtttaggatcaa

SEQ ID NO: 2049434 - DNA, 25 bp, Homo sapien
tgctaataggatgtataccctcacc

SEQ ID NO: 2049435 - DNA, 25 bp, Homo sapien
tccagaatatcaatctcagtatctc

SEQ ID NO: 2049436 - DNA, 25 bp, Homo sapien
taggatcaagatcttctggtaaaca

SEQ ID NO: 2049437 - DNA, 25 bp, Homo sapien
ttgcccacaaacatacagtaagcct

SEQ ID NO: 2049438 - DNA, 25 bp, Homo sapien
tatcttttaagggacagagagtagc

SEQ ID NO: 2049439 - DNA, 25 bp, Homo sapien
tggcatggttcaaggtaggatttat

SEQ ID NO: 2049440 - DNA, 25 bp, Homo sapien
tttaacactctaacgcatttgtggt

SEQ ID NO: 2049441 - DNA, 25 bp, Homo sapien
tctgtcctctctacccataattcat

SEQ ID NO: 2049442 - DNA, 25 bp, Homo sapien
tattctcaggttgcatacactgttt

SEQ ID NO: 2049443 - DNA, 25 bp, Homo sapien
atcccatattctcaggttgcataca

SEQ ID NO: 2049444 - DNA, 25 bp, Homo sapien
ccatattctcaggttgcatacactg

SEQ ID NO: 2049445 - DNA, 25 bp, Homo sapien
aagggcagcctgcacttaatgacct

SEQ ID NO: 2049446 - DNA, 25 bp, Homo sapien
tccattgcagcaaattgatcctaca

SEQ ID NO: 2049447 - DNA, 25 bp, Homo sapien
tgatcctacatgacactgacaaggg

SEQ ID NO: 2049448 - DNA, 25 bp, Homo sapien
taacagcatcaataaggcctctctg

SEQ ID NO: 2049449 - DNA, 25 bp, Homo sapien
tatctctaattgaagtatcaagtga

SEQ ID NO: 2049450 - DNA, 25 bp, Homo sapien
caagtgatagctgtttatcatatat

SEQ ID NO: 2049451 - DNA, 25 bp, Homo sapien
gctaaacgcagattttcttcaagtg

SEQ ID NO: 2049452 - DNA, 25 bp, Homo sapien
tcttcaagtgaatcagctattattt

SEQ ID NO: 2049453 - DNA, 25 bp, Homo sapien
tgccggctcttgctaccacatccat

SEQ ID NO: 2049454 - DNA, 25 bp, Homo sapien
agagctctgccggctcttgctacca

SEQ ID NO: 2049455 - DNA, 25 bp, Homo sapien
ctgccggctcttgctaccacatcca

SEQ ID NO: 2049456 - DNA, 25 bp, Homo sapien
gctctgccggctcttgctaccacat

SEQ ID NO: 2049457 - DNA, 25 bp, Homo sapien
gcctcagaggagcaaataactgttt

SEQ ID NO: 2049458 - DNA, 25 bp, Homo sapien
cagaaagcaagagttctccctagtg

SEQ ID NO: 2049459 - DNA, 25 bp, Homo sapien
tatgtgtcgataccctgaagcctca

SEQ ID NO: 2049460 - DNA, 25 bp, Homo sapien
ggaaaccattctcttgtccaaggcg

SEQ ID NO: 2049461 - DNA, 25 bp, Homo sapien
caggttgattacactaaactgcttc

SEQ ID NO: 2049462 - DNA, 25 bp, Homo sapien
gagtccctgatatggcaacattccc

SEQ ID NO: 2049463 - DNA, 25 bp, Homo sapien
gccagcaacgtagaccaacttgagt

SEQ ID NO: 2049464 - DNA, 25 bp, Homo sapien
gagtccttaatctgccagcaacgta

SEQ ID NO: 2049465 - DNA, 25 bp, Homo sapien
gagtttaacccagcagaaagagcgg

SEQ ID NO: 2049466 - DNA, 25 bp, Homo sapien
tgaagaaataatggagcgtgtctct

SEQ ID NO: 2049467 - DNA, 25 bp, Homo sapien
ctctgcagtaaaacagaacggcact

SEQ ID NO: 2049468 - DNA, 25 bp, Homo sapien
caaactattgggcatgtaactgaat

SEQ ID NO: 2049469 - DNA, 25 bp, Homo sapien
atctgatcctgggttgttattttgc

SEQ ID NO: 2049470 - DNA, 25 bp, Homo sapien
aaatctgatcctgggttgttatttt

SEQ ID NO: 2049471 - DNA, 25 bp, Homo sapien
gggaaaatctgatcctgggttgtta

SEQ ID NO: 2049472 - DNA, 25 bp, Homo sapien
gaaaatctgatcctgggttgttatt

SEQ ID NO: 2049473 - DNA, 25 bp, Homo sapien
tgtttgcaagaggatgtgataccca

SEQ ID NO: 2049474 - DNA, 25 bp, Homo sapien
tcttcttgtttgcaagaggatgtga

SEQ ID NO: 2049475 - DNA, 25 bp, Homo sapien
tgcaagaggatgtgatacccaaatt

SEQ ID NO: 2049476 - DNA, 25 bp, Homo sapien
ggatgtgatacccaaattttcagca

SEQ ID NO: 2049477 - DNA, 25 bp, Homo sapien
ggaactttctcctcacatcatttag

SEQ ID NO: 2049478 - DNA, 25 bp, Homo sapien
ctttgtcttgcattgatgagaacac

SEQ ID NO: 2049479 - DNA, 25 bp, Homo sapien
aaagcttctgccgtgactgtccttc

SEQ ID NO: 2049480 - DNA, 25 bp, Homo sapien
tcagtgtgtcctgggttcgtctgga

SEQ ID NO: 2049481 - DNA, 25 bp, Homo sapien
ctgctatttgtcataagataaatga

SEQ ID NO: 2049482 - DNA, 25 bp, Homo sapien
ctgaatacacaagaggagtgctcag

SEQ ID NO: 2049483 - DNA, 25 bp, Homo sapien
cactgaatacacaagaggagtgctc

SEQ ID NO: 2049484 - DNA, 25 bp, Homo sapien
atctgctatttgtcataagataaat

SEQ ID NO: 2049485 - DNA, 25 bp, Homo sapien
caactgcagttccctaaatgcatgc

SEQ ID NO: 2049486 - DNA, 25 bp, Homo sapien
catgctgattttcgacacttgtatg

SEQ ID NO: 2049487 - DNA, 25 bp, Homo sapien
tacaaacgctataaaccaactgcag

SEQ ID NO: 2049488 - DNA, 25 bp, Homo sapien
cctaatgttttcactacttgaagta

SEQ ID NO: 2049489 - DNA, 25 bp, Homo sapien
taagtacttgtgatcattgaagcac

SEQ ID NO: 2049490 - DNA, 25 bp, Homo sapien
tacttgtgatcattgaagcaccgga

SEQ ID NO: 2049491 - DNA, 25 bp, Homo sapien
taccctctcctgttaagtacttgtg

SEQ ID NO: 2049492 - DNA, 25 bp, Homo sapien
cctgttaagtacttgtgatcattga

SEQ ID NO: 2049493 - DNA, 25 bp, Homo sapien
tcaagtctgtttttcaaatcttcca

SEQ ID NO: 2049494 - DNA, 25 bp, Homo sapien
atcttccatcttcctgctgatgtgt

SEQ ID NO: 2049495 - DNA, 25 bp, Homo sapien
tttttcaaatcttccatcttcctgc

SEQ ID NO: 2049496 - DNA, 25 bp, Homo sapien
caagtctgtttttcaaatcttccat

SEQ ID NO: 2049497 - DNA, 25 bp, Homo sapien
ttgccatttcactaattattattgt

SEQ ID NO: 2049498 - DNA, 25 bp, Homo sapien
ccatttcactaattattattgttcc

SEQ ID NO: 2049499 - DNA, 25 bp, Homo sapien
gccatttcactaattattattgttc

SEQ ID NO: 2049500 - DNA, 25 bp, Homo sapien
gcaactgctctaagaagaggcatca

SEQ ID NO: 2049501 - DNA, 25 bp, Homo sapien
agcaactgctctaagaagaggcatc

SEQ ID NO: 2049502 - DNA, 25 bp, Homo sapien
caactgctctaagaagaggcatcac

SEQ ID NO: 2049503 - DNA, 25 bp, Homo sapien
tctcttgcatataatgatcaaacac

SEQ ID NO: 2049504 - DNA, 25 bp, Homo sapien
caaacacagtttgtgcatgttccct

SEQ ID NO: 2049505 - DNA, 25 bp, Homo sapien
ttcctcaaagattctctcttcacag

SEQ ID NO: 2049506 - DNA, 25 bp, Homo sapien
tacagcaaggagcactctaaatctc

SEQ ID NO: 2049507 - DNA, 25 bp, Homo sapien
tttcaagtgtctgatcaaaactttt

SEQ ID NO: 2049508 - DNA, 25 bp, Homo sapien
atttcaagtgtctgatcaaaacttt

SEQ ID NO: 2049509 - DNA, 25 bp, Homo sapien
gcttttaattcctcattcaattcat

SEQ ID NO: 2049510 - DNA, 25 bp, Homo sapien
aaatcattgtcttacttttagttgc

SEQ ID NO: 2049511 - DNA, 25 bp, Homo sapien
cttacttttagttgcttctaggtct

SEQ ID NO: 2049512 - DNA, 25 bp, Homo sapien
cattgtcttacttttagttgcttct

SEQ ID NO: 2049513 - DNA, 25 bp, Homo sapien
tttctgatcaattatattattaagc

SEQ ID NO: 2049514 - DNA, 25 bp, Homo sapien
tctaataagatctttctgatcaatt

SEQ ID NO: 2049515 - DNA, 25 bp, Homo sapien
ttcttctaataagatctttctgatc

SEQ ID NO: 2049516 - DNA, 25 bp, Homo sapien
cttctaataagatctttctgatcaa

SEQ ID NO: 2049517 - DNA, 25 bp, Homo sapien
tctttccgctcaagtgcctggactt

SEQ ID NO: 2049518 - DNA, 25 bp, Homo sapien
gcctggacttcgtaaatggaatata

SEQ ID NO: 2049519 - DNA, 25 bp, Homo sapien
tgtagttctgccagtgacatggcac

SEQ ID NO: 2049520 - DNA, 25 bp, Homo sapien
aacagaatgttctttgtcgagactt

SEQ ID NO: 2049521 - DNA, 25 bp, Homo sapien
gagtgagttttttcaggaattcttc

SEQ ID NO: 2049522 - DNA, 25 bp, Homo sapien
gcagccacttcaccttgagtgagtt

SEQ ID NO: 2049523 - DNA, 25 bp, Homo sapien
cacttcaccttgagtgagttttttc

SEQ ID NO: 2049524 - DNA, 25 bp, Homo sapien
caccttgagtgagttttttcaggaa

SEQ ID NO: 2049525 - DNA, 25 bp, Homo sapien
tgcccacaaactccattccacctcc

SEQ ID NO: 2049526 - DNA, 25 bp, Homo sapien
ctctgcccacaaactccattccacc

SEQ ID NO: 2049527 - DNA, 25 bp, Homo sapien
ctccattctcctgcagaactgccac

SEQ ID NO: 2049528 - DNA, 25 bp, Homo sapien
tctccattctcctgcagaactgcca

SEQ ID NO: 2049529 - DNA, 25 bp, Homo sapien
ctgtcttgtgtttggttaggtggaa

SEQ ID NO: 2049530 - DNA, 25 bp, Homo sapien
cagattcgtattttgattttttccg

SEQ ID NO: 2049531 - DNA, 25 bp, Homo sapien
aagcctccttatagatgttcttgag

SEQ ID NO: 2049532 - DNA, 25 bp, Homo sapien
ttaggtggaaaagagtaccaatgcg

SEQ ID NO: 2049533 - DNA, 25 bp, Homo sapien
cgtataggtctgattttggactttc

SEQ ID NO: 2049534 - DNA, 25 bp, Homo sapien
tattctttgctgcactatagtggca

SEQ ID NO: 2049535 - DNA, 25 bp, Homo sapien
tggcacgcttgtcacaaatctggtg

SEQ ID NO: 2049536 - DNA, 25 bp, Homo sapien
tctggtgaatgtatacgtataggtc

SEQ ID NO: 2049537 - DNA, 25 bp, Homo sapien
tgtcttccgtcagttttgtacatgc

SEQ ID NO: 2049538 - DNA, 25 bp, Homo sapien
gaaagctcaatatcccatgtttttt

SEQ ID NO: 2049539 - DNA, 25 bp, Homo sapien
ttgtacatgccaaagaaatagctga

SEQ ID NO: 2049540 - DNA, 25 bp, Homo sapien
acatcagaaagctcaatatcccatg

SEQ ID NO: 2049541 - DNA, 25 bp, Homo sapien
tccaggttagttggtcataaactct

SEQ ID NO: 2049542 - DNA, 25 bp, Homo sapien
gcagcataaaaatcattaactgctt

SEQ ID NO: 2049543 - DNA, 25 bp, Homo sapien
cagcataaaaatcattaactgcttc

SEQ ID NO: 2049544 - DNA, 25 bp, Homo sapien
gcttccaggttagttggtcataaac

SEQ ID NO: 2049545 - DNA, 25 bp, Homo sapien
taacatttatcactgatgaagagta

SEQ ID NO: 2049546 - DNA, 25 bp, Homo sapien
gatgactttgtttcccttattgctt

SEQ ID NO: 2049547 - DNA, 25 bp, Homo sapien
gactgttaagttgatatatctctct

SEQ ID NO: 2049548 - DNA, 25 bp, Homo sapien
gtaatgatcaaatagactgttaagt

SEQ ID NO: 2049549 - DNA, 25 bp, Homo sapien
tagtactttagggatttatgcacaa

SEQ ID NO: 2049550 - DNA, 25 bp, Homo sapien
tacatataaacttggtgataagaca

SEQ ID NO: 2049551 - DNA, 25 bp, Homo sapien
tattgttataacatgtcctcaggca

SEQ ID NO: 2049552 - DNA, 25 bp, Homo sapien
tagttacttttgcacacatagtagg

SEQ ID NO: 2049553 - DNA, 25 bp, Homo sapien
tttcatcctggtaaatatccttatc

SEQ ID NO: 2049554 - DNA, 25 bp, Homo sapien
tgtaggcctctatggttttttcatc

SEQ ID NO: 2049555 - DNA, 25 bp, Homo sapien
taacttttctgtgtaggtccattac

SEQ ID NO: 2049556 - DNA, 25 bp, Homo sapien
aatttgctgagccttcaatctggca

SEQ ID NO: 2049557 - DNA, 25 bp, Homo sapien
tgcttagagtccagtagagggccat

SEQ ID NO: 2049558 - DNA, 25 bp, Homo sapien
tcaaaatgttgtagttgattagctt

SEQ ID NO: 2049559 - DNA, 25 bp, Homo sapien
tataacatcactcaaataggcctca

SEQ ID NO: 2049560 - DNA, 25 bp, Homo sapien
catgtagtctatgtctgcttgaatc

SEQ ID NO: 2049561 - DNA, 25 bp, Homo sapien
agcgtctgcccggtcagtttctaga

SEQ ID NO: 2049562 - DNA, 25 bp, Homo sapien
ctgcacagccaatgggagttcttga

SEQ ID NO: 2049563 - DNA, 25 bp, Homo sapien
tggcctctgagagcaatgtttccat

SEQ ID NO: 2049564 - DNA, 25 bp, Homo sapien
tagacttttaatgagacgaatggcc

SEQ ID NO: 2049565 - DNA, 25 bp, Homo sapien
tcctgctttaactctggacactttt

SEQ ID NO: 2049566 - DNA, 25 bp, Homo sapien
tgctttaactctggacacttttcat

SEQ ID NO: 2049567 - DNA, 25 bp, Homo sapien
cctgctttaactctggacacttttc

SEQ ID NO: 2049568 - DNA, 25 bp, Homo sapien
ctgctttaactctggacacttttca

SEQ ID NO: 2049569 - DNA, 25 bp, Homo sapien
aggtcttttgtggaagaagttctgc

SEQ ID NO: 2049570 - DNA, 25 bp, Homo sapien
tcaggtcttttgtggaagaagttct

SEQ ID NO: 2049571 - DNA, 25 bp, Homo sapien
tggtgtagttacactccaatcttct

SEQ ID NO: 2049572 - DNA, 25 bp, Homo sapien
actggtgtagttacactccaatctt

SEQ ID NO: 2049573 - DNA, 25 bp, Homo sapien
tgacgtcgacatgggtagctaaagt

SEQ ID NO: 2049574 - DNA, 25 bp, Homo sapien
tcaaatgctcctgtattttggactc

SEQ ID NO: 2049575 - DNA, 25 bp, Homo sapien
tggaatatttactacggcacagctg

SEQ ID NO: 2049576 - DNA, 25 bp, Homo sapien
cacatcttggatgtgtgaaatcatt

SEQ ID NO: 2049577 - DNA, 25 bp, Homo sapien
ccttagaggctccatatagaaccaa

SEQ ID NO: 2049578 - DNA, 25 bp, Homo sapien
ttagaggctccatatagaaccaaac

SEQ ID NO: 2049579 - DNA, 25 bp, Homo sapien
tagaggctccatatagaaccaaact

SEQ ID NO: 2049580 - DNA, 25 bp, Homo sapien
ttcactgttctccttagaggctcca

SEQ ID NO: 2049581 - DNA, 25 bp, Homo sapien
ttctctctgagagcctttacttcct

SEQ ID NO: 2049582 - DNA, 25 bp, Homo sapien
cactgtgcactttcatgctatggag

SEQ ID NO: 2049583 - DNA, 25 bp, Homo sapien
cacggtacaaacagatgtactgtca

SEQ ID NO: 2049584 - DNA, 25 bp, Homo sapien
gtttctgacaaaagactcagcttgt

SEQ ID NO: 2049585 - DNA, 25 bp, Homo sapien
tgttcaccttcatcaattagcttag

SEQ ID NO: 2049586 - DNA, 25 bp, Homo sapien
ttgatcatctctagtggaagaagag

SEQ ID NO: 2049587 - DNA, 25 bp, Homo sapien
tgatcatctctagtggaagaagagg

SEQ ID NO: 2049588 - DNA, 25 bp, Homo sapien
gtttgatcatctctagtggaagaag

SEQ ID NO: 2049589 - DNA, 25 bp, Homo sapien
tttgatcatctctagtggaagaaga

SEQ ID NO: 2049590 - DNA, 25 bp, Homo sapien
tagcttggcttgttaacttgccagg

SEQ ID NO: 2049591 - DNA, 25 bp, Homo sapien
gcagtagcttggcttgttaacttgc

SEQ ID NO: 2049592 - DNA, 25 bp, Homo sapien
tggcttgttaacttgccagggtaaa

SEQ ID NO: 2049593 - DNA, 25 bp, Homo sapien
aaaatcttagatctttcacagttct

SEQ ID NO: 2049594 - DNA, 25 bp, Homo sapien
tgacaattctaactctcatctgcta

SEQ ID NO: 2049595 - DNA, 25 bp, Homo sapien
gggacgtgaaatgattcccatcatc

SEQ ID NO: 2049596 - DNA, 25 bp, Homo sapien
ggtgtatatttcacatggggacgtg

SEQ ID NO: 2049597 - DNA, 25 bp, Homo sapien
gattcccatcatcataagattcatt

SEQ ID NO: 2049598 - DNA, 25 bp, Homo sapien
catgggccccattactggctggcta

SEQ ID NO: 2049599 - DNA, 25 bp, Homo sapien
tcaatcagttagatgtagaattcag

SEQ ID NO: 2049600 - DNA, 25 bp, Homo sapien
tggctatctgaccttgggaagggta

SEQ ID NO: 2049601 - DNA, 25 bp, Homo sapien
tagttaatgtatttgagcttcagcc

SEQ ID NO: 2049602 - DNA, 25 bp, Homo sapien
ggtgctttcgagcaagcaagtataa

SEQ ID NO: 2049603 - DNA, 25 bp, Homo sapien
tccgccaggaagttgttcagtattt

SEQ ID NO: 2049604 - DNA, 25 bp, Homo sapien
aagtataaaattctcagcctctccg

SEQ ID NO: 2049605 - DNA, 25 bp, Homo sapien
gaggtgttggcgtggatcatcttat

SEQ ID NO: 2049606 - DNA, 25 bp, Homo sapien
gaagaactagtcgactctaactccc

SEQ ID NO: 2049607 - DNA, 25 bp, Homo sapien
gaactagtcgactctaactccctca

SEQ ID NO: 2049608 - DNA, 25 bp, Homo sapien
gtcgactctaactccctcagggtgg

SEQ ID NO: 2049609 - DNA, 25 bp, Homo sapien
gggtgaagaactagtcgactctaac

SEQ ID NO: 2049610 - DNA, 25 bp, Homo sapien
ctccgcgcgtttccccgcgcgtctc

SEQ ID NO: 2049611 - DNA, 25 bp, Homo sapien
cgcgcgtctcccggacccgcgcctg

SEQ ID NO: 2049612 - DNA, 25 bp, Homo sapien
gcgcgtctcccggacccgcgcctgc

SEQ ID NO: 2049613 - DNA, 25 bp, Homo sapien
cggctccgcgcgtttccccgcgcgt

SEQ ID NO: 2049614 - DNA, 25 bp, Homo sapien
tggcacccatagctacagcgaacat

SEQ ID NO: 2049615 - DNA, 25 bp, Homo sapien
caccaggccgttgagaagcatttaa

SEQ ID NO: 2049616 - DNA, 25 bp, Homo sapien
gctcagggatgcaggcccactaaaa

SEQ ID NO: 2049617 - DNA, 25 bp, Homo sapien
tagagaaattgaaccctctggcacc

SEQ ID NO: 2049618 - DNA, 25 bp, Homo sapien
gttctatggaccaaggagtctagga

SEQ ID NO: 2049619 - DNA, 25 bp, Homo sapien
cacagttctatggaccaaggagtct

SEQ ID NO: 2049620 - DNA, 25 bp, Homo sapien
tctatggaccaaggagtctaggatc

SEQ ID NO: 2049621 - DNA, 25 bp, Homo sapien
cagttctatggaccaaggagtctag

SEQ ID NO: 2049622 - DNA, 25 bp, Homo sapien
tgaaactacaactttagctgccagc

SEQ ID NO: 2049623 - DNA, 25 bp, Homo sapien
actacaactttagctgccagcagaa

SEQ ID NO: 2049624 - DNA, 25 bp, Homo sapien
gaaactacaactttagctgccagca

SEQ ID NO: 2049625 - DNA, 25 bp, Homo sapien
aactacaactttagctgccagcaga

SEQ ID NO: 2049626 - DNA, 25 bp, Homo sapien
tctcccaatcatgaagaaagctggt

SEQ ID NO: 2049627 - DNA, 25 bp, Homo sapien
aaagctggtattacctaaaaatctg

SEQ ID NO: 2049628 - DNA, 25 bp, Homo sapien
acctaaaaatctgagtactgagtcc

SEQ ID NO: 2049629 - DNA, 25 bp, Homo sapien
cttctcccaatcatgaagaaagctg

SEQ ID NO: 2049630 - DNA, 25 bp, Homo sapien
cctttgcttagagacagtagacctt

SEQ ID NO: 2049631 - DNA, 25 bp, Homo sapien
tacttgggatccaaagccaaccatg

SEQ ID NO: 2049632 - DNA, 25 bp, Homo sapien
agaactgttgcagggtgagccttcc

SEQ ID NO: 2049633 - DNA, 25 bp, Homo sapien
caatcagatattgcaggcaagcccc

SEQ ID NO: 2049634 - DNA, 25 bp, Homo sapien
taaggcagtccaacagaggagagta

SEQ ID NO: 2049635 - DNA, 25 bp, Homo sapien
ttagttctgtatccgaagacactgg

SEQ ID NO: 2049636 - DNA, 25 bp, Homo sapien
tgtgcacgcgtgagcgcacaggaca

SEQ ID NO: 2049637 - DNA, 25 bp, Homo sapien
ctttcaacaaggctctgggagttcc

SEQ ID NO: 2049638 - DNA, 25 bp, Homo sapien
gcgggacagcgggaagcgggtggaa

SEQ ID NO: 2049639 - DNA, 25 bp, Homo sapien
aggccaccgtgtccgcggctttcgg

SEQ ID NO: 2049640 - DNA, 25 bp, Homo sapien
cgtgtccgcggctttcggcctgagc

SEQ ID NO: 2049641 - DNA, 25 bp, Homo sapien
ttccaaaggccaccgtgtccgcggc

SEQ ID NO: 2049642 - DNA, 25 bp, Homo sapien
tgggcagcgccccaggaatttgggg

SEQ ID NO: 2049643 - DNA, 25 bp, Homo sapien
gtgggcagcgccccaggaatttggg

SEQ ID NO: 2049644 - DNA, 25 bp, Homo sapien
cgagtgtgagcgcggcgagtgtgag

SEQ ID NO: 2049645 - DNA, 25 bp, Homo sapien
gtgtgcgcgcgcgagagggcgagtg

SEQ ID NO: 2049646 - DNA, 25 bp, Homo sapien
tcgcgagggtttcagggcgtggctg

SEQ ID NO: 2049647 - DNA, 25 bp, Homo sapien
ggagaggggtctcgcgagggtttca

SEQ ID NO: 2049648 - DNA, 25 bp, Homo sapien
ttattctgcgggagtgggctcgccc

SEQ ID NO: 2049649 - DNA, 25 bp, Homo sapien
tgtgccttctccacgggtgaatttc

SEQ ID NO: 2049650 - DNA, 25 bp, Homo sapien
ggtgaatttccgagcgctcggcgca

SEQ ID NO: 2049651 - DNA, 25 bp, Homo sapien
cgctccggagacctttgtgtggcaa

SEQ ID NO: 2049652 - DNA, 25 bp, Homo sapien
tgacaaattcatgagtaacagatga

SEQ ID NO: 2049653 - DNA, 25 bp, Homo sapien
taacagatgatttcttagatgccag

SEQ ID NO: 2049654 - DNA, 25 bp, Homo sapien
cttgtagagttgtacctggaaggga

SEQ ID NO: 2049655 - DNA, 25 bp, Homo sapien
cttggtgtactgtggcttttagact

SEQ ID NO: 2049656 - DNA, 25 bp, Homo sapien
tctccatggaatgaatcttcactca

SEQ ID NO: 2049657 - DNA, 25 bp, Homo sapien
cttctccatggaatgaatcttcact

SEQ ID NO: 2049658 - DNA, 25 bp, Homo sapien
ttcttctccatggaatgaatcttca

SEQ ID NO: 2049659 - DNA, 25 bp, Homo sapien
caaatgtttcttctccatggaatga

SEQ ID NO: 2049660 - DNA, 25 bp, Homo sapien
catcctggagaagattaatgattgg

SEQ ID NO: 2049661 - DNA, 25 bp, Homo sapien
agattaatgattggctctccctgtg

SEQ ID NO: 2049662 - DNA, 25 bp, Homo sapien
taatgattggctctccctgtgtccc

SEQ ID NO: 2049663 - DNA, 25 bp, Homo sapien
gagaagattaatgattggctctccc

SEQ ID NO: 2049664 - DNA, 25 bp, Homo sapien
ccactaggaaggcagctagttgtgt

SEQ ID NO: 2049665 - DNA, 25 bp, Homo sapien
tgtttgctttgtgcaccagccgtgg

SEQ ID NO: 2049666 - DNA, 25 bp, Homo sapien
ccagccgtggagagtcccgtttgtg

SEQ ID NO: 2049667 - DNA, 25 bp, Homo sapien
gtgaaaaatagatccaccactagga

SEQ ID NO: 2049668 - DNA, 25 bp, Homo sapien
ttccttcccgttcacatattcgttg

SEQ ID NO: 2049669 - DNA, 25 bp, Homo sapien
cgttcacatattcgttgccataccc

SEQ ID NO: 2049670 - DNA, 25 bp, Homo sapien
cgttgccatacccttgttgtagtgt

SEQ ID NO: 2049671 - DNA, 25 bp, Homo sapien
atacccttgttgtagtgtggctcat

SEQ ID NO: 2049672 - DNA, 25 bp, Homo sapien
tgttagctcacagtgtcatccctgc

SEQ ID NO: 2049673 - DNA, 25 bp, Homo sapien
catgtgtataagcaagcttcgagaa

SEQ ID NO: 2049674 - DNA, 25 bp, Homo sapien
tacttagagagggatgtatgagaca

SEQ ID NO: 2049675 - DNA, 25 bp, Homo sapien
tgtaaatggtgtgcacagtcagcta

SEQ ID NO: 2049676 - DNA, 25 bp, Homo sapien
tagttatcacattgttgatgtaaga

SEQ ID NO: 2049677 - DNA, 25 bp, Homo sapien
ctggtagttatcacattgttgatgt

SEQ ID NO: 2049678 - DNA, 25 bp, Homo sapien
ttctggtagttatcacattgttgat

SEQ ID NO: 2049679 - DNA, 25 bp, Homo sapien
ggtagttatcacattgttgatgtaa

SEQ ID NO: 2049680 - DNA, 25 bp, Homo sapien
aacctcacaccgttttgcttgtcca

SEQ ID NO: 2049681 - DNA, 25 bp, Homo sapien
catgaggatgaccattttgggtaaa

SEQ ID NO: 2049682 - DNA, 25 bp, Homo sapien
tttggaggatgcaaaacctcacacc

SEQ ID NO: 2049683 - DNA, 25 bp, Homo sapien
agatttgggcttatggacagcagca

SEQ ID NO: 2049684 - DNA, 25 bp, Homo sapien
tattttcatacttaggtcacttcaa

SEQ ID NO: 2049685 - DNA, 25 bp, Homo sapien
ggaggcagtggtgatatttctttag

SEQ ID NO: 2049686 - DNA, 25 bp, Homo sapien
tcacttaacatattagtgctcaggt

SEQ ID NO: 2049687 - DNA, 25 bp, Homo sapien
aactttatgtagcaaattataccta

SEQ ID NO: 2049688 - DNA, 25 bp, Homo sapien
tgttaacagtagtatcccgacagta

SEQ ID NO: 2049689 - DNA, 25 bp, Homo sapien
ccgacagtatttctgcccattatct

SEQ ID NO: 2049690 - DNA, 25 bp, Homo sapien
tctgcccattatctgatgggtatgt

SEQ ID NO: 2049691 - DNA, 25 bp, Homo sapien
ctcataagtgttaacagtagtatcc

SEQ ID NO: 2049692 - DNA, 25 bp, Homo sapien
gtatgtaggaaataattctttggaa

SEQ ID NO: 2049693 - DNA, 25 bp, Homo sapien
gagaagagactttagggagcaaaac

SEQ ID NO: 2049694 - DNA, 25 bp, Homo sapien
tctgtgtcattatttgtgcgcttct

SEQ ID NO: 2049695 - DNA, 25 bp, Homo sapien
gtttgaaatgtgattatgaagcttc

SEQ ID NO: 2049696 - DNA, 25 bp, Homo sapien
tacagatggttagtgctcctgggaa

SEQ ID NO: 2049697 - DNA, 25 bp, Homo sapien
tgtacttgactgtgattggaacctc

SEQ ID NO: 2049698 - DNA, 25 bp, Homo sapien
gaaagctggtagcatatctcactcg

SEQ ID NO: 2049699 - DNA, 25 bp, Homo sapien
ggttattaggatcactgccacgtta

SEQ ID NO: 2049700 - DNA, 25 bp, Homo sapien
catgaggtgatgctgaaccgaatgc

SEQ ID NO: 2049701 - DNA, 25 bp, Homo sapien
aaaatggacattgagggtcttcccg

SEQ ID NO: 2049702 - DNA, 25 bp, Homo sapien
cgtaaggaaccccataagagtcact

SEQ ID NO: 2049703 - DNA, 25 bp, Homo sapien
cagctgctttcgtgttggtcatgag

SEQ ID NO: 2049704 - DNA, 25 bp, Homo sapien
gctgagagaagctaggtatcttgcc

SEQ ID NO: 2049705 - DNA, 25 bp, Homo sapien
tattatttggcctcggtctcgccca

SEQ ID NO: 2049706 - DNA, 25 bp, Homo sapien
agctcagtatttccgtcactgtggg

SEQ ID NO: 2049707 - DNA, 25 bp, Homo sapien
gtatcttgcctaacttcacacaatg

SEQ ID NO: 2049708 - DNA, 25 bp, Homo sapien
cagggcacttgaaatggaccaaagc

SEQ ID NO: 2049709 - DNA, 25 bp, Homo sapien
gctcccagaagtggataggcaggta

SEQ ID NO: 2049710 - DNA, 25 bp, Homo sapien
gacattgacatagaaaccccaggat

SEQ ID NO: 2049711 - DNA, 25 bp, Homo sapien
tagacatttgataccagccactagt

SEQ ID NO: 2049712 - DNA, 25 bp, Homo sapien
tagatctattggtgaaggttaaccg

SEQ ID NO: 2049713 - DNA, 25 bp, Homo sapien
tagttcacgtaaaggaatgctttct

SEQ ID NO: 2049714 - DNA, 25 bp, Homo sapien
tctttcagtgggtcatagttcacgt

SEQ ID NO: 2049715 - DNA, 25 bp, Homo sapien
gacagaagtgtacatcaagctatca

SEQ ID NO: 2049716 - DNA, 25 bp, Homo sapien
gattagcctaggatcacaaagttcc

SEQ ID NO: 2049717 - DNA, 25 bp, Homo sapien
tagttgtcaatatctcagtcagggc

SEQ ID NO: 2049718 - DNA, 25 bp, Homo sapien
ttattgctttatgccctaagggtgc

SEQ ID NO: 2049719 - DNA, 25 bp, Homo sapien
gcatgcaaggtagcataggagtgca

SEQ ID NO: 2049720 - DNA, 25 bp, Homo sapien
tcatgttgacaagaatggcggcttc

SEQ ID NO: 2049721 - DNA, 25 bp, Homo sapien
tgttcacagccctgaggtcaaacag

SEQ ID NO: 2049722 - DNA, 25 bp, Homo sapien
ccaatatgcccatgaaagaaggtga

SEQ ID NO: 2049723 - DNA, 25 bp, Homo sapien
tgacgctggtacctcacacagacag

SEQ ID NO: 2049724 - DNA, 25 bp, Homo sapien
cctatgaggttgagcctggttgcta

SEQ ID NO: 2049725 - DNA, 25 bp, Homo sapien
agtttagttgactgctggaccttgg

SEQ ID NO: 2049726 - DNA, 25 bp, Homo sapien
ccctgcgaaggtctagtttgaagaa

SEQ ID NO: 2049727 - DNA, 25 bp, Homo sapien
cctaagtagcacttttggagcaggg

SEQ ID NO: 2049728 - DNA, 25 bp, Homo sapien
cagttgattcagtaagactgcgaca

SEQ ID NO: 2049729 - DNA, 25 bp, Homo sapien
tacgcttgctttgatacctgactaa

SEQ ID NO: 2049730 - DNA, 25 bp, Homo sapien
taaaggcggtattactcctacagtg

SEQ ID NO: 2049731 - DNA, 25 bp, Homo sapien
ggcgaaggccctgaacctacataga

SEQ ID NO: 2049732 - DNA, 25 bp, Homo sapien
tggtgactgaggacataagcgatga

SEQ ID NO: 2049733 - DNA, 25 bp, Homo sapien
ctggtgactgaggacataagcgatg

SEQ ID NO: 2049734 - DNA, 25 bp, Homo sapien
ggtgactgaggacataagcgatgac

SEQ ID NO: 2049735 - DNA, 25 bp, Homo sapien
tgactgaggacataagcgatgactg

SEQ ID NO: 2049736 - DNA, 25 bp, Homo sapien
tggtccacgctgcattgtcatcctg

SEQ ID NO: 2049737 - DNA, 25 bp, Homo sapien
tcactccatagagaagcctcgtctg

SEQ ID NO: 2049738 - DNA, 25 bp, Homo sapien
cctcgtctgtagcaccaagtggtcc

SEQ ID NO: 2049739 - DNA, 25 bp, Homo sapien
tgccccagctgtgagagcatgacgt

SEQ ID NO: 2049740 - DNA, 25 bp, Homo sapien
gcttcaggactgcagtttcgtgcca

SEQ ID NO: 2049741 - DNA, 25 bp, Homo sapien
agatttgggacctcttcacttggaa

SEQ ID NO: 2049742 - DNA, 25 bp, Homo sapien
tcgtgccatgcatgattcaccagag

SEQ ID NO: 2049743 - DNA, 25 bp, Homo sapien
cacagatggtctagcttgcttcagg

SEQ ID NO: 2049744 - DNA, 25 bp, Homo sapien
tcagggacagctgatgttttcatac

SEQ ID NO: 2049745 - DNA, 25 bp, Homo sapien
gaaccaatttttgtgggtggcagca

SEQ ID NO: 2049746 - DNA, 25 bp, Homo sapien
agctgatgttttcatacttggaacc

SEQ ID NO: 2049747 - DNA, 25 bp, Homo sapien
catacttggaaccaatttttgtggg

SEQ ID NO: 2049748 - DNA, 25 bp, Homo sapien
tcataaagaccatccaggctaggaa

SEQ ID NO: 2049749 - DNA, 25 bp, Homo sapien
caaatcataaagaccatccaggcta

SEQ ID NO: 2049750 - DNA, 25 bp, Homo sapien
gccaaatcataaagaccatccaggc

SEQ ID NO: 2049751 - DNA, 25 bp, Homo sapien
aatcataaagaccatccaggctagg

SEQ ID NO: 2049752 - DNA, 25 bp, Homo sapien
gagacagcaaccctgagaggcaccc

SEQ ID NO: 2049753 - DNA, 25 bp, Homo sapien
tctacccttagcagatggacagtac

SEQ ID NO: 2049754 - DNA, 25 bp, Homo sapien
ctctacccttagcagatggacagta

SEQ ID NO: 2049755 - DNA, 25 bp, Homo sapien
gacagcaaccctgagaggcacccac

SEQ ID NO: 2049756 - DNA, 25 bp, Homo sapien
ggccaatgttaaggtcaggattttg

SEQ ID NO: 2049757 - DNA, 25 bp, Homo sapien
cttaacaatgttggcagcagcagct

SEQ ID NO: 2049758 - DNA, 25 bp, Homo sapien
ttacttaacaatgttggcagcagca

SEQ ID NO: 2049759 - DNA, 25 bp, Homo sapien
ctgctgcttgtgctgtttcaaagca

SEQ ID NO: 2049760 - DNA, 25 bp, Homo sapien
tgcttgtgctgtttcaaagcaatta

SEQ ID NO: 2049761 - DNA, 25 bp, Homo sapien
aggttgccaggtgctggctgccccg

SEQ ID NO: 2049762 - DNA, 25 bp, Homo sapien
gaggttgccaggtgctggctgcccc

SEQ ID NO: 2049763 - DNA, 25 bp, Homo sapien
tttgaggaggttgccaggtgctggc

SEQ ID NO: 2049764 - DNA, 25 bp, Homo sapien
tgaggaggttgccaggtgctggctg

SEQ ID NO: 2049765 - DNA, 25 bp, Homo sapien
aacttcccgtttcatcaggcacaaa

SEQ ID NO: 2049766 - DNA, 25 bp, Homo sapien
cttcaacttcccgtttcatcaggca

SEQ ID NO: 2049767 - DNA, 25 bp, Homo sapien
accttcaacttcccgtttcatcagg

SEQ ID NO: 2049768 - DNA, 25 bp, Homo sapien
tcaacttcccgtttcatcaggcaca

SEQ ID NO: 2049769 - DNA, 25 bp, Homo sapien
gcccatttcaaatgtgtcacactgg

SEQ ID NO: 2049770 - DNA, 25 bp, Homo sapien
aacagagtagcaatgatggtttcca

SEQ ID NO: 2049771 - DNA, 25 bp, Homo sapien
tcacggatgcctgtgtcactaagga

SEQ ID NO: 2049772 - DNA, 25 bp, Homo sapien
aaatgtgtcacactggttctcacgg

SEQ ID NO: 2049773 - DNA, 25 bp, Homo sapien
tgagccacattcagtttgctgatag

SEQ ID NO: 2049774 - DNA, 25 bp, Homo sapien
tgatagtcaacagggataatgtatg

SEQ ID NO: 2049775 - DNA, 25 bp, Homo sapien
attcctgactggtattctgagccac

SEQ ID NO: 2049776 - DNA, 25 bp, Homo sapien
tctctattactaatcccattgccat

SEQ ID NO: 2049777 - DNA, 25 bp, Homo sapien
cttacggatcaaggacaatgtggca

SEQ ID NO: 2049778 - DNA, 25 bp, Homo sapien
tccaggtgctgctagagggatgcct

SEQ ID NO: 2049779 - DNA, 25 bp, Homo sapien
gaatagatagccttttatgcccctg

SEQ ID NO: 2049780 - DNA, 25 bp, Homo sapien
aaaaaataggcttgtctcagtgcac

SEQ ID NO: 2049781 - DNA, 25 bp, Homo sapien
ggaggatcctgagctagtcgccaat

SEQ ID NO: 2049782 - DNA, 25 bp, Homo sapien
tgcaacaagctgtctcacggcattg

SEQ ID NO: 2049783 - DNA, 25 bp, Homo sapien
cgccaattgtctcttcatgctgaga

SEQ ID NO: 2049784 - DNA, 25 bp, Homo sapien
tgattctcgatatcctgcaacaagc

SEQ ID NO: 2049785 - DNA, 25 bp, Homo sapien
tcagatgccgaaatcagcctctgga

SEQ ID NO: 2049786 - DNA, 25 bp, Homo sapien
taatgagcaatgtaatggtaaccga

SEQ ID NO: 2049787 - DNA, 25 bp, Homo sapien
tggtaaccgagtggcttctcttcgg

SEQ ID NO: 2049788 - DNA, 25 bp, Homo sapien
cttccacaagaagctagtgatctct

SEQ ID NO: 2049789 - DNA, 25 bp, Homo sapien
gctacctctagagtatcctttttgc

SEQ ID NO: 2049790 - DNA, 25 bp, Homo sapien
cctgctacctctagagtatcctttt

SEQ ID NO: 2049791 - DNA, 25 bp, Homo sapien
gggtgggtagatcctgctacctcta

SEQ ID NO: 2049792 - DNA, 25 bp, Homo sapien
gggtagatcctgctacctctagagt

SEQ ID NO: 2049793 - DNA, 25 bp, Homo sapien
cagggcctttcttggaggctttctg

SEQ ID NO: 2049794 - DNA, 25 bp, Homo sapien
ttcagggcctttcttggaggctttc

SEQ ID NO: 2049795 - DNA, 25 bp, Homo sapien
gggcctttcttggaggctttctgcc

SEQ ID NO: 2049796 - DNA, 25 bp, Homo sapien
cttttcagggcctttcttggaggct

SEQ ID NO: 2049797 - DNA, 25 bp, Homo sapien
atttatgcagccaaaaaacacatga

SEQ ID NO: 2049798 - DNA, 25 bp, Homo sapien
ccaccaaaaagtgggtgaaggacat

SEQ ID NO: 2049799 - DNA, 25 bp, Homo sapien
aaaaatgctcatcatcactggccat

SEQ ID NO: 2049800 - DNA, 25 bp, Homo sapien
gaacagacacttctcaaaagaagac

SEQ ID NO: 2049801 - DNA, 25 bp, Homo sapien
tacactgtttgtcagctggagcaga

SEQ ID NO: 2049802 - DNA, 25 bp, Homo sapien
tacagcacgtcctgtgagcctggaa

SEQ ID NO: 2049803 - DNA, 25 bp, Homo sapien
tgagtaagtggcctgggtcgcctct

SEQ ID NO: 2049804 - DNA, 25 bp, Homo sapien
gtaactatggtaactataggtccca

SEQ ID NO: 2049805 - DNA, 25 bp, Homo sapien
caagtctacttcttcgtatttggaa

SEQ ID NO: 2049806 - DNA, 25 bp, Homo sapien
cagtcccaacattcctgtagcagaa

SEQ ID NO: 2049807 - DNA, 25 bp, Homo sapien
cttgggaaaaggtagcctcaaacag

SEQ ID NO: 2049808 - DNA, 25 bp, Homo sapien
taacaatgaaatgcgcttgcagaag

SEQ ID NO: 2049809 - DNA, 25 bp, Homo sapien
tttattgcagtacctttgatagaca

SEQ ID NO: 2049810 - DNA, 25 bp, Homo sapien
ttattgcagtacctttgatagacat

SEQ ID NO: 2049811 - DNA, 25 bp, Homo sapien
ctttattgcagtacctttgatagac

SEQ ID NO: 2049812 - DNA, 25 bp, Homo sapien
tgtctataacccaggaccaagtctt

SEQ ID NO: 2049813 - DNA, 25 bp, Homo sapien
tatccagtttcctgagttagagact

SEQ ID NO: 2049814 - DNA, 25 bp, Homo sapien
gagaatcataatcaaccgtcccctt

SEQ ID NO: 2049815 - DNA, 25 bp, Homo sapien
tcctaggcattatatccgaaactgt

SEQ ID NO: 2049816 - DNA, 25 bp, Homo sapien
gtcatctgggaactcttttataggt

SEQ ID NO: 2049817 - DNA, 25 bp, Homo sapien
tctgtcaaagtcatctgggaactct

SEQ ID NO: 2049818 - DNA, 25 bp, Homo sapien
aaagtcatctgggaactcttttata

SEQ ID NO: 2049819 - DNA, 25 bp, Homo sapien
catctgggaactcttttataggtgg

SEQ ID NO: 2049820 - DNA, 25 bp, Homo sapien
ctaaatgcgaaatctggctgcccct

SEQ ID NO: 2049821 - DNA, 25 bp, Homo sapien
ctggctgccccttttgaattgtcaa

SEQ ID NO: 2049822 - DNA, 25 bp, Homo sapien
ccttttgaattgtcaaagtgaagaa

SEQ ID NO: 2049823 - DNA, 25 bp, Homo sapien
aatgcgaaatctggctgcccctttt

SEQ ID NO: 2049824 - DNA, 25 bp, Homo sapien
accagacttcaagatgcctcagtac

SEQ ID NO: 2049825 - DNA, 25 bp, Homo sapien
caccagacttcaagatgcctcagta

SEQ ID NO: 2049826 - DNA, 25 bp, Homo sapien
tcaccagacttcaagatgcctcagt

SEQ ID NO: 2049827 - DNA, 25 bp, Homo sapien
ttggcggcatttctactctcactct

SEQ ID NO: 2049828 - DNA, 25 bp, Homo sapien
tccagacgcatcctcttggcggcat

SEQ ID NO: 2049829 - DNA, 25 bp, Homo sapien
taaggtgggaaggaataggtcgaga

SEQ ID NO: 2049830 - DNA, 25 bp, Homo sapien
gaagccaagatactctctgcaactg

SEQ ID NO: 2049831 - DNA, 25 bp, Homo sapien
tgtcgcctgcatgagtcaatgatag

SEQ ID NO: 2049832 - DNA, 25 bp, Homo sapien
tcttgatactcagggaattgtcgcc

SEQ ID NO: 2049833 - DNA, 25 bp, Homo sapien
tcatccgcctgcaggacttgaggta

SEQ ID NO: 2049834 - DNA, 25 bp, Homo sapien
agtacgtatacgttttctggcacgc

SEQ ID NO: 2049835 - DNA, 25 bp, Homo sapien
ggtttggagggctgctctcttctgt

SEQ ID NO: 2049836 - DNA, 25 bp, Homo sapien
gggtttggagggctgctctcttctg

SEQ ID NO: 2049837 - DNA, 25 bp, Homo sapien
tgccagagtcatagctggagtaact

SEQ ID NO: 2049838 - DNA, 25 bp, Homo sapien
gaatcgtcatggtcctcgtggtcat

SEQ ID NO: 2049839 - DNA, 25 bp, Homo sapien
taaaagctttcagccgctcggcttc

SEQ ID NO: 2049840 - DNA, 25 bp, Homo sapien
tcccctgtttagtgagaggtcctca

SEQ ID NO: 2049841 - DNA, 25 bp, Homo sapien
attgcacaagcttataagttttatg

SEQ ID NO: 2049842 - DNA, 25 bp, Homo sapien
cattgcacaagcttataagttttat

SEQ ID NO: 2049843 - DNA, 25 bp, Homo sapien
tcattgcacaagcttataagtttta

SEQ ID NO: 2049844 - DNA, 25 bp, Homo sapien
gcaaagggaccctagaactgataaa

SEQ ID NO: 2049845 - DNA, 25 bp, Homo sapien
caagataaggttgctcactctcatc

SEQ ID NO: 2049846 - DNA, 25 bp, Homo sapien
gagaaccaaatcaacaatgcaaaca

SEQ ID NO: 2049847 - DNA, 25 bp, Homo sapien
aatcatactgactaggcaaaagctg

SEQ ID NO: 2049848 - DNA, 25 bp, Homo sapien
tcatgatcggagcttggaaagtaca

SEQ ID NO: 2049849 - DNA, 25 bp, Homo sapien
ttgatcacgagaatgactggaaagc

SEQ ID NO: 2049850 - DNA, 25 bp, Homo sapien
catacagcagttggaaagtgaccct

SEQ ID NO: 2049851 - DNA, 25 bp, Homo sapien
gaagcatgccatagatgaatgacac

SEQ ID NO: 2049852 - DNA, 25 bp, Homo sapien
catttctaaaatggaggatattcaa

SEQ ID NO: 2049853 - DNA, 25 bp, Homo sapien
gagccagaacataatatatcagcag

SEQ ID NO: 2049854 - DNA, 25 bp, Homo sapien
cctggttggtatcgaagccctgacc

SEQ ID NO: 2049855 - DNA, 25 bp, Homo sapien
taggaagccactagcaagtatttgc

SEQ ID NO: 2049856 - DNA, 25 bp, Homo sapien
tgtccaatcattcggcatttatcct

SEQ ID NO: 2049857 - DNA, 25 bp, Homo sapien
gaaatccaggttaggtagataacaa

SEQ ID NO: 2049858 - DNA, 25 bp, Homo sapien
tgggaacatatctcatccaagaaat

SEQ ID NO: 2049859 - DNA, 25 bp, Homo sapien
aatagtcttgtagacttgtccaatc

SEQ ID NO: 2049860 - DNA, 25 bp, Homo sapien
ctaagagataatgtggtccgtacag

SEQ ID NO: 2049861 - DNA, 25 bp, Homo sapien
gtacagtcaacctgctcaggagctg

SEQ ID NO: 2049862 - DNA, 25 bp, Homo sapien
ggtccgtacagtcaacctgctcagg

SEQ ID NO: 2049863 - DNA, 25 bp, Homo sapien
taatgtggtccgtacagtcaacctg

SEQ ID NO: 2049864 - DNA, 25 bp, Homo sapien
taactgtgtgtgatcaattaattgt

SEQ ID NO: 2049865 - DNA, 25 bp, Homo sapien
gcaatgggaatggacaaggaataaa

SEQ ID NO: 2049866 - DNA, 25 bp, Homo sapien
gaagcaatgggaatggacaaggaat

SEQ ID NO: 2049867 - DNA, 25 bp, Homo sapien
gtaactgtgtgtgatcaattaattg

SEQ ID NO: 2049868 - DNA, 25 bp, Homo sapien
tatggtcttctaattcagactggga

SEQ ID NO: 2049869 - DNA, 25 bp, Homo sapien
gaatttcttagcctccacagttgtg

SEQ ID NO: 2049870 - DNA, 25 bp, Homo sapien
gaataatacagaggactaacaccag

SEQ ID NO: 2049871 - DNA, 25 bp, Homo sapien
gcttacactggacctataccagggc

SEQ ID NO: 2049872 - DNA, 25 bp, Homo sapien
tactgttgtgatcatctattctgta

SEQ ID NO: 2049873 - DNA, 25 bp, Homo sapien
cctgaagcaattgaactgtgcccca

SEQ ID NO: 2049874 - DNA, 25 bp, Homo sapien
cccctgaagcaattgaactgtgccc

SEQ ID NO: 2049875 - DNA, 25 bp, Homo sapien
tattccgaagttagctgcgcagaga

SEQ ID NO: 2049876 - DNA, 25 bp, Homo sapien
catagtttggtccatcctgagtagc

SEQ ID NO: 2049877 - DNA, 25 bp, Homo sapien
ttcaggttcactgggccaaggcggt

SEQ ID NO: 2049878 - DNA, 25 bp, Homo sapien
gggtaccatagcatttgaaccaaag

SEQ ID NO: 2049879 - DNA, 25 bp, Homo sapien
tctgtatatgagtcccaaggaaaac

SEQ ID NO: 2049880 - DNA, 25 bp, Homo sapien
tctttcccctcttgatcactaattc

SEQ ID NO: 2049881 - DNA, 25 bp, Homo sapien
gaagaattgtcaaaaccatcaaagt

SEQ ID NO: 2049882 - DNA, 25 bp, Homo sapien
ctgggtcctgcatgttctctttccc

SEQ ID NO: 2049883 - DNA, 25 bp, Homo sapien
tagcaggtaaagagtatcaccctgg

SEQ ID NO: 2049884 - DNA, 25 bp, Homo sapien
catcaatcacaatgggcagttttag

SEQ ID NO: 2049885 - DNA, 25 bp, Homo sapien
tctccttagtttatgtaacagacca

SEQ ID NO: 2049886 - DNA, 25 bp, Homo sapien
ccctagcagaggtttctgttgtaaa

SEQ ID NO: 2049887 - DNA, 25 bp, Homo sapien
tgtttgttgagtgttccctagcaga

SEQ ID NO: 2049888 - DNA, 25 bp, Homo sapien
gaggtccaacctttctctcgaagtg

SEQ ID NO: 2049889 - DNA, 25 bp, Homo sapien
gccaattctatcattgcagatccag

SEQ ID NO: 2049890 - DNA, 25 bp, Homo sapien
cttaaataccaatgtctgtggcagg

SEQ ID NO: 2049891 - DNA, 25 bp, Homo sapien
gatccagcatccctcaggcgaggtc

SEQ ID NO: 2049892 - DNA, 25 bp, Homo sapien
tatggattcgtcctggttgcagttg

SEQ ID NO: 2049893 - DNA, 25 bp, Homo sapien
acagtttgattgtaatgggtcctgg

SEQ ID NO: 2049894 - DNA, 25 bp, Homo sapien
gaggctataatgtacatgatgagtc

SEQ ID NO: 2049895 - DNA, 25 bp, Homo sapien
catgtatatccgtttctttcctcaa

SEQ ID NO: 2049896 - DNA, 25 bp, Homo sapien
ctctgccttctgtatgtcttttctg

SEQ ID NO: 2049897 - DNA, 25 bp, Homo sapien
ttttctcaaatccttttccacagcc

SEQ ID NO: 2049898 - DNA, 25 bp, Homo sapien
agcctctgccttctgtatgtctttt

SEQ ID NO: 2049899 - DNA, 25 bp, Homo sapien
tttttctcaaatccttttccacagc

SEQ ID NO: 2049900 - DNA, 25 bp, Homo sapien
tagatctcaaatatctgagcttcac

SEQ ID NO: 2049901 - DNA, 25 bp, Homo sapien
ttagatctcaaatatctgagcttca

SEQ ID NO: 2049902 - DNA, 25 bp, Homo sapien
ccttttacaaaagattggacatggg

SEQ ID NO: 2049903 - DNA, 25 bp, Homo sapien
tcagtgacctgtggcataaacttca

SEQ ID NO: 2049904 - DNA, 25 bp, Homo sapien
ggaattatctaaactaaaacatgag

SEQ ID NO: 2049905 - DNA, 25 bp, Homo sapien
gatgtgtgaaacaattgacaacaaa

SEQ ID NO: 2049906 - DNA, 25 bp, Homo sapien
taaatgcggtggttacacagctggg

SEQ ID NO: 2049907 - DNA, 25 bp, Homo sapien
gagagtaggcatgtcctcacagaga

SEQ ID NO: 2049908 - DNA, 25 bp, Homo sapien
ttattcctcaaacagcgcctagcgt

SEQ ID NO: 2049909 - DNA, 25 bp, Homo sapien
tagtaaattagcctccgtgtcctct

SEQ ID NO: 2049910 - DNA, 25 bp, Homo sapien
gaatctggtgttcagcctgaaaaac

SEQ ID NO: 2049911 - DNA, 25 bp, Homo sapien
aatctggtgttcagcctgaaaaaca

SEQ ID NO: 2049912 - DNA, 25 bp, Homo sapien
tttcctaagaaattgtaaacactga

SEQ ID NO: 2049913 - DNA, 25 bp, Homo sapien
cctaagaaattgtaaacactgaaag

SEQ ID NO: 2049914 - DNA, 25 bp, Homo sapien
tacccaaggatccaagtgagttacc

SEQ ID NO: 2049915 - DNA, 25 bp, Homo sapien
tcagttcaaatcaaggaagtatggc

SEQ ID NO: 2049916 - DNA, 25 bp, Homo sapien
tcatatgtgtcttagtgggaggcaa

SEQ ID NO: 2049917 - DNA, 25 bp, Homo sapien
gctgacatacagagaatttaagggt

SEQ ID NO: 2049918 - DNA, 25 bp, Homo sapien
ttatttagtcaaactgaaaggctta

SEQ ID NO: 2049919 - DNA, 25 bp, Homo sapien
tatttagtcaaactgaaaggcttac

SEQ ID NO: 2049920 - DNA, 25 bp, Homo sapien
gagttcacagctgacatccgtgttg

SEQ ID NO: 2049921 - DNA, 25 bp, Homo sapien
ttggagctaagatcagagttcacag

SEQ ID NO: 2049922 - DNA, 25 bp, Homo sapien
tgaatcactcatgtcaaattcatca

SEQ ID NO: 2049923 - DNA, 25 bp, Homo sapien
tcttcaagattggagctaagatcag

SEQ ID NO: 2049924 - DNA, 25 bp, Homo sapien
gtagccatatggcaatataaaatcc

SEQ ID NO: 2049925 - DNA, 25 bp, Homo sapien
ccagaagggatcagcatatgtgggc

SEQ ID NO: 2049926 - DNA, 25 bp, Homo sapien
gacagctctaactagttaatgagac

SEQ ID NO: 2049927 - DNA, 25 bp, Homo sapien
atgtgggcgcattgttggcacaaag

SEQ ID NO: 2049928 - DNA, 25 bp, Homo sapien
gcttcatgtgtttcatgtaggccat

SEQ ID NO: 2049929 - DNA, 25 bp, Homo sapien
taattggcatgttgtagtcaatcat

SEQ ID NO: 2049930 - DNA, 25 bp, Homo sapien
ggtaattggcatgttgtagtcaatc

SEQ ID NO: 2049931 - DNA, 25 bp, Homo sapien
gtaattggcatgttgtagtcaatca

SEQ ID NO: 2049932 - DNA, 25 bp, Homo sapien
ggtaggaaggcatagctctctgaaa

SEQ ID NO: 2049933 - DNA, 25 bp, Homo sapien
ttcttttctggcactctgagcagct

SEQ ID NO: 2049934 - DNA, 25 bp, Homo sapien
gcagctcattagaaatcgtgtcacc

SEQ ID NO: 2049935 - DNA, 25 bp, Homo sapien
tcgtgtcaccgcttctcttggtagg

SEQ ID NO: 2049936 - DNA, 25 bp, Homo sapien
gaatacaatggtggttccagtggct

SEQ ID NO: 2049937 - DNA, 25 bp, Homo sapien
gacaagcataatctcacctgtaagt

SEQ ID NO: 2049938 - DNA, 25 bp, Homo sapien
tctgtttctcaagacagggtcacag

SEQ ID NO: 2049939 - DNA, 25 bp, Homo sapien
aggtgcggaccactaagcccaactt

SEQ ID NO: 2049940 - DNA, 25 bp, Homo sapien
tcagtcttcccacccgttcatctac

SEQ ID NO: 2049941 - DNA, 25 bp, Homo sapien
cttctctgatcatgttctccctcag

SEQ ID NO: 2049942 - DNA, 25 bp, Homo sapien
caatgcaccatttgtagaaaagcac

SEQ ID NO: 2049943 - DNA, 25 bp, Homo sapien
ttactccaatgcaccatttgtagaa

SEQ ID NO: 2049944 - DNA, 25 bp, Homo sapien
tgaatggcagtaagctattcttttg

SEQ ID NO: 2049945 - DNA, 25 bp, Homo sapien
gagatgttgtacacatctgacaata

SEQ ID NO: 2049946 - DNA, 25 bp, Homo sapien
tggccactgcggtgagcaactacac

SEQ ID NO: 2049947 - DNA, 25 bp, Homo sapien
tcttaacagatttgcagtattactc

SEQ ID NO: 2049948 - DNA, 25 bp, Homo sapien
ttgtagagtcacatgcacagtttca

SEQ ID NO: 2049949 - DNA, 25 bp, Homo sapien
gcattgcaagcagttctatattttg

SEQ ID NO: 2049950 - DNA, 25 bp, Homo sapien
tagagtcacatgcacagtttcactg

SEQ ID NO: 2049951 - DNA, 25 bp, Homo sapien
tggcattgcaagcagttctatattt

SEQ ID NO: 2049952 - DNA, 25 bp, Homo sapien
tgttctccatttggccccgtttcca

SEQ ID NO: 2049953 - DNA, 25 bp, Homo sapien
agcgtgtttccgaatttgttctcca

SEQ ID NO: 2049954 - DNA, 25 bp, Homo sapien
ttctcttttgtccagcgtgtttccg

SEQ ID NO: 2049955 - DNA, 25 bp, Homo sapien
catttggccccgtttccacatgcat

SEQ ID NO: 2049956 - DNA, 25 bp, Homo sapien
ccacagctacccgtcgtaaagatag

SEQ ID NO: 2049957 - DNA, 25 bp, Homo sapien
ttcaaccacagctacccgtcgtaaa

SEQ ID NO: 2049958 - DNA, 25 bp, Homo sapien
tacccgtcgtaaagatagcttctca

SEQ ID NO: 2049959 - DNA, 25 bp, Homo sapien
gatagcttctcatctacccctacgc

SEQ ID NO: 2049960 - DNA, 25 bp, Homo sapien
atacagaacttggaaaaacatgaga

SEQ ID NO: 2049961 - DNA, 25 bp, Homo sapien
cagaacttggaaaaacatgagagaa

SEQ ID NO: 2049962 - DNA, 25 bp, Homo sapien
acttggaaaaacatgagagaagaca

SEQ ID NO: 2049963 - DNA, 25 bp, Homo sapien
gaacttggaaaaacatgagagaaga

SEQ ID NO: 2049964 - DNA, 25 bp, Homo sapien
atataatttaacacaggttggagtt

SEQ ID NO: 2049965 - DNA, 25 bp, Homo sapien
ataatttaacacaggttggagttgg

SEQ ID NO: 2049966 - DNA, 25 bp, Homo sapien
ctgttgaagtagattccaggaagaa

SEQ ID NO: 2049967 - DNA, 25 bp, Homo sapien
tctgttgaagtagattccaggaaga

SEQ ID NO: 2049968 - DNA, 25 bp, Homo sapien
aaacacagatggattagagcccaga

SEQ ID NO: 2049969 - DNA, 25 bp, Homo sapien
gaaaagagattttagcactggcata

SEQ ID NO: 2049970 - DNA, 25 bp, Homo sapien
ctcaaacacagatggattagagccc

SEQ ID NO: 2049971 - DNA, 25 bp, Homo sapien
cacagatggattagagcccagaaaa

SEQ ID NO: 2049972 - DNA, 25 bp, Homo sapien
ccaatggtaaatgtccataaatgca

SEQ ID NO: 2049973 - DNA, 25 bp, Homo sapien
ttcccaaagtcccattatcaaagat

SEQ ID NO: 2049974 - DNA, 25 bp, Homo sapien
gatctatcatttgaactggagccaa

SEQ ID NO: 2049975 - DNA, 25 bp, Homo sapien
gcaatcatgtcactaacacaataga

SEQ ID NO: 2049976 - DNA, 25 bp, Homo sapien
cttgccgtgtcaagcaaagactgtt

SEQ ID NO: 2049977 - DNA, 25 bp, Homo sapien
tatgcacatgtgcatgctcctcctg

SEQ ID NO: 2049978 - DNA, 25 bp, Homo sapien
gatgtgctaagctatcagatgtaca

SEQ ID NO: 2049979 - DNA, 25 bp, Homo sapien
gacttcagaagtctccggcttcatg

SEQ ID NO: 2049980 - DNA, 25 bp, Homo sapien
gccaaggaaacaattgacagagtga

SEQ ID NO: 2049981 - DNA, 25 bp, Homo sapien
gacttacacacaagacctaatactg

SEQ ID NO: 2049982 - DNA, 25 bp, Homo sapien
ggctcctcgaccttagattttctaa

SEQ ID NO: 2049983 - DNA, 25 bp, Homo sapien
caaacagccaatatgaatatcagga

SEQ ID NO: 2049984 - DNA, 25 bp, Homo sapien
aaactactactatgaggaaaagctc

SEQ ID NO: 2049985 - DNA, 25 bp, Homo sapien
gaccacaagccctgttgacctggta

SEQ ID NO: 2049986 - DNA, 25 bp, Homo sapien
tcgcttttagcagtttataaactgg

SEQ ID NO: 2049987 - DNA, 25 bp, Homo sapien
tgacctggtagcacttcattggctg

SEQ ID NO: 2049988 - DNA, 25 bp, Homo sapien
cctatgctacaggatctcccaaagt

SEQ ID NO: 2049989 - DNA, 25 bp, Homo sapien
taagtcagctaataagccacattgc

SEQ ID NO: 2049990 - DNA, 25 bp, Homo sapien
gaatggcctttactactggtcccca

SEQ ID NO: 2049991 - DNA, 25 bp, Homo sapien
tcattctcgggatctatttgacccc

SEQ ID NO: 2049992 - DNA, 25 bp, Homo sapien
tggcatgatgcagaaaggtctcctg

SEQ ID NO: 2049993 - DNA, 25 bp, Homo sapien
gtggcatgatgcagaaaggtctcct

SEQ ID NO: 2049994 - DNA, 25 bp, Homo sapien
cgtggcatgatgcagaaaggtctcc

SEQ ID NO: 2049995 - DNA, 25 bp, Homo sapien
tctgcagcgtgaggctgagatgcat

SEQ ID NO: 2049996 - DNA, 25 bp, Homo sapien
aatgccagtgcctcgcggcgcctgg

SEQ ID NO: 2049997 - DNA, 25 bp, Homo sapien
gatgcattgggctctcaatgccagt

SEQ ID NO: 2049998 - DNA, 25 bp, Homo sapien
tcttgtgaagaaaatcgacgctgct

SEQ ID NO: 2049999 - DNA, 25 bp, Homo sapien
acacaccattcgatagcgcctaaac

SEQ ID NO: 2050000 - DNA, 25 bp, Homo sapien
attcgatagcgcctaaacccatctt

SEQ ID NO: 2050001 - DNA, 25 bp, Homo sapien
tacacacaccattcgatagcgccta

SEQ ID NO: 2050002 - DNA, 25 bp, Homo sapien
aatacacacaccattcgatagcgcc

SEQ ID NO: 2050003 - DNA, 25 bp, Homo sapien
tgctccggcagacaaataacagagg

SEQ ID NO: 2050004 - DNA, 25 bp, Homo sapien
tctacaatctcaacagtcgcggcaa

SEQ ID NO: 2050005 - DNA, 25 bp, Homo sapien
tcgcggcaacgatctctgggagtga

SEQ ID NO: 2050006 - DNA, 25 bp, Homo sapien
tcccgggcagcgatctaacgataaa

SEQ ID NO: 2050007 - DNA, 25 bp, Homo sapien
aaatttggcgttgtccgtggagctc

SEQ ID NO: 2050008 - DNA, 25 bp, Homo sapien
cattgaggagctggacgatccgttc

SEQ ID NO: 2050009 - DNA, 25 bp, Homo sapien
tggtcttgcctgagtccccgtaagt

SEQ ID NO: 2050010 - DNA, 25 bp, Homo sapien
tcttgacaggcacgtagagcacttg

SEQ ID NO: 2050011 - DNA, 25 bp, Homo sapien
cgctcggccgctggccggatgctcc

SEQ ID NO: 2050012 - DNA, 25 bp, Homo sapien
tcccagcgcacttcgcacctgttca

SEQ ID NO: 2050013 - DNA, 25 bp, Homo sapien
ccacgttgcagggatgcgaggtccc

SEQ ID NO: 2050014 - DNA, 25 bp, Homo sapien
atgaaaaatgcagccccggccacgt

SEQ ID NO: 2050015 - DNA, 25 bp, Homo sapien
tcctgttcccttagcggtcggtctc

SEQ ID NO: 2050016 - DNA, 25 bp, Homo sapien
taattgcaacggctgtctcggacgt

SEQ ID NO: 2050017 - DNA, 25 bp, Homo sapien
tattttgtgaccaggaccatcccaa

SEQ ID NO: 2050018 - DNA, 25 bp, Homo sapien
tccggttgggcaccagcaatcaatg

SEQ ID NO: 2050019 - DNA, 25 bp, Homo sapien
ttggggtggtccctagacgcctcgc

SEQ ID NO: 2050020 - DNA, 25 bp, Homo sapien
ctgctttgaccttccccacgacggg

SEQ ID NO: 2050021 - DNA, 25 bp, Homo sapien
cacgggtcccggatctctccttcct

SEQ ID NO: 2050022 - DNA, 25 bp, Homo sapien
ttgagccccgaagggcacacgggtc

SEQ ID NO: 2050023 - DNA, 25 bp, Homo sapien
ccccaaacagatatccgttccaggg

SEQ ID NO: 2050024 - DNA, 25 bp, Homo sapien
gtagattctacgagttaagtcccag

SEQ ID NO: 2050025 - DNA, 25 bp, Homo sapien
taagtcccagaaattagcaaagcat

SEQ ID NO: 2050026 - DNA, 25 bp, Homo sapien
cgctggcggcgggtatcccgaataa

SEQ ID NO: 2050027 - DNA, 25 bp, Homo sapien
tgctgaacaagacatagaagtaagt

SEQ ID NO: 2050028 - DNA, 25 bp, Homo sapien
gaagtaagtttaggatacagatgct

SEQ ID NO: 2050029 - DNA, 25 bp, Homo sapien
gcttgaaaacctttgcacgaaatta

SEQ ID NO: 2050030 - DNA, 25 bp, Homo sapien
ttgcagttcacacgggaggtttcag

SEQ ID NO: 2050031 - DNA, 25 bp, Homo sapien
cagagctggaaataggggagttccc

SEQ ID NO: 2050032 - DNA, 25 bp, Homo sapien
tctttattctactctcacccgaggc

SEQ ID NO: 2050033 - DNA, 25 bp, Homo sapien
cagttgctccattcaggacttccat

SEQ ID NO: 2050034 - DNA, 25 bp, Homo sapien
gagcggctctgccaggaaaacggcc

SEQ ID NO: 2050035 - DNA, 25 bp, Homo sapien
gtagctggtcctgacacttgcaaaa

SEQ ID NO: 2050036 - DNA, 25 bp, Homo sapien
cttgcaaaatggtcagtggctcctg

SEQ ID NO: 2050037 - DNA, 25 bp, Homo sapien
ggaaagcgggatgtttgcgcccacc

SEQ ID NO: 2050038 - DNA, 25 bp, Homo sapien
tcgtcgtcgtctcccagactaaatc

SEQ ID NO: 2050039 - DNA, 25 bp, Homo sapien
gagcacgcagcatccaggtgggggg

SEQ ID NO: 2050040 - DNA, 25 bp, Homo sapien
atcccgggggcagtgcgcatgctgc

SEQ ID NO: 2050041 - DNA, 25 bp, Homo sapien
gcagaaggaggtagcagcgggcccg

SEQ ID NO: 2050042 - DNA, 25 bp, Homo sapien
tccaggtggggggacgactccagca

SEQ ID NO: 2050043 - DNA, 25 bp, Homo sapien
gagtaatctctaccataacaatatt

SEQ ID NO: 2050044 - DNA, 25 bp, Homo sapien
agatgtcatgagtaatctctaccat

SEQ ID NO: 2050045 - DNA, 25 bp, Homo sapien
tgtcatgagtaatctctaccataac

SEQ ID NO: 2050046 - DNA, 25 bp, Homo sapien
tcatgagtaatctctaccataacaa

SEQ ID NO: 2050047 - DNA, 25 bp, Homo sapien
ggagacatatttgccgtctgtatcc

SEQ ID NO: 2050048 - DNA, 25 bp, Homo sapien
tatttgccgtctgtatcccatctac

SEQ ID NO: 2050049 - DNA, 25 bp, Homo sapien
tgccgtctgtatcccatctacactg

SEQ ID NO: 2050050 - DNA, 25 bp, Homo sapien
aagcctgattgcctgtatttgtcat

SEQ ID NO: 2050051 - DNA, 25 bp, Homo sapien
ctacccgtttccagaaccatcagtt

SEQ ID NO: 2050052 - DNA, 25 bp, Homo sapien
ttccagaaccatcagttagtgaatt

SEQ ID NO: 2050053 - DNA, 25 bp, Homo sapien
cccgtttccagaaccatcagttagt

SEQ ID NO: 2050054 - DNA, 25 bp, Homo sapien
ccagaaccatcagttagtgaattgt

SEQ ID NO: 2050055 - DNA, 25 bp, Homo sapien
caatagagtataaagtggggttcat

SEQ ID NO: 2050056 - DNA, 25 bp, Homo sapien
tgaacaaattgttcaatagagtata

SEQ ID NO: 2050057 - DNA, 25 bp, Homo sapien
caaattgttcaatagagtataaagt

SEQ ID NO: 2050058 - DNA, 25 bp, Homo sapien
attgttcaatagagtataaagtggg

SEQ ID NO: 2050059 - DNA, 25 bp, Homo sapien
ctgggctctgctgatagatttgtcc

SEQ ID NO: 2050060 - DNA, 25 bp, Homo sapien
ctttccaaatgcgatcctctgttgc

SEQ ID NO: 2050061 - DNA, 25 bp, Homo sapien
ccaaatgcgatcctctgttgctggg

SEQ ID NO: 2050062 - DNA, 25 bp, Homo sapien
cctccttgccatggtgttgcccttg

SEQ ID NO: 2050063 - DNA, 25 bp, Homo sapien
ctttgtctgtaatagggaacgccat

SEQ ID NO: 2050064 - DNA, 25 bp, Homo sapien
tctttgtctgtaatagggaacgcca

SEQ ID NO: 2050065 - DNA, 25 bp, Homo sapien
ttctttgtctgtaatagggaacgcc

SEQ ID NO: 2050066 - DNA, 25 bp, Homo sapien
catcttgtcacagccccaatagttc

SEQ ID NO: 2050067 - DNA, 25 bp, Homo sapien
tgtcacagccccaatagttccattt

SEQ ID NO: 2050068 - DNA, 25 bp, Homo sapien
tcaacatcttgtcacagccccaata

SEQ ID NO: 2050069 - DNA, 25 bp, Homo sapien
cagccccaatagttccattttcaaa

SEQ ID NO: 2050070 - DNA, 25 bp, Homo sapien
tagtctgtctacttttacatcaccc

SEQ ID NO: 2050071 - DNA, 25 bp, Homo sapien
tttagtctgtctacttttacatcac

SEQ ID NO: 2050072 - DNA, 25 bp, Homo sapien
tctgtctacttttacatcaccctgg

SEQ ID NO: 2050073 - DNA, 25 bp, Homo sapien
tatcttttagtctgtctacttttac

SEQ ID NO: 2050074 - DNA, 25 bp, Homo sapien
aatctgagtattggactgacaaagt

SEQ ID NO: 2050075 - DNA, 25 bp, Homo sapien
ttgtgaacgaggcagatatgacaca

SEQ ID NO: 2050076 - DNA, 25 bp, Homo sapien
tattggactgacaaagtcagtgtag

SEQ ID NO: 2050077 - DNA, 25 bp, Homo sapien
gagtattggactgacaaagtcagtg

SEQ ID NO: 2050078 - DNA, 25 bp, Homo sapien
ccatggtctaatgcatcatacagca

SEQ ID NO: 2050079 - DNA, 25 bp, Homo sapien
aatgcatcatacagcaagcttttcc

SEQ ID NO: 2050080 - DNA, 25 bp, Homo sapien
catcatacagcaagcttttcctttt

SEQ ID NO: 2050081 - DNA, 25 bp, Homo sapien
tgcatcatacagcaagcttttcctt

SEQ ID NO: 2050082 - DNA, 25 bp, Homo sapien
tgatttcttcattactgtccttgca

SEQ ID NO: 2050083 - DNA, 25 bp, Homo sapien
agttccccaccattttcatgggttg

SEQ ID NO: 2050084 - DNA, 25 bp, Homo sapien
gcattgaagtctgccaaggaaagca

SEQ ID NO: 2050085 - DNA, 25 bp, Homo sapien
cttcactgtcgttttctttctcacc

SEQ ID NO: 2050086 - DNA, 25 bp, Homo sapien
catcacaacagagcaccataatagg

SEQ ID NO: 2050087 - DNA, 25 bp, Homo sapien
gccagacaggaagatcgacaaagga

SEQ ID NO: 2050088 - DNA, 25 bp, Homo sapien
actgccagggactgccgagctcgga

SEQ ID NO: 2050089 - DNA, 25 bp, Homo sapien
tgagaagaccgtggagaatggaaac

SEQ ID NO: 2050090 - DNA, 25 bp, Homo sapien
cattctgattttacccatggccatt

SEQ ID NO: 2050091 - DNA, 25 bp, Homo sapien
gacccaaagcacatgtatactctat

SEQ ID NO: 2050092 - DNA, 25 bp, Homo sapien
catggccattctcatatcaattata

SEQ ID NO: 2050093 - DNA, 25 bp, Homo sapien
tatagataatagtaaccatccccat

SEQ ID NO: 2050094 - DNA, 25 bp, Homo sapien
tatgctgatcaaaaggaaagtgctc

SEQ ID NO: 2050095 - DNA, 25 bp, Homo sapien
ttttgcagaaatctcccaggaatgc

SEQ ID NO: 2050096 - DNA, 25 bp, Homo sapien
tgttgagccaccgaagttgtaatgc

SEQ ID NO: 2050097 - DNA, 25 bp, Homo sapien
caaagccattagagtctgctgcata

SEQ ID NO: 2050098 - DNA, 25 bp, Homo sapien
aaggctagttagctgctggagttcc

SEQ ID NO: 2050099 - DNA, 25 bp, Homo sapien
tactgtttatgtgagtatggtgcca

SEQ ID NO: 2050100 - DNA, 25 bp, Homo sapien
ggagttccttatctacactgaacag

SEQ ID NO: 2050101 - DNA, 25 bp, Homo sapien
aagctacccaagagtgttccttctg

SEQ ID NO: 2050102 - DNA, 25 bp, Homo sapien
taagagtttggcgagtcagtgactg

SEQ ID NO: 2050103 - DNA, 25 bp, Homo sapien
tccaaggtgtgtgcacggcgttttc

SEQ ID NO: 2050104 - DNA, 25 bp, Homo sapien
aagcgcccgtccattccaaggtgtg

SEQ ID NO: 2050105 - DNA, 25 bp, Homo sapien
tcttctttgacagctccggagtggg

SEQ ID NO: 2050106 - DNA, 25 bp, Homo sapien
cgccggccgcggctagcgcgaagca

SEQ ID NO: 2050107 - DNA, 25 bp, Homo sapien
gccggccgcggctagcgcgaagcat

SEQ ID NO: 2050108 - DNA, 25 bp, Homo sapien
gcgccggccgcggctagcgcgaagc

SEQ ID NO: 2050109 - DNA, 25 bp, Homo sapien
gctttgtgggcccacttgatataaa

SEQ ID NO: 2050110 - DNA, 25 bp, Homo sapien
cttctgataagaaatgagctttgtg

SEQ ID NO: 2050111 - DNA, 25 bp, Homo sapien
aagacaatcatgatattctttctgt

SEQ ID NO: 2050112 - DNA, 25 bp, Homo sapien
tgggcccacttgatataaaagacaa

SEQ ID NO: 2050113 - DNA, 25 bp, Homo sapien
ctccggataactgcgagtgtgttag

SEQ ID NO: 2050114 - DNA, 25 bp, Homo sapien
ggatatactccggataactgcgagt

SEQ ID NO: 2050115 - DNA, 25 bp, Homo sapien
ctaagcaaatgaggatatactccgg

SEQ ID NO: 2050116 - DNA, 25 bp, Homo sapien
taactgcgagtgtgttaggttgaaa

SEQ ID NO: 2050117 - DNA, 25 bp, Homo sapien
ctgcattgatcttgacttctaagtt

SEQ ID NO: 2050118 - DNA, 25 bp, Homo sapien
ttcttttggcttgtggaggcagtta

SEQ ID NO: 2050119 - DNA, 25 bp, Homo sapien
aagttaccagcagttaattgtatca

SEQ ID NO: 2050120 - DNA, 25 bp, Homo sapien
gcttgtggaggcagttatattgttt

SEQ ID NO: 2050121 - DNA, 25 bp, Homo sapien
atgtttaaagtatggacattctgcc

SEQ ID NO: 2050122 - DNA, 25 bp, Homo sapien
tttaaagtatggacattctgccagt

SEQ ID NO: 2050123 - DNA, 25 bp, Homo sapien
catgtttaaagtatggacattctgc

SEQ ID NO: 2050124 - DNA, 25 bp, Homo sapien
tggccagacatagcccccttttcat

SEQ ID NO: 2050125 - DNA, 25 bp, Homo sapien
gacagtgaagtggatgttacataca

SEQ ID NO: 2050126 - DNA, 25 bp, Homo sapien
gaagctgacagtgaagtggatgtta

SEQ ID NO: 2050127 - DNA, 25 bp, Homo sapien
tggatgttacatacaagctcatcat

SEQ ID NO: 2050128 - DNA, 25 bp, Homo sapien
ctggagcttgattgtgggctcccac

SEQ ID NO: 2050129 - DNA, 25 bp, Homo sapien
gcctgggccaaggatccatgggatc

SEQ ID NO: 2050130 - DNA, 25 bp, Homo sapien
acatattcccgttgtgtgtcagcag

SEQ ID NO: 2050131 - DNA, 25 bp, Homo sapien
cctgggccaaggatccatgggatct

SEQ ID NO: 2050132 - DNA, 25 bp, Homo sapien
ggccaacatattcccgttgtgtgtc

SEQ ID NO: 2050133 - DNA, 25 bp, Homo sapien
tctgagactccaaggccaaatggta

SEQ ID NO: 2050134 - DNA, 25 bp, Homo sapien
gatctgagactccaaggccaaatgg

SEQ ID NO: 2050135 - DNA, 25 bp, Homo sapien
gagactccaaggccaaatggtacca

SEQ ID NO: 2050136 - DNA, 25 bp, Homo sapien
cttgatctgagactccaaggccaaa

SEQ ID NO: 2050137 - DNA, 25 bp, Homo sapien
ccagcctcttgttcttgtcgagttt

SEQ ID NO: 2050138 - DNA, 25 bp, Homo sapien
ggccagcctcttgttcttgtcgagt

SEQ ID NO: 2050139 - DNA, 25 bp, Homo sapien
ttcttgtcgagtttctccagtgcct

SEQ ID NO: 2050140 - DNA, 25 bp, Homo sapien
tgttcttgtcgagtttctccagtgc

SEQ ID NO: 2050141 - DNA, 25 bp, Homo sapien
ccttcttagagtcacagtgagcaat

SEQ ID NO: 2050142 - DNA, 25 bp, Homo sapien
gtccttcttagagtcacagtgagca

SEQ ID NO: 2050143 - DNA, 25 bp, Homo sapien
ttgtccttcttagagtcacagtgag

SEQ ID NO: 2050144 - DNA, 25 bp, Homo sapien
gtggacttcagcccaatgatgcccc

SEQ ID NO: 2050145 - DNA, 25 bp, Homo sapien
attcctctgtcattgaacactttgg

SEQ ID NO: 2050146 - DNA, 25 bp, Homo sapien
caatgagcatggaagtacagatacc

SEQ ID NO: 2050147 - DNA, 25 bp, Homo sapien
gataataaatagcatgctgctgctt

SEQ ID NO: 2050148 - DNA, 25 bp, Homo sapien
tatatacccataaaagagattgctg

SEQ ID NO: 2050149 - DNA, 25 bp, Homo sapien
ttattacagagtgcacagatgaaca

SEQ ID NO: 2050150 - DNA, 25 bp, Homo sapien
taatagtcacagagtacatggtgtg

SEQ ID NO: 2050151 - DNA, 25 bp, Homo sapien
cagttgttaaatgtaactggccagt

SEQ ID NO: 2050152 - DNA, 25 bp, Homo sapien
gaaaataaatctgctgacgctgtta

SEQ ID NO: 2050153 - DNA, 25 bp, Homo sapien
cttgtgaagagaaaggtcatcttca

SEQ ID NO: 2050154 - DNA, 25 bp, Homo sapien
gaagagaaaggtcatcttcaacttc

SEQ ID NO: 2050155 - DNA, 25 bp, Homo sapien
tcaacttcaacatcttcaacttctt

SEQ ID NO: 2050156 - DNA, 25 bp, Homo sapien
tgtgaagagaaaggtcatcttcaac

SEQ ID NO: 2050157 - DNA, 25 bp, Homo sapien
acaattctcatagggattatgccag

SEQ ID NO: 2050158 - DNA, 25 bp, Homo sapien
tctcagacctagagcacgttggctt

SEQ ID NO: 2050159 - DNA, 25 bp, Homo sapien
gaataaggagctaagcccacacaat

SEQ ID NO: 2050160 - DNA, 25 bp, Homo sapien
taccataaagcatggcactttggga

SEQ ID NO: 2050161 - DNA, 25 bp, Homo sapien
ccaccgcgcgtgagctcaccggctg

SEQ ID NO: 2050162 - DNA, 25 bp, Homo sapien
cgcgcgtgagctcaccggctggcaa

SEQ ID NO: 2050163 - DNA, 25 bp, Homo sapien
accgcgcgtgagctcaccggctggc

SEQ ID NO: 2050164 - DNA, 25 bp, Homo sapien
cgtgagctcaccggctggcaaggac

SEQ ID NO: 2050165 - DNA, 25 bp, Homo sapien
taataaagggtaatgtccacttcca

SEQ ID NO: 2050166 - DNA, 25 bp, Homo sapien
aataaagggtaatgtccacttccat

SEQ ID NO: 2050167 - DNA, 25 bp, Homo sapien
caccattaatggagacctaggttga

SEQ ID NO: 2050168 - DNA, 25 bp, Homo sapien
taagttatctgagaagttgccaaac

SEQ ID NO: 2050169 - DNA, 25 bp, Homo sapien
gcatgtatctttgtagtagaacaat

SEQ ID NO: 2050170 - DNA, 25 bp, Homo sapien
tagcaacgtataagtgctccctttc

SEQ ID NO: 2050171 - DNA, 25 bp, Homo sapien
gaaattctcgtagactgtcaagcag

SEQ ID NO: 2050172 - DNA, 25 bp, Homo sapien
gaatccggatttgatctgataggaa

SEQ ID NO: 2050173 - DNA, 25 bp, Homo sapien
gaatgccaagacaaggaatccggat

SEQ ID NO: 2050174 - DNA, 25 bp, Homo sapien
ccttggaagaactaattggttgcat

SEQ ID NO: 2050175 - DNA, 25 bp, Homo sapien
tgcctctcttggaacatggtgatca

SEQ ID NO: 2050176 - DNA, 25 bp, Homo sapien
ctttataatgctcagtccagtgttc

SEQ ID NO: 2050177 - DNA, 25 bp, Homo sapien
ggccatgctatctgaaaagtccctt

SEQ ID NO: 2050178 - DNA, 25 bp, Homo sapien
ttagagatcatagagggccatgcta

SEQ ID NO: 2050179 - DNA, 25 bp, Homo sapien
tcagccctagctcggaagatatcta

SEQ ID NO: 2050180 - DNA, 25 bp, Homo sapien
gttgtccagattcctaatgaatatg

SEQ ID NO: 2050181 - DNA, 25 bp, Homo sapien
gctcggaagatatctagaagtggtc

SEQ ID NO: 2050182 - DNA, 25 bp, Homo sapien
ctaatgaatatggtactttcagccc

SEQ ID NO: 2050183 - DNA, 25 bp, Homo sapien
taaaacttcaatcaactgtttgggc

SEQ ID NO: 2050184 - DNA, 25 bp, Homo sapien
ctttcttaaaacttcaatcaactgt

SEQ ID NO: 2050185 - DNA, 25 bp, Homo sapien
tcttaaaacttcaatcaactgtttg

SEQ ID NO: 2050186 - DNA, 25 bp, Homo sapien
aaacttcaatcaactgtttgggcat

SEQ ID NO: 2050187 - DNA, 25 bp, Homo sapien
gtgagtaactagcatgccataactt

SEQ ID NO: 2050188 - DNA, 25 bp, Homo sapien
gcagcaggctactgcaaacatctct

SEQ ID NO: 2050189 - DNA, 25 bp, Homo sapien
tgccataacttagcagcaggctact

SEQ ID NO: 2050190 - DNA, 25 bp, Homo sapien
gcaggctactgcaaacatctctgag

SEQ ID NO: 2050191 - DNA, 25 bp, Homo sapien
gtttcctgcaacgtcttttctagaa

SEQ ID NO: 2050192 - DNA, 25 bp, Homo sapien
tttcctgcaacgtcttttctagaac

SEQ ID NO: 2050193 - DNA, 25 bp, Homo sapien
ttcctgaaagccaagtgtttgaaga

SEQ ID NO: 2050194 - DNA, 25 bp, Homo sapien
tccaagcatctggatttactgccaa

SEQ ID NO: 2050195 - DNA, 25 bp, Homo sapien
ttgaagacaaaacgttgaccttcca

SEQ ID NO: 2050196 - DNA, 25 bp, Homo sapien
tcctgaaagccaagtgtttgaagac

SEQ ID NO: 2050197 - DNA, 25 bp, Homo sapien
cgtgaatccgaaatctccatgagac

SEQ ID NO: 2050198 - DNA, 25 bp, Homo sapien
cattaacctaggagctgcaaagttc

SEQ ID NO: 2050199 - DNA, 25 bp, Homo sapien
cagggatccaatctatcatcgggta

SEQ ID NO: 2050200 - DNA, 25 bp, Homo sapien
cttctgttctaggtggccaagtcca

SEQ ID NO: 2050201 - DNA, 25 bp, Homo sapien
cgctgccagtggtgattgtttgaca

SEQ ID NO: 2050202 - DNA, 25 bp, Homo sapien
gctgcctacggctgctgaaaagctg

SEQ ID NO: 2050203 - DNA, 25 bp, Homo sapien
tcattgcctatgaatggccccgctg

SEQ ID NO: 2050204 - DNA, 25 bp, Homo sapien
taaccggtgaccgtatttagtgctg

SEQ ID NO: 2050205 - DNA, 25 bp, Homo sapien
cctgtgcccagtcatacagaaccat

SEQ ID NO: 2050206 - DNA, 25 bp, Homo sapien
gttgggtcttgcctctccactcgtc

SEQ ID NO: 2050207 - DNA, 25 bp, Homo sapien
tccactcgtcctgtgcccagtcata

SEQ ID NO: 2050208 - DNA, 25 bp, Homo sapien
tcgtcctgtgcccagtcatacagaa

SEQ ID NO: 2050209 - DNA, 25 bp, Homo sapien
tatccaggttcatttataggtggga

SEQ ID NO: 2050210 - DNA, 25 bp, Homo sapien
ttctcttggcagtatatccaggttc

SEQ ID NO: 2050211 - DNA, 25 bp, Homo sapien
tccaggttcatttataggtgggaag

SEQ ID NO: 2050212 - DNA, 25 bp, Homo sapien
tttctcttggcagtatatccaggtt

SEQ ID NO: 2050213 - DNA, 25 bp, Homo sapien
ctctcaccaccaaatcagtctcctc

SEQ ID NO: 2050214 - DNA, 25 bp, Homo sapien
ccataatttatttgaagtagtttat

SEQ ID NO: 2050215 - DNA, 25 bp, Homo sapien
cataatttatttgaagtagtttatt

SEQ ID NO: 2050216 - DNA, 25 bp, Homo sapien
ccttgggcagttgctctgtagatgt

SEQ ID NO: 2050217 - DNA, 25 bp, Homo sapien
gatgtgtccactgtaattggctgct

SEQ ID NO: 2050218 - DNA, 25 bp, Homo sapien
cttagcctttgcaggtcgccagcaa

SEQ ID NO: 2050219 - DNA, 25 bp, Homo sapien
ttgcaggtcgccagcaagcttcttg

SEQ ID NO: 2050220 - DNA, 25 bp, Homo sapien
cctgtgattactcatggattaatcc

SEQ ID NO: 2050221 - DNA, 25 bp, Homo sapien
gctgcctctggtgagagtctgctta

SEQ ID NO: 2050222 - DNA, 25 bp, Homo sapien
ggcacacatagtaaggaggctgagc

SEQ ID NO: 2050223 - DNA, 25 bp, Homo sapien
gtctgcttactagtgggactctctg

SEQ ID NO: 2050224 - DNA, 25 bp, Homo sapien
ttcttttctggtccacatccttatc

SEQ ID NO: 2050225 - DNA, 25 bp, Homo sapien
catccttatcctgcatccagaattg

SEQ ID NO: 2050226 - DNA, 25 bp, Homo sapien
tctgttcttttctggtccacatcct

SEQ ID NO: 2050227 - DNA, 25 bp, Homo sapien
tcctgcatccagaattgtcttggaa

SEQ ID NO: 2050228 - DNA, 25 bp, Homo sapien
tactcaataggcaatggagaacggc

SEQ ID NO: 2050229 - DNA, 25 bp, Homo sapien
ttactcaataggcaatggagaacgg

SEQ ID NO: 2050230 - DNA, 25 bp, Homo sapien
tcaataggcaatggagaacggcatg

SEQ ID NO: 2050231 - DNA, 25 bp, Homo sapien
taggcaatggagaacggcatggcca

SEQ ID NO: 2050232 - DNA, 25 bp, Homo sapien
gaaactattatggaatctagctgct

SEQ ID NO: 2050233 - DNA, 25 bp, Homo sapien
atatgcatatggcaatctttctcca

SEQ ID NO: 2050234 - DNA, 25 bp, Homo sapien
tctttctccatatgttacagcctgc

SEQ ID NO: 2050235 - DNA, 25 bp, Homo sapien
gccttaaaaatgctggttggattta

SEQ ID NO: 2050236 - DNA, 25 bp, Homo sapien
acttctaagcaaatctctccacggc

SEQ ID NO: 2050237 - DNA, 25 bp, Homo sapien
ttaaggcgtctagtggaatggatga

SEQ ID NO: 2050238 - DNA, 25 bp, Homo sapien
tatcttttttaaggcgtctagtgga

SEQ ID NO: 2050239 - DNA, 25 bp, Homo sapien
aacttctaagcaaatctctccacgg

SEQ ID NO: 2050240 - DNA, 25 bp, Homo sapien
ttcttctgtcacctcttgtccatat

SEQ ID NO: 2050241 - DNA, 25 bp, Homo sapien
cctccagaatccccccagcaaactg

SEQ ID NO: 2050242 - DNA, 25 bp, Homo sapien
ctccagaatccccccagcaaactgg

SEQ ID NO: 2050243 - DNA, 25 bp, Homo sapien
ttgcacctgattctgctattgtctt

SEQ ID NO: 2050244 - DNA, 25 bp, Homo sapien
cacctgattctgctattgtcttata

SEQ ID NO: 2050245 - DNA, 25 bp, Homo sapien
tttccacaggtccacctctccttgc

SEQ ID NO: 2050246 - DNA, 25 bp, Homo sapien
gattctgctattgtcttatagtgca

SEQ ID NO: 2050247 - DNA, 25 bp, Homo sapien
gactgtttatatgactgcctcccaa

SEQ ID NO: 2050248 - DNA, 25 bp, Homo sapien
cacatctttgtggttgacgttcctg

SEQ ID NO: 2050249 - DNA, 25 bp, Homo sapien
gaagaatcatggatgtttcacacag

SEQ ID NO: 2050250 - DNA, 25 bp, Homo sapien
tacacagtactgaggctagggctcc

SEQ ID NO: 2050251 - DNA, 25 bp, Homo sapien
tgttcagcatgagaggttgtccctg

SEQ ID NO: 2050252 - DNA, 25 bp, Homo sapien
ctttatagcctaaactggagctgtc

SEQ ID NO: 2050253 - DNA, 25 bp, Homo sapien
caagtgcatgtaccacgctatgtat

SEQ ID NO: 2050254 - DNA, 25 bp, Homo sapien
tatttccatggatcaattagaacca

SEQ ID NO: 2050255 - DNA, 25 bp, Homo sapien
cctgtggtcaggctcaagagccagc

SEQ ID NO: 2050256 - DNA, 25 bp, Homo sapien
gaaaacctgggtacattcacagtgg

SEQ ID NO: 2050257 - DNA, 25 bp, Homo sapien
gaatttgcacggactcagtttgagg

SEQ ID NO: 2050258 - DNA, 25 bp, Homo sapien
ggagctaccacaagtaccatgcgtg

SEQ ID NO: 2050259 - DNA, 25 bp, Homo sapien
gacatgtgagtatcttccgcttgga

SEQ ID NO: 2050260 - DNA, 25 bp, Homo sapien
tagccgctctagcacttgaaaagga

SEQ ID NO: 2050261 - DNA, 25 bp, Homo sapien
agtcatactatacctcgggctcaag

SEQ ID NO: 2050262 - DNA, 25 bp, Homo sapien
caatatcggagtttgtagccgctct

SEQ ID NO: 2050263 - DNA, 25 bp, Homo sapien
tcagtacctctagagatgggccagc

SEQ ID NO: 2050264 - DNA, 25 bp, Homo sapien
gactctggaaactgccgccaatgac

SEQ ID NO: 2050265 - DNA, 25 bp, Homo sapien
gttctgctgataaccttccccgttg

SEQ ID NO: 2050266 - DNA, 25 bp, Homo sapien
gaacttaaatcctgcacgtggcact

SEQ ID NO: 2050267 - DNA, 25 bp, Homo sapien
tcagcactgagaccagactcgagca

SEQ ID NO: 2050268 - DNA, 25 bp, Homo sapien
ggttcgattccacgcaaggagccac

SEQ ID NO: 2050269 - DNA, 25 bp, Homo sapien
tctactataaggcagggaaggttca

SEQ ID NO: 2050270 - DNA, 25 bp, Homo sapien
cagaagtgttgcatcttgaggcgaa

SEQ ID NO: 2050271 - DNA, 25 bp, Homo sapien
gagaactccactgtccttagaagaa

SEQ ID NO: 2050272 - DNA, 25 bp, Homo sapien
agaacctctgtgagtcccatgcaat

SEQ ID NO: 2050273 - DNA, 25 bp, Homo sapien
cagatataaatcttgcacgcacaga

SEQ ID NO: 2050274 - DNA, 25 bp, Homo sapien
tgagtctggctctacgcttcaagaa

SEQ ID NO: 2050275 - DNA, 25 bp, Homo sapien
gaagaaatagagtccacagtgatga

SEQ ID NO: 2050276 - DNA, 25 bp, Homo sapien
gaagttctccatcaattacaaaggc

SEQ ID NO: 2050277 - DNA, 25 bp, Homo sapien
agaaattaagaagttctccatcaat

SEQ ID NO: 2050278 - DNA, 25 bp, Homo sapien
aaggcaaatactgacctgagataat

SEQ ID NO: 2050279 - DNA, 25 bp, Homo sapien
gcaaatactgacctgagataatcgt

SEQ ID NO: 2050280 - DNA, 25 bp, Homo sapien
cacttccctttgaaggtgagagcca

SEQ ID NO: 2050281 - DNA, 25 bp, Homo sapien
ccctttgaaggtgagagccaagggc

SEQ ID NO: 2050282 - DNA, 25 bp, Homo sapien
agtccacttccctttgaaggtgaga

SEQ ID NO: 2050283 - DNA, 25 bp, Homo sapien
cttccctttgaaggtgagagccaag

SEQ ID NO: 2050284 - DNA, 25 bp, Homo sapien
tgaaggggttagtatatggaagaaa

SEQ ID NO: 2050285 - DNA, 25 bp, Homo sapien
agcccattgcagcttctatcttctg

SEQ ID NO: 2050286 - DNA, 25 bp, Homo sapien
tggcccctttatagccttaaatata

SEQ ID NO: 2050287 - DNA, 25 bp, Homo sapien
catgcttggcccctttatagcctta

SEQ ID NO: 2050288 - DNA, 25 bp, Homo sapien
caggatatgtaaattactcgcctac

SEQ ID NO: 2050289 - DNA, 25 bp, Homo sapien
agcttgatacaggagccacttcagg

SEQ ID NO: 2050290 - DNA, 25 bp, Homo sapien
catgggagagcatatatgtgactgt

SEQ ID NO: 2050291 - DNA, 25 bp, Homo sapien
ccacttcaggtggagcatgggagag

SEQ ID NO: 2050292 - DNA, 25 bp, Homo sapien
tcaggtttaaggtagcaacaggtcc

SEQ ID NO: 2050293 - DNA, 25 bp, Homo sapien
gctgtgtacaagacagagctgcaaa

SEQ ID NO: 2050294 - DNA, 25 bp, Homo sapien
atgcatttcctggagtcaggtttaa

SEQ ID NO: 2050295 - DNA, 25 bp, Homo sapien
catggagaacccaatgagagatttt

SEQ ID NO: 2050296 - DNA, 25 bp, Homo sapien
tttctttcagaaggttgttaatgtc

SEQ ID NO: 2050297 - DNA, 25 bp, Homo sapien
atgaatcataagtcactttagctaa

SEQ ID NO: 2050298 - DNA, 25 bp, Homo sapien
gcaagtggattagggctttgtaaat

SEQ ID NO: 2050299 - DNA, 25 bp, Homo sapien
gaatgaatcataagtcactttagct

SEQ ID NO: 2050300 - DNA, 25 bp, Homo sapien
ttgaatgaatcataagtcactttag

SEQ ID NO: 2050301 - DNA, 25 bp, Homo sapien
ttaagtggtgactgtctgtgctgac

SEQ ID NO: 2050302 - DNA, 25 bp, Homo sapien
tcaacaggttcaagttccaaagatt

SEQ ID NO: 2050303 - DNA, 25 bp, Homo sapien
tattattgttaccttcaacaggttc

SEQ ID NO: 2050304 - DNA, 25 bp, Homo sapien
tctgtgctgacttattattgttacc

SEQ ID NO: 2050305 - DNA, 25 bp, Homo sapien
tattagaaatgtagataaattcatt

SEQ ID NO: 2050306 - DNA, 25 bp, Homo sapien
gaagtctgctaccaggatcccattc

SEQ ID NO: 2050307 - DNA, 25 bp, Homo sapien
acattgctgcaagatgactgagaag

SEQ ID NO: 2050308 - DNA, 25 bp, Homo sapien
cattccagtgatgaagctgatttca

SEQ ID NO: 2050309 - DNA, 25 bp, Homo sapien
tcagctgctcactgaggcccatcat

SEQ ID NO: 2050310 - DNA, 25 bp, Homo sapien
gggccactggcaaatcgatacacgg

SEQ ID NO: 2050311 - DNA, 25 bp, Homo sapien
caaatcgatacacggcatcagctgc

SEQ ID NO: 2050312 - DNA, 25 bp, Homo sapien
gcatcagctgctcactgaggcccat

SEQ ID NO: 2050313 - DNA, 25 bp, Homo sapien
tgttaagcacggcatttgctctcct

SEQ ID NO: 2050314 - DNA, 25 bp, Homo sapien
tggaaagcatgttaagcacggcatt

SEQ ID NO: 2050315 - DNA, 25 bp, Homo sapien
aaagcatgttaagcacggcatttgc

SEQ ID NO: 2050316 - DNA, 25 bp, Homo sapien
gcatgttaagcacggcatttgctct

SEQ ID NO: 2050317 - DNA, 25 bp, Homo sapien
agtactacccggaaatcctgtggct

SEQ ID NO: 2050318 - DNA, 25 bp, Homo sapien
cagtactacccggaaatcctgtggc

SEQ ID NO: 2050319 - DNA, 25 bp, Homo sapien
cccagtactacccggaaatcctgtg

SEQ ID NO: 2050320 - DNA, 25 bp, Homo sapien
atcccagtactacccggaaatcctg

SEQ ID NO: 2050321 - DNA, 25 bp, Homo sapien
gaactaatggctatcacaacagcag

SEQ ID NO: 2050322 - DNA, 25 bp, Homo sapien
tgtgtcagccttcttgagacaagct

SEQ ID NO: 2050323 - DNA, 25 bp, Homo sapien
cgtggtatctgttccaggtttccca

SEQ ID NO: 2050324 - DNA, 25 bp, Homo sapien
tctccctgctatgtctcccattgtg

SEQ ID NO: 2050325 - DNA, 25 bp, Homo sapien
cagaagcgaagtggactggttctga

SEQ ID NO: 2050326 - DNA, 25 bp, Homo sapien
gctctgtgcaccccaggaaagtgga

SEQ ID NO: 2050327 - DNA, 25 bp, Homo sapien
ctgtccagggtaggaacacggcgtt

SEQ ID NO: 2050328 - DNA, 25 bp, Homo sapien
cgcgggccacatctctggttcggtg

SEQ ID NO: 2050329 - DNA, 25 bp, Homo sapien
aacggaagaacttccttgattagca

SEQ ID NO: 2050330 - DNA, 25 bp, Homo sapien
tagcatagtatcgaccctggggccg

SEQ ID NO: 2050331 - DNA, 25 bp, Homo sapien
aacttccttgattagcatagtatcg

SEQ ID NO: 2050332 - DNA, 25 bp, Homo sapien
gaagaacttccttgattagcatagt

SEQ ID NO: 2050333 - DNA, 25 bp, Homo sapien
ctgcgaggcggaggttcggtcccag

SEQ ID NO: 2050334 - DNA, 25 bp, Homo sapien
tcgaagcttacttcaatgcctggtt

SEQ ID NO: 2050335 - DNA, 25 bp, Homo sapien
taagggagacggatagaaacttcca

SEQ ID NO: 2050336 - DNA, 25 bp, Homo sapien
tctgcactgttgttaagggagacgg

SEQ ID NO: 2050337 - DNA, 25 bp, Homo sapien
ggtctgattggaaaaatcgaagctt

SEQ ID NO: 2050338 - DNA, 25 bp, Homo sapien
ctattgtagcctgcttggtattcta

SEQ ID NO: 2050339 - DNA, 25 bp, Homo sapien
tggccgttgaactttatctgaacct

SEQ ID NO: 2050340 - DNA, 25 bp, Homo sapien
acctctcttagagcatctattgtag

SEQ ID NO: 2050341 - DNA, 25 bp, Homo sapien
ggaggaaaaacagtgtcttgcacac

SEQ ID NO: 2050342 - DNA, 25 bp, Homo sapien
agaaagaccttgctggttttgctcc

SEQ ID NO: 2050343 - DNA, 25 bp, Homo sapien
aagaaagaccttgctggttttgctc

SEQ ID NO: 2050344 - DNA, 25 bp, Homo sapien
aaagaccttgctggttttgctccac

SEQ ID NO: 2050345 - DNA, 25 bp, Homo sapien
gaaagaccttgctggttttgctcca

SEQ ID NO: 2050346 - DNA, 25 bp, Homo sapien
aggctcttcggtagtttcacttcca

SEQ ID NO: 2050347 - DNA, 25 bp, Homo sapien
tgatataagtaaggctcttcggtag

SEQ ID NO: 2050348 - DNA, 25 bp, Homo sapien
ttcttcccgggaaagacgctattga

SEQ ID NO: 2050349 - DNA, 25 bp, Homo sapien
gacgctattgatataagtaaggctc

SEQ ID NO: 2050350 - DNA, 25 bp, Homo sapien
tctcctcttgggagtctaccgctat

SEQ ID NO: 2050351 - DNA, 25 bp, Homo sapien
taaagggagtataatcatattccag

SEQ ID NO: 2050352 - DNA, 25 bp, Homo sapien
cacagactgcaagactaaagggagt

SEQ ID NO: 2050353 - DNA, 25 bp, Homo sapien
catattccagaatgcgtggcctttt

SEQ ID NO: 2050354 - DNA, 25 bp, Homo sapien
cattgtgaattggagttaggttcat

SEQ ID NO: 2050355 - DNA, 25 bp, Homo sapien
tcaccatggacacagctccaggagc

SEQ ID NO: 2050356 - DNA, 25 bp, Homo sapien
ctccaggagcattgtgaattggagt

SEQ ID NO: 2050357 - DNA, 25 bp, Homo sapien
agctccaggagcattgtgaattgga

SEQ ID NO: 2050358 - DNA, 25 bp, Homo sapien
tctggaagtccctggtacctgatgg

SEQ ID NO: 2050359 - DNA, 25 bp, Homo sapien
tagctctgccatggtacacaccaga

SEQ ID NO: 2050360 - DNA, 25 bp, Homo sapien
cagacttgacagagaagttccaggc

SEQ ID NO: 2050361 - DNA, 25 bp, Homo sapien
catgttcccttgacacgctgtcgag

SEQ ID NO: 2050362 - DNA, 25 bp, Homo sapien
actcatccaagattttaggtgtact

SEQ ID NO: 2050363 - DNA, 25 bp, Homo sapien
cctatgttgcaccattgctgtagca

SEQ ID NO: 2050364 - DNA, 25 bp, Homo sapien
taggtgctcaccttcgatggtccca

SEQ ID NO: 2050365 - DNA, 25 bp, Homo sapien
gctgtagcacttgtgttgtaatcat

SEQ ID NO: 2050366 - DNA, 25 bp, Homo sapien
ttagggaacttaattgggcaatatc

SEQ ID NO: 2050367 - DNA, 25 bp, Homo sapien
ccagggagactgaccaattaagaaa

SEQ ID NO: 2050368 - DNA, 25 bp, Homo sapien
tgtgatgacggccaggaaacaagcc

SEQ ID NO: 2050369 - DNA, 25 bp, Homo sapien
tatagggacctgctcactgtcagca

SEQ ID NO: 2050370 - DNA, 25 bp, Homo sapien
gatgtgccgtgaacggaagccaaat

SEQ ID NO: 2050371 - DNA, 25 bp, Homo sapien
gatcccttgagagttgcgagtgttc

SEQ ID NO: 2050372 - DNA, 25 bp, Homo sapien
ccaaaaggttcaggccgaatttcag

SEQ ID NO: 2050373 - DNA, 25 bp, Homo sapien
gattctctctgttctggttgggact

SEQ ID NO: 2050374 - DNA, 25 bp, Homo sapien
tctgtgtcagagtctactatggaaa

SEQ ID NO: 2050375 - DNA, 25 bp, Homo sapien
tggcctgtacttcccttgtcctgtt

SEQ ID NO: 2050376 - DNA, 25 bp, Homo sapien
gagtagataagcacaaatatggctg

SEQ ID NO: 2050377 - DNA, 25 bp, Homo sapien
tcttttggagtcagattcactggaa

SEQ ID NO: 2050378 - DNA, 25 bp, Homo sapien
gttacagctggcagatttgccagcc

SEQ ID NO: 2050379 - DNA, 25 bp, Homo sapien
tgttacagctggcagatttgccagc

SEQ ID NO: 2050380 - DNA, 25 bp, Homo sapien
gtattctacctcgataacccaagag

SEQ ID NO: 2050381 - DNA, 25 bp, Homo sapien
aatggcggtcaatgtgtattctacc

SEQ ID NO: 2050382 - DNA, 25 bp, Homo sapien
gggcttagccagagcaggactttta

SEQ ID NO: 2050383 - DNA, 25 bp, Homo sapien
tgccaggatcttgacctcgaatagg

SEQ ID NO: 2050384 - DNA, 25 bp, Homo sapien
gcttcgtaatgcctttcactggctc

SEQ ID NO: 2050385 - DNA, 25 bp, Homo sapien
ctcttgcttgagcttcgtaatgcct

SEQ ID NO: 2050386 - DNA, 25 bp, Homo sapien
acgtattggaaaggtctcttgcttg

SEQ ID NO: 2050387 - DNA, 25 bp, Homo sapien
cgtattggaaaggtctcttgcttga

SEQ ID NO: 2050388 - DNA, 25 bp, Homo sapien
cagtattaaaactaacaccagcttt

SEQ ID NO: 2050389 - DNA, 25 bp, Homo sapien
gctctttaaaggaaagatggcgtga

SEQ ID NO: 2050390 - DNA, 25 bp, Homo sapien
cattggtgttgtgttttactcagta

SEQ ID NO: 2050391 - DNA, 25 bp, Homo sapien
gagctaaaagattgcctcacattgg

SEQ ID NO: 2050392 - DNA, 25 bp, Homo sapien
tctgcatgaggaggatcgttctcca

SEQ ID NO: 2050393 - DNA, 25 bp, Homo sapien
tcctgcagtttctcttcgcattctg

SEQ ID NO: 2050394 - DNA, 25 bp, Homo sapien
tgacatgagaagcatataaatgtga

SEQ ID NO: 2050395 - DNA, 25 bp, Homo sapien
aactaatgcgagtcctgtttcctgc

SEQ ID NO: 2050396 - DNA, 25 bp, Homo sapien
tacatttgtatgacagctcatggaa

SEQ ID NO: 2050397 - DNA, 25 bp, Homo sapien
catttgtatgacagctcatggaaga

SEQ ID NO: 2050398 - DNA, 25 bp, Homo sapien
acatttgtatgacagctcatggaag

SEQ ID NO: 2050399 - DNA, 25 bp, Homo sapien
atttgtatgacagctcatggaagaa

SEQ ID NO: 2050400 - DNA, 25 bp, Homo sapien
caaaagtgtagaaggagccaaattt

SEQ ID NO: 2050401 - DNA, 25 bp, Homo sapien
acaaaagtgtagaaggagccaaatt

SEQ ID NO: 2050402 - DNA, 25 bp, Homo sapien
tacaaaagtgtagaaggagccaaat

SEQ ID NO: 2050403 - DNA, 25 bp, Homo sapien
tactgtggtcatatgattgaatccc

SEQ ID NO: 2050404 - DNA, 25 bp, Homo sapien
tgttagtatcacagtctgcacgaat

SEQ ID NO: 2050405 - DNA, 25 bp, Homo sapien
gatttgggatccttctgatactaga

SEQ ID NO: 2050406 - DNA, 25 bp, Homo sapien
gagtgtacctagaaagcaaagtata

SEQ ID NO: 2050407 - DNA, 25 bp, Homo sapien
gatgttattggtgtagatgaaagct

SEQ ID NO: 2050408 - DNA, 25 bp, Homo sapien
tattggtgtagatgaaagctagagg

SEQ ID NO: 2050409 - DNA, 25 bp, Homo sapien
tgttattggtgtagatgaaagctag

SEQ ID NO: 2050410 - DNA, 25 bp, Homo sapien
ttattggtgtagatgaaagctagag

SEQ ID NO: 2050411 - DNA, 25 bp, Homo sapien
tgagcaacttgagaaaggggcgcat

SEQ ID NO: 2050412 - DNA, 25 bp, Homo sapien
tctctagtgccagggatagtgacct

SEQ ID NO: 2050413 - DNA, 25 bp, Homo sapien
ctcagcctcaaaatgagcaacttga

SEQ ID NO: 2050414 - DNA, 25 bp, Homo sapien
agaatcctggagcttctagtctcta

SEQ ID NO: 2050415 - DNA, 25 bp, Homo sapien
tagagttcatgtagtggcctggcct

SEQ ID NO: 2050416 - DNA, 25 bp, Homo sapien
tgtgggctgccatacatagagttca

SEQ ID NO: 2050417 - DNA, 25 bp, Homo sapien
gaccgtgggtttgcgctggtccact

SEQ ID NO: 2050418 - DNA, 25 bp, Homo sapien
ggcctggcctgtataactgttgata

SEQ ID NO: 2050419 - DNA, 25 bp, Homo sapien
tgtccactgaggtgcttttttgccc

SEQ ID NO: 2050420 - DNA, 25 bp, Homo sapien
tagggactggcaaccctattgcagt

SEQ ID NO: 2050421 - DNA, 25 bp, Homo sapien
tcagctcagagcagattacagaatc

SEQ ID NO: 2050422 - DNA, 25 bp, Homo sapien
gaatctacaaagtgacagtacggag

SEQ ID NO: 2050423 - DNA, 25 bp, Homo sapien
ctgccatagttgttcagctctgggt

SEQ ID NO: 2050424 - DNA, 25 bp, Homo sapien
tgccatagttgttcagctctgggtt

SEQ ID NO: 2050425 - DNA, 25 bp, Homo sapien
ctcctctgtttatgactttggcaaa

SEQ ID NO: 2050426 - DNA, 25 bp, Homo sapien
cagagtcttggccatgaaggataaa

SEQ ID NO: 2050427 - DNA, 25 bp, Homo sapien
tgtgtgtgcacacgctcatgttttt

SEQ ID NO: 2050428 - DNA, 25 bp, Homo sapien
atgaccagaagagtggtggccgcct

SEQ ID NO: 2050429 - DNA, 25 bp, Homo sapien
gtctgggctgaagcattggttacct

SEQ ID NO: 2050430 - DNA, 25 bp, Homo sapien
tctgggctgaagcattggttacctg

SEQ ID NO: 2050431 - DNA, 25 bp, Homo sapien
gggctgaagcattggttacctgctc

SEQ ID NO: 2050432 - DNA, 25 bp, Homo sapien
ctgggctgaagcattggttacctgc

SEQ ID NO: 2050433 - DNA, 25 bp, Homo sapien
ggcctcctacttagacatgggttta

SEQ ID NO: 2050434 - DNA, 25 bp, Homo sapien
tcttcattctcgtataaggcataga

SEQ ID NO: 2050435 - DNA, 25 bp, Homo sapien
gaattattaggtgatgctctggtgc

SEQ ID NO: 2050436 - DNA, 25 bp, Homo sapien
ttggtataggttttgcctggcctcc

SEQ ID NO: 2050437 - DNA, 25 bp, Homo sapien
ggccaagcatgagcaatccattgat

SEQ ID NO: 2050438 - DNA, 25 bp, Homo sapien
gaaaggaggcctagcctagtggctt

SEQ ID NO: 2050439 - DNA, 25 bp, Homo sapien
cagcaaacctgctgccttgttggat

SEQ ID NO: 2050440 - DNA, 25 bp, Homo sapien
tgcagatgcatgacatcacagaggg

SEQ ID NO: 2050441 - DNA, 25 bp, Homo sapien
ttagcccacaataaactcccagttg

SEQ ID NO: 2050442 - DNA, 25 bp, Homo sapien
tgaatctaggtctttcaactttagc

SEQ ID NO: 2050443 - DNA, 25 bp, Homo sapien
tctaggtctttcaactttagctcca

SEQ ID NO: 2050444 - DNA, 25 bp, Homo sapien
actttagctccattagcccacaata

SEQ ID NO: 2050445 - DNA, 25 bp, Homo sapien
cagaaactgaggataggaagcttgg

SEQ ID NO: 2050446 - DNA, 25 bp, Homo sapien
ctcagagcccggctggagagacaga

SEQ ID NO: 2050447 - DNA, 25 bp, Homo sapien
aacacacgcgggactgtggtgcgcc

SEQ ID NO: 2050448 - DNA, 25 bp, Homo sapien
ccctcccaccgaagcagaaactgag

SEQ ID NO: 2050449 - DNA, 25 bp, Homo sapien
attcttgttaaactcccatgaatgt

SEQ ID NO: 2050450 - DNA, 25 bp, Homo sapien
ttaaactcccatgaatgttagtttc

SEQ ID NO: 2050451 - DNA, 25 bp, Homo sapien
cattcttgttaaactcccatgaatg

SEQ ID NO: 2050452 - DNA, 25 bp, Homo sapien
actcccatgaatgttagtttcattc

SEQ ID NO: 2050453 - DNA, 25 bp, Homo sapien
ctgagaggaccagcctcacatgtgc

SEQ ID NO: 2050454 - DNA, 25 bp, Homo sapien
gggatcagggctctgagatctccct

SEQ ID NO: 2050455 - DNA, 25 bp, Homo sapien
tgtttcttgtcctgcgctggcccaa

SEQ ID NO: 2050456 - DNA, 25 bp, Homo sapien
gcatgtatggccacactgttggtga

SEQ ID NO: 2050457 - DNA, 25 bp, Homo sapien
ggcctgtcggcacggtaagagacaa

SEQ ID NO: 2050458 - DNA, 25 bp, Homo sapien
cacggtaagagacaatgccagattt

SEQ ID NO: 2050459 - DNA, 25 bp, Homo sapien
gttccagaagtggagctagttctag

SEQ ID NO: 2050460 - DNA, 25 bp, Homo sapien
ggagctagttctaggtggtgaacac

SEQ ID NO: 2050461 - DNA, 25 bp, Homo sapien
tgctgtaaggctagaagtgaagacc

SEQ ID NO: 2050462 - DNA, 25 bp, Homo sapien
tatggttaggtacgggtcttcctgc

SEQ ID NO: 2050463 - DNA, 25 bp, Homo sapien
taattgcgagggagaatcatggttc

SEQ ID NO: 2050464 - DNA, 25 bp, Homo sapien
tcagttttctgcagtccaaagaggg

SEQ ID NO: 2050465 - DNA, 25 bp, Homo sapien
ttagcaggtgcaacaaaaacaagaa

SEQ ID NO: 2050466 - DNA, 25 bp, Homo sapien
ccactttccgcttaactgaaaagct

SEQ ID NO: 2050467 - DNA, 25 bp, Homo sapien
cactttccgcttaactgaaaagctt

SEQ ID NO: 2050468 - DNA, 25 bp, Homo sapien
acttagcaggtgcaacaaaaacaag

SEQ ID NO: 2050469 - DNA, 25 bp, Homo sapien
tggtcacatgtcatcgggctgggca

SEQ ID NO: 2050470 - DNA, 25 bp, Homo sapien
tgtcggctggttatagcacttccac

SEQ ID NO: 2050471 - DNA, 25 bp, Homo sapien
gaagcgtccctgattgcgtgctcca

SEQ ID NO: 2050472 - DNA, 25 bp, Homo sapien
ttattctctcatctcggcattcagg

SEQ ID NO: 2050473 - DNA, 25 bp, Homo sapien
ctattgtcgcatggtagaatagttt

SEQ ID NO: 2050474 - DNA, 25 bp, Homo sapien
gcatggtagaatagttttttgtctc

SEQ ID NO: 2050475 - DNA, 25 bp, Homo sapien
tgtgaataacttgacttgcattgat

SEQ ID NO: 2050476 - DNA, 25 bp, Homo sapien
ctctgaatatgtgaataacttgact

SEQ ID NO: 2050477 - DNA, 25 bp, Homo sapien
cacttcctcagtttcagaacttgtt

SEQ ID NO: 2050478 - DNA, 25 bp, Homo sapien
tggttgactcccgttttccatggga

SEQ ID NO: 2050479 - DNA, 25 bp, Homo sapien
tatgggcttccgctccctggttgac

SEQ ID NO: 2050480 - DNA, 25 bp, Homo sapien
gctttccaagctgtgccagtatggg

SEQ ID NO: 2050481 - DNA, 25 bp, Homo sapien
caagctgtgccagtatgggcttccg

SEQ ID NO: 2050482 - DNA, 25 bp, Homo sapien
ctgagctaggcagaactttcctacc

SEQ ID NO: 2050483 - DNA, 25 bp, Homo sapien
tctcctctatcgacttgtactgaag

SEQ ID NO: 2050484 - DNA, 25 bp, Homo sapien
tgtactgaagttcccagagtgttcc

SEQ ID NO: 2050485 - DNA, 25 bp, Homo sapien
ctctatcgacttgtactgaagttcc

SEQ ID NO: 2050486 - DNA, 25 bp, Homo sapien
ctgaagttcccagagtgttccaggc

SEQ ID NO: 2050487 - DNA, 25 bp, Homo sapien
ctgccgtgagcccatctatctgact

SEQ ID NO: 2050488 - DNA, 25 bp, Homo sapien
cgtgagcccatctatctgactgctt

SEQ ID NO: 2050489 - DNA, 25 bp, Homo sapien
gggccagacttctctgccgtgagcc

SEQ ID NO: 2050490 - DNA, 25 bp, Homo sapien
gccgtgagcccatctatctgactgc

SEQ ID NO: 2050491 - DNA, 25 bp, Homo sapien
aggcatccaatagagctcatcgtca

SEQ ID NO: 2050492 - DNA, 25 bp, Homo sapien
tgactccgagcaacagaatcgtccc

SEQ ID NO: 2050493 - DNA, 25 bp, Homo sapien
catccaatagagctcatcgtcatcc

SEQ ID NO: 2050494 - DNA, 25 bp, Homo sapien
cctgacactgactccgagcaacaga

SEQ ID NO: 2050495 - DNA, 25 bp, Homo sapien
tgatcatgacttcttgcctcactca

SEQ ID NO: 2050496 - DNA, 25 bp, Homo sapien
tcattcccaacttgcagtcctgttc

SEQ ID NO: 2050497 - DNA, 25 bp, Homo sapien
tttatcatcactcaacatggtctcc

SEQ ID NO: 2050498 - DNA, 25 bp, Homo sapien
tccctgaccctgaaagagttgctct

SEQ ID NO: 2050499 - DNA, 25 bp, Homo sapien
cttgatcataacctgccataccttg

SEQ ID NO: 2050500 - DNA, 25 bp, Homo sapien
atcataacctgccataccttgatca

SEQ ID NO: 2050501 - DNA, 25 bp, Homo sapien
tgatcataacctgccataccttgat

SEQ ID NO: 2050502 - DNA, 25 bp, Homo sapien
tcataacctgccataccttgatcat

SEQ ID NO: 2050503 - DNA, 25 bp, Homo sapien
cttccccactggaccggaagtatct

SEQ ID NO: 2050504 - DNA, 25 bp, Homo sapien
gaccggaagtatcttccgatcctgg

SEQ ID NO: 2050505 - DNA, 25 bp, Homo sapien
cactggaccggaagtatcttccgat

SEQ ID NO: 2050506 - DNA, 25 bp, Homo sapien
gaagtatcttccgatcctggaccat

SEQ ID NO: 2050507 - DNA, 25 bp, Homo sapien
ttcctgcatgggacaccccgtgtga

SEQ ID NO: 2050508 - DNA, 25 bp, Homo sapien
ctgcatgggacaccccgtgtgaagc

SEQ ID NO: 2050509 - DNA, 25 bp, Homo sapien
atgggacaccccgtgtgaagccctg

SEQ ID NO: 2050510 - DNA, 25 bp, Homo sapien
gggacaccccgtgtgaagccctgag

SEQ ID NO: 2050511 - DNA, 25 bp, Homo sapien
gtcctgagtgcagcagagaatctct

SEQ ID NO: 2050512 - DNA, 25 bp, Homo sapien
attaacccaagggtcctgagtgcag

SEQ ID NO: 2050513 - DNA, 25 bp, Homo sapien
cagagaatctctgggctgactgccc

SEQ ID NO: 2050514 - DNA, 25 bp, Homo sapien
tgcagcagagaatctctgggctgac

SEQ ID NO: 2050515 - DNA, 25 bp, Homo sapien
tccatcgtgacccaattgatcacag

SEQ ID NO: 2050516 - DNA, 25 bp, Homo sapien
aactgtcgatccattcccttcgacg

SEQ ID NO: 2050517 - DNA, 25 bp, Homo sapien
ttcgacgtcctaaagatcccatgct

SEQ ID NO: 2050518 - DNA, 25 bp, Homo sapien
cagaaagccattccatcgtgaccca

SEQ ID NO: 2050519 - DNA, 25 bp, Homo sapien
tcttcagggtgaaactactttgttc

SEQ ID NO: 2050520 - DNA, 25 bp, Homo sapien
gggtgaaactactttgttcttggca

SEQ ID NO: 2050521 - DNA, 25 bp, Homo sapien
aggccaaagtgttgccaaaccagag

SEQ ID NO: 2050522 - DNA, 25 bp, Homo sapien
caaaccagagctgagaatctctggg

SEQ ID NO: 2050523 - DNA, 25 bp, Homo sapien
ctacagtgatgagcaggtaagaagg

SEQ ID NO: 2050524 - DNA, 25 bp, Homo sapien
acagtgatgagcaggtaagaaggta

SEQ ID NO: 2050525 - DNA, 25 bp, Homo sapien
tacagtgatgagcaggtaagaaggt

SEQ ID NO: 2050526 - DNA, 25 bp, Homo sapien
gctgcttgatcagcttcgcttctct

SEQ ID NO: 2050527 - DNA, 25 bp, Homo sapien
aagcagtgtcatatcatacacgtcc

SEQ ID NO: 2050528 - DNA, 25 bp, Homo sapien
cttgcatctgaggtgcctcagaagc

SEQ ID NO: 2050529 - DNA, 25 bp, Homo sapien
gatcagcttcgcttctctatcaagc

SEQ ID NO: 2050530 - DNA, 25 bp, Homo sapien
caggatctctgcaaacaaaatgtct

SEQ ID NO: 2050531 - DNA, 25 bp, Homo sapien
ggatctctgcaaacaaaatgtctta

SEQ ID NO: 2050532 - DNA, 25 bp, Homo sapien
gatctctgcaaacaaaatgtcttac

SEQ ID NO: 2050533 - DNA, 25 bp, Homo sapien
tcaggatctctgcaaacaaaatgtc

SEQ ID NO: 2050534 - DNA, 25 bp, Homo sapien
agttccatcatcaatctgatagcct

SEQ ID NO: 2050535 - DNA, 25 bp, Homo sapien
tagttccatcatcaatctgatagcc

SEQ ID NO: 2050536 - DNA, 25 bp, Homo sapien
gttccatcatcaatctgatagcctc

SEQ ID NO: 2050537 - DNA, 25 bp, Homo sapien
tcaaattgttatcaagagccagaag

SEQ ID NO: 2050538 - DNA, 25 bp, Homo sapien
tttccattaggatcaaattgttatc

SEQ ID NO: 2050539 - DNA, 25 bp, Homo sapien
gagccagaagtgtgggtacaaaatg

SEQ ID NO: 2050540 - DNA, 25 bp, Homo sapien
gacgttatctgacttaatttttcca

SEQ ID NO: 2050541 - DNA, 25 bp, Homo sapien
gcatttttcttcacagggagaggca

SEQ ID NO: 2050542 - DNA, 25 bp, Homo sapien
catttttcttcacagggagaggcac

SEQ ID NO: 2050543 - DNA, 25 bp, Homo sapien
ccttggcccatttgcgctgtcttct

SEQ ID NO: 2050544 - DNA, 25 bp, Homo sapien
catttgcgctgtcttctcactgcat

SEQ ID NO: 2050545 - DNA, 25 bp, Homo sapien
gtacagtatgatcctatgtaaaata

SEQ ID NO: 2050546 - DNA, 25 bp, Homo sapien
atgtacagtatgatcctatgtaaaa

SEQ ID NO: 2050547 - DNA, 25 bp, Homo sapien
tgtacagtatgatcctatgtaaaat

SEQ ID NO: 2050548 - DNA, 25 bp, Homo sapien
tcttatagtaccgaactgggaggga

SEQ ID NO: 2050549 - DNA, 25 bp, Homo sapien
gatctggagacagcccatcatcagg

SEQ ID NO: 2050550 - DNA, 25 bp, Homo sapien
ccttaactctgggagggcaatgacc

SEQ ID NO: 2050551 - DNA, 25 bp, Homo sapien
catgtactttgatggaaacccgcat

SEQ ID NO: 2050552 - DNA, 25 bp, Homo sapien
ttttcccggcgatatcatagctgct

SEQ ID NO: 2050553 - DNA, 25 bp, Homo sapien
gctgctgaggctacacattcaacaa

SEQ ID NO: 2050554 - DNA, 25 bp, Homo sapien
tatccgttgggaatgtgtttctcca

SEQ ID NO: 2050555 - DNA, 25 bp, Homo sapien
tggattctccgatgcctgatgagct

SEQ ID NO: 2050556 - DNA, 25 bp, Homo sapien
cccttggagagtaaggtagacaaag

SEQ ID NO: 2050557 - DNA, 25 bp, Homo sapien
caatctagaattcagagaagtggcc

SEQ ID NO: 2050558 - DNA, 25 bp, Homo sapien
tacttcccatgacagaagaaactgt

SEQ ID NO: 2050559 - DNA, 25 bp, Homo sapien
tatttattaggaggacagttctcaa

SEQ ID NO: 2050560 - DNA, 25 bp, Homo sapien
gactcattctcaggtcaggtgggaa

SEQ ID NO: 2050561 - DNA, 25 bp, Homo sapien
aatagaataagacacagacccagag

SEQ ID NO: 2050562 - DNA, 25 bp, Homo sapien
tacctgatcaaagcagagggttgtc

SEQ ID NO: 2050563 - DNA, 25 bp, Homo sapien
tacagtaactcataacagaaggcta

SEQ ID NO: 2050564 - DNA, 25 bp, Homo sapien
gagaggcttagttaaaacaaggtca

SEQ ID NO: 2050565 - DNA, 25 bp, Homo sapien
tgtcttgatccccaaacttcagatg

SEQ ID NO: 2050566 - DNA, 25 bp, Homo sapien
ccagagaaaagtggcaagatatcca

SEQ ID NO: 2050567 - DNA, 25 bp, Homo sapien
cagacagaacacagatgggatcaga

SEQ ID NO: 2050568 - DNA, 25 bp, Homo sapien
tcaacctcttaaagcgctggcatta

SEQ ID NO: 2050569 - DNA, 25 bp, Homo sapien
gcacccggccacagatggccacttt

SEQ ID NO: 2050570 - DNA, 25 bp, Homo sapien
tagtatgtttactagggtttccaca

SEQ ID NO: 2050571 - DNA, 25 bp, Homo sapien
cacagaatgggtggtaaacaacaga

SEQ ID NO: 2050572 - DNA, 25 bp, Homo sapien
tgtctgttcactcttataataggtt

SEQ ID NO: 2050573 - DNA, 25 bp, Homo sapien
tctgttcactcttataataggttct

SEQ ID NO: 2050574 - DNA, 25 bp, Homo sapien
gtctgttcactcttataataggttc

SEQ ID NO: 2050575 - DNA, 25 bp, Homo sapien
aatgggagttaatcatgtttggctc

SEQ ID NO: 2050576 - DNA, 25 bp, Homo sapien
cagacacagagatataggaatctct

SEQ ID NO: 2050577 - DNA, 25 bp, Homo sapien
ctagacatgggatcatattatctgc

SEQ ID NO: 2050578 - DNA, 25 bp, Homo sapien
gtcttattgttgttcaggtgtgcag

SEQ ID NO: 2050579 - DNA, 25 bp, Homo sapien
tatttctaggcaaagaagcctttcc

SEQ ID NO: 2050580 - DNA, 25 bp, Homo sapien
gaaccgtgccacagttgatagctct

SEQ ID NO: 2050581 - DNA, 25 bp, Homo sapien
ccacaagtggctgtcgttaagaaaa

SEQ ID NO: 2050582 - DNA, 25 bp, Homo sapien
caatacttagtgatagccacaagtg

SEQ ID NO: 2050583 - DNA, 25 bp, Homo sapien
accccacatggactggggcttctca

SEQ ID NO: 2050584 - DNA, 25 bp, Homo sapien
caaccccacatggactggggcttct

SEQ ID NO: 2050585 - DNA, 25 bp, Homo sapien
tcaaccccacatggactggggcttc

SEQ ID NO: 2050586 - DNA, 25 bp, Homo sapien
ccccacatggactggggcttctcac

SEQ ID NO: 2050587 - DNA, 25 bp, Homo sapien
gctgcaccgggctattcagagacag

SEQ ID NO: 2050588 - DNA, 25 bp, Homo sapien
agtcttgcactggttctctaagggc

SEQ ID NO: 2050589 - DNA, 25 bp, Homo sapien
gacagagacttcagtgctcctgtgg

SEQ ID NO: 2050590 - DNA, 25 bp, Homo sapien
tgcactggttctctaagggctgcac

SEQ ID NO: 2050591 - DNA, 25 bp, Homo sapien
ctaggagtaatcaagtaccagcact

SEQ ID NO: 2050592 - DNA, 25 bp, Homo sapien
cagagtaactaaactgcctgaactt

SEQ ID NO: 2050593 - DNA, 25 bp, Homo sapien
cctcccgagggccagtggagtcaga

SEQ ID NO: 2050594 - DNA, 25 bp, Homo sapien
tcaaccactgacagcaaagctctcg

SEQ ID NO: 2050595 - DNA, 25 bp, Homo sapien
aaagctctcgcagccggctcagagc

SEQ ID NO: 2050596 - DNA, 25 bp, Homo sapien
caaagtcctggtccaaaacataatt

SEQ ID NO: 2050597 - DNA, 25 bp, Homo sapien
ttgacaactagaagtccttcctgtt

SEQ ID NO: 2050598 - DNA, 25 bp, Homo sapien
ccaaagtcctggtccaaaacataat

SEQ ID NO: 2050599 - DNA, 25 bp, Homo sapien
tggagatttgcgtctgagagattcc

SEQ ID NO: 2050600 - DNA, 25 bp, Homo sapien
gagatttgcgtctgagagattcctt

SEQ ID NO: 2050601 - DNA, 25 bp, Homo sapien
aggagatggagatttgcgtctgaga

SEQ ID NO: 2050602 - DNA, 25 bp, Homo sapien
agatggagatttgcgtctgagagat

SEQ ID NO: 2050603 - DNA, 25 bp, Homo sapien
gctttggccacgtgagaagtggcag

SEQ ID NO: 2050604 - DNA, 25 bp, Homo sapien
caggaaggagcccattggcgagtgt

SEQ ID NO: 2050605 - DNA, 25 bp, Homo sapien
aaggagcccattggcgagtgtcaga

SEQ ID NO: 2050606 - DNA, 25 bp, Homo sapien
ttggccacgtgagaagtggcaggaa

SEQ ID NO: 2050607 - DNA, 25 bp, Homo sapien
cgaggggtcgaagaaaggcggcgcg

SEQ ID NO: 2050608 - DNA, 25 bp, Homo sapien
cgcggaggccggatgcgggacaggg

SEQ ID NO: 2050609 - DNA, 25 bp, Homo sapien
ccgagccccggcctgtggccgaggg

SEQ ID NO: 2050610 - DNA, 25 bp, Homo sapien
cgggcgggaccccagatacagccga

SEQ ID NO: 2050611 - DNA, 25 bp, Homo sapien
aggcgcgggtcgtgtctcgcaggag

SEQ ID NO: 2050612 - DNA, 25 bp, Homo sapien
ggcatcgcagagtacaagcggttga

SEQ ID NO: 2050613 - DNA, 25 bp, Homo sapien
gcgcgggtccggctcagacctggcg

SEQ ID NO: 2050614 - DNA, 25 bp, Homo sapien
ccggaagtgggagagtgcccctcta

SEQ ID NO: 2050615 - DNA, 25 bp, Homo sapien
agctgtaaagatttcctggtggact

SEQ ID NO: 2050616 - DNA, 25 bp, Homo sapien
gacgacagtcctaggagctgcggaa

SEQ ID NO: 2050617 - DNA, 25 bp, Homo sapien
gttcagggcacgctcggaattggcc

SEQ ID NO: 2050618 - DNA, 25 bp, Homo sapien
gtttcccgcgtaggaagcgacagga

SEQ ID NO: 2050619 - DNA, 25 bp, Homo sapien
gctggcacggttcccgcccacgcct

SEQ ID NO: 2050620 - DNA, 25 bp, Homo sapien
ttgtcacctctcactaccacctggc

SEQ ID NO: 2050621 - DNA, 25 bp, Homo sapien
aactcgcgctggcacggttcccgcc

SEQ ID NO: 2050622 - DNA, 25 bp, Homo sapien
caagagcagacgctgaggccaagga

SEQ ID NO: 2050623 - DNA, 25 bp, Homo sapien
gaatcattgtttgcttctgccagct

SEQ ID NO: 2050624 - DNA, 25 bp, Homo sapien
gaagggctggtttactacaagttca

SEQ ID NO: 2050625 - DNA, 25 bp, Homo sapien
cggccgaaggtactcctcttctaga

SEQ ID NO: 2050626 - DNA, 25 bp, Homo sapien
cagatgacttgcagttgggctacag

SEQ ID NO: 2050627 - DNA, 25 bp, Homo sapien
caacgtaaagctcgggctgtgggtt

SEQ ID NO: 2050628 - DNA, 25 bp, Homo sapien
gccaacgtaaagctcgggctgtggg

SEQ ID NO: 2050629 - DNA, 25 bp, Homo sapien
tgggtggggcctagggctcccctgc

SEQ ID NO: 2050630 - DNA, 25 bp, Homo sapien
acttgttgccctgcatcctagccgc

SEQ ID NO: 2050631 - DNA, 25 bp, Homo sapien
tgcccaaggctatgcaagcccacct

SEQ ID NO: 2050632 - DNA, 25 bp, Homo sapien
tgcctgtatccccatcatatccagg

SEQ ID NO: 2050633 - DNA, 25 bp, Homo sapien
gtgcctgtatccccatcatatccag

SEQ ID NO: 2050634 - DNA, 25 bp, Homo sapien
cccaaggctatgcaagcccacctct

SEQ ID NO: 2050635 - DNA, 25 bp, Homo sapien
tcaagtatgcgcacaactggctggg

SEQ ID NO: 2050636 - DNA, 25 bp, Homo sapien
tatgtttacagtttgggcgggccaa

SEQ ID NO: 2050637 - DNA, 25 bp, Homo sapien
agatatccaggttggtccgcagcca

SEQ ID NO: 2050638 - DNA, 25 bp, Homo sapien
tcaatcaagaggcataacaggctgg

SEQ ID NO: 2050639 - DNA, 25 bp, Homo sapien
aggaataacaatcctaaacatttat

SEQ ID NO: 2050640 - DNA, 25 bp, Homo sapien
gaataacaatcctaaacatttatgc

SEQ ID NO: 2050641 - DNA, 25 bp, Homo sapien
ggaataacaatcctaaacatttatg

SEQ ID NO: 2050642 - DNA, 25 bp, Homo sapien
cctggccacaaagcatatatttgac

SEQ ID NO: 2050643 - DNA, 25 bp, Homo sapien
gacaaaagactagtgtccagaatgg

SEQ ID NO: 2050644 - DNA, 25 bp, Homo sapien
tccagaatggacgaaagatttgtac

SEQ ID NO: 2050645 - DNA, 25 bp, Homo sapien
aattacacgcttgggccatggcacc

SEQ ID NO: 2050646 - DNA, 25 bp, Homo sapien
tcctgggttcatgggttcacgcgat

SEQ ID NO: 2050647 - DNA, 25 bp, Homo sapien
tattaagggcttagtcatacatccc

SEQ ID NO: 2050648 - DNA, 25 bp, Homo sapien
tccctacttgggagggttggactca

SEQ ID NO: 2050649 - DNA, 25 bp, Homo sapien
tcatatatcccaacagggacttggg

SEQ ID NO: 2050650 - DNA, 25 bp, Homo sapien
ggtgattctgatgcgcgctactctt

SEQ ID NO: 2050651 - DNA, 25 bp, Homo sapien
gaattaaagcatacctacgaatcag

SEQ ID NO: 2050652 - DNA, 25 bp, Homo sapien
tgagcatcacttatttcttgggcag

SEQ ID NO: 2050653 - DNA, 25 bp, Homo sapien
cactactaaatcagcaactccggag

SEQ ID NO: 2050654 - DNA, 25 bp, Homo sapien
gctttcccgaaagataatggattcc

SEQ ID NO: 2050655 - DNA, 25 bp, Homo sapien
cccgaaagataatggattccgacat

SEQ ID NO: 2050656 - DNA, 25 bp, Homo sapien
aaagataatggattccgacattcac

SEQ ID NO: 2050657 - DNA, 25 bp, Homo sapien
ccccagagagctttcccgaaagata

SEQ ID NO: 2050658 - DNA, 25 bp, Homo sapien
ccaagcaggtccctggctaaggcac

SEQ ID NO: 2050659 - DNA, 25 bp, Homo sapien
cagcaaaggatctgtcgctggccaa

SEQ ID NO: 2050660 - DNA, 25 bp, Homo sapien
gcagcaaaggatctgtcgctggcca

SEQ ID NO: 2050661 - DNA, 25 bp, Homo sapien
caagcaggtccctggctaaggcact

SEQ ID NO: 2050662 - DNA, 25 bp, Homo sapien
atgtagccttcataaaaaactgaag

SEQ ID NO: 2050663 - DNA, 25 bp, Homo sapien
tcatgcctacgtgatgtagccttca

SEQ ID NO: 2050664 - DNA, 25 bp, Homo sapien
tggagactgaattcagtcaccagtg

SEQ ID NO: 2050665 - DNA, 25 bp, Homo sapien
gatttaatcattcatgcctacgtga

SEQ ID NO: 2050666 - DNA, 25 bp, Homo sapien
cactgtctagatattccatagttta

SEQ ID NO: 2050667 - DNA, 25 bp, Homo sapien
taagatagataattctggcccagaa

SEQ ID NO: 2050668 - DNA, 25 bp, Homo sapien
gaatgtggcctatcttggtgaatat

SEQ ID NO: 2050669 - DNA, 25 bp, Homo sapien
atcccactgtctagatattccatag

SEQ ID NO: 2050670 - DNA, 25 bp, Homo sapien
attaacttatatagtgcataaagtc

SEQ ID NO: 2050671 - DNA, 25 bp, Homo sapien
ttaacttatatagtgcataaagtct

SEQ ID NO: 2050672 - DNA, 25 bp, Homo sapien
tacaaataacctatattaatcagaa

SEQ ID NO: 2050673 - DNA, 25 bp, Homo sapien
caaataacctatattaatcagaaca

SEQ ID NO: 2050674 - DNA, 25 bp, Homo sapien
catgacttctcggtaacactgtgaa

SEQ ID NO: 2050675 - DNA, 25 bp, Homo sapien
gctaaagatcaagtaccaactgggt

SEQ ID NO: 2050676 - DNA, 25 bp, Homo sapien
tatgccacctgaaaacctacttgga

SEQ ID NO: 2050677 - DNA, 25 bp, Homo sapien
cagggttggcagactataggcaaac

SEQ ID NO: 2050678 - DNA, 25 bp, Homo sapien
gcaaacccctatgatttacagtgga

SEQ ID NO: 2050679 - DNA, 25 bp, Homo sapien
cagtttctaggcaggtatgacacca

SEQ ID NO: 2050680 - DNA, 25 bp, Homo sapien
taagagtatcgtggactcacctctg

SEQ ID NO: 2050681 - DNA, 25 bp, Homo sapien
gcacagtgccttgtcggtagaaaat

SEQ ID NO: 2050682 - DNA, 25 bp, Homo sapien
tgttgcacaagaatggaacttcggc

SEQ ID NO: 2050683 - DNA, 25 bp, Homo sapien
tgaggaacacccatattgagagtgc

SEQ ID NO: 2050684 - DNA, 25 bp, Homo sapien
gatgattaataagccccgaattctg

SEQ ID NO: 2050685 - DNA, 25 bp, Homo sapien
tgatgaagaataagggctgagccct

SEQ ID NO: 2050686 - DNA, 25 bp, Homo sapien
gaaaatgtaaatatcattcattatc

SEQ ID NO: 2050687 - DNA, 25 bp, Homo sapien
tcattcattatctattaagggaaaa

SEQ ID NO: 2050688 - DNA, 25 bp, Homo sapien
aatatcattcattatctattaaggg

SEQ ID NO: 2050689 - DNA, 25 bp, Homo sapien
ttcattatctattaagggaaaagaa

SEQ ID NO: 2050690 - DNA, 25 bp, Homo sapien
tcacacgcaggcagagataacagca

SEQ ID NO: 2050691 - DNA, 25 bp, Homo sapien
tctaagcctcagtgaaacgtgtcca

SEQ ID NO: 2050692 - DNA, 25 bp, Homo sapien
tgaacaagccaagtcaggtcacagc

SEQ ID NO: 2050693 - DNA, 25 bp, Homo sapien
gaaaagcctgaattaccaacatggg

SEQ ID NO: 2050694 - DNA, 25 bp, Homo sapien
tctcaaactttattgcacagaagaa

SEQ ID NO: 2050695 - DNA, 25 bp, Homo sapien
ggcactgtcccctcagatgtgaaga

SEQ ID NO: 2050696 - DNA, 25 bp, Homo sapien
aaaactgcagattttcagcagactt

SEQ ID NO: 2050697 - DNA, 25 bp, Homo sapien
tcattcagtggcataccagcaccat

SEQ ID NO: 2050698 - DNA, 25 bp, Homo sapien
taatatattgggaaagactggtctc

SEQ ID NO: 2050699 - DNA, 25 bp, Homo sapien
aatgcaaaatagagggacttggtcc

SEQ ID NO: 2050700 - DNA, 25 bp, Homo sapien
gctggctcaaagtaaggcaaatgct

SEQ ID NO: 2050701 - DNA, 25 bp, Homo sapien
caaatgctagcctgacatgggcaac

SEQ ID NO: 2050702 - DNA, 25 bp, Homo sapien
catcaagctcagaacttggtaatcc

SEQ ID NO: 2050703 - DNA, 25 bp, Homo sapien
tcagaacttggtaatccctgagctt

SEQ ID NO: 2050704 - DNA, 25 bp, Homo sapien
acagtgccttagggaatggagctcc

SEQ ID NO: 2050705 - DNA, 25 bp, Homo sapien
catgtcttctactagtacttcccgt

SEQ ID NO: 2050706 - DNA, 25 bp, Homo sapien
cggttgtccagggtcatcaagttca

SEQ ID NO: 2050707 - DNA, 25 bp, Homo sapien
tgcctcctctccattctctggatga

SEQ ID NO: 2050708 - DNA, 25 bp, Homo sapien
ctctccaaatcctccagcactgtca

SEQ ID NO: 2050709 - DNA, 25 bp, Homo sapien
tcctctccattctctggatgatgat

SEQ ID NO: 2050710 - DNA, 25 bp, Homo sapien
cctcctctccattctctggatgatg

SEQ ID NO: 2050711 - DNA, 25 bp, Homo sapien
agctctttgggtaggatggcaacaa

SEQ ID NO: 2050712 - DNA, 25 bp, Homo sapien
cgaacccaagtctgtagctctttgg

SEQ ID NO: 2050713 - DNA, 25 bp, Homo sapien
gtagctctttgggtaggatggcaac

SEQ ID NO: 2050714 - DNA, 25 bp, Homo sapien
ctctttgggtaggatggcaacaaac

SEQ ID NO: 2050715 - DNA, 25 bp, Homo sapien
gcaaagttctcggagctggctcaca

SEQ ID NO: 2050716 - DNA, 25 bp, Homo sapien
cctgagccacagacggcaaagttct

SEQ ID NO: 2050717 - DNA, 25 bp, Homo sapien
gatacttgatccctcttcgccatca

SEQ ID NO: 2050718 - DNA, 25 bp, Homo sapien
aaactgcctgaatcgctgtcggaaa

SEQ ID NO: 2050719 - DNA, 25 bp, Homo sapien
tgggatgataagtattgaatcttct

SEQ ID NO: 2050720 - DNA, 25 bp, Homo sapien
gagttgggatgataagtattgaatc

SEQ ID NO: 2050721 - DNA, 25 bp, Homo sapien
gatgataagtattgaatcttcttcc

SEQ ID NO: 2050722 - DNA, 25 bp, Homo sapien
taagtattgaatcttcttccactga

SEQ ID NO: 2050723 - DNA, 25 bp, Homo sapien
agacaactgaggcagaatataagcc

SEQ ID NO: 2050724 - DNA, 25 bp, Homo sapien
aaaagacaactgaggcagaatataa

SEQ ID NO: 2050725 - DNA, 25 bp, Homo sapien
aatataagcctcagggcaatacccc

SEQ ID NO: 2050726 - DNA, 25 bp, Homo sapien
caataccccgttttcttcacaggca

SEQ ID NO: 2050727 - DNA, 25 bp, Homo sapien
taccttcagtgaaactgtatactgc

SEQ ID NO: 2050728 - DNA, 25 bp, Homo sapien
gaaactgtatactgcttctggacct

SEQ ID NO: 2050729 - DNA, 25 bp, Homo sapien
cccgtgctgttgtttacgacacata

SEQ ID NO: 2050730 - DNA, 25 bp, Homo sapien
tattatttgcacgatcatgcccgtg

SEQ ID NO: 2050731 - DNA, 25 bp, Homo sapien
gctgtagagcataccgcttgtggga

SEQ ID NO: 2050732 - DNA, 25 bp, Homo sapien
agagcataccgcttgtgggaaatgg

SEQ ID NO: 2050733 - DNA, 25 bp, Homo sapien
ccacggtcccgacaatgtttgggca

SEQ ID NO: 2050734 - DNA, 25 bp, Homo sapien
tcccgacaatgtttgggcagggtac

SEQ ID NO: 2050735 - DNA, 25 bp, Homo sapien
tcccagcactcaggaccgcggattt

SEQ ID NO: 2050736 - DNA, 25 bp, Homo sapien
gatttcagatgaccaaaggccaccc

SEQ ID NO: 2050737 - DNA, 25 bp, Homo sapien
gatcgcccaccttactgctgcatag

SEQ ID NO: 2050738 - DNA, 25 bp, Homo sapien
atagacctgctgtgtatcccggccc

SEQ ID NO: 2050739 - DNA, 25 bp, Homo sapien
cagaaacgccgttcacaagcctttt

SEQ ID NO: 2050740 - DNA, 25 bp, Homo sapien
aggaaccgcagcagcttcgctgtcc

SEQ ID NO: 2050741 - DNA, 25 bp, Homo sapien
gctgtccacggcagacgcagaaacg

SEQ ID NO: 2050742 - DNA, 25 bp, Homo sapien
cagacgcagaaacgccgttcacaag

SEQ ID NO: 2050743 - DNA, 25 bp, Homo sapien
atttcgcaagccctttcacgtgcat

SEQ ID NO: 2050744 - DNA, 25 bp, Homo sapien
aatttcgcaagccctttcacgtgca

SEQ ID NO: 2050745 - DNA, 25 bp, Homo sapien
tatcttgtggatcctctcagtaatc

SEQ ID NO: 2050746 - DNA, 25 bp, Homo sapien
atcttgtggatcctctcagtaatcc

SEQ ID NO: 2050747 - DNA, 25 bp, Homo sapien
tcttgtggatcctctcagtaatccc

SEQ ID NO: 2050748 - DNA, 25 bp, Homo sapien
tgtggcccaagatcctcagcctcac

SEQ ID NO: 2050749 - DNA, 25 bp, Homo sapien
gacccttcatggcactgttattaat

SEQ ID NO: 2050750 - DNA, 25 bp, Homo sapien
taatggaagtgatctcatttattta

SEQ ID NO: 2050751 - DNA, 25 bp, Homo sapien
actgttattaatggaagtgatctca

SEQ ID NO: 2050752 - DNA, 25 bp, Homo sapien
attaatggaagtgatctcatttatt

SEQ ID NO: 2050753 - DNA, 25 bp, Homo sapien
tgggggccagtgtctcttccttggt

SEQ ID NO: 2050754 - DNA, 25 bp, Homo sapien
ggctgggggccagtgtctcttcctt

SEQ ID NO: 2050755 - DNA, 25 bp, Homo sapien
acctgcggcaacaaatcatctgttt

SEQ ID NO: 2050756 - DNA, 25 bp, Homo sapien
caaacctgcggcaacaaatcatctg

SEQ ID NO: 2050757 - DNA, 25 bp, Homo sapien
tatactttatgaggaacccaaccag

SEQ ID NO: 2050758 - DNA, 25 bp, Homo sapien
tgtacaagagcatcaaaatccaggg

SEQ ID NO: 2050759 - DNA, 25 bp, Homo sapien
gagctcctctaagccagtttctgga

SEQ ID NO: 2050760 - DNA, 25 bp, Homo sapien
tattgtcatcagcagttacgggctt

SEQ ID NO: 2050761 - DNA, 25 bp, Homo sapien
cttttgggcctctgcaatcgcatgt

SEQ ID NO: 2050762 - DNA, 25 bp, Homo sapien
ttgctctgtctgagcggttcaagca

SEQ ID NO: 2050763 - DNA, 25 bp, Homo sapien
cttgctctgtctgagcggttcaagc

SEQ ID NO: 2050764 - DNA, 25 bp, Homo sapien
caaggcctgcatagggatggaaatc

SEQ ID NO: 2050765 - DNA, 25 bp, Homo sapien
caaataatgctgacctgagatcttc

SEQ ID NO: 2050766 - DNA, 25 bp, Homo sapien
tcttgaaaggagactggtgcttact

SEQ ID NO: 2050767 - DNA, 25 bp, Homo sapien
ggtgcttactaagaccactgatttg

SEQ ID NO: 2050768 - DNA, 25 bp, Homo sapien
cctatgtctaaaaagatttgagctc

SEQ ID NO: 2050769 - DNA, 25 bp, Homo sapien
tgtcttttcctatgtctaaaaagat

SEQ ID NO: 2050770 - DNA, 25 bp, Homo sapien
tttctaatgtgtcttttcctatgtc

SEQ ID NO: 2050771 - DNA, 25 bp, Homo sapien
taatgtgtcttttcctatgtctaaa

SEQ ID NO: 2050772 - DNA, 25 bp, Homo sapien
tatgggttcgtcgatgctgaatcag

SEQ ID NO: 2050773 - DNA, 25 bp, Homo sapien
gcgcttcggctgaatgcctttgcac

SEQ ID NO: 2050774 - DNA, 25 bp, Homo sapien
tgctgaatcagaattgcgcttcggc

SEQ ID NO: 2050775 - DNA, 25 bp, Homo sapien
cacactcgtcacatgcataaggttt

SEQ ID NO: 2050776 - DNA, 25 bp, Homo sapien
ctctgggagccattcatatgaagga

SEQ ID NO: 2050777 - DNA, 25 bp, Homo sapien
tctgggagccattcatatgaaggat

SEQ ID NO: 2050778 - DNA, 25 bp, Homo sapien
gaactctgggagccattcatatgaa

SEQ ID NO: 2050779 - DNA, 25 bp, Homo sapien
aactctgggagccattcatatgaag

SEQ ID NO: 2050780 - DNA, 25 bp, Homo sapien
cacatttgtagttttgatgtcttca

SEQ ID NO: 2050781 - DNA, 25 bp, Homo sapien
gcctaaagaagtcttttgccttgaa

SEQ ID NO: 2050782 - DNA, 25 bp, Homo sapien
gcagttctatgcctaaagaagtctt

SEQ ID NO: 2050783 - DNA, 25 bp, Homo sapien
ccttgaagcagatttcacatttgta

SEQ ID NO: 2050784 - DNA, 25 bp, Homo sapien
tcaaagcacgtatgagagcaaagtc

SEQ ID NO: 2050785 - DNA, 25 bp, Homo sapien
tataggcgattctgctacgagatcc

SEQ ID NO: 2050786 - DNA, 25 bp, Homo sapien
cgtgtcccagtataagccttcagag

SEQ ID NO: 2050787 - DNA, 25 bp, Homo sapien
tgatcatctagaaggagggtctctg

SEQ ID NO: 2050788 - DNA, 25 bp, Homo sapien
ctgagatgtgtgtggtgagcagagg

SEQ ID NO: 2050789 - DNA, 25 bp, Homo sapien
agcagagggcccccacaccttccaa

SEQ ID NO: 2050790 - DNA, 25 bp, Homo sapien
caccttccaacatgaactgaatcct

SEQ ID NO: 2050791 - DNA, 25 bp, Homo sapien
ccttccaacatgaactgaatcctgc

SEQ ID NO: 2050792 - DNA, 25 bp, Homo sapien
cgggcatgagctggctacttggcaa

SEQ ID NO: 2050793 - DNA, 25 bp, Homo sapien
gagctggctacttggcaattcctca

SEQ ID NO: 2050794 - DNA, 25 bp, Homo sapien
gactgaagctcccatgatgctccct

SEQ ID NO: 2050795 - DNA, 25 bp, Homo sapien
tcttcacgggcatgagctggctact

SEQ ID NO: 2050796 - DNA, 25 bp, Homo sapien
tatacatccagttgtgctgagtggg

SEQ ID NO: 2050797 - DNA, 25 bp, Homo sapien
gaacaccatcaggttgggacttgag

SEQ ID NO: 2050798 - DNA, 25 bp, Homo sapien
agtagagccaccttctatttgctgg

SEQ ID NO: 2050799 - DNA, 25 bp, Homo sapien
gctgggacacccattagtactttca

SEQ ID NO: 2050800 - DNA, 25 bp, Homo sapien
ccaatgatgtgccagtgctcttgac

SEQ ID NO: 2050801 - DNA, 25 bp, Homo sapien
ctcagcctgggggttcatctccaca

SEQ ID NO: 2050802 - DNA, 25 bp, Homo sapien
gatgtgccagtgctcttgactcagc

SEQ ID NO: 2050803 - DNA, 25 bp, Homo sapien
tgtgccagtgctcttgactcagcct

SEQ ID NO: 2050804 - DNA, 25 bp, Homo sapien
cagcatagtcacagtttcctctcca

SEQ ID NO: 2050805 - DNA, 25 bp, Homo sapien
ccaggcctgaagctcttttgggagg

SEQ ID NO: 2050806 - DNA, 25 bp, Homo sapien
tgaagctcttttgggaggatggcca

SEQ ID NO: 2050807 - DNA, 25 bp, Homo sapien
atcctccagcatagtcacagtttcc

SEQ ID NO: 2050808 - DNA, 25 bp, Homo sapien
agatgacaaagttcccagagccggc

SEQ ID NO: 2050809 - DNA, 25 bp, Homo sapien
aactgcctgaattgctggcggaagg

SEQ ID NO: 2050810 - DNA, 25 bp, Homo sapien
cttggtgtgcacttccggcctcagc

SEQ ID NO: 2050811 - DNA, 25 bp, Homo sapien
tgcacttccggcctcagccagagat

SEQ ID NO: 2050812 - DNA, 25 bp, Homo sapien
cagaatcccattacactcctctgaa

SEQ ID NO: 2050813 - DNA, 25 bp, Homo sapien
gaatcccattacactcctctgaagt

SEQ ID NO: 2050814 - DNA, 25 bp, Homo sapien
agaatcccattacactcctctgaag

SEQ ID NO: 2050815 - DNA, 25 bp, Homo sapien
tctctgtcagaatcccattacactc

SEQ ID NO: 2050816 - DNA, 25 bp, Homo sapien
tttgacagacaaatagctcagtact

SEQ ID NO: 2050817 - DNA, 25 bp, Homo sapien
tactgttaggctttaatcctcaagg

SEQ ID NO: 2050818 - DNA, 25 bp, Homo sapien
ggtgaagctgtcctgatggacactc

SEQ ID NO: 2050819 - DNA, 25 bp, Homo sapien
tcctcaaggaggtgaagctgtcctg

SEQ ID NO: 2050820 - DNA, 25 bp, Homo sapien
cagccgcgctcccagatgaagcggg

SEQ ID NO: 2050821 - DNA, 25 bp, Homo sapien
ctgcgcgttgtctcagcgcagagga

SEQ ID NO: 2050822 - DNA, 25 bp, Homo sapien
ggcccttgtggtgacccctgcgcgt

SEQ ID NO: 2050823 - DNA, 25 bp, Homo sapien
aggaagtggcggcaggcagccgcgc

SEQ ID NO: 2050824 - DNA, 25 bp, Homo sapien
gagccgtcaggtaccctaagggata

SEQ ID NO: 2050825 - DNA, 25 bp, Homo sapien
acttcagcaccaggcgcagaatctg

SEQ ID NO: 2050826 - DNA, 25 bp, Homo sapien
tgaggccaccggtttggagccgtca

SEQ ID NO: 2050827 - DNA, 25 bp, Homo sapien
ctaagggatatatgagggaccccgg

SEQ ID NO: 2050828 - DNA, 25 bp, Homo sapien
cagctgcgcaacaacttccggttct

SEQ ID NO: 2050829 - DNA, 25 bp, Homo sapien
gggaactgccagctgcgcaacaact

SEQ ID NO: 2050830 - DNA, 25 bp, Homo sapien
gaacgcggggacgttgccatggaga

SEQ ID NO: 2050831 - DNA, 25 bp, Homo sapien
tgccagctgcgcaacaacttccggt

SEQ ID NO: 2050832 - DNA, 25 bp, Homo sapien
aagacagccagctctacaggatcca

SEQ ID NO: 2050833 - DNA, 25 bp, Homo sapien
aatgcagtaaggaccccctatctta

SEQ ID NO: 2050834 - DNA, 25 bp, Homo sapien
cagctctacaggatccacatcatgt

SEQ ID NO: 2050835 - DNA, 25 bp, Homo sapien
aaggaccccctatcttatgacacag

SEQ ID NO: 2050836 - DNA, 25 bp, Homo sapien
actttagagtgacaagtatacaagg

SEQ ID NO: 2050837 - DNA, 25 bp, Homo sapien
ccttgtatacttgtcactctaaagt

SEQ ID NO: 2050838 - DNA, 25 bp, Homo sapien
tcttttccttgggcatcttgggcag

SEQ ID NO: 2050839 - DNA, 25 bp, Homo sapien
gccttcttttccttgggcatcttgg

SEQ ID NO: 2050840 - DNA, 25 bp, Homo sapien
ttggccttcttttccttgggcatct

SEQ ID NO: 2050841 - DNA, 25 bp, Homo sapien
cttcttttccttgggcatcttgggc

SEQ ID NO: 2050842 - DNA, 25 bp, Homo sapien
agcacccctgactgttcctcttgtt

SEQ ID NO: 2050843 - DNA, 25 bp, Homo sapien
tgagcacccctgactgttcctcttg

SEQ ID NO: 2050844 - DNA, 25 bp, Homo sapien
cttctgagcacccctgactgttcct

SEQ ID NO: 2050845 - DNA, 25 bp, Homo sapien
ccatcttctgagcacccctgactgt

SEQ ID NO: 2050846 - DNA, 25 bp, Homo sapien
tctcttccaaggcatggggctccat

SEQ ID NO: 2050847 - DNA, 25 bp, Homo sapien
ctctcttccaaggcatggggctcca

SEQ ID NO: 2050848 - DNA, 25 bp, Homo sapien
ttcataaaatttcccggaagcagga

SEQ ID NO: 2050849 - DNA, 25 bp, Homo sapien
tcataaaatttcccggaagcaggaa

SEQ ID NO: 2050850 - DNA, 25 bp, Homo sapien
attcataaaatttcccggaagcagg

SEQ ID NO: 2050851 - DNA, 25 bp, Homo sapien
cacttgctgcactgatcaatctcca

SEQ ID NO: 2050852 - DNA, 25 bp, Homo sapien
ccacttgctgcactgatcaatctcc

SEQ ID NO: 2050853 - DNA, 25 bp, Homo sapien
acttgctgcactgatcaatctccat

SEQ ID NO: 2050854 - DNA, 25 bp, Homo sapien
aggaagtgcctgttaaccattgagc

SEQ ID NO: 2050855 - DNA, 25 bp, Homo sapien
ctgttaaccattgagctagggctga

SEQ ID NO: 2050856 - DNA, 25 bp, Homo sapien
atttcataggcacttgatactactg

SEQ ID NO: 2050857 - DNA, 25 bp, Homo sapien
ctactgtgacaagtgcctcatacac

SEQ ID NO: 2050858 - DNA, 25 bp, Homo sapien
tctggacacccatgttagtagcagc

SEQ ID NO: 2050859 - DNA, 25 bp, Homo sapien
tacaccatgggtgatcctgaggaca

SEQ ID NO: 2050860 - DNA, 25 bp, Homo sapien
tatggtactggtgtaaagacagacc

SEQ ID NO: 2050861 - DNA, 25 bp, Homo sapien
ctttttaacaaggatgctgagacca

SEQ ID NO: 2050862 - DNA, 25 bp, Homo sapien
tcttcatactctgccgttggcattt

SEQ ID NO: 2050863 - DNA, 25 bp, Homo sapien
tggtcttcatactctgccgttggca

SEQ ID NO: 2050864 - DNA, 25 bp, Homo sapien
ctggtcttcatactctgccgttggc

SEQ ID NO: 2050865 - DNA, 25 bp, Homo sapien
gtcttcatactctgccgttggcatt

SEQ ID NO: 2050866 - DNA, 25 bp, Homo sapien
ggtcatctagcatggactgtcctgc

SEQ ID NO: 2050867 - DNA, 25 bp, Homo sapien
ccagggcatctgaggcaagtgagtt

SEQ ID NO: 2050868 - DNA, 25 bp, Homo sapien
tctaggagagcatttccgattgagc

SEQ ID NO: 2050869 - DNA, 25 bp, Homo sapien
ctatgcaatgcactggcgtaatgga

SEQ ID NO: 2050870 - DNA, 25 bp, Homo sapien
ccacagttttggtcctggtctcagc

SEQ ID NO: 2050871 - DNA, 25 bp, Homo sapien
aggagggacacgctgttcccaggaa

SEQ ID NO: 2050872 - DNA, 25 bp, Homo sapien
gggctggaagtatgtggccaacaca

SEQ ID NO: 2050873 - DNA, 25 bp, Homo sapien
tctcagcttggtcctgccagcagtg

SEQ ID NO: 2050874 - DNA, 25 bp, Homo sapien
tccgcagcacagtaagtctgaggct

SEQ ID NO: 2050875 - DNA, 25 bp, Homo sapien
ctgaggctccttcatcatataaagg

SEQ ID NO: 2050876 - DNA, 25 bp, Homo sapien
ttcatcatataaaggctcaggaagg

SEQ ID NO: 2050877 - DNA, 25 bp, Homo sapien
agcaaaactccgcagcacagtaagt

SEQ ID NO: 2050878 - DNA, 25 bp, Homo sapien
gttatgtgagaatcctgctgcccca

SEQ ID NO: 2050879 - DNA, 25 bp, Homo sapien
ccctccttagctccaccctgggtgt

SEQ ID NO: 2050880 - DNA, 25 bp, Homo sapien
tcatcacaaagttccaagttatgtg

SEQ ID NO: 2050881 - DNA, 25 bp, Homo sapien
ccctgggtgtggccaaaacccacag

SEQ ID NO: 2050882 - DNA, 25 bp, Homo sapien
ggttaaccagtgctgacgtttcgcc

SEQ ID NO: 2050883 - DNA, 25 bp, Homo sapien
gacgtttcgccccagtgaagacaaa

SEQ ID NO: 2050884 - DNA, 25 bp, Homo sapien
caaagtatgcaaagtaggtaaggtc

SEQ ID NO: 2050885 - DNA, 25 bp, Homo sapien
tcttcctggctgtgacgttgctgtc

SEQ ID NO: 2050886 - DNA, 25 bp, Homo sapien
agagtcaaagacaatgggagattgg

SEQ ID NO: 2050887 - DNA, 25 bp, Homo sapien
gagtcaaagacaatgggagattggc

SEQ ID NO: 2050888 - DNA, 25 bp, Homo sapien
gtcaaagacaatgggagattggcat

SEQ ID NO: 2050889 - DNA, 25 bp, Homo sapien
gagattggcatgcatccctgcccac

SEQ ID NO: 2050890 - DNA, 25 bp, Homo sapien
cctgttcacaggaatgtttggcttg

SEQ ID NO: 2050891 - DNA, 25 bp, Homo sapien
tttggcttggtaaaggaggagccca

SEQ ID NO: 2050892 - DNA, 25 bp, Homo sapien
catctagttggaacggagatgcctg

SEQ ID NO: 2050893 - DNA, 25 bp, Homo sapien
gaagtgacataatgtgcttgcaatg

SEQ ID NO: 2050894 - DNA, 25 bp, Homo sapien
tccctcctccaactgtcagaacccc

SEQ ID NO: 2050895 - DNA, 25 bp, Homo sapien
gtgtgtgccacacatcagttaattt

SEQ ID NO: 2050896 - DNA, 25 bp, Homo sapien
ttactatgttggctaggatgtctca

SEQ ID NO: 2050897 - DNA, 25 bp, Homo sapien
acaggtgtgtgccacacatcagtta

SEQ ID NO: 2050898 - DNA, 25 bp, Homo sapien
ttttactatgttggctaggatgtct

SEQ ID NO: 2050899 - DNA, 25 bp, Homo sapien
gctgtttgacttcactgggacccca

SEQ ID NO: 2050900 - DNA, 25 bp, Homo sapien
taagactagtccagcctttatcctg

SEQ ID NO: 2050901 - DNA, 25 bp, Homo sapien
caggctgtggtcaacaagccaccaa

SEQ ID NO: 2050902 - DNA, 25 bp, Homo sapien
gaggaccagctctaatgaggttcaa

SEQ ID NO: 2050903 - DNA, 25 bp, Homo sapien
tgtggattcaagttatcaactggag

SEQ ID NO: 2050904 - DNA, 25 bp, Homo sapien
ccttttcgaaggataatcttgctga

SEQ ID NO: 2050905 - DNA, 25 bp, Homo sapien
ttttttgtaaggcaggtcattagcg

SEQ ID NO: 2050906 - DNA, 25 bp, Homo sapien
cagtaaaatatagcaactttcctcc

SEQ ID NO: 2050907 - DNA, 25 bp, Homo sapien
tatctgaatagtaagagtctcatat

SEQ ID NO: 2050908 - DNA, 25 bp, Homo sapien
tgtccacgtcaagctttcagccaga

SEQ ID NO: 2050909 - DNA, 25 bp, Homo sapien
gaccctggttgttattgagggataa

SEQ ID NO: 2050910 - DNA, 25 bp, Homo sapien
agtctcatattttcatagcaggaaa

SEQ ID NO: 2050911 - DNA, 25 bp, Homo sapien
gatcaggagcacatctagctctggc

SEQ ID NO: 2050912 - DNA, 25 bp, Homo sapien
gggagactgagacatccaggatcct

SEQ ID NO: 2050913 - DNA, 25 bp, Homo sapien
aatgacccctggttttgatgaggca

SEQ ID NO: 2050914 - DNA, 25 bp, Homo sapien
ttcagtccattccaatgacccctgg

SEQ ID NO: 2050915 - DNA, 25 bp, Homo sapien
gaccagtgttcgtatatcaggggaa

SEQ ID NO: 2050916 - DNA, 25 bp, Homo sapien
tttagaagcactgatgcagacacca

SEQ ID NO: 2050917 - DNA, 25 bp, Homo sapien
gatatgaagtcagacgtctgaccag

SEQ ID NO: 2050918 - DNA, 25 bp, Homo sapien
gaatcaccagcgcacacaaaagtca

SEQ ID NO: 2050919 - DNA, 25 bp, Homo sapien
aatctgtgcaagaattccccagatg

SEQ ID NO: 2050920 - DNA, 25 bp, Homo sapien
cccacaaactgcgtaatgcggtgat

SEQ ID NO: 2050921 - DNA, 25 bp, Homo sapien
ctgtgcaagaattccccagatgaag

SEQ ID NO: 2050922 - DNA, 25 bp, Homo sapien
caaactgcgtaatgcggtgatgatg

SEQ ID NO: 2050923 - DNA, 25 bp, Homo sapien
aggttctggctgatttggtttctag

SEQ ID NO: 2050924 - DNA, 25 bp, Homo sapien
tattttttcacatctctgaaggctg

SEQ ID NO: 2050925 - DNA, 25 bp, Homo sapien
tagtgaaggctctttctggcttaca

SEQ ID NO: 2050926 - DNA, 25 bp, Homo sapien
gtgtccttgcatggcctttccttgg

SEQ ID NO: 2050927 - DNA, 25 bp, Homo sapien
catcggtgtatcgtggatggtatat

SEQ ID NO: 2050928 - DNA, 25 bp, Homo sapien
acagaaggagaggtgggccatcggt

SEQ ID NO: 2050929 - DNA, 25 bp, Homo sapien
tgtgtgctggcccttaggcttgaga

SEQ ID NO: 2050930 - DNA, 25 bp, Homo sapien
cctgcatgagatgccgtacgtggag

SEQ ID NO: 2050931 - DNA, 25 bp, Homo sapien
gtgtccaaagtcctctggtcctggc

SEQ ID NO: 2050932 - DNA, 25 bp, Homo sapien
cgtgtccaaagtcctctggtcctgg

SEQ ID NO: 2050933 - DNA, 25 bp, Homo sapien
gagttgcagtgcctgtccttttaca

SEQ ID NO: 2050934 - DNA, 25 bp, Homo sapien
atgggacaggagttgcagtgcctgt

SEQ ID NO: 2050935 - DNA, 25 bp, Homo sapien
gcagtgcctgtccttttacactggg

SEQ ID NO: 2050936 - DNA, 25 bp, Homo sapien
caggagttgcagtgcctgtcctttt

SEQ ID NO: 2050937 - DNA, 25 bp, Homo sapien
atggaggggatatctgcttccacac

SEQ ID NO: 2050938 - DNA, 25 bp, Homo sapien
gccatggaggggatatctgcttcca

SEQ ID NO: 2050939 - DNA, 25 bp, Homo sapien
catggaggggatatctgcttccaca

SEQ ID NO: 2050940 - DNA, 25 bp, Homo sapien
cagccatggaggggatatctgcttc

SEQ ID NO: 2050941 - DNA, 25 bp, Homo sapien
gcctgtagtcagtcccagcttcttg

SEQ ID NO: 2050942 - DNA, 25 bp, Homo sapien
gagctgagatcatgccactgtattc

SEQ ID NO: 2050943 - DNA, 25 bp, Homo sapien
ggaggctgatgcatgagaattgctt

SEQ ID NO: 2050944 - DNA, 25 bp, Homo sapien
gaacctggggggcagaggttgcagt

SEQ ID NO: 2050945 - DNA, 25 bp, Homo sapien
gaaaattgcactgcgtgctggaaga

SEQ ID NO: 2050946 - DNA, 25 bp, Homo sapien
caaggtagatgggtcaggtacagct

SEQ ID NO: 2050947 - DNA, 25 bp, Homo sapien
gaatcctcgtgtgggaggtgacaat

SEQ ID NO: 2050948 - DNA, 25 bp, Homo sapien
ctattgtgagccaagggcgtgtgca

SEQ ID NO: 2050949 - DNA, 25 bp, Homo sapien
ctcctccatgtgatcttcaagtagt

SEQ ID NO: 2050950 - DNA, 25 bp, Homo sapien
tcaagtagtcagtcccctcacctcc

SEQ ID NO: 2050951 - DNA, 25 bp, Homo sapien
cctccatgtgatcttcaagtagtca

SEQ ID NO: 2050952 - DNA, 25 bp, Homo sapien
cttcaagtagtcagtcccctcacct

SEQ ID NO: 2050953 - DNA, 25 bp, Homo sapien
ggcaaggacgcacaattttaccact

SEQ ID NO: 2050954 - DNA, 25 bp, Homo sapien
tcactatccactgggacaatagggc

SEQ ID NO: 2050955 - DNA, 25 bp, Homo sapien
ttcaccttaacgtggagaacaaggc

SEQ ID NO: 2050956 - DNA, 25 bp, Homo sapien
tacactaggaatagaagggaccttc

SEQ ID NO: 2050957 - DNA, 25 bp, Homo sapien
tgctagtgggaatgtcaattgatgc

SEQ ID NO: 2050958 - DNA, 25 bp, Homo sapien
ctactttacacccaccagaatggcc

SEQ ID NO: 2050959 - DNA, 25 bp, Homo sapien
caagtgttggtgagcatctggaaaa

SEQ ID NO: 2050960 - DNA, 25 bp, Homo sapien
gtgggaatgtcaattgatgcagcct

SEQ ID NO: 2050961 - DNA, 25 bp, Homo sapien
ggaaatgagcagcattagaaccttc

SEQ ID NO: 2050962 - DNA, 25 bp, Homo sapien
tagaaccttcagctaggagtggatg

SEQ ID NO: 2050963 - DNA, 25 bp, Homo sapien
tgagttggattttgcttaactcggg

SEQ ID NO: 2050964 - DNA, 25 bp, Homo sapien
catatgttgtgctgtttaagtagcc

SEQ ID NO: 2050965 - DNA, 25 bp, Homo sapien
tttgcatatgcacgatgaggtatgg

SEQ ID NO: 2050966 - DNA, 25 bp, Homo sapien
tagctatcaccggaaagcactgctt

SEQ ID NO: 2050967 - DNA, 25 bp, Homo sapien
ggaaagaatgggctaggctttgcat

SEQ ID NO: 2050968 - DNA, 25 bp, Homo sapien
tgaggtatggaatctacttgtttgg

SEQ ID NO: 2050969 - DNA, 25 bp, Homo sapien
gaaatgtgcccgaggcttgactcca

SEQ ID NO: 2050970 - DNA, 25 bp, Homo sapien
gagcctgtttaagggagcaacctaa

SEQ ID NO: 2050971 - DNA, 25 bp, Homo sapien
ttatctatgctgcaaggaagcccag

SEQ ID NO: 2050972 - DNA, 25 bp, Homo sapien
ccttaccagggaagcatggagctcc

SEQ ID NO: 2050973 - DNA, 25 bp, Homo sapien
aaggactctgtgcagtatgcaggcc

SEQ ID NO: 2050974 - DNA, 25 bp, Homo sapien
ctccagcttggcctatggaccaggc

SEQ ID NO: 2050975 - DNA, 25 bp, Homo sapien
tgcaggatgtcctttgcagagcccc

SEQ ID NO: 2050976 - DNA, 25 bp, Homo sapien
gcaggccaggattctctcaggctgt

SEQ ID NO: 2050977 - DNA, 25 bp, Homo sapien
tgtggagtgtccctgcccttaaggt

SEQ ID NO: 2050978 - DNA, 25 bp, Homo sapien
ctgtggagtgtccctgcccttaagg

SEQ ID NO: 2050979 - DNA, 25 bp, Homo sapien
gagtgtccctgcccttaaggtctta

SEQ ID NO: 2050980 - DNA, 25 bp, Homo sapien
tggagtgtccctgcccttaaggtct

SEQ ID NO: 2050981 - DNA, 25 bp, Homo sapien
gaccatgcaaggcaacaactgtgga

SEQ ID NO: 2050982 - DNA, 25 bp, Homo sapien
catgcaaggcaacaactgtggagct

SEQ ID NO: 2050983 - DNA, 25 bp, Homo sapien
tgcaaggcaacaactgtggagctgg

SEQ ID NO: 2050984 - DNA, 25 bp, Homo sapien
gtgaccatgcaaggcaacaactgtg

SEQ ID NO: 2050985 - DNA, 25 bp, Homo sapien
gaggaggcgactgctgagttaagtg

SEQ ID NO: 2050986 - DNA, 25 bp, Homo sapien
ctggaggaggcgactgctgagttaa

SEQ ID NO: 2050987 - DNA, 25 bp, Homo sapien
ggaggaggcgactgctgagttaagt

SEQ ID NO: 2050988 - DNA, 25 bp, Homo sapien
tggaggaggcgactgctgagttaag

SEQ ID NO: 2050989 - DNA, 25 bp, Homo sapien
ggttccttaggtgtagagcgagccc

SEQ ID NO: 2050990 - DNA, 25 bp, Homo sapien
catttaaggagacgctaagccagaa

SEQ ID NO: 2050991 - DNA, 25 bp, Homo sapien
tgacaaaatgggatcaggcctctcc

SEQ ID NO: 2050992 - DNA, 25 bp, Homo sapien
tatcagagtactgtggcctagccca

SEQ ID NO: 2050993 - DNA, 25 bp, Homo sapien
gctgtagccatgtttgcctctgagg

SEQ ID NO: 2050994 - DNA, 25 bp, Homo sapien
caaatgcgtactttgaggaagctca

SEQ ID NO: 2050995 - DNA, 25 bp, Homo sapien
gaaaggctttgacggcagttggaac

SEQ ID NO: 2050996 - DNA, 25 bp, Homo sapien
taattttccgttgcgaagagcagaa

SEQ ID NO: 2050997 - DNA, 25 bp, Homo sapien
tgactccagtgtgggatgccatgta

SEQ ID NO: 2050998 - DNA, 25 bp, Homo sapien
caaatgaccagtagatatgccgtga

SEQ ID NO: 2050999 - DNA, 25 bp, Homo sapien
tcctgaagcaggattggagccaagt

SEQ ID NO: 2051000 - DNA, 25 bp, Homo sapien
cttgcaatttgctcatggcctggga

SEQ ID NO: 2051001 - DNA, 25 bp, Homo sapien
gaaggtctaggatgtggcccaagaa

SEQ ID NO: 2051002 - DNA, 25 bp, Homo sapien
cactccctgggtcggtcagaaggtc

SEQ ID NO: 2051003 - DNA, 25 bp, Homo sapien
cattttagcgggtctccaggtgacc

SEQ ID NO: 2051004 - DNA, 25 bp, Homo sapien
tgtgaggtgtcctgcacacgagctt

SEQ ID NO: 2051005 - DNA, 25 bp, Homo sapien
tgtatcttcttgtcaaacaccttta

SEQ ID NO: 2051006 - DNA, 25 bp, Homo sapien
tcttcttgtcaaacacctttacttg

SEQ ID NO: 2051007 - DNA, 25 bp, Homo sapien
cttgtcaaacacctttacttgaggc

SEQ ID NO: 2051008 - DNA, 25 bp, Homo sapien
atgaaaagtatggttttattgtatc

SEQ ID NO: 2051009 - DNA, 25 bp, Homo sapien
cagcagaacgagtttgtttccgtga

SEQ ID NO: 2051010 - DNA, 25 bp, Homo sapien
caaaatcatgagtccagagtctgtt

SEQ ID NO: 2051011 - DNA, 25 bp, Homo sapien
caggaaatatcacacttggagggaa

SEQ ID NO: 2051012 - DNA, 25 bp, Homo sapien
gcattttcagattgacagcagaacg

SEQ ID NO: 2051013 - DNA, 25 bp, Homo sapien
ccaggtagccggtgacgacgtcaga

SEQ ID NO: 2051014 - DNA, 25 bp, Homo sapien
ggtgctgaaccgcagtttgctctgg

SEQ ID NO: 2051015 - DNA, 25 bp, Homo sapien
tcagggaacgatgctcgtggccttc

SEQ ID NO: 2051016 - DNA, 25 bp, Homo sapien
agagggcagcctccgaatgtaggaa

SEQ ID NO: 2051017 - DNA, 25 bp, Homo sapien
cttccaacaccccctgcgccacttc

SEQ ID NO: 2051018 - DNA, 25 bp, Homo sapien
tccaacaccccctgcgccacttcca

SEQ ID NO: 2051019 - DNA, 25 bp, Homo sapien
ttccaacaccccctgcgccacttcc

SEQ ID NO: 2051020 - DNA, 25 bp, Homo sapien
ccaacaccccctgcgccacttccat

SEQ ID NO: 2051021 - DNA, 25 bp, Homo sapien
ctccctgagcaactctgtagtgcat

SEQ ID NO: 2051022 - DNA, 25 bp, Homo sapien
gcctccctgagcaactctgtagtgc

SEQ ID NO: 2051023 - DNA, 25 bp, Homo sapien
cctccctgagcaactctgtagtgca

SEQ ID NO: 2051024 - DNA, 25 bp, Homo sapien
ttaggttccaccttctgcaaataag

SEQ ID NO: 2051025 - DNA, 25 bp, Homo sapien
tgcaaataaggaaatgggggtgttc

SEQ ID NO: 2051026 - DNA, 25 bp, Homo sapien
gagctttagcaacttgcccacttcc

SEQ ID NO: 2051027 - DNA, 25 bp, Homo sapien
ggtgttctgaggttcctgagcttta

SEQ ID NO: 2051028 - DNA, 25 bp, Homo sapien
gctggcagtttctgaattgtgttcc

SEQ ID NO: 2051029 - DNA, 25 bp, Homo sapien
ctgctggcagtttctgaattgtgtt

SEQ ID NO: 2051030 - DNA, 25 bp, Homo sapien
tgctggcagtttctgaattgtgttc

SEQ ID NO: 2051031 - DNA, 25 bp, Homo sapien
ttccccagaagcacttgagcagtca

SEQ ID NO: 2051032 - DNA, 25 bp, Homo sapien
gccagatccacatgggaccacagca

SEQ ID NO: 2051033 - DNA, 25 bp, Homo sapien
gaggaagataggcggccagatccac

SEQ ID NO: 2051034 - DNA, 25 bp, Homo sapien
gcggccagatccacatgggaccaca

SEQ ID NO: 2051035 - DNA, 25 bp, Homo sapien
gggaggaagataggcggccagatcc

SEQ ID NO: 2051036 - DNA, 25 bp, Homo sapien
aggatggaggagcatcaatactgaa

SEQ ID NO: 2051037 - DNA, 25 bp, Homo sapien
tcagaatacttcttagctggcttaa

SEQ ID NO: 2051038 - DNA, 25 bp, Homo sapien
tcttagctggcttaaaggatggagg

SEQ ID NO: 2051039 - DNA, 25 bp, Homo sapien
ctggcttaaaggatggaggagcatc

SEQ ID NO: 2051040 - DNA, 25 bp, Homo sapien
cctttcagaagcgaggatttgtttc

SEQ ID NO: 2051041 - DNA, 25 bp, Homo sapien
tcgttcagttgccacggcaatgccc

SEQ ID NO: 2051042 - DNA, 25 bp, Homo sapien
agttaggatcgttcagttgccacgg

SEQ ID NO: 2051043 - DNA, 25 bp, Homo sapien
tttcagaagcgaggatttgtttcag

SEQ ID NO: 2051044 - DNA, 25 bp, Homo sapien
tgtgttctactccacagcacaacag

SEQ ID NO: 2051045 - DNA, 25 bp, Homo sapien
taccagtctcaagaatgaaaggaag

SEQ ID NO: 2051046 - DNA, 25 bp, Homo sapien
gaactgctgcagtttattaccagtc

SEQ ID NO: 2051047 - DNA, 25 bp, Homo sapien
gggaacaatcatcatggaaatgtcc

SEQ ID NO: 2051048 - DNA, 25 bp, Homo sapien
caaagttgggatccttaaatggcaa

SEQ ID NO: 2051049 - DNA, 25 bp, Homo sapien
cacaaagttgggatccttaaatggc

SEQ ID NO: 2051050 - DNA, 25 bp, Homo sapien
caggtcctgtgctaaactcagaggg

SEQ ID NO: 2051051 - DNA, 25 bp, Homo sapien
ggtcctgtgctaaactcagagggca

SEQ ID NO: 2051052 - DNA, 25 bp, Homo sapien
gctctcaacagggcatacgatgatg

SEQ ID NO: 2051053 - DNA, 25 bp, Homo sapien
ctctcaacagggcatacgatgatgc

SEQ ID NO: 2051054 - DNA, 25 bp, Homo sapien
tctcaacagggcatacgatgatgcc

SEQ ID NO: 2051055 - DNA, 25 bp, Homo sapien
tcatggcggaaggcaagaggcacgt

SEQ ID NO: 2051056 - DNA, 25 bp, Homo sapien
atcatggcggaaggcaagaggcacg

SEQ ID NO: 2051057 - DNA, 25 bp, Homo sapien
atttccacgcggctggggaggcctc

SEQ ID NO: 2051058 - DNA, 25 bp, Homo sapien
gtgagggcacagccaaactatcatt

SEQ ID NO: 2051059 - DNA, 25 bp, Homo sapien
ggtgagggcacagccaaactatcat

SEQ ID NO: 2051060 - DNA, 25 bp, Homo sapien
gccaaactatcattccgcccccggc

SEQ ID NO: 2051061 - DNA, 25 bp, Homo sapien
gggtatctttacatacagcagcaac

SEQ ID NO: 2051062 - DNA, 25 bp, Homo sapien
tctttacatacagcagcaacccact

SEQ ID NO: 2051063 - DNA, 25 bp, Homo sapien
gcagcaacccactctaccggtacca

SEQ ID NO: 2051064 - DNA, 25 bp, Homo sapien
ttttcgggtatctttacatacagca

SEQ ID NO: 2051065 - DNA, 25 bp, Homo sapien
acaatcatggtggaaggcgaaaggc

SEQ ID NO: 2051066 - DNA, 25 bp, Homo sapien
atcatggtggaaggcgaaaggcacg

SEQ ID NO: 2051067 - DNA, 25 bp, Homo sapien
tcatggtggaaggcgaaaggcacgt

SEQ ID NO: 2051068 - DNA, 25 bp, Homo sapien
cacaatcatggtggaaggcgaaagg

SEQ ID NO: 2051069 - DNA, 25 bp, Homo sapien
taaaaagactaaggaagtgttctga

SEQ ID NO: 2051070 - DNA, 25 bp, Homo sapien
gattacaggagactaaaaagatatg

SEQ ID NO: 2051071 - DNA, 25 bp, Homo sapien
catgatttagttatatcacactggg

SEQ ID NO: 2051072 - DNA, 25 bp, Homo sapien
gattctgaaccagataagggacaag

SEQ ID NO: 2051073 - DNA, 25 bp, Homo sapien
cagccagtattcttgaaaatttgtg

SEQ ID NO: 2051074 - DNA, 25 bp, Homo sapien
ccagtattcttgaaaatttgtgcat

SEQ ID NO: 2051075 - DNA, 25 bp, Homo sapien
ggattcttgaagatctgtggttcag

SEQ ID NO: 2051076 - DNA, 25 bp, Homo sapien
attcttgaagatctgtggttcagcc

SEQ ID NO: 2051077 - DNA, 25 bp, Homo sapien
tgtaagcccatgtgtccaaacgaag

SEQ ID NO: 2051078 - DNA, 25 bp, Homo sapien
ccaaacgaagggaaagagtagtcat

SEQ ID NO: 2051079 - DNA, 25 bp, Homo sapien
tcttctctccttacaacacaaggcg

SEQ ID NO: 2051080 - DNA, 25 bp, Homo sapien
tagtcattcactccgcggggcagcg

SEQ ID NO: 2051081 - DNA, 25 bp, Homo sapien
ccacaattggaatttgcgccgccat

SEQ ID NO: 2051082 - DNA, 25 bp, Homo sapien
tgttccggactattccgggagtgga

SEQ ID NO: 2051083 - DNA, 25 bp, Homo sapien
tttcttcttactggcgccatagccc

SEQ ID NO: 2051084 - DNA, 25 bp, Homo sapien
gctggaagcggacgcttttttcttc

SEQ ID NO: 2051085 - DNA, 25 bp, Homo sapien
ccggcctggactccaagctgtagct

SEQ ID NO: 2051086 - DNA, 25 bp, Homo sapien
ggcctggactccaagctgtagctgg

SEQ ID NO: 2051087 - DNA, 25 bp, Homo sapien
cctttccgctgttacttccgtcttg

SEQ ID NO: 2051088 - DNA, 25 bp, Homo sapien
ttgatgcttgaaaacccggcctgga

SEQ ID NO: 2051089 - DNA, 25 bp, Homo sapien
cgtcgggacgggaagatgtcagcgg

SEQ ID NO: 2051090 - DNA, 25 bp, Homo sapien
agatgtcagcgggcgttgtcctgcc

SEQ ID NO: 2051091 - DNA, 25 bp, Homo sapien
aagatgtcagcgggcgttgtcctgc

SEQ ID NO: 2051092 - DNA, 25 bp, Homo sapien
ctgtgccgtcgggacgggaagatgt

SEQ ID NO: 2051093 - DNA, 25 bp, Homo sapien
agcctccagatggacgtttcggccg

SEQ ID NO: 2051094 - DNA, 25 bp, Homo sapien
tccagatggacgtttcggccgccat

SEQ ID NO: 2051095 - DNA, 25 bp, Homo sapien
catgtctacatctcagcaacagcct

SEQ ID NO: 2051096 - DNA, 25 bp, Homo sapien
attcctcacctcctcagctcgcttc

SEQ ID NO: 2051097 - DNA, 25 bp, Homo sapien
cacactggctgccagaatgggattt

SEQ ID NO: 2051098 - DNA, 25 bp, Homo sapien
ttcacactggctgccagaatgggat

SEQ ID NO: 2051099 - DNA, 25 bp, Homo sapien
tcacactggctgccagaatgggatt

SEQ ID NO: 2051100 - DNA, 25 bp, Homo sapien
cttcacactggctgccagaatggga

SEQ ID NO: 2051101 - DNA, 25 bp, Homo sapien
cttacattcttcagggcccttttgc

SEQ ID NO: 2051102 - DNA, 25 bp, Homo sapien
ttacattcttcagggcccttttgcc

SEQ ID NO: 2051103 - DNA, 25 bp, Homo sapien
tacattcttcagggcccttttgcct

SEQ ID NO: 2051104 - DNA, 25 bp, Homo sapien
tcttacattcttcagggcccttttg

SEQ ID NO: 2051105 - DNA, 25 bp, Homo sapien
tattcctgaaaacttgcagggtgtg

SEQ ID NO: 2051106 - DNA, 25 bp, Homo sapien
agttattcctgaaaacttgcagggt

SEQ ID NO: 2051107 - DNA, 25 bp, Homo sapien
tcctgaaaacttgcagggtgtgtct

SEQ ID NO: 2051108 - DNA, 25 bp, Homo sapien
ctgaaaacttgcagggtgtgtctca

SEQ ID NO: 2051109 - DNA, 25 bp, Homo sapien
ccctgccgtagtgtgcgccctctct

SEQ ID NO: 2051110 - DNA, 25 bp, Homo sapien
gctcctgtttccctcaccaatgcca

SEQ ID NO: 2051111 - DNA, 25 bp, Homo sapien
gtagtgtgcgccctctcttgcactt

SEQ ID NO: 2051112 - DNA, 25 bp, Homo sapien
ctgccgtagtgtgcgccctctcttg

SEQ ID NO: 2051113 - DNA, 25 bp, Homo sapien
tctgggcactggtcgtccctttctc

SEQ ID NO: 2051114 - DNA, 25 bp, Homo sapien
tttctctcttaccagaggtcccacc

SEQ ID NO: 2051115 - DNA, 25 bp, Homo sapien
ggcactggtcgtccctttctctctt

SEQ ID NO: 2051116 - DNA, 25 bp, Homo sapien
ctctcttaccagaggtcccacccat

SEQ ID NO: 2051117 - DNA, 25 bp, Homo sapien
catgttcacattttatgaggctcat

SEQ ID NO: 2051118 - DNA, 25 bp, Homo sapien
ttttatgaggctcatctttccagcc

SEQ ID NO: 2051119 - DNA, 25 bp, Homo sapien
cacattttatgaggctcatctttcc

SEQ ID NO: 2051120 - DNA, 25 bp, Homo sapien
tatgaggctcatctttccagccttg

SEQ ID NO: 2051121 - DNA, 25 bp, Homo sapien
cctgcctccacgctgtgatgagtgc

SEQ ID NO: 2051122 - DNA, 25 bp, Homo sapien
tcgctgctggggcacactgagaggt

SEQ ID NO: 2051123 - DNA, 25 bp, Homo sapien
actcctgcctccacgctgtgatgag

SEQ ID NO: 2051124 - DNA, 25 bp, Homo sapien
ctcctgcctccacgctgtgatgagt

SEQ ID NO: 2051125 - DNA, 25 bp, Homo sapien
tcagcatctgtttgttcactgtcca

SEQ ID NO: 2051126 - DNA, 25 bp, Homo sapien
tctcagcatctgtttgttcactgtc

SEQ ID NO: 2051127 - DNA, 25 bp, Homo sapien
tcatctcagcatctgtttgttcact

SEQ ID NO: 2051128 - DNA, 25 bp, Homo sapien
catctcagcatctgtttgttcactg

SEQ ID NO: 2051129 - DNA, 25 bp, Homo sapien
tggctgcatccaggtctttctttag

SEQ ID NO: 2051130 - DNA, 25 bp, Homo sapien
ggctgcatccaggtctttctttagg

SEQ ID NO: 2051131 - DNA, 25 bp, Homo sapien
gctgcatccaggtctttctttaggt

SEQ ID NO: 2051132 - DNA, 25 bp, Homo sapien
gctggctgcatccaggtctttcttt

SEQ ID NO: 2051133 - DNA, 25 bp, Homo sapien
gttgtgtctgtatactgtggcaaaa

SEQ ID NO: 2051134 - DNA, 25 bp, Homo sapien
cttgtgcttgatctcgtatacttta

SEQ ID NO: 2051135 - DNA, 25 bp, Homo sapien
tctcgtatactttaggcaagtgtga

SEQ ID NO: 2051136 - DNA, 25 bp, Homo sapien
ctttaggcaagtgtgatgttgtgtc

SEQ ID NO: 2051137 - DNA, 25 bp, Homo sapien
aacttggcaacggtcactgcgggct

SEQ ID NO: 2051138 - DNA, 25 bp, Homo sapien
tcccaacttggcaacggtcactgcg

SEQ ID NO: 2051139 - DNA, 25 bp, Homo sapien
ttggcaacggtcactgcgggctctg

SEQ ID NO: 2051140 - DNA, 25 bp, Homo sapien
ccaacttggcaacggtcactgcggg

SEQ ID NO: 2051141 - DNA, 25 bp, Homo sapien
catgacagcgatgatgtctacgggc

SEQ ID NO: 2051142 - DNA, 25 bp, Homo sapien
aatttgcgttctcttgttcctgggc

SEQ ID NO: 2051143 - DNA, 25 bp, Homo sapien
gctatgagacgaagaagtgcatgca

SEQ ID NO: 2051144 - DNA, 25 bp, Homo sapien
gttcctgggcctcacaacagtgagt

SEQ ID NO: 2051145 - DNA, 25 bp, Homo sapien
caaacagtccccgttctgcaagggc

SEQ ID NO: 2051146 - DNA, 25 bp, Homo sapien
tccgggcactgtgcgggagccactt

SEQ ID NO: 2051147 - DNA, 25 bp, Homo sapien
aaaagaatggttggttatgcctcgc

SEQ ID NO: 2051148 - DNA, 25 bp, Homo sapien
gaattgtaccaagcagtgtttccca

SEQ ID NO: 2051149 - DNA, 25 bp, Homo sapien
tattttggataaagacctggtttca

SEQ ID NO: 2051150 - DNA, 25 bp, Homo sapien
cattggatggatagtttacaggtgt

SEQ ID NO: 2051151 - DNA, 25 bp, Homo sapien
gagccattacgcctagccagattta

SEQ ID NO: 2051152 - DNA, 25 bp, Homo sapien
tgtgctcccatttgcctacatttac

SEQ ID NO: 2051153 - DNA, 25 bp, Homo sapien
tagacctaagctaggcatctcttgc

SEQ ID NO: 2051154 - DNA, 25 bp, Homo sapien
tgtgctaacagtctatcccaaaacc

SEQ ID NO: 2051155 - DNA, 25 bp, Homo sapien
aaatcagtagctttaaggtgcttgc

SEQ ID NO: 2051156 - DNA, 25 bp, Homo sapien
gcagttctggcgaaacaattatgaa

SEQ ID NO: 2051157 - DNA, 25 bp, Homo sapien
tctctgtggcagttagcatcgtctc

SEQ ID NO: 2051158 - DNA, 25 bp, Homo sapien
ctccacattcatggtagcttgctga

SEQ ID NO: 2051159 - DNA, 25 bp, Homo sapien
ggcagttagcatcgtctcagactcc

SEQ ID NO: 2051160 - DNA, 25 bp, Homo sapien
tcctcctttgtattggcaccactct

SEQ ID NO: 2051161 - DNA, 25 bp, Homo sapien
ctggcctttgcttttcagactcttt

SEQ ID NO: 2051162 - DNA, 25 bp, Homo sapien
ctttgcttttcagactctttagcat

SEQ ID NO: 2051163 - DNA, 25 bp, Homo sapien
gcctttgcttttcagactctttagc

SEQ ID NO: 2051164 - DNA, 25 bp, Homo sapien
ggcctttgcttttcagactctttag

SEQ ID NO: 2051165 - DNA, 25 bp, Homo sapien
ttcattgagaatgcacctggttacc

SEQ ID NO: 2051166 - DNA, 25 bp, Homo sapien
ggccatagttgctgggtctgaccca

SEQ ID NO: 2051167 - DNA, 25 bp, Homo sapien
caagcgatggatgaacggatgcact

SEQ ID NO: 2051168 - DNA, 25 bp, Homo sapien
taacctaagcgttcaggcacagggt

SEQ ID NO: 2051169 - DNA, 25 bp, Homo sapien
gcagagtcactactaccactgagta

SEQ ID NO: 2051170 - DNA, 25 bp, Homo sapien
tgaaagctgccaatacacagtcctt

SEQ ID NO: 2051171 - DNA, 25 bp, Homo sapien
tgcctaggaggtagcgcagagtcac

SEQ ID NO: 2051172 - DNA, 25 bp, Homo sapien
caccagtttttggacattgaacagc

SEQ ID NO: 2051173 - DNA, 25 bp, Homo sapien
cagcttcagaagaggagtcttgctt

SEQ ID NO: 2051174 - DNA, 25 bp, Homo sapien
ctgacaggcgattacagttgagact

SEQ ID NO: 2051175 - DNA, 25 bp, Homo sapien
gataagaagttacttcaacagcttc

SEQ ID NO: 2051176 - DNA, 25 bp, Homo sapien
ccctagggtagagtgttcgataaga

SEQ ID NO: 2051177 - DNA, 25 bp, Homo sapien
tctatttgctaggacttaatccctc

SEQ ID NO: 2051178 - DNA, 25 bp, Homo sapien
tatataattacatgtcagaaggaat

SEQ ID NO: 2051179 - DNA, 25 bp, Homo sapien
gagagcagttaagaataccacacgt

SEQ ID NO: 2051180 - DNA, 25 bp, Homo sapien
aaccttatgtggataatctatttgc

SEQ ID NO: 2051181 - DNA, 25 bp, Homo sapien
ctttgagagactgtacaggccgatt

SEQ ID NO: 2051182 - DNA, 25 bp, Homo sapien
ggaaagtcaatatcataagagtatc

SEQ ID NO: 2051183 - DNA, 25 bp, Homo sapien
ggccgattctagcattgatacggaa

SEQ ID NO: 2051184 - DNA, 25 bp, Homo sapien
gaaattcacgaaaaaatcttgagag

SEQ ID NO: 2051185 - DNA, 25 bp, Homo sapien
cagtcccttgaagattaaagtctta

SEQ ID NO: 2051186 - DNA, 25 bp, Homo sapien
tatcatagttaaaatcagtcccttg

SEQ ID NO: 2051187 - DNA, 25 bp, Homo sapien
gtggtgttatgtgatcccagccgtg

SEQ ID NO: 2051188 - DNA, 25 bp, Homo sapien
gcagtggcccctgattgcactactg

SEQ ID NO: 2051189 - DNA, 25 bp, Homo sapien
tacttttgagtacatggcaggctct

SEQ ID NO: 2051190 - DNA, 25 bp, Homo sapien
ggcaggctctgatatgacctatggt

SEQ ID NO: 2051191 - DNA, 25 bp, Homo sapien
gaacagtggtgtgtcccatcatcga

SEQ ID NO: 2051192 - DNA, 25 bp, Homo sapien
cctatggtgggttcaactggaagct

SEQ ID NO: 2051193 - DNA, 25 bp, Homo sapien
ttaaccatgagccacattaataaat

SEQ ID NO: 2051194 - DNA, 25 bp, Homo sapien
aatggatctagttgagattcctagg

SEQ ID NO: 2051195 - DNA, 25 bp, Homo sapien
agttgagattcctaggttctgtttc

SEQ ID NO: 2051196 - DNA, 25 bp, Homo sapien
gtttcatgtacaagccgtgacgcag

SEQ ID NO: 2051197 - DNA, 25 bp, Homo sapien
tagaacatccttaagagctagtcct

SEQ ID NO: 2051198 - DNA, 25 bp, Homo sapien
cctgatgactactgaatatgttacc

SEQ ID NO: 2051199 - DNA, 25 bp, Homo sapien
tagctgtagactgtgtgtacaccaa

SEQ ID NO: 2051200 - DNA, 25 bp, Homo sapien
tatgttaccaaacaaggctcacttc

SEQ ID NO: 2051201 - DNA, 25 bp, Homo sapien
tgctcttgggtcaactggcttacag

SEQ ID NO: 2051202 - DNA, 25 bp, Homo sapien
aagattcatgctactgtaccacaga

SEQ ID NO: 2051203 - DNA, 25 bp, Homo sapien
attccacttaacaaaaggcctgcag

SEQ ID NO: 2051204 - DNA, 25 bp, Homo sapien
cctaactgattatgcgaaataccca

SEQ ID NO: 2051205 - DNA, 25 bp, Homo sapien
tccaaaagtcgcatcgctaatgata

SEQ ID NO: 2051206 - DNA, 25 bp, Homo sapien
ccttttaatctcgtaggaggaatct

SEQ ID NO: 2051207 - DNA, 25 bp, Homo sapien
gaatcacctgagtgtcaattgaaag

SEQ ID NO: 2051208 - DNA, 25 bp, Homo sapien
gatatttgccaagttgagtgtacac

SEQ ID NO: 2051209 - DNA, 25 bp, Homo sapien
tggatagtgatttctctgatagacc

SEQ ID NO: 2051210 - DNA, 25 bp, Homo sapien
tcaaataccaacacgaacaggagtt

SEQ ID NO: 2051211 - DNA, 25 bp, Homo sapien
tgagatgaaatcctcgtggtgaaaa

SEQ ID NO: 2051212 - DNA, 25 bp, Homo sapien
gaggaaatacctgcagatgtagaaa

SEQ ID NO: 2051213 - DNA, 25 bp, Homo sapien
gaacaacattggagtactcacaccc

SEQ ID NO: 2051214 - DNA, 25 bp, Homo sapien
agatttacggtcttactacaaagct

SEQ ID NO: 2051215 - DNA, 25 bp, Homo sapien
tgaggatagtcatatagatcaactg

SEQ ID NO: 2051216 - DNA, 25 bp, Homo sapien
aatagagaaagccaacattgcactg

SEQ ID NO: 2051217 - DNA, 25 bp, Homo sapien
tccacagattcagatggccaaaacc

SEQ ID NO: 2051218 - DNA, 25 bp, Homo sapien
aatccacagattcagatggccaaaa

SEQ ID NO: 2051219 - DNA, 25 bp, Homo sapien
gaatccacagattcagatggccaaa

SEQ ID NO: 2051220 - DNA, 25 bp, Homo sapien
atccacagattcagatggccaaaac

SEQ ID NO: 2051221 - DNA, 25 bp, Homo sapien
gaaaggcccagccttaagttcatca

SEQ ID NO: 2051222 - DNA, 25 bp, Homo sapien
agaaaggcccagccttaagttcatc

SEQ ID NO: 2051223 - DNA, 25 bp, Homo sapien
ttaagttcatcagcaatagttgcat

SEQ ID NO: 2051224 - DNA, 25 bp, Homo sapien
aaaggcccagccttaagttcatcag

SEQ ID NO: 2051225 - DNA, 25 bp, Homo sapien
gccctggcataaacgagctccaggt

SEQ ID NO: 2051226 - DNA, 25 bp, Homo sapien
aaggccctggcataaacgagctcca

SEQ ID NO: 2051227 - DNA, 25 bp, Homo sapien
ccaaggccctggcataaacgagctc

SEQ ID NO: 2051228 - DNA, 25 bp, Homo sapien
aggccctggcataaacgagctccag

SEQ ID NO: 2051229 - DNA, 25 bp, Homo sapien
ggcagctttgggcattgcagatgtt

SEQ ID NO: 2051230 - DNA, 25 bp, Homo sapien
gcattgcagatgtttggccagggcc

SEQ ID NO: 2051231 - DNA, 25 bp, Homo sapien
ctagcggatgcctagaagggcagct

SEQ ID NO: 2051232 - DNA, 25 bp, Homo sapien
gatgtttggccagggccaaaggcct

SEQ ID NO: 2051233 - DNA, 25 bp, Homo sapien
cataatgggctgagttgggatgtgg

SEQ ID NO: 2051234 - DNA, 25 bp, Homo sapien
gagctggattcatgttctctgtggt

SEQ ID NO: 2051235 - DNA, 25 bp, Homo sapien
gtggtttggtggtggcatggacggc

SEQ ID NO: 2051236 - DNA, 25 bp, Homo sapien
agcaggacacgtgaagagctggatt

SEQ ID NO: 2051237 - DNA, 25 bp, Homo sapien
atgcctggcctaaagggactggttt

SEQ ID NO: 2051238 - DNA, 25 bp, Homo sapien
gattacagtgggactagagttgtca

SEQ ID NO: 2051239 - DNA, 25 bp, Homo sapien
cctggtgactggatctcttggtaat

SEQ ID NO: 2051240 - DNA, 25 bp, Homo sapien
ggaagtggaggcaacctggtgactg

SEQ ID NO: 2051241 - DNA, 25 bp, Homo sapien
gattcgaccatcataaaccacagtg

SEQ ID NO: 2051242 - DNA, 25 bp, Homo sapien
gtagaaggatatacctgctgttgct

SEQ ID NO: 2051243 - DNA, 25 bp, Homo sapien
cacagtgaagcatctctgattttta

SEQ ID NO: 2051244 - DNA, 25 bp, Homo sapien
tctctgcatgaacaatctattctgt

SEQ ID NO: 2051245 - DNA, 25 bp, Homo sapien
tgactttgctcctctttcgtcttct

SEQ ID NO: 2051246 - DNA, 25 bp, Homo sapien
gctcccagcagatggtggcagttgt

SEQ ID NO: 2051247 - DNA, 25 bp, Homo sapien
ctggctcccagcagatggtggcagt

SEQ ID NO: 2051248 - DNA, 25 bp, Homo sapien
caggaaggactcgtagcctggctcc

SEQ ID NO: 2051249 - DNA, 25 bp, Homo sapien
ggaaggactcgtagcctggctccca

SEQ ID NO: 2051250 - DNA, 25 bp, Homo sapien
tgtgaatggcactagctgttcctgt

SEQ ID NO: 2051251 - DNA, 25 bp, Homo sapien
gggtgtgaatggcactagctgttcc

SEQ ID NO: 2051252 - DNA, 25 bp, Homo sapien
ggtgtgaatggcactagctgttcct

SEQ ID NO: 2051253 - DNA, 25 bp, Homo sapien
gaatggcactagctgttcctgttca

SEQ ID NO: 2051254 - DNA, 25 bp, Homo sapien
tctcagtctgattggagggtctcat

SEQ ID NO: 2051255 - DNA, 25 bp, Homo sapien
tcctctcagtctgattggagggtct

SEQ ID NO: 2051256 - DNA, 25 bp, Homo sapien
cagtcctctcagtctgattggaggg

SEQ ID NO: 2051257 - DNA, 25 bp, Homo sapien
aggacagtcctctcagtctgattgg

SEQ ID NO: 2051258 - DNA, 25 bp, Homo sapien
gctctccttactaacaggtaagttc

SEQ ID NO: 2051259 - DNA, 25 bp, Homo sapien
tctcaaactacttggtaagaattgg

SEQ ID NO: 2051260 - DNA, 25 bp, Homo sapien
tggcctttggatgaagaactttatt

SEQ ID NO: 2051261 - DNA, 25 bp, Homo sapien
ctaacaggtaagttctataatcata

SEQ ID NO: 2051262 - DNA, 25 bp, Homo sapien
gcccacctgagtcagccccatccag

SEQ ID NO: 2051263 - DNA, 25 bp, Homo sapien
aagagggcccacctgagtcagcccc

SEQ ID NO: 2051264 - DNA, 25 bp, Homo sapien
agggcccacctgagtcagccccatc

SEQ ID NO: 2051265 - DNA, 25 bp, Homo sapien
gccaagagggcccacctgagtcagc

SEQ ID NO: 2051266 - DNA, 25 bp, Homo sapien
aaattattgtccttgagtttcgttg

SEQ ID NO: 2051267 - DNA, 25 bp, Homo sapien
catgagcatgtgttttatgttggca

SEQ ID NO: 2051268 - DNA, 25 bp, Homo sapien
ccttgagtttcgttgattttatggc

SEQ ID NO: 2051269 - DNA, 25 bp, Homo sapien
gccatgagcatgtgttttatgttgg

SEQ ID NO: 2051270 - DNA, 25 bp, Homo sapien
ccactgtgtccaaccttaaaatctt

SEQ ID NO: 2051271 - DNA, 25 bp, Homo sapien
ccatgttgtagcagggatcacaact

SEQ ID NO: 2051272 - DNA, 25 bp, Homo sapien
gtagcagggatcacaactgtacttc

SEQ ID NO: 2051273 - DNA, 25 bp, Homo sapien
cactgtgtccaaccttaaaatcttt

SEQ ID NO: 2051274 - DNA, 25 bp, Homo sapien
cattagtttggatgtgctcatggaa

SEQ ID NO: 2051275 - DNA, 25 bp, Homo sapien
gtttggatgtgctcatggaaccatc

SEQ ID NO: 2051276 - DNA, 25 bp, Homo sapien
tctgtcattagtttggatgtgctca

SEQ ID NO: 2051277 - DNA, 25 bp, Homo sapien
catctgtcattagtttggatgtgct

SEQ ID NO: 2051278 - DNA, 25 bp, Homo sapien
cagacccaaagtaggctgtgtcacc

SEQ ID NO: 2051279 - DNA, 25 bp, Homo sapien
ggtctctgtgcagtcccctgtgtcg

SEQ ID NO: 2051280 - DNA, 25 bp, Homo sapien
ccctgtgtcgagtccctcaggacaa

SEQ ID NO: 2051281 - DNA, 25 bp, Homo sapien
gagtccctcaggacaagcggagcag

SEQ ID NO: 2051282 - DNA, 25 bp, Homo sapien
cagagcctggactttcccatggtct

SEQ ID NO: 2051283 - DNA, 25 bp, Homo sapien
ctgcaacacaagacacgaggggtca

SEQ ID NO: 2051284 - DNA, 25 bp, Homo sapien
agcagcgcccgggtcctgtgttgta

SEQ ID NO: 2051285 - DNA, 25 bp, Homo sapien
tcctgtgttgtagcccgaggtctca

SEQ ID NO: 2051286 - DNA, 25 bp, Homo sapien
tgtagcccgaggtctcacactgtgt

SEQ ID NO: 2051287 - DNA, 25 bp, Homo sapien
gggaatccgacttgctgtgcatccc

SEQ ID NO: 2051288 - DNA, 25 bp, Homo sapien
ggggaatccgacttgctgtgcatcc

SEQ ID NO: 2051289 - DNA, 25 bp, Homo sapien
cagaagtggagttgcattattgggt

SEQ ID NO: 2051290 - DNA, 25 bp, Homo sapien
gcagcagaagtggagttgcattatt

SEQ ID NO: 2051291 - DNA, 25 bp, Homo sapien
gtggagttgcattattgggttctgt

SEQ ID NO: 2051292 - DNA, 25 bp, Homo sapien
gaagtggagttgcattattgggttc

SEQ ID NO: 2051293 - DNA, 25 bp, Homo sapien
atgaacttgccagtgaggcaaatcc

SEQ ID NO: 2051294 - DNA, 25 bp, Homo sapien
tcccactcagtagatgaacccgtca

SEQ ID NO: 2051295 - DNA, 25 bp, Homo sapien
tcatctagatcccactcagtagatg

SEQ ID NO: 2051296 - DNA, 25 bp, Homo sapien
gtctcacaaaggatgaacttgccag

SEQ ID NO: 2051297 - DNA, 25 bp, Homo sapien
gcatagctccttgcatgttgcaggg

SEQ ID NO: 2051298 - DNA, 25 bp, Homo sapien
gcagtcacagaggtagcatagctcc

SEQ ID NO: 2051299 - DNA, 25 bp, Homo sapien
agcatagctccttgcatgttgcagg

SEQ ID NO: 2051300 - DNA, 25 bp, Homo sapien
tcacagaggtagcatagctccttgc

SEQ ID NO: 2051301 - DNA, 25 bp, Homo sapien
ctgaatgaacagaccaatcagtgag

SEQ ID NO: 2051302 - DNA, 25 bp, Homo sapien
tcctccctcaatgacattctgatag

SEQ ID NO: 2051303 - DNA, 25 bp, Homo sapien
tgacattctgatagagcttggaccc

SEQ ID NO: 2051304 - DNA, 25 bp, Homo sapien
tcaatgacattctgatagagcttgg

SEQ ID NO: 2051305 - DNA, 25 bp, Homo sapien
tctgatagagcttggaccctaccat

SEQ ID NO: 2051306 - DNA, 25 bp, Homo sapien
ataaaaataagtggcatgctgagaa

SEQ ID NO: 2051307 - DNA, 25 bp, Homo sapien
gataaaaataagtggcatgctgaga

SEQ ID NO: 2051308 - DNA, 25 bp, Homo sapien
aaaaataagtggcatgctgagaagt

SEQ ID NO: 2051309 - DNA, 25 bp, Homo sapien
aaataagtggcatgctgagaagtgc

SEQ ID NO: 2051310 - DNA, 25 bp, Homo sapien
tttaacaaatccatacaagcactag

SEQ ID NO: 2051311 - DNA, 25 bp, Homo sapien
aagaactgtgacctaaaatccagag

SEQ ID NO: 2051312 - DNA, 25 bp, Homo sapien
cttgggacaactaattaaccatttg

SEQ ID NO: 2051313 - DNA, 25 bp, Homo sapien
taacttgggtgtgaagaaagaactg

SEQ ID NO: 2051314 - DNA, 25 bp, Homo sapien
tcaaggaagtacaatgtgatcccag

SEQ ID NO: 2051315 - DNA, 25 bp, Homo sapien
agcagcaggagggcacactgagggc

SEQ ID NO: 2051316 - DNA, 25 bp, Homo sapien
agcccagaagccatggagatgaccc

SEQ ID NO: 2051317 - DNA, 25 bp, Homo sapien
gcccagaagccatggagatgaccca

SEQ ID NO: 2051318 - DNA, 25 bp, Homo sapien
catataagcatggcccctagaactg

SEQ ID NO: 2051319 - DNA, 25 bp, Homo sapien
cccagaagccatggagatgacccag

SEQ ID NO: 2051320 - DNA, 25 bp, Homo sapien
ggtggaagaggtgttaatggtgggc

SEQ ID NO: 2051321 - DNA, 25 bp, Homo sapien
ctgggtggaagaggtgttaatggtg

SEQ ID NO: 2051322 - DNA, 25 bp, Homo sapien
tggaagaggtgttaatggtgggcat

SEQ ID NO: 2051323 - DNA, 25 bp, Homo sapien
tgggtggaagaggtgttaatggtgg

SEQ ID NO: 2051324 - DNA, 25 bp, Homo sapien
tcatctggatcccactgggacccgg

SEQ ID NO: 2051325 - DNA, 25 bp, Homo sapien
ggcttgggcgtacgctcatctggat

SEQ ID NO: 2051326 - DNA, 25 bp, Homo sapien
ggcgtacgctcatctggatcccact

SEQ ID NO: 2051327 - DNA, 25 bp, Homo sapien
cccgcgggcttgggcgtacgctcat

SEQ ID NO: 2051328 - DNA, 25 bp, Homo sapien
gaggtgagggtcattccagcttcta

SEQ ID NO: 2051329 - DNA, 25 bp, Homo sapien
tcactcgggtaagactgagttccct

SEQ ID NO: 2051330 - DNA, 25 bp, Homo sapien
tacgttacacttctggaggtacagg

SEQ ID NO: 2051331 - DNA, 25 bp, Homo sapien
tacagggctcattgggccaaaatca

SEQ ID NO: 2051332 - DNA, 25 bp, Homo sapien
tgcactcccacctgggggatagagc

SEQ ID NO: 2051333 - DNA, 25 bp, Homo sapien
gcactcccacctgggggatagagca

SEQ ID NO: 2051334 - DNA, 25 bp, Homo sapien
ccactgcactcccacctgggggata

SEQ ID NO: 2051335 - DNA, 25 bp, Homo sapien
actgcactcccacctgggggataga

SEQ ID NO: 2051336 - DNA, 25 bp, Homo sapien
taaaatgctgcagccattacggaaa

SEQ ID NO: 2051337 - DNA, 25 bp, Homo sapien
gtaaaatgctgcagccattacggaa

SEQ ID NO: 2051338 - DNA, 25 bp, Homo sapien
gtatgtatccaaaaaacgtcaaagc

SEQ ID NO: 2051339 - DNA, 25 bp, Homo sapien
ccaaaaaacgtcaaagcaggatctc

SEQ ID NO: 2051340 - DNA, 25 bp, Homo sapien
cagcactggatcctggaccaccggg

SEQ ID NO: 2051341 - DNA, 25 bp, Homo sapien
gccgagcagcatgtgagatgggcac

SEQ ID NO: 2051342 - DNA, 25 bp, Homo sapien
agcactggatcctggaccaccgggc

SEQ ID NO: 2051343 - DNA, 25 bp, Homo sapien
ctgctggtgccgagcagcatgtgag

SEQ ID NO: 2051344 - DNA, 25 bp, Homo sapien
cacatattgcgtgagtgcacagatg

SEQ ID NO: 2051345 - DNA, 25 bp, Homo sapien
agaatccaggtgcactagcagatct

SEQ ID NO: 2051346 - DNA, 25 bp, Homo sapien
gcctccacgttccatgcacatattg

SEQ ID NO: 2051347 - DNA, 25 bp, Homo sapien
cagccaagctgagtaaagtttgttc

SEQ ID NO: 2051348 - DNA, 25 bp, Homo sapien
gaggatttgcctttcacctatctaa

SEQ ID NO: 2051349 - DNA, 25 bp, Homo sapien
gcaggactttttagaccacacagaa

SEQ ID NO: 2051350 - DNA, 25 bp, Homo sapien
tagttgcctaactttgacaaagcag

SEQ ID NO: 2051351 - DNA, 25 bp, Homo sapien
cagatccaataatgaaaagagtgac

SEQ ID NO: 2051352 - DNA, 25 bp, Homo sapien
gaattgttcaccttaaaatggtcaa

SEQ ID NO: 2051353 - DNA, 25 bp, Homo sapien
ctgcggcagggcaatcacaaaaggg

SEQ ID NO: 2051354 - DNA, 25 bp, Homo sapien
ggccgcctcgttgctggcagcgctt

SEQ ID NO: 2051355 - DNA, 25 bp, Homo sapien
aaacgctagcgtttacgcaggcgga

SEQ ID NO: 2051356 - DNA, 25 bp, Homo sapien
tttggactctatcgccacagcccgg

SEQ ID NO: 2051357 - DNA, 25 bp, Homo sapien
tgcctgagaggacccggcaggccaa

SEQ ID NO: 2051358 - DNA, 25 bp, Homo sapien
tctgactcgaaactccgctgggtgc

SEQ ID NO: 2051359 - DNA, 25 bp, Homo sapien
gctacgcccgagctcaagtctgact

SEQ ID NO: 2051360 - DNA, 25 bp, Homo sapien
cggcgatgagacagaagcactacct

SEQ ID NO: 2051361 - DNA, 25 bp, Homo sapien
cggcggcgatgagacagaagcacta

SEQ ID NO: 2051362 - DNA, 25 bp, Homo sapien
ctgcagcgcggggactgcacgacag

SEQ ID NO: 2051363 - DNA, 25 bp, Homo sapien
ggttcccgcggcgagccagcggcag

SEQ ID NO: 2051364 - DNA, 25 bp, Homo sapien
tgaatcccaaaagattccaaaggtg

SEQ ID NO: 2051365 - DNA, 25 bp, Homo sapien
tgttacttagtcagaatgaatccca

SEQ ID NO: 2051366 - DNA, 25 bp, Homo sapien
tggaaactagatctgaatgcaaact

SEQ ID NO: 2051367 - DNA, 25 bp, Homo sapien
cattagtgtgaatacctgaaacctg

SEQ ID NO: 2051368 - DNA, 25 bp, Homo sapien
aagaactaaggtcctttctgagcac

SEQ ID NO: 2051369 - DNA, 25 bp, Homo sapien
cacactaagaactaaggtcctttct

SEQ ID NO: 2051370 - DNA, 25 bp, Homo sapien
catttaataagttctacttcttcca

SEQ ID NO: 2051371 - DNA, 25 bp, Homo sapien
ttaataagttctacttcttccacac

SEQ ID NO: 2051372 - DNA, 25 bp, Homo sapien
caagatcgggatgcttttactcagg

SEQ ID NO: 2051373 - DNA, 25 bp, Homo sapien
tactcaggaacagtaatggtgctgc

SEQ ID NO: 2051374 - DNA, 25 bp, Homo sapien
gctgctacattagaccacgccagag

SEQ ID NO: 2051375 - DNA, 25 bp, Homo sapien
taaaccttggccagtaagctgtaag

SEQ ID NO: 2051376 - DNA, 25 bp, Homo sapien
tctcagtgagatggtgcatgaaaaa

SEQ ID NO: 2051377 - DNA, 25 bp, Homo sapien
aggtctcagtgagatggtgcatgaa

SEQ ID NO: 2051378 - DNA, 25 bp, Homo sapien
cagtgagatggtgcatgaaaaacac

SEQ ID NO: 2051379 - DNA, 25 bp, Homo sapien
cataaaaactttgttgaggtctcag

SEQ ID NO: 2051380 - DNA, 25 bp, Homo sapien
gaagacattaagtataataagtcag

SEQ ID NO: 2051381 - DNA, 25 bp, Homo sapien
gtgaggtacctctagaagtcaaatt

SEQ ID NO: 2051382 - DNA, 25 bp, Homo sapien
tatgtgaggtacctctagaagtcaa

SEQ ID NO: 2051383 - DNA, 25 bp, Homo sapien
taagtataataagtcagtcctaaaa

SEQ ID NO: 2051384 - DNA, 25 bp, Homo sapien
tattaagaacatcttatactgtcat

SEQ ID NO: 2051385 - DNA, 25 bp, Homo sapien
ttattaagaacatcttatactgtca

SEQ ID NO: 2051386 - DNA, 25 bp, Homo sapien
ctttattaagaacatcttatactgt

SEQ ID NO: 2051387 - DNA, 25 bp, Homo sapien
attaagaacatcttatactgtcatc

SEQ ID NO: 2051388 - DNA, 25 bp, Homo sapien
tatagaaaaaccctgattcagagtg

SEQ ID NO: 2051389 - DNA, 25 bp, Homo sapien
cagagtgcatgtgataggagatacc

SEQ ID NO: 2051390 - DNA, 25 bp, Homo sapien
tcagattcctggttcccctctatgg

SEQ ID NO: 2051391 - DNA, 25 bp, Homo sapien
gaaacaagactacatccttaggagc

SEQ ID NO: 2051392 - DNA, 25 bp, Homo sapien
aaggagagaaggagcgcccgagaat

SEQ ID NO: 2051393 - DNA, 25 bp, Homo sapien
gagcgcccgagaatctgttcagatt

SEQ ID NO: 2051394 - DNA, 25 bp, Homo sapien
gaaggagcgcccgagaatctgttca

SEQ ID NO: 2051395 - DNA, 25 bp, Homo sapien
cgcccgagaatctgttcagattgtg

SEQ ID NO: 2051396 - DNA, 25 bp, Homo sapien
tacacctagggacagaggtacacag

SEQ ID NO: 2051397 - DNA, 25 bp, Homo sapien
ttctgtgagaaaatgcaccccaagt

SEQ ID NO: 2051398 - DNA, 25 bp, Homo sapien
tatcagcggtagtgttagggaacct

SEQ ID NO: 2051399 - DNA, 25 bp, Homo sapien
agttcccaggtgagctatcagcggt

SEQ ID NO: 2051400 - DNA, 25 bp, Homo sapien
ggctactttactgaacattaacgaa

SEQ ID NO: 2051401 - DNA, 25 bp, Homo sapien
caaacagtttaatcaagggagtcac

SEQ ID NO: 2051402 - DNA, 25 bp, Homo sapien
aactgctctaacacacagggtcaga

SEQ ID NO: 2051403 - DNA, 25 bp, Homo sapien
ccccttcaggaattacatagtatac

SEQ ID NO: 2051404 - DNA, 25 bp, Homo sapien
gtctccatctcttgcaaagtcctgg

SEQ ID NO: 2051405 - DNA, 25 bp, Homo sapien
atctcttgcaaagtcctgggacctg

SEQ ID NO: 2051406 - DNA, 25 bp, Homo sapien
tgtctccatctcttgcaaagtcctg

SEQ ID NO: 2051407 - DNA, 25 bp, Homo sapien
tccatctcttgcaaagtcctgggac

SEQ ID NO: 2051408 - DNA, 25 bp, Homo sapien
tcactgtagatgtctcccgcaaagg

SEQ ID NO: 2051409 - DNA, 25 bp, Homo sapien
caatcgagataagtctggcaggctc

SEQ ID NO: 2051410 - DNA, 25 bp, Homo sapien
aactctggctagcttgcgcttgtac

SEQ ID NO: 2051411 - DNA, 25 bp, Homo sapien
gatccgggacctgagttctttgcgc

SEQ ID NO: 2051412 - DNA, 25 bp, Homo sapien
gaaacccagctaggagtttactgca

SEQ ID NO: 2051413 - DNA, 25 bp, Homo sapien
gcttcataagcaggtggatatcgga

SEQ ID NO: 2051414 - DNA, 25 bp, Homo sapien
gaggaccatcctagagagtgcatag

SEQ ID NO: 2051415 - DNA, 25 bp, Homo sapien
tcacaggtaagtcctgagaggacca

SEQ ID NO: 2051416 - DNA, 25 bp, Homo sapien
ggttcattaacaccaggcaccatgt

SEQ ID NO: 2051417 - DNA, 25 bp, Homo sapien
tatttctggtcaaatgatacgacat

SEQ ID NO: 2051418 - DNA, 25 bp, Homo sapien
aactgaagataacacgctggtttcc

SEQ ID NO: 2051419 - DNA, 25 bp, Homo sapien
ggcatcattattcccgttccataga

SEQ ID NO: 2051420 - DNA, 25 bp, Homo sapien
ctgtccaggataccaatttctttcc

SEQ ID NO: 2051421 - DNA, 25 bp, Homo sapien
tgtccaggataccaatttctttcca

SEQ ID NO: 2051422 - DNA, 25 bp, Homo sapien
gtccaggataccaatttctttccat

SEQ ID NO: 2051423 - DNA, 25 bp, Homo sapien
tttggcttggtatctaatcctggaa

SEQ ID NO: 2051424 - DNA, 25 bp, Homo sapien
ccttgactgcagaagttttaccttt

SEQ ID NO: 2051425 - DNA, 25 bp, Homo sapien
aagatctcagtggtttgccctcacc

SEQ ID NO: 2051426 - DNA, 25 bp, Homo sapien
tcagggcgtttctgagactgcagat

SEQ ID NO: 2051427 - DNA, 25 bp, Homo sapien
accaataaattacaatggcacactg

SEQ ID NO: 2051428 - DNA, 25 bp, Homo sapien
tattgttaccaatgatagcactcca

SEQ ID NO: 2051429 - DNA, 25 bp, Homo sapien
gaatcttacttcaaaagctaggagg

SEQ ID NO: 2051430 - DNA, 25 bp, Homo sapien
gcacccagacaaattctagctctaa

SEQ ID NO: 2051431 - DNA, 25 bp, Homo sapien
tcacatacaatggagtttaagtgcc

SEQ ID NO: 2051432 - DNA, 25 bp, Homo sapien
tttaagtgccatggcagggttttat

SEQ ID NO: 2051433 - DNA, 25 bp, Homo sapien
tagcatctacctatgacaatcacag

SEQ ID NO: 2051434 - DNA, 25 bp, Homo sapien
tcaaatttcccttaaagacagtatg

SEQ ID NO: 2051435 - DNA, 25 bp, Homo sapien
gaataaaatctagcaggctaagccc

SEQ ID NO: 2051436 - DNA, 25 bp, Homo sapien
taacaatgccggaatacagacagaa

SEQ ID NO: 2051437 - DNA, 25 bp, Homo sapien
tattggaggcttcaagggcagcatc

SEQ ID NO: 2051438 - DNA, 25 bp, Homo sapien
gaacctgacaatcctagaactccta

SEQ ID NO: 2051439 - DNA, 25 bp, Homo sapien
tcatctggcctatatgacacctgct

SEQ ID NO: 2051440 - DNA, 25 bp, Homo sapien
gaattatctacaagggatctccaac

SEQ ID NO: 2051441 - DNA, 25 bp, Homo sapien
ggtcagaactatcccatgatggcgt

SEQ ID NO: 2051442 - DNA, 25 bp, Homo sapien
tcacatatcaactagcaagcaggtc

SEQ ID NO: 2051443 - DNA, 25 bp, Homo sapien
caacatggattatcccagcaactgg

SEQ ID NO: 2051444 - DNA, 25 bp, Homo sapien
ttccactgcaatggagtcactgtgt

SEQ ID NO: 2051445 - DNA, 25 bp, Homo sapien
tgctacctggcccaagaaaggagga

SEQ ID NO: 2051446 - DNA, 25 bp, Homo sapien
tcctgcttctaggtgtctcacttct

SEQ ID NO: 2051447 - DNA, 25 bp, Homo sapien
cataaagtcggtacaattattatcc

SEQ ID NO: 2051448 - DNA, 25 bp, Homo sapien
tgtggcagttttaagcacccaactc

SEQ ID NO: 2051449 - DNA, 25 bp, Homo sapien
ctgaggtatttactgtatgtgtggc

SEQ ID NO: 2051450 - DNA, 25 bp, Homo sapien
tcacttaaatcccataataaccaca

SEQ ID NO: 2051451 - DNA, 25 bp, Homo sapien
ggtatccggaatagccaaattcaga

SEQ ID NO: 2051452 - DNA, 25 bp, Homo sapien
tattaccaaactgtcctccacagag

SEQ ID NO: 2051453 - DNA, 25 bp, Homo sapien
catccctgtgcacccagaatttggt

SEQ ID NO: 2051454 - DNA, 25 bp, Homo sapien
caagtatacagccatggacaaatga

SEQ ID NO: 2051455 - DNA, 25 bp, Homo sapien
ttgatgagtttctaaagaggagtgt

SEQ ID NO: 2051456 - DNA, 25 bp, Homo sapien
attgatgagtttctaaagaggagtg

SEQ ID NO: 2051457 - DNA, 25 bp, Homo sapien
gaggaattctggatatgttccggac

SEQ ID NO: 2051458 - DNA, 25 bp, Homo sapien
ccgaaagtaatgtaattcatcctga

SEQ ID NO: 2051459 - DNA, 25 bp, Homo sapien
gatatgttccggactttgcagtacc

SEQ ID NO: 2051460 - DNA, 25 bp, Homo sapien
gctgcaacaggaaataatgaccgaa

SEQ ID NO: 2051461 - DNA, 25 bp, Homo sapien
gcttctttgaaacatccacagagct

SEQ ID NO: 2051462 - DNA, 25 bp, Homo sapien
aacagggctaagtcttttgcttaag

SEQ ID NO: 2051463 - DNA, 25 bp, Homo sapien
aattggccaggcattgtgaggtaca

SEQ ID NO: 2051464 - DNA, 25 bp, Homo sapien
taagctgagtttgtggcaacccggc

SEQ ID NO: 2051465 - DNA, 25 bp, Homo sapien
aacagttatctgcttctgcttagta

SEQ ID NO: 2051466 - DNA, 25 bp, Homo sapien
tgcttctgcttagtaaccaactata

SEQ ID NO: 2051467 - DNA, 25 bp, Homo sapien
acacccggcccaacagttatctgct

SEQ ID NO: 2051468 - DNA, 25 bp, Homo sapien
ggcccaacagttatctgcttctgct

SEQ ID NO: 2051469 - DNA, 25 bp, Homo sapien
gacacatcagtatctggtcaaccac

SEQ ID NO: 2051470 - DNA, 25 bp, Homo sapien
tcaacttcaaagtgatgccacctac

SEQ ID NO: 2051471 - DNA, 25 bp, Homo sapien
tgaaatggccaattcccgaactgat

SEQ ID NO: 2051472 - DNA, 25 bp, Homo sapien
ggcagattctctgcgttccaaacaa

SEQ ID NO: 2051473 - DNA, 25 bp, Homo sapien
ggaagaatatactaatggtgacgac

SEQ ID NO: 2051474 - DNA, 25 bp, Homo sapien
taatggtgacgacatcgttagaaga

SEQ ID NO: 2051475 - DNA, 25 bp, Homo sapien
tgacgacatcgttagaagatacgcc

SEQ ID NO: 2051476 - DNA, 25 bp, Homo sapien
cgttagaagatacgcccatgtccaa

SEQ ID NO: 2051477 - DNA, 25 bp, Homo sapien
tcctttccatgtagaagtgggcaac

SEQ ID NO: 2051478 - DNA, 25 bp, Homo sapien
aatttctgcctaagagtgtgagccg

SEQ ID NO: 2051479 - DNA, 25 bp, Homo sapien
taatacaaggagaagcttacctggg

SEQ ID NO: 2051480 - DNA, 25 bp, Homo sapien
cctgggctactgcttaaaaaggtct

SEQ ID NO: 2051481 - DNA, 25 bp, Homo sapien
cgagtgagttgctttctatcatcta

SEQ ID NO: 2051482 - DNA, 25 bp, Homo sapien
aatctgccagcaacatacacgcatc

SEQ ID NO: 2051483 - DNA, 25 bp, Homo sapien
tctctgcaagggcttccttttgaca

SEQ ID NO: 2051484 - DNA, 25 bp, Homo sapien
caagggcttccttttgacaacgaag

SEQ ID NO: 2051485 - DNA, 25 bp, Homo sapien
gaactgctgcatcacctgaggctgc

SEQ ID NO: 2051486 - DNA, 25 bp, Homo sapien
ccagatcttgtaatgctctaacgag

SEQ ID NO: 2051487 - DNA, 25 bp, Homo sapien
acttcttggacttcaacaggtaaag

SEQ ID NO: 2051488 - DNA, 25 bp, Homo sapien
gaagctatcctctgatgaactgctg

SEQ ID NO: 2051489 - DNA, 25 bp, Homo sapien
gagaaggtaggctataacatcaacc

SEQ ID NO: 2051490 - DNA, 25 bp, Homo sapien
gacaaggccctagaccttgaagaga

SEQ ID NO: 2051491 - DNA, 25 bp, Homo sapien
cttgaagagagcttactccagtggt

SEQ ID NO: 2051492 - DNA, 25 bp, Homo sapien
caagctataattaggagggaagcgc

SEQ ID NO: 2051493 - DNA, 25 bp, Homo sapien
ggatactaatttctggcaaccccat

SEQ ID NO: 2051494 - DNA, 25 bp, Homo sapien
ccatgtctgcttcgggaccagggct

SEQ ID NO: 2051495 - DNA, 25 bp, Homo sapien
tcttgtccatagtggccaatgggct

SEQ ID NO: 2051496 - DNA, 25 bp, Homo sapien
caaacaggtaggctgactcaggtcg

SEQ ID NO: 2051497 - DNA, 25 bp, Homo sapien
ttttcatccacctttatctgttcat

SEQ ID NO: 2051498 - DNA, 25 bp, Homo sapien
tgttcataagttcgcttcctaggct

SEQ ID NO: 2051499 - DNA, 25 bp, Homo sapien
tggttcacttggagatcccagagag

SEQ ID NO: 2051500 - DNA, 25 bp, Homo sapien
ggttcacttggagatcccagagagg

SEQ ID NO: 2051501 - DNA, 25 bp, Homo sapien
aggtgcttcttacaactttcatcag

SEQ ID NO: 2051502 - DNA, 25 bp, Homo sapien
tgcttaaaagcctccactataactg

SEQ ID NO: 2051503 - DNA, 25 bp, Homo sapien
catcattggctaggtagagaaaagt

SEQ ID NO: 2051504 - DNA, 25 bp, Homo sapien
ctggtgcaaaatcttttgtaaactc

SEQ ID NO: 2051505 - DNA, 25 bp, Homo sapien
tgacatcattggctaggtagagaaa

SEQ ID NO: 2051506 - DNA, 25 bp, Homo sapien
aagttgagcacatcccccagaaggg

SEQ ID NO: 2051507 - DNA, 25 bp, Homo sapien
aaaagttgagcacatcccccagaag

SEQ ID NO: 2051508 - DNA, 25 bp, Homo sapien
aaaaagttgagcacatcccccagaa

SEQ ID NO: 2051509 - DNA, 25 bp, Homo sapien
ctaaaaagttgagcacatcccccag

SEQ ID NO: 2051510 - DNA, 25 bp, Homo sapien
tcctgtttgacaaaatctccaattg

SEQ ID NO: 2051511 - DNA, 25 bp, Homo sapien
ctgtttgacaaaatctccaattgga

SEQ ID NO: 2051512 - DNA, 25 bp, Homo sapien
agtaaattcctgtttgacaaaatct

SEQ ID NO: 2051513 - DNA, 25 bp, Homo sapien
aattcctgtttgacaaaatctccaa

SEQ ID NO: 2051514 - DNA, 25 bp, Homo sapien
cgcacccggccaaatgtaaacattc

SEQ ID NO: 2051515 - DNA, 25 bp, Homo sapien
ggccaaatgtaaacattcttaacaa

SEQ ID NO: 2051516 - DNA, 25 bp, Homo sapien
gaattttacaacacagataagtgta

SEQ ID NO: 2051517 - DNA, 25 bp, Homo sapien
tagtgaataaaattcagcaacatat

SEQ ID NO: 2051518 - DNA, 25 bp, Homo sapien
caaaaatgtactcaaggatcaagat

SEQ ID NO: 2051519 - DNA, 25 bp, Homo sapien
taatgtgcacattaggagaaactaa

SEQ ID NO: 2051520 - DNA, 25 bp, Homo sapien
caaaggtcagacctatcaatgtgac

SEQ ID NO: 2051521 - DNA, 25 bp, Homo sapien
taataagtgcattcagcaagagctg

SEQ ID NO: 2051522 - DNA, 25 bp, Homo sapien
cgtgcgtcaatatagcaagtaagga

SEQ ID NO: 2051523 - DNA, 25 bp, Homo sapien
tttatatcatcaagacgtgcgtcaa

SEQ ID NO: 2051524 - DNA, 25 bp, Homo sapien
ggtcagacctatgttgttcaatgga

SEQ ID NO: 2051525 - DNA, 25 bp, Homo sapien
aatgattaggtgctactggttttca

SEQ ID NO: 2051526 - DNA, 25 bp, Homo sapien
ccaaaacttgaagacgtgaatctac

SEQ ID NO: 2051527 - DNA, 25 bp, Homo sapien
gaaatcctaaagacagtccttcagg

SEQ ID NO: 2051528 - DNA, 25 bp, Homo sapien
gcagcaaggagtctcagtaagatta

SEQ ID NO: 2051529 - DNA, 25 bp, Homo sapien
gattaactaatgactgaaaactcca

SEQ ID NO: 2051530 - DNA, 25 bp, Homo sapien
ccaccaagtggtataagagttcctg

SEQ ID NO: 2051531 - DNA, 25 bp, Homo sapien
actgctaggtcaaaggatatattta

SEQ ID NO: 2051532 - DNA, 25 bp, Homo sapien
cataaagtggtacctcactggctta

SEQ ID NO: 2051533 - DNA, 25 bp, Homo sapien
gtttctctgcaacaattatccatat

SEQ ID NO: 2051534 - DNA, 25 bp, Homo sapien
gataaacctgttaccgattctgaaa

SEQ ID NO: 2051535 - DNA, 25 bp, Homo sapien
ttccagacctttatatcagtgtttc

SEQ ID NO: 2051536 - DNA, 25 bp, Homo sapien
aaaagcaaagctaattcctgacttt

SEQ ID NO: 2051537 - DNA, 25 bp, Homo sapien
gggtatcaaccctatactgattaca

SEQ ID NO: 2051538 - DNA, 25 bp, Homo sapien
agaagcgtggtgcacgcagctcctc

SEQ ID NO: 2051539 - DNA, 25 bp, Homo sapien
aagcccgcagaccaccgcgcgctgg

SEQ ID NO: 2051540 - DNA, 25 bp, Homo sapien
ctggcatcccgacgccgggaagccg

SEQ ID NO: 2051541 - DNA, 25 bp, Homo sapien
cagactttgcagaagcgtggtgcac

SEQ ID NO: 2051542 - DNA, 25 bp, Homo sapien
cggccgacataagcggttgactcac

SEQ ID NO: 2051543 - DNA, 25 bp, Homo sapien
gaagcggccgacataagcggttgac

SEQ ID NO: 2051544 - DNA, 25 bp, Homo sapien
tgggaagcggccgacataagcggtt

SEQ ID NO: 2051545 - DNA, 25 bp, Homo sapien
ccgggtggtgggaagcggccgacat

SEQ ID NO: 2051546 - DNA, 25 bp, Homo sapien
cgagttgctcaactccgacagcttc

SEQ ID NO: 2051547 - DNA, 25 bp, Homo sapien
tttacggtggtgaatgagccacagg

SEQ ID NO: 2051548 - DNA, 25 bp, Homo sapien
gctcccacacggtgacgatgggacg

SEQ ID NO: 2051549 - DNA, 25 bp, Homo sapien
cgatgggacgcgagtgtttacggtg

SEQ ID NO: 2051550 - DNA, 25 bp, Homo sapien
acaccacgttcacgccgtcccacgc

SEQ ID NO: 2051551 - DNA, 25 bp, Homo sapien
cgttcacgccgtcccacgcggtggg

SEQ ID NO: 2051552 - DNA, 25 bp, Homo sapien
cgacaccacgttcacgccgtcccac

SEQ ID NO: 2051553 - DNA, 25 bp, Homo sapien
cacgttcacgccgtcccacgcggtg

SEQ ID NO: 2051554 - DNA, 25 bp, Homo sapien
acgctctcaccacggccgccgcttc

SEQ ID NO: 2051555 - DNA, 25 bp, Homo sapien
cagcaagatggcgtccggccggcag

SEQ ID NO: 2051556 - DNA, 25 bp, Homo sapien
gcttcatccaagaccggccgcaaac

SEQ ID NO: 2051557 - DNA, 25 bp, Homo sapien
ccggccggcagtgacgtcacaggga

SEQ ID NO: 2051558 - DNA, 25 bp, Homo sapien
catggacttttgctctaggaacaac

SEQ ID NO: 2051559 - DNA, 25 bp, Homo sapien
ggagacaaggctgatgtacagctcc

SEQ ID NO: 2051560 - DNA, 25 bp, Homo sapien
agtgtgtggagacttacaccatgga

SEQ ID NO: 2051561 - DNA, 25 bp, Homo sapien
aaatagttagagataagaattcaag

SEQ ID NO: 2051562 - DNA, 25 bp, Homo sapien
ttgctcagatcttcataggaagcac

SEQ ID NO: 2051563 - DNA, 25 bp, Homo sapien
ttatcttaggatagccagtgactga

SEQ ID NO: 2051564 - DNA, 25 bp, Homo sapien
tatcttaggatagccagtgactgat

SEQ ID NO: 2051565 - DNA, 25 bp, Homo sapien
tgctcagatcttcataggaagcacc

SEQ ID NO: 2051566 - DNA, 25 bp, Homo sapien
ggtgccttaatcacttctacaatgt

SEQ ID NO: 2051567 - DNA, 25 bp, Homo sapien
cactccgtgtggtgccttaatcact

SEQ ID NO: 2051568 - DNA, 25 bp, Homo sapien
ccgtgtggtgccttaatcacttcta

SEQ ID NO: 2051569 - DNA, 25 bp, Homo sapien
tagctctagcactccgtgtggtgcc

SEQ ID NO: 2051570 - DNA, 25 bp, Homo sapien
ccatcctctgacacagagtgatggg

SEQ ID NO: 2051571 - DNA, 25 bp, Homo sapien
ccatatacccgttaacaggttccag

SEQ ID NO: 2051572 - DNA, 25 bp, Homo sapien
tatctgaatcttccatatacccgtt

SEQ ID NO: 2051573 - DNA, 25 bp, Homo sapien
gaatcttccatatacccgttaacag

SEQ ID NO: 2051574 - DNA, 25 bp, Homo sapien
gaagcagagtaatctattcaaccaa

SEQ ID NO: 2051575 - DNA, 25 bp, Homo sapien
tctagcagtggcactatggtaggtc

SEQ ID NO: 2051576 - DNA, 25 bp, Homo sapien
taatctattcaaccaaaggggatgc

SEQ ID NO: 2051577 - DNA, 25 bp, Homo sapien
cttgcactgatctagcagtggcact

SEQ ID NO: 2051578 - DNA, 25 bp, Homo sapien
gaacatccagtcatacagcttttgg

SEQ ID NO: 2051579 - DNA, 25 bp, Homo sapien
taaaccaggtaaccagaacatccag

SEQ ID NO: 2051580 - DNA, 25 bp, Homo sapien
aatgccacagacaggcctagtatgg

SEQ ID NO: 2051581 - DNA, 25 bp, Homo sapien
ggtatatacccgcacgaacattttg

SEQ ID NO: 2051582 - DNA, 25 bp, Homo sapien
tcttattcctaaacaccagcagttc

SEQ ID NO: 2051583 - DNA, 25 bp, Homo sapien
ttcttattcctaaacaccagcagtt

SEQ ID NO: 2051584 - DNA, 25 bp, Homo sapien
attcttattcctaaacaccagcagt

SEQ ID NO: 2051585 - DNA, 25 bp, Homo sapien
cttattcctaaacaccagcagttct

SEQ ID NO: 2051586 - DNA, 25 bp, Homo sapien
taataccggtgaattgcacatacag

SEQ ID NO: 2051587 - DNA, 25 bp, Homo sapien
gactttgtaacagacagcaatattc

SEQ ID NO: 2051588 - DNA, 25 bp, Homo sapien
catctccctatgacctactgaaact

SEQ ID NO: 2051589 - DNA, 25 bp, Homo sapien
taactttaaacgctgcatagtacag

SEQ ID NO: 2051590 - DNA, 25 bp, Homo sapien
aatttatacgaaacacgattttatg

SEQ ID NO: 2051591 - DNA, 25 bp, Homo sapien
tacgaaacacgattttatgttcaaa

SEQ ID NO: 2051592 - DNA, 25 bp, Homo sapien
aaacccaaaagcatcccagcattct

SEQ ID NO: 2051593 - DNA, 25 bp, Homo sapien
ctagaaatttatacgaaacacgatt

SEQ ID NO: 2051594 - DNA, 25 bp, Homo sapien
catggtcactagcatcattgtgcag

SEQ ID NO: 2051595 - DNA, 25 bp, Homo sapien
ggtcactagcatcattgtgcagcat

SEQ ID NO: 2051596 - DNA, 25 bp, Homo sapien
tccatggtcactagcatcattgtgc

SEQ ID NO: 2051597 - DNA, 25 bp, Homo sapien
ccagcggctacatccatggtcacta

SEQ ID NO: 2051598 - DNA, 25 bp, Homo sapien
ttgttggtcaataatgtaataagac

SEQ ID NO: 2051599 - DNA, 25 bp, Homo sapien
tctattttattgttggtcaataatg

SEQ ID NO: 2051600 - DNA, 25 bp, Homo sapien
tggaaggatcatttgggctcaggaa

SEQ ID NO: 2051601 - DNA, 25 bp, Homo sapien
atgaggctttaccgaatattttctc

SEQ ID NO: 2051602 - DNA, 25 bp, Homo sapien
aggacagcctgcttaacggtcatgc

SEQ ID NO: 2051603 - DNA, 25 bp, Homo sapien
catatcaaccagagcaacatacatg

SEQ ID NO: 2051604 - DNA, 25 bp, Homo sapien
tgttgccattccaagatacgccagc

SEQ ID NO: 2051605 - DNA, 25 bp, Homo sapien
catgaataagccagcagtaagtgca

SEQ ID NO: 2051606 - DNA, 25 bp, Homo sapien
gcaactcatgacagaacacagcaac

SEQ ID NO: 2051607 - DNA, 25 bp, Homo sapien
aattcatgaggcaactcatgacaga

SEQ ID NO: 2051608 - DNA, 25 bp, Homo sapien
catgaggcaactcatgacagaacac

SEQ ID NO: 2051609 - DNA, 25 bp, Homo sapien
gaggcaactcatgacagaacacagc

SEQ ID NO: 2051610 - DNA, 25 bp, Homo sapien
tgtgcaggccatcacccattatcac

SEQ ID NO: 2051611 - DNA, 25 bp, Homo sapien
caattgctaggccatcgctgaaatt

SEQ ID NO: 2051612 - DNA, 25 bp, Homo sapien
tggcgacgccggcatctttcagctc

SEQ ID NO: 2051613 - DNA, 25 bp, Homo sapien
ccagagtggcgacgccggcatcttt

SEQ ID NO: 2051614 - DNA, 25 bp, Homo sapien
ctcccgagagtagcgctggctgtga

SEQ ID NO: 2051615 - DNA, 25 bp, Homo sapien
tggtgatgatggagaatatgatggt

SEQ ID NO: 2051616 - DNA, 25 bp, Homo sapien
ggtggtgatgatggagaatatgatg

SEQ ID NO: 2051617 - DNA, 25 bp, Homo sapien
tgactgtgaggatggtggttttggt

SEQ ID NO: 2051618 - DNA, 25 bp, Homo sapien
catattcattgtagacttcctgtgg

SEQ ID NO: 2051619 - DNA, 25 bp, Homo sapien
tggtgaatgagatcgtctgactggc

SEQ ID NO: 2051620 - DNA, 25 bp, Homo sapien
gccgagtgtatcgtggaaatgtgaa

SEQ ID NO: 2051621 - DNA, 25 bp, Homo sapien
tattcttgcaccctctgggtacata

SEQ ID NO: 2051622 - DNA, 25 bp, Homo sapien
tctgctcgtaaatagccttcagttc

SEQ ID NO: 2051623 - DNA, 25 bp, Homo sapien
caggctgctgagaatcaaagtggga

SEQ ID NO: 2051624 - DNA, 25 bp, Homo sapien
cttgtgagtctgctcgtaaatagcc

SEQ ID NO: 2051625 - DNA, 25 bp, Homo sapien
aatcaaagtgggagggctcttgtga

SEQ ID NO: 2051626 - DNA, 25 bp, Homo sapien
tctcctcatttgttgaaagttgaga

SEQ ID NO: 2051627 - DNA, 25 bp, Homo sapien
caactgcttcttaatctccacatca

SEQ ID NO: 2051628 - DNA, 25 bp, Homo sapien
cttggacaactgcttcttaatctcc

SEQ ID NO: 2051629 - DNA, 25 bp, Homo sapien
aagttgagattcatacttggacaac

SEQ ID NO: 2051630 - DNA, 25 bp, Homo sapien
taaattgtttgatcaatgtgaggac

SEQ ID NO: 2051631 - DNA, 25 bp, Homo sapien
cttccacgtggaatcaaaataggca

SEQ ID NO: 2051632 - DNA, 25 bp, Homo sapien
tcctagagctgttagacccttccac

SEQ ID NO: 2051633 - DNA, 25 bp, Homo sapien
gttcaacaagaaacatgaaatacag

SEQ ID NO: 2051634 - DNA, 25 bp, Homo sapien
atgttttgagaagacagatgactga

SEQ ID NO: 2051635 - DNA, 25 bp, Homo sapien
tatgttttgagaagacagatgactg

SEQ ID NO: 2051636 - DNA, 25 bp, Homo sapien
tgctattgcacattagggaatcggg

SEQ ID NO: 2051637 - DNA, 25 bp, Homo sapien
catgtacccgagatccaggtgcact

SEQ ID NO: 2051638 - DNA, 25 bp, Homo sapien
gtgtggaacacactaagatactggg

SEQ ID NO: 2051639 - DNA, 25 bp, Homo sapien
gggatcacagagtacaccccataca

SEQ ID NO: 2051640 - DNA, 25 bp, Homo sapien
tttcttgggtacataaagggtcaca

SEQ ID NO: 2051641 - DNA, 25 bp, Homo sapien
taaagcagataactcacattgctgc

SEQ ID NO: 2051642 - DNA, 25 bp, Homo sapien
cacaaatgtattaagatcgagcaga

SEQ ID NO: 2051643 - DNA, 25 bp, Homo sapien
tatcacagtactaatagccaggcag

SEQ ID NO: 2051644 - DNA, 25 bp, Homo sapien
aagtcccaacggccagtgccacaag

SEQ ID NO: 2051645 - DNA, 25 bp, Homo sapien
gcatcaccactcaaagtcccaacgg

SEQ ID NO: 2051646 - DNA, 25 bp, Homo sapien
ctgatgatggaaatggctataaaac

SEQ ID NO: 2051647 - DNA, 25 bp, Homo sapien
aagcatcaccactcaaagtcccaac

SEQ ID NO: 2051648 - DNA, 25 bp, Homo sapien
gagatagttgaactctgttgcattc

SEQ ID NO: 2051649 - DNA, 25 bp, Homo sapien
tgcattcagcggaacctggatgccc

SEQ ID NO: 2051650 - DNA, 25 bp, Homo sapien
tgtaatgaataggtctttggaggga

SEQ ID NO: 2051651 - DNA, 25 bp, Homo sapien
catcaatttggttgatgatggctgg

SEQ ID NO: 2051652 - DNA, 25 bp, Homo sapien
gccatgagatgtcagtagctttgat

SEQ ID NO: 2051653 - DNA, 25 bp, Homo sapien
catgagatgtcagtagctttgatgc

SEQ ID NO: 2051654 - DNA, 25 bp, Homo sapien
ccatgagatgtcagtagctttgatg

SEQ ID NO: 2051655 - DNA, 25 bp, Homo sapien
tcagccaaggtgaattacgtacagt

SEQ ID NO: 2051656 - DNA, 25 bp, Homo sapien
agcagtggtattctcagtagtcttc

SEQ ID NO: 2051657 - DNA, 25 bp, Homo sapien
tcatggtggaccttctgtcaaggag

SEQ ID NO: 2051658 - DNA, 25 bp, Homo sapien
tggaagtctactctagaaaaaccac

SEQ ID NO: 2051659 - DNA, 25 bp, Homo sapien
acataaagccttttcggggctcact

SEQ ID NO: 2051660 - DNA, 25 bp, Homo sapien
ataaagccttttcggggctcactca

SEQ ID NO: 2051661 - DNA, 25 bp, Homo sapien
agccttttcggggctcactcacaga

SEQ ID NO: 2051662 - DNA, 25 bp, Homo sapien
gttttcctaccagccagccggctca

SEQ ID NO: 2051663 - DNA, 25 bp, Homo sapien
ggatctttacctgaactatctgagt

SEQ ID NO: 2051664 - DNA, 25 bp, Homo sapien
ccggctctttgatgtgacactgggt

SEQ ID NO: 2051665 - DNA, 25 bp, Homo sapien
gagtggagctgcttacatctttggg

SEQ ID NO: 2051666 - DNA, 25 bp, Homo sapien
tattgtctctagaaagtgagttcct

SEQ ID NO: 2051667 - DNA, 25 bp, Homo sapien
tctccatagcggtagaaaagctgtt

SEQ ID NO: 2051668 - DNA, 25 bp, Homo sapien
gccgtgtggaaattgccaagtcaac

SEQ ID NO: 2051669 - DNA, 25 bp, Homo sapien
tacagataacttcctcgccattgcg

SEQ ID NO: 2051670 - DNA, 25 bp, Homo sapien
taatgccagattcccaattcggact

SEQ ID NO: 2051671 - DNA, 25 bp, Homo sapien
ttaattcagatccagcaggatgtcc

SEQ ID NO: 2051672 - DNA, 25 bp, Homo sapien
aatcacaggctgttaatcatccaca

SEQ ID NO: 2051673 - DNA, 25 bp, Homo sapien
caattgagttggagcttgaaaagca

SEQ ID NO: 2051674 - DNA, 25 bp, Homo sapien
tccacagtagtgtttggaaccaaag

SEQ ID NO: 2051675 - DNA, 25 bp, Homo sapien
gggctatccagctctaccacggtca

SEQ ID NO: 2051676 - DNA, 25 bp, Homo sapien
gttctttggacagggctctcgcatt

SEQ ID NO: 2051677 - DNA, 25 bp, Homo sapien
tctccagcaaaagacgcagacgtca

SEQ ID NO: 2051678 - DNA, 25 bp, Homo sapien
gtttacaactaagcaagagcatggg

SEQ ID NO: 2051679 - DNA, 25 bp, Homo sapien
cggccacgcgcgcaggtttggttcc

SEQ ID NO: 2051680 - DNA, 25 bp, Homo sapien
ccacgcgcgcaggtttggttccaca

SEQ ID NO: 2051681 - DNA, 25 bp, Homo sapien
ctcgttgtcccacggcccggccacg

SEQ ID NO: 2051682 - DNA, 25 bp, Homo sapien
gtctccgcggcctcgttgtcccacg

SEQ ID NO: 2051683 - DNA, 25 bp, Homo sapien
gcccactggtgtcttcgagaaatct

SEQ ID NO: 2051684 - DNA, 25 bp, Homo sapien
cgggcccactggtgtcttcgagaaa

SEQ ID NO: 2051685 - DNA, 25 bp, Homo sapien
gggcccactggtgtcttcgagaaat

SEQ ID NO: 2051686 - DNA, 25 bp, Homo sapien
ggcccactggtgtcttcgagaaatc

SEQ ID NO: 2051687 - DNA, 25 bp, Homo sapien
caggcgcgaacacgcggtggtttca

SEQ ID NO: 2051688 - DNA, 25 bp, Homo sapien
cgaacacgcggtggtttcattgggt

SEQ ID NO: 2051689 - DNA, 25 bp, Homo sapien
aatcactaattaccgccgcgcgcag

SEQ ID NO: 2051690 - DNA, 25 bp, Homo sapien
agctggaagacaatcactaattacc

SEQ ID NO: 2051691 - DNA, 25 bp, Homo sapien
cggctccgcagacggatccgctttt

SEQ ID NO: 2051692 - DNA, 25 bp, Homo sapien
cagacggatccgcttttccgtgtgt

SEQ ID NO: 2051693 - DNA, 25 bp, Homo sapien
cttttccgtgtgttcgccgacgccg

SEQ ID NO: 2051694 - DNA, 25 bp, Homo sapien
ggatccgcttttccgtgtgttcgcc

SEQ ID NO: 2051695 - DNA, 25 bp, Homo sapien
ctagcgcattgtaagcagttggggg

SEQ ID NO: 2051696 - DNA, 25 bp, Homo sapien
cgcattgtaagcagttgggggtcat

SEQ ID NO: 2051697 - DNA, 25 bp, Homo sapien
tgggggtcatttcctcgaggcccta

SEQ ID NO: 2051698 - DNA, 25 bp, Homo sapien
attgtaagcagttgggggtcatttc

SEQ ID NO: 2051699 - DNA, 25 bp, Homo sapien
gatttcgctcttgagacaaaggcct

SEQ ID NO: 2051700 - DNA, 25 bp, Homo sapien
cgagatgtttctgacgctgccccag

SEQ ID NO: 2051701 - DNA, 25 bp, Homo sapien
acaaaggcctggctcgttcgcggag

SEQ ID NO: 2051702 - DNA, 25 bp, Homo sapien
caagagcagagctagcaaagcggcg

SEQ ID NO: 2051703 - DNA, 25 bp, Homo sapien
cccctggtaagagaggtcgctggac

SEQ ID NO: 2051704 - DNA, 25 bp, Homo sapien
gagtcctgaactggagctctgggcc

SEQ ID NO: 2051705 - DNA, 25 bp, Homo sapien
tcgggttgaacctgtggacgtgctc

SEQ ID NO: 2051706 - DNA, 25 bp, Homo sapien
cgtcctgctccgtggtgctctatga

SEQ ID NO: 2051707 - DNA, 25 bp, Homo sapien
cttgaatggcaagagaaagtgcaaa

SEQ ID NO: 2051708 - DNA, 25 bp, Homo sapien
ttcttgaatggcaagagaaagtgca

SEQ ID NO: 2051709 - DNA, 25 bp, Homo sapien
caaggaccgactgtagaatgggaga

SEQ ID NO: 2051710 - DNA, 25 bp, Homo sapien
aaagggaccatgaggcaaggaccga

SEQ ID NO: 2051711 - DNA, 25 bp, Homo sapien
gtctcctcatccagcgccgtgagcg

SEQ ID NO: 2051712 - DNA, 25 bp, Homo sapien
ccacagcgtctcctcatccagcgcc

SEQ ID NO: 2051713 - DNA, 25 bp, Homo sapien
ccgtgagcgcggagccttgcggcat

SEQ ID NO: 2051714 - DNA, 25 bp, Homo sapien
gccgtgagcgcggagccttgcggca

SEQ ID NO: 2051715 - DNA, 25 bp, Homo sapien
attttctgaattattaagactttgc

SEQ ID NO: 2051716 - DNA, 25 bp, Homo sapien
tctgaattattaagactttgctatg

SEQ ID NO: 2051717 - DNA, 25 bp, Homo sapien
ctgaattattaagactttgctatga

SEQ ID NO: 2051718 - DNA, 25 bp, Homo sapien
tttctgaattattaagactttgcta

SEQ ID NO: 2051719 - DNA, 25 bp, Homo sapien
cagagttaggacatgaacctgggcc

SEQ ID NO: 2051720 - DNA, 25 bp, Homo sapien
taagtggctcaattgctgtgacaca

SEQ ID NO: 2051721 - DNA, 25 bp, Homo sapien
ctgtgacacatgaagttgaagccca

SEQ ID NO: 2051722 - DNA, 25 bp, Homo sapien
ttcctgccaagagtgtttagcctgc

SEQ ID NO: 2051723 - DNA, 25 bp, Homo sapien
catacctacagtgaagcattcctag

SEQ ID NO: 2051724 - DNA, 25 bp, Homo sapien
gagaacatgcgtcactgtagtcttg

SEQ ID NO: 2051725 - DNA, 25 bp, Homo sapien
tgagtggttaaactaaaggagagaa

SEQ ID NO: 2051726 - DNA, 25 bp, Homo sapien
taaaaatggttgtgaaagtccagct

SEQ ID NO: 2051727 - DNA, 25 bp, Homo sapien
catctgtatgtaggaagttaggttt

SEQ ID NO: 2051728 - DNA, 25 bp, Homo sapien
gaatgctaccacaaagcctaatgga

SEQ ID NO: 2051729 - DNA, 25 bp, Homo sapien
ttgcaaatggtgatagaatgctacc

SEQ ID NO: 2051730 - DNA, 25 bp, Homo sapien
ctaagaaaactcatggttgagtggt

SEQ ID NO: 2051731 - DNA, 25 bp, Homo sapien
tagtatgaggctttcaccttccagg

SEQ ID NO: 2051732 - DNA, 25 bp, Homo sapien
cagaatttagtgttgtggccatacc

SEQ ID NO: 2051733 - DNA, 25 bp, Homo sapien
tggccataccgagcttcaggagaag

SEQ ID NO: 2051734 - DNA, 25 bp, Homo sapien
catggtctttgcgttccagccagca

SEQ ID NO: 2051735 - DNA, 25 bp, Homo sapien
gctggccagaagtgaaagtccggtc

SEQ ID NO: 2051736 - DNA, 25 bp, Homo sapien
tgggacccatcgagaggttgtttaa

SEQ ID NO: 2051737 - DNA, 25 bp, Homo sapien
ggcctctccgcgagacatagctaaa

SEQ ID NO: 2051738 - DNA, 25 bp, Homo sapien
agggtctggaaacatcttcgtggga

SEQ ID NO: 2051739 - DNA, 25 bp, Homo sapien
tacattacggttaaagcagacattt

SEQ ID NO: 2051740 - DNA, 25 bp, Homo sapien
tatgtctggtagtgttgtgggcatc

SEQ ID NO: 2051741 - DNA, 25 bp, Homo sapien
gcaagttccttgtatttcctctaca

SEQ ID NO: 2051742 - DNA, 25 bp, Homo sapien
tttgtgcactaatctgacgcccctc

SEQ ID NO: 2051743 - DNA, 25 bp, Homo sapien
tgtggcgttacaaaagcctcgttcc

SEQ ID NO: 2051744 - DNA, 25 bp, Homo sapien
tggctcctcgaggacacagctttgt

SEQ ID NO: 2051745 - DNA, 25 bp, Homo sapien
tgatagtttccactctcgagcacgg

SEQ ID NO: 2051746 - DNA, 25 bp, Homo sapien
cagggatcctcgtgtataatagtga

SEQ ID NO: 2051747 - DNA, 25 bp, Homo sapien
accaaaccttggtgttagagtcaca

SEQ ID NO: 2051748 - DNA, 25 bp, Homo sapien
cttggtgagaacagacaataacttg

SEQ ID NO: 2051749 - DNA, 25 bp, Homo sapien
tcaaagacaatgtcatgtcccttga

SEQ ID NO: 2051750 - DNA, 25 bp, Homo sapien
tctcctggagttcagccttatgtgc

SEQ ID NO: 2051751 - DNA, 25 bp, Homo sapien
gaacaggttctagagtttcagaaac

SEQ ID NO: 2051752 - DNA, 25 bp, Homo sapien
gaagaacaggcagtgatatacattt

SEQ ID NO: 2051753 - DNA, 25 bp, Homo sapien
tctgctgttgaaagatgtccgctta

SEQ ID NO: 2051754 - DNA, 25 bp, Homo sapien
cactatagaggcatcactaattggg

SEQ ID NO: 2051755 - DNA, 25 bp, Homo sapien
gtgttcgtggcaccttcataggacc

SEQ ID NO: 2051756 - DNA, 25 bp, Homo sapien
tgtagcttgttgtgttcgtggcacc

SEQ ID NO: 2051757 - DNA, 25 bp, Homo sapien
gtatcataaggaacatacactccag

SEQ ID NO: 2051758 - DNA, 25 bp, Homo sapien
ttccctgcagttgggctttcaagtg

SEQ ID NO: 2051759 - DNA, 25 bp, Homo sapien
ttaggtggggctcccggtcactgcc

SEQ ID NO: 2051760 - DNA, 25 bp, Homo sapien
tgccctgccggggtattccaaatct

SEQ ID NO: 2051761 - DNA, 25 bp, Homo sapien
acccctcttgctgccgaagccggct

SEQ ID NO: 2051762 - DNA, 25 bp, Homo sapien
gggtattccaaatctgggcagcaga

SEQ ID NO: 2051763 - DNA, 25 bp, Homo sapien
aggaggactcaggcaggctcctgac

SEQ ID NO: 2051764 - DNA, 25 bp, Homo sapien
aggctgcaggaggactcaggcaggc

SEQ ID NO: 2051765 - DNA, 25 bp, Homo sapien
gctgcaggaggactcaggcaggctc

SEQ ID NO: 2051766 - DNA, 25 bp, Homo sapien
tgcaggaggactcaggcaggctcct

SEQ ID NO: 2051767 - DNA, 25 bp, Homo sapien
ctgtgaatcaccagacaccggcagt

SEQ ID NO: 2051768 - DNA, 25 bp, Homo sapien
aagtgagagaggttatccagtcttc

SEQ ID NO: 2051769 - DNA, 25 bp, Homo sapien
gccagtgcccggaagtgagagaggt

SEQ ID NO: 2051770 - DNA, 25 bp, Homo sapien
tccgggagcggctagtgtctgagct

SEQ ID NO: 2051771 - DNA, 25 bp, Homo sapien
tggtgttggtgtgtggccatgcagg

SEQ ID NO: 2051772 - DNA, 25 bp, Homo sapien
gaagttcgctgatttagctggtcag

SEQ ID NO: 2051773 - DNA, 25 bp, Homo sapien
gtgcacacggataggaggaccatgg

SEQ ID NO: 2051774 - DNA, 25 bp, Homo sapien
cggataggaggaccatgggagacaa

SEQ ID NO: 2051775 - DNA, 25 bp, Homo sapien
cctggaagaggagtggacttttcct

SEQ ID NO: 2051776 - DNA, 25 bp, Homo sapien
gtcacagtgatagccctgcactggg

SEQ ID NO: 2051777 - DNA, 25 bp, Homo sapien
actgggctggtatataacgtgaata

SEQ ID NO: 2051778 - DNA, 25 bp, Homo sapien
cctggtcacagtgatagccctgcac

SEQ ID NO: 2051779 - DNA, 25 bp, Homo sapien
tgctgaacaggactcccgtaatctg

SEQ ID NO: 2051780 - DNA, 25 bp, Homo sapien
cactgctgaacaggactcccgtaat

SEQ ID NO: 2051781 - DNA, 25 bp, Homo sapien
aacaggactcccgtaatctgcatct

SEQ ID NO: 2051782 - DNA, 25 bp, Homo sapien
aggactcccgtaatctgcatctcag

SEQ ID NO: 2051783 - DNA, 25 bp, Homo sapien
atctcagtgggcctacccttagacc

SEQ ID NO: 2051784 - DNA, 25 bp, Homo sapien
ccaggtggagctagattcttggccc

SEQ ID NO: 2051785 - DNA, 25 bp, Homo sapien
tcacttagcctgaagggtgccgtgt

SEQ ID NO: 2051786 - DNA, 25 bp, Homo sapien
gaccccaggatatactcacttagcc

SEQ ID NO: 2051787 - DNA, 25 bp, Homo sapien
ctgttcatgagcggcaggtgcaggg

SEQ ID NO: 2051788 - DNA, 25 bp, Homo sapien
tgttcatgagcggcaggtgcagggt

SEQ ID NO: 2051789 - DNA, 25 bp, Homo sapien
agatagactgattctgttcaacatt

SEQ ID NO: 2051790 - DNA, 25 bp, Homo sapien
tagactgattctgttcaacattcca

SEQ ID NO: 2051791 - DNA, 25 bp, Homo sapien
gactgattctgttcaacattccagg

SEQ ID NO: 2051792 - DNA, 25 bp, Homo sapien
gattctgttcaacattccaggcatt

SEQ ID NO: 2051793 - DNA, 25 bp, Homo sapien
caggcatagctgtattgcaactgac

SEQ ID NO: 2051794 - DNA, 25 bp, Homo sapien
aacaggcatagctgtattgcaactg

SEQ ID NO: 2051795 - DNA, 25 bp, Homo sapien
gaaacaggcatagctgtattgcaac

SEQ ID NO: 2051796 - DNA, 25 bp, Homo sapien
gggaaacaggcatagctgtattgca

SEQ ID NO: 2051797 - DNA, 25 bp, Homo sapien
actcaggggacccatagtcaagctg

SEQ ID NO: 2051798 - DNA, 25 bp, Homo sapien
caggggacccatagtcaagctggcc

SEQ ID NO: 2051799 - DNA, 25 bp, Homo sapien
tcaggggacccatagtcaagctggc

SEQ ID NO: 2051800 - DNA, 25 bp, Homo sapien
ctcaggggacccatagtcaagctgg

SEQ ID NO: 2051801 - DNA, 25 bp, Homo sapien
gatgacgccgggtaagagcaactgt

SEQ ID NO: 2051802 - DNA, 25 bp, Homo sapien
agcgggatgagttggaaggcttcca

SEQ ID NO: 2051803 - DNA, 25 bp, Homo sapien
cgggtaagagcaactgttcaccctg

SEQ ID NO: 2051804 - DNA, 25 bp, Homo sapien
cttccaggatgacgccgggtaagag

SEQ ID NO: 2051805 - DNA, 25 bp, Homo sapien
gaaatgggggtacattgaggcctta

SEQ ID NO: 2051806 - DNA, 25 bp, Homo sapien
taagagacctcgatggaggtttgcc

SEQ ID NO: 2051807 - DNA, 25 bp, Homo sapien
gttaagagacctcgatggaggtttg

SEQ ID NO: 2051808 - DNA, 25 bp, Homo sapien
aagagacctcgatggaggtttgccc

SEQ ID NO: 2051809 - DNA, 25 bp, Homo sapien
ttagttaagagacctcgatggaggt

SEQ ID NO: 2051810 - DNA, 25 bp, Homo sapien
cagaacctccactcttttgcctgtt

SEQ ID NO: 2051811 - DNA, 25 bp, Homo sapien
gaacctccactcttttgcctgttgc

SEQ ID NO: 2051812 - DNA, 25 bp, Homo sapien
cctccactcttttgcctgttgctac

SEQ ID NO: 2051813 - DNA, 25 bp, Homo sapien
acctccactcttttgcctgttgcta

SEQ ID NO: 2051814 - DNA, 25 bp, Homo sapien
aaggtgggcttttaggcaagccctg

SEQ ID NO: 2051815 - DNA, 25 bp, Homo sapien
caagccctggaggatatggtggctt

SEQ ID NO: 2051816 - DNA, 25 bp, Homo sapien
catcatgaggaccagtgtggtggct

SEQ ID NO: 2051817 - DNA, 25 bp, Homo sapien
aaggaaaccaatgccagcctgggtc

SEQ ID NO: 2051818 - DNA, 25 bp, Homo sapien
tgtgaggctggtggcttagaaatca

SEQ ID NO: 2051819 - DNA, 25 bp, Homo sapien
gtctatgtgaggctggtggcttaga

SEQ ID NO: 2051820 - DNA, 25 bp, Homo sapien
gtgtctatgtgaggctggtggctta

SEQ ID NO: 2051821 - DNA, 25 bp, Homo sapien
ctatgtgaggctggtggcttagaaa

SEQ ID NO: 2051822 - DNA, 25 bp, Homo sapien
ctattttagatagtccccttggcac

SEQ ID NO: 2051823 - DNA, 25 bp, Homo sapien
ttagcggtagtgccgttgtgtccct

SEQ ID NO: 2051824 - DNA, 25 bp, Homo sapien
gtccctggtgcgtgtgcctccatag

SEQ ID NO: 2051825 - DNA, 25 bp, Homo sapien
tagtgccgttgtgtccctggtgcgt

SEQ ID NO: 2051826 - DNA, 25 bp, Homo sapien
taggaaaggaatccgagtctccctg

SEQ ID NO: 2051827 - DNA, 25 bp, Homo sapien
gttcagaagctggtgatgtgtccct

SEQ ID NO: 2051828 - DNA, 25 bp, Homo sapien
gagattaaggtcaagctgagccgcg

SEQ ID NO: 2051829 - DNA, 25 bp, Homo sapien
tcactggattctgggtacttggcgc

SEQ ID NO: 2051830 - DNA, 25 bp, Homo sapien
aaggatggctaaggtgcttacagta

SEQ ID NO: 2051831 - DNA, 25 bp, Homo sapien
aaaaggatggctaaggtgcttacag

SEQ ID NO: 2051832 - DNA, 25 bp, Homo sapien
gatggctaaggtgcttacagtaaat

SEQ ID NO: 2051833 - DNA, 25 bp, Homo sapien
gaaaaggatggctaaggtgcttaca

SEQ ID NO: 2051834 - DNA, 25 bp, Homo sapien
caaagcctttgttcctgttgggtag

SEQ ID NO: 2051835 - DNA, 25 bp, Homo sapien
gcctttgttcctgttgggtagccag

SEQ ID NO: 2051836 - DNA, 25 bp, Homo sapien
agcctttgttcctgttgggtagcca

SEQ ID NO: 2051837 - DNA, 25 bp, Homo sapien
tcctgggtacatgggcatgggtgct

SEQ ID NO: 2051838 - DNA, 25 bp, Homo sapien
tcctctttaccaggtagcggctcag

SEQ ID NO: 2051839 - DNA, 25 bp, Homo sapien
cagggcatcctgggtacatgggcat

SEQ ID NO: 2051840 - DNA, 25 bp, Homo sapien
aggggtgggctgaccgggcactcct

SEQ ID NO: 2051841 - DNA, 25 bp, Homo sapien
ttgttattactgtcaaaatccagca

SEQ ID NO: 2051842 - DNA, 25 bp, Homo sapien
gcaatttcttgtgggtaagcttgaa

SEQ ID NO: 2051843 - DNA, 25 bp, Homo sapien
taagcttgaaagcatcactatcatt

SEQ ID NO: 2051844 - DNA, 25 bp, Homo sapien
gccctgcaggttttcattaatgtga

SEQ ID NO: 2051845 - DNA, 25 bp, Homo sapien
cttcatattcctcccaccccgccat

SEQ ID NO: 2051846 - DNA, 25 bp, Homo sapien
catgatgatggtcctgttacgcctg

SEQ ID NO: 2051847 - DNA, 25 bp, Homo sapien
cctgttacgcctggagtgattctcc

SEQ ID NO: 2051848 - DNA, 25 bp, Homo sapien
gtaacagacccacacttaacacatg

SEQ ID NO: 2051849 - DNA, 25 bp, Homo sapien
gagtgactgatgtaacagacccaca

SEQ ID NO: 2051850 - DNA, 25 bp, Homo sapien
gaaagcccagcactccaactgtagg

SEQ ID NO: 2051851 - DNA, 25 bp, Homo sapien
atctcttcataagcataaggccagg

SEQ ID NO: 2051852 - DNA, 25 bp, Homo sapien
ctgtaggcaccagtcagaattctgc

SEQ ID NO: 2051853 - DNA, 25 bp, Homo sapien
caggtttcatctaatgctgccaaca

SEQ ID NO: 2051854 - DNA, 25 bp, Homo sapien
catgggaattttttctcgatgatag

SEQ ID NO: 2051855 - DNA, 25 bp, Homo sapien
tcttaggattggtctgttcctggac

SEQ ID NO: 2051856 - DNA, 25 bp, Homo sapien
gacagatgccaggatccctgtttct

SEQ ID NO: 2051857 - DNA, 25 bp, Homo sapien
attttttctcgatgataggagggtc

SEQ ID NO: 2051858 - DNA, 25 bp, Homo sapien
tcatgagcggtctgagaaggagact

SEQ ID NO: 2051859 - DNA, 25 bp, Homo sapien
tggtttgaaggagtcctctatgaga

SEQ ID NO: 2051860 - DNA, 25 bp, Homo sapien
gagtcctctatgagattggggcagt

SEQ ID NO: 2051861 - DNA, 25 bp, Homo sapien
tgtggttggtttgaaggagtcctct

SEQ ID NO: 2051862 - DNA, 25 bp, Homo sapien
ttggaatggtactggtagaatagag

SEQ ID NO: 2051863 - DNA, 25 bp, Homo sapien
tttggaatggtactggtagaataga

SEQ ID NO: 2051864 - DNA, 25 bp, Homo sapien
cttttggaatggtactggtagaata

SEQ ID NO: 2051865 - DNA, 25 bp, Homo sapien
ttttggaatggtactggtagaatag

SEQ ID NO: 2051866 - DNA, 25 bp, Homo sapien
tccctttccaggaggagaccaccag

SEQ ID NO: 2051867 - DNA, 25 bp, Homo sapien
ttccaggaggagaccaccagaacca

SEQ ID NO: 2051868 - DNA, 25 bp, Homo sapien
gagtcttgcggcccggcaaattcct

SEQ ID NO: 2051869 - DNA, 25 bp, Homo sapien
gggctgagtcttgcggcccggcaaa

SEQ ID NO: 2051870 - DNA, 25 bp, Homo sapien
tgatgatggcaacagtggcggcagt

SEQ ID NO: 2051871 - DNA, 25 bp, Homo sapien
tgatggcaacagtggcggcagtaga

SEQ ID NO: 2051872 - DNA, 25 bp, Homo sapien
gatgatgatggcaacagtggcggca

SEQ ID NO: 2051873 - DNA, 25 bp, Homo sapien
tgtgatgatgatggcaacagtggcg

SEQ ID NO: 2051874 - DNA, 25 bp, Homo sapien
gattctttttccaagactacataat

SEQ ID NO: 2051875 - DNA, 25 bp, Homo sapien
tttttcctttccatgccgcagcagc

SEQ ID NO: 2051876 - DNA, 25 bp, Homo sapien
gtgattctttttccaagactacata

SEQ ID NO: 2051877 - DNA, 25 bp, Homo sapien
ttccaagactacataataagggtgg

SEQ ID NO: 2051878 - DNA, 25 bp, Homo sapien
tgtactggattcatactgatccgtc

SEQ ID NO: 2051879 - DNA, 25 bp, Homo sapien
ggattcatactgatccgtccacact

SEQ ID NO: 2051880 - DNA, 25 bp, Homo sapien
gatgagctacagttgagggtatagt

SEQ ID NO: 2051881 - DNA, 25 bp, Homo sapien
taattgatggtgtacacttgttagc

SEQ ID NO: 2051882 - DNA, 25 bp, Homo sapien
agaagacaaatggtgaggttaaatt

SEQ ID NO: 2051883 - DNA, 25 bp, Homo sapien
aaatggtgaggttaaatttggccat

SEQ ID NO: 2051884 - DNA, 25 bp, Homo sapien
ccagaagacaaatggtgaggttaaa

SEQ ID NO: 2051885 - DNA, 25 bp, Homo sapien
agacaaatggtgaggttaaatttgg

SEQ ID NO: 2051886 - DNA, 25 bp, Homo sapien
ctgcactgccctcccacacactcct

SEQ ID NO: 2051887 - DNA, 25 bp, Homo sapien
ttatttcagtggcatcccctgcact

SEQ ID NO: 2051888 - DNA, 25 bp, Homo sapien
ttgggagttttatttcagtggcatc

SEQ ID NO: 2051889 - DNA, 25 bp, Homo sapien
aggctgcctgcaggggatgcctctg

SEQ ID NO: 2051890 - DNA, 25 bp, Homo sapien
agctcgggcagccatccaatgagca

SEQ ID NO: 2051891 - DNA, 25 bp, Homo sapien
gcgcagggcacttcaggaagccttt

SEQ ID NO: 2051892 - DNA, 25 bp, Homo sapien
cctcctctgagtctgcgttggtcaa

SEQ ID NO: 2051893 - DNA, 25 bp, Homo sapien
tgagtctgcgttggtcaaatgaagg

SEQ ID NO: 2051894 - DNA, 25 bp, Homo sapien
ggccagttcaggacttagatagtta

SEQ ID NO: 2051895 - DNA, 25 bp, Homo sapien
gagaataggctttgaggccagttca

SEQ ID NO: 2051896 - DNA, 25 bp, Homo sapien
tccaggctctctaggggacatatga

SEQ ID NO: 2051897 - DNA, 25 bp, Homo sapien
gatagttaatccatacctttccagg

SEQ ID NO: 2051898 - DNA, 25 bp, Homo sapien
catgtccaggtagttgcagcgaggc

SEQ ID NO: 2051899 - DNA, 25 bp, Homo sapien
taagtaaggttgaagcggaagttgc

SEQ ID NO: 2051900 - DNA, 25 bp, Homo sapien
caatatttgatggactggctaaggg

SEQ ID NO: 2051901 - DNA, 25 bp, Homo sapien
ccccattggtgggttccagaaatca

SEQ ID NO: 2051902 - DNA, 25 bp, Homo sapien
gtgctctgcgcaatgcagcctccag

SEQ ID NO: 2051903 - DNA, 25 bp, Homo sapien
catggagcagttatacccctgtggg

SEQ ID NO: 2051904 - DNA, 25 bp, Homo sapien
tccaggagaggcttcagacccagtt

SEQ ID NO: 2051905 - DNA, 25 bp, Homo sapien
catgaatgtcacacgcatgtgccaa

SEQ ID NO: 2051906 - DNA, 25 bp, Homo sapien
ctggaacagggagccaggggaggcc

SEQ ID NO: 2051907 - DNA, 25 bp, Homo sapien
aggggaggccaggctttgaatgagg

SEQ ID NO: 2051908 - DNA, 25 bp, Homo sapien
aggccaggctttgaatgaggccaga

SEQ ID NO: 2051909 - DNA, 25 bp, Homo sapien
ggaggccaggctttgaatgaggcca

SEQ ID NO: 2051910 - DNA, 25 bp, Homo sapien
ggtcctgaggtcgaccctcacattg

SEQ ID NO: 2051911 - DNA, 25 bp, Homo sapien
aggtcctgaggtcgaccctcacatt

SEQ ID NO: 2051912 - DNA, 25 bp, Homo sapien
caggtcctgaggtcgaccctcacat

SEQ ID NO: 2051913 - DNA, 25 bp, Homo sapien
ccaggtcctgaggtcgaccctcaca

SEQ ID NO: 2051914 - DNA, 25 bp, Homo sapien
tctgcagatatcctgcagcaaacct

SEQ ID NO: 2051915 - DNA, 25 bp, Homo sapien
gcagcaaaccttcctctgggcttct

SEQ ID NO: 2051916 - DNA, 25 bp, Homo sapien
ttatcagccttgatcctagcaacag

SEQ ID NO: 2051917 - DNA, 25 bp, Homo sapien
ccttgatcctagcaacagtctgttg

SEQ ID NO: 2051918 - DNA, 25 bp, Homo sapien
tcagccttgatcctagcaacagtct

SEQ ID NO: 2051919 - DNA, 25 bp, Homo sapien
agccttgatcctagcaacagtctgt

SEQ ID NO: 2051920 - DNA, 25 bp, Homo sapien
atagttaaatgtgttagggacgagt

SEQ ID NO: 2051921 - DNA, 25 bp, Homo sapien
ccaggcaccctggtgaaagtggcag

SEQ ID NO: 2051922 - DNA, 25 bp, Homo sapien
caccctggtgaaagtggcagccatc

SEQ ID NO: 2051923 - DNA, 25 bp, Homo sapien
gcaccctggtgaaagtggcagccat

SEQ ID NO: 2051924 - DNA, 25 bp, Homo sapien
caggcaccctggtgaaagtggcagc

SEQ ID NO: 2051925 - DNA, 25 bp, Homo sapien
gaatgccttcagatatggtaccaag

SEQ ID NO: 2051926 - DNA, 25 bp, Homo sapien
tgggaagaatgccttcagatatggt

SEQ ID NO: 2051927 - DNA, 25 bp, Homo sapien
ggaagaatgccttcagatatggtac

SEQ ID NO: 2051928 - DNA, 25 bp, Homo sapien
aagaatgccttcagatatggtacca

SEQ ID NO: 2051929 - DNA, 25 bp, Homo sapien
cacacacaagcttccgtacagaaca

SEQ ID NO: 2051930 - DNA, 25 bp, Homo sapien
cagaacatctgacttttgcaaaaat

SEQ ID NO: 2051931 - DNA, 25 bp, Homo sapien
cattcaaatacgaagggtgtctgaa

SEQ ID NO: 2051932 - DNA, 25 bp, Homo sapien
ggtgtctgaatccaacagtaaaaag

SEQ ID NO: 2051933 - DNA, 25 bp, Homo sapien
gcaggggatcccttgcagagtaagg

SEQ ID NO: 2051934 - DNA, 25 bp, Homo sapien
ggctttgctgcaggtcctcagatac

SEQ ID NO: 2051935 - DNA, 25 bp, Homo sapien
atcccttgcagagtaagggagggca

SEQ ID NO: 2051936 - DNA, 25 bp, Homo sapien
ctttgctgcaggtcctcagatacac

SEQ ID NO: 2051937 - DNA, 25 bp, Homo sapien
gtgccatgctctggggccagcctgc

SEQ ID NO: 2051938 - DNA, 25 bp, Homo sapien
tgccatgctctggggccagcctgct

SEQ ID NO: 2051939 - DNA, 25 bp, Homo sapien
ctctgtttctgtgccatgctctggg

SEQ ID NO: 2051940 - DNA, 25 bp, Homo sapien
catgctctggggccagcctgctcac

SEQ ID NO: 2051941 - DNA, 25 bp, Homo sapien
gtcaacacagcaccttctttccatt

SEQ ID NO: 2051942 - DNA, 25 bp, Homo sapien
tgtgtcaacacagcaccttctttcc

SEQ ID NO: 2051943 - DNA, 25 bp, Homo sapien
tccttcctgtgtcaacacagcacct

SEQ ID NO: 2051944 - DNA, 25 bp, Homo sapien
tcctgtgtcaacacagcaccttctt

SEQ ID NO: 2051945 - DNA, 25 bp, Homo sapien
gacctgggcctggactggcgagggc

SEQ ID NO: 2051946 - DNA, 25 bp, Homo sapien
aatgatgttcgtggctgcctccaga

SEQ ID NO: 2051947 - DNA, 25 bp, Homo sapien
ccagaaccatgggtccgaaatgacc

SEQ ID NO: 2051948 - DNA, 25 bp, Homo sapien
cacaagcaatgatgttcgtggctgc

SEQ ID NO: 2051949 - DNA, 25 bp, Homo sapien
tcctgaaggaccctgtagtttggct

SEQ ID NO: 2051950 - DNA, 25 bp, Homo sapien
gaaggaccctgtagtttggctgctg

SEQ ID NO: 2051951 - DNA, 25 bp, Homo sapien
ctgaaggaccctgtagtttggctgc

SEQ ID NO: 2051952 - DNA, 25 bp, Homo sapien
gtgtcctgaaggaccctgtagtttg

SEQ ID NO: 2051953 - DNA, 25 bp, Homo sapien
agggccgtaggatactcagtgctca

SEQ ID NO: 2051954 - DNA, 25 bp, Homo sapien
gaatcctcacgatcaaaggcagtaa

SEQ ID NO: 2051955 - DNA, 25 bp, Homo sapien
gccagtatgagtcactgaatcctca

SEQ ID NO: 2051956 - DNA, 25 bp, Homo sapien
gaagtcagctcttaagccagtatga

SEQ ID NO: 2051957 - DNA, 25 bp, Homo sapien
ttagccctccttaccagaggacaca

SEQ ID NO: 2051958 - DNA, 25 bp, Homo sapien
gccctccttaccagaggacacacag

SEQ ID NO: 2051959 - DNA, 25 bp, Homo sapien
ccctccttaccagaggacacacagc

SEQ ID NO: 2051960 - DNA, 25 bp, Homo sapien
tagccctccttaccagaggacacac

SEQ ID NO: 2051961 - DNA, 25 bp, Homo sapien
actgtggatgagagctggccctggt

SEQ ID NO: 2051962 - DNA, 25 bp, Homo sapien
gggagatcacagaagtgtgcatgga

SEQ ID NO: 2051963 - DNA, 25 bp, Homo sapien
cagataagcgatgattcatggcaga

SEQ ID NO: 2051964 - DNA, 25 bp, Homo sapien
ggagggaaaccactgtggatgagag

SEQ ID NO: 2051965 - DNA, 25 bp, Homo sapien
gaccttgtcattgttcacgtgtagc

SEQ ID NO: 2051966 - DNA, 25 bp, Homo sapien
tgtcattgttcacgtgtagcctcct

SEQ ID NO: 2051967 - DNA, 25 bp, Homo sapien
tcattgttcacgtgtagcctcctca

SEQ ID NO: 2051968 - DNA, 25 bp, Homo sapien
ctcatgaccttgtcattgttcacgt

SEQ ID NO: 2051969 - DNA, 25 bp, Homo sapien
tcaagcctccactactcacagtcat

SEQ ID NO: 2051970 - DNA, 25 bp, Homo sapien
ctcaggctaaatcgggggtacctca

SEQ ID NO: 2051971 - DNA, 25 bp, Homo sapien
cctcaagcctccactactcacagtc

SEQ ID NO: 2051972 - DNA, 25 bp, Homo sapien
caggctaaatcgggggtacctcaag

SEQ ID NO: 2051973 - DNA, 25 bp, Homo sapien
agtgatagccagagtggatttctac

SEQ ID NO: 2051974 - DNA, 25 bp, Homo sapien
cagtgatagccagagtggatttcta

SEQ ID NO: 2051975 - DNA, 25 bp, Homo sapien
tcagtgatagccagagtggatttct

SEQ ID NO: 2051976 - DNA, 25 bp, Homo sapien
gttcaatcataccacggagtccctt

SEQ ID NO: 2051977 - DNA, 25 bp, Homo sapien
ccttctctgtgttgacatttctgca

SEQ ID NO: 2051978 - DNA, 25 bp, Homo sapien
tgtgttcaatcataccacggagtcc

SEQ ID NO: 2051979 - DNA, 25 bp, Homo sapien
tctctgtgttgacatttctgcagac

SEQ ID NO: 2051980 - DNA, 25 bp, Homo sapien
gatgtctgtgtttggagttgaatga

SEQ ID NO: 2051981 - DNA, 25 bp, Homo sapien
ttgttttgccccgagaatgcttcct

SEQ ID NO: 2051982 - DNA, 25 bp, Homo sapien
gccccgagaatgcttccttatgttc

SEQ ID NO: 2051983 - DNA, 25 bp, Homo sapien
cttccttatgttctgtggcgttttc

SEQ ID NO: 2051984 - DNA, 25 bp, Homo sapien
gggtatgaattgtacttgctggcaa

SEQ ID NO: 2051985 - DNA, 25 bp, Homo sapien
tgcatgggcaggttaaacacaggtc

SEQ ID NO: 2051986 - DNA, 25 bp, Homo sapien
tacttgctggcaatgggagatgatg

SEQ ID NO: 2051987 - DNA, 25 bp, Homo sapien
gttgatacagggaacttcatccaca

SEQ ID NO: 2051988 - DNA, 25 bp, Homo sapien
tctcagggctcggggactctcttgt

SEQ ID NO: 2051989 - DNA, 25 bp, Homo sapien
ctcagggctcggggactctcttgtc

SEQ ID NO: 2051990 - DNA, 25 bp, Homo sapien
ctagtctcagggctcggggactctc

SEQ ID NO: 2051991 - DNA, 25 bp, Homo sapien
ccctagtctcagggctcggggactc

SEQ ID NO: 2051992 - DNA, 25 bp, Homo sapien
caagtgctgaatgatctgagtcatc

SEQ ID NO: 2051993 - DNA, 25 bp, Homo sapien
tctgcaagtgctgaatgatctgagt

SEQ ID NO: 2051994 - DNA, 25 bp, Homo sapien
atttgggtagatttggaggagggtg

SEQ ID NO: 2051995 - DNA, 25 bp, Homo sapien
gaatgatctgagtcatcattgctgt

SEQ ID NO: 2051996 - DNA, 25 bp, Homo sapien
actggccggctggctgttcttctga

SEQ ID NO: 2051997 - DNA, 25 bp, Homo sapien
ggccggctggctgttcttctgattc

SEQ ID NO: 2051998 - DNA, 25 bp, Homo sapien
ggaacactggccggctggctgttct

SEQ ID NO: 2051999 - DNA, 25 bp, Homo sapien
tgtggaccggggaacactggccggc

SEQ ID NO: 2052000 - DNA, 25 bp, Homo sapien
tgcctggtcaactcgtgggcaatgc

SEQ ID NO: 2052001 - DNA, 25 bp, Homo sapien
ctcgtgggcaatgctgttgtagtac

SEQ ID NO: 2052002 - DNA, 25 bp, Homo sapien
tggtcaactcgtgggcaatgctgtt

SEQ ID NO: 2052003 - DNA, 25 bp, Homo sapien
caactcgtgggcaatgctgttgtag

SEQ ID NO: 2052004 - DNA, 25 bp, Homo sapien
gctgatagtccgtgccacatcactg

SEQ ID NO: 2052005 - DNA, 25 bp, Homo sapien
ggcttctgtgctgatagtccgtgcc

SEQ ID NO: 2052006 - DNA, 25 bp, Homo sapien
tgtgctgatagtccgtgccacatca

SEQ ID NO: 2052007 - DNA, 25 bp, Homo sapien
tctgtgctgatagtccgtgccacat

SEQ ID NO: 2052008 - DNA, 25 bp, Homo sapien
ctcaggcatcgtatttcccaaaggt

SEQ ID NO: 2052009 - DNA, 25 bp, Homo sapien
cttggtcatgtaggcgatttccggg

SEQ ID NO: 2052010 - DNA, 25 bp, Homo sapien
ccaaaggtaagcagagttaaggtag

SEQ ID NO: 2052011 - DNA, 25 bp, Homo sapien
gagttaaggtaggatagaaattcac

SEQ ID NO: 2052012 - DNA, 25 bp, Homo sapien
tagtagcatagaacaagccactggg

SEQ ID NO: 2052013 - DNA, 25 bp, Homo sapien
tgaccgtgcccaacatggcactggc

SEQ ID NO: 2052014 - DNA, 25 bp, Homo sapien
gagtccaagagagatgaccgtgccc

SEQ ID NO: 2052015 - DNA, 25 bp, Homo sapien
ctgccgcgaggcagtgtcagagtcc

SEQ ID NO: 2052016 - DNA, 25 bp, Homo sapien
catcactctatccacgagcgagtac

SEQ ID NO: 2052017 - DNA, 25 bp, Homo sapien
gcttctaagagtctatcacctcctt

SEQ ID NO: 2052018 - DNA, 25 bp, Homo sapien
tatccacgagcgagtacggtagctt

SEQ ID NO: 2052019 - DNA, 25 bp, Homo sapien
gcgagtacggtagcttctaagagtc

SEQ ID NO: 2052020 - DNA, 25 bp, Homo sapien
tatgcatcggtgtgttcaaactgtt

SEQ ID NO: 2052021 - DNA, 25 bp, Homo sapien
tgcatcggtgtgttcaaactgttct

SEQ ID NO: 2052022 - DNA, 25 bp, Homo sapien
tttatgcatcggtgtgttcaaactg

SEQ ID NO: 2052023 - DNA, 25 bp, Homo sapien
tttgtttatgcatcggtgtgttcaa

SEQ ID NO: 2052024 - DNA, 25 bp, Homo sapien
atccttcaggcagcaccaagagtca

SEQ ID NO: 2052025 - DNA, 25 bp, Homo sapien
ccgagtggtcttctcacatcatcct

SEQ ID NO: 2052026 - DNA, 25 bp, Homo sapien
attgtatctccaggtcatcaccgag

SEQ ID NO: 2052027 - DNA, 25 bp, Homo sapien
acatcatccttcaggcagcaccaag

SEQ ID NO: 2052028 - DNA, 25 bp, Homo sapien
ctgttctccacattctccaggtcat

SEQ ID NO: 2052029 - DNA, 25 bp, Homo sapien
cacattctccaggtcatcctccttc

SEQ ID NO: 2052030 - DNA, 25 bp, Homo sapien
ccaggtcatcctccttcacacccat

SEQ ID NO: 2052031 - DNA, 25 bp, Homo sapien
tgttctccacattctccaggtcatc

SEQ ID NO: 2052032 - DNA, 25 bp, Homo sapien
tcatcttcgttgtggaagatgttct

SEQ ID NO: 2052033 - DNA, 25 bp, Homo sapien
ttttcctgtgggcatccatttgtcc

SEQ ID NO: 2052034 - DNA, 25 bp, Homo sapien
gctgtcatcattgttagcgttgact

SEQ ID NO: 2052035 - DNA, 25 bp, Homo sapien
gttagcgttgactgtctttgtcatc

SEQ ID NO: 2052036 - DNA, 25 bp, Homo sapien
tgcttggagtgcactcttccattgg

SEQ ID NO: 2052037 - DNA, 25 bp, Homo sapien
ggagtgcactcttccattgggtgcc

SEQ ID NO: 2052038 - DNA, 25 bp, Homo sapien
tcatcgagctgaggcatcttctctt

SEQ ID NO: 2052039 - DNA, 25 bp, Homo sapien
attgggtgccccctggactcttcat

SEQ ID NO: 2052040 - DNA, 25 bp, Homo sapien
gggctacttgtgtgccataggcaat

SEQ ID NO: 2052041 - DNA, 25 bp, Homo sapien
tgtgttgtactttagtcaggctggg

SEQ ID NO: 2052042 - DNA, 25 bp, Homo sapien
gattctgataattctcacctacagg

SEQ ID NO: 2052043 - DNA, 25 bp, Homo sapien
cactatcgtatagaagagatttcac

SEQ ID NO: 2052044 - DNA, 25 bp, Homo sapien
ccctttgctggttaaagagggcaat

SEQ ID NO: 2052045 - DNA, 25 bp, Homo sapien
gagggagcagatttatgtaccagag

SEQ ID NO: 2052046 - DNA, 25 bp, Homo sapien
cagaaaatgttgagggagcagattt

SEQ ID NO: 2052047 - DNA, 25 bp, Homo sapien
taaagagggcaatcctgttacaatt

SEQ ID NO: 2052048 - DNA, 25 bp, Homo sapien
taagtgccccgcgtatgggtttgct

SEQ ID NO: 2052049 - DNA, 25 bp, Homo sapien
tgccctcaggtgatcacaggacctg

SEQ ID NO: 2052050 - DNA, 25 bp, Homo sapien
ccggatattgatggctgtgtagcag

SEQ ID NO: 2052051 - DNA, 25 bp, Homo sapien
catacaaccactgatagagagctga

SEQ ID NO: 2052052 - DNA, 25 bp, Homo sapien
gactcgcccaatgtcacagatgatg

SEQ ID NO: 2052053 - DNA, 25 bp, Homo sapien
tcatggaccgcatcgtcaagtcagc

SEQ ID NO: 2052054 - DNA, 25 bp, Homo sapien
tagtggagcccatcgtcaagtccag

SEQ ID NO: 2052055 - DNA, 25 bp, Homo sapien
tgaattgtcagtggctcccagagtg

SEQ ID NO: 2052056 - DNA, 25 bp, Homo sapien
aaactagggtagcaagggatttgat

SEQ ID NO: 2052057 - DNA, 25 bp, Homo sapien
cttgaaatatttaacgtggcctagg

SEQ ID NO: 2052058 - DNA, 25 bp, Homo sapien
gggttcatcgctgcccacaagcatg

SEQ ID NO: 2052059 - DNA, 25 bp, Homo sapien
tttttggtctgaacctactgcctgc

SEQ ID NO: 2052060 - DNA, 25 bp, Homo sapien
tagaggctgctttagtctccactgg

SEQ ID NO: 2052061 - DNA, 25 bp, Homo sapien
ttcagagagccccaaacttgttcca

SEQ ID NO: 2052062 - DNA, 25 bp, Homo sapien
tgacatctccctgcatgagctgtgg

SEQ ID NO: 2052063 - DNA, 25 bp, Homo sapien
tgtggcctgtgtatgttggacccag

SEQ ID NO: 2052064 - DNA, 25 bp, Homo sapien
tgagccaaacattcagtctggaggc

SEQ ID NO: 2052065 - DNA, 25 bp, Homo sapien
tatgttgacccctgttccaagtgct

SEQ ID NO: 2052066 - DNA, 25 bp, Homo sapien
cagtaacacgatttgagagaacccc

SEQ ID NO: 2052067 - DNA, 25 bp, Homo sapien
gcttcagggcccaaaggtaggcttg

SEQ ID NO: 2052068 - DNA, 25 bp, Homo sapien
tgtgacactcataggttactcccag

SEQ ID NO: 2052069 - DNA, 25 bp, Homo sapien
catactgggtagatgctgaggtctc

SEQ ID NO: 2052070 - DNA, 25 bp, Homo sapien
ccactgcagtgcgaagaaccctgaa

SEQ ID NO: 2052071 - DNA, 25 bp, Homo sapien
gaggctaagacccacagtactcatg

SEQ ID NO: 2052072 - DNA, 25 bp, Homo sapien
ggcaatctgattagcttcacagact

SEQ ID NO: 2052073 - DNA, 25 bp, Homo sapien
tcttgattccgtgacacccggttta

SEQ ID NO: 2052074 - DNA, 25 bp, Homo sapien
acagactgagtctccacaacaccaa

SEQ ID NO: 2052075 - DNA, 25 bp, Homo sapien
taccttctccatcgtgtcagctgtg

SEQ ID NO: 2052076 - DNA, 25 bp, Homo sapien
tagatgtaacaaatgtttatacaaa

SEQ ID NO: 2052077 - DNA, 25 bp, Homo sapien
ttatacaaatacatacatgtacacc

SEQ ID NO: 2052078 - DNA, 25 bp, Homo sapien
aaatacatacatgtacaccatgttt

SEQ ID NO: 2052079 - DNA, 25 bp, Homo sapien
ttagatgtaacaaatgtttatacaa

SEQ ID NO: 2052080 - DNA, 25 bp, Homo sapien
tggaacggccttcagatcctttggg

SEQ ID NO: 2052081 - DNA, 25 bp, Homo sapien
tcagaagcaccctcgcttggaacgg

SEQ ID NO: 2052082 - DNA, 25 bp, Homo sapien
cctcgcttggaacggccttcagatc

SEQ ID NO: 2052083 - DNA, 25 bp, Homo sapien
gaacaggaccttaaacagttccaca

SEQ ID NO: 2052084 - DNA, 25 bp, Homo sapien
gctgttgttaacctaacatctatca

SEQ ID NO: 2052085 - DNA, 25 bp, Homo sapien
gcctaagtccttgttacaggacgtg

SEQ ID NO: 2052086 - DNA, 25 bp, Homo sapien
tattttgttaatagagtgagtaaca

SEQ ID NO: 2052087 - DNA, 25 bp, Homo sapien
aacagtgtgctctttgaaactcctt

SEQ ID NO: 2052088 - DNA, 25 bp, Homo sapien
tcatcattgtgcagatattatagac

SEQ ID NO: 2052089 - DNA, 25 bp, Homo sapien
cagagagcctcagaatcgcatgctt

SEQ ID NO: 2052090 - DNA, 25 bp, Homo sapien
gtttacaaatctgaactattccaca

SEQ ID NO: 2052091 - DNA, 25 bp, Homo sapien
gaagcaaaaatgagagcagcagttt

SEQ ID NO: 2052092 - DNA, 25 bp, Homo sapien
agcaactgtagagcaatactgaggg

SEQ ID NO: 2052093 - DNA, 25 bp, Homo sapien
ggtggtcataccctccacggaagcc

SEQ ID NO: 2052094 - DNA, 25 bp, Homo sapien
ggtcacatggttccctgtgaggaac

SEQ ID NO: 2052095 - DNA, 25 bp, Homo sapien
tgagacccagatggtggtcataccc

SEQ ID NO: 2052096 - DNA, 25 bp, Homo sapien
tggatgtgaacaccccaggagagcc

SEQ ID NO: 2052097 - DNA, 25 bp, Homo sapien
gacatttgtcaaatagtacatgatg

SEQ ID NO: 2052098 - DNA, 25 bp, Homo sapien
ggagagcctggaacttgcgagagtt

SEQ ID NO: 2052099 - DNA, 25 bp, Homo sapien
gacagggagcttgttgaagcagaca

SEQ ID NO: 2052100 - DNA, 25 bp, Homo sapien
ctgtacattatagacggttgtgttt

SEQ ID NO: 2052101 - DNA, 25 bp, Homo sapien
gtacattatagacggttgtgtttaa

SEQ ID NO: 2052102 - DNA, 25 bp, Homo sapien
acattatagacggttgtgtttaatc

SEQ ID NO: 2052103 - DNA, 25 bp, Homo sapien
attatagacggttgtgtttaatcac

SEQ ID NO: 2052104 - DNA, 25 bp, Homo sapien
agcatcttgaatagtgccactgcag

SEQ ID NO: 2052105 - DNA, 25 bp, Homo sapien
tgtccctccaccagagattgtggtt

SEQ ID NO: 2052106 - DNA, 25 bp, Homo sapien
caatctacacatcggactcacctgg

SEQ ID NO: 2052107 - DNA, 25 bp, Homo sapien
tagggtggtgattcccagcccaatc

SEQ ID NO: 2052108 - DNA, 25 bp, Homo sapien
taggacatgtttgagcaaagctgcc

SEQ ID NO: 2052109 - DNA, 25 bp, Homo sapien
tgaaaaatgcccagtaacatgggag

SEQ ID NO: 2052110 - DNA, 25 bp, Homo sapien
caattaactgatcaactaggacatg

SEQ ID NO: 2052111 - DNA, 25 bp, Homo sapien
catcggaagtggtataaagggccag

SEQ ID NO: 2052112 - DNA, 25 bp, Homo sapien
cattgttaacacagtgcagggggaa

SEQ ID NO: 2052113 - DNA, 25 bp, Homo sapien
gccaggagtaggagacttagtttcc

SEQ ID NO: 2052114 - DNA, 25 bp, Homo sapien
tgttcatagatacacctaagatggt

SEQ ID NO: 2052115 - DNA, 25 bp, Homo sapien
cctggtctgtgagtggtctccacat

SEQ ID NO: 2052116 - DNA, 25 bp, Homo sapien
tctgactgggctgactgacttggga

SEQ ID NO: 2052117 - DNA, 25 bp, Homo sapien
tgtgcaccgcgcacccgttatggag

SEQ ID NO: 2052118 - DNA, 25 bp, Homo sapien
gagtcatggtccttcccttagggcc

SEQ ID NO: 2052119 - DNA, 25 bp, Homo sapien
ttatggaggtaactgtgcgccaggc

SEQ ID NO: 2052120 - DNA, 25 bp, Homo sapien
catccgtgtatgtaggttcagcacc

SEQ ID NO: 2052121 - DNA, 25 bp, Homo sapien
gatactttctcgagggagggccaag

SEQ ID NO: 2052122 - DNA, 25 bp, Homo sapien
gaaaaaacgtgttacatatggccca

SEQ ID NO: 2052123 - DNA, 25 bp, Homo sapien
tatgaaggtggtcctaacgcatgtg

SEQ ID NO: 2052124 - DNA, 25 bp, Homo sapien
tgtcacaaagttgttccgtcagtct

SEQ ID NO: 2052125 - DNA, 25 bp, Homo sapien
tccccttggccagcagagagtctgt

SEQ ID NO: 2052126 - DNA, 25 bp, Homo sapien
ccatcctgttatggtcagaaactca

SEQ ID NO: 2052127 - DNA, 25 bp, Homo sapien
tcagtttctaaggttctctggagtc

SEQ ID NO: 2052128 - DNA, 25 bp, Homo sapien
cataactgaggaatgattgcgacac

SEQ ID NO: 2052129 - DNA, 25 bp, Homo sapien
cccatgctgttggattggcgcctgc

SEQ ID NO: 2052130 - DNA, 25 bp, Homo sapien
ttgcgacactgttgttcccatgctg

SEQ ID NO: 2052131 - DNA, 25 bp, Homo sapien
tcatgctgctgactctttgcttgtg

SEQ ID NO: 2052132 - DNA, 25 bp, Homo sapien
ggctcaacagccagtttccagtgaa

SEQ ID NO: 2052133 - DNA, 25 bp, Homo sapien
gctcaacagccagtttccagtgaac

SEQ ID NO: 2052134 - DNA, 25 bp, Homo sapien
ctcaacagccagtttccagtgaaca

SEQ ID NO: 2052135 - DNA, 25 bp, Homo sapien
cagagagagacttcgcccctaatag

SEQ ID NO: 2052136 - DNA, 25 bp, Homo sapien
tcctgaactatgagaggtcactgca

SEQ ID NO: 2052137 - DNA, 25 bp, Homo sapien
catgcatagcatgttacaggtagca

SEQ ID NO: 2052138 - DNA, 25 bp, Homo sapien
caatgggctaggaaataaagttgct

SEQ ID NO: 2052139 - DNA, 25 bp, Homo sapien
gaaatgccacctcaatagaaggaag

SEQ ID NO: 2052140 - DNA, 25 bp, Homo sapien
catgcgattaggaatgttgtgagaa

SEQ ID NO: 2052141 - DNA, 25 bp, Homo sapien
agctagctatccctctgtcagcagg

SEQ ID NO: 2052142 - DNA, 25 bp, Homo sapien
gagctcattcacagagatgcaacac

SEQ ID NO: 2052143 - DNA, 25 bp, Homo sapien
tctgcagctaaaatgggtagcagca

SEQ ID NO: 2052144 - DNA, 25 bp, Homo sapien
gctttaagatgcagaaaatcctgaa

SEQ ID NO: 2052145 - DNA, 25 bp, Homo sapien
tcctgaagacctagaacctgctcct

SEQ ID NO: 2052146 - DNA, 25 bp, Homo sapien
tctgaggctaggaggacgatcccaa

SEQ ID NO: 2052147 - DNA, 25 bp, Homo sapien
tatgtctacattgtgctctgagtct

SEQ ID NO: 2052148 - DNA, 25 bp, Homo sapien
ttctctcttgacatatcccacctag

SEQ ID NO: 2052149 - DNA, 25 bp, Homo sapien
atgtgaagtcaatactgtcaaatat

SEQ ID NO: 2052150 - DNA, 25 bp, Homo sapien
tagaagatacagtctctcctcagca

SEQ ID NO: 2052151 - DNA, 25 bp, Homo sapien
ggttgcttactagtgtgtagccctc

SEQ ID NO: 2052152 - DNA, 25 bp, Homo sapien
ccccatctgatgtggtctgcatttg

SEQ ID NO: 2052153 - DNA, 25 bp, Homo sapien
agatctggttgcttactagtgtgta

SEQ ID NO: 2052154 - DNA, 25 bp, Homo sapien
caatggattttccagagtaacatga

SEQ ID NO: 2052155 - DNA, 25 bp, Homo sapien
cagatttgagtgacaccgctgacct

SEQ ID NO: 2052156 - DNA, 25 bp, Homo sapien
ggttcctccgctgcttcacttgtgg

SEQ ID NO: 2052157 - DNA, 25 bp, Homo sapien
gagtggagtcagtcctgctcttccc

SEQ ID NO: 2052158 - DNA, 25 bp, Homo sapien
tagaatctcctatccagtgccgttg

SEQ ID NO: 2052159 - DNA, 25 bp, Homo sapien
gcagccagttagagcttgccctgat

SEQ ID NO: 2052160 - DNA, 25 bp, Homo sapien
caaaagtgcatgtggagaatcctgt

SEQ ID NO: 2052161 - DNA, 25 bp, Homo sapien
tggaggagatatcgaaggcgctttc

SEQ ID NO: 2052162 - DNA, 25 bp, Homo sapien
gaagcccaccctgttctaagcagga

SEQ ID NO: 2052163 - DNA, 25 bp, Homo sapien
tgaggaagacaaactttataggaag

SEQ ID NO: 2052164 - DNA, 25 bp, Homo sapien
ggtccacacgcaaaactggaggtca

SEQ ID NO: 2052165 - DNA, 25 bp, Homo sapien
tagtggctcctgaatgaacaatgca

SEQ ID NO: 2052166 - DNA, 25 bp, Homo sapien
tcaactagaaagaggcctacggtcc

SEQ ID NO: 2052167 - DNA, 25 bp, Homo sapien
caaattccccattgcttccagaggc

SEQ ID NO: 2052168 - DNA, 25 bp, Homo sapien
gggtcctgagggccctttctggcca

SEQ ID NO: 2052169 - DNA, 25 bp, Homo sapien
ccgggtggggtttccagagccagag

SEQ ID NO: 2052170 - DNA, 25 bp, Homo sapien
agtggagggaccggagggtcctgag

SEQ ID NO: 2052171 - DNA, 25 bp, Homo sapien
agccagaggaggatttagaagtgga

SEQ ID NO: 2052172 - DNA, 25 bp, Homo sapien
gctgcacaggccctttcttttttgg

SEQ ID NO: 2052173 - DNA, 25 bp, Homo sapien
gcaggctgcacaggccctttctttt

SEQ ID NO: 2052174 - DNA, 25 bp, Homo sapien
aggctgcacaggccctttctttttt

SEQ ID NO: 2052175 - DNA, 25 bp, Homo sapien
ctgcaggctgcacaggccctttctt

SEQ ID NO: 2052176 - DNA, 25 bp, Homo sapien
taggtgataggtttatacatgctga

SEQ ID NO: 2052177 - DNA, 25 bp, Homo sapien
aaaggagtcggtctcttctgtgagc

SEQ ID NO: 2052178 - DNA, 25 bp, Homo sapien
tagcttattcacaaaggagtcggtc

SEQ ID NO: 2052179 - DNA, 25 bp, Homo sapien
taaacactttgctgggatctagctt

SEQ ID NO: 2052180 - DNA, 25 bp, Homo sapien
tgatttagtgagtcctgagcctggg

SEQ ID NO: 2052181 - DNA, 25 bp, Homo sapien
cccaaagcactagaggacagcgtct

SEQ ID NO: 2052182 - DNA, 25 bp, Homo sapien
cattgctttatgaggtctcaggacc

SEQ ID NO: 2052183 - DNA, 25 bp, Homo sapien
cctctggtaagatagacacattgct

SEQ ID NO: 2052184 - DNA, 25 bp, Homo sapien
ggaaactcgtaatagcagctgccac

SEQ ID NO: 2052185 - DNA, 25 bp, Homo sapien
catctgtatgcctgaaatggtgacc

SEQ ID NO: 2052186 - DNA, 25 bp, Homo sapien
tatagctgcaagaaaccaccacgaa

SEQ ID NO: 2052187 - DNA, 25 bp, Homo sapien
taatataaatgaggcacacccacac

SEQ ID NO: 2052188 - DNA, 25 bp, Homo sapien
acaatggcaggtgttcctcccttac

SEQ ID NO: 2052189 - DNA, 25 bp, Homo sapien
ttacaatggcaggtgttcctccctt

SEQ ID NO: 2052190 - DNA, 25 bp, Homo sapien
tacaatggcaggtgttcctccctta

SEQ ID NO: 2052191 - DNA, 25 bp, Homo sapien
gctggtgaaggcatattgccactgg

SEQ ID NO: 2052192 - DNA, 25 bp, Homo sapien
tgtccaggaaccagatctcagtgtc

SEQ ID NO: 2052193 - DNA, 25 bp, Homo sapien
tgagcaggcggtaataggcagtaaa

SEQ ID NO: 2052194 - DNA, 25 bp, Homo sapien
aatgccagtataacgctctgtccag

SEQ ID NO: 2052195 - DNA, 25 bp, Homo sapien
ctgccattgcatgaatccagctcaa

SEQ ID NO: 2052196 - DNA, 25 bp, Homo sapien
cacactgcgagagtcaaagtgaggc

SEQ ID NO: 2052197 - DNA, 25 bp, Homo sapien
gctcaaatatcacactgcgagagtc

SEQ ID NO: 2052198 - DNA, 25 bp, Homo sapien
cactgccattgcatgaatccagctc

SEQ ID NO: 2052199 - DNA, 25 bp, Homo sapien
gcgcccggtcagaaccatgtaaaag

SEQ ID NO: 2052200 - DNA, 25 bp, Homo sapien
tgtaaaagccctctaagtcatgtgg

SEQ ID NO: 2052201 - DNA, 25 bp, Homo sapien
agccctctaagtcatgtggcataac

SEQ ID NO: 2052202 - DNA, 25 bp, Homo sapien
ccgcgcccggtcagaaccatgtaaa

SEQ ID NO: 2052203 - DNA, 25 bp, Homo sapien
tgaaactgtgcctgttgaccaacgt

SEQ ID NO: 2052204 - DNA, 25 bp, Homo sapien
tagctatagtcattatgctgtgcaa

SEQ ID NO: 2052205 - DNA, 25 bp, Homo sapien
actgctgatctgttacctgttatct

SEQ ID NO: 2052206 - DNA, 25 bp, Homo sapien
acaacacgctattttaagatgtata

SEQ ID NO: 2052207 - DNA, 25 bp, Homo sapien
gagtgggtgcattaggaagtgaata

SEQ ID NO: 2052208 - DNA, 25 bp, Homo sapien
ttcatgtgtatcgtcctccaggtct

SEQ ID NO: 2052209 - DNA, 25 bp, Homo sapien
atgctgttaattgccatgcttccca

SEQ ID NO: 2052210 - DNA, 25 bp, Homo sapien
gtgggtgcattaggaagtgaataca

SEQ ID NO: 2052211 - DNA, 25 bp, Homo sapien
tcaggtaaaagttcttcacatcttc

SEQ ID NO: 2052212 - DNA, 25 bp, Homo sapien
catgtggaagccattggtcatcagg

SEQ ID NO: 2052213 - DNA, 25 bp, Homo sapien
tccatgtcatgtggaagccattggt

SEQ ID NO: 2052214 - DNA, 25 bp, Homo sapien
tgtcatgtggaagccattggtcatc

SEQ ID NO: 2052215 - DNA, 25 bp, Homo sapien
tgttctgcaaggtccttgctcctct

SEQ ID NO: 2052216 - DNA, 25 bp, Homo sapien
ttctgcaaggtccttgctcctctcg

SEQ ID NO: 2052217 - DNA, 25 bp, Homo sapien
gtgttctgcaaggtccttgctcctc

SEQ ID NO: 2052218 - DNA, 25 bp, Homo sapien
ctgcaaggtccttgctcctctcgtc

SEQ ID NO: 2052219 - DNA, 25 bp, Homo sapien
ttttgttgagtagggtatgagagtt

SEQ ID NO: 2052220 - DNA, 25 bp, Homo sapien
tttgttttgttgagtagggtatgag

SEQ ID NO: 2052221 - DNA, 25 bp, Homo sapien
ggccagagctgcattgcttaacagc

SEQ ID NO: 2052222 - DNA, 25 bp, Homo sapien
cagagctgcattgcttaacagccaa

SEQ ID NO: 2052223 - DNA, 25 bp, Homo sapien
aagcctgctcctgtgtcaacatgct

SEQ ID NO: 2052224 - DNA, 25 bp, Homo sapien
ttctttaaactctttcagcctctgt

SEQ ID NO: 2052225 - DNA, 25 bp, Homo sapien
cactgtgccggccaaattctttaaa

SEQ ID NO: 2052226 - DNA, 25 bp, Homo sapien
gagctggagtattgccatgttgtcc

SEQ ID NO: 2052227 - DNA, 25 bp, Homo sapien
gctaattaacattattgttttgtag

SEQ ID NO: 2052228 - DNA, 25 bp, Homo sapien
catgttctggacagcatgacactta

SEQ ID NO: 2052229 - DNA, 25 bp, Homo sapien
gctgtggtctgagtaaatattcttc

SEQ ID NO: 2052230 - DNA, 25 bp, Homo sapien
caactttgaatgtccactgcttctg

SEQ ID NO: 2052231 - DNA, 25 bp, Homo sapien
tttacactgacctctctttgatggg

SEQ ID NO: 2052232 - DNA, 25 bp, Homo sapien
cgttcagcaggaggcttttctatga

SEQ ID NO: 2052233 - DNA, 25 bp, Homo sapien
ccaggaagaaatcatatgacgttca

SEQ ID NO: 2052234 - DNA, 25 bp, Homo sapien
gaaatcatatgacgttcagcaggag

SEQ ID NO: 2052235 - DNA, 25 bp, Homo sapien
ttctatgatggtcacctcagtcaca

SEQ ID NO: 2052236 - DNA, 25 bp, Homo sapien
taagaacatccaatccttctcatga

SEQ ID NO: 2052237 - DNA, 25 bp, Homo sapien
acatttctacgctagttgttgacta

SEQ ID NO: 2052238 - DNA, 25 bp, Homo sapien
gttgcaattggtccgctgtcataca

SEQ ID NO: 2052239 - DNA, 25 bp, Homo sapien
aaaaaagagtctgtagagttgcaat

SEQ ID NO: 2052240 - DNA, 25 bp, Homo sapien
ggtagcttactccaaaggtgggtgc

SEQ ID NO: 2052241 - DNA, 25 bp, Homo sapien
aaaactctctgtggtagcttactcc

SEQ ID NO: 2052242 - DNA, 25 bp, Homo sapien
ttagatatgccgtggattaaaactc

SEQ ID NO: 2052243 - DNA, 25 bp, Homo sapien
gcccatagcacttctcattgagagg

SEQ ID NO: 2052244 - DNA, 25 bp, Homo sapien
aatgtaacataatcaaggtgtggta

SEQ ID NO: 2052245 - DNA, 25 bp, Homo sapien
taacataatcaaggtgtggtatctc

SEQ ID NO: 2052246 - DNA, 25 bp, Homo sapien
ggataatcttgcttttgccatttaa

SEQ ID NO: 2052247 - DNA, 25 bp, Homo sapien
atcaaggtgtggtatctcatcatct

SEQ ID NO: 2052248 - DNA, 25 bp, Homo sapien
tcctccacaccctctcggcaccgtg

SEQ ID NO: 2052249 - DNA, 25 bp, Homo sapien
tctcggcaccgtgccccctttcctc

SEQ ID NO: 2052250 - DNA, 25 bp, Homo sapien
cccgcacctcatccctccgctcctc

SEQ ID NO: 2052251 - DNA, 25 bp, Homo sapien
tccacaccctctcggcaccgtgccc

SEQ ID NO: 2052252 - DNA, 25 bp, Homo sapien
ctaggatgcgcgtgatgcccagggt

SEQ ID NO: 2052253 - DNA, 25 bp, Homo sapien
taggatgcgcgtgatgcccagggtc

SEQ ID NO: 2052254 - DNA, 25 bp, Homo sapien
cccagccccggggacgatgcctcct

SEQ ID NO: 2052255 - DNA, 25 bp, Homo sapien
gccccggggacgatgcctcctcctc

SEQ ID NO: 2052256 - DNA, 25 bp, Homo sapien
agccccggggacgatgcctcctcct

SEQ ID NO: 2052257 - DNA, 25 bp, Homo sapien
gcagcccagccccggggacgatgcc

SEQ ID NO: 2052258 - DNA, 25 bp, Homo sapien
ggctcgcgaccgcgattcgcgcgcg

SEQ ID NO: 2052259 - DNA, 25 bp, Homo sapien
gcgaccgcgattcgcgcgcggcggg

SEQ ID NO: 2052260 - DNA, 25 bp, Homo sapien
tcgcgaccgcgattcgcgcgcggcg

SEQ ID NO: 2052261 - DNA, 25 bp, Homo sapien
ctcgcgaccgcgattcgcgcgcggc

SEQ ID NO: 2052262 - DNA, 25 bp, Homo sapien
aggccaatttcatggcatgccggga

SEQ ID NO: 2052263 - DNA, 25 bp, Homo sapien
tggagccgggactgtatcctttgcc

SEQ ID NO: 2052264 - DNA, 25 bp, Homo sapien
ccccgagtggcggttgtttcaagat

SEQ ID NO: 2052265 - DNA, 25 bp, Homo sapien
aacggtagttctcggcgcctgaaag

SEQ ID NO: 2052266 - DNA, 25 bp, Homo sapien
tctttagtctgcattgctaggagca

SEQ ID NO: 2052267 - DNA, 25 bp, Homo sapien
ggagcaagtcaggacctttcggact

SEQ ID NO: 2052268 - DNA, 25 bp, Homo sapien
taaaaggccctccagtgatgatgta

SEQ ID NO: 2052269 - DNA, 25 bp, Homo sapien
ctgacttgagtgtgcggagctagct

SEQ ID NO: 2052270 - DNA, 25 bp, Homo sapien
gactgatgcttcaatctccatggag

SEQ ID NO: 2052271 - DNA, 25 bp, Homo sapien
aatccttaggaatttctgctgaagg

SEQ ID NO: 2052272 - DNA, 25 bp, Homo sapien
cagggtgactgatgcttcaatctcc

SEQ ID NO: 2052273 - DNA, 25 bp, Homo sapien
ctgatgcttcaatctccatggagtc

SEQ ID NO: 2052274 - DNA, 25 bp, Homo sapien
tattgttgtaatcagaggcgtagca

SEQ ID NO: 2052275 - DNA, 25 bp, Homo sapien
cagaggcgtagcagttacctttgat

SEQ ID NO: 2052276 - DNA, 25 bp, Homo sapien
taatcagaggcgtagcagttacctt

SEQ ID NO: 2052277 - DNA, 25 bp, Homo sapien
taggttgatattgttgtaatcagag

SEQ ID NO: 2052278 - DNA, 25 bp, Homo sapien
tgcttgtgttgcagcacaccagttc

SEQ ID NO: 2052279 - DNA, 25 bp, Homo sapien
tctgtgttgctactccctctgctgc

SEQ ID NO: 2052280 - DNA, 25 bp, Homo sapien
ggttctgactcttcatgttggacca

SEQ ID NO: 2052281 - DNA, 25 bp, Homo sapien
gatacactctgtctaaatgccctcc

SEQ ID NO: 2052282 - DNA, 25 bp, Homo sapien
gccagaccggacatcatatgaaagt

SEQ ID NO: 2052283 - DNA, 25 bp, Homo sapien
caaagctgaagaaacgcattctgtc

SEQ ID NO: 2052284 - DNA, 25 bp, Homo sapien
tggatgtgctcttctatctagggaa

SEQ ID NO: 2052285 - DNA, 25 bp, Homo sapien
cacttagaagtgaggcaatattttc

SEQ ID NO: 2052286 - DNA, 25 bp, Homo sapien
taaatgattaggtctttccagtggg

SEQ ID NO: 2052287 - DNA, 25 bp, Homo sapien
caattgcgaaagttctctgctcagt

SEQ ID NO: 2052288 - DNA, 25 bp, Homo sapien
tagagaactctgtattgtgtgcaaa

SEQ ID NO: 2052289 - DNA, 25 bp, Homo sapien
catttagtgcttcaaacacctgtgc

SEQ ID NO: 2052290 - DNA, 25 bp, Homo sapien
cattccagcaggtttactgtggaga

SEQ ID NO: 2052291 - DNA, 25 bp, Homo sapien
atgaggagtaaataatagtattcat

SEQ ID NO: 2052292 - DNA, 25 bp, Homo sapien
tcattccagcaggtttactgtggag

SEQ ID NO: 2052293 - DNA, 25 bp, Homo sapien
ttcattccagcaggtttactgtgga

SEQ ID NO: 2052294 - DNA, 25 bp, Homo sapien
tagttgtttatagcatgaggacaat

SEQ ID NO: 2052295 - DNA, 25 bp, Homo sapien
tttatagcatgaggacaattcttgt

SEQ ID NO: 2052296 - DNA, 25 bp, Homo sapien
aattcttgtcccaatttattcatct

SEQ ID NO: 2052297 - DNA, 25 bp, Homo sapien
gtcctttctccaacatctggaactg

SEQ ID NO: 2052298 - DNA, 25 bp, Homo sapien
gttacatttgccacattttaagtta

SEQ ID NO: 2052299 - DNA, 25 bp, Homo sapien
tacatttgccacattttaagttatc

SEQ ID NO: 2052300 - DNA, 25 bp, Homo sapien
acatttgccacattttaagttatca

SEQ ID NO: 2052301 - DNA, 25 bp, Homo sapien
ctgttacatttgccacattttaagt

SEQ ID NO: 2052302 - DNA, 25 bp, Homo sapien
cttgggtctccattgtgtaggtagt

SEQ ID NO: 2052303 - DNA, 25 bp, Homo sapien
tggagaaataaaccttgggtctcca

SEQ ID NO: 2052304 - DNA, 25 bp, Homo sapien
taaaccttgggtctccattgtgtag

SEQ ID NO: 2052305 - DNA, 25 bp, Homo sapien
agaaataaaccttgggtctccattg

SEQ ID NO: 2052306 - DNA, 25 bp, Homo sapien
gatgacgatggcagcagattgtttt

SEQ ID NO: 2052307 - DNA, 25 bp, Homo sapien
ctgcagattttatgatgacgatggc

SEQ ID NO: 2052308 - DNA, 25 bp, Homo sapien
cgatggcagcagattgtttttcatg

SEQ ID NO: 2052309 - DNA, 25 bp, Homo sapien
tgcagattttatgatgacgatggca

SEQ ID NO: 2052310 - DNA, 25 bp, Homo sapien
tgtagtcccatagttgcatttgagt

SEQ ID NO: 2052311 - DNA, 25 bp, Homo sapien
tatgcctattccttcacctcatgtg

SEQ ID NO: 2052312 - DNA, 25 bp, Homo sapien
ccagtacttcaagattgtagtccca

SEQ ID NO: 2052313 - DNA, 25 bp, Homo sapien
ccttaaagcggctgactagtattgc

SEQ ID NO: 2052314 - DNA, 25 bp, Homo sapien
ttttgcgtatcttaaatgttgcatg

SEQ ID NO: 2052315 - DNA, 25 bp, Homo sapien
gaggaaatcagtatgtaattgagca

SEQ ID NO: 2052316 - DNA, 25 bp, Homo sapien
tctgtgaggagataacgtttgagct

SEQ ID NO: 2052317 - DNA, 25 bp, Homo sapien
ctggaaagaagctacttaagaggaa

SEQ ID NO: 2052318 - DNA, 25 bp, Homo sapien
catctccagcctccaccctaatctt

SEQ ID NO: 2052319 - DNA, 25 bp, Homo sapien
tctacctggccagaccatgttgtct

SEQ ID NO: 2052320 - DNA, 25 bp, Homo sapien
gctccttactatacatatggttgag

SEQ ID NO: 2052321 - DNA, 25 bp, Homo sapien
ctatacatatggttgagaaaaggga

SEQ ID NO: 2052322 - DNA, 25 bp, Homo sapien
aatttttgcaacttctcagctacac

SEQ ID NO: 2052323 - DNA, 25 bp, Homo sapien
tacacttgtagccttaccaagcagc

SEQ ID NO: 2052324 - DNA, 25 bp, Homo sapien
ttaatccaacgtgtagccttcttca

SEQ ID NO: 2052325 - DNA, 25 bp, Homo sapien
actcctgtatggctgctagaaattt

SEQ ID NO: 2052326 - DNA, 25 bp, Homo sapien
cttctatctgaaatcttggctcttt

SEQ ID NO: 2052327 - DNA, 25 bp, Homo sapien
tctatctgaaatcttggctctttca

SEQ ID NO: 2052328 - DNA, 25 bp, Homo sapien
ctatctgaaatcttggctctttcat

SEQ ID NO: 2052329 - DNA, 25 bp, Homo sapien
ttctatctgaaatcttggctctttc

SEQ ID NO: 2052330 - DNA, 25 bp, Homo sapien
ttcaagacctcaacgaggaaagtac

SEQ ID NO: 2052331 - DNA, 25 bp, Homo sapien
cctcaacgaggaaagtaccaagcaa

SEQ ID NO: 2052332 - DNA, 25 bp, Homo sapien
ggagtttcaagacctcaacgaggaa

SEQ ID NO: 2052333 - DNA, 25 bp, Homo sapien
aaggagtttcaagacctcaacgagg

SEQ ID NO: 2052334 - DNA, 25 bp, Homo sapien
ttgacaggatttgggaaatacttga

SEQ ID NO: 2052335 - DNA, 25 bp, Homo sapien
cttgacaggatttgggaaatacttg

SEQ ID NO: 2052336 - DNA, 25 bp, Homo sapien
gagaggtgttgattttgtgaagctt

SEQ ID NO: 2052337 - DNA, 25 bp, Homo sapien
ggtgttgattttgtgaagcttcttt

SEQ ID NO: 2052338 - DNA, 25 bp, Homo sapien
gctatgttttccagggacagttatt

SEQ ID NO: 2052339 - DNA, 25 bp, Homo sapien
ctgcaggtgatttaagcttgttgga

SEQ ID NO: 2052340 - DNA, 25 bp, Homo sapien
ggaagggcatttttaactcgagtgc

SEQ ID NO: 2052341 - DNA, 25 bp, Homo sapien
ggtaaactgtgtaaatttgctatgt

SEQ ID NO: 2052342 - DNA, 25 bp, Homo sapien
aaggactttggagcagtgatcacaa

SEQ ID NO: 2052343 - DNA, 25 bp, Homo sapien
ctctccgcttgcttagccagatgga

SEQ ID NO: 2052344 - DNA, 25 bp, Homo sapien
ggcaccctagttgccctctgcgctg

SEQ ID NO: 2052345 - DNA, 25 bp, Homo sapien
gaacaggcattgaggggttgcatcc

SEQ ID NO: 2052346 - DNA, 25 bp, Homo sapien
catatgccatatttgagggccccag

SEQ ID NO: 2052347 - DNA, 25 bp, Homo sapien
caagagcccagtgaagtggttccca

SEQ ID NO: 2052348 - DNA, 25 bp, Homo sapien
ctttcccggcacttggcagagagct

SEQ ID NO: 2052349 - DNA, 25 bp, Homo sapien
gaagattacatacacggcgtctgcc

SEQ ID NO: 2052350 - DNA, 25 bp, Homo sapien
cacgtgctgtcactacttaaagagt

SEQ ID NO: 2052351 - DNA, 25 bp, Homo sapien
gactatacacttattccacgtgctg

SEQ ID NO: 2052352 - DNA, 25 bp, Homo sapien
gcctctttgggacatgccttcagtt

SEQ ID NO: 2052353 - DNA, 25 bp, Homo sapien
cagttgtccgtaatttgtccattcc

SEQ ID NO: 2052354 - DNA, 25 bp, Homo sapien
gctaagctggagaaagcgtcatcca

SEQ ID NO: 2052355 - DNA, 25 bp, Homo sapien
caggaggccctagaggaactggaaa

SEQ ID NO: 2052356 - DNA, 25 bp, Homo sapien
tacatctggacatcctaaaaggagg

SEQ ID NO: 2052357 - DNA, 25 bp, Homo sapien
catccaatagttacagaaggttaca

SEQ ID NO: 2052358 - DNA, 25 bp, Homo sapien
tacagaaaaacagagccggcatcat

SEQ ID NO: 2052359 - DNA, 25 bp, Homo sapien
gcccggaaagtctctggagcaagcg

SEQ ID NO: 2052360 - DNA, 25 bp, Homo sapien
aaagtacagtcctacaacatctggg

SEQ ID NO: 2052361 - DNA, 25 bp, Homo sapien
catctgggattttagcagtaatgct

SEQ ID NO: 2052362 - DNA, 25 bp, Homo sapien
agggtcatcaaagcgcctctcaaag

SEQ ID NO: 2052363 - DNA, 25 bp, Homo sapien
caatgaccttgcttggtaagtccca

SEQ ID NO: 2052364 - DNA, 25 bp, Homo sapien
taacagctccatccagacatagaat

SEQ ID NO: 2052365 - DNA, 25 bp, Homo sapien
aagccccgggatcggtaagcagcgt

SEQ ID NO: 2052366 - DNA, 25 bp, Homo sapien
cttcagcttgattgatattggctga

SEQ ID NO: 2052367 - DNA, 25 bp, Homo sapien
cacacagacagtgtctggagtcttc

SEQ ID NO: 2052368 - DNA, 25 bp, Homo sapien
tattggctgatatgtcaaaggtgtc

SEQ ID NO: 2052369 - DNA, 25 bp, Homo sapien
ggtgtcatccaacagttctcattta

SEQ ID NO: 2052370 - DNA, 25 bp, Homo sapien
tgacggcaattgtcatgcaaccgat

SEQ ID NO: 2052371 - DNA, 25 bp, Homo sapien
aaagaccagacctaggaaagtgtca

SEQ ID NO: 2052372 - DNA, 25 bp, Homo sapien
gattcttagccttgttacatgacgc

SEQ ID NO: 2052373 - DNA, 25 bp, Homo sapien
tgcacgtgtgatcatgactggccaa

SEQ ID NO: 2052374 - DNA, 25 bp, Homo sapien
tcctagctcagcgcgagactgtggt

SEQ ID NO: 2052375 - DNA, 25 bp, Homo sapien
ctcagcgcgagactgtggtggattt

SEQ ID NO: 2052376 - DNA, 25 bp, Homo sapien
tgattacgtgaactttattcctagc

SEQ ID NO: 2052377 - DNA, 25 bp, Homo sapien
actctcatgtgattacgtgaacttt

SEQ ID NO: 2052378 - DNA, 25 bp, Homo sapien
ctgtgcgagtcctggtctcccccgg

SEQ ID NO: 2052379 - DNA, 25 bp, Homo sapien
tgtgcgagtcctggtctcccccggg

SEQ ID NO: 2052380 - DNA, 25 bp, Homo sapien
gtacgggcgattggcgtctttgggc

SEQ ID NO: 2052381 - DNA, 25 bp, Homo sapien
ggcgattggcgtctttgggccgctt

SEQ ID NO: 2052382 - DNA, 25 bp, Homo sapien
cgggcgattggcgtctttgggccgc

SEQ ID NO: 2052383 - DNA, 25 bp, Homo sapien
tcagtacgggcgattggcgtctttg

SEQ ID NO: 2052384 - DNA, 25 bp, Homo sapien
ctggcgagacacgagggacgagggc

SEQ ID NO: 2052385 - DNA, 25 bp, Homo sapien
ctgcgggtggaggagtttattggac

SEQ ID NO: 2052386 - DNA, 25 bp, Homo sapien
cgggtggaggagtttattggacact

SEQ ID NO: 2052387 - DNA, 25 bp, Homo sapien
tgcgggtggaggagtttattggaca

SEQ ID NO: 2052388 - DNA, 25 bp, Homo sapien
gcgggtggaggagtttattggacac

SEQ ID NO: 2052389 - DNA, 25 bp, Homo sapien
cctctgccccagatgctgcctccat

SEQ ID NO: 2052390 - DNA, 25 bp, Homo sapien
tttccctctttccctctgccccaga

SEQ ID NO: 2052391 - DNA, 25 bp, Homo sapien
cctctttccctctgccccagatgct

SEQ ID NO: 2052392 - DNA, 25 bp, Homo sapien
tccctctttccctctgccccagatg

SEQ ID NO: 2052393 - DNA, 25 bp, Homo sapien
ggttagtcgcccgatccacaaacac

SEQ ID NO: 2052394 - DNA, 25 bp, Homo sapien
tttggttagtcgcccgatccacaaa

SEQ ID NO: 2052395 - DNA, 25 bp, Homo sapien
aacactttcgaggagatgacattac

SEQ ID NO: 2052396 - DNA, 25 bp, Homo sapien
tccacaaacactttcgaggagatga

SEQ ID NO: 2052397 - DNA, 25 bp, Homo sapien
aggaacatctgcatcagctcagcgt

SEQ ID NO: 2052398 - DNA, 25 bp, Homo sapien
catcagctcagcgtccccaaactcc

SEQ ID NO: 2052399 - DNA, 25 bp, Homo sapien
tcagctcagcgtccccaaactcctg

SEQ ID NO: 2052400 - DNA, 25 bp, Homo sapien
gaacatctgcatcagctcagcgtcc

SEQ ID NO: 2052401 - DNA, 25 bp, Homo sapien
tgctgggggatcattggaggcggct

SEQ ID NO: 2052402 - DNA, 25 bp, Homo sapien
gcctggcttatctgaccataggcag

SEQ ID NO: 2052403 - DNA, 25 bp, Homo sapien
tgaggaaaggcctggcttatctgac

SEQ ID NO: 2052404 - DNA, 25 bp, Homo sapien
gaaaggcctggcttatctgaccata

SEQ ID NO: 2052405 - DNA, 25 bp, Homo sapien
cagaggactgagttggataaacctg

SEQ ID NO: 2052406 - DNA, 25 bp, Homo sapien
ggactgagttggataaacctgattg

SEQ ID NO: 2052407 - DNA, 25 bp, Homo sapien
gaggactgagttggataaacctgat

SEQ ID NO: 2052408 - DNA, 25 bp, Homo sapien
tgagttggataaacctgattgtcca

SEQ ID NO: 2052409 - DNA, 25 bp, Homo sapien
tgctgcactccggcgtaggcctgct

SEQ ID NO: 2052410 - DNA, 25 bp, Homo sapien
actgctgcactccggcgtaggcctg

SEQ ID NO: 2052411 - DNA, 25 bp, Homo sapien
ctgcactccggcgtaggcctgctgc

SEQ ID NO: 2052412 - DNA, 25 bp, Homo sapien
atactgctgcactccggcgtaggcc

SEQ ID NO: 2052413 - DNA, 25 bp, Homo sapien
ttggcgaacacagcttccgcagcag

SEQ ID NO: 2052414 - DNA, 25 bp, Homo sapien
gtggatgccattggcgaacacagct

SEQ ID NO: 2052415 - DNA, 25 bp, Homo sapien
ggatgccattggcgaacacagcttc

SEQ ID NO: 2052416 - DNA, 25 bp, Homo sapien
cattggcgaacacagcttccgcagc

SEQ ID NO: 2052417 - DNA, 25 bp, Homo sapien
cattcaccccaatgggggatgggat

SEQ ID NO: 2052418 - DNA, 25 bp, Homo sapien
tgctaggcacggctggtgcagtgat

SEQ ID NO: 2052419 - DNA, 25 bp, Homo sapien
cagtgatgcccggaggggtgctgcc

SEQ ID NO: 2052420 - DNA, 25 bp, Homo sapien
gggatgggatgctaggcacggctgg

SEQ ID NO: 2052421 - DNA, 25 bp, Homo sapien
tccctatgccaagtgggtggaacct

SEQ ID NO: 2052422 - DNA, 25 bp, Homo sapien
catgtaggaagcagggtccctctga

SEQ ID NO: 2052423 - DNA, 25 bp, Homo sapien
gcagagaggttattacagagcccag

SEQ ID NO: 2052424 - DNA, 25 bp, Homo sapien
gaagagtagtgttcaagttgagccc

SEQ ID NO: 2052425 - DNA, 25 bp, Homo sapien
tcttggatgttaggaaagttgctgc

SEQ ID NO: 2052426 - DNA, 25 bp, Homo sapien
aaaggaacagctcttggatgttagg

SEQ ID NO: 2052427 - DNA, 25 bp, Homo sapien
cttggatgttaggaaagttgctgct

SEQ ID NO: 2052428 - DNA, 25 bp, Homo sapien
ttctcatcatagacaccacagggag

SEQ ID NO: 2052429 - DNA, 25 bp, Homo sapien
ggtgcaggaccagcccttaggacta

SEQ ID NO: 2052430 - DNA, 25 bp, Homo sapien
cttttgccacagaatggtccgctgg

SEQ ID NO: 2052431 - DNA, 25 bp, Homo sapien
cacacggtagactgcatgggtccca

SEQ ID NO: 2052432 - DNA, 25 bp, Homo sapien
aggtgcggccgccaggccattcatg

SEQ ID NO: 2052433 - DNA, 25 bp, Homo sapien
ccatcagggccgcttgctgctgcat

SEQ ID NO: 2052434 - DNA, 25 bp, Homo sapien
cggccgccaggccattcatgttgag

SEQ ID NO: 2052435 - DNA, 25 bp, Homo sapien
aggtagccgccctgcgcgactgatg

SEQ ID NO: 2052436 - DNA, 25 bp, Homo sapien
ggcacccctagtgttgtcacaaagg

SEQ ID NO: 2052437 - DNA, 25 bp, Homo sapien
ggccaaggcggacagtactgcagaa

SEQ ID NO: 2052438 - DNA, 25 bp, Homo sapien
ttagagtccaccaccctgagagatg

SEQ ID NO: 2052439 - DNA, 25 bp, Homo sapien
tgcattttcagacccagaaccgtgg

SEQ ID NO: 2052440 - DNA, 25 bp, Homo sapien
atgggagctgtggttaccagtctgc

SEQ ID NO: 2052441 - DNA, 25 bp, Homo sapien
gctgtggttaccagtctgcaggcag

SEQ ID NO: 2052442 - DNA, 25 bp, Homo sapien
aggctgacagagtgggcccccatgt

SEQ ID NO: 2052443 - DNA, 25 bp, Homo sapien
agtgggcccccatgtggaagaaaga

SEQ ID NO: 2052444 - DNA, 25 bp, Homo sapien
tcagctctgccccttagaactaaga

SEQ ID NO: 2052445 - DNA, 25 bp, Homo sapien
gggtggtttgcaaccaatgacctga

SEQ ID NO: 2052446 - DNA, 25 bp, Homo sapien
tcaacgttgatctggctgagaggaa

SEQ ID NO: 2052447 - DNA, 25 bp, Homo sapien
tgaagtcaccgttccatggagtagg

SEQ ID NO: 2052448 - DNA, 25 bp, Homo sapien
catctgctgcattcgccgcatcgtg

SEQ ID NO: 2052449 - DNA, 25 bp, Homo sapien
cgtaggccccgaaagggatggccat

SEQ ID NO: 2052450 - DNA, 25 bp, Homo sapien
tcgtgcgctccttgtcggtgtcggc

SEQ ID NO: 2052451 - DNA, 25 bp, Homo sapien
gggttgaacatgcccatctggccag

SEQ ID NO: 2052452 - DNA, 25 bp, Homo sapien
tgggcttccgcgtccttgtctgagg

SEQ ID NO: 2052453 - DNA, 25 bp, Homo sapien
gtctgaggcccggaataagggtcat

SEQ ID NO: 2052454 - DNA, 25 bp, Homo sapien
gcattttccacctgggtaacctcag

SEQ ID NO: 2052455 - DNA, 25 bp, Homo sapien
gggaatgaggtgtgaaccccaccgc

SEQ ID NO: 2052456 - DNA, 25 bp, Homo sapien
gcatggtctggctgccgtgtagcgc

SEQ ID NO: 2052457 - DNA, 25 bp, Homo sapien
tctggctgccgtgtagcgcgttgat

SEQ ID NO: 2052458 - DNA, 25 bp, Homo sapien
ggtctggctgccgtgtagcgcgttg

SEQ ID NO: 2052459 - DNA, 25 bp, Homo sapien
cctgcgcctcggcgtgggaggagta

SEQ ID NO: 2052460 - DNA, 25 bp, Homo sapien
gagcatgcccacgaagagttttcta

SEQ ID NO: 2052461 - DNA, 25 bp, Homo sapien
ggcccgcgcaggatggtgcactcct

SEQ ID NO: 2052462 - DNA, 25 bp, Homo sapien
tcggactgttgcttgttgagcatgc

SEQ ID NO: 2052463 - DNA, 25 bp, Homo sapien
tcgatgttcccaaaggcctcgaaaa

SEQ ID NO: 2052464 - DNA, 25 bp, Homo sapien
ttctcaatgatgatgtggtaccagg

SEQ ID NO: 2052465 - DNA, 25 bp, Homo sapien
ctcaatgatgatgtggtaccaggtc

SEQ ID NO: 2052466 - DNA, 25 bp, Homo sapien
gcactcagcactgggccagttctca

SEQ ID NO: 2052467 - DNA, 25 bp, Homo sapien
cctcagtccagacgcactcagcact

SEQ ID NO: 2052468 - DNA, 25 bp, Homo sapien
ctgtagggcacagttactggtccct

SEQ ID NO: 2052469 - DNA, 25 bp, Homo sapien
agggcacagttactggtccctgtta

SEQ ID NO: 2052470 - DNA, 25 bp, Homo sapien
gcacagttactggtccctgttacca

SEQ ID NO: 2052471 - DNA, 25 bp, Homo sapien
cacagttactggtccctgttaccag

SEQ ID NO: 2052472 - DNA, 25 bp, Homo sapien
agcttgatttacatgcggagactgc

SEQ ID NO: 2052473 - DNA, 25 bp, Homo sapien
atttacatgcggagactgcagctcc

SEQ ID NO: 2052474 - DNA, 25 bp, Homo sapien
agctcctcgccttcgcctctcctga

SEQ ID NO: 2052475 - DNA, 25 bp, Homo sapien
cttgatttacatgcggagactgcag

SEQ ID NO: 2052476 - DNA, 25 bp, Homo sapien
gggacttttcgcagccgaactctgt

SEQ ID NO: 2052477 - DNA, 25 bp, Homo sapien
gcacggcacacgatagacggccctg

SEQ ID NO: 2052478 - DNA, 25 bp, Homo sapien
gcacactctcctgcatttcacccat

SEQ ID NO: 2052479 - DNA, 25 bp, Homo sapien
tttccgctggcgtctggcacactct

SEQ ID NO: 2052480 - DNA, 25 bp, Homo sapien
aaagtaactaagtcaatacagtaat

SEQ ID NO: 2052481 - DNA, 25 bp, Homo sapien
cagtaataacttgatcctgtgttag

SEQ ID NO: 2052482 - DNA, 25 bp, Homo sapien
acttgatcctgtgttagtaataatt

SEQ ID NO: 2052483 - DNA, 25 bp, Homo sapien
agtcaatacagtaataacttgatcc

SEQ ID NO: 2052484 - DNA, 25 bp, Homo sapien
ctagcttgtaagtcccagtagggca

SEQ ID NO: 2052485 - DNA, 25 bp, Homo sapien
gctgtgcttgctaaccttctgtgga

SEQ ID NO: 2052486 - DNA, 25 bp, Homo sapien
taagagcaagtaggcaggatccgag

SEQ ID NO: 2052487 - DNA, 25 bp, Homo sapien
gcagcggtcacctagcacttagcat

SEQ ID NO: 2052488 - DNA, 25 bp, Homo sapien
tgtctaggacgttgggatcatggat

SEQ ID NO: 2052489 - DNA, 25 bp, Homo sapien
gatcatggattttccccgataaggg

SEQ ID NO: 2052490 - DNA, 25 bp, Homo sapien
ggagcaaggactgtccctcgaagtt

SEQ ID NO: 2052491 - DNA, 25 bp, Homo sapien
taagggtcccggctgacctctagat

SEQ ID NO: 2052492 - DNA, 25 bp, Homo sapien
tgaaaggaggccctacaacctggct

SEQ ID NO: 2052493 - DNA, 25 bp, Homo sapien
acacacatccgttcagcccaggagc

SEQ ID NO: 2052494 - DNA, 25 bp, Homo sapien
ggccatggtagtcagagcctctacc

SEQ ID NO: 2052495 - DNA, 25 bp, Homo sapien
actaagcggggtgggcacacacatc

SEQ ID NO: 2052496 - DNA, 25 bp, Homo sapien
tgaaggagtgttctgagcaggcaca

SEQ ID NO: 2052497 - DNA, 25 bp, Homo sapien
agaaattcctcggttcctggctgat

SEQ ID NO: 2052498 - DNA, 25 bp, Homo sapien
ggacaactggctctccaaatttgca

SEQ ID NO: 2052499 - DNA, 25 bp, Homo sapien
gcaagtagctttcacctgctcgaca

SEQ ID NO: 2052500 - DNA, 25 bp, Homo sapien
gcagccaaggtctctcccatagtgg

SEQ ID NO: 2052501 - DNA, 25 bp, Homo sapien
ctgtctctggcggaagagcagccaa

SEQ ID NO: 2052502 - DNA, 25 bp, Homo sapien
ggcctcatgggtgttctcaattttt

SEQ ID NO: 2052503 - DNA, 25 bp, Homo sapien
ctgctcctgtctctggcggaagagc

SEQ ID NO: 2052504 - DNA, 25 bp, Homo sapien
gagctcagttcagagcaacgtctgg

SEQ ID NO: 2052505 - DNA, 25 bp, Homo sapien
cagaggggatgaggctcagtgtgag

SEQ ID NO: 2052506 - DNA, 25 bp, Homo sapien
agaggggatgaggctcagtgtgagt

SEQ ID NO: 2052507 - DNA, 25 bp, Homo sapien
tgagagctcagttcagagcaacgtc

SEQ ID NO: 2052508 - DNA, 25 bp, Homo sapien
tgaagggggctggcgcaggcagcta

SEQ ID NO: 2052509 - DNA, 25 bp, Homo sapien
aagggggctggcgcaggcagctact

SEQ ID NO: 2052510 - DNA, 25 bp, Homo sapien
gggggctggcgcaggcagctactac

SEQ ID NO: 2052511 - DNA, 25 bp, Homo sapien
gtgaagggggctggcgcaggcagct

SEQ ID NO: 2052512 - DNA, 25 bp, Homo sapien
ctcctcggctctcgctgtccgcagg

SEQ ID NO: 2052513 - DNA, 25 bp, Homo sapien
cctcggctctcgctgtccgcaggct

SEQ ID NO: 2052514 - DNA, 25 bp, Homo sapien
ggctctcgctgtccgcaggcttcac

SEQ ID NO: 2052515 - DNA, 25 bp, Homo sapien
tcggctctcgctgtccgcaggcttc

SEQ ID NO: 2052516 - DNA, 25 bp, Homo sapien
gcaacagagcagagggggacagcat

SEQ ID NO: 2052517 - DNA, 25 bp, Homo sapien
ctgcaacagagcagagggggacagc

SEQ ID NO: 2052518 - DNA, 25 bp, Homo sapien
tgcaacagagcagagggggacagca

SEQ ID NO: 2052519 - DNA, 25 bp, Homo sapien
tctcccctcgacggcacggccccat

SEQ ID NO: 2052520 - DNA, 25 bp, Homo sapien
tcaccaaagtgctgcccgtctcccc

SEQ ID NO: 2052521 - DNA, 25 bp, Homo sapien
tggccttcagttggtgtcttcctcc

SEQ ID NO: 2052522 - DNA, 25 bp, Homo sapien
ccagtgcgctgtcctccccggaggg

SEQ ID NO: 2052523 - DNA, 25 bp, Homo sapien
tgctgattctctttcagagatgtcc

SEQ ID NO: 2052524 - DNA, 25 bp, Homo sapien
ccatggaggccctgtggccttcagt

SEQ ID NO: 2052525 - DNA, 25 bp, Homo sapien
cctccggggacatcacaaacccttg

SEQ ID NO: 2052526 - DNA, 25 bp, Homo sapien
ccgggcgcccctcttagggagcgag

SEQ ID NO: 2052527 - DNA, 25 bp, Homo sapien
gcccctcttagggagcgagtgggcc

SEQ ID NO: 2052528 - DNA, 25 bp, Homo sapien
ttctacttccagccgggcgcccctc

SEQ ID NO: 2052529 - DNA, 25 bp, Homo sapien
gtgctgccaagtctactcccaccag

SEQ ID NO: 2052530 - DNA, 25 bp, Homo sapien
tgccaagtctactcccaccagcctc

SEQ ID NO: 2052531 - DNA, 25 bp, Homo sapien
tctgtgctgccaagtctactcccac

SEQ ID NO: 2052532 - DNA, 25 bp, Homo sapien
ctgccaagtctactcccaccagcct

SEQ ID NO: 2052533 - DNA, 25 bp, Homo sapien
caaccactgtcctaagggttggcct

SEQ ID NO: 2052534 - DNA, 25 bp, Homo sapien
accactgtcctaagggttggcctgg

SEQ ID NO: 2052535 - DNA, 25 bp, Homo sapien
ccactgtcctaagggttggcctgga

SEQ ID NO: 2052536 - DNA, 25 bp, Homo sapien
agcaaccactgtcctaagggttggc

SEQ ID NO: 2052537 - DNA, 25 bp, Homo sapien
ggttctcagcaaaggtcagcctgca

SEQ ID NO: 2052538 - DNA, 25 bp, Homo sapien
tgattagtgctatgtgacatcacag

SEQ ID NO: 2052539 - DNA, 25 bp, Homo sapien
gaaatctgcaagagcaggttctcag

SEQ ID NO: 2052540 - DNA, 25 bp, Homo sapien
gattcgcattgaacgagatcatgaa

SEQ ID NO: 2052541 - DNA, 25 bp, Homo sapien
catctccccatactggctgcattcc

SEQ ID NO: 2052542 - DNA, 25 bp, Homo sapien
atctccccatactggctgcattcca

SEQ ID NO: 2052543 - DNA, 25 bp, Homo sapien
ctccccatactggctgcattccatt

SEQ ID NO: 2052544 - DNA, 25 bp, Homo sapien
tctccccatactggctgcattccat

SEQ ID NO: 2052545 - DNA, 25 bp, Homo sapien
tgggtccacccagttacactcaccg

SEQ ID NO: 2052546 - DNA, 25 bp, Homo sapien
tccagtcatcgcctctggactcact

SEQ ID NO: 2052547 - DNA, 25 bp, Homo sapien
tgcaattgaagtcacaagcctttgc

SEQ ID NO: 2052548 - DNA, 25 bp, Homo sapien
tctcctctcatagctgtgtctgcaa

SEQ ID NO: 2052549 - DNA, 25 bp, Homo sapien
gaaacctgatgaatcaggtgagcaa

SEQ ID NO: 2052550 - DNA, 25 bp, Homo sapien
ttcctgaaacctgatgaatcaggtg

SEQ ID NO: 2052551 - DNA, 25 bp, Homo sapien
cctgatgaatcaggtgagcaaattc

SEQ ID NO: 2052552 - DNA, 25 bp, Homo sapien
gatgaatcaggtgagcaaattcatg

SEQ ID NO: 2052553 - DNA, 25 bp, Homo sapien
tgtgaaagggtgtgcggcaagtcgc

SEQ ID NO: 2052554 - DNA, 25 bp, Homo sapien
gccgcagaggatctggtgtggccat

SEQ ID NO: 2052555 - DNA, 25 bp, Homo sapien
cgggagcccctgttagtttgcagac

SEQ ID NO: 2052556 - DNA, 25 bp, Homo sapien
ttgcagacagcattgcacactagga

SEQ ID NO: 2052557 - DNA, 25 bp, Homo sapien
ctgcatttggaaagagcaaggaggc

SEQ ID NO: 2052558 - DNA, 25 bp, Homo sapien
gcatttggaaagagcaaggaggcag

SEQ ID NO: 2052559 - DNA, 25 bp, Homo sapien
tgcatttggaaagagcaaggaggca

SEQ ID NO: 2052560 - DNA, 25 bp, Homo sapien
aacgtttgttcagttccagaatgac

SEQ ID NO: 2052561 - DNA, 25 bp, Homo sapien
aagacaccaagcaaacgtttgttca

SEQ ID NO: 2052562 - DNA, 25 bp, Homo sapien
caagcaaacgtttgttcagttccag

SEQ ID NO: 2052563 - DNA, 25 bp, Homo sapien
gtttgttcagttccagaatgaccag

SEQ ID NO: 2052564 - DNA, 25 bp, Homo sapien
gtggaaggacacgatgaaaatcacc

SEQ ID NO: 2052565 - DNA, 25 bp, Homo sapien
gaaaatcaccaagatggaactggtg

SEQ ID NO: 2052566 - DNA, 25 bp, Homo sapien
gtggacccgtgaccatgctgctgct

SEQ ID NO: 2052567 - DNA, 25 bp, Homo sapien
tttatgggtagaagcttccagcgcg

SEQ ID NO: 2052568 - DNA, 25 bp, Homo sapien
ggcagagggctctttgtctccaagc

SEQ ID NO: 2052569 - DNA, 25 bp, Homo sapien
agagggctctttgtctccaagcccc

SEQ ID NO: 2052570 - DNA, 25 bp, Homo sapien
aagggcagagggctctttgtctcca

SEQ ID NO: 2052571 - DNA, 25 bp, Homo sapien
tgaggccctcactgccaagggcaga

SEQ ID NO: 2052572 - DNA, 25 bp, Homo sapien
gcctggagatgatattaggataatg

SEQ ID NO: 2052573 - DNA, 25 bp, Homo sapien
aatgatgataaattttaccctgctg

SEQ ID NO: 2052574 - DNA, 25 bp, Homo sapien
ttaccctgctggcaagccactgctt

SEQ ID NO: 2052575 - DNA, 25 bp, Homo sapien
cctggagatgatattaggataatga

SEQ ID NO: 2052576 - DNA, 25 bp, Homo sapien
cagaacaacccgtgaaacagagaac

SEQ ID NO: 2052577 - DNA, 25 bp, Homo sapien
gcaacccgtgaaacacagaacaacc

SEQ ID NO: 2052578 - DNA, 25 bp, Homo sapien
gcttacacatggcaagcaacccgtg

SEQ ID NO: 2052579 - DNA, 25 bp, Homo sapien
cagagagcaagtgctgaggacagac

SEQ ID NO: 2052580 - DNA, 25 bp, Homo sapien
atgtctgcgggcatcaagccagccc

SEQ ID NO: 2052581 - DNA, 25 bp, Homo sapien
tgagcacatgtctgcgggcatcaag

SEQ ID NO: 2052582 - DNA, 25 bp, Homo sapien
gtgccaaatccagggtacccaagga

SEQ ID NO: 2052583 - DNA, 25 bp, Homo sapien
tcgtcacctgcatgaaggacccagg

SEQ ID NO: 2052584 - DNA, 25 bp, Homo sapien
ggcgcttccgggcacggaccatctg

SEQ ID NO: 2052585 - DNA, 25 bp, Homo sapien
cagggatgtgaatgcacccccggtc

SEQ ID NO: 2052586 - DNA, 25 bp, Homo sapien
tgtccatcccacatcacatcaggcg

SEQ ID NO: 2052587 - DNA, 25 bp, Homo sapien
acaaccctgcttctctatgacacag

SEQ ID NO: 2052588 - DNA, 25 bp, Homo sapien
ggaggggcttgcacatgccagtaat

SEQ ID NO: 2052589 - DNA, 25 bp, Homo sapien
tagtatagctcttctcattaatatt

SEQ ID NO: 2052590 - DNA, 25 bp, Homo sapien
cacatgccagtaattgtcttgacag

SEQ ID NO: 2052591 - DNA, 25 bp, Homo sapien
gtaattgtcttgacagccggagatc

SEQ ID NO: 2052592 - DNA, 25 bp, Homo sapien
caggattaaagtcgctaaatggggt

SEQ ID NO: 2052593 - DNA, 25 bp, Homo sapien
tccagctgcctgacgggttcctgtt

SEQ ID NO: 2052594 - DNA, 25 bp, Homo sapien
tgtggctcaccagctaaccgtagct

SEQ ID NO: 2052595 - DNA, 25 bp, Homo sapien
gtagctctcgtccaatgcatccagc

SEQ ID NO: 2052596 - DNA, 25 bp, Homo sapien
ggggtggggtttggcaggctggcca

SEQ ID NO: 2052597 - DNA, 25 bp, Homo sapien
tggcaggctggccaggctggcaagc

SEQ ID NO: 2052598 - DNA, 25 bp, Homo sapien
tttggcaggctggccaggctggcaa

SEQ ID NO: 2052599 - DNA, 25 bp, Homo sapien
ctggggtggggtttggcaggctggc

SEQ ID NO: 2052600 - DNA, 25 bp, Homo sapien
ctgctggagtgggaagcggacggtc

SEQ ID NO: 2052601 - DNA, 25 bp, Homo sapien
ctggagtgggaagcggacggtcaga

SEQ ID NO: 2052602 - DNA, 25 bp, Homo sapien
ggaagcggacggtcagaggagccct

SEQ ID NO: 2052603 - DNA, 25 bp, Homo sapien
tcctggggtccggcccgtgctgatg

SEQ ID NO: 2052604 - DNA, 25 bp, Homo sapien
aaagagaacgaaagcacaagtgaca

SEQ ID NO: 2052605 - DNA, 25 bp, Homo sapien
tatttactgtcagctccgtggcgcc

SEQ ID NO: 2052606 - DNA, 25 bp, Homo sapien
tgggtataaagagccaggttccagc

SEQ ID NO: 2052607 - DNA, 25 bp, Homo sapien
tgctgcgttgccaagagtgtccctc

SEQ ID NO: 2052608 - DNA, 25 bp, Homo sapien
ccatctgtggaggagacctgggcat

SEQ ID NO: 2052609 - DNA, 25 bp, Homo sapien
gatatggaagggcaagggcggaaag

SEQ ID NO: 2052610 - DNA, 25 bp, Homo sapien
gggtttctgggatatggaagggcaa

SEQ ID NO: 2052611 - DNA, 25 bp, Homo sapien
tgctgggaaggatgcattcgttctg

SEQ ID NO: 2052612 - DNA, 25 bp, Homo sapien
gaggaaagtgggtttctgggatatg

SEQ ID NO: 2052613 - DNA, 25 bp, Homo sapien
gcgcccctacgtcagagctggctgg

SEQ ID NO: 2052614 - DNA, 25 bp, Homo sapien
aagcagaggtcctgagtccagcggg

SEQ ID NO: 2052615 - DNA, 25 bp, Homo sapien
gtcctgagtccagcggggaccttct

SEQ ID NO: 2052616 - DNA, 25 bp, Homo sapien
ctccctgcgcccctacgtcagagct

SEQ ID NO: 2052617 - DNA, 25 bp, Homo sapien
gtatggcccgacagtggctccgcag

SEQ ID NO: 2052618 - DNA, 25 bp, Homo sapien
cttgttgcttgggtcgcaggaggtg

SEQ ID NO: 2052619 - DNA, 25 bp, Homo sapien
ctctgccaccccttgcttgttgctt

SEQ ID NO: 2052620 - DNA, 25 bp, Homo sapien
tccctggacagaggctacgagagga

SEQ ID NO: 2052621 - DNA, 25 bp, Homo sapien
ggccacccccacagaagggaggcca

SEQ ID NO: 2052622 - DNA, 25 bp, Homo sapien
agggggcaggcacagagagggccat

SEQ ID NO: 2052623 - DNA, 25 bp, Homo sapien
ggagggggcaggcacagagagggcc

SEQ ID NO: 2052624 - DNA, 25 bp, Homo sapien
ctgggccacccccacagaagggagg

SEQ ID NO: 2052625 - DNA, 25 bp, Homo sapien
cttttgtaggctggagtttactgca

SEQ ID NO: 2052626 - DNA, 25 bp, Homo sapien
ttaatcaccttcataatggccagct

SEQ ID NO: 2052627 - DNA, 25 bp, Homo sapien
caccttcataatggccagctctggc

SEQ ID NO: 2052628 - DNA, 25 bp, Homo sapien
ttacgtgttaatgatgctggctgcc

SEQ ID NO: 2052629 - DNA, 25 bp, Homo sapien
tggagattcaggatccagggcccac

SEQ ID NO: 2052630 - DNA, 25 bp, Homo sapien
caatcctggagattcaggatccagg

SEQ ID NO: 2052631 - DNA, 25 bp, Homo sapien
tcaatcctggagattcaggatccag

SEQ ID NO: 2052632 - DNA, 25 bp, Homo sapien
tcctggagattcaggatccagggcc

SEQ ID NO: 2052633 - DNA, 25 bp, Homo sapien
gcccagctgagtccggcttgccagt

SEQ ID NO: 2052634 - DNA, 25 bp, Homo sapien
tccaccccgagaggactgaattcag

SEQ ID NO: 2052635 - DNA, 25 bp, Homo sapien
cgatgtaaagttgaggactctggtc

SEQ ID NO: 2052636 - DNA, 25 bp, Homo sapien
ttggacaaacccagagtctcgatgt

SEQ ID NO: 2052637 - DNA, 25 bp, Homo sapien
aagcagtctggactcctcacgctca

SEQ ID NO: 2052638 - DNA, 25 bp, Homo sapien
actcacgctgcacagatccttcagg

SEQ ID NO: 2052639 - DNA, 25 bp, Homo sapien
gatccttcagggatgggcccatgga

SEQ ID NO: 2052640 - DNA, 25 bp, Homo sapien
cagggatgggcccatggaatattct

SEQ ID NO: 2052641 - DNA, 25 bp, Homo sapien
gattcttcctctcggttccaggacg

SEQ ID NO: 2052642 - DNA, 25 bp, Homo sapien
tccaggatggcttctaggacacctt

SEQ ID NO: 2052643 - DNA, 25 bp, Homo sapien
gcatatgtccatgagcgtgcgccac

SEQ ID NO: 2052644 - DNA, 25 bp, Homo sapien
cacatgctgtaggtggcatatgtcc

SEQ ID NO: 2052645 - DNA, 25 bp, Homo sapien
cctactgtccaggtgatggtgagag

SEQ ID NO: 2052646 - DNA, 25 bp, Homo sapien
tccggctggagggtagctctttcag

SEQ ID NO: 2052647 - DNA, 25 bp, Homo sapien
tgttgactgcggcactcctactgtc

SEQ ID NO: 2052648 - DNA, 25 bp, Homo sapien
gctggctaaggcatggcctgttgac

SEQ ID NO: 2052649 - DNA, 25 bp, Homo sapien
gaacaagagccaagcatgggtggca

SEQ ID NO: 2052650 - DNA, 25 bp, Homo sapien
gcacctgaaggtggactacctgctg

SEQ ID NO: 2052651 - DNA, 25 bp, Homo sapien
tggctgactgagtgaatgggtggat

SEQ ID NO: 2052652 - DNA, 25 bp, Homo sapien
agtgaatgggtggatgattaaagca

SEQ ID NO: 2052653 - DNA, 25 bp, Homo sapien
gtgctgctggccggcacagcagtgg

SEQ ID NO: 2052654 - DNA, 25 bp, Homo sapien
gctgctggccggcacagcagtggca

SEQ ID NO: 2052655 - DNA, 25 bp, Homo sapien
aattctcgcctgaatcccctcaggg

SEQ ID NO: 2052656 - DNA, 25 bp, Homo sapien
cctcagggccttgcatagagcttgt

SEQ ID NO: 2052657 - DNA, 25 bp, Homo sapien
ctggctggtccacgtagtgaattct

SEQ ID NO: 2052658 - DNA, 25 bp, Homo sapien
gagcttgttttctgattgtcagaga

SEQ ID NO: 2052659 - DNA, 25 bp, Homo sapien
tgacgatgactcagcttcacacacc

SEQ ID NO: 2052660 - DNA, 25 bp, Homo sapien
ggtaaaccataatgcctgcaactgg

SEQ ID NO: 2052661 - DNA, 25 bp, Homo sapien
caaggcacaattggtcccagggtgg

SEQ ID NO: 2052662 - DNA, 25 bp, Homo sapien
tgggtcaccagaaccgaattcaggg

SEQ ID NO: 2052663 - DNA, 25 bp, Homo sapien
gatctgaccgctgaccactcggatg

SEQ ID NO: 2052664 - DNA, 25 bp, Homo sapien
ttgcgttgctctgtgcttgcactgg

SEQ ID NO: 2052665 - DNA, 25 bp, Homo sapien
agcctcttgcttagtgctcctcaca

SEQ ID NO: 2052666 - DNA, 25 bp, Homo sapien
aaccctccatgtttaggtgcacagc

SEQ ID NO: 2052667 - DNA, 25 bp, Homo sapien
ccacccctgcagatccaagtctcac

SEQ ID NO: 2052668 - DNA, 25 bp, Homo sapien
cacccacccctgcagatccaagtct

SEQ ID NO: 2052669 - DNA, 25 bp, Homo sapien
tgtccccagagtaagtctgccaccc

SEQ ID NO: 2052670 - DNA, 25 bp, Homo sapien
gtccccagagtaagtctgccaccca

SEQ ID NO: 2052671 - DNA, 25 bp, Homo sapien
tccaaggcccgtggccatgggtttc

SEQ ID NO: 2052672 - DNA, 25 bp, Homo sapien
cactatttctgtctacatatcccct

SEQ ID NO: 2052673 - DNA, 25 bp, Homo sapien
catgggtttcccatatcttcctggg

SEQ ID NO: 2052674 - DNA, 25 bp, Homo sapien
ttctgtccaaggcccgtggccatgg

SEQ ID NO: 2052675 - DNA, 25 bp, Homo sapien
tggagacgcctgaattattgattag

SEQ ID NO: 2052676 - DNA, 25 bp, Homo sapien
taggccaaatccgagttttccacag

SEQ ID NO: 2052677 - DNA, 25 bp, Homo sapien
gatgatgttctttgtttatgagaga

SEQ ID NO: 2052678 - DNA, 25 bp, Homo sapien
tccacagatggagacgcctgaatta

SEQ ID NO: 2052679 - DNA, 25 bp, Homo sapien
tcagtgcccatggctggctttggca

SEQ ID NO: 2052680 - DNA, 25 bp, Homo sapien
ctcagtgcccatggctggctttggc

SEQ ID NO: 2052681 - DNA, 25 bp, Homo sapien
gctctccctggcgatttgatttccc

SEQ ID NO: 2052682 - DNA, 25 bp, Homo sapien
ttctgggaggactgaccaaaacctg

SEQ ID NO: 2052683 - DNA, 25 bp, Homo sapien
tccctggcgatttgatttcccacat

SEQ ID NO: 2052684 - DNA, 25 bp, Homo sapien
tgggaggactgaccaaaacctggaa

SEQ ID NO: 2052685 - DNA, 25 bp, Homo sapien
caccctgttgtcgaggtccagaaag

SEQ ID NO: 2052686 - DNA, 25 bp, Homo sapien
tgttgtcgaggtccagaaagccaag

SEQ ID NO: 2052687 - DNA, 25 bp, Homo sapien
gcctgcaccctgttgtcgaggtcca

SEQ ID NO: 2052688 - DNA, 25 bp, Homo sapien
ctagcctgcaccctgttgtcgaggt

SEQ ID NO: 2052689 - DNA, 25 bp, Homo sapien
ttgactggactgagcggctgccact

SEQ ID NO: 2052690 - DNA, 25 bp, Homo sapien
agggccactttcaggtgttgactgg

SEQ ID NO: 2052691 - DNA, 25 bp, Homo sapien
tgctaatattgggatgagaaaggcc

SEQ ID NO: 2052692 - DNA, 25 bp, Homo sapien
tccccgtgccgatgtgtgtgaggtt

SEQ ID NO: 2052693 - DNA, 25 bp, Homo sapien
gcacataggccatctacgcttttgg

SEQ ID NO: 2052694 - DNA, 25 bp, Homo sapien
tcgggctggcaaacccgacgatagg

SEQ ID NO: 2052695 - DNA, 25 bp, Homo sapien
gacgatagggcttgacatcatgcct

SEQ ID NO: 2052696 - DNA, 25 bp, Homo sapien
ctgggctaccagaacctcgggctgg

SEQ ID NO: 2052697 - DNA, 25 bp, Homo sapien
tctgtgagtcaggaaaagacgcagg

SEQ ID NO: 2052698 - DNA, 25 bp, Homo sapien
caaatcactgaatgggtgcctgctc

SEQ ID NO: 2052699 - DNA, 25 bp, Homo sapien
tgaaggactcacaaaacggccactc

SEQ ID NO: 2052700 - DNA, 25 bp, Homo sapien
ggtatgcgactgcagggaaacctca

SEQ ID NO: 2052701 - DNA, 25 bp, Homo sapien
cctctgctagagaacaggtgactcg

SEQ ID NO: 2052702 - DNA, 25 bp, Homo sapien
gaatggctgtgaacgggaatcctca

SEQ ID NO: 2052703 - DNA, 25 bp, Homo sapien
aggtgactcgttctccaagcatggg

SEQ ID NO: 2052704 - DNA, 25 bp, Homo sapien
ccttgagggaccaaatgaccttgct

SEQ ID NO: 2052705 - DNA, 25 bp, Homo sapien
gatattcctggagccttgcccttaa

SEQ ID NO: 2052706 - DNA, 25 bp, Homo sapien
tgtgagctgtaaaacaccggatgtg

SEQ ID NO: 2052707 - DNA, 25 bp, Homo sapien
caagtgataaacagatcggaggctc

SEQ ID NO: 2052708 - DNA, 25 bp, Homo sapien
tgtgtaaggaccagattccagaccc

SEQ ID NO: 2052709 - DNA, 25 bp, Homo sapien
ggaggcttcagggagatgcaccata

SEQ ID NO: 2052710 - DNA, 25 bp, Homo sapien
aacagtggagttaccaaaatcctgg

SEQ ID NO: 2052711 - DNA, 25 bp, Homo sapien
caggtgggcgaagctattctagtga

SEQ ID NO: 2052712 - DNA, 25 bp, Homo sapien
gagaggctcacagatctttgactgg

SEQ ID NO: 2052713 - DNA, 25 bp, Homo sapien
tctccagcactgtataccgatacgt

SEQ ID NO: 2052714 - DNA, 25 bp, Homo sapien
gagatgccctcaaatgctccctcat

SEQ ID NO: 2052715 - DNA, 25 bp, Homo sapien
tgtataccgatacgtttgtttaaga

SEQ ID NO: 2052716 - DNA, 25 bp, Homo sapien
gacggtaaccacgaactcgggagca

SEQ ID NO: 2052717 - DNA, 25 bp, Homo sapien
actctcactaggttttgcagctggc

SEQ ID NO: 2052718 - DNA, 25 bp, Homo sapien
gaagtacttggatggccatgggaca

SEQ ID NO: 2052719 - DNA, 25 bp, Homo sapien
tcctgatgctggaactgcagagggc

SEQ ID NO: 2052720 - DNA, 25 bp, Homo sapien
atttccagatggctaatgcccaggg

SEQ ID NO: 2052721 - DNA, 25 bp, Homo sapien
cccttgtgggatagcacagccaagg

SEQ ID NO: 2052722 - DNA, 25 bp, Homo sapien
cactgtacccttgtgggatagcaca

SEQ ID NO: 2052723 - DNA, 25 bp, Homo sapien
tgtcactgtacccttgtgggatagc

SEQ ID NO: 2052724 - DNA, 25 bp, Homo sapien
tacccttgtgggatagcacagccaa

SEQ ID NO: 2052725 - DNA, 25 bp, Homo sapien
tgcaggcattgtccgatttttctcc

SEQ ID NO: 2052726 - DNA, 25 bp, Homo sapien
ggcattgtccgatttttctcccaat

SEQ ID NO: 2052727 - DNA, 25 bp, Homo sapien
aggccctgcaggcattgtccgattt

SEQ ID NO: 2052728 - DNA, 25 bp, Homo sapien
tgctcctccggaggcctttctgtct

SEQ ID NO: 2052729 - DNA, 25 bp, Homo sapien
aggccactgggcaaccctcagagag

SEQ ID NO: 2052730 - DNA, 25 bp, Homo sapien
gctgcaggtctgctttgcttgaaga

SEQ ID NO: 2052731 - DNA, 25 bp, Homo sapien
gagagctgaggtttgtctcagtggg

SEQ ID NO: 2052732 - DNA, 25 bp, Homo sapien
cagtgggggttgactgtgggcccac

SEQ ID NO: 2052733 - DNA, 25 bp, Homo sapien
catgggctggggcaactccacagca

SEQ ID NO: 2052734 - DNA, 25 bp, Homo sapien
acagcagggagttttggacaccgcc

SEQ ID NO: 2052735 - DNA, 25 bp, Homo sapien
gagttttggacaccgccagaagaag

SEQ ID NO: 2052736 - DNA, 25 bp, Homo sapien
ggccttgaccatcctgcacatgggc

SEQ ID NO: 2052737 - DNA, 25 bp, Homo sapien
cgggcagagtcaatggccacgtgga

SEQ ID NO: 2052738 - DNA, 25 bp, Homo sapien
ggcagagtcaatggccacgtggacc

SEQ ID NO: 2052739 - DNA, 25 bp, Homo sapien
agtcgggcagagtcaatggccacgt

SEQ ID NO: 2052740 - DNA, 25 bp, Homo sapien
tcgggcagagtcaatggccacgtgg

SEQ ID NO: 2052741 - DNA, 25 bp, Homo sapien
cccttcgtgtcatgacggcaggggc

SEQ ID NO: 2052742 - DNA, 25 bp, Homo sapien
ctgtatggcacagacagtgatgtgg

SEQ ID NO: 2052743 - DNA, 25 bp, Homo sapien
atggcacagacagtgatgtggagtt

SEQ ID NO: 2052744 - DNA, 25 bp, Homo sapien
tgtatggcacagacagtgatgtgga

SEQ ID NO: 2052745 - DNA, 25 bp, Homo sapien
gcacagacagtgatgtggagttggg

SEQ ID NO: 2052746 - DNA, 25 bp, Homo sapien
ctcagtcctctcatcaggactggca

SEQ ID NO: 2052747 - DNA, 25 bp, Homo sapien
tcagtcctctcatcaggactggcac

SEQ ID NO: 2052748 - DNA, 25 bp, Homo sapien
ggtgcatgaataccccagttctctg

SEQ ID NO: 2052749 - DNA, 25 bp, Homo sapien
agcggaagacccctgggcacaacct

SEQ ID NO: 2052750 - DNA, 25 bp, Homo sapien
ccagaaaagctagaaagcggaagac

SEQ ID NO: 2052751 - DNA, 25 bp, Homo sapien
ccacagcctggtggaaattggtgca

SEQ ID NO: 2052752 - DNA, 25 bp, Homo sapien
ccccaagttggttggtgtcctctgc

SEQ ID NO: 2052753 - DNA, 25 bp, Homo sapien
gtggagccgagtgttcggcatcatt

SEQ ID NO: 2052754 - DNA, 25 bp, Homo sapien
gttcggcatcattttgcctcttctg

SEQ ID NO: 2052755 - DNA, 25 bp, Homo sapien
cacaggctgacagtgttctgaaggg

SEQ ID NO: 2052756 - DNA, 25 bp, Homo sapien
gctccacacatgcccacattcacac

SEQ ID NO: 2052757 - DNA, 25 bp, Homo sapien
ctcgctccacacatgcccacattca

SEQ ID NO: 2052758 - DNA, 25 bp, Homo sapien
tcgctccacacatgcccacattcac

SEQ ID NO: 2052759 - DNA, 25 bp, Homo sapien
cgctccacacatgcccacattcaca

SEQ ID NO: 2052760 - DNA, 25 bp, Homo sapien
aatgcacccccgcagggtgagctag

SEQ ID NO: 2052761 - DNA, 25 bp, Homo sapien
tcctctttccaaatgcacccccgca

SEQ ID NO: 2052762 - DNA, 25 bp, Homo sapien
cctttctacatccatgaccagagag

SEQ ID NO: 2052763 - DNA, 25 bp, Homo sapien
ttcctttctacatccatgaccagag

SEQ ID NO: 2052764 - DNA, 25 bp, Homo sapien
ctggaggggcatagaggtgatatgg

SEQ ID NO: 2052765 - DNA, 25 bp, Homo sapien
gcctgtctggtgtccttagaatgag

SEQ ID NO: 2052766 - DNA, 25 bp, Homo sapien
tatttttgtccgatgccagacaccc

SEQ ID NO: 2052767 - DNA, 25 bp, Homo sapien
gcagccgtgatccaagccacattgg

SEQ ID NO: 2052768 - DNA, 25 bp, Homo sapien
ggctatctgtaaacgctgctgccgc

SEQ ID NO: 2052769 - DNA, 25 bp, Homo sapien
cctgcatttgctagtggcacacttt

SEQ ID NO: 2052770 - DNA, 25 bp, Homo sapien
tggcaggatcgcctattatttggtt

SEQ ID NO: 2052771 - DNA, 25 bp, Homo sapien
atttggcttggtcccgtccctgcat

SEQ ID NO: 2052772 - DNA, 25 bp, Homo sapien
cctattatttggttgggtgagagca

SEQ ID NO: 2052773 - DNA, 25 bp, Homo sapien
tggcgcgtcgctccaatgtgctcct

SEQ ID NO: 2052774 - DNA, 25 bp, Homo sapien
cacggacagtgatattgattgcttc

SEQ ID NO: 2052775 - DNA, 25 bp, Homo sapien
gcaggccccttggtgaaatcagcac

SEQ ID NO: 2052776 - DNA, 25 bp, Homo sapien
taagccttctttaatctggcaggcc

SEQ ID NO: 2052777 - DNA, 25 bp, Homo sapien
gggccgaggcgcgatagtttatcaa

SEQ ID NO: 2052778 - DNA, 25 bp, Homo sapien
tttatcaaagacgagggctggctcc

SEQ ID NO: 2052779 - DNA, 25 bp, Homo sapien
gttattaagatgactcagccccgtg

SEQ ID NO: 2052780 - DNA, 25 bp, Homo sapien
gaagggcctcccataacaatgtggt

SEQ ID NO: 2052781 - DNA, 25 bp, Homo sapien
gactcacgctcgcagtaggtgagga

SEQ ID NO: 2052782 - DNA, 25 bp, Homo sapien
tgggccttcagcgctgactcacgct

SEQ ID NO: 2052783 - DNA, 25 bp, Homo sapien
ttcagcgctgactcacgctcgcagt

SEQ ID NO: 2052784 - DNA, 25 bp, Homo sapien
gctgactcacgctcgcagtaggtga

SEQ ID NO: 2052785 - DNA, 25 bp, Homo sapien
tattttgctccctccgcggagtctc

SEQ ID NO: 2052786 - DNA, 25 bp, Homo sapien
tctgcctctcggtgttcccggctgt

SEQ ID NO: 2052787 - DNA, 25 bp, Homo sapien
tctctcccgtgcactgttctcggag

SEQ ID NO: 2052788 - DNA, 25 bp, Homo sapien
tgcctctcgtacctccctttgcttt

SEQ ID NO: 2052789 - DNA, 25 bp, Homo sapien
ctctagccacacttgaccatgggct

SEQ ID NO: 2052790 - DNA, 25 bp, Homo sapien
gcaggcttgaatgttctggtgaaca

SEQ ID NO: 2052791 - DNA, 25 bp, Homo sapien
gaagcaggcttgaatgttctggtga

SEQ ID NO: 2052792 - DNA, 25 bp, Homo sapien
tgttctggtgaacagtcacctcaga

SEQ ID NO: 2052793 - DNA, 25 bp, Homo sapien
tgaacagtcacctcagaccttttca

SEQ ID NO: 2052794 - DNA, 25 bp, Homo sapien
gactgaaatgaatagcggtcagagg

SEQ ID NO: 2052795 - DNA, 25 bp, Homo sapien
ccccgtgacgtcgtccctcgtgctg

SEQ ID NO: 2052796 - DNA, 25 bp, Homo sapien
atagcggtcagaggcccccgtgacg

SEQ ID NO: 2052797 - DNA, 25 bp, Homo sapien
gtgacgtcgtccctcgtgctgccgc

SEQ ID NO: 2052798 - DNA, 25 bp, Homo sapien
gagggggctgtgggctgtgagggtg

SEQ ID NO: 2052799 - DNA, 25 bp, Homo sapien
ggctgtgggctgtgagggtgtccag

SEQ ID NO: 2052800 - DNA, 25 bp, Homo sapien
gggctgtgggctgtgagggtgtcca

SEQ ID NO: 2052801 - DNA, 25 bp, Homo sapien
gggggctgtgggctgtgagggtgtc

SEQ ID NO: 2052802 - DNA, 25 bp, Homo sapien
tctatgtctatacggctaagtggag

SEQ ID NO: 2052803 - DNA, 25 bp, Homo sapien
tctatacggctaagtggagggccca

SEQ ID NO: 2052804 - DNA, 25 bp, Homo sapien
gacgggctcttctatgtctatacgg

SEQ ID NO: 2052805 - DNA, 25 bp, Homo sapien
cagtgagggtggagacgggctcttc

SEQ ID NO: 2052806 - DNA, 25 bp, Homo sapien
gccctaaaagcttgagaattacatg

SEQ ID NO: 2052807 - DNA, 25 bp, Homo sapien
ccagttgcccttgtttatgccctaa

SEQ ID NO: 2052808 - DNA, 25 bp, Homo sapien
ccaagtgtccatcctttccagttgc

SEQ ID NO: 2052809 - DNA, 25 bp, Homo sapien
attacatgtctggtgtcggctgctc

SEQ ID NO: 2052810 - DNA, 25 bp, Homo sapien
tcctctatcacaggtgccctttcaa

SEQ ID NO: 2052811 - DNA, 25 bp, Homo sapien
ccttctcttgggataaggggctcaa

SEQ ID NO: 2052812 - DNA, 25 bp, Homo sapien
cttcccgcagacacccaagtagagt

SEQ ID NO: 2052813 - DNA, 25 bp, Homo sapien
acccaagtagagtcagctgaggtgg

SEQ ID NO: 2052814 - DNA, 25 bp, Homo sapien
gagcatcaagggtggatttcaaatg

SEQ ID NO: 2052815 - DNA, 25 bp, Homo sapien
catcaagggtggatttcaaatgcat

SEQ ID NO: 2052816 - DNA, 25 bp, Homo sapien
gcatcaagggtggatttcaaatgca

SEQ ID NO: 2052817 - DNA, 25 bp, Homo sapien
ctgagcatcaagggtggatttcaaa

SEQ ID NO: 2052818 - DNA, 25 bp, Homo sapien
gtggcagagaattccccttgctgga

SEQ ID NO: 2052819 - DNA, 25 bp, Homo sapien
tggcagagaattccccttgctggag

SEQ ID NO: 2052820 - DNA, 25 bp, Homo sapien
gcagagaattccccttgctggagct

SEQ ID NO: 2052821 - DNA, 25 bp, Homo sapien
ggcagagaattccccttgctggagc

SEQ ID NO: 2052822 - DNA, 25 bp, Homo sapien
tgggctgcacccaacatcaatacgg

SEQ ID NO: 2052823 - DNA, 25 bp, Homo sapien
tccagctgtcgatagagggtgtctt

SEQ ID NO: 2052824 - DNA, 25 bp, Homo sapien
tgggacgccagcctcaatgagtcaa

SEQ ID NO: 2052825 - DNA, 25 bp, Homo sapien
caatatttaacctgagggctgcggc

SEQ ID NO: 2052826 - DNA, 25 bp, Homo sapien
gggtaagacagagcctagcatttgg

SEQ ID NO: 2052827 - DNA, 25 bp, Homo sapien
gtacacaagacccaacaaaccatgt

SEQ ID NO: 2052828 - DNA, 25 bp, Homo sapien
tgaagccaacttatcagctgactgg

SEQ ID NO: 2052829 - DNA, 25 bp, Homo sapien
ctctcaaggagtgcccaaggtgggt

SEQ ID NO: 2052830 - DNA, 25 bp, Homo sapien
aatgatagcagcaaacactcactga

SEQ ID NO: 2052831 - DNA, 25 bp, Homo sapien
tgcagggcctattggtggcacaaat

SEQ ID NO: 2052832 - DNA, 25 bp, Homo sapien
tgatgagtgtgcaaccaacatacct

SEQ ID NO: 2052833 - DNA, 25 bp, Homo sapien
tcaagccaaagtttgtgcagggcct

SEQ ID NO: 2052834 - DNA, 25 bp, Homo sapien
gcatcactcgtggtctcagcagcat

SEQ ID NO: 2052835 - DNA, 25 bp, Homo sapien
tgtttgtgcatcactcgtggtctca

SEQ ID NO: 2052836 - DNA, 25 bp, Homo sapien
actcgtggtctcagcagcatgggct

SEQ ID NO: 2052837 - DNA, 25 bp, Homo sapien
tgtgcatcactcgtggtctcagcag

SEQ ID NO: 2052838 - DNA, 25 bp, Homo sapien
ccgtgaacctcgagccactgagctg

SEQ ID NO: 2052839 - DNA, 25 bp, Homo sapien
taaatatagcggttgagatgcgcac

SEQ ID NO: 2052840 - DNA, 25 bp, Homo sapien
tctgtgggtctaaatatagcggttg

SEQ ID NO: 2052841 - DNA, 25 bp, Homo sapien
agctgcccgcttcgtctgtgggtct

SEQ ID NO: 2052842 - DNA, 25 bp, Homo sapien
gaattggatttgatgtagccctctg

SEQ ID NO: 2052843 - DNA, 25 bp, Homo sapien
ggatttgatgtagccctctggactc

SEQ ID NO: 2052844 - DNA, 25 bp, Homo sapien
gatgtagccctctggactcgagcta

SEQ ID NO: 2052845 - DNA, 25 bp, Homo sapien
tttgatgtagccctctggactcgag

SEQ ID NO: 2052846 - DNA, 25 bp, Homo sapien
gcacagaccttctccatgaaatcgg

SEQ ID NO: 2052847 - DNA, 25 bp, Homo sapien
caggcggctctccaagacgaaattt

SEQ ID NO: 2052848 - DNA, 25 bp, Homo sapien
tgaacactaattaccgcacagacct

SEQ ID NO: 2052849 - DNA, 25 bp, Homo sapien
caattcctccctcatgaacactaat

SEQ ID NO: 2052850 - DNA, 25 bp, Homo sapien
tctaggtagcgctgattccctccat

SEQ ID NO: 2052851 - DNA, 25 bp, Homo sapien
cagtgctggggtcggatctgctttc

SEQ ID NO: 2052852 - DNA, 25 bp, Homo sapien
tcccaagccctctaggtagcgctga

SEQ ID NO: 2052853 - DNA, 25 bp, Homo sapien
ctcaactctagaggcctgtcccagg

SEQ ID NO: 2052854 - DNA, 25 bp, Homo sapien
ccgcttgaatgtcaggcagtctcct

SEQ ID NO: 2052855 - DNA, 25 bp, Homo sapien
gagtactgagagccgcttgaatgtc

SEQ ID NO: 2052856 - DNA, 25 bp, Homo sapien
cgcttgaatgtcaggcagtctcctt

SEQ ID NO: 2052857 - DNA, 25 bp, Homo sapien
ggagtactgagagccgcttgaatgt

SEQ ID NO: 2052858 - DNA, 25 bp, Homo sapien
gctctcccaagactctccttttcct

SEQ ID NO: 2052859 - DNA, 25 bp, Homo sapien
tctcccaagactctccttttccttc

SEQ ID NO: 2052860 - DNA, 25 bp, Homo sapien
ccaagactctccttttccttccctg

SEQ ID NO: 2052861 - DNA, 25 bp, Homo sapien
caagactctccttttccttccctga

SEQ ID NO: 2052862 - DNA, 25 bp, Homo sapien
gctgaaagggtcacatccaccatgg

SEQ ID NO: 2052863 - DNA, 25 bp, Homo sapien
gcatctccgcttagattcctggtta

SEQ ID NO: 2052864 - DNA, 25 bp, Homo sapien
caagaagcagtctcgtctccacact

SEQ ID NO: 2052865 - DNA, 25 bp, Homo sapien
tcagcagagctaagctgaaagggtc

SEQ ID NO: 2052866 - DNA, 25 bp, Homo sapien
caggtccagacctcgccatcactcg

SEQ ID NO: 2052867 - DNA, 25 bp, Homo sapien
gagctgttacctcctctccgctttt

SEQ ID NO: 2052868 - DNA, 25 bp, Homo sapien
catctccaaagtggattcctcctct

SEQ ID NO: 2052869 - DNA, 25 bp, Homo sapien
catcactcgccaagtttgtgtttcc

SEQ ID NO: 2052870 - DNA, 25 bp, Homo sapien
agctcaagtggtctggtggactggg

SEQ ID NO: 2052871 - DNA, 25 bp, Homo sapien
gtctccttagctaaccattcctttc

SEQ ID NO: 2052872 - DNA, 25 bp, Homo sapien
ctcaaggtcatgctgtgagctcaag

SEQ ID NO: 2052873 - DNA, 25 bp, Homo sapien
cccttgcggccattggttggtctcc

SEQ ID NO: 2052874 - DNA, 25 bp, Homo sapien
agagtgacattggaggtggccttct

SEQ ID NO: 2052875 - DNA, 25 bp, Homo sapien
gctcctgggcttcctttggaaacat

SEQ ID NO: 2052876 - DNA, 25 bp, Homo sapien
aatgaaactcgacttgcccttggcc

SEQ ID NO: 2052877 - DNA, 25 bp, Homo sapien
cctgagagtgacattggaggtggcc

SEQ ID NO: 2052878 - DNA, 25 bp, Homo sapien
caggcaggctctttgttcggtcagg

SEQ ID NO: 2052879 - DNA, 25 bp, Homo sapien
tgttcggtcaggtgcccactgtgtg

SEQ ID NO: 2052880 - DNA, 25 bp, Homo sapien
acaggtatgcatcagctgccctcca

SEQ ID NO: 2052881 - DNA, 25 bp, Homo sapien
ccactgtgtgctgccctcatgagca

SEQ ID NO: 2052882 - DNA, 25 bp, Homo sapien
tccttggcaacaaagcagcagtctg

SEQ ID NO: 2052883 - DNA, 25 bp, Homo sapien
cagtgctctgctgtccttcgctggg

SEQ ID NO: 2052884 - DNA, 25 bp, Homo sapien
gcagcagtctggggcccagtgctct

SEQ ID NO: 2052885 - DNA, 25 bp, Homo sapien
agagtaattgctgtttccttggcaa

SEQ ID NO: 2052886 - DNA, 25 bp, Homo sapien
ccagggcatggctcatcagcgtggc

SEQ ID NO: 2052887 - DNA, 25 bp, Homo sapien
tggtgggtgtccgatgaggcacagc

SEQ ID NO: 2052888 - DNA, 25 bp, Homo sapien
agctctggttggggcgtgcacctca

SEQ ID NO: 2052889 - DNA, 25 bp, Homo sapien
tccttcactgtcaagtctgggaaag

SEQ ID NO: 2052890 - DNA, 25 bp, Homo sapien
gagagaaaacaatctccgggcaggc

SEQ ID NO: 2052891 - DNA, 25 bp, Homo sapien
tcccctgaacgagaagtattaatgg

SEQ ID NO: 2052892 - DNA, 25 bp, Homo sapien
tgggcagtctgctacctcctgaggc

SEQ ID NO: 2052893 - DNA, 25 bp, Homo sapien
taaattccaattagcagacccctgg

SEQ ID NO: 2052894 - DNA, 25 bp, Homo sapien
atattagccgacctctggcgccgtc

SEQ ID NO: 2052895 - DNA, 25 bp, Homo sapien
gcgccgtccgcccgcggtgaaaata

SEQ ID NO: 2052896 - DNA, 25 bp, Homo sapien
gtgaaaataagacgcggggccaatc

SEQ ID NO: 2052897 - DNA, 25 bp, Homo sapien
ccggagcgggaagatccacaccgcg

SEQ ID NO: 2052898 - DNA, 25 bp, Homo sapien
tctaactccagacaatagccccgtg

SEQ ID NO: 2052899 - DNA, 25 bp, Homo sapien
aagctgcccggcatgtctgcatagg

SEQ ID NO: 2052900 - DNA, 25 bp, Homo sapien
tcctcttaagctggccacagggtgg

SEQ ID NO: 2052901 - DNA, 25 bp, Homo sapien
ccccgtgttagaagaggcatggcca

SEQ ID NO: 2052902 - DNA, 25 bp, Homo sapien
tctagggtaggatgacccaggtgga

SEQ ID NO: 2052903 - DNA, 25 bp, Homo sapien
taccccaaattgctactttcccaga

SEQ ID NO: 2052904 - DNA, 25 bp, Homo sapien
taaaggattaagaaccagggtctca

SEQ ID NO: 2052905 - DNA, 25 bp, Homo sapien
gcaagtcgctcaggtgctctgtgcc

SEQ ID NO: 2052906 - DNA, 25 bp, Homo sapien
aaccagggcacatccaatagctcag

SEQ ID NO: 2052907 - DNA, 25 bp, Homo sapien
accagctcccaaatggaggaaactg

SEQ ID NO: 2052908 - DNA, 25 bp, Homo sapien
gctccaataggggagagagtctgct

SEQ ID NO: 2052909 - DNA, 25 bp, Homo sapien
gggcacatccaatagctcagcacca

SEQ ID NO: 2052910 - DNA, 25 bp, Homo sapien
agtcagactctcttccggccacagt

SEQ ID NO: 2052911 - DNA, 25 bp, Homo sapien
ggttacatcagcgttggagcactgc

SEQ ID NO: 2052912 - DNA, 25 bp, Homo sapien
tattgtccctagagactgcactacc

SEQ ID NO: 2052913 - DNA, 25 bp, Homo sapien
ggagcactgctgaacttttgtattg

SEQ ID NO: 2052914 - DNA, 25 bp, Homo sapien
gctcccctcagtccgatggggtagg

SEQ ID NO: 2052915 - DNA, 25 bp, Homo sapien
aatcaggaggtgtgcacaaagctgg

SEQ ID NO: 2052916 - DNA, 25 bp, Homo sapien
ccaaatcaggaggtgtgcacaaagc

SEQ ID NO: 2052917 - DNA, 25 bp, Homo sapien
cctcctggtggtgacctggtcacct

SEQ ID NO: 2052918 - DNA, 25 bp, Homo sapien
ctggatatctctcatggaagctaaa

SEQ ID NO: 2052919 - DNA, 25 bp, Homo sapien
tcccagaattatctgggttgttgcc

SEQ ID NO: 2052920 - DNA, 25 bp, Homo sapien
cccagaattatctgggttgttgcca

SEQ ID NO: 2052921 - DNA, 25 bp, Homo sapien
tatctggatatctctcatggaagct

SEQ ID NO: 2052922 - DNA, 25 bp, Homo sapien
agttattccagagccttgaagcgca

SEQ ID NO: 2052923 - DNA, 25 bp, Homo sapien
aaaggcattgccgtgaccaaatctg

SEQ ID NO: 2052924 - DNA, 25 bp, Homo sapien
aaaccttgtcatctccacgtcaggg

SEQ ID NO: 2052925 - DNA, 25 bp, Homo sapien
tgtatatcatcagagctcctgcatg

SEQ ID NO: 2052926 - DNA, 25 bp, Homo sapien
acctggccgctgggccccgatggat

SEQ ID NO: 2052927 - DNA, 25 bp, Homo sapien
ccccgatggattccccgtctctcat

SEQ ID NO: 2052928 - DNA, 25 bp, Homo sapien
tggccgctgggccccgatggattcc

SEQ ID NO: 2052929 - DNA, 25 bp, Homo sapien
ctgggccccgatggattccccgtct

SEQ ID NO: 2052930 - DNA, 25 bp, Homo sapien
gtttccctggaaatgacgctctctg

SEQ ID NO: 2052931 - DNA, 25 bp, Homo sapien
cgagggccttgtggctgaacaacaa

SEQ ID NO: 2052932 - DNA, 25 bp, Homo sapien
gaaatttcccctgacgcctggacat

SEQ ID NO: 2052933 - DNA, 25 bp, Homo sapien
tgctgggagcccaagttgcatcctg

SEQ ID NO: 2052934 - DNA, 25 bp, Homo sapien
gggaggtgggaggatactccctgga

SEQ ID NO: 2052935 - DNA, 25 bp, Homo sapien
aaacaggcttttccagggaaagctg

SEQ ID NO: 2052936 - DNA, 25 bp, Homo sapien
tgtttggagcaatgaggggaggtgg

SEQ ID NO: 2052937 - DNA, 25 bp, Homo sapien
gtggggtggcaaacaggcttttcca

SEQ ID NO: 2052938 - DNA, 25 bp, Homo sapien
cctcctcttgtatttgtcttctccc

SEQ ID NO: 2052939 - DNA, 25 bp, Homo sapien
caccttgatcatgactttcatttga

SEQ ID NO: 2052940 - DNA, 25 bp, Homo sapien
gactttcatttgaatctccaaactg

SEQ ID NO: 2052941 - DNA, 25 bp, Homo sapien
tgcactcagttatcaccaccttgat

SEQ ID NO: 2052942 - DNA, 25 bp, Homo sapien
gtcccaggcgctgaatccagctctg

SEQ ID NO: 2052943 - DNA, 25 bp, Homo sapien
cttggtccgggttgtgcagtagtcc

SEQ ID NO: 2052944 - DNA, 25 bp, Homo sapien
ttgtgccctgtgccccggagagtcc

SEQ ID NO: 2052945 - DNA, 25 bp, Homo sapien
tggccacgtctgaaaacacaggcgg

SEQ ID NO: 2052946 - DNA, 25 bp, Homo sapien
accactgtgaatctggctgactcac

SEQ ID NO: 2052947 - DNA, 25 bp, Homo sapien
tcaccactgtgaatctggctgactc

SEQ ID NO: 2052948 - DNA, 25 bp, Homo sapien
caccactgtgaatctggctgactca

SEQ ID NO: 2052949 - DNA, 25 bp, Homo sapien
atcaccactgtgaatctggctgact

SEQ ID NO: 2052950 - DNA, 25 bp, Homo sapien
tccctgctgcgtggaatgcaacctt

SEQ ID NO: 2052951 - DNA, 25 bp, Homo sapien
gctctccctgctgcgtggaatgcaa

SEQ ID NO: 2052952 - DNA, 25 bp, Homo sapien
cgctctccctgctgcgtggaatgca

SEQ ID NO: 2052953 - DNA, 25 bp, Homo sapien
tctccctgctgcgtggaatgcaacc

SEQ ID NO: 2052954 - DNA, 25 bp, Homo sapien
taaacactcgttattgagtgctcgc

SEQ ID NO: 2052955 - DNA, 25 bp, Homo sapien
taaatgctccttacttaaacaaaca

SEQ ID NO: 2052956 - DNA, 25 bp, Homo sapien
taaataaacactcgttattgagtgc

SEQ ID NO: 2052957 - DNA, 25 bp, Homo sapien
ctcgttattgagtgctcgctgtgca

SEQ ID NO: 2052958 - DNA, 25 bp, Homo sapien
tgaacttcacgagctggctgctctg

SEQ ID NO: 2052959 - DNA, 25 bp, Homo sapien
ttcacgagctggctgctctgatctt

SEQ ID NO: 2052960 - DNA, 25 bp, Homo sapien
acttcacgagctggctgctctgatc

SEQ ID NO: 2052961 - DNA, 25 bp, Homo sapien
cacgagctggctgctctgatcttcc

SEQ ID NO: 2052962 - DNA, 25 bp, Homo sapien
tggcatctacacttaggaaggctga

SEQ ID NO: 2052963 - DNA, 25 bp, Homo sapien
tacttaaccacaataggcacaggcg

SEQ ID NO: 2052964 - DNA, 25 bp, Homo sapien
ccaagcgtacgactcatgggagcat

SEQ ID NO: 2052965 - DNA, 25 bp, Homo sapien
gagatagcacattagagcacttggc

SEQ ID NO: 2052966 - DNA, 25 bp, Homo sapien
gaagcgttcttcgaggtgacccatt

SEQ ID NO: 2052967 - DNA, 25 bp, Homo sapien
tgcatggactcagcacctctgactg

SEQ ID NO: 2052968 - DNA, 25 bp, Homo sapien
catttcattcccatcccgagaggaa

SEQ ID NO: 2052969 - DNA, 25 bp, Homo sapien
ggttagagcccaatactgatgagga

SEQ ID NO: 2052970 - DNA, 25 bp, Homo sapien
tgcagatgcattgggcaaagcacac

SEQ ID NO: 2052971 - DNA, 25 bp, Homo sapien
aatgggtaaccaccagatctgtgcc

SEQ ID NO: 2052972 - DNA, 25 bp, Homo sapien
gaagaccgggcataataagggcacc

SEQ ID NO: 2052973 - DNA, 25 bp, Homo sapien
caacagcagcttgctgcagatgcat

SEQ ID NO: 2052974 - DNA, 25 bp, Homo sapien
ctcttcttccggtctcccagggaat

SEQ ID NO: 2052975 - DNA, 25 bp, Homo sapien
tcttcttccggtctcccagggaatc

SEQ ID NO: 2052976 - DNA, 25 bp, Homo sapien
cttccggtctcccagggaatctgtg

SEQ ID NO: 2052977 - DNA, 25 bp, Homo sapien
ttcttccggtctcccagggaatctg

SEQ ID NO: 2052978 - DNA, 25 bp, Homo sapien
agcagactacccttctcccaaacag

SEQ ID NO: 2052979 - DNA, 25 bp, Homo sapien
tcccaaacagtctacgctgttgtgg

SEQ ID NO: 2052980 - DNA, 25 bp, Homo sapien
ggtgcccaaagccagatttattagc

SEQ ID NO: 2052981 - DNA, 25 bp, Homo sapien
ccagatttattagcctcatcactca

SEQ ID NO: 2052982 - DNA, 25 bp, Homo sapien
catcctagagcagtatgaccaggac

SEQ ID NO: 2052983 - DNA, 25 bp, Homo sapien
atccaaaccatcctagagcagtatg

SEQ ID NO: 2052984 - DNA, 25 bp, Homo sapien
tttaaaggatttgactgtaagtagc

SEQ ID NO: 2052985 - DNA, 25 bp, Homo sapien
gatttgactgtaagtagcatttgct

SEQ ID NO: 2052986 - DNA, 25 bp, Homo sapien
ccaccttgtcggaacagagcctgac

SEQ ID NO: 2052987 - DNA, 25 bp, Homo sapien
tatcacatctcaagttatcttgtgg

SEQ ID NO: 2052988 - DNA, 25 bp, Homo sapien
cagcgtatttacacgggacagtttt

SEQ ID NO: 2052989 - DNA, 25 bp, Homo sapien
ttgtggcagtgaaagcgggtccccc

SEQ ID NO: 2052990 - DNA, 25 bp, Homo sapien
ggcagttggttcagtgactccccaa

SEQ ID NO: 2052991 - DNA, 25 bp, Homo sapien
caagacaaggtcagaacattccaag

SEQ ID NO: 2052992 - DNA, 25 bp, Homo sapien
gaaacctgcctctgcgtgatgaggg

SEQ ID NO: 2052993 - DNA, 25 bp, Homo sapien
ggcatcccagaagtcaacggcagtt

SEQ ID NO: 2052994 - DNA, 25 bp, Homo sapien
ccacagaagcaggactatgtctctc

SEQ ID NO: 2052995 - DNA, 25 bp, Homo sapien
ttatgcgttgtccagagccggcctt

SEQ ID NO: 2052996 - DNA, 25 bp, Homo sapien
cttgcagaaggccacataggatttg

SEQ ID NO: 2052997 - DNA, 25 bp, Homo sapien
caatatttttggctgttctgtcccc

SEQ ID NO: 2052998 - DNA, 25 bp, Homo sapien
tgtggcttgggctttatacccacct

SEQ ID NO: 2052999 - DNA, 25 bp, Homo sapien
cccacctagggctatgcggaacttg

SEQ ID NO: 2053000 - DNA, 25 bp, Homo sapien
tggcttgggctttatacccacctag

SEQ ID NO: 2053001 - DNA, 25 bp, Homo sapien
tatgcggaacttgatgggtggagat

SEQ ID NO: 2053002 - DNA, 25 bp, Homo sapien
caagccaggagttctgaggtggatc

SEQ ID NO: 2053003 - DNA, 25 bp, Homo sapien
tgttctactcccctaggctgtttgg

SEQ ID NO: 2053004 - DNA, 25 bp, Homo sapien
gagggcctgacttgactgagctgtc

SEQ ID NO: 2053005 - DNA, 25 bp, Homo sapien
tgcgtatctaaaggcctgcaggaaa

SEQ ID NO: 2053006 - DNA, 25 bp, Homo sapien
tattccaaggcctcactcagaagcc

SEQ ID NO: 2053007 - DNA, 25 bp, Homo sapien
taatggccatgatcaagttgctgga

SEQ ID NO: 2053008 - DNA, 25 bp, Homo sapien
tttgagaggccacaaacatccagcc

SEQ ID NO: 2053009 - DNA, 25 bp, Homo sapien
tttaggtgagatcccttctgggtca

SEQ ID NO: 2053010 - DNA, 25 bp, Homo sapien
gtgtccatagcccatttgtggccaa

SEQ ID NO: 2053011 - DNA, 25 bp, Homo sapien
ctaatgtgctggaggatcagctgtg

SEQ ID NO: 2053012 - DNA, 25 bp, Homo sapien
tgctggaggatcagctgtgtccata

SEQ ID NO: 2053013 - DNA, 25 bp, Homo sapien
tgtccatagcccatttgtggccaag

SEQ ID NO: 2053014 - DNA, 25 bp, Homo sapien
taacagcatcttcggcggctctcca

SEQ ID NO: 2053015 - DNA, 25 bp, Homo sapien
tgtaacagcatcttcggcggctctc

SEQ ID NO: 2053016 - DNA, 25 bp, Homo sapien
cagcatcttcggcggctctccacac

SEQ ID NO: 2053017 - DNA, 25 bp, Homo sapien
gcatcttcggcggctctccacacta

SEQ ID NO: 2053018 - DNA, 25 bp, Homo sapien
ctactctagcccggagcaaaggatg

SEQ ID NO: 2053019 - DNA, 25 bp, Homo sapien
actctagcccggagcaaaggatgag

SEQ ID NO: 2053020 - DNA, 25 bp, Homo sapien
tactctagcccggagcaaaggatga

SEQ ID NO: 2053021 - DNA, 25 bp, Homo sapien
gagtccgtccgctcagcgtcctggg

SEQ ID NO: 2053022 - DNA, 25 bp, Homo sapien
tctccatggcatcgttcctatcagc

SEQ ID NO: 2053023 - DNA, 25 bp, Homo sapien
ggtcgctgtacccaaaaatccaagc

SEQ ID NO: 2053024 - DNA, 25 bp, Homo sapien
tcctgggctcgaccggtgcagcctt

SEQ ID NO: 2053025 - DNA, 25 bp, Homo sapien
ccaaaacccagtcttgccccagcga

SEQ ID NO: 2053026 - DNA, 25 bp, Homo sapien
tcgcccaaaacccagtcttgcccca

SEQ ID NO: 2053027 - DNA, 25 bp, Homo sapien
aaacccagtcttgccccagcgaaca

SEQ ID NO: 2053028 - DNA, 25 bp, Homo sapien
cagtcttgccccagcgaacagctcc

SEQ ID NO: 2053029 - DNA, 25 bp, Homo sapien
gattttgccaaactcctcgaagagg

SEQ ID NO: 2053030 - DNA, 25 bp, Homo sapien
tgtccttcagaaccgtaagctcgta

SEQ ID NO: 2053031 - DNA, 25 bp, Homo sapien
gcttaatccgttcatgtgcccggca

SEQ ID NO: 2053032 - DNA, 25 bp, Homo sapien
cttcatgggaatggtcgacgggttc

SEQ ID NO: 2053033 - DNA, 25 bp, Homo sapien
ctaacgtggccatctttatatacat

SEQ ID NO: 2053034 - DNA, 25 bp, Homo sapien
ctgtcctttccgtttaaacaggctg

SEQ ID NO: 2053035 - DNA, 25 bp, Homo sapien
acacacactcgggttctctccccct

SEQ ID NO: 2053036 - DNA, 25 bp, Homo sapien
cgctcgctcgcgctcacacacgcac

SEQ ID NO: 2053037 - DNA, 25 bp, Homo sapien
gtttctctacacctcgctctccgct

SEQ ID NO: 2053038 - DNA, 25 bp, Homo sapien
caagctatgctctattagggcgcca

SEQ ID NO: 2053039 - DNA, 25 bp, Homo sapien
tttagactagaaaagcgagccggct

SEQ ID NO: 2053040 - DNA, 25 bp, Homo sapien
atagacaagagctctctcgcgcgcg

SEQ ID NO: 2053041 - DNA, 25 bp, Homo sapien
gatccgagcgcgcattcatcagtgt

SEQ ID NO: 2053042 - DNA, 25 bp, Homo sapien
tacagctcccgaggtgcgaggctga

SEQ ID NO: 2053043 - DNA, 25 bp, Homo sapien
gtttcgttttcggcacctacagctc

SEQ ID NO: 2053044 - DNA, 25 bp, Homo sapien
tgaatcgctatctgggttgccgccg

SEQ ID NO: 2053045 - DNA, 25 bp, Homo sapien
caaaagaataaagcccctgaatcgc

SEQ ID NO: 2053046 - DNA, 25 bp, Homo sapien
gacacccactgaactagcagccctg

SEQ ID NO: 2053047 - DNA, 25 bp, Homo sapien
tgacacccactgaactagcagccct

SEQ ID NO: 2053048 - DNA, 25 bp, Homo sapien
cacccactgaactagcagccctggc

SEQ ID NO: 2053049 - DNA, 25 bp, Homo sapien
acacccactgaactagcagccctgg

SEQ ID NO: 2053050 - DNA, 25 bp, Homo sapien
ccagagccttgtctgttgcgctgcc

SEQ ID NO: 2053051 - DNA, 25 bp, Homo sapien
cagagccttgtctgttgcgctgccc

SEQ ID NO: 2053052 - DNA, 25 bp, Homo sapien
gcccaggcccgcatcgccggcctgc

SEQ ID NO: 2053053 - DNA, 25 bp, Homo sapien
ccgcatcgccggcctgctgatttcc

SEQ ID NO: 2053054 - DNA, 25 bp, Homo sapien
agctctgcctgctctacgctgtttc

SEQ ID NO: 2053055 - DNA, 25 bp, Homo sapien
ctggaaatgcccctgtcggtcagat

SEQ ID NO: 2053056 - DNA, 25 bp, Homo sapien
ggtcagatccctggcctttagccct

SEQ ID NO: 2053057 - DNA, 25 bp, Homo sapien
gctctacgctgtttcttggactgga

SEQ ID NO: 2053058 - DNA, 25 bp, Homo sapien
acactgaggacggtcctatagctca

SEQ ID NO: 2053059 - DNA, 25 bp, Homo sapien
tagacactgaggacggtcctatagc

SEQ ID NO: 2053060 - DNA, 25 bp, Homo sapien
cactgaggacggtcctatagctcat

SEQ ID NO: 2053061 - DNA, 25 bp, Homo sapien
gcatagacactgaggacggtcctat

SEQ ID NO: 2053062 - DNA, 25 bp, Homo sapien
attccacaaatgtttgctggcagtc

SEQ ID NO: 2053063 - DNA, 25 bp, Homo sapien
gtttgctggcagtctgaaagaggac

SEQ ID NO: 2053064 - DNA, 25 bp, Homo sapien
ttcctaattccacaaatgtttgctg

SEQ ID NO: 2053065 - DNA, 25 bp, Homo sapien
ttgctggcagtctgaaagaggacag

SEQ ID NO: 2053066 - DNA, 25 bp, Homo sapien
caggctgacattggtaagaaggcca

SEQ ID NO: 2053067 - DNA, 25 bp, Homo sapien
ggtaagaaggccatattggcatgga

SEQ ID NO: 2053068 - DNA, 25 bp, Homo sapien
gcagggacaggacatgctctgagct

SEQ ID NO: 2053069 - DNA, 25 bp, Homo sapien
aagccaaaggaactccctgaacgcg

SEQ ID NO: 2053070 - DNA, 25 bp, Homo sapien
tactccagtgtgatggtaggagctg

SEQ ID NO: 2053071 - DNA, 25 bp, Homo sapien
gctactccagtgtgatggtaggagc

SEQ ID NO: 2053072 - DNA, 25 bp, Homo sapien
ccccagcactggcgctactccagtg

SEQ ID NO: 2053073 - DNA, 25 bp, Homo sapien
gcgctactccagtgtgatggtagga

SEQ ID NO: 2053074 - DNA, 25 bp, Homo sapien
tgaatgtggaggcacctttcaggca

SEQ ID NO: 2053075 - DNA, 25 bp, Homo sapien
aatgaatgtggaggcacctttcagg

SEQ ID NO: 2053076 - DNA, 25 bp, Homo sapien
aaatgaatgtggaggcacctttcag

SEQ ID NO: 2053077 - DNA, 25 bp, Homo sapien
gaatgtggaggcacctttcaggcat

SEQ ID NO: 2053078 - DNA, 25 bp, Homo sapien
gatcctacgtggtcttctgctaact

SEQ ID NO: 2053079 - DNA, 25 bp, Homo sapien
tcagtgatcctacgtggtcttctgc

SEQ ID NO: 2053080 - DNA, 25 bp, Homo sapien
cttcactcagtgatcctacgtggtc

SEQ ID NO: 2053081 - DNA, 25 bp, Homo sapien
ccaatttcactatccaaagtcttca

SEQ ID NO: 2053082 - DNA, 25 bp, Homo sapien
taaatggtgtgctttctgtaatgtc

SEQ ID NO: 2053083 - DNA, 25 bp, Homo sapien
aatctgaataattgtatttctgggc

SEQ ID NO: 2053084 - DNA, 25 bp, Homo sapien
gcatgccaaattttattgcttctaa

SEQ ID NO: 2053085 - DNA, 25 bp, Homo sapien
tgcaggaattctgaatacgagaaaa

SEQ ID NO: 2053086 - DNA, 25 bp, Homo sapien
gcccggctgcgggaacttcgcaagc

SEQ ID NO: 2053087 - DNA, 25 bp, Homo sapien
tataaggccattaaactcatcttgg

SEQ ID NO: 2053088 - DNA, 25 bp, Homo sapien
caagcgtatatgcatgagagccggc

SEQ ID NO: 2053089 - DNA, 25 bp, Homo sapien
cggcgcggtgcttcagaaacttccc

SEQ ID NO: 2053090 - DNA, 25 bp, Homo sapien
taaatgagtacaattcaggctgatg

SEQ ID NO: 2053091 - DNA, 25 bp, Homo sapien
aagaaaagcctaataaataactcag

SEQ ID NO: 2053092 - DNA, 25 bp, Homo sapien
ctgatgtattgcagctgagccggct

SEQ ID NO: 2053093 - DNA, 25 bp, Homo sapien
gtcggatggcatgcttttaaagtga

SEQ ID NO: 2053094 - DNA, 25 bp, Homo sapien
gagcataatttgactgttaacagaa

SEQ ID NO: 2053095 - DNA, 25 bp, Homo sapien
tccctgctttgcaccgatgtgttgt

SEQ ID NO: 2053096 - DNA, 25 bp, Homo sapien
cctgcagagcatgcgaaggttgacc

SEQ ID NO: 2053097 - DNA, 25 bp, Homo sapien
ggacaacctgggtgcgagtctgtct

SEQ ID NO: 2053098 - DNA, 25 bp, Homo sapien
cttgcaggacccaccagtggttttg

SEQ ID NO: 2053099 - DNA, 25 bp, Homo sapien
tgcaggacccaccagtggttttgct

SEQ ID NO: 2053100 - DNA, 25 bp, Homo sapien
ggacccaccagtggttttgctctgg

SEQ ID NO: 2053101 - DNA, 25 bp, Homo sapien
caggacccaccagtggttttgctct

SEQ ID NO: 2053102 - DNA, 25 bp, Homo sapien
tgagttcagctgacttgccacatct

SEQ ID NO: 2053103 - DNA, 25 bp, Homo sapien
ccacctgagttcagctgacttgcca

SEQ ID NO: 2053104 - DNA, 25 bp, Homo sapien
cagcatgatttccacctgagttcag

SEQ ID NO: 2053105 - DNA, 25 bp, Homo sapien
ttcagcatgatttccacctgagttc

SEQ ID NO: 2053106 - DNA, 25 bp, Homo sapien
tcaggagtcctgtttcacagctcag

SEQ ID NO: 2053107 - DNA, 25 bp, Homo sapien
tgtgcagtccacagcttataaaagg

SEQ ID NO: 2053108 - DNA, 25 bp, Homo sapien
gactgggaccaacactatgatgctt

SEQ ID NO: 2053109 - DNA, 25 bp, Homo sapien
tataaaaggccggatcagtgggtcc

SEQ ID NO: 2053110 - DNA, 25 bp, Homo sapien
gaaaagcctgttgtcactcgtgcta

SEQ ID NO: 2053111 - DNA, 25 bp, Homo sapien
gaaacacagttctaaagtgcttagc

SEQ ID NO: 2053112 - DNA, 25 bp, Homo sapien
tccttaatctgcatggctcagggag

SEQ ID NO: 2053113 - DNA, 25 bp, Homo sapien
tctcttgtattgattctctgtgggt

SEQ ID NO: 2053114 - DNA, 25 bp, Homo sapien
tggaggatcagttgggtagacagca

SEQ ID NO: 2053115 - DNA, 25 bp, Homo sapien
gcagaaaaactcgtagcatggggca

SEQ ID NO: 2053116 - DNA, 25 bp, Homo sapien
ggggaggcagaaaaactcgtagcat

SEQ ID NO: 2053117 - DNA, 25 bp, Homo sapien
gaggcagaaaaactcgtagcatggg

SEQ ID NO: 2053118 - DNA, 25 bp, Homo sapien
gaggagacttagatggttccctgta

SEQ ID NO: 2053119 - DNA, 25 bp, Homo sapien
tgtgctgaggagacttagatggttc

SEQ ID NO: 2053120 - DNA, 25 bp, Homo sapien
cctgtatctaacactgcagtcttct

SEQ ID NO: 2053121 - DNA, 25 bp, Homo sapien
gatggttccctgtatctaacactgc

SEQ ID NO: 2053122 - DNA, 25 bp, Homo sapien
tagagcaatgctcagtacatcctca

SEQ ID NO: 2053123 - DNA, 25 bp, Homo sapien
tggctgagggcttctgatatctaga

SEQ ID NO: 2053124 - DNA, 25 bp, Homo sapien
tgtggaataagtaagtgtatgctgc

SEQ ID NO: 2053125 - DNA, 25 bp, Homo sapien
agtacatcctcaatatccaataatg

SEQ ID NO: 2053126 - DNA, 25 bp, Homo sapien
tgtctgcagttatgttacccattcc

SEQ ID NO: 2053127 - DNA, 25 bp, Homo sapien
ctgcagttatgttacccattccatt

SEQ ID NO: 2053128 - DNA, 25 bp, Homo sapien
gtctgcagttatgttacccattcca

SEQ ID NO: 2053129 - DNA, 25 bp, Homo sapien
tctgcagttatgttacccattccat

SEQ ID NO: 2053130 - DNA, 25 bp, Homo sapien
cctctgcaaggataaattcattggc

SEQ ID NO: 2053131 - DNA, 25 bp, Homo sapien
ggcacctctgcaaggataaattcat

SEQ ID NO: 2053132 - DNA, 25 bp, Homo sapien
tgcctggcacctctgcaaggataaa

SEQ ID NO: 2053133 - DNA, 25 bp, Homo sapien
ctggcacctctgcaaggataaattc

SEQ ID NO: 2053134 - DNA, 25 bp, Homo sapien
agaggctttcaaaggcattgtgtgg

SEQ ID NO: 2053135 - DNA, 25 bp, Homo sapien
ttcctgattttggggcaccccaagc

SEQ ID NO: 2053136 - DNA, 25 bp, Homo sapien
gaagaggctttcaaaggcattgtgt

SEQ ID NO: 2053137 - DNA, 25 bp, Homo sapien
ctgaggttcctgattttggggcacc

SEQ ID NO: 2053138 - DNA, 25 bp, Homo sapien
caccatggcaaggtgagaataaccc

SEQ ID NO: 2053139 - DNA, 25 bp, Homo sapien
ccatggggattctgactacaccagg

SEQ ID NO: 2053140 - DNA, 25 bp, Homo sapien
ctgcacatgcaccatggcaaggtga

SEQ ID NO: 2053141 - DNA, 25 bp, Homo sapien
caaggtgagaataaccccagaatcc

SEQ ID NO: 2053142 - DNA, 25 bp, Homo sapien
gagtcctggatgtctcagccaggga

SEQ ID NO: 2053143 - DNA, 25 bp, Homo sapien
gccagggagtatttcaagatgtaga

SEQ ID NO: 2053144 - DNA, 25 bp, Homo sapien
ctcagccagggagtatttcaagatg

SEQ ID NO: 2053145 - DNA, 25 bp, Homo sapien
agagtcctggatgtctcagccaggg

SEQ ID NO: 2053146 - DNA, 25 bp, Homo sapien
actcttttatctacagcacctgcca

SEQ ID NO: 2053147 - DNA, 25 bp, Homo sapien
ctgcagcacgtatactcttttatct

SEQ ID NO: 2053148 - DNA, 25 bp, Homo sapien
ctggtccaccatcaagttagctgcc

SEQ ID NO: 2053149 - DNA, 25 bp, Homo sapien
ctgtctggtccaccatcaagttagc

SEQ ID NO: 2053150 - DNA, 25 bp, Homo sapien
ttcccagatggcccatctcctggtt

SEQ ID NO: 2053151 - DNA, 25 bp, Homo sapien
tcccagatggcccatctcctggttc

SEQ ID NO: 2053152 - DNA, 25 bp, Homo sapien
ttttcccagatggcccatctcctgg

SEQ ID NO: 2053153 - DNA, 25 bp, Homo sapien
ccttttcccagatggcccatctcct

SEQ ID NO: 2053154 - DNA, 25 bp, Homo sapien
aggactgtcaggcagtgtttttggt

SEQ ID NO: 2053155 - DNA, 25 bp, Homo sapien
gaggtcacaagtaggactgtcaggc

SEQ ID NO: 2053156 - DNA, 25 bp, Homo sapien
cacaagtaggactgtcaggcagtgt

SEQ ID NO: 2053157 - DNA, 25 bp, Homo sapien
gctcttggtgaggtcacaagtagga

SEQ ID NO: 2053158 - DNA, 25 bp, Homo sapien
attattctttcttcgtccacagtgg

SEQ ID NO: 2053159 - DNA, 25 bp, Homo sapien
ctcacattattctttcttcgtccac

SEQ ID NO: 2053160 - DNA, 25 bp, Homo sapien
ccactttatcctcacattattcttt

SEQ ID NO: 2053161 - DNA, 25 bp, Homo sapien
cacattattctttcttcgtccacag

SEQ ID NO: 2053162 - DNA, 25 bp, Homo sapien
catgagatgtaagtagtcccattga

SEQ ID NO: 2053163 - DNA, 25 bp, Homo sapien
ggtcccctgaactgaccctgagtct

SEQ ID NO: 2053164 - DNA, 25 bp, Homo sapien
cactgatttcagctcaatggttctg

SEQ ID NO: 2053165 - DNA, 25 bp, Homo sapien
gaagtagcgttcactttaggccagc

SEQ ID NO: 2053166 - DNA, 25 bp, Homo sapien
tgtagaaatgacactggggcattcg

SEQ ID NO: 2053167 - DNA, 25 bp, Homo sapien
ccaccagctctaattatacttcaag

SEQ ID NO: 2053168 - DNA, 25 bp, Homo sapien
gcttgttttccagggttcagctggg

SEQ ID NO: 2053169 - DNA, 25 bp, Homo sapien
tgggggtccttgcttgcctgtacct

SEQ ID NO: 2053170 - DNA, 25 bp, Homo sapien
gaagcaccaccataggttcaccgaa

SEQ ID NO: 2053171 - DNA, 25 bp, Homo sapien
agacaaattcttaaccccagccctg

SEQ ID NO: 2053172 - DNA, 25 bp, Homo sapien
gaaaggacccatcaaaggcaaccga

SEQ ID NO: 2053173 - DNA, 25 bp, Homo sapien
gccatgatgacagcgagatgcacca

SEQ ID NO: 2053174 - DNA, 25 bp, Homo sapien
tgactgctcgccgttgctccgagct

SEQ ID NO: 2053175 - DNA, 25 bp, Homo sapien
tcctggcacgtttcccgtgtgcgca

SEQ ID NO: 2053176 - DNA, 25 bp, Homo sapien
gagaggcaggcgctactcctggcac

SEQ ID NO: 2053177 - DNA, 25 bp, Homo sapien
ccgttgctccgagcttgtctctggg

SEQ ID NO: 2053178 - DNA, 25 bp, Homo sapien
ttttttcagtcgtcctgtatccagg

SEQ ID NO: 2053179 - DNA, 25 bp, Homo sapien
caggttcatgtgacgctggccacat

SEQ ID NO: 2053180 - DNA, 25 bp, Homo sapien
cttggaggatgccaaggtgtaactt

SEQ ID NO: 2053181 - DNA, 25 bp, Homo sapien
gacctcaacaagattataggcctgt

SEQ ID NO: 2053182 - DNA, 25 bp, Homo sapien
gagctctcgagcttgaagagcttga

SEQ ID NO: 2053183 - DNA, 25 bp, Homo sapien
ctcgagcttgaagagcttgaaagtc

SEQ ID NO: 2053184 - DNA, 25 bp, Homo sapien
gtatattccagagctctcgagcttg

SEQ ID NO: 2053185 - DNA, 25 bp, Homo sapien
tccagagctctcgagcttgaagagc

SEQ ID NO: 2053186 - DNA, 25 bp, Homo sapien
taattggcagtaatcatggagatag

SEQ ID NO: 2053187 - DNA, 25 bp, Homo sapien
cgtggtgatgattaattggcagtaa

SEQ ID NO: 2053188 - DNA, 25 bp, Homo sapien
agatagtgaaagtaatgaggcccac

SEQ ID NO: 2053189 - DNA, 25 bp, Homo sapien
gatgatgttcgtggtgatgattaat

SEQ ID NO: 2053190 - DNA, 25 bp, Homo sapien
cctggcttgccaggcagagcaaggt

SEQ ID NO: 2053191 - DNA, 25 bp, Homo sapien
aactgcattcgaattctggagggcc

SEQ ID NO: 2053192 - DNA, 25 bp, Homo sapien
tggctgaagtaaagggtcacttatt

SEQ ID NO: 2053193 - DNA, 25 bp, Homo sapien
cacttattggggctggaagtgtcag

SEQ ID NO: 2053194 - DNA, 25 bp, Homo sapien
tccctcagctggagtatgtcctctt

SEQ ID NO: 2053195 - DNA, 25 bp, Homo sapien
tggtgattgccttttgacacagtcc

SEQ ID NO: 2053196 - DNA, 25 bp, Homo sapien
cagttctgtgttgtttagcctgccc

SEQ ID NO: 2053197 - DNA, 25 bp, Homo sapien
ggtctttcagcagtaccctgtattg

SEQ ID NO: 2053198 - DNA, 25 bp, Homo sapien
gagacacatgtggtcagtaaggaca

SEQ ID NO: 2053199 - DNA, 25 bp, Homo sapien
agacacatgtggtcagtaaggacat

SEQ ID NO: 2053200 - DNA, 25 bp, Homo sapien
ctggcagtgtgatgaaacacttccc

SEQ ID NO: 2053201 - DNA, 25 bp, Homo sapien
cagtgtgatgaaacacttccctccg

SEQ ID NO: 2053202 - DNA, 25 bp, Homo sapien
gatgaaacacttccctccgtgctgc

SEQ ID NO: 2053203 - DNA, 25 bp, Homo sapien
tgtgatgaaacacttccctccgtgc

SEQ ID NO: 2053204 - DNA, 25 bp, Homo sapien
gcaaaacctttgtccaagcacagga

SEQ ID NO: 2053205 - DNA, 25 bp, Homo sapien
tgcaaaacctttgtccaagcacagg

SEQ ID NO: 2053206 - DNA, 25 bp, Homo sapien
aaaacctttgtccaagcacaggact

SEQ ID NO: 2053207 - DNA, 25 bp, Homo sapien
caaaacctttgtccaagcacaggac

SEQ ID NO: 2053208 - DNA, 25 bp, Homo sapien
tgtgagcacaagctctccttcatta

SEQ ID NO: 2053209 - DNA, 25 bp, Homo sapien
ggctgtgagcacaagctctccttca

SEQ ID NO: 2053210 - DNA, 25 bp, Homo sapien
gctgtgagcacaagctctccttcat

SEQ ID NO: 2053211 - DNA, 25 bp, Homo sapien
tgagcacaagctctccttcattacc

SEQ ID NO: 2053212 - DNA, 25 bp, Homo sapien
ttctgctgggcccctgactggggag

SEQ ID NO: 2053213 - DNA, 25 bp, Homo sapien
tctgctgggcccctgactggggagg

SEQ ID NO: 2053214 - DNA, 25 bp, Homo sapien
ccaaacacggagaagctattccctg

SEQ ID NO: 2053215 - DNA, 25 bp, Homo sapien
ggggccaaacacggagaagctattc

SEQ ID NO: 2053216 - DNA, 25 bp, Homo sapien
gggccaaacacggagaagctattcc

SEQ ID NO: 2053217 - DNA, 25 bp, Homo sapien
gccaaacacggagaagctattccct

SEQ ID NO: 2053218 - DNA, 25 bp, Homo sapien
tgaaggcaacaagcaattgacatgg

SEQ ID NO: 2053219 - DNA, 25 bp, Homo sapien
gcccagcaagtgaagggttttctaa

SEQ ID NO: 2053220 - DNA, 25 bp, Homo sapien
catggatcgaacatctacaccgggt

SEQ ID NO: 2053221 - DNA, 25 bp, Homo sapien
tacaccgggtagctttgtgtgcggc

SEQ ID NO: 2053222 - DNA, 25 bp, Homo sapien
agaattctggcataaagaggagttt

SEQ ID NO: 2053223 - DNA, 25 bp, Homo sapien
aattctggcataaagaggagtttgg

SEQ ID NO: 2053224 - DNA, 25 bp, Homo sapien
cagaagggcgctcccttttatagac

SEQ ID NO: 2053225 - DNA, 25 bp, Homo sapien
ctgccttcagaagggcgctcccttt

SEQ ID NO: 2053226 - DNA, 25 bp, Homo sapien
tttggaaatggccccttgaagaagc

SEQ ID NO: 2053227 - DNA, 25 bp, Homo sapien
gggccatagcgctcaggttttggaa

SEQ ID NO: 2053228 - DNA, 25 bp, Homo sapien
gctctgcactagatgtggggacatg

SEQ ID NO: 2053229 - DNA, 25 bp, Homo sapien
ctgcactagatgtggggacatgacc

SEQ ID NO: 2053230 - DNA, 25 bp, Homo sapien
tctgcactagatgtggggacatgac

SEQ ID NO: 2053231 - DNA, 25 bp, Homo sapien
gagctggctctgcactagatgtggg

SEQ ID NO: 2053232 - DNA, 25 bp, Homo sapien
gggctgtgaaggctggcatgggccc

SEQ ID NO: 2053233 - DNA, 25 bp, Homo sapien
ggctgtgaaggctggcatgggccct

SEQ ID NO: 2053234 - DNA, 25 bp, Homo sapien
gctgtgaaggctggcatgggccctg

SEQ ID NO: 2053235 - DNA, 25 bp, Homo sapien
ctgtgaaggctggcatgggccctgc

SEQ ID NO: 2053236 - DNA, 25 bp, Homo sapien
gcacaggaaacacgttccgatttgt

SEQ ID NO: 2053237 - DNA, 25 bp, Homo sapien
cccagcacaggaaacacgttccgat

SEQ ID NO: 2053238 - DNA, 25 bp, Homo sapien
caggaaacacgttccgatttgtctc

SEQ ID NO: 2053239 - DNA, 25 bp, Homo sapien
aacacgttccgatttgtctccacag

SEQ ID NO: 2053240 - DNA, 25 bp, Homo sapien
gagatgctgatgtcctggccaaaga

SEQ ID NO: 2053241 - DNA, 25 bp, Homo sapien
caatgtaaaagtggtatgggagcac

SEQ ID NO: 2053242 - DNA, 25 bp, Homo sapien
ggccaaagaggtcagccaaggccat

SEQ ID NO: 2053243 - DNA, 25 bp, Homo sapien
agaggtgctggtcaacagccacctc

SEQ ID NO: 2053244 - DNA, 25 bp, Homo sapien
gcaggcaggcccgaagagtttcact

SEQ ID NO: 2053245 - DNA, 25 bp, Homo sapien
gtttcactgggttctttggatctca

SEQ ID NO: 2053246 - DNA, 25 bp, Homo sapien
tgagggtatttctgccagcgaatct

SEQ ID NO: 2053247 - DNA, 25 bp, Homo sapien
aattaacaccatctccgttgcagcc

SEQ ID NO: 2053248 - DNA, 25 bp, Homo sapien
ccttctgagtgggatgggccccaga

SEQ ID NO: 2053249 - DNA, 25 bp, Homo sapien
ccccagaggcattgtgggtccatgg

SEQ ID NO: 2053250 - DNA, 25 bp, Homo sapien
aaagagcaagaagagccatccagga

SEQ ID NO: 2053251 - DNA, 25 bp, Homo sapien
taagcacatggtcaagaaagccctc

SEQ ID NO: 2053252 - DNA, 25 bp, Homo sapien
gaaataactagggttctatcatgag

SEQ ID NO: 2053253 - DNA, 25 bp, Homo sapien
ccctctgtgagcaaaagacatttca

SEQ ID NO: 2053254 - DNA, 25 bp, Homo sapien
caagagtgcaggtctgcttaaaggc

SEQ ID NO: 2053255 - DNA, 25 bp, Homo sapien
aatttgagcttcctccaagagtgca

SEQ ID NO: 2053256 - DNA, 25 bp, Homo sapien
aagccttggcaaacaggaatttgag

SEQ ID NO: 2053257 - DNA, 25 bp, Homo sapien
gaccctggcagcatcaattccaagt

SEQ ID NO: 2053258 - DNA, 25 bp, Homo sapien
gcagggtcacgaaggactcagatga

SEQ ID NO: 2053259 - DNA, 25 bp, Homo sapien
tcacgaaggactcagatgaccaaga

SEQ ID NO: 2053260 - DNA, 25 bp, Homo sapien
ttgagaagatgcaagtagaggtatc

SEQ ID NO: 2053261 - DNA, 25 bp, Homo sapien
caagtagaggtatcacctgcctaaa

SEQ ID NO: 2053262 - DNA, 25 bp, Homo sapien
ctgacactgagctgccctttaccgc

SEQ ID NO: 2053263 - DNA, 25 bp, Homo sapien
ccgtcctcgccctctgacagacact

SEQ ID NO: 2053264 - DNA, 25 bp, Homo sapien
ggcttcccgtcctcgccctctgaca

SEQ ID NO: 2053265 - DNA, 25 bp, Homo sapien
gccctctgacagacactgacactga

SEQ ID NO: 2053266 - DNA, 25 bp, Homo sapien
tcagcttgtgcccaaactgcccatc

SEQ ID NO: 2053267 - DNA, 25 bp, Homo sapien
ttgtgcccaaactgcccatcaccct

SEQ ID NO: 2053268 - DNA, 25 bp, Homo sapien
tttgcacccataattctgagaaagg

SEQ ID NO: 2053269 - DNA, 25 bp, Homo sapien
cctctttgcacccataattctgaga

SEQ ID NO: 2053270 - DNA, 25 bp, Homo sapien
tttccttttgacaatcagcccacct

SEQ ID NO: 2053271 - DNA, 25 bp, Homo sapien
ttttgacaatcagcccacctatcac

SEQ ID NO: 2053272 - DNA, 25 bp, Homo sapien
cacctatcaccgaggtgggggccat

SEQ ID NO: 2053273 - DNA, 25 bp, Homo sapien
tatcaccgaggtgggggccatgcac

SEQ ID NO: 2053274 - DNA, 25 bp, Homo sapien
caggtccccaagttgggcctgattc

SEQ ID NO: 2053275 - DNA, 25 bp, Homo sapien
gcaggtccccaagttgggcctgatt

SEQ ID NO: 2053276 - DNA, 25 bp, Homo sapien
ggtccccaagttgggcctgattcat

SEQ ID NO: 2053277 - DNA, 25 bp, Homo sapien
aggtccccaagttgggcctgattca

SEQ ID NO: 2053278 - DNA, 25 bp, Homo sapien
gtgctgctgctttaatgtaactctt

SEQ ID NO: 2053279 - DNA, 25 bp, Homo sapien
aactcttctgcagtggctttatggc

SEQ ID NO: 2053280 - DNA, 25 bp, Homo sapien
taaccacagctcgttgtttggcgca

SEQ ID NO: 2053281 - DNA, 25 bp, Homo sapien
tggccctgctgtccaacttaataac

SEQ ID NO: 2053282 - DNA, 25 bp, Homo sapien
tatctaaaaccatcacctacacagg

SEQ ID NO: 2053283 - DNA, 25 bp, Homo sapien
aaggcatgattgctgatgagctcca

SEQ ID NO: 2053284 - DNA, 25 bp, Homo sapien
caagggcacaatcataggaagcaga

SEQ ID NO: 2053285 - DNA, 25 bp, Homo sapien
taagttgtcgtagctaaaggcatga

SEQ ID NO: 2053286 - DNA, 25 bp, Homo sapien
gagaccagggcataacgctaactta

SEQ ID NO: 2053287 - DNA, 25 bp, Homo sapien
taaggcatacatcgtttcaaagctg

SEQ ID NO: 2053288 - DNA, 25 bp, Homo sapien
tctaagcattgcataggagttggcc

SEQ ID NO: 2053289 - DNA, 25 bp, Homo sapien
tgtttcactaaggaggtagagacca

SEQ ID NO: 2053290 - DNA, 25 bp, Homo sapien
gagctgtctggtggattcaggatca

SEQ ID NO: 2053291 - DNA, 25 bp, Homo sapien
tcacatagcagctcttgaagggatt

SEQ ID NO: 2053292 - DNA, 25 bp, Homo sapien
tcttgaagggattaggtcaaagtgg

SEQ ID NO: 2053293 - DNA, 25 bp, Homo sapien
tctggagctgtctggtggattcagg

SEQ ID NO: 2053294 - DNA, 25 bp, Homo sapien
tcttccatcctgagcaagtcaggtt

SEQ ID NO: 2053295 - DNA, 25 bp, Homo sapien
tgccttctgctagacttgatcccat

SEQ ID NO: 2053296 - DNA, 25 bp, Homo sapien
gctctctgattgtattcagtgctcc

SEQ ID NO: 2053297 - DNA, 25 bp, Homo sapien
taaaccaattcgaatcccagcctca

SEQ ID NO: 2053298 - DNA, 25 bp, Homo sapien
ttctctactgcagggtctagctcaa

SEQ ID NO: 2053299 - DNA, 25 bp, Homo sapien
tttctctactgcagggtctagctca

SEQ ID NO: 2053300 - DNA, 25 bp, Homo sapien
aaaacttctaaccctgcatcacatg

SEQ ID NO: 2053301 - DNA, 25 bp, Homo sapien
cagaaaacttctaaccctgcatcac

SEQ ID NO: 2053302 - DNA, 25 bp, Homo sapien
cttcctgctgaagtgaataccttaa

SEQ ID NO: 2053303 - DNA, 25 bp, Homo sapien
tgtaaaatccatttcggtgctcatc

SEQ ID NO: 2053304 - DNA, 25 bp, Homo sapien
catcatcgtgagtcttacctctaag

SEQ ID NO: 2053305 - DNA, 25 bp, Homo sapien
tacctctaagcacacatacttcctg

SEQ ID NO: 2053306 - DNA, 25 bp, Homo sapien
aaatcttgagcgcacagatgatcaa

SEQ ID NO: 2053307 - DNA, 25 bp, Homo sapien
gcttactcataactacttgtactct

SEQ ID NO: 2053308 - DNA, 25 bp, Homo sapien
tcttgccccaagagatgtttttatt

SEQ ID NO: 2053309 - DNA, 25 bp, Homo sapien
tattgcatttgtgcccagctaaatc

SEQ ID NO: 2053310 - DNA, 25 bp, Homo sapien
ttcccagtgggtttgggtattctga

SEQ ID NO: 2053311 - DNA, 25 bp, Homo sapien
agggatccagctctcggatgccctg

SEQ ID NO: 2053312 - DNA, 25 bp, Homo sapien
attctgagcagggatccagctctcg

SEQ ID NO: 2053313 - DNA, 25 bp, Homo sapien
agcagggatccagctctcggatgcc

SEQ ID NO: 2053314 - DNA, 25 bp, Homo sapien
gaaagcctgagttgtgcttccacag

SEQ ID NO: 2053315 - DNA, 25 bp, Homo sapien
taactgttctggcaagtgagctaca

SEQ ID NO: 2053316 - DNA, 25 bp, Homo sapien
tattgaggacatgtctgctgccacc

SEQ ID NO: 2053317 - DNA, 25 bp, Homo sapien
cagaataaagccctcatgtgccctt

SEQ ID NO: 2053318 - DNA, 25 bp, Homo sapien
atatctcctaaacactgagccttct

SEQ ID NO: 2053319 - DNA, 25 bp, Homo sapien
catatctcctaaacactgagccttc

SEQ ID NO: 2053320 - DNA, 25 bp, Homo sapien
atccatgtggtctaaaacccttaga

SEQ ID NO: 2053321 - DNA, 25 bp, Homo sapien
ccatcttgtgagtgtttctacttca

SEQ ID NO: 2053322 - DNA, 25 bp, Homo sapien
catccaaacaactctgtggactttc

SEQ ID NO: 2053323 - DNA, 25 bp, Homo sapien
acctctgggctccagaccctcacag

SEQ ID NO: 2053324 - DNA, 25 bp, Homo sapien
ttctccatccaaacaactctgtgga

SEQ ID NO: 2053325 - DNA, 25 bp, Homo sapien
caaaagagatattgaaggcgatgca

SEQ ID NO: 2053326 - DNA, 25 bp, Homo sapien
ggagcagcctttaaccacaaaagag

SEQ ID NO: 2053327 - DNA, 25 bp, Homo sapien
tcctcaggaagggtcactcgatgcc

SEQ ID NO: 2053328 - DNA, 25 bp, Homo sapien
caatcaatagagctagagcggacag

SEQ ID NO: 2053329 - DNA, 25 bp, Homo sapien
tcctggcaaacctgatgaagaatag

SEQ ID NO: 2053330 - DNA, 25 bp, Homo sapien
caaacctgatgaagaatagtgagat

SEQ ID NO: 2053331 - DNA, 25 bp, Homo sapien
gatgaagaatagtgagatgccgcag

SEQ ID NO: 2053332 - DNA, 25 bp, Homo sapien
ggcatcctggcaaacctgatgaaga

SEQ ID NO: 2053333 - DNA, 25 bp, Homo sapien
tattaagtgggctcaaggaaagcca

SEQ ID NO: 2053334 - DNA, 25 bp, Homo sapien
gagaaatctgctcatggagttggca

SEQ ID NO: 2053335 - DNA, 25 bp, Homo sapien
ggaaggatctggttagaagaaacaa

SEQ ID NO: 2053336 - DNA, 25 bp, Homo sapien
gtgagatagtctaccaaccccagaa

SEQ ID NO: 2053337 - DNA, 25 bp, Homo sapien
gcataggccagagggtgaatgtgga

SEQ ID NO: 2053338 - DNA, 25 bp, Homo sapien
ggtgaatgtggatataaccaaccat

SEQ ID NO: 2053339 - DNA, 25 bp, Homo sapien
gagagacaataaggcataggccaga

SEQ ID NO: 2053340 - DNA, 25 bp, Homo sapien
gggtgaatgtggatataaccaacca

SEQ ID NO: 2053341 - DNA, 25 bp, Homo sapien
gggtgatcagcagggaacctcttcc

SEQ ID NO: 2053342 - DNA, 25 bp, Homo sapien
tccaggatttaccactgagatcctg

SEQ ID NO: 2053343 - DNA, 25 bp, Homo sapien
tcttcctggaaagtgtatgaattct

SEQ ID NO: 2053344 - DNA, 25 bp, Homo sapien
tctagttttcctccacagaaccttg

SEQ ID NO: 2053345 - DNA, 25 bp, Homo sapien
tatacatcttggagcccttttgggc

SEQ ID NO: 2053346 - DNA, 25 bp, Homo sapien
tgtcgtctcatggtgggctgctgtc

SEQ ID NO: 2053347 - DNA, 25 bp, Homo sapien
ttacctccaggagaaatagcgaggg

SEQ ID NO: 2053348 - DNA, 25 bp, Homo sapien
gacatggtgctctttcaggcatcac

SEQ ID NO: 2053349 - DNA, 25 bp, Homo sapien
tagaggtccgccctggcggaggcat

SEQ ID NO: 2053350 - DNA, 25 bp, Homo sapien
catgttgtgaagaatattcttgagt

SEQ ID NO: 2053351 - DNA, 25 bp, Homo sapien
ccctggcggaggcatgttgtgaaga

SEQ ID NO: 2053352 - DNA, 25 bp, Homo sapien
gcatgttgtgaagaatattcttgag

SEQ ID NO: 2053353 - DNA, 25 bp, Homo sapien
cccagagtgattcagtgaaggtgca

SEQ ID NO: 2053354 - DNA, 25 bp, Homo sapien
acttcatccatgacgattttttgag

SEQ ID NO: 2053355 - DNA, 25 bp, Homo sapien
caaaggcccagagtgattcagtgaa

SEQ ID NO: 2053356 - DNA, 25 bp, Homo sapien
ccttccacttcatccatgacgattt

SEQ ID NO: 2053357 - DNA, 25 bp, Homo sapien
gattaacagtctcccaagaaaatat

SEQ ID NO: 2053358 - DNA, 25 bp, Homo sapien
cacctgcaggccaccgattaacagt

SEQ ID NO: 2053359 - DNA, 25 bp, Homo sapien
caccgattaacagtctcccaagaaa

SEQ ID NO: 2053360 - DNA, 25 bp, Homo sapien
tgcaggccaccgattaacagtctcc

SEQ ID NO: 2053361 - DNA, 25 bp, Homo sapien
atgatgatggtataattttcagtgt

SEQ ID NO: 2053362 - DNA, 25 bp, Homo sapien
cctctgcaatacttgtactgccttg

SEQ ID NO: 2053363 - DNA, 25 bp, Homo sapien
ccaggacacgggcttgcattcacct

SEQ ID NO: 2053364 - DNA, 25 bp, Homo sapien
gcattcacctctgcaatacttgtac

SEQ ID NO: 2053365 - DNA, 25 bp, Homo sapien
gatcctagaggccaagagtgcaaag

SEQ ID NO: 2053366 - DNA, 25 bp, Homo sapien
actggtacgtaaaattattgtcatc

SEQ ID NO: 2053367 - DNA, 25 bp, Homo sapien
caccatcatttgcaatggtcatgaa

SEQ ID NO: 2053368 - DNA, 25 bp, Homo sapien
tggtcatgaaatagtactggtacgt

SEQ ID NO: 2053369 - DNA, 25 bp, Homo sapien
aatgtgttgccaagtaatccattcc

SEQ ID NO: 2053370 - DNA, 25 bp, Homo sapien
aattgccagggttacctcactcaag

SEQ ID NO: 2053371 - DNA, 25 bp, Homo sapien
acaattgccagggttacctcactca

SEQ ID NO: 2053372 - DNA, 25 bp, Homo sapien
tgacaattgccagggttacctcact

SEQ ID NO: 2053373 - DNA, 25 bp, Homo sapien
caattgccagggttacctcactcaa

SEQ ID NO: 2053374 - DNA, 25 bp, Homo sapien
ctccagttttgattagtcctgggcc

SEQ ID NO: 2053375 - DNA, 25 bp, Homo sapien
ttttgattagtcctgggccaagttc

SEQ ID NO: 2053376 - DNA, 25 bp, Homo sapien
ttgattagtcctgggccaagttcca

SEQ ID NO: 2053377 - DNA, 25 bp, Homo sapien
cagttttgattagtcctgggccaag

SEQ ID NO: 2053378 - DNA, 25 bp, Homo sapien
gattgtcttgttgccatataattcc

SEQ ID NO: 2053379 - DNA, 25 bp, Homo sapien
ttaagagtggtttttggcaaagaga

SEQ ID NO: 2053380 - DNA, 25 bp, Homo sapien
aagaatttactagccactgctgttc

SEQ ID NO: 2053381 - DNA, 25 bp, Homo sapien
gcaaacagacgtgtgagactcactg

SEQ ID NO: 2053382 - DNA, 25 bp, Homo sapien
tctggaagactgatggcttgacaat

SEQ ID NO: 2053383 - DNA, 25 bp, Homo sapien
aagactgatggcttgacaatcttct

SEQ ID NO: 2053384 - DNA, 25 bp, Homo sapien
gatagacctagaactggactcctct

SEQ ID NO: 2053385 - DNA, 25 bp, Homo sapien
tgagttctcctccataatgatagac

SEQ ID NO: 2053386 - DNA, 25 bp, Homo sapien
gaatctggcatgaagaaatttgggt

SEQ ID NO: 2053387 - DNA, 25 bp, Homo sapien
tctcataatctgagtaatccagtct

SEQ ID NO: 2053388 - DNA, 25 bp, Homo sapien
attttgaatgctcatatccgtctcg

SEQ ID NO: 2053389 - DNA, 25 bp, Homo sapien
tcgaagctcttctcataatctgagt

SEQ ID NO: 2053390 - DNA, 25 bp, Homo sapien
tcaaccattcgacccatttctgttg

SEQ ID NO: 2053391 - DNA, 25 bp, Homo sapien
tcttcaaccattcgacccatttctg

SEQ ID NO: 2053392 - DNA, 25 bp, Homo sapien
tgacagtaatgttctagtgttgtgc

SEQ ID NO: 2053393 - DNA, 25 bp, Homo sapien
gtgtcaatgtgaccactctcttcaa

SEQ ID NO: 2053394 - DNA, 25 bp, Homo sapien
tatctagcatctgcctccactgagc

SEQ ID NO: 2053395 - DNA, 25 bp, Homo sapien
aattctttacggattccagctttct

SEQ ID NO: 2053396 - DNA, 25 bp, Homo sapien
gctttctctggattataccaggtca

SEQ ID NO: 2053397 - DNA, 25 bp, Homo sapien
tgggaattctttacggattccagct

SEQ ID NO: 2053398 - DNA, 25 bp, Homo sapien
gtaatcttgtcctattttgacctcc

SEQ ID NO: 2053399 - DNA, 25 bp, Homo sapien
tgacctcctttgatccatattgctt

SEQ ID NO: 2053400 - DNA, 25 bp, Homo sapien
tgccttctttaattgtactagctcg

SEQ ID NO: 2053401 - DNA, 25 bp, Homo sapien
gcagttttacttcctcctaatgcct

SEQ ID NO: 2053402 - DNA, 25 bp, Homo sapien
tcaagagcaagacgttgttgtgcac

SEQ ID NO: 2053403 - DNA, 25 bp, Homo sapien
aagagcaagacgttgttgtgcacca

SEQ ID NO: 2053404 - DNA, 25 bp, Homo sapien
caagagcaagacgttgttgtgcacc

SEQ ID NO: 2053405 - DNA, 25 bp, Homo sapien
ctattcaagagcaagacgttgttgt

SEQ ID NO: 2053406 - DNA, 25 bp, Homo sapien
tctggtgacatcctgtgtttggaat

SEQ ID NO: 2053407 - DNA, 25 bp, Homo sapien
tccctggaccagtaataccattgtg

SEQ ID NO: 2053408 - DNA, 25 bp, Homo sapien
cattgtgcaatccttcctcagtatc

SEQ ID NO: 2053409 - DNA, 25 bp, Homo sapien
ctggaatctttcactgttccctgga

SEQ ID NO: 2053410 - DNA, 25 bp, Homo sapien
agaagcaaatgaagtcatattcctt

SEQ ID NO: 2053411 - DNA, 25 bp, Homo sapien
gtcatattccttcttgtagttccaa

SEQ ID NO: 2053412 - DNA, 25 bp, Homo sapien
tttggagaaggggcatagaagcaaa

SEQ ID NO: 2053413 - DNA, 25 bp, Homo sapien
tagaagcaaatgaagtcatattcct

SEQ ID NO: 2053414 - DNA, 25 bp, Homo sapien
gcgtgatgggaaaatcataggattt

SEQ ID NO: 2053415 - DNA, 25 bp, Homo sapien
ggatcagaagatcaagctgtagatc

SEQ ID NO: 2053416 - DNA, 25 bp, Homo sapien
gctaacatgagtgataaggatcaga

SEQ ID NO: 2053417 - DNA, 25 bp, Homo sapien
tatttcacccctgatgattctgctg

SEQ ID NO: 2053418 - DNA, 25 bp, Homo sapien
gtgtcaacagtggataacctgcggg

SEQ ID NO: 2053419 - DNA, 25 bp, Homo sapien
tttatagactccagtcttcatcagc

SEQ ID NO: 2053420 - DNA, 25 bp, Homo sapien
ctgcgggatggttttctttatagac

SEQ ID NO: 2053421 - DNA, 25 bp, Homo sapien
ctttctcataggtatgtgtcaacag

SEQ ID NO: 2053422 - DNA, 25 bp, Homo sapien
aaatgtttcatatatcatttgttca

SEQ ID NO: 2053423 - DNA, 25 bp, Homo sapien
ttcacacagattgctcatctgaatg

SEQ ID NO: 2053424 - DNA, 25 bp, Homo sapien
acacagattgctcatctgaatggcc

SEQ ID NO: 2053425 - DNA, 25 bp, Homo sapien
aatgtttcatatatcatttgttcac

SEQ ID NO: 2053426 - DNA, 25 bp, Homo sapien
gatcttgctccatttgtgttcctga

SEQ ID NO: 2053427 - DNA, 25 bp, Homo sapien
ttgagaaaccttgtggagacctctg

SEQ ID NO: 2053428 - DNA, 25 bp, Homo sapien
gacctctgctgtcttgatgcctctc

SEQ ID NO: 2053429 - DNA, 25 bp, Homo sapien
tctatagatatccttctcatcactg

SEQ ID NO: 2053430 - DNA, 25 bp, Homo sapien
tattcaaggaagtacctgaatattc

SEQ ID NO: 2053431 - DNA, 25 bp, Homo sapien
aaggaagtacctgaatattcttggg

SEQ ID NO: 2053432 - DNA, 25 bp, Homo sapien
ttatattcaaggaagtacctgaata

SEQ ID NO: 2053433 - DNA, 25 bp, Homo sapien
ccttgaatataaggaaatatgtttt

SEQ ID NO: 2053434 - DNA, 25 bp, Homo sapien
gacatgcgtgctgaagcagtgaccc

SEQ ID NO: 2053435 - DNA, 25 bp, Homo sapien
tattcgatgatacatagatttctga

SEQ ID NO: 2053436 - DNA, 25 bp, Homo sapien
tgaaaagctgtcattgcccgggcct

SEQ ID NO: 2053437 - DNA, 25 bp, Homo sapien
ccagcagggcgtgcccctctgaaaa

SEQ ID NO: 2053438 - DNA, 25 bp, Homo sapien
gaaagagttagtccaaggagcaggt

SEQ ID NO: 2053439 - DNA, 25 bp, Homo sapien
gaaggaaagagttagtccaaggagc

SEQ ID NO: 2053440 - DNA, 25 bp, Homo sapien
ttgcaagggaaggaaagagttagtc

SEQ ID NO: 2053441 - DNA, 25 bp, Homo sapien
gcaagggaaggaaagagttagtcca

SEQ ID NO: 2053442 - DNA, 25 bp, Homo sapien
gagcaggtcctttattctcagagaa

SEQ ID NO: 2053443 - DNA, 25 bp, Homo sapien
tctctctccaataactgggtctgag

SEQ ID NO: 2053444 - DNA, 25 bp, Homo sapien
agaacttataatttgctctggagtc

SEQ ID NO: 2053445 - DNA, 25 bp, Homo sapien
tctggagtcagtgcacatatatgtt

SEQ ID NO: 2053446 - DNA, 25 bp, Homo sapien
cattgctgagtggattctatatggg

SEQ ID NO: 2053447 - DNA, 25 bp, Homo sapien
gatccaaaacctccactaataattg

SEQ ID NO: 2053448 - DNA, 25 bp, Homo sapien
tcatccttcgcccattgctgagtgg

SEQ ID NO: 2053449 - DNA, 25 bp, Homo sapien
gaagtcagtagatcagtgttaccta

SEQ ID NO: 2053450 - DNA, 25 bp, Homo sapien
cttcggctatggcagacatggtact

SEQ ID NO: 2053451 - DNA, 25 bp, Homo sapien
tatggcagacatggtactgtcagca

SEQ ID NO: 2053452 - DNA, 25 bp, Homo sapien
tcctctcttcggctatggcagacat

SEQ ID NO: 2053453 - DNA, 25 bp, Homo sapien
tctgggtccccacataaacagctgt

SEQ ID NO: 2053454 - DNA, 25 bp, Homo sapien
aattacacagtcagatttctctgca

SEQ ID NO: 2053455 - DNA, 25 bp, Homo sapien
gaattacacagtcagatttctctgc

SEQ ID NO: 2053456 - DNA, 25 bp, Homo sapien
accatggtaactgaacttctgggca

SEQ ID NO: 2053457 - DNA, 25 bp, Homo sapien
gtttctgtcatcagaaccagcagtc

SEQ ID NO: 2053458 - DNA, 25 bp, Homo sapien
tctagttccttttataccatggtaa

SEQ ID NO: 2053459 - DNA, 25 bp, Homo sapien
catggtaactgaacttctgggcatc

SEQ ID NO: 2053460 - DNA, 25 bp, Homo sapien
caagtgtgataaagaagctgagagg

SEQ ID NO: 2053461 - DNA, 25 bp, Homo sapien
tgaggaccggatgggcttgagtact

SEQ ID NO: 2053462 - DNA, 25 bp, Homo sapien
gggaagatgtagtttatgatgtgct

SEQ ID NO: 2053463 - DNA, 25 bp, Homo sapien
cctttatgacaaggtctggggaaga

SEQ ID NO: 2053464 - DNA, 25 bp, Homo sapien
ctttcataggccagctttgaaattg

SEQ ID NO: 2053465 - DNA, 25 bp, Homo sapien
tcataggccagctttgaaattgcag

SEQ ID NO: 2053466 - DNA, 25 bp, Homo sapien
tttcataggccagctttgaaattgc

SEQ ID NO: 2053467 - DNA, 25 bp, Homo sapien
ttcataggccagctttgaaattgca

SEQ ID NO: 2053468 - DNA, 25 bp, Homo sapien
attcagactctgtgcttcccattgg

SEQ ID NO: 2053469 - DNA, 25 bp, Homo sapien
tccacagttccatatggattaatat

SEQ ID NO: 2053470 - DNA, 25 bp, Homo sapien
ggtaatttgtgcttagatgttcttg

SEQ ID NO: 2053471 - DNA, 25 bp, Homo sapien
tcttgatgcttgatatgtgtactcg

SEQ ID NO: 2053472 - DNA, 25 bp, Homo sapien
gacacagctagcagatgtattcatt

SEQ ID NO: 2053473 - DNA, 25 bp, Homo sapien
agacacagctagcagatgtattcat

SEQ ID NO: 2053474 - DNA, 25 bp, Homo sapien
cagacacagctagcagatgtattca

SEQ ID NO: 2053475 - DNA, 25 bp, Homo sapien
cacagctagcagatgtattcatttc

SEQ ID NO: 2053476 - DNA, 25 bp, Homo sapien
tgaaaaccaagagggctgccctaga

SEQ ID NO: 2053477 - DNA, 25 bp, Homo sapien
tctttaagccccagatgcagtgaag

SEQ ID NO: 2053478 - DNA, 25 bp, Homo sapien
tgccctagagtatcccaggaatctt

SEQ ID NO: 2053479 - DNA, 25 bp, Homo sapien
tatggagtatctcctgtgtgcaagg

SEQ ID NO: 2053480 - DNA, 25 bp, Homo sapien
tccatcatgtggacagctttggcca

SEQ ID NO: 2053481 - DNA, 25 bp, Homo sapien
gtgcccactacatcactggctttaa

SEQ ID NO: 2053482 - DNA, 25 bp, Homo sapien
cctggagatgtggtcctatccatca

SEQ ID NO: 2053483 - DNA, 25 bp, Homo sapien
cactggctttaataaaaagttgctg

SEQ ID NO: 2053484 - DNA, 25 bp, Homo sapien
ggaatttcggagagaaaaacctgca

SEQ ID NO: 2053485 - DNA, 25 bp, Homo sapien
tagagcaaacgcatcctggaaacca

SEQ ID NO: 2053486 - DNA, 25 bp, Homo sapien
gcaaatacgcataaaataaggtccc

SEQ ID NO: 2053487 - DNA, 25 bp, Homo sapien
taacctatttggagtgcgtgtctga

SEQ ID NO: 2053488 - DNA, 25 bp, Homo sapien
caaaaatcctgttccgacgcctttg

SEQ ID NO: 2053489 - DNA, 25 bp, Homo sapien
agcaaaaatcctgttccgacgcctt

SEQ ID NO: 2053490 - DNA, 25 bp, Homo sapien
tccgacgcctttgcagcttgcagac

SEQ ID NO: 2053491 - DNA, 25 bp, Homo sapien
tttgcagcttgcagacattcagcat

SEQ ID NO: 2053492 - DNA, 25 bp, Homo sapien
tattgcgtataaacagctggattcc

SEQ ID NO: 2053493 - DNA, 25 bp, Homo sapien
tgaacttcataattgctgcatattg

SEQ ID NO: 2053494 - DNA, 25 bp, Homo sapien
gaatcattgacatgctaaagaccat

SEQ ID NO: 2053495 - DNA, 25 bp, Homo sapien
cccaagaaaatggccctgtatttga

SEQ ID NO: 2053496 - DNA, 25 bp, Homo sapien
agaaaccatgattagtggttgtctc

SEQ ID NO: 2053497 - DNA, 25 bp, Homo sapien
cagaaaccatgattagtggttgtct

SEQ ID NO: 2053498 - DNA, 25 bp, Homo sapien
cttctgtgggcttctaagatcccac

SEQ ID NO: 2053499 - DNA, 25 bp, Homo sapien
ggcttctaagatcccacactgtatt

SEQ ID NO: 2053500 - DNA, 25 bp, Homo sapien
caaatatctgccaaactggccttct

SEQ ID NO: 2053501 - DNA, 25 bp, Homo sapien
tgtgggcttctaagatcccacactg

SEQ ID NO: 2053502 - DNA, 25 bp, Homo sapien
tccgaacgcgtgatgctgggttttc

SEQ ID NO: 2053503 - DNA, 25 bp, Homo sapien
tgaggatgtctgagaagttagaccc

SEQ ID NO: 2053504 - DNA, 25 bp, Homo sapien
ttgcacaaaccagtccgaacgcgtg

SEQ ID NO: 2053505 - DNA, 25 bp, Homo sapien
caaaccagtccgaacgcgtgatgct

SEQ ID NO: 2053506 - DNA, 25 bp, Homo sapien
tccacagggcgatgggaaaacatca

SEQ ID NO: 2053507 - DNA, 25 bp, Homo sapien
ttccacagggcgatgggaaaacatc

SEQ ID NO: 2053508 - DNA, 25 bp, Homo sapien
atgcagtcacatcagcgactaaggt

SEQ ID NO: 2053509 - DNA, 25 bp, Homo sapien
tatccatgtcgtttattccaaagag

SEQ ID NO: 2053510 - DNA, 25 bp, Homo sapien
cacatcagcgactaaggttgttttt

SEQ ID NO: 2053511 - DNA, 25 bp, Homo sapien
ttaagctgaggttcaatgcagtcac

SEQ ID NO: 2053512 - DNA, 25 bp, Homo sapien
tctgcggtcggaaattttaatgaac

SEQ ID NO: 2053513 - DNA, 25 bp, Homo sapien
tgttcatcaaaggagtctcgggagt

SEQ ID NO: 2053514 - DNA, 25 bp, Homo sapien
tattttagctcaaattcatctgcgg

SEQ ID NO: 2053515 - DNA, 25 bp, Homo sapien
taaacacattacaagtcattagtgt

SEQ ID NO: 2053516 - DNA, 25 bp, Homo sapien
catgagagaaaggtaggtatacaac

SEQ ID NO: 2053517 - DNA, 25 bp, Homo sapien
aagagaaacttgctgaactgcagtc

SEQ ID NO: 2053518 - DNA, 25 bp, Homo sapien
ggtatacaacattctgtggtttcca

SEQ ID NO: 2053519 - DNA, 25 bp, Homo sapien
aacccatgactcttgttcttcatga

SEQ ID NO: 2053520 - DNA, 25 bp, Homo sapien
gttcatggccagattagaggcttta

SEQ ID NO: 2053521 - DNA, 25 bp, Homo sapien
tttgttcatggccagattagaggct

SEQ ID NO: 2053522 - DNA, 25 bp, Homo sapien
ttttgttcatggccagattagaggc

SEQ ID NO: 2053523 - DNA, 25 bp, Homo sapien
tgttcatggccagattagaggcttt

SEQ ID NO: 2053524 - DNA, 25 bp, Homo sapien
ctaatttagacctgtgactgtcggc

SEQ ID NO: 2053525 - DNA, 25 bp, Homo sapien
gacctgtgactgtcggctttttcac

SEQ ID NO: 2053526 - DNA, 25 bp, Homo sapien
tgtcggctttttcacagagccagtg

SEQ ID NO: 2053527 - DNA, 25 bp, Homo sapien
gtgactgtcggctttttcacagagc

SEQ ID NO: 2053528 - DNA, 25 bp, Homo sapien
gaaagccatggtcaccagaggcaca

SEQ ID NO: 2053529 - DNA, 25 bp, Homo sapien
agtttgtgcatgggacagaaagcca

SEQ ID NO: 2053530 - DNA, 25 bp, Homo sapien
gagtttgtgcatgggacagaaagcc

SEQ ID NO: 2053531 - DNA, 25 bp, Homo sapien
ttttcacttagctcttggtcagttt

SEQ ID NO: 2053532 - DNA, 25 bp, Homo sapien
cttcaaatctagctttctctctgga

SEQ ID NO: 2053533 - DNA, 25 bp, Homo sapien
tcaaatctagctttctctctggata

SEQ ID NO: 2053534 - DNA, 25 bp, Homo sapien
cacttagctcttggtcagtttcttc

SEQ ID NO: 2053535 - DNA, 25 bp, Homo sapien
tattcacatcggtgtctttccaaat

SEQ ID NO: 2053536 - DNA, 25 bp, Homo sapien
ctattcacatcggtgtctttccaaa

SEQ ID NO: 2053537 - DNA, 25 bp, Homo sapien
aatttcatctggtctaccggcatgg

SEQ ID NO: 2053538 - DNA, 25 bp, Homo sapien
ggctctagccagagcagcacgtgca

SEQ ID NO: 2053539 - DNA, 25 bp, Homo sapien
gcacgtgcacagaccaatcttcggt

SEQ ID NO: 2053540 - DNA, 25 bp, Homo sapien
ccaatcttcggtctagattgcacat

SEQ ID NO: 2053541 - DNA, 25 bp, Homo sapien
tgtcaattgacttaacggccaaaag

SEQ ID NO: 2053542 - DNA, 25 bp, Homo sapien
tctgatattatcatggttgctgagt

SEQ ID NO: 2053543 - DNA, 25 bp, Homo sapien
ggcgatttgttctggccagtaaaac

SEQ ID NO: 2053544 - DNA, 25 bp, Homo sapien
tctaggaacagaaatagaatcgtta

SEQ ID NO: 2053545 - DNA, 25 bp, Homo sapien
ccgaaaacacctgctttgcttcaca

SEQ ID NO: 2053546 - DNA, 25 bp, Homo sapien
cttctccgaaaacacctgctttgct

SEQ ID NO: 2053547 - DNA, 25 bp, Homo sapien
tgctttgcttcacaccaagtcccat

SEQ ID NO: 2053548 - DNA, 25 bp, Homo sapien
aacacctgctttgcttcacaccaag

SEQ ID NO: 2053549 - DNA, 25 bp, Homo sapien
gacccttctgttcacgacgtttgac

SEQ ID NO: 2053550 - DNA, 25 bp, Homo sapien
gacactggagctgatccaacccttt

SEQ ID NO: 2053551 - DNA, 25 bp, Homo sapien
tttccatagtagtcgctgtgagcac

SEQ ID NO: 2053552 - DNA, 25 bp, Homo sapien
cacatactgagctggtgccacacct

SEQ ID NO: 2053553 - DNA, 25 bp, Homo sapien
aaataaatgagtcttgggccacagg

SEQ ID NO: 2053554 - DNA, 25 bp, Homo sapien
tgaacaaagcaaggtagtgattctt

SEQ ID NO: 2053555 - DNA, 25 bp, Homo sapien
caactggataactgcagtaggtgga

SEQ ID NO: 2053556 - DNA, 25 bp, Homo sapien
ccttcttggattgctcatataggca

SEQ ID NO: 2053557 - DNA, 25 bp, Homo sapien
atttgttctgggcataggcagtagg

SEQ ID NO: 2053558 - DNA, 25 bp, Homo sapien
agtatagaatgcgtaagaggaaatg

SEQ ID NO: 2053559 - DNA, 25 bp, Homo sapien
gaagtatagaatgcgtaagaggaaa

SEQ ID NO: 2053560 - DNA, 25 bp, Homo sapien
atagaatgcgtaagaggaaatgctg

SEQ ID NO: 2053561 - DNA, 25 bp, Homo sapien
aagaagtatagaatgcgtaagagga

SEQ ID NO: 2053562 - DNA, 25 bp, Homo sapien
cagatgatttttccgaaacatttcg

SEQ ID NO: 2053563 - DNA, 25 bp, Homo sapien
gagggatccacatatcagatgattt

SEQ ID NO: 2053564 - DNA, 25 bp, Homo sapien
tcgatgatgtgttggtgtttctggt

SEQ ID NO: 2053565 - DNA, 25 bp, Homo sapien
cttgaagagggatccacatatcaga

SEQ ID NO: 2053566 - DNA, 25 bp, Homo sapien
caaggtctttttagatactctgggt

SEQ ID NO: 2053567 - DNA, 25 bp, Homo sapien
attatcccttgatttcgaccaaggt

SEQ ID NO: 2053568 - DNA, 25 bp, Homo sapien
tgatttcgaccaaggtctttttaga

SEQ ID NO: 2053569 - DNA, 25 bp, Homo sapien
tcgaccaaggtctttttagatactc

SEQ ID NO: 2053570 - DNA, 25 bp, Homo sapien
tctctgaagtagctgttaacatgtt

SEQ ID NO: 2053571 - DNA, 25 bp, Homo sapien
gatggtgtggtcacttaaatggcca

SEQ ID NO: 2053572 - DNA, 25 bp, Homo sapien
gtagaagtgtctccgcaactcaggg

SEQ ID NO: 2053573 - DNA, 25 bp, Homo sapien
caactcagggactaatggcttctct

SEQ ID NO: 2053574 - DNA, 25 bp, Homo sapien
gttagtgtatcagtattctgcttga

SEQ ID NO: 2053575 - DNA, 25 bp, Homo sapien
atatgttagtgtatcagtattctgc

SEQ ID NO: 2053576 - DNA, 25 bp, Homo sapien
gagtagatatgttagtgtatcagta

SEQ ID NO: 2053577 - DNA, 25 bp, Homo sapien
tgtatcagtattctgcttgagcttc

SEQ ID NO: 2053578 - DNA, 25 bp, Homo sapien
tcacactggtcatgttgggagctcc

SEQ ID NO: 2053579 - DNA, 25 bp, Homo sapien
gaaacgtagaagaagggatgccatc

SEQ ID NO: 2053580 - DNA, 25 bp, Homo sapien
gatgccatctcacagtggaggggaa

SEQ ID NO: 2053581 - DNA, 25 bp, Homo sapien
aattgccaaacagggtatgagggaa

SEQ ID NO: 2053582 - DNA, 25 bp, Homo sapien
agagtaaaggtgattcagcttcaca

SEQ ID NO: 2053583 - DNA, 25 bp, Homo sapien
ctaggagagtaaaggtgattcagct

SEQ ID NO: 2053584 - DNA, 25 bp, Homo sapien
gattcagcttcacaggggttctgac

SEQ ID NO: 2053585 - DNA, 25 bp, Homo sapien
aggagagtaaaggtgattcagcttc

SEQ ID NO: 2053586 - DNA, 25 bp, Homo sapien
tctccataaatgtggtgagttaata

SEQ ID NO: 2053587 - DNA, 25 bp, Homo sapien
atccagtgtaggtctccataaatgt

SEQ ID NO: 2053588 - DNA, 25 bp, Homo sapien
tccagtgtaggtctccataaatgtg

SEQ ID NO: 2053589 - DNA, 25 bp, Homo sapien
ccgggcagggctcaagtagactgaa

SEQ ID NO: 2053590 - DNA, 25 bp, Homo sapien
tagtggtaccatcaaacttgtaggt

SEQ ID NO: 2053591 - DNA, 25 bp, Homo sapien
tgtaatatgtgcaactagtggtacc

SEQ ID NO: 2053592 - DNA, 25 bp, Homo sapien
gggttagtcattcacaaagtcctct

SEQ ID NO: 2053593 - DNA, 25 bp, Homo sapien
cacagcttgaccacagaagttgagg

SEQ ID NO: 2053594 - DNA, 25 bp, Homo sapien
tagagctaatttcaacctgggtacc

SEQ ID NO: 2053595 - DNA, 25 bp, Homo sapien
tcagtgtaagggagattgacttcca

SEQ ID NO: 2053596 - DNA, 25 bp, Homo sapien
tatcacaccctggaattaaacacac

SEQ ID NO: 2053597 - DNA, 25 bp, Homo sapien
ctattggcagcccgtgaagtagggc

SEQ ID NO: 2053598 - DNA, 25 bp, Homo sapien
ggcagcccgtgaagtagggccccag

SEQ ID NO: 2053599 - DNA, 25 bp, Homo sapien
tattggcagcccgtgaagtagggcc

SEQ ID NO: 2053600 - DNA, 25 bp, Homo sapien
ttggcagcccgtgaagtagggcccc

SEQ ID NO: 2053601 - DNA, 25 bp, Homo sapien
aaactgttcagtggcaggcttctgt

SEQ ID NO: 2053602 - DNA, 25 bp, Homo sapien
ttgaactgtgatcattggtgtattt

SEQ ID NO: 2053603 - DNA, 25 bp, Homo sapien
aaaactgttcagtggcaggcttctg

SEQ ID NO: 2053604 - DNA, 25 bp, Homo sapien
ctgtttgaactgtgatcattggtgt

SEQ ID NO: 2053605 - DNA, 25 bp, Homo sapien
tgaaaatggaaagtgagactctgct

SEQ ID NO: 2053606 - DNA, 25 bp, Homo sapien
gatgcctccttgaacagcatctgtc

SEQ ID NO: 2053607 - DNA, 25 bp, Homo sapien
tgttcactgggaaggtgtgccacca

SEQ ID NO: 2053608 - DNA, 25 bp, Homo sapien
actgtggatgcccaggtgccaacga

SEQ ID NO: 2053609 - DNA, 25 bp, Homo sapien
gagtgaaaggactcgcagatgcctc

SEQ ID NO: 2053610 - DNA, 25 bp, Homo sapien
aattgtttcagagtaggcagttgct

SEQ ID NO: 2053611 - DNA, 25 bp, Homo sapien
gggggcatctcagggtgaatttcca

SEQ ID NO: 2053612 - DNA, 25 bp, Homo sapien
gctgtagagctacagtaagacagga

SEQ ID NO: 2053613 - DNA, 25 bp, Homo sapien
agagctacagtaagacaggagcagg

SEQ ID NO: 2053614 - DNA, 25 bp, Homo sapien
ccttgaaaatgtcgtgccctttctg

SEQ ID NO: 2053615 - DNA, 25 bp, Homo sapien
ttccttgaaaatgtcgtgccctttc

SEQ ID NO: 2053616 - DNA, 25 bp, Homo sapien
cttgaaaatgtcgtgccctttctgt

SEQ ID NO: 2053617 - DNA, 25 bp, Homo sapien
tccttgaaaatgtcgtgccctttct

SEQ ID NO: 2053618 - DNA, 25 bp, Homo sapien
tgattatacctttttcatacactag

SEQ ID NO: 2053619 - DNA, 25 bp, Homo sapien
ccattaatccaatgattataccttt

SEQ ID NO: 2053620 - DNA, 25 bp, Homo sapien
tttgcctaataggagggccttcatt

SEQ ID NO: 2053621 - DNA, 25 bp, Homo sapien
cttttgcctaataggagggccttca

SEQ ID NO: 2053622 - DNA, 25 bp, Homo sapien
ctttgatgtgttaaaatctaggaag

SEQ ID NO: 2053623 - DNA, 25 bp, Homo sapien
atgtgttaaaatctaggaaggccat

SEQ ID NO: 2053624 - DNA, 25 bp, Homo sapien
ttgatgtgttaaaatctaggaaggc

SEQ ID NO: 2053625 - DNA, 25 bp, Homo sapien
gatgtgttaaaatctaggaaggcca

SEQ ID NO: 2053626 - DNA, 25 bp, Homo sapien
catgtaacttgtgtttctcccagga

SEQ ID NO: 2053627 - DNA, 25 bp, Homo sapien
gatgatggttgattactagtgatgg

SEQ ID NO: 2053628 - DNA, 25 bp, Homo sapien
gcttctgattatgttcgcttcttgg

SEQ ID NO: 2053629 - DNA, 25 bp, Homo sapien
catgtgagaagagcaataccatgta

SEQ ID NO: 2053630 - DNA, 25 bp, Homo sapien
aaatagatgaaatcgggaattttgg

SEQ ID NO: 2053631 - DNA, 25 bp, Homo sapien
catcatttctaggttacagatgctt

SEQ ID NO: 2053632 - DNA, 25 bp, Homo sapien
cagctttgaacgttacccatcattt

SEQ ID NO: 2053633 - DNA, 25 bp, Homo sapien
aattacaatacaacttttcatagtc

SEQ ID NO: 2053634 - DNA, 25 bp, Homo sapien
atcagtagcagtgctgtctcacttt

SEQ ID NO: 2053635 - DNA, 25 bp, Homo sapien
tcagtagcagtgctgtctcactttt

SEQ ID NO: 2053636 - DNA, 25 bp, Homo sapien
gcatccaaggcaagttcctccttta

SEQ ID NO: 2053637 - DNA, 25 bp, Homo sapien
ggtgtgggtaaaaagctcagtaatg

SEQ ID NO: 2053638 - DNA, 25 bp, Homo sapien
gacttcattccagtatcagttttgg

SEQ ID NO: 2053639 - DNA, 25 bp, Homo sapien
gaaactctacagagtaagctgcccc

SEQ ID NO: 2053640 - DNA, 25 bp, Homo sapien
gaccctgaatcagtccatccaactg

SEQ ID NO: 2053641 - DNA, 25 bp, Homo sapien
gaacgtttctgaattattcatccac

SEQ ID NO: 2053642 - DNA, 25 bp, Homo sapien
catccaactggaacgtttctgaatt

SEQ ID NO: 2053643 - DNA, 25 bp, Homo sapien
gctgcagcatcatgagagaccctga

SEQ ID NO: 2053644 - DNA, 25 bp, Homo sapien
cagctggagatgtcactaagtcaca

SEQ ID NO: 2053645 - DNA, 25 bp, Homo sapien
tttcatctgcaggttgtttggccca

SEQ ID NO: 2053646 - DNA, 25 bp, Homo sapien
cttgaaggccgtgtgtgacttgtga

SEQ ID NO: 2053647 - DNA, 25 bp, Homo sapien
ctaagtcacagggagctctgtctga

SEQ ID NO: 2053648 - DNA, 25 bp, Homo sapien
tccgtcaaaatgctagtggtgtggt

SEQ ID NO: 2053649 - DNA, 25 bp, Homo sapien
tccaattaggataaagtttcgaatc

SEQ ID NO: 2053650 - DNA, 25 bp, Homo sapien
tggaggattcctttgctatcgcaag

SEQ ID NO: 2053651 - DNA, 25 bp, Homo sapien
gctctgaataatagcctttccttgg

SEQ ID NO: 2053652 - DNA, 25 bp, Homo sapien
gagggcaattccctacatctacatt

SEQ ID NO: 2053653 - DNA, 25 bp, Homo sapien
tccaggaatcagttgtaattctgtt

SEQ ID NO: 2053654 - DNA, 25 bp, Homo sapien
aagcctgttggcctcgttcttcaga

SEQ ID NO: 2053655 - DNA, 25 bp, Homo sapien
ccaggaatcagttgtaattctgtta

SEQ ID NO: 2053656 - DNA, 25 bp, Homo sapien
gttggcctcgttcttcagaacatcc

SEQ ID NO: 2053657 - DNA, 25 bp, Homo sapien
gcattgcacggaataagctgaaaac

SEQ ID NO: 2053658 - DNA, 25 bp, Homo sapien
aaaaagatgctccacggattcagtg

SEQ ID NO: 2053659 - DNA, 25 bp, Homo sapien
aaatgtaactacactggttccctgc

SEQ ID NO: 2053660 - DNA, 25 bp, Homo sapien
tactattggcagataaaggactgga

SEQ ID NO: 2053661 - DNA, 25 bp, Homo sapien
ttcctcttctggtgctgtcgctgtt

SEQ ID NO: 2053662 - DNA, 25 bp, Homo sapien
tcttcctcttctggtgctgtcgctg

SEQ ID NO: 2053663 - DNA, 25 bp, Homo sapien
cctcttctggtgctgtcgctgttgc

SEQ ID NO: 2053664 - DNA, 25 bp, Homo sapien
gtcgctgttgcttgtttttcctctt

SEQ ID NO: 2053665 - DNA, 25 bp, Homo sapien
cccacgtaattgagtcagacaaaaa

SEQ ID NO: 2053666 - DNA, 25 bp, Homo sapien
tggttctaccacctgcaaatgtagg

SEQ ID NO: 2053667 - DNA, 25 bp, Homo sapien
gaagataatctgatactctttgcag

SEQ ID NO: 2053668 - DNA, 25 bp, Homo sapien
ctccaaggcctgtgttatgtgttga

SEQ ID NO: 2053669 - DNA, 25 bp, Homo sapien
cttgtcgctgacaacgcctttggct

SEQ ID NO: 2053670 - DNA, 25 bp, Homo sapien
gctgctggcttgtcgctgacaacgc

SEQ ID NO: 2053671 - DNA, 25 bp, Homo sapien
tgccgctgctggcttgtcgctgaca

SEQ ID NO: 2053672 - DNA, 25 bp, Homo sapien
gctggcttgtcgctgacaacgcctt

SEQ ID NO: 2053673 - DNA, 25 bp, Homo sapien
tactgttagtgactcccacgtgcat

SEQ ID NO: 2053674 - DNA, 25 bp, Homo sapien
cccacgtgcatccatggtaatccat

SEQ ID NO: 2053675 - DNA, 25 bp, Homo sapien
ccttagtgtgccatttactgttagt

SEQ ID NO: 2053676 - DNA, 25 bp, Homo sapien
ctgaccttagtgtgccatttactgt

SEQ ID NO: 2053677 - DNA, 25 bp, Homo sapien
taactttcccacaacggcagaaatc

SEQ ID NO: 2053678 - DNA, 25 bp, Homo sapien
cacaacggcagaaatctcattatgt

SEQ ID NO: 2053679 - DNA, 25 bp, Homo sapien
tcccacaacggcagaaatctcatta

SEQ ID NO: 2053680 - DNA, 25 bp, Homo sapien
ttcccacaacggcagaaatctcatt

SEQ ID NO: 2053681 - DNA, 25 bp, Homo sapien
ggacaactgaactgagcttcaaagt

SEQ ID NO: 2053682 - DNA, 25 bp, Homo sapien
gaagaaagcgtcacagagttgagga

SEQ ID NO: 2053683 - DNA, 25 bp, Homo sapien
ttgaagaaagcgtcacagagttgag

SEQ ID NO: 2053684 - DNA, 25 bp, Homo sapien
cagagttgaggacaactgaactgag

SEQ ID NO: 2053685 - DNA, 25 bp, Homo sapien
gagtcgttttcatggagattgttcc

SEQ ID NO: 2053686 - DNA, 25 bp, Homo sapien
taaaggtgcaatgtacttaagaaag

SEQ ID NO: 2053687 - DNA, 25 bp, Homo sapien
ggctttgcggcaataatgtcagctt

SEQ ID NO: 2053688 - DNA, 25 bp, Homo sapien
cagtggtgaggaatgccttagtttc

SEQ ID NO: 2053689 - DNA, 25 bp, Homo sapien
tcaaatttcttgcatcctagatttt

SEQ ID NO: 2053690 - DNA, 25 bp, Homo sapien
agcaaatatgtcccttgatataccc

SEQ ID NO: 2053691 - DNA, 25 bp, Homo sapien
atagaattaataatcagggttctca

SEQ ID NO: 2053692 - DNA, 25 bp, Homo sapien
cttgcatcctagattttgaattaca

SEQ ID NO: 2053693 - DNA, 25 bp, Homo sapien
tcttccgggaatctgttgttcaaca

SEQ ID NO: 2053694 - DNA, 25 bp, Homo sapien
ggttagggctactgattactctctt

SEQ ID NO: 2053695 - DNA, 25 bp, Homo sapien
ctggagtttcttccgggaatctgtt

SEQ ID NO: 2053696 - DNA, 25 bp, Homo sapien
caacaaaatgtgtcctggtgacagg

SEQ ID NO: 2053697 - DNA, 25 bp, Homo sapien
ctattgattggaccacctaaagtct

SEQ ID NO: 2053698 - DNA, 25 bp, Homo sapien
gattggaccacctaaagtctgttcc

SEQ ID NO: 2053699 - DNA, 25 bp, Homo sapien
ttggaccacctaaagtctgttccat

SEQ ID NO: 2053700 - DNA, 25 bp, Homo sapien
ttgattggaccacctaaagtctgtt

SEQ ID NO: 2053701 - DNA, 25 bp, Homo sapien
tcttgaagatagcagtgtatttgtg

SEQ ID NO: 2053702 - DNA, 25 bp, Homo sapien
cgttgaacacaaacatgatgttgga

SEQ ID NO: 2053703 - DNA, 25 bp, Homo sapien
agtgtatttgtgagccaggtctggc

SEQ ID NO: 2053704 - DNA, 25 bp, Homo sapien
tcactcggccctcttttccgttgaa

SEQ ID NO: 2053705 - DNA, 25 bp, Homo sapien
caggcacatcctgtgattgaagttg

SEQ ID NO: 2053706 - DNA, 25 bp, Homo sapien
catcctgtgattgaagttggaagaa

SEQ ID NO: 2053707 - DNA, 25 bp, Homo sapien
gcacatcctgtgattgaagttggaa

SEQ ID NO: 2053708 - DNA, 25 bp, Homo sapien
tccaggcacatcctgtgattgaagt

SEQ ID NO: 2053709 - DNA, 25 bp, Homo sapien
tgaattttctgacgtctctgagctg

SEQ ID NO: 2053710 - DNA, 25 bp, Homo sapien
ttaagataattagtaccgaagagct

SEQ ID NO: 2053711 - DNA, 25 bp, Homo sapien
gaagagctgcactctcgccatgctg

SEQ ID NO: 2053712 - DNA, 25 bp, Homo sapien
cctggaaggtcaactcttaagataa

SEQ ID NO: 2053713 - DNA, 25 bp, Homo sapien
tccaagtgtccggttccttaggcca

SEQ ID NO: 2053714 - DNA, 25 bp, Homo sapien
caagtgtccggttccttaggccact

SEQ ID NO: 2053715 - DNA, 25 bp, Homo sapien
gtgtccggttccttaggccactgcg

SEQ ID NO: 2053716 - DNA, 25 bp, Homo sapien
tctccaagtgtccggttccttaggc

SEQ ID NO: 2053717 - DNA, 25 bp, Homo sapien
tgctcccaactgaaagtttgacagc

SEQ ID NO: 2053718 - DNA, 25 bp, Homo sapien
gaatccttcatgcttgtgcgtgcga

SEQ ID NO: 2053719 - DNA, 25 bp, Homo sapien
caatgagcaacagggctcttagcag

SEQ ID NO: 2053720 - DNA, 25 bp, Homo sapien
tagactagtgaagcctcagtcgagg

SEQ ID NO: 2053721 - DNA, 25 bp, Homo sapien
tgtgctcactttgcatagactctgg

SEQ ID NO: 2053722 - DNA, 25 bp, Homo sapien
tttgcatagactctggactccattc

SEQ ID NO: 2053723 - DNA, 25 bp, Homo sapien
ctctatgcggggctctctctgggtg

SEQ ID NO: 2053724 - DNA, 25 bp, Homo sapien
gctcactttgcatagactctggact

SEQ ID NO: 2053725 - DNA, 25 bp, Homo sapien
atctgcctgtcaagaggagcgggtg

SEQ ID NO: 2053726 - DNA, 25 bp, Homo sapien
aaagccgctgcatcttctgattctg

SEQ ID NO: 2053727 - DNA, 25 bp, Homo sapien
tggcctccctgaatactcctcagcg

SEQ ID NO: 2053728 - DNA, 25 bp, Homo sapien
ctcagcggcacccatcctttaataa

SEQ ID NO: 2053729 - DNA, 25 bp, Homo sapien
cacattgtactagattgtctccaag

SEQ ID NO: 2053730 - DNA, 25 bp, Homo sapien
ttgtgcctgggtagtgtcactggcc

SEQ ID NO: 2053731 - DNA, 25 bp, Homo sapien
ttgaaaggataagggcgactctctc

SEQ ID NO: 2053732 - DNA, 25 bp, Homo sapien
tgggcatgtcttcctgccctgaaga

SEQ ID NO: 2053733 - DNA, 25 bp, Homo sapien
tgggcaaagaaattacctagcaaaa

SEQ ID NO: 2053734 - DNA, 25 bp, Homo sapien
catgccggccatatttctacataag

SEQ ID NO: 2053735 - DNA, 25 bp, Homo sapien
tattgccatcaatttagctcaagca

SEQ ID NO: 2053736 - DNA, 25 bp, Homo sapien
gagccaacatgccggccatatttct

SEQ ID NO: 2053737 - DNA, 25 bp, Homo sapien
cctctgtgtcatatgcttggatgtg

SEQ ID NO: 2053738 - DNA, 25 bp, Homo sapien
tgatatcacgatatccacgtggcca

SEQ ID NO: 2053739 - DNA, 25 bp, Homo sapien
tcttaaatcctgctagtgactgctg

SEQ ID NO: 2053740 - DNA, 25 bp, Homo sapien
tggccatgcaattgtgaaacctctg

SEQ ID NO: 2053741 - DNA, 25 bp, Homo sapien
caagatgttcattctggctccagga

SEQ ID NO: 2053742 - DNA, 25 bp, Homo sapien
cccaagatgttcattctggctccag

SEQ ID NO: 2053743 - DNA, 25 bp, Homo sapien
ggtcccaagatgttcattctggctc

SEQ ID NO: 2053744 - DNA, 25 bp, Homo sapien
gtcccaagatgttcattctggctcc

SEQ ID NO: 2053745 - DNA, 25 bp, Homo sapien
gatggaagaagtcaatgggaatctg

SEQ ID NO: 2053746 - DNA, 25 bp, Homo sapien
tggaagaagtcaatgggaatctgga

SEQ ID NO: 2053747 - DNA, 25 bp, Homo sapien
atggaagaagtcaatgggaatctgg

SEQ ID NO: 2053748 - DNA, 25 bp, Homo sapien
ggatggaagaagtcaatgggaatct

SEQ ID NO: 2053749 - DNA, 25 bp, Homo sapien
cggagaagttctggtgaggtcacaa

SEQ ID NO: 2053750 - DNA, 25 bp, Homo sapien
gaatgaacatctgcatgcctgctgc

SEQ ID NO: 2053751 - DNA, 25 bp, Homo sapien
aactatgcagtgaagagttccagta

SEQ ID NO: 2053752 - DNA, 25 bp, Homo sapien
tgcctgctgcactgaggcaatcgta

SEQ ID NO: 2053753 - DNA, 25 bp, Homo sapien
taaagtcgtccagattttctctcca

SEQ ID NO: 2053754 - DNA, 25 bp, Homo sapien
tggtgaataggagctacgaaaaaca

SEQ ID NO: 2053755 - DNA, 25 bp, Homo sapien
ggagctacgaaaaacagtgatttaa

SEQ ID NO: 2053756 - DNA, 25 bp, Homo sapien
caaccaattccaaatggtgaatagg

SEQ ID NO: 2053757 - DNA, 25 bp, Homo sapien
ctgcaatcgatacaaccaattccaa

SEQ ID NO: 2053758 - DNA, 25 bp, Homo sapien
cagtctgatgctgaagtctatagca

SEQ ID NO: 2053759 - DNA, 25 bp, Homo sapien
tccttaatgtgctctgacaaagcct

SEQ ID NO: 2053760 - DNA, 25 bp, Homo sapien
tgtgagagtttagcaactgcagtgt

SEQ ID NO: 2053761 - DNA, 25 bp, Homo sapien
aagcctcttaatccggtcatagtcc

SEQ ID NO: 2053762 - DNA, 25 bp, Homo sapien
tagagtccctgagggtatttctcct

SEQ ID NO: 2053763 - DNA, 25 bp, Homo sapien
gagtccctgagggtatttctcctca

SEQ ID NO: 2053764 - DNA, 25 bp, Homo sapien
ctagagtccctgagggtatttctcc

SEQ ID NO: 2053765 - DNA, 25 bp, Homo sapien
agtccctgagggtatttctcctcac

SEQ ID NO: 2053766 - DNA, 25 bp, Homo sapien
cttgctcaagggaaccagggtttat

SEQ ID NO: 2053767 - DNA, 25 bp, Homo sapien
ttattgaatccctgtgctggccttt

SEQ ID NO: 2053768 - DNA, 25 bp, Homo sapien
tgtggagttcttccaaatttaatac

SEQ ID NO: 2053769 - DNA, 25 bp, Homo sapien
catgaacttcaactctgattgtcag

SEQ ID NO: 2053770 - DNA, 25 bp, Homo sapien
agttaaggtcaagccccaaagatga

SEQ ID NO: 2053771 - DNA, 25 bp, Homo sapien
gacttctaatccctgtgtcagagaa

SEQ ID NO: 2053772 - DNA, 25 bp, Homo sapien
cacagattatttcacggtccagaag

SEQ ID NO: 2053773 - DNA, 25 bp, Homo sapien
tgacaatagtttaaagcacaggccc

SEQ ID NO: 2053774 - DNA, 25 bp, Homo sapien
agttttggaagacattgtgaggttt

SEQ ID NO: 2053775 - DNA, 25 bp, Homo sapien
cagaagttttggaagacattgtgag

SEQ ID NO: 2053776 - DNA, 25 bp, Homo sapien
gagcagaagttttggaagacattgt

SEQ ID NO: 2053777 - DNA, 25 bp, Homo sapien
catacctgagcagaagttttggaag

SEQ ID NO: 2053778 - DNA, 25 bp, Homo sapien
catgttttcctgagattcctgatga

SEQ ID NO: 2053779 - DNA, 25 bp, Homo sapien
ggtgcccgacatgttttcctgagat

SEQ ID NO: 2053780 - DNA, 25 bp, Homo sapien
cttggtgcccgacatgttttcctga

SEQ ID NO: 2053781 - DNA, 25 bp, Homo sapien
cctgatgacttgacactttaatgtt

SEQ ID NO: 2053782 - DNA, 25 bp, Homo sapien
gctgctgtgctccaggcgatgctca

SEQ ID NO: 2053783 - DNA, 25 bp, Homo sapien
ttcattagctgctgtgctccaggcg

SEQ ID NO: 2053784 - DNA, 25 bp, Homo sapien
ttagctgctgtgctccaggcgatgc

SEQ ID NO: 2053785 - DNA, 25 bp, Homo sapien
gcttcattagctgctgtgctccagg

SEQ ID NO: 2053786 - DNA, 25 bp, Homo sapien
attgttctctctttccactttccat

SEQ ID NO: 2053787 - DNA, 25 bp, Homo sapien
tcatggagtcacatgtaacaatgat

SEQ ID NO: 2053788 - DNA, 25 bp, Homo sapien
tcttggcttctcgaagtgtaaaact

SEQ ID NO: 2053789 - DNA, 25 bp, Homo sapien
gagtcacatgtaacaatgattcctt

SEQ ID NO: 2053790 - DNA, 25 bp, Homo sapien
tgtaaaacttgcagttcctcctgcc

SEQ ID NO: 2053791 - DNA, 25 bp, Homo sapien
cacactctccttttccttgcagcct

SEQ ID NO: 2053792 - DNA, 25 bp, Homo sapien
cttccacactctccttttccttgca

SEQ ID NO: 2053793 - DNA, 25 bp, Homo sapien
actctccttttccttgcagcctttt

SEQ ID NO: 2053794 - DNA, 25 bp, Homo sapien
tccttttccttgcagccttttctcc

SEQ ID NO: 2053795 - DNA, 25 bp, Homo sapien
tctggctgaagatggatggcacctg

SEQ ID NO: 2053796 - DNA, 25 bp, Homo sapien
gtctttccaagtcacttctaactca

SEQ ID NO: 2053797 - DNA, 25 bp, Homo sapien
tcatattcaattactaaggtaacag

SEQ ID NO: 2053798 - DNA, 25 bp, Homo sapien
gtattcaacgctttgtctacacagc

SEQ ID NO: 2053799 - DNA, 25 bp, Homo sapien
ttacagcggatgattagaggattcc

SEQ ID NO: 2053800 - DNA, 25 bp, Homo sapien
tttctctctactaccgtcaaggata

SEQ ID NO: 2053801 - DNA, 25 bp, Homo sapien
agcggatgattagaggattcctttc

SEQ ID NO: 2053802 - DNA, 25 bp, Homo sapien
ctactaccgtcaaggataagcttac

SEQ ID NO: 2053803 - DNA, 25 bp, Homo sapien
aaagaagtcagcaactaccacctct

SEQ ID NO: 2053804 - DNA, 25 bp, Homo sapien
gcctggctcttctgaggttttcacc

SEQ ID NO: 2053805 - DNA, 25 bp, Homo sapien
tgcctggctcttctgaggttttcac

SEQ ID NO: 2053806 - DNA, 25 bp, Homo sapien
tttgcctggctcttctgaggttttc

SEQ ID NO: 2053807 - DNA, 25 bp, Homo sapien
ctggctcttctgaggttttcaccat

SEQ ID NO: 2053808 - DNA, 25 bp, Homo sapien
cttctaagataagcctgctgctact

SEQ ID NO: 2053809 - DNA, 25 bp, Homo sapien
tggcttctaagataagcctgctgct

SEQ ID NO: 2053810 - DNA, 25 bp, Homo sapien
gcttctaagataagcctgctgctac

SEQ ID NO: 2053811 - DNA, 25 bp, Homo sapien
tttggcttctaagataagcctgctg

SEQ ID NO: 2053812 - DNA, 25 bp, Homo sapien
tgatggatggtcttctactttgacc

SEQ ID NO: 2053813 - DNA, 25 bp, Homo sapien
tgaagaccagtccacccttatgatg

SEQ ID NO: 2053814 - DNA, 25 bp, Homo sapien
cttcacttggaataagttcttgata

SEQ ID NO: 2053815 - DNA, 25 bp, Homo sapien
tggacatggagtggtgctggaagaa

SEQ ID NO: 2053816 - DNA, 25 bp, Homo sapien
ttatatgtccaagcctcttttgact

SEQ ID NO: 2053817 - DNA, 25 bp, Homo sapien
tatatgtccaagcctcttttgactc

SEQ ID NO: 2053818 - DNA, 25 bp, Homo sapien
tccttcataacttggcagctagttc

SEQ ID NO: 2053819 - DNA, 25 bp, Homo sapien
gcttctttgggtcagaacttgcttc

SEQ ID NO: 2053820 - DNA, 25 bp, Homo sapien
cagagagtatttgacgacaagcttc

SEQ ID NO: 2053821 - DNA, 25 bp, Homo sapien
tattggcagtaaaataagaactcca

SEQ ID NO: 2053822 - DNA, 25 bp, Homo sapien
ctgctgcaacgctttcataagtaca

SEQ ID NO: 2053823 - DNA, 25 bp, Homo sapien
gcaacgctttcataagtacaaatga

SEQ ID NO: 2053824 - DNA, 25 bp, Homo sapien
gaaattgttttgatgaaggcagcaa

SEQ ID NO: 2053825 - DNA, 25 bp, Homo sapien
atgaaattgttttgatgaaggcagc

SEQ ID NO: 2053826 - DNA, 25 bp, Homo sapien
taaacctataatgtattccaaacat

SEQ ID NO: 2053827 - DNA, 25 bp, Homo sapien
gagcacctgctatacttcccagttt

SEQ ID NO: 2053828 - DNA, 25 bp, Homo sapien
tttacaggtctatattcttctttaa

SEQ ID NO: 2053829 - DNA, 25 bp, Homo sapien
ctggagcacctgctatacttcccag

SEQ ID NO: 2053830 - DNA, 25 bp, Homo sapien
ggcttcttaccagtagtgtgcaaca

SEQ ID NO: 2053831 - DNA, 25 bp, Homo sapien
gtgtgcaacaaaacatcccaagaga

SEQ ID NO: 2053832 - DNA, 25 bp, Homo sapien
tcccaagagataatgatgcctagca

SEQ ID NO: 2053833 - DNA, 25 bp, Homo sapien
cccagggttgcgatgtgagtgccaa

SEQ ID NO: 2053834 - DNA, 25 bp, Homo sapien
tgctcttgatcacatcaccttcatg

SEQ ID NO: 2053835 - DNA, 25 bp, Homo sapien
gctctgctcttgatcacatcacctt

SEQ ID NO: 2053836 - DNA, 25 bp, Homo sapien
agctctgctcttgatcacatcacct

SEQ ID NO: 2053837 - DNA, 25 bp, Homo sapien
tctgctcttgatcacatcaccttca

SEQ ID NO: 2053838 - DNA, 25 bp, Homo sapien
tttatcaaactcctcagtttatagg

SEQ ID NO: 2053839 - DNA, 25 bp, Homo sapien
gcaatcatcatcagtccatacaagg

SEQ ID NO: 2053840 - DNA, 25 bp, Homo sapien
tcatcatcagtccatacaaggccat

SEQ ID NO: 2053841 - DNA, 25 bp, Homo sapien
atgcaatcatcatcagtccatacaa

SEQ ID NO: 2053842 - DNA, 25 bp, Homo sapien
caagattgaacagagcatgaatgac

SEQ ID NO: 2053843 - DNA, 25 bp, Homo sapien
acttctgtgatcaggctcaagattg

SEQ ID NO: 2053844 - DNA, 25 bp, Homo sapien
aacagagcatgaatgacgagaggag

SEQ ID NO: 2053845 - DNA, 25 bp, Homo sapien
tgatcaggctcaagattgaacagag

SEQ ID NO: 2053846 - DNA, 25 bp, Homo sapien
tatatgcactagcttcagtgaaaat

SEQ ID NO: 2053847 - DNA, 25 bp, Homo sapien
tactttttcaagtatatgcactagc

SEQ ID NO: 2053848 - DNA, 25 bp, Homo sapien
tattgccattgcatagtgaagaagc

SEQ ID NO: 2053849 - DNA, 25 bp, Homo sapien
caaggaggtagtccacatagatgaa

SEQ ID NO: 2053850 - DNA, 25 bp, Homo sapien
tgcttctggctttaatgaccctcga

SEQ ID NO: 2053851 - DNA, 25 bp, Homo sapien
tgaaaggagaaattgaagtacaccc

SEQ ID NO: 2053852 - DNA, 25 bp, Homo sapien
gaaataaatagacgactgctcccac

SEQ ID NO: 2053853 - DNA, 25 bp, Homo sapien
caaagtaggtgtgataggacagtca

SEQ ID NO: 2053854 - DNA, 25 bp, Homo sapien
caataatatttctgcctgcccgctc

SEQ ID NO: 2053855 - DNA, 25 bp, Homo sapien
ctctgcgtgcaattgcattataagg

SEQ ID NO: 2053856 - DNA, 25 bp, Homo sapien
cattcttatttttggaaaaggctgg

SEQ ID NO: 2053857 - DNA, 25 bp, Homo sapien
taagggtctataagcccaatttgct

SEQ ID NO: 2053858 - DNA, 25 bp, Homo sapien
gcgtccaggcaagcgatggcagcct

SEQ ID NO: 2053859 - DNA, 25 bp, Homo sapien
taaggacagggacatctctctggga

SEQ ID NO: 2053860 - DNA, 25 bp, Homo sapien
tgctgataagcccaggcgtccaggc

SEQ ID NO: 2053861 - DNA, 25 bp, Homo sapien
gtgatttctcattaaggacagggac

SEQ ID NO: 2053862 - DNA, 25 bp, Homo sapien
ctccttgaaggtgctcagcttcagc

SEQ ID NO: 2053863 - DNA, 25 bp, Homo sapien
ttgaaggtgctcagcttcagcttcc

SEQ ID NO: 2053864 - DNA, 25 bp, Homo sapien
ccttgaaggtgctcagcttcagctt

SEQ ID NO: 2053865 - DNA, 25 bp, Homo sapien
gaaggtgctcagcttcagcttccat

SEQ ID NO: 2053866 - DNA, 25 bp, Homo sapien
taaacatgaatgtagctactgtgga

SEQ ID NO: 2053867 - DNA, 25 bp, Homo sapien
aatgggtctacaggtctacgtgccg

SEQ ID NO: 2053868 - DNA, 25 bp, Homo sapien
gtgccgctccactcagtaagtaacc

SEQ ID NO: 2053869 - DNA, 25 bp, Homo sapien
gagtagaataattaaggtttgccac

SEQ ID NO: 2053870 - DNA, 25 bp, Homo sapien
ggaaccgaagccttgccaaatacag

SEQ ID NO: 2053871 - DNA, 25 bp, Homo sapien
tgtccggtgccttccctataagtaa

SEQ ID NO: 2053872 - DNA, 25 bp, Homo sapien
ggtctccgctgaacttttgccaaga

SEQ ID NO: 2053873 - DNA, 25 bp, Homo sapien
cagcacgtgcttcagtctatggaaa

SEQ ID NO: 2053874 - DNA, 25 bp, Homo sapien
cagatgtcagtctcaacttttagtt

SEQ ID NO: 2053875 - DNA, 25 bp, Homo sapien
gttgtattacagaagcagtcttttc

SEQ ID NO: 2053876 - DNA, 25 bp, Homo sapien
gatgtcagtctcaacttttagttca

SEQ ID NO: 2053877 - DNA, 25 bp, Homo sapien
attgttgtattacagaagcagtctt

SEQ ID NO: 2053878 - DNA, 25 bp, Homo sapien
tagggtattgtttagtccaatattc

SEQ ID NO: 2053879 - DNA, 25 bp, Homo sapien
tccaacttgaaaataagcaaccgtc

SEQ ID NO: 2053880 - DNA, 25 bp, Homo sapien
taagcaaccgtctttatgaaaggta

SEQ ID NO: 2053881 - DNA, 25 bp, Homo sapien
caggttgagtatagggtattgttta

SEQ ID NO: 2053882 - DNA, 25 bp, Homo sapien
agcgccaaacaagagcagtcccact

SEQ ID NO: 2053883 - DNA, 25 bp, Homo sapien
tgtgctcccttaatgcgtagcacaa

SEQ ID NO: 2053884 - DNA, 25 bp, Homo sapien
atgcgtagcacaaacccatttactt

SEQ ID NO: 2053885 - DNA, 25 bp, Homo sapien
gccaaacaagagcagtcccactcta

SEQ ID NO: 2053886 - DNA, 25 bp, Homo sapien
ggtaaataatttacatagttttgca

SEQ ID NO: 2053887 - DNA, 25 bp, Homo sapien
gtaaataatttacatagttttgcat

SEQ ID NO: 2053888 - DNA, 25 bp, Homo sapien
tggtaaataatttacatagttttgc

SEQ ID NO: 2053889 - DNA, 25 bp, Homo sapien
aaaattgagcaaacagtgcaatttt

SEQ ID NO: 2053890 - DNA, 25 bp, Homo sapien
taaacaagtacagcgttccctgtag

SEQ ID NO: 2053891 - DNA, 25 bp, Homo sapien
aaaagaatgcagaaccaaatggcat

SEQ ID NO: 2053892 - DNA, 25 bp, Homo sapien
atttaaagagctttgcaatcctaga

SEQ ID NO: 2053893 - DNA, 25 bp, Homo sapien
catgctggtcaggtagtttggcaaa

SEQ ID NO: 2053894 - DNA, 25 bp, Homo sapien
caagcccagccttaacaagtggaaa

SEQ ID NO: 2053895 - DNA, 25 bp, Homo sapien
tgctgcatgcttcaataggaggctg

SEQ ID NO: 2053896 - DNA, 25 bp, Homo sapien
tcatggtgggtgcagcttgctacag

SEQ ID NO: 2053897 - DNA, 25 bp, Homo sapien
gcatggaggagtttaaggcaattcc

SEQ ID NO: 2053898 - DNA, 25 bp, Homo sapien
tctctgacagtggttgacttggctt

SEQ ID NO: 2053899 - DNA, 25 bp, Homo sapien
gatccaacaagatcacagcttgagg

SEQ ID NO: 2053900 - DNA, 25 bp, Homo sapien
aacacacaagattggccagctttca

SEQ ID NO: 2053901 - DNA, 25 bp, Homo sapien
gagggagaaggtctgtaacactctc

SEQ ID NO: 2053902 - DNA, 25 bp, Homo sapien
tacagttggtatgagatatcagtga

SEQ ID NO: 2053903 - DNA, 25 bp, Homo sapien
acagttggtatgagatatcagtgag

SEQ ID NO: 2053904 - DNA, 25 bp, Homo sapien
ccagctctcatacagttggtatgag

SEQ ID NO: 2053905 - DNA, 25 bp, Homo sapien
tcatacagttggtatgagatatcag

SEQ ID NO: 2053906 - DNA, 25 bp, Homo sapien
cgtataaccacttcacttggcagta

SEQ ID NO: 2053907 - DNA, 25 bp, Homo sapien
ggcagttaactgcaaccattcaggt

SEQ ID NO: 2053908 - DNA, 25 bp, Homo sapien
gttggtgtctgctgtgactaccaca

SEQ ID NO: 2053909 - DNA, 25 bp, Homo sapien
gaattttcctggcagttaactgcaa

SEQ ID NO: 2053910 - DNA, 25 bp, Homo sapien
ctgtaggtagcagatagttctacta

SEQ ID NO: 2053911 - DNA, 25 bp, Homo sapien
taggtagcagatagttctactagaa

SEQ ID NO: 2053912 - DNA, 25 bp, Homo sapien
tagttctactagaaatgagctctcc

SEQ ID NO: 2053913 - DNA, 25 bp, Homo sapien
gcagatagttctactagaaatgagc

SEQ ID NO: 2053914 - DNA, 25 bp, Homo sapien
agtgttggttaaatattgtggaaga

SEQ ID NO: 2053915 - DNA, 25 bp, Homo sapien
tgtggaagaattttcaggacatcat

SEQ ID NO: 2053916 - DNA, 25 bp, Homo sapien
tctggaaagtgttggttaaatattg

SEQ ID NO: 2053917 - DNA, 25 bp, Homo sapien
aagaattttcaggacatcatatggt

SEQ ID NO: 2053918 - DNA, 25 bp, Homo sapien
ccctcttgtcttccggaaactcatt

SEQ ID NO: 2053919 - DNA, 25 bp, Homo sapien
cttgtcttccggaaactcattttga

SEQ ID NO: 2053920 - DNA, 25 bp, Homo sapien
ctcttgtcttccggaaactcatttt

SEQ ID NO: 2053921 - DNA, 25 bp, Homo sapien
ttccctcttgtcttccggaaactca

SEQ ID NO: 2053922 - DNA, 25 bp, Homo sapien
gattccccgtgaagcaatatgcaaa

SEQ ID NO: 2053923 - DNA, 25 bp, Homo sapien
caaatatgacaaggtcgcatgtggg

SEQ ID NO: 2053924 - DNA, 25 bp, Homo sapien
tctctgtccttgcaaaagagcatgt

SEQ ID NO: 2053925 - DNA, 25 bp, Homo sapien
ggcattcaaaaaagccatgctgtca

SEQ ID NO: 2053926 - DNA, 25 bp, Homo sapien
tccgaggacggtttccaacctctgc

SEQ ID NO: 2053927 - DNA, 25 bp, Homo sapien
gatgcgcttcctttttccgaggacg

SEQ ID NO: 2053928 - DNA, 25 bp, Homo sapien
gattatctacatcctcgttattcat

SEQ ID NO: 2053929 - DNA, 25 bp, Homo sapien
acctctgctctgattatctacatcc

SEQ ID NO: 2053930 - DNA, 25 bp, Homo sapien
gaattagactactcagggaacacca

SEQ ID NO: 2053931 - DNA, 25 bp, Homo sapien
aatggctcgtttttcactgtagctg

SEQ ID NO: 2053932 - DNA, 25 bp, Homo sapien
gatatgccacagatcttgaaggtga

SEQ ID NO: 2053933 - DNA, 25 bp, Homo sapien
aagttacatttgcatcgccactcct

SEQ ID NO: 2053934 - DNA, 25 bp, Homo sapien
tgagttgaaagagacggtgtatcac

SEQ ID NO: 2053935 - DNA, 25 bp, Homo sapien
ggtctaaaaggacttgtgtgcttta

SEQ ID NO: 2053936 - DNA, 25 bp, Homo sapien
agacggtgtatcacttctgagcctg

SEQ ID NO: 2053937 - DNA, 25 bp, Homo sapien
tctaaaaggacttgtgtgctttagc

SEQ ID NO: 2053938 - DNA, 25 bp, Homo sapien
ttttgatacatcaagggtagtctga

SEQ ID NO: 2053939 - DNA, 25 bp, Homo sapien
gaacattcagccctctcccggtgat

SEQ ID NO: 2053940 - DNA, 25 bp, Homo sapien
ctcccggtgatattcatgtgcctga

SEQ ID NO: 2053941 - DNA, 25 bp, Homo sapien
tattttgatacatcaagggtagtct

SEQ ID NO: 2053942 - DNA, 25 bp, Homo sapien
tagagaaatgagtggtaagcaactt

SEQ ID NO: 2053943 - DNA, 25 bp, Homo sapien
ggatgacctatacctctagcaaacg

SEQ ID NO: 2053944 - DNA, 25 bp, Homo sapien
catagttagaggcacacgtgtcagg

SEQ ID NO: 2053945 - DNA, 25 bp, Homo sapien
tgacaactactaggcaaagtggagg

SEQ ID NO: 2053946 - DNA, 25 bp, Homo sapien
tcccaaatgaggtagcacaggctgt

SEQ ID NO: 2053947 - DNA, 25 bp, Homo sapien
tatactcatggccaaaccactcctg

SEQ ID NO: 2053948 - DNA, 25 bp, Homo sapien
cagccttgaggaagaccaatggtaa

SEQ ID NO: 2053949 - DNA, 25 bp, Homo sapien
caaggcaggcctacatgaaaatgtg

SEQ ID NO: 2053950 - DNA, 25 bp, Homo sapien
tgtgatgcctcagctgcaatgggtg

SEQ ID NO: 2053951 - DNA, 25 bp, Homo sapien
atcatcttgttaatcccattacagg

SEQ ID NO: 2053952 - DNA, 25 bp, Homo sapien
ctgctagtatgtggtcttggcaaaa

SEQ ID NO: 2053953 - DNA, 25 bp, Homo sapien
tgggtgagaactactcctcatttat

SEQ ID NO: 2053954 - DNA, 25 bp, Homo sapien
tatttttatgtacagaaaactcaac

SEQ ID NO: 2053955 - DNA, 25 bp, Homo sapien
tttttatgtacagaaaactcaacag

SEQ ID NO: 2053956 - DNA, 25 bp, Homo sapien
tttatgtacagaaaactcaacagtg

SEQ ID NO: 2053957 - DNA, 25 bp, Homo sapien
tatgtacagaaaactcaacagtgta

SEQ ID NO: 2053958 - DNA, 25 bp, Homo sapien
ccacgtcatgtgcaattaccaccag

SEQ ID NO: 2053959 - DNA, 25 bp, Homo sapien
gatccacgtcatgtgcaattaccac

SEQ ID NO: 2053960 - DNA, 25 bp, Homo sapien
tccacgtcatgtgcaattaccacca

SEQ ID NO: 2053961 - DNA, 25 bp, Homo sapien
gggatccacgtcatgtgcaattacc

SEQ ID NO: 2053962 - DNA, 25 bp, Homo sapien
tctcctcccgggccagcagtctctg

SEQ ID NO: 2053963 - DNA, 25 bp, Homo sapien
tcttctcctcccgggccagcagtct

SEQ ID NO: 2053964 - DNA, 25 bp, Homo sapien
tttcttctcctcccgggccagcagt

SEQ ID NO: 2053965 - DNA, 25 bp, Homo sapien
gctttcttctcctcccgggccagca

SEQ ID NO: 2053966 - DNA, 25 bp, Homo sapien
tcagtgcacccaatttaccttggtc

SEQ ID NO: 2053967 - DNA, 25 bp, Homo sapien
cactgtagcaaagttaaccattacc

SEQ ID NO: 2053968 - DNA, 25 bp, Homo sapien
cagctgcagaagtggtcaggttttt

SEQ ID NO: 2053969 - DNA, 25 bp, Homo sapien
agatgcacagctgcagaagtggtca

SEQ ID NO: 2053970 - DNA, 25 bp, Homo sapien
tccctaattgctagagatgcacact

SEQ ID NO: 2053971 - DNA, 25 bp, Homo sapien
tagcctaaatgtaaccgaagagtcc

SEQ ID NO: 2053972 - DNA, 25 bp, Homo sapien
ggctatgtgttaattctccaggaga

SEQ ID NO: 2053973 - DNA, 25 bp, Homo sapien
tatggcatgacttaaaaaacaggga

SEQ ID NO: 2053974 - DNA, 25 bp, Homo sapien
catcagggatgcagccaattcttca

SEQ ID NO: 2053975 - DNA, 25 bp, Homo sapien
gacctttggcctctccatcagggat

SEQ ID NO: 2053976 - DNA, 25 bp, Homo sapien
caattcttcattctgggttgactga

SEQ ID NO: 2053977 - DNA, 25 bp, Homo sapien
tctgggttgactgaactggccctgt

SEQ ID NO: 2053978 - DNA, 25 bp, Homo sapien
gatctttccttaagcgtacggatca

SEQ ID NO: 2053979 - DNA, 25 bp, Homo sapien
tcaataatatgagatctttccttaa

SEQ ID NO: 2053980 - DNA, 25 bp, Homo sapien
tacggatcatactgataatcttctg

SEQ ID NO: 2053981 - DNA, 25 bp, Homo sapien
tcccaatgccaggtctaggagccac

SEQ ID NO: 2053982 - DNA, 25 bp, Homo sapien
tctggctgcataggcaagactggag

SEQ ID NO: 2053983 - DNA, 25 bp, Homo sapien
gcctgcgttctgaagttttcatata

SEQ ID NO: 2053984 - DNA, 25 bp, Homo sapien
tttttcaatggcctgcgttctgaag

SEQ ID NO: 2053985 - DNA, 25 bp, Homo sapien
aattagatctggctgcataggcaag

SEQ ID NO: 2053986 - DNA, 25 bp, Homo sapien
cagaaataaggaacggcgtaagccg

SEQ ID NO: 2053987 - DNA, 25 bp, Homo sapien
cgtaagccggaggtgtagcaggctc

SEQ ID NO: 2053988 - DNA, 25 bp, Homo sapien
tgcggcagaaataaggaacggcgta

SEQ ID NO: 2053989 - DNA, 25 bp, Homo sapien
ctgtgcggcagaaataaggaacggc

SEQ ID NO: 2053990 - DNA, 25 bp, Homo sapien
tcaatggagtctgtgacattttctt

SEQ ID NO: 2053991 - DNA, 25 bp, Homo sapien
aaaccagatgtattggctcaacagc

SEQ ID NO: 2053992 - DNA, 25 bp, Homo sapien
cagaatatactaccaacctagaggt

SEQ ID NO: 2053993 - DNA, 25 bp, Homo sapien
gcatccctagaacacaagtctctgg

SEQ ID NO: 2053994 - DNA, 25 bp, Homo sapien
cctagaggtattccgtgtagtcaaa

SEQ ID NO: 2053995 - DNA, 25 bp, Homo sapien
gactctgattctccagtattagcct

SEQ ID NO: 2053996 - DNA, 25 bp, Homo sapien
gcctcctctattgggttacagtaaa

SEQ ID NO: 2053997 - DNA, 25 bp, Homo sapien
ccattgtgtgttccttagactctga

SEQ ID NO: 2053998 - DNA, 25 bp, Homo sapien
acagtaaagtttagtgccgagccac

SEQ ID NO: 2053999 - DNA, 25 bp, Homo sapien
taatcctaggttgggatcttccttc

SEQ ID NO: 2054000 - DNA, 25 bp, Homo sapien
cactaaatacgttcagttctctgcc

SEQ ID NO: 2054001 - DNA, 25 bp, Homo sapien
acactgtggcatcttagcagtctca

SEQ ID NO: 2054002 - DNA, 25 bp, Homo sapien
tgaaaagcaagcacctacagtaccc

SEQ ID NO: 2054003 - DNA, 25 bp, Homo sapien
ctttgaaaggagaccgcatatactt

SEQ ID NO: 2054004 - DNA, 25 bp, Homo sapien
gttccagattgcagaagccctgtag

SEQ ID NO: 2054005 - DNA, 25 bp, Homo sapien
gcttcctgtgacagtgatccacagt

SEQ ID NO: 2054006 - DNA, 25 bp, Homo sapien
tacttttcgaggcagaagtttgcct

SEQ ID NO: 2054007 - DNA, 25 bp, Homo sapien
tttaacatgttttacaaggcaggcc

SEQ ID NO: 2054008 - DNA, 25 bp, Homo sapien
cgggcatcaatttagaggaagtctc

SEQ ID NO: 2054009 - DNA, 25 bp, Homo sapien
tggatcttcccttcggtgtcgggca

SEQ ID NO: 2054010 - DNA, 25 bp, Homo sapien
gggaggctacccagaaattgcaata

SEQ ID NO: 2054011 - DNA, 25 bp, Homo sapien
cattatagtttaattgtcaaccaag

SEQ ID NO: 2054012 - DNA, 25 bp, Homo sapien
caaactctgcctactgaatctctat

SEQ ID NO: 2054013 - DNA, 25 bp, Homo sapien
caaccaagggtatggatagattttt

SEQ ID NO: 2054014 - DNA, 25 bp, Homo sapien
tgaaggagtccactactaactttct

SEQ ID NO: 2054015 - DNA, 25 bp, Homo sapien
tacacagtagatgggagtttgacac

SEQ ID NO: 2054016 - DNA, 25 bp, Homo sapien
gtttacacagtagatgggagtttga

SEQ ID NO: 2054017 - DNA, 25 bp, Homo sapien
cttgttgttctctggccgtaaagac

SEQ ID NO: 2054018 - DNA, 25 bp, Homo sapien
tctctggccgtaaagacaggaattt

SEQ ID NO: 2054019 - DNA, 25 bp, Homo sapien
ttctgcttctccgaggtgagtaaca

SEQ ID NO: 2054020 - DNA, 25 bp, Homo sapien
gtaagcaagcaacaatagtaaatcg

SEQ ID NO: 2054021 - DNA, 25 bp, Homo sapien
ccgaggtgagtaacatggactgatt

SEQ ID NO: 2054022 - DNA, 25 bp, Homo sapien
tagaaattgataagagtaagtaagc

SEQ ID NO: 2054023 - DNA, 25 bp, Homo sapien
aacgctaaagggctggataaaagca

SEQ ID NO: 2054024 - DNA, 25 bp, Homo sapien
tgtgaccaacgctaaagggctggat

SEQ ID NO: 2054025 - DNA, 25 bp, Homo sapien
caacgctaaagggctggataaaagc

SEQ ID NO: 2054026 - DNA, 25 bp, Homo sapien
gaccaacgctaaagggctggataaa

SEQ ID NO: 2054027 - DNA, 25 bp, Homo sapien
tggtcatgggggtcaaggaaacacc

SEQ ID NO: 2054028 - DNA, 25 bp, Homo sapien
gtgccacggaagccaatatgggaga

SEQ ID NO: 2054029 - DNA, 25 bp, Homo sapien
agtgaacagtgccactctccatgtt

SEQ ID NO: 2054030 - DNA, 25 bp, Homo sapien
ggagagtacattgggatagtgaaca

SEQ ID NO: 2054031 - DNA, 25 bp, Homo sapien
caacccatagttgagataatgacca

SEQ ID NO: 2054032 - DNA, 25 bp, Homo sapien
aatgaccatgactgagattttgggc

SEQ ID NO: 2054033 - DNA, 25 bp, Homo sapien
tctgcatagactcaactctgaaagg

SEQ ID NO: 2054034 - DNA, 25 bp, Homo sapien
aatgccactgtagactgagatgctg

SEQ ID NO: 2054035 - DNA, 25 bp, Homo sapien
gaaggccatcctacaaaatggagct

SEQ ID NO: 2054036 - DNA, 25 bp, Homo sapien
gagattagcaacgatttgttgggac

SEQ ID NO: 2054037 - DNA, 25 bp, Homo sapien
tttgttgggacttggaaggccatcc

SEQ ID NO: 2054038 - DNA, 25 bp, Homo sapien
ctgagattagcaacgatttgttggg

SEQ ID NO: 2054039 - DNA, 25 bp, Homo sapien
ttatgatgatgggctcagcaagcct

SEQ ID NO: 2054040 - DNA, 25 bp, Homo sapien
taatctgcactactgggagctgagt

SEQ ID NO: 2054041 - DNA, 25 bp, Homo sapien
cacttccttcttatagacctttaga

SEQ ID NO: 2054042 - DNA, 25 bp, Homo sapien
aaaccccagggactcgctgccttca

SEQ ID NO: 2054043 - DNA, 25 bp, Homo sapien
tcttatagacctttagaatttctcc

SEQ ID NO: 2054044 - DNA, 25 bp, Homo sapien
ggataataggacttggtaatgaccc

SEQ ID NO: 2054045 - DNA, 25 bp, Homo sapien
aacaaattcatatcgcagttcctga

SEQ ID NO: 2054046 - DNA, 25 bp, Homo sapien
taaaatgggctatttccatgcttgc

SEQ ID NO: 2054047 - DNA, 25 bp, Homo sapien
gctgtgcaaatcgatttgttggctg

SEQ ID NO: 2054048 - DNA, 25 bp, Homo sapien
gacccaccaggatctaagaaatcgg

SEQ ID NO: 2054049 - DNA, 25 bp, Homo sapien
cccaccaggatctaagaaatcggca

SEQ ID NO: 2054050 - DNA, 25 bp, Homo sapien
tgacccaccaggatctaagaaatcg

SEQ ID NO: 2054051 - DNA, 25 bp, Homo sapien
cgtgacccaccaggatctaagaaat

SEQ ID NO: 2054052 - DNA, 25 bp, Homo sapien
tccctcagggacttaatggttcttg

SEQ ID NO: 2054053 - DNA, 25 bp, Homo sapien
tattgtggcctagtccagttctcaa

SEQ ID NO: 2054054 - DNA, 25 bp, Homo sapien
tattctaggtagctcaaacaggtcc

SEQ ID NO: 2054055 - DNA, 25 bp, Homo sapien
gggccaaaaccctcagctagttaga

SEQ ID NO: 2054056 - DNA, 25 bp, Homo sapien
tcacctagacacacagttagcaggc

SEQ ID NO: 2054057 - DNA, 25 bp, Homo sapien
cctccaagaggtttgggattatgta

SEQ ID NO: 2054058 - DNA, 25 bp, Homo sapien
ggcttgctagaagtctagacatcca

SEQ ID NO: 2054059 - DNA, 25 bp, Homo sapien
gttagcaggctatctaaagtcaaga

SEQ ID NO: 2054060 - DNA, 25 bp, Homo sapien
aacacgtcttctgtaactcctgtca

SEQ ID NO: 2054061 - DNA, 25 bp, Homo sapien
catgtaacacgtcttctgtaactcc

SEQ ID NO: 2054062 - DNA, 25 bp, Homo sapien
atccaagaaacccatgtaacacgtc

SEQ ID NO: 2054063 - DNA, 25 bp, Homo sapien
gaaacccatgtaacacgtcttctgt

SEQ ID NO: 2054064 - DNA, 25 bp, Homo sapien
cttgcatctcaagattcactgctgg

SEQ ID NO: 2054065 - DNA, 25 bp, Homo sapien
tgcatctcaagattcactgctgggc

SEQ ID NO: 2054066 - DNA, 25 bp, Homo sapien
ttcttgcatctcaagattcactgct

SEQ ID NO: 2054067 - DNA, 25 bp, Homo sapien
ttgcatctcaagattcactgctggg

SEQ ID NO: 2054068 - DNA, 25 bp, Homo sapien
tagaaccaatcattggagataggag

SEQ ID NO: 2054069 - DNA, 25 bp, Homo sapien
aatgctgtgcatttcactggtgtga

SEQ ID NO: 2054070 - DNA, 25 bp, Homo sapien
cactggtgtgattgggaactttaac

SEQ ID NO: 2054071 - DNA, 25 bp, Homo sapien
gataggagattgactgaccccaaat

SEQ ID NO: 2054072 - DNA, 25 bp, Homo sapien
tttcaaccatctcactttcaaaaca

SEQ ID NO: 2054073 - DNA, 25 bp, Homo sapien
ttcaaccatctcactttcaaaacag

SEQ ID NO: 2054074 - DNA, 25 bp, Homo sapien
ttaattcaggtgttcaccactttcc

SEQ ID NO: 2054075 - DNA, 25 bp, Homo sapien
ttcaggtgttcaccactttcctccc

SEQ ID NO: 2054076 - DNA, 25 bp, Homo sapien
aattcaggtgttcaccactttcctc

SEQ ID NO: 2054077 - DNA, 25 bp, Homo sapien
taattcaggtgttcaccactttcct

SEQ ID NO: 2054078 - DNA, 25 bp, Homo sapien
gttgataacaggtttcatgcatttt

SEQ ID NO: 2054079 - DNA, 25 bp, Homo sapien
ccttcgatggtctgttgataacagg

SEQ ID NO: 2054080 - DNA, 25 bp, Homo sapien
gatggtctgttgataacaggtttca

SEQ ID NO: 2054081 - DNA, 25 bp, Homo sapien
tttcccttcgatggtctgttgataa

SEQ ID NO: 2054082 - DNA, 25 bp, Homo sapien
gacaggctggaagttaacttaatca

SEQ ID NO: 2054083 - DNA, 25 bp, Homo sapien
cacaaaagggatcaacacagactta

SEQ ID NO: 2054084 - DNA, 25 bp, Homo sapien
tcctggagggtggtaggcctaggga

SEQ ID NO: 2054085 - DNA, 25 bp, Homo sapien
ccttcccttatacctcatgctatgt

SEQ ID NO: 2054086 - DNA, 25 bp, Homo sapien
tagaagtccagacttgtgactaatg

SEQ ID NO: 2054087 - DNA, 25 bp, Homo sapien
actagtcagatattctagaagtcca

SEQ ID NO: 2054088 - DNA, 25 bp, Homo sapien
taacttgaaactagtcagatattct

SEQ ID NO: 2054089 - DNA, 25 bp, Homo sapien
taatgtctgaaagggaggcagtctt

SEQ ID NO: 2054090 - DNA, 25 bp, Homo sapien
acttcacaaagctccaaataaatgg

SEQ ID NO: 2054091 - DNA, 25 bp, Homo sapien
caatgagaggtcagctgtactgggc

SEQ ID NO: 2054092 - DNA, 25 bp, Homo sapien
acagctcaaataacaccagtagtga

SEQ ID NO: 2054093 - DNA, 25 bp, Homo sapien
tgtactgggctagtgacagctgcaa

SEQ ID NO: 2054094 - DNA, 25 bp, Homo sapien
gctgctcagctaagtgtttctgggc

SEQ ID NO: 2054095 - DNA, 25 bp, Homo sapien
cacagaaacgcacaaaataagaagg

SEQ ID NO: 2054096 - DNA, 25 bp, Homo sapien
taagaaggtactttcagaagaagcg

SEQ ID NO: 2054097 - DNA, 25 bp, Homo sapien
ggtgttggctgtcatacggacctaa

SEQ ID NO: 2054098 - DNA, 25 bp, Homo sapien
caggtggaagaatcagcatattgcc

SEQ ID NO: 2054099 - DNA, 25 bp, Homo sapien
ggtggaagaatcagcatattgcctt

SEQ ID NO: 2054100 - DNA, 25 bp, Homo sapien
aggtggaagaatcagcatattgcct

SEQ ID NO: 2054101 - DNA, 25 bp, Homo sapien
tcaggtggaagaatcagcatattgc

SEQ ID NO: 2054102 - DNA, 25 bp, Homo sapien
gcagcccaggtcatcaactgtgcct

SEQ ID NO: 2054103 - DNA, 25 bp, Homo sapien
tcactttataaagctgtgacttcac

SEQ ID NO: 2054104 - DNA, 25 bp, Homo sapien
caactgtgcctttcgtgttgagcag

SEQ ID NO: 2054105 - DNA, 25 bp, Homo sapien
ctccctgctgagaatctaaaatgac

SEQ ID NO: 2054106 - DNA, 25 bp, Homo sapien
ctcttagtgctagcaatagggaaaa

SEQ ID NO: 2054107 - DNA, 25 bp, Homo sapien
ttagtgctagcaatagggaaaaact

SEQ ID NO: 2054108 - DNA, 25 bp, Homo sapien
tgtctcttagtgctagcaataggga

SEQ ID NO: 2054109 - DNA, 25 bp, Homo sapien
gctgtctcttagtgctagcaatagg

SEQ ID NO: 2054110 - DNA, 25 bp, Homo sapien
ttccatatcctaatgttggaagaag

SEQ ID NO: 2054111 - DNA, 25 bp, Homo sapien
tccatatcctaatgttggaagaagg

SEQ ID NO: 2054112 - DNA, 25 bp, Homo sapien
tatcctaatgttggaagaaggctga

SEQ ID NO: 2054113 - DNA, 25 bp, Homo sapien
atatcctaatgttggaagaaggctg

SEQ ID NO: 2054114 - DNA, 25 bp, Homo sapien
tcattctacgactacaaacaggaca

SEQ ID NO: 2054115 - DNA, 25 bp, Homo sapien
caccttccttatcactgcaagatga

SEQ ID NO: 2054116 - DNA, 25 bp, Homo sapien
ttccttatcactgcaagatgaatta

SEQ ID NO: 2054117 - DNA, 25 bp, Homo sapien
ggccaccttccttatcactgcaaga

SEQ ID NO: 2054118 - DNA, 25 bp, Homo sapien
aaggccaccttccttatcactgcaa

SEQ ID NO: 2054119 - DNA, 25 bp, Homo sapien
ctgtaaaggtgctttcattccagta

SEQ ID NO: 2054120 - DNA, 25 bp, Homo sapien
cttaattcattctacacatgtgatg

SEQ ID NO: 2054121 - DNA, 25 bp, Homo sapien
gaatacaacttgcattgcctcttct

SEQ ID NO: 2054122 - DNA, 25 bp, Homo sapien
cttctttgcaactggcataaatctt

SEQ ID NO: 2054123 - DNA, 25 bp, Homo sapien
catagcataaacagaggcttccagc

SEQ ID NO: 2054124 - DNA, 25 bp, Homo sapien
tctccttcacatagcataaacagag

SEQ ID NO: 2054125 - DNA, 25 bp, Homo sapien
ttcacatagcataaacagaggcttc

SEQ ID NO: 2054126 - DNA, 25 bp, Homo sapien
agcataaacagaggcttccagctgg

SEQ ID NO: 2054127 - DNA, 25 bp, Homo sapien
ccatggtaatcaggccctttttgct

SEQ ID NO: 2054128 - DNA, 25 bp, Homo sapien
taatcaggccctttttgctcatcat

SEQ ID NO: 2054129 - DNA, 25 bp, Homo sapien
cttgctgagacgtgtctgctcggcc

SEQ ID NO: 2054130 - DNA, 25 bp, Homo sapien
tctgctcggccatggtaatcaggcc

SEQ ID NO: 2054131 - DNA, 25 bp, Homo sapien
attgagtattgaattgcttgactgg

SEQ ID NO: 2054132 - DNA, 25 bp, Homo sapien
ttgagtattgaattgcttgactgga

SEQ ID NO: 2054133 - DNA, 25 bp, Homo sapien
gagtattgaattgcttgactggagc

SEQ ID NO: 2054134 - DNA, 25 bp, Homo sapien
tgagtattgaattgcttgactggag

SEQ ID NO: 2054135 - DNA, 25 bp, Homo sapien
ttcgtccccgggtgaatttcagcca

SEQ ID NO: 2054136 - DNA, 25 bp, Homo sapien
tgcaacattcgtccccgggtgaatt

SEQ ID NO: 2054137 - DNA, 25 bp, Homo sapien
ctgcaacattcgtccccgggtgaat

SEQ ID NO: 2054138 - DNA, 25 bp, Homo sapien
acattcgtccccgggtgaatttcag

SEQ ID NO: 2054139 - DNA, 25 bp, Homo sapien
ttacttagcagacttagcagaagga

SEQ ID NO: 2054140 - DNA, 25 bp, Homo sapien
tatttgggtatgaaattatccctaa

SEQ ID NO: 2054141 - DNA, 25 bp, Homo sapien
cagataaggcctttgtgatgatgtt

SEQ ID NO: 2054142 - DNA, 25 bp, Homo sapien
gctgggcactatccttataataggg

SEQ ID NO: 2054143 - DNA, 25 bp, Homo sapien
aagtaatctgcccactttgtcctcc

SEQ ID NO: 2054144 - DNA, 25 bp, Homo sapien
agtaatctgcccactttgtcctccc

SEQ ID NO: 2054145 - DNA, 25 bp, Homo sapien
atgagccatcggtgcccagcctgaa

SEQ ID NO: 2054146 - DNA, 25 bp, Homo sapien
agccatcggtgcccagcctgaaatg

SEQ ID NO: 2054147 - DNA, 25 bp, Homo sapien
gcccgctccatttctagggtaagag

SEQ ID NO: 2054148 - DNA, 25 bp, Homo sapien
cttgaatatgcagggtcatgaagcc

SEQ ID NO: 2054149 - DNA, 25 bp, Homo sapien
tcaagtcaataggttagtaggtacc

SEQ ID NO: 2054150 - DNA, 25 bp, Homo sapien
ggctttctagtctatggctactggc

SEQ ID NO: 2054151 - DNA, 25 bp, Homo sapien
attgtgggatgtcgctgtcaggcct

SEQ ID NO: 2054152 - DNA, 25 bp, Homo sapien
gtgggatgtcgctgtcaggcctaat

SEQ ID NO: 2054153 - DNA, 25 bp, Homo sapien
ttattgtgggatgtcgctgtcaggc

SEQ ID NO: 2054154 - DNA, 25 bp, Homo sapien
tgtgggatgtcgctgtcaggcctaa

SEQ ID NO: 2054155 - DNA, 25 bp, Homo sapien
tagacttgttcctgctgcatctgtg

SEQ ID NO: 2054156 - DNA, 25 bp, Homo sapien
ccttgtagtgtagacttgttcctgc

SEQ ID NO: 2054157 - DNA, 25 bp, Homo sapien
cttgtagtgtagacttgttcctgct

SEQ ID NO: 2054158 - DNA, 25 bp, Homo sapien
gtgtagacttgttcctgctgcatct

SEQ ID NO: 2054159 - DNA, 25 bp, Homo sapien
ctggtattcttagactgctggcacc

SEQ ID NO: 2054160 - DNA, 25 bp, Homo sapien
gctgattttcccttacattccaaca

SEQ ID NO: 2054161 - DNA, 25 bp, Homo sapien
ttagactgctggcacctagggctga

SEQ ID NO: 2054162 - DNA, 25 bp, Homo sapien
tgctggcacctagggctgattttcc

SEQ ID NO: 2054163 - DNA, 25 bp, Homo sapien
ttaaaaaatccatagtacaatgaag

SEQ ID NO: 2054164 - DNA, 25 bp, Homo sapien
aaggggatgtatcatcatagttgtc

SEQ ID NO: 2054165 - DNA, 25 bp, Homo sapien
aaaatccatagtacaatgaagaacc

SEQ ID NO: 2054166 - DNA, 25 bp, Homo sapien
ccatagtacaatgaagaacctttaa

SEQ ID NO: 2054167 - DNA, 25 bp, Homo sapien
ctcttagctaaacagctaccgtggg

SEQ ID NO: 2054168 - DNA, 25 bp, Homo sapien
gagcttcctggagtactgttattgt

SEQ ID NO: 2054169 - DNA, 25 bp, Homo sapien
tagctaaacagctaccgtgggcctg

SEQ ID NO: 2054170 - DNA, 25 bp, Homo sapien
tgttattgtgtctccaataggtgag

SEQ ID NO: 2054171 - DNA, 25 bp, Homo sapien
taccaaactgatttgtagttgaatt

SEQ ID NO: 2054172 - DNA, 25 bp, Homo sapien
ttaccaaactgatttgtagttgaat

SEQ ID NO: 2054173 - DNA, 25 bp, Homo sapien
gaggtggcattgatagaggcttcct

SEQ ID NO: 2054174 - DNA, 25 bp, Homo sapien
tggcagaggaacagtattctcactg

SEQ ID NO: 2054175 - DNA, 25 bp, Homo sapien
aagctcggctgagagtctctttctt

SEQ ID NO: 2054176 - DNA, 25 bp, Homo sapien
gaggcttcctgattcggcgactacc

SEQ ID NO: 2054177 - DNA, 25 bp, Homo sapien
agctggaccccatcacttgggtttc

SEQ ID NO: 2054178 - DNA, 25 bp, Homo sapien
ggaccccatcacttgggtttccagc

SEQ ID NO: 2054179 - DNA, 25 bp, Homo sapien
gatgtgaccctctgccagaggacca

SEQ ID NO: 2054180 - DNA, 25 bp, Homo sapien
gccatggatgtgaccctctgccaga

SEQ ID NO: 2054181 - DNA, 25 bp, Homo sapien
aaatccaaaccatttcacaccctct

SEQ ID NO: 2054182 - DNA, 25 bp, Homo sapien
ttttgtacgtgatgcagcaatatgg

SEQ ID NO: 2054183 - DNA, 25 bp, Homo sapien
ttccaagagctcagattctggatca

SEQ ID NO: 2054184 - DNA, 25 bp, Homo sapien
cagcaatatggttagagagagagaa

SEQ ID NO: 2054185 - DNA, 25 bp, Homo sapien
gcattcagctaatggaagtccatca

SEQ ID NO: 2054186 - DNA, 25 bp, Homo sapien
ggtttttgctcttaaggcattcagc

SEQ ID NO: 2054187 - DNA, 25 bp, Homo sapien
tctctattttacagtcttcaggcag

SEQ ID NO: 2054188 - DNA, 25 bp, Homo sapien
aaactgtagggaaagccggcaggct

SEQ ID NO: 2054189 - DNA, 25 bp, Homo sapien
ttggacaggggccatactaatcttt

SEQ ID NO: 2054190 - DNA, 25 bp, Homo sapien
taaaactatggaatacttcacaaat

SEQ ID NO: 2054191 - DNA, 25 bp, Homo sapien
ggacaggggccatactaatcttttc

SEQ ID NO: 2054192 - DNA, 25 bp, Homo sapien
caaatttctgtgtcatccttggaca

SEQ ID NO: 2054193 - DNA, 25 bp, Homo sapien
acttctaggaattagtattacaggc

SEQ ID NO: 2054194 - DNA, 25 bp, Homo sapien
gagcactaacctttttaatgccttc

SEQ ID NO: 2054195 - DNA, 25 bp, Homo sapien
agcactaacctttttaatgccttca

SEQ ID NO: 2054196 - DNA, 25 bp, Homo sapien
aatacttctaggaattagtattaca

SEQ ID NO: 2054197 - DNA, 25 bp, Homo sapien
gggagactcaaggtcaaagcaggaa

SEQ ID NO: 2054198 - DNA, 25 bp, Homo sapien
gaagaggtctttcagtcactcaaca

SEQ ID NO: 2054199 - DNA, 25 bp, Homo sapien
aatctggagccagcaaattgacagg

SEQ ID NO: 2054200 - DNA, 25 bp, Homo sapien
ggtgccaattatgttcagatgctca

SEQ ID NO: 2054201 - DNA, 25 bp, Homo sapien
aagttcaagcaagcaggtgtgccga

SEQ ID NO: 2054202 - DNA, 25 bp, Homo sapien
ccaaacagacagtaggaggcatgca

SEQ ID NO: 2054203 - DNA, 25 bp, Homo sapien
gaaacttgggtgatgcactgagtcc

SEQ ID NO: 2054204 - DNA, 25 bp, Homo sapien
tagtattaaacagggagactctctc

SEQ ID NO: 2054205 - DNA, 25 bp, Homo sapien
tcaaaacacgatgaacgatatctac

SEQ ID NO: 2054206 - DNA, 25 bp, Homo sapien
tctaattgaaatattgcctgattaa

SEQ ID NO: 2054207 - DNA, 25 bp, Homo sapien
aaggataatattggcttaaaaagca

SEQ ID NO: 2054208 - DNA, 25 bp, Homo sapien
gcctgattaaaacttatatcaaaac

SEQ ID NO: 2054209 - DNA, 25 bp, Homo sapien
aaatagtggttactgcttgcaggga

SEQ ID NO: 2054210 - DNA, 25 bp, Homo sapien
tcaaatagtggttactgcttgcagg

SEQ ID NO: 2054211 - DNA, 25 bp, Homo sapien
ttcaccattcaaatagtggttactg

SEQ ID NO: 2054212 - DNA, 25 bp, Homo sapien
cattcaaatagtggttactgcttgc

SEQ ID NO: 2054213 - DNA, 25 bp, Homo sapien
tcctgagagcttttgccggagacct

SEQ ID NO: 2054214 - DNA, 25 bp, Homo sapien
ctttgctgtaaactagtcagtttaa

SEQ ID NO: 2054215 - DNA, 25 bp, Homo sapien
tccagtccacggcttttcctgagag

SEQ ID NO: 2054216 - DNA, 25 bp, Homo sapien
catgtactgtactgaggtagttagc

SEQ ID NO: 2054217 - DNA, 25 bp, Homo sapien
tatgtcctagctcggctgccaaagt

SEQ ID NO: 2054218 - DNA, 25 bp, Homo sapien
gaatatcctgagtcttcattaggta

SEQ ID NO: 2054219 - DNA, 25 bp, Homo sapien
tgggattaatctcaaagggaatgga

SEQ ID NO: 2054220 - DNA, 25 bp, Homo sapien
tttgtcaaacactttatgtcctagc

SEQ ID NO: 2054221 - DNA, 25 bp, Homo sapien
caaacacagttagggagcaaaatgc

SEQ ID NO: 2054222 - DNA, 25 bp, Homo sapien
tccagtaagattgagacagatagaa

SEQ ID NO: 2054223 - DNA, 25 bp, Homo sapien
tatgctaggcagaatggatgaggaa

SEQ ID NO: 2054224 - DNA, 25 bp, Homo sapien
gaatctgtaggcaatcttgttgggt

SEQ ID NO: 2054225 - DNA, 25 bp, Homo sapien
cttccttatgaagttgttggcttat

SEQ ID NO: 2054226 - DNA, 25 bp, Homo sapien
tcctgtgaattaagttgtgctggtt

SEQ ID NO: 2054227 - DNA, 25 bp, Homo sapien
aaagaaaacagttgagttatttgca

SEQ ID NO: 2054228 - DNA, 25 bp, Homo sapien
cagctcatatggtgacttatagaaa

SEQ ID NO: 2054229 - DNA, 25 bp, Homo sapien
tatcctaatttgcacgttcagtttc

SEQ ID NO: 2054230 - DNA, 25 bp, Homo sapien
tattaatgtcagatagagcaggtag

SEQ ID NO: 2054231 - DNA, 25 bp, Homo sapien
gattggacaattaagcctcaagcaa

SEQ ID NO: 2054232 - DNA, 25 bp, Homo sapien
ccttgctcccaaatgaaatgagcag

SEQ ID NO: 2054233 - DNA, 25 bp, Homo sapien
gcactgatgaacgagcgagtaaatg

SEQ ID NO: 2054234 - DNA, 25 bp, Homo sapien
gaacgagcgagtaaatgcatgcttc

SEQ ID NO: 2054235 - DNA, 25 bp, Homo sapien
agcgagtaaatgcatgcttctgcac

SEQ ID NO: 2054236 - DNA, 25 bp, Homo sapien
gatgaacgagcgagtaaatgcatgc

SEQ ID NO: 2054237 - DNA, 25 bp, Homo sapien
ttctgatgaggaatacgcgccatgg

SEQ ID NO: 2054238 - DNA, 25 bp, Homo sapien
gcctcttgggatgactgcttgatta

SEQ ID NO: 2054239 - DNA, 25 bp, Homo sapien
tggcagtttccggacaccttccaag

SEQ ID NO: 2054240 - DNA, 25 bp, Homo sapien
tttccggacaccttccaagctcaga

SEQ ID NO: 2054241 - DNA, 25 bp, Homo sapien
tggattggcactgagacatgcaggc

SEQ ID NO: 2054242 - DNA, 25 bp, Homo sapien
gtggtaagtcatatcattgtttgga

SEQ ID NO: 2054243 - DNA, 25 bp, Homo sapien
ctgtaagtggtaagtcatatcattg

SEQ ID NO: 2054244 - DNA, 25 bp, Homo sapien
tgtttggattggcactgagacatgc

SEQ ID NO: 2054245 - DNA, 25 bp, Homo sapien
acagttgcaacagctcaacggtgcc

SEQ ID NO: 2054246 - DNA, 25 bp, Homo sapien
aacagttgcaacagctcaacggtgc

SEQ ID NO: 2054247 - DNA, 25 bp, Homo sapien
ccatggaattctctgcgtatttcaa

SEQ ID NO: 2054248 - DNA, 25 bp, Homo sapien
ctagccatcagagtctccatggaat

SEQ ID NO: 2054249 - DNA, 25 bp, Homo sapien
tctgcgtatttcaatatggtctgca

SEQ ID NO: 2054250 - DNA, 25 bp, Homo sapien
gagtctccatggaattctctgcgta

SEQ ID NO: 2054251 - DNA, 25 bp, Homo sapien
gaaaagaaatcggtactgattatct

SEQ ID NO: 2054252 - DNA, 25 bp, Homo sapien
ttctttgacattgtcttgtttctct

SEQ ID NO: 2054253 - DNA, 25 bp, Homo sapien
tcggtactgattatctacttgttgc

SEQ ID NO: 2054254 - DNA, 25 bp, Homo sapien
caagaaactgggtcatgggagcaag

SEQ ID NO: 2054255 - DNA, 25 bp, Homo sapien
tcataggccattagtgaccaaatca

SEQ ID NO: 2054256 - DNA, 25 bp, Homo sapien
catgtgttcagtaatcctgaagttc

SEQ ID NO: 2054257 - DNA, 25 bp, Homo sapien
aaaacatctaggcacctccatgtgt

SEQ ID NO: 2054258 - DNA, 25 bp, Homo sapien
ggtgtgactgattacatcataggcc

SEQ ID NO: 2054259 - DNA, 25 bp, Homo sapien
atagcatgagcagccgtgagcatca

SEQ ID NO: 2054260 - DNA, 25 bp, Homo sapien
gttgggaagcaaatatgaagataca

SEQ ID NO: 2054261 - DNA, 25 bp, Homo sapien
taataccctaagattcgttccgaca

SEQ ID NO: 2054262 - DNA, 25 bp, Homo sapien
cagaaagaaacacagggtaagctac

SEQ ID NO: 2054263 - DNA, 25 bp, Homo sapien
tttagctctaatagggtttctgctt

SEQ ID NO: 2054264 - DNA, 25 bp, Homo sapien
tccaccactgagtactgtgaagtag

SEQ ID NO: 2054265 - DNA, 25 bp, Homo sapien
ataacgatctccatgtttaagaggg

SEQ ID NO: 2054266 - DNA, 25 bp, Homo sapien
ttgccttggacattctatataacga

SEQ ID NO: 2054267 - DNA, 25 bp, Homo sapien
tattttactcaactacctgccgtga

SEQ ID NO: 2054268 - DNA, 25 bp, Homo sapien
ttttactcaactacctgccgtgaac

SEQ ID NO: 2054269 - DNA, 25 bp, Homo sapien
tactcaactacctgccgtgaacaca

SEQ ID NO: 2054270 - DNA, 25 bp, Homo sapien
gaatattttactcaactacctgccg

SEQ ID NO: 2054271 - DNA, 25 bp, Homo sapien
tcaggctcgcagatgatttaaaggg

SEQ ID NO: 2054272 - DNA, 25 bp, Homo sapien
gggacacaggtattccctcacaagg

SEQ ID NO: 2054273 - DNA, 25 bp, Homo sapien
agcacttcccgcctgccgttcgaat

SEQ ID NO: 2054274 - DNA, 25 bp, Homo sapien
ggtattccctcacaaggtcagactc

SEQ ID NO: 2054275 - DNA, 25 bp, Homo sapien
ggtaaacacaacttcagcttcagct

SEQ ID NO: 2054276 - DNA, 25 bp, Homo sapien
tcagaaaccctcctattatagccat

SEQ ID NO: 2054277 - DNA, 25 bp, Homo sapien
agctttcaccactgataggtcagcg

SEQ ID NO: 2054278 - DNA, 25 bp, Homo sapien
tgaggacagcactcagaaaccctcc

SEQ ID NO: 2054279 - DNA, 25 bp, Homo sapien
gtccagaatcactggtcttgaccat

SEQ ID NO: 2054280 - DNA, 25 bp, Homo sapien
ccagaatcactggtcttgaccatga

SEQ ID NO: 2054281 - DNA, 25 bp, Homo sapien
actggtcttgaccatgacacattct

SEQ ID NO: 2054282 - DNA, 25 bp, Homo sapien
ggtcttgaccatgacacattctcca

SEQ ID NO: 2054283 - DNA, 25 bp, Homo sapien
aaaaagagagaatgtggtgtccaag

SEQ ID NO: 2054284 - DNA, 25 bp, Homo sapien
gagagaatgtggtgtccaagctgca

SEQ ID NO: 2054285 - DNA, 25 bp, Homo sapien
ctgtgtgcaaaaagagagaatgtgg

SEQ ID NO: 2054286 - DNA, 25 bp, Homo sapien
aaagagagaatgtggtgtccaagct

SEQ ID NO: 2054287 - DNA, 25 bp, Homo sapien
gagatgaagcgtcttcccgcgtaca

SEQ ID NO: 2054288 - DNA, 25 bp, Homo sapien
gaaaatagaccagaaagggctgccc

SEQ ID NO: 2054289 - DNA, 25 bp, Homo sapien
cgtatcccctggcaatctgttcagg

SEQ ID NO: 2054290 - DNA, 25 bp, Homo sapien
gggctgcgccagcttcagaatcctg

SEQ ID NO: 2054291 - DNA, 25 bp, Homo sapien
cgcaggagaccctgccgatgccact

SEQ ID NO: 2054292 - DNA, 25 bp, Homo sapien
cctgccgatgccactcagggtcaag

SEQ ID NO: 2054293 - DNA, 25 bp, Homo sapien
ctcagggtcaagactctggcgcggt

SEQ ID NO: 2054294 - DNA, 25 bp, Homo sapien
aacacccctggtctgccgcaggaga

SEQ ID NO: 2054295 - DNA, 25 bp, Homo sapien
gtctatcactttgggtagtttttgc

SEQ ID NO: 2054296 - DNA, 25 bp, Homo sapien
tgcttttgagcagattgtttctttt

SEQ ID NO: 2054297 - DNA, 25 bp, Homo sapien
ccccagaaacaggtctatcactttg

SEQ ID NO: 2054298 - DNA, 25 bp, Homo sapien
gaaacaggtctatcactttgggtag

SEQ ID NO: 2054299 - DNA, 25 bp, Homo sapien
caacaggaaagatggcattcctcac

SEQ ID NO: 2054300 - DNA, 25 bp, Homo sapien
tcaacaggaaagatggcattcctca

SEQ ID NO: 2054301 - DNA, 25 bp, Homo sapien
acaggaaagatggcattcctcacat

SEQ ID NO: 2054302 - DNA, 25 bp, Homo sapien
ttcaacaggaaagatggcattcctc

SEQ ID NO: 2054303 - DNA, 25 bp, Homo sapien
agggtgttggtatcatctggccaga

SEQ ID NO: 2054304 - DNA, 25 bp, Homo sapien
gttggtatcatctggccagagatcc

SEQ ID NO: 2054305 - DNA, 25 bp, Homo sapien
tatcatctggccagagatccaatgg

SEQ ID NO: 2054306 - DNA, 25 bp, Homo sapien
caaatttgagggtgttggtatcatc

SEQ ID NO: 2054307 - DNA, 25 bp, Homo sapien
tggggattctgaatgttggactttt

SEQ ID NO: 2054308 - DNA, 25 bp, Homo sapien
ttctattaggatttacgtatgcatc

SEQ ID NO: 2054309 - DNA, 25 bp, Homo sapien
tattaggatttacgtatgcatcttg

SEQ ID NO: 2054310 - DNA, 25 bp, Homo sapien
cgtatgcatcttggggattctgaat

SEQ ID NO: 2054311 - DNA, 25 bp, Homo sapien
accgggcttaaagccttcctcatca

SEQ ID NO: 2054312 - DNA, 25 bp, Homo sapien
ggaattctgaaattggtagaaaagc

SEQ ID NO: 2054313 - DNA, 25 bp, Homo sapien
gaaaagcttgttgccaccgggctta

SEQ ID NO: 2054314 - DNA, 25 bp, Homo sapien
catcaatgtcttgcttagcggaatt

SEQ ID NO: 2054315 - DNA, 25 bp, Homo sapien
aggcaggttgagcagttcacgtttc

SEQ ID NO: 2054316 - DNA, 25 bp, Homo sapien
ccatgtgaatcccctgtaccaggca

SEQ ID NO: 2054317 - DNA, 25 bp, Homo sapien
ctccatgtgaatcccctgtaccagg

SEQ ID NO: 2054318 - DNA, 25 bp, Homo sapien
ggcaggttgagcagttcacgtttcc

SEQ ID NO: 2054319 - DNA, 25 bp, Homo sapien
catatatcaacttggatgtgctgaa

SEQ ID NO: 2054320 - DNA, 25 bp, Homo sapien
atatcaacttggatgtgctgaaaag

SEQ ID NO: 2054321 - DNA, 25 bp, Homo sapien
catccatatatcaacttggatgtgc

SEQ ID NO: 2054322 - DNA, 25 bp, Homo sapien
tttacatccatatatcaacttggat

SEQ ID NO: 2054323 - DNA, 25 bp, Homo sapien
tatgtctgaagaaataaacagctgg

SEQ ID NO: 2054324 - DNA, 25 bp, Homo sapien
tgtctgaagaaataaacagctggtg

SEQ ID NO: 2054325 - DNA, 25 bp, Homo sapien
gtctgaagaaataaacagctggtga

SEQ ID NO: 2054326 - DNA, 25 bp, Homo sapien
tgaagaaataaacagctggtgatac

SEQ ID NO: 2054327 - DNA, 25 bp, Homo sapien
tttcatggggccttcccaagcatag

SEQ ID NO: 2054328 - DNA, 25 bp, Homo sapien
ggccttcccaagcatagctttgctg

SEQ ID NO: 2054329 - DNA, 25 bp, Homo sapien
catagctttgctgaggagccctcat

SEQ ID NO: 2054330 - DNA, 25 bp, Homo sapien
agcatagctttgctgaggagccctc

SEQ ID NO: 2054331 - DNA, 25 bp, Homo sapien
ttgagatgatgacatcacctttatc

SEQ ID NO: 2054332 - DNA, 25 bp, Homo sapien
caaaccgggctgacatgatccactt

SEQ ID NO: 2054333 - DNA, 25 bp, Homo sapien
aaccaaaccgggctgacatgatcca

SEQ ID NO: 2054334 - DNA, 25 bp, Homo sapien
ccgggctgacatgatccactttgat

SEQ ID NO: 2054335 - DNA, 25 bp, Homo sapien
gacatgatccactttgatttggcca

SEQ ID NO: 2054336 - DNA, 25 bp, Homo sapien
catatgtactcctctcacaaactcc

SEQ ID NO: 2054337 - DNA, 25 bp, Homo sapien
cacatatgtactcctctcacaaact

SEQ ID NO: 2054338 - DNA, 25 bp, Homo sapien
ctctcacaaactccctgggtgcaga

SEQ ID NO: 2054339 - DNA, 25 bp, Homo sapien
tctcacaaactccctgggtgcagag

SEQ ID NO: 2054340 - DNA, 25 bp, Homo sapien
ggcctctgataactgtcactgctgc

SEQ ID NO: 2054341 - DNA, 25 bp, Homo sapien
ggcccaatcaactgaatatctgctt

SEQ ID NO: 2054342 - DNA, 25 bp, Homo sapien
gcatccagacccctaatgcaactga

SEQ ID NO: 2054343 - DNA, 25 bp, Homo sapien
tactgtcctcattgccatctccagg

SEQ ID NO: 2054344 - DNA, 25 bp, Homo sapien
cgtgctacacaagctattttgggct

SEQ ID NO: 2054345 - DNA, 25 bp, Homo sapien
gatcattatcagaatgccgcttcag

SEQ ID NO: 2054346 - DNA, 25 bp, Homo sapien
cttattttcgctaaccgtaggagat

SEQ ID NO: 2054347 - DNA, 25 bp, Homo sapien
gaatgccgcttcagtcctgtccgtg

SEQ ID NO: 2054348 - DNA, 25 bp, Homo sapien
catttaaaaagtcagagagccccat

SEQ ID NO: 2054349 - DNA, 25 bp, Homo sapien
tacatttaaaaagtcagagagcccc

SEQ ID NO: 2054350 - DNA, 25 bp, Homo sapien
cttgaggcttacatttaaaaagtca

SEQ ID NO: 2054351 - DNA, 25 bp, Homo sapien
cttacatttaaaaagtcagagagcc

SEQ ID NO: 2054352 - DNA, 25 bp, Homo sapien
ccagtgccgaatgcctagagcttgc

SEQ ID NO: 2054353 - DNA, 25 bp, Homo sapien
taaagttcctgaaagttaggccagc

SEQ ID NO: 2054354 - DNA, 25 bp, Homo sapien
ccttcaggtgcaactaggccagacc

SEQ ID NO: 2054355 - DNA, 25 bp, Homo sapien
gaagcccatgctataatgagcgtga

SEQ ID NO: 2054356 - DNA, 25 bp, Homo sapien
gtaatcatatcttttcgtccctcca

SEQ ID NO: 2054357 - DNA, 25 bp, Homo sapien
gccacttggttatttgcctttagca

SEQ ID NO: 2054358 - DNA, 25 bp, Homo sapien
ggtgcttatctcagttgtaatcata

SEQ ID NO: 2054359 - DNA, 25 bp, Homo sapien
tcttcaatgacaaggagaacccagt

SEQ ID NO: 2054360 - DNA, 25 bp, Homo sapien
ggtgattaacaagaacgccagctct

SEQ ID NO: 2054361 - DNA, 25 bp, Homo sapien
gactttgccaggtgattaacaagaa

SEQ ID NO: 2054362 - DNA, 25 bp, Homo sapien
taagactttgccaggtgattaacaa

SEQ ID NO: 2054363 - DNA, 25 bp, Homo sapien
tgccaggtgattaacaagaacgcca

SEQ ID NO: 2054364 - DNA, 25 bp, Homo sapien
cagatggaggctttgttctcccgaa

SEQ ID NO: 2054365 - DNA, 25 bp, Homo sapien
ctctttccctttggtccagatggag

SEQ ID NO: 2054366 - DNA, 25 bp, Homo sapien
tcccgaagttggtcaggtgctgtgc

SEQ ID NO: 2054367 - DNA, 25 bp, Homo sapien
tgttctttgctgctccacaggcgac

SEQ ID NO: 2054368 - DNA, 25 bp, Homo sapien
tagtttataggcctagaactcccaa

SEQ ID NO: 2054369 - DNA, 25 bp, Homo sapien
gaactcccaattaattgaagctcaa

SEQ ID NO: 2054370 - DNA, 25 bp, Homo sapien
cccaatgtgtggagattggactgca

SEQ ID NO: 2054371 - DNA, 25 bp, Homo sapien
cttgctgatgttactccagacccaa

SEQ ID NO: 2054372 - DNA, 25 bp, Homo sapien
tggaatctccaatcacagagtcttc

SEQ ID NO: 2054373 - DNA, 25 bp, Homo sapien
tgctcactacgaaggaaacattgcc

SEQ ID NO: 2054374 - DNA, 25 bp, Homo sapien
tctaaagtggataagcatgtgctca

SEQ ID NO: 2054375 - DNA, 25 bp, Homo sapien
tgctctgcccgcataaaatggtgat

SEQ ID NO: 2054376 - DNA, 25 bp, Homo sapien
caggcccctgatggaatgtttaaaa

SEQ ID NO: 2054377 - DNA, 25 bp, Homo sapien
gagagaccacggaagctaattcaga

SEQ ID NO: 2054378 - DNA, 25 bp, Homo sapien
cgtagattctactgccagttcatgc

SEQ ID NO: 2054379 - DNA, 25 bp, Homo sapien
gcttcttgattgactcgccgccaga

SEQ ID NO: 2054380 - DNA, 25 bp, Homo sapien
gaccaccaggataccttatggtagg

SEQ ID NO: 2054381 - DNA, 25 bp, Homo sapien
aaaattcctcaatatgaccaccagg

SEQ ID NO: 2054382 - DNA, 25 bp, Homo sapien
gatttacttctcaccatgcagcaag

SEQ ID NO: 2054383 - DNA, 25 bp, Homo sapien
gctttccagatcaataaaaattcct

SEQ ID NO: 2054384 - DNA, 25 bp, Homo sapien
ttactccatcactgtgtctgccttt

SEQ ID NO: 2054385 - DNA, 25 bp, Homo sapien
cagagccttttggttcattgctgca

SEQ ID NO: 2054386 - DNA, 25 bp, Homo sapien
cattgctgcagaatcttttactcca

SEQ ID NO: 2054387 - DNA, 25 bp, Homo sapien
gtctgcctttggagttttctccact

SEQ ID NO: 2054388 - DNA, 25 bp, Homo sapien
tacatataaggtgctcaatgttttt

SEQ ID NO: 2054389 - DNA, 25 bp, Homo sapien
cttctgtagaggctctgatacatat

SEQ ID NO: 2054390 - DNA, 25 bp, Homo sapien
gtagaggctctgatacatataaggt

SEQ ID NO: 2054391 - DNA, 25 bp, Homo sapien
catataaggtgctcaatgtttttgt

SEQ ID NO: 2054392 - DNA, 25 bp, Homo sapien
gggctgataattatgacttctctta

SEQ ID NO: 2054393 - DNA, 25 bp, Homo sapien
tcaagaatgggctgataattatgac

SEQ ID NO: 2054394 - DNA, 25 bp, Homo sapien
ttatgacttctcttaagtggcctcc

SEQ ID NO: 2054395 - DNA, 25 bp, Homo sapien
ctcactcgagggatgggaattgtgt

SEQ ID NO: 2054396 - DNA, 25 bp, Homo sapien
aaactagccagaattccaactttgt

SEQ ID NO: 2054397 - DNA, 25 bp, Homo sapien
ctttggtgcgttgcaatggttactg

SEQ ID NO: 2054398 - DNA, 25 bp, Homo sapien
tggttactgcaggtataaactagcc

SEQ ID NO: 2054399 - DNA, 25 bp, Homo sapien
tggtgttaagttgttaggaaatgac

SEQ ID NO: 2054400 - DNA, 25 bp, Homo sapien
aaaagactgaaattccgaggctgct

SEQ ID NO: 2054401 - DNA, 25 bp, Homo sapien
gagcatataacacgaaacgttattc

SEQ ID NO: 2054402 - DNA, 25 bp, Homo sapien
ccccttctttaatctagtcttcaat

SEQ ID NO: 2054403 - DNA, 25 bp, Homo sapien
tcttgcctgatatcctggaaataga

SEQ ID NO: 2054404 - DNA, 25 bp, Homo sapien
aagaatagttcttctggtgtgagga

SEQ ID NO: 2054405 - DNA, 25 bp, Homo sapien
aagtaaggacaagcattattaatga

SEQ ID NO: 2054406 - DNA, 25 bp, Homo sapien
gtgtgaggatccactgggttgccac

SEQ ID NO: 2054407 - DNA, 25 bp, Homo sapien
tgaggatccactgggttgccactga

SEQ ID NO: 2054408 - DNA, 25 bp, Homo sapien
ggcagctcagaaggggaaacgacac

SEQ ID NO: 2054409 - DNA, 25 bp, Homo sapien
gtatgcgatgaaaccagaatcagca

SEQ ID NO: 2054410 - DNA, 25 bp, Homo sapien
caactgtagatggcagctcagaagg

SEQ ID NO: 2054411 - DNA, 25 bp, Homo sapien
cattgcctgagggtatgcgatgaaa

SEQ ID NO: 2054412 - DNA, 25 bp, Homo sapien
ggaaaagcacagaaggtcccagcat

SEQ ID NO: 2054413 - DNA, 25 bp, Homo sapien
gagagaacactaagaacatgaggaa

SEQ ID NO: 2054414 - DNA, 25 bp, Homo sapien
ggaggagagagaacactaagaacat

SEQ ID NO: 2054415 - DNA, 25 bp, Homo sapien
aacactaagaacatgaggaaaagca

SEQ ID NO: 2054416 - DNA, 25 bp, Homo sapien
aaatgtgttttcttgctttttcttg

SEQ ID NO: 2054417 - DNA, 25 bp, Homo sapien
gttttcttgctttttcttgtatgca

SEQ ID NO: 2054418 - DNA, 25 bp, Homo sapien
ttcttgctttttcttgtatgcatac

SEQ ID NO: 2054419 - DNA, 25 bp, Homo sapien
aatgtgttttcttgctttttcttgt

SEQ ID NO: 2054420 - DNA, 25 bp, Homo sapien
gagcaagtctgcaaccagtcttgga

SEQ ID NO: 2054421 - DNA, 25 bp, Homo sapien
catgcacatccatggcataaaattc

SEQ ID NO: 2054422 - DNA, 25 bp, Homo sapien
caaatgcttctctccttgtttagaa

SEQ ID NO: 2054423 - DNA, 25 bp, Homo sapien
cttggagttatgatgtatcctggac

SEQ ID NO: 2054424 - DNA, 25 bp, Homo sapien
caactggtgtgagtaatgtttgccc

SEQ ID NO: 2054425 - DNA, 25 bp, Homo sapien
gcttcaggcaagatgtcttaagcct

SEQ ID NO: 2054426 - DNA, 25 bp, Homo sapien
gcatttacttagtgggcagctctgc

SEQ ID NO: 2054427 - DNA, 25 bp, Homo sapien
tagaggtagcttattttgcccagcc

SEQ ID NO: 2054428 - DNA, 25 bp, Homo sapien
ttgaccacctatgcagatatacaac

SEQ ID NO: 2054429 - DNA, 25 bp, Homo sapien
tcagattatcaatttgaccacctat

SEQ ID NO: 2054430 - DNA, 25 bp, Homo sapien
tttgaccacctatgcagatatacaa

SEQ ID NO: 2054431 - DNA, 25 bp, Homo sapien
ttatcaatttgaccacctatgcaga

SEQ ID NO: 2054432 - DNA, 25 bp, Homo sapien
taataaaggcactaagctcaaatga

SEQ ID NO: 2054433 - DNA, 25 bp, Homo sapien
cagggaacactgatgatgatcaagt

SEQ ID NO: 2054434 - DNA, 25 bp, Homo sapien
gagcaagacgccttatcaaaagaaa

SEQ ID NO: 2054435 - DNA, 25 bp, Homo sapien
tattataagatacctgtgccaggga

SEQ ID NO: 2054436 - DNA, 25 bp, Homo sapien
tcaagatgtggtagggtgagctcat

SEQ ID NO: 2054437 - DNA, 25 bp, Homo sapien
aaccatgagatctgtaagtctggca

SEQ ID NO: 2054438 - DNA, 25 bp, Homo sapien
tcaatttcttctagggtgtattttc

SEQ ID NO: 2054439 - DNA, 25 bp, Homo sapien
tgaaatctcctcttccggtttaaga

SEQ ID NO: 2054440 - DNA, 25 bp, Homo sapien
aatacattgaaactcaagtttagca

SEQ ID NO: 2054441 - DNA, 25 bp, Homo sapien
tacattgaaactcaagtttagcatt

SEQ ID NO: 2054442 - DNA, 25 bp, Homo sapien
tgaaactcaagtttagcattactct

SEQ ID NO: 2054443 - DNA, 25 bp, Homo sapien
ctataatacattgaaactcaagttt

SEQ ID NO: 2054444 - DNA, 25 bp, Homo sapien
gaagtattcagataagtatataaat

SEQ ID NO: 2054445 - DNA, 25 bp, Homo sapien
ggcttttcatgtaagcataaccttg

SEQ ID NO: 2054446 - DNA, 25 bp, Homo sapien
catgtaagcataaccttgatgtcct

SEQ ID NO: 2054447 - DNA, 25 bp, Homo sapien
tggggttttccggatgaagtattca

SEQ ID NO: 2054448 - DNA, 25 bp, Homo sapien
taaccgcaaaatccgaaaaagatca

SEQ ID NO: 2054449 - DNA, 25 bp, Homo sapien
tcatctaatataaccgcaaaatccg

SEQ ID NO: 2054450 - DNA, 25 bp, Homo sapien
tctaatataaccgcaaaatccgaaa

SEQ ID NO: 2054451 - DNA, 25 bp, Homo sapien
catctaatataaccgcaaaatccga

SEQ ID NO: 2054452 - DNA, 25 bp, Homo sapien
cgtccaggtaatgaggtaacatgac

SEQ ID NO: 2054453 - DNA, 25 bp, Homo sapien
cagagaatgtcagaaggaagatatc

SEQ ID NO: 2054454 - DNA, 25 bp, Homo sapien
caggaatgcaaacgctgttcgtcca

SEQ ID NO: 2054455 - DNA, 25 bp, Homo sapien
gagaatgtcagaaggaagatatcca

SEQ ID NO: 2054456 - DNA, 25 bp, Homo sapien
tatcaaatctttctgagccccagaa

SEQ ID NO: 2054457 - DNA, 25 bp, Homo sapien
tgtcttatcaaatctttctgagccc

SEQ ID NO: 2054458 - DNA, 25 bp, Homo sapien
tcttatcaaatctttctgagcccca

SEQ ID NO: 2054459 - DNA, 25 bp, Homo sapien
attgtcttatcaaatctttctgagc

SEQ ID NO: 2054460 - DNA, 25 bp, Homo sapien
gatgttatcatcatagagctcaaat

SEQ ID NO: 2054461 - DNA, 25 bp, Homo sapien
tttgccttgatctatggatgttatc

SEQ ID NO: 2054462 - DNA, 25 bp, Homo sapien
ccaccagatatgaacagttattaag

SEQ ID NO: 2054463 - DNA, 25 bp, Homo sapien
aattcaataacaagtaagcctagca

SEQ ID NO: 2054464 - DNA, 25 bp, Homo sapien
cttccctgccaattataactgtgct

SEQ ID NO: 2054465 - DNA, 25 bp, Homo sapien
tttgacatacaattgtccttaaaat

SEQ ID NO: 2054466 - DNA, 25 bp, Homo sapien
ttactaaagtccctgcggctctgca

SEQ ID NO: 2054467 - DNA, 25 bp, Homo sapien
gggactcttctccagtgcaggaaat

SEQ ID NO: 2054468 - DNA, 25 bp, Homo sapien
aagtattgggcagactgagcagaac

SEQ ID NO: 2054469 - DNA, 25 bp, Homo sapien
caaagtggcagagctcaaggtgttc

SEQ ID NO: 2054470 - DNA, 25 bp, Homo sapien
ctattctatcacagactctgaagta

SEQ ID NO: 2054471 - DNA, 25 bp, Homo sapien
gagctatgttcactgagagttctgc

SEQ ID NO: 2054472 - DNA, 25 bp, Homo sapien
caaaaagcccattctcaattctcta

SEQ ID NO: 2054473 - DNA, 25 bp, Homo sapien
cagtgggtaatatggaatagagcca

SEQ ID NO: 2054474 - DNA, 25 bp, Homo sapien
gttcatcagtgggtaatatggaata

SEQ ID NO: 2054475 - DNA, 25 bp, Homo sapien
catcagtgggtaatatggaatagag

SEQ ID NO: 2054476 - DNA, 25 bp, Homo sapien
caaaagaaactgctctgtctgatac

SEQ ID NO: 2054477 - DNA, 25 bp, Homo sapien
ctgtctgatactctccctgaagttt

SEQ ID NO: 2054478 - DNA, 25 bp, Homo sapien
gtttctattgacaggacatcaatca

SEQ ID NO: 2054479 - DNA, 25 bp, Homo sapien
cttcaaaagaaactgctctgtctga

SEQ ID NO: 2054480 - DNA, 25 bp, Homo sapien
gttagcagatttccttcactggcct

SEQ ID NO: 2054481 - DNA, 25 bp, Homo sapien
taagttagcagatttccttcactgg

SEQ ID NO: 2054482 - DNA, 25 bp, Homo sapien
aaacgatctgaagccatcggatcct

SEQ ID NO: 2054483 - DNA, 25 bp, Homo sapien
ctctgttctcaagaaaacgatctga

SEQ ID NO: 2054484 - DNA, 25 bp, Homo sapien
tcacatgacgttagaaaataggagg

SEQ ID NO: 2054485 - DNA, 25 bp, Homo sapien
catgacgttagaaaataggaggaca

SEQ ID NO: 2054486 - DNA, 25 bp, Homo sapien
ttcggtagaggttcacatgacgtta

SEQ ID NO: 2054487 - DNA, 25 bp, Homo sapien
agttttctgaatgttcggtagaggt

SEQ ID NO: 2054488 - DNA, 25 bp, Homo sapien
tgtggacagcttgttcctgaaccac

SEQ ID NO: 2054489 - DNA, 25 bp, Homo sapien
gtggacagcttgttcctgaaccaca

SEQ ID NO: 2054490 - DNA, 25 bp, Homo sapien
cctgtggacagcttgttcctgaacc

SEQ ID NO: 2054491 - DNA, 25 bp, Homo sapien
ctgtggacagcttgttcctgaacca

SEQ ID NO: 2054492 - DNA, 25 bp, Homo sapien
aggtcattgcttcatacagtattag

SEQ ID NO: 2054493 - DNA, 25 bp, Homo sapien
ggtcattgcttcatacagtattagg

SEQ ID NO: 2054494 - DNA, 25 bp, Homo sapien
taaggtcattgcttcatacagtatt

SEQ ID NO: 2054495 - DNA, 25 bp, Homo sapien
ctatgagctgtaaagaccacttaag

SEQ ID NO: 2054496 - DNA, 25 bp, Homo sapien
aaccgtcacttctactattccagag

SEQ ID NO: 2054497 - DNA, 25 bp, Homo sapien
gcttgagaatgctctaaccgtcact

SEQ ID NO: 2054498 - DNA, 25 bp, Homo sapien
tagaagtctgtgatattcgtgcttg

SEQ ID NO: 2054499 - DNA, 25 bp, Homo sapien
tgaacttagagtgagacagtagaag

SEQ ID NO: 2054500 - DNA, 25 bp, Homo sapien
tttttaaattcacaattctgggctc

SEQ ID NO: 2054501 - DNA, 25 bp, Homo sapien
gacatctgagtaagaaggctttgaa

SEQ ID NO: 2054502 - DNA, 25 bp, Homo sapien
tactcccagcgttcttagaggagac

SEQ ID NO: 2054503 - DNA, 25 bp, Homo sapien
catgttttgcgtggttgacatctga

SEQ ID NO: 2054504 - DNA, 25 bp, Homo sapien
cccacaatcttaatagagctcaaag

SEQ ID NO: 2054505 - DNA, 25 bp, Homo sapien
tcacttaggctccactgatgcactc

SEQ ID NO: 2054506 - DNA, 25 bp, Homo sapien
caatcttaatagagctcaaagtggt

SEQ ID NO: 2054507 - DNA, 25 bp, Homo sapien
aatcaagtcacttaggctccactga

SEQ ID NO: 2054508 - DNA, 25 bp, Homo sapien
tccagaacagcttgtgaggcagaac

SEQ ID NO: 2054509 - DNA, 25 bp, Homo sapien
gagtgtgtacacatacgggcctgaa

SEQ ID NO: 2054510 - DNA, 25 bp, Homo sapien
gatccaaaaagaccatagcgttcgg

SEQ ID NO: 2054511 - DNA, 25 bp, Homo sapien
tcccggtagggagagcaagttgcaa

SEQ ID NO: 2054512 - DNA, 25 bp, Homo sapien
tcttgctcaaatggccatctgacaa

SEQ ID NO: 2054513 - DNA, 25 bp, Homo sapien
cttgctcaaatggccatctgacaaa

SEQ ID NO: 2054514 - DNA, 25 bp, Homo sapien
ctcttgctcaaatggccatctgaca

SEQ ID NO: 2054515 - DNA, 25 bp, Homo sapien
ttgaaacacattgcaatgtcccatc

SEQ ID NO: 2054516 - DNA, 25 bp, Homo sapien
gaatgtggcctgacattgccttctc

SEQ ID NO: 2054517 - DNA, 25 bp, Homo sapien
tgtggcctgacattgccttctccat

SEQ ID NO: 2054518 - DNA, 25 bp, Homo sapien
cccatcacccgtgtctttcagaatg

SEQ ID NO: 2054519 - DNA, 25 bp, Homo sapien
gcactgttgatggttcagctcctcc

SEQ ID NO: 2054520 - DNA, 25 bp, Homo sapien
cactgttgatggttcagctcctcca

SEQ ID NO: 2054521 - DNA, 25 bp, Homo sapien
tgttgatggttcagctcctccactc

SEQ ID NO: 2054522 - DNA, 25 bp, Homo sapien
actgttgatggttcagctcctccac

SEQ ID NO: 2054523 - DNA, 25 bp, Homo sapien
ttacaggatcattgttcactggcct

SEQ ID NO: 2054524 - DNA, 25 bp, Homo sapien
tacaggatcattgttcactggcctg

SEQ ID NO: 2054525 - DNA, 25 bp, Homo sapien
cttacaggatcattgttcactggcc

SEQ ID NO: 2054526 - DNA, 25 bp, Homo sapien
cctcacattgtctgtctactacctt

SEQ ID NO: 2054527 - DNA, 25 bp, Homo sapien
tttctatcttgggtaaaccctcatc

SEQ ID NO: 2054528 - DNA, 25 bp, Homo sapien
tctatcttgggtaaaccctcatcct

SEQ ID NO: 2054529 - DNA, 25 bp, Homo sapien
ttgggtaaaccctcatcctcagatg

SEQ ID NO: 2054530 - DNA, 25 bp, Homo sapien
tcttgggtaaaccctcatcctcaga

SEQ ID NO: 2054531 - DNA, 25 bp, Homo sapien
ttctccactctatatggatcattac

SEQ ID NO: 2054532 - DNA, 25 bp, Homo sapien
actcttctctaggtatatttggact

SEQ ID NO: 2054533 - DNA, 25 bp, Homo sapien
ttgtgggacctgatgtttttctcca

SEQ ID NO: 2054534 - DNA, 25 bp, Homo sapien
ggcaggcaatgtaagtatactcttc

SEQ ID NO: 2054535 - DNA, 25 bp, Homo sapien
ctttccaagagagggtgggattcca

SEQ ID NO: 2054536 - DNA, 25 bp, Homo sapien
gcatagacagagtagctggttccct

SEQ ID NO: 2054537 - DNA, 25 bp, Homo sapien
ggctgcattcttttacggttccaca

SEQ ID NO: 2054538 - DNA, 25 bp, Homo sapien
ccacagaagtgttttaggcatagac

SEQ ID NO: 2054539 - DNA, 25 bp, Homo sapien
ggaaggcctgatagtaaaatgatgg

SEQ ID NO: 2054540 - DNA, 25 bp, Homo sapien
cacgtgaaatgtcagggttgctgag

SEQ ID NO: 2054541 - DNA, 25 bp, Homo sapien
gtctgaaacacgtgaaatgtcaggg

SEQ ID NO: 2054542 - DNA, 25 bp, Homo sapien
cttgcttaggagctacaaagtagtc

SEQ ID NO: 2054543 - DNA, 25 bp, Homo sapien
ttcacttaaattctcttgtctgtca

SEQ ID NO: 2054544 - DNA, 25 bp, Homo sapien
ttagattcacttaaattctcttgtc

SEQ ID NO: 2054545 - DNA, 25 bp, Homo sapien
gattcacttaaattctcttgtctgt

SEQ ID NO: 2054546 - DNA, 25 bp, Homo sapien
gatttatctaaattagattcactta

SEQ ID NO: 2054547 - DNA, 25 bp, Homo sapien
tgaagatctggccaagctattggtt

SEQ ID NO: 2054548 - DNA, 25 bp, Homo sapien
aaaacttaaggtatatgtgactgaa

SEQ ID NO: 2054549 - DNA, 25 bp, Homo sapien
aacagcttgtgcattttgtaatgcc

SEQ ID NO: 2054550 - DNA, 25 bp, Homo sapien
tctggccaagctattggttagtggc

SEQ ID NO: 2054551 - DNA, 25 bp, Homo sapien
gatgcaatcttccagaagtcctgaa

SEQ ID NO: 2054552 - DNA, 25 bp, Homo sapien
tgcaatcttccagaagtcctgaaaa

SEQ ID NO: 2054553 - DNA, 25 bp, Homo sapien
gatgatgcaatcttccagaagtcct

SEQ ID NO: 2054554 - DNA, 25 bp, Homo sapien
ttgatgatgcaatcttccagaagtc

SEQ ID NO: 2054555 - DNA, 25 bp, Homo sapien
cagacccttctctgcataatgtccc

SEQ ID NO: 2054556 - DNA, 25 bp, Homo sapien
ttctctgcataatgtccccatgtct

SEQ ID NO: 2054557 - DNA, 25 bp, Homo sapien
atgtccccatgtctgctcatttgtt

SEQ ID NO: 2054558 - DNA, 25 bp, Homo sapien
tccccatgtctgctcatttgttcca

SEQ ID NO: 2054559 - DNA, 25 bp, Homo sapien
tgaatccaaaatggtgactctgttc

SEQ ID NO: 2054560 - DNA, 25 bp, Homo sapien
caaaatggtgactctgttcttgttg

SEQ ID NO: 2054561 - DNA, 25 bp, Homo sapien
tccaaaatggtgactctgttcttgt

SEQ ID NO: 2054562 - DNA, 25 bp, Homo sapien
gctactgaatccaaaatggtgactc

SEQ ID NO: 2054563 - DNA, 25 bp, Homo sapien
attttacaaaaaaagctgcagctgc

SEQ ID NO: 2054564 - DNA, 25 bp, Homo sapien
ctattttacaaaaaaagctgcagct

SEQ ID NO: 2054565 - DNA, 25 bp, Homo sapien
tacaaaaaaagctgcagctgcttcc

SEQ ID NO: 2054566 - DNA, 25 bp, Homo sapien
ttttacaaaaaaagctgcagctgct

SEQ ID NO: 2054567 - DNA, 25 bp, Homo sapien
ccgtagacatgtaatgtgcaaagcc

SEQ ID NO: 2054568 - DNA, 25 bp, Homo sapien
gcaaagcctggtgatctcagtgcat

SEQ ID NO: 2054569 - DNA, 25 bp, Homo sapien
gaagacaacatagggtaatgtcccg

SEQ ID NO: 2054570 - DNA, 25 bp, Homo sapien
gaatattttataagtccctggcaga

SEQ ID NO: 2054571 - DNA, 25 bp, Homo sapien
tggtggatgtcctggtagttcccat

SEQ ID NO: 2054572 - DNA, 25 bp, Homo sapien
tctctccagctatatcaaaatcatc

SEQ ID NO: 2054573 - DNA, 25 bp, Homo sapien
cctgtctctccagctatatcaaaat

SEQ ID NO: 2054574 - DNA, 25 bp, Homo sapien
cttaaagtggtggatgtcctggtag

SEQ ID NO: 2054575 - DNA, 25 bp, Homo sapien
tgttctgtgaggctacttctaactt

SEQ ID NO: 2054576 - DNA, 25 bp, Homo sapien
tctgtgaggctacttctaacttcac

SEQ ID NO: 2054577 - DNA, 25 bp, Homo sapien
tgaggctacttctaacttcaccaca

SEQ ID NO: 2054578 - DNA, 25 bp, Homo sapien
tgtgaggctacttctaacttcacca

SEQ ID NO: 2054579 - DNA, 25 bp, Homo sapien
ctttatttccacttgtcttctgaac

SEQ ID NO: 2054580 - DNA, 25 bp, Homo sapien
aagtattctctgctaagtaatggag

SEQ ID NO: 2054581 - DNA, 25 bp, Homo sapien
tggagcttttaagttccacgctcgt

SEQ ID NO: 2054582 - DNA, 25 bp, Homo sapien
aacttgaaatggctctccctatcct

SEQ ID NO: 2054583 - DNA, 25 bp, Homo sapien
tccgtgttgcattgtagtccctggc

SEQ ID NO: 2054584 - DNA, 25 bp, Homo sapien
tgttgcattgtagtccctggcagtg

SEQ ID NO: 2054585 - DNA, 25 bp, Homo sapien
tctctggccaggtccgtgttgcatt

SEQ ID NO: 2054586 - DNA, 25 bp, Homo sapien
ttgcattgtagtccctggcagtgat

SEQ ID NO: 2054587 - DNA, 25 bp, Homo sapien
cactttcattttgtaggtagagaat

SEQ ID NO: 2054588 - DNA, 25 bp, Homo sapien
gtaggtagagaatatatatggccat

SEQ ID NO: 2054589 - DNA, 25 bp, Homo sapien
caatgggttgggctttagaattaga

SEQ ID NO: 2054590 - DNA, 25 bp, Homo sapien
tgggctttagaattagatgttttag

SEQ ID NO: 2054591 - DNA, 25 bp, Homo sapien
tggtgcttacaatattatgtaattt

SEQ ID NO: 2054592 - DNA, 25 bp, Homo sapien
tcacctggtttatggtgcttacaat

SEQ ID NO: 2054593 - DNA, 25 bp, Homo sapien
tttttcacctggtttatggtgctta

SEQ ID NO: 2054594 - DNA, 25 bp, Homo sapien
tttcacctggtttatggtgcttaca

SEQ ID NO: 2054595 - DNA, 25 bp, Homo sapien
tctatttggtgcagcatagtgctct

SEQ ID NO: 2054596 - DNA, 25 bp, Homo sapien
cacatcttacttatggcactgagaa

SEQ ID NO: 2054597 - DNA, 25 bp, Homo sapien
tgagaatgtgaccacgaatgcctgc

SEQ ID NO: 2054598 - DNA, 25 bp, Homo sapien
tcaaagagagccagtcagtccacat

SEQ ID NO: 2054599 - DNA, 25 bp, Homo sapien
agaggaagcgttgcccctggtcatc

SEQ ID NO: 2054600 - DNA, 25 bp, Homo sapien
tctatctctgagaggaagcgttgcc

SEQ ID NO: 2054601 - DNA, 25 bp, Homo sapien
gttgcccctggtcatcagtgtagtc

SEQ ID NO: 2054602 - DNA, 25 bp, Homo sapien
tcatcagtgtagtcagatgatacaa

SEQ ID NO: 2054603 - DNA, 25 bp, Homo sapien
ttctgctgtatttcccatggatttg

SEQ ID NO: 2054604 - DNA, 25 bp, Homo sapien
cttgactccttctagttctgctgta

SEQ ID NO: 2054605 - DNA, 25 bp, Homo sapien
tatagcttattattcaagctggccc

SEQ ID NO: 2054606 - DNA, 25 bp, Homo sapien
gcttattattcaagctggccctgag

SEQ ID NO: 2054607 - DNA, 25 bp, Homo sapien
caagaacgtgagatctaatagcttc

SEQ ID NO: 2054608 - DNA, 25 bp, Homo sapien
accagtggtccgcaggagtcttgga

SEQ ID NO: 2054609 - DNA, 25 bp, Homo sapien
gccataagacctctccaagaacgtg

SEQ ID NO: 2054610 - DNA, 25 bp, Homo sapien
tagaacagctaactggacactggac

SEQ ID NO: 2054611 - DNA, 25 bp, Homo sapien
catctgggaggaggatgtctgaaat

SEQ ID NO: 2054612 - DNA, 25 bp, Homo sapien
ggaggatgtctgaaattgccgccat

SEQ ID NO: 2054613 - DNA, 25 bp, Homo sapien
ttccagctctgagtccatatggcca

SEQ ID NO: 2054614 - DNA, 25 bp, Homo sapien
atatggccatgctcatctgggagga

SEQ ID NO: 2054615 - DNA, 25 bp, Homo sapien
tctggaaaccttagggcagaatcca

SEQ ID NO: 2054616 - DNA, 25 bp, Homo sapien
ggttactataacaaatagcctcagt

SEQ ID NO: 2054617 - DNA, 25 bp, Homo sapien
tgtgctcagggtccaaagtctgaca

SEQ ID NO: 2054618 - DNA, 25 bp, Homo sapien
caaggtattggcaggtctgtattcc

SEQ ID NO: 2054619 - DNA, 25 bp, Homo sapien
aaaggtaactgctgcgtgtgggttc

SEQ ID NO: 2054620 - DNA, 25 bp, Homo sapien
gtcacagaaattgagaggaagtagt

SEQ ID NO: 2054621 - DNA, 25 bp, Homo sapien
taactgctgcgtgtgggttcatttg

SEQ ID NO: 2054622 - DNA, 25 bp, Homo sapien
ttgagaggaagtagtgacagagaca

SEQ ID NO: 2054623 - DNA, 25 bp, Homo sapien
ctaactgttgccatccttgaatttt

SEQ ID NO: 2054624 - DNA, 25 bp, Homo sapien
ttttgcttcagagatccatttccag

SEQ ID NO: 2054625 - DNA, 25 bp, Homo sapien
ccaaggcagtcaagaacgagtgttt

SEQ ID NO: 2054626 - DNA, 25 bp, Homo sapien
tacttctggccaatgggcatgaggg

SEQ ID NO: 2054627 - DNA, 25 bp, Homo sapien
tagaagacacatgctctgaatggca

SEQ ID NO: 2054628 - DNA, 25 bp, Homo sapien
tcttctcctgctatagaaatcttag

SEQ ID NO: 2054629 - DNA, 25 bp, Homo sapien
tcccactgagtttcccatttgtggc

SEQ ID NO: 2054630 - DNA, 25 bp, Homo sapien
tactctcccactgagtttcccattt

SEQ ID NO: 2054631 - DNA, 25 bp, Homo sapien
tcatactctcccactgagtttccca

SEQ ID NO: 2054632 - DNA, 25 bp, Homo sapien
tctcccactgagtttcccatttgtg

SEQ ID NO: 2054633 - DNA, 25 bp, Homo sapien
ccatatgtcccccacaactctttgt

SEQ ID NO: 2054634 - DNA, 25 bp, Homo sapien
ctctccatatgtcccccacaactct

SEQ ID NO: 2054635 - DNA, 25 bp, Homo sapien
tcttctctccatatgtcccccacaa

SEQ ID NO: 2054636 - DNA, 25 bp, Homo sapien
catatgtcccccacaactctttgtc

SEQ ID NO: 2054637 - DNA, 25 bp, Homo sapien
tctcgtggacattccagtcctgtgc

SEQ ID NO: 2054638 - DNA, 25 bp, Homo sapien
gcagagccttctcgtggacattcca

SEQ ID NO: 2054639 - DNA, 25 bp, Homo sapien
gaagaagtgtcctgatctggagatc

SEQ ID NO: 2054640 - DNA, 25 bp, Homo sapien
gagcacttatggtcccgaaaaacac

SEQ ID NO: 2054641 - DNA, 25 bp, Homo sapien
cttttcaactccagagcatattttg

SEQ ID NO: 2054642 - DNA, 25 bp, Homo sapien
tcaactccagagcatattttgtccc

SEQ ID NO: 2054643 - DNA, 25 bp, Homo sapien
gagcatattttgtccccacatatca

SEQ ID NO: 2054644 - DNA, 25 bp, Homo sapien
tactcttttcaactccagagcatat

SEQ ID NO: 2054645 - DNA, 25 bp, Homo sapien
aaatgacgttctcttccacttccaa

SEQ ID NO: 2054646 - DNA, 25 bp, Homo sapien
caggtcgttgagaagtttacatgtg

SEQ ID NO: 2054647 - DNA, 25 bp, Homo sapien
aaggcacagaaatgacgttctcttc

SEQ ID NO: 2054648 - DNA, 25 bp, Homo sapien
cacttccaagattccggtattggcc

SEQ ID NO: 2054649 - DNA, 25 bp, Homo sapien
cagtatgtgaaatcgtgctttgaca

SEQ ID NO: 2054650 - DNA, 25 bp, Homo sapien
tacttggccacgcagcagtatgtga

SEQ ID NO: 2054651 - DNA, 25 bp, Homo sapien
cttgcaagataacaatcctacttgg

SEQ ID NO: 2054652 - DNA, 25 bp, Homo sapien
gaaatcgtgctttgacatgacctgc

SEQ ID NO: 2054653 - DNA, 25 bp, Homo sapien
cttcagcatgacacagtatttcttc

SEQ ID NO: 2054654 - DNA, 25 bp, Homo sapien
catgacacagtatttcttcacaaaa

SEQ ID NO: 2054655 - DNA, 25 bp, Homo sapien
tcagcatgacacagtatttcttcac

SEQ ID NO: 2054656 - DNA, 25 bp, Homo sapien
cagcatgacacagtatttcttcaca

SEQ ID NO: 2054657 - DNA, 25 bp, Homo sapien
tcttagccttctctgggtcaggaca

SEQ ID NO: 2054658 - DNA, 25 bp, Homo sapien
cttgtgtcttagccttctctgggtc

SEQ ID NO: 2054659 - DNA, 25 bp, Homo sapien
tttcttgtgtcttagccttctctgg

SEQ ID NO: 2054660 - DNA, 25 bp, Homo sapien
tgtgtcttagccttctctgggtcag

SEQ ID NO: 2054661 - DNA, 25 bp, Homo sapien
accgccatcacacccttccgtttgg

SEQ ID NO: 2054662 - DNA, 25 bp, Homo sapien
tctgaaagcctcatgtcgtatagct

SEQ ID NO: 2054663 - DNA, 25 bp, Homo sapien
gatacttggtgtgattaccgccatc

SEQ ID NO: 2054664 - DNA, 25 bp, Homo sapien
tcgtatagcttctcaggatacttgg

SEQ ID NO: 2054665 - DNA, 25 bp, Homo sapien
ctgcaaatttcacaatcccagaata

SEQ ID NO: 2054666 - DNA, 25 bp, Homo sapien
tgcaaatttcacaatcccagaatac

SEQ ID NO: 2054667 - DNA, 25 bp, Homo sapien
gcaaatttcacaatcccagaatact

SEQ ID NO: 2054668 - DNA, 25 bp, Homo sapien
cccagaatactgtgctgaagatatg

SEQ ID NO: 2054669 - DNA, 25 bp, Homo sapien
acatgtggtgactctagctggctcc

SEQ ID NO: 2054670 - DNA, 25 bp, Homo sapien
gtggtgcctgacacatgtggtgact

SEQ ID NO: 2054671 - DNA, 25 bp, Homo sapien
ctgacacatgtggtgactctagctg

SEQ ID NO: 2054672 - DNA, 25 bp, Homo sapien
tctagctggctccagtcatcactgt

SEQ ID NO: 2054673 - DNA, 25 bp, Homo sapien
cttgttaataggacaggtagagcca

SEQ ID NO: 2054674 - DNA, 25 bp, Homo sapien
cagtaatgaggaggtactcttccat

SEQ ID NO: 2054675 - DNA, 25 bp, Homo sapien
ctcttccatgataaaccctgtgggc

SEQ ID NO: 2054676 - DNA, 25 bp, Homo sapien
aatgaggaggtactcttccatgata

SEQ ID NO: 2054677 - DNA, 25 bp, Homo sapien
ctttcagtaatgaggaggtactctt

SEQ ID NO: 2054678 - DNA, 25 bp, Homo sapien
attctttcacctagcacgcaggctg

SEQ ID NO: 2054679 - DNA, 25 bp, Homo sapien
ctgttttccctttgcgaaatcccat

SEQ ID NO: 2054680 - DNA, 25 bp, Homo sapien
ctagcacgcaggctgttttcccttt

SEQ ID NO: 2054681 - DNA, 25 bp, Homo sapien
tcacctagcacgcaggctgttttcc

SEQ ID NO: 2054682 - DNA, 25 bp, Homo sapien
gaaggttttgacaagtcacacttat

SEQ ID NO: 2054683 - DNA, 25 bp, Homo sapien
cttctgtgtatgatgcccactggcc

SEQ ID NO: 2054684 - DNA, 25 bp, Homo sapien
cctcttcaccaaggcaagctgcagg

SEQ ID NO: 2054685 - DNA, 25 bp, Homo sapien
cacattactgattctagcagttgct

SEQ ID NO: 2054686 - DNA, 25 bp, Homo sapien
taagggaagcctcaagaatccagtg

SEQ ID NO: 2054687 - DNA, 25 bp, Homo sapien
tccagtgcagaccagcatgaggata

SEQ ID NO: 2054688 - DNA, 25 bp, Homo sapien
gaggcaccattatcccatgtgacaa

SEQ ID NO: 2054689 - DNA, 25 bp, Homo sapien
tcatagcggcggatgaactgcacct

SEQ ID NO: 2054690 - DNA, 25 bp, Homo sapien
agcattctcagattaggcctcagat

SEQ ID NO: 2054691 - DNA, 25 bp, Homo sapien
cagattaagaccgtagagaagtgac

SEQ ID NO: 2054692 - DNA, 25 bp, Homo sapien
ccgtagagaagtgacaccctctttg

SEQ ID NO: 2054693 - DNA, 25 bp, Homo sapien
cagattaggcctcagattaagaccg

SEQ ID NO: 2054694 - DNA, 25 bp, Homo sapien
gatgccactctcacatgaaagtaaa

SEQ ID NO: 2054695 - DNA, 25 bp, Homo sapien
tcatgtccaagctttaaatccccga

SEQ ID NO: 2054696 - DNA, 25 bp, Homo sapien
taaatccccgatttggggatgccac

SEQ ID NO: 2054697 - DNA, 25 bp, Homo sapien
ggatgccactctcacatgaaagtaa

SEQ ID NO: 2054698 - DNA, 25 bp, Homo sapien
cttgaatttctgtacttgctgtcat

SEQ ID NO: 2054699 - DNA, 25 bp, Homo sapien
ctttgtaaatcttgaatttctgtac

SEQ ID NO: 2054700 - DNA, 25 bp, Homo sapien
atcttgaatttctgtacttgctgtc

SEQ ID NO: 2054701 - DNA, 25 bp, Homo sapien
gtaaatcttgaatttctgtacttgc

SEQ ID NO: 2054702 - DNA, 25 bp, Homo sapien
gttgcatttggttgtcctcggttgt

SEQ ID NO: 2054703 - DNA, 25 bp, Homo sapien
acagtgggatttttcgaagtggagg

SEQ ID NO: 2054704 - DNA, 25 bp, Homo sapien
agtgggatttttcgaagtggaggag

SEQ ID NO: 2054705 - DNA, 25 bp, Homo sapien
tgggatttttcgaagtggaggagat

SEQ ID NO: 2054706 - DNA, 25 bp, Homo sapien
ctacaagtagtcaaaggcttttggc

SEQ ID NO: 2054707 - DNA, 25 bp, Homo sapien
tcaatatctaatgcaataatagctt

SEQ ID NO: 2054708 - DNA, 25 bp, Homo sapien
catcttgccttattctgtccatcac

SEQ ID NO: 2054709 - DNA, 25 bp, Homo sapien
ctgtccatcactctggaatggagac

SEQ ID NO: 2054710 - DNA, 25 bp, Homo sapien
tccatcactctggaatggagacatt

SEQ ID NO: 2054711 - DNA, 25 bp, Homo sapien
gccttattctgtccatcactctgga

SEQ ID NO: 2054712 - DNA, 25 bp, Homo sapien
tgcctttcccttatagtactggtca

SEQ ID NO: 2054713 - DNA, 25 bp, Homo sapien
tactctcctgcttggctatgccaac

SEQ ID NO: 2054714 - DNA, 25 bp, Homo sapien
agttagtttctatatttgggtcatt

SEQ ID NO: 2054715 - DNA, 25 bp, Homo sapien
tcccttatagtactggtcaactgta

SEQ ID NO: 2054716 - DNA, 25 bp, Homo sapien
cctaatgaacagtccactttatgtg

SEQ ID NO: 2054717 - DNA, 25 bp, Homo sapien
ctaatgaacagtccactttatgtgt

SEQ ID NO: 2054718 - DNA, 25 bp, Homo sapien
tcctaatgaacagtccactttatgt

SEQ ID NO: 2054719 - DNA, 25 bp, Homo sapien
taatgaacagtccactttatgtgtt

SEQ ID NO: 2054720 - DNA, 25 bp, Homo sapien
tcttgattggatttcagacatggaa

SEQ ID NO: 2054721 - DNA, 25 bp, Homo sapien
gagccagaacatctttgagggtcac

SEQ ID NO: 2054722 - DNA, 25 bp, Homo sapien
gagaagatgaattctaagggagcca

SEQ ID NO: 2054723 - DNA, 25 bp, Homo sapien
gacatggaatagatttctaagatgg

SEQ ID NO: 2054724 - DNA, 25 bp, Homo sapien
atcccagcaacaggtgggatagtct

SEQ ID NO: 2054725 - DNA, 25 bp, Homo sapien
ccagcaacaggtgggatagtctcag

SEQ ID NO: 2054726 - DNA, 25 bp, Homo sapien
cccagcaacaggtgggatagtctca

SEQ ID NO: 2054727 - DNA, 25 bp, Homo sapien
agcaacaggtgggatagtctcagaa

SEQ ID NO: 2054728 - DNA, 25 bp, Homo sapien
taagcagccctacacttgcaattgt

SEQ ID NO: 2054729 - DNA, 25 bp, Homo sapien
tctgtgagctctggtaaactatgtc

SEQ ID NO: 2054730 - DNA, 25 bp, Homo sapien
tctagtagggctcttttgagaaaca

SEQ ID NO: 2054731 - DNA, 25 bp, Homo sapien
gaccaaagtactatcctaagcagcc

SEQ ID NO: 2054732 - DNA, 25 bp, Homo sapien
gttgtgcttgaaggtaagatgccat

SEQ ID NO: 2054733 - DNA, 25 bp, Homo sapien
gcatgtgttgtgcttgaaggtaaga

SEQ ID NO: 2054734 - DNA, 25 bp, Homo sapien
ccttgagtaaaacaatacccaatgg

SEQ ID NO: 2054735 - DNA, 25 bp, Homo sapien
aatacccaatggcatgtgttgtgct

SEQ ID NO: 2054736 - DNA, 25 bp, Homo sapien
gggttgagatcataacataccatcc

SEQ ID NO: 2054737 - DNA, 25 bp, Homo sapien
ccatggtattaattagtctttcagg

SEQ ID NO: 2054738 - DNA, 25 bp, Homo sapien
gatctgagagtccataatgaatttt

SEQ ID NO: 2054739 - DNA, 25 bp, Homo sapien
tagtctttctatcctgagcaaacag

SEQ ID NO: 2054740 - DNA, 25 bp, Homo sapien
tctgaatccatatttctgcaactga

SEQ ID NO: 2054741 - DNA, 25 bp, Homo sapien
aatccatatttctgcaactgaacaa

SEQ ID NO: 2054742 - DNA, 25 bp, Homo sapien
ccatatttctgcaactgaacaactc

SEQ ID NO: 2054743 - DNA, 25 bp, Homo sapien
tttctgcaactgaacaactcccttc

SEQ ID NO: 2054744 - DNA, 25 bp, Homo sapien
tgggactcaaaataatggaaaagct

SEQ ID NO: 2054745 - DNA, 25 bp, Homo sapien
gttttgcgtgtttcttgtgggactc

SEQ ID NO: 2054746 - DNA, 25 bp, Homo sapien
tgacagcaagtcgttgttttgcgtg

SEQ ID NO: 2054747 - DNA, 25 bp, Homo sapien
tcattctgacagcaagtcgttgttt

SEQ ID NO: 2054748 - DNA, 25 bp, Homo sapien
gattgctcccagtattcctctgtcc

SEQ ID NO: 2054749 - DNA, 25 bp, Homo sapien
tgttttttagattgctcccagtatt

SEQ ID NO: 2054750 - DNA, 25 bp, Homo sapien
ttttagattgctcccagtattcctc

SEQ ID NO: 2054751 - DNA, 25 bp, Homo sapien
tagattgctcccagtattcctctgt

SEQ ID NO: 2054752 - DNA, 25 bp, Homo sapien
aattaagatactccttgtggttcat

SEQ ID NO: 2054753 - DNA, 25 bp, Homo sapien
caaattaagatactccttgtggttc

SEQ ID NO: 2054754 - DNA, 25 bp, Homo sapien
aaattaagatactccttgtggttca

SEQ ID NO: 2054755 - DNA, 25 bp, Homo sapien
ttcaaattaagatactccttgtggt

SEQ ID NO: 2054756 - DNA, 25 bp, Homo sapien
ccaacaatgtcggaagtgacaatat

SEQ ID NO: 2054757 - DNA, 25 bp, Homo sapien
tcagagagtacggcgaagttttaaa

SEQ ID NO: 2054758 - DNA, 25 bp, Homo sapien
tgtcggaagtgacaatatgaatacg

SEQ ID NO: 2054759 - DNA, 25 bp, Homo sapien
atatgaatacgacttcctgagccac

SEQ ID NO: 2054760 - DNA, 25 bp, Homo sapien
ctagactgataaccttccaggtacc

SEQ ID NO: 2054761 - DNA, 25 bp, Homo sapien
cggttcagcactagactgataacct

SEQ ID NO: 2054762 - DNA, 25 bp, Homo sapien
cagcactagactgataaccttccag

SEQ ID NO: 2054763 - DNA, 25 bp, Homo sapien
tcacggttcagcactagactgataa

SEQ ID NO: 2054764 - DNA, 25 bp, Homo sapien
ctatcatctgtggctagggataaag

SEQ ID NO: 2054765 - DNA, 25 bp, Homo sapien
tctgtggctagggataaagaattaa

SEQ ID NO: 2054766 - DNA, 25 bp, Homo sapien
gaattaaagcgacctgtggtatcca

SEQ ID NO: 2054767 - DNA, 25 bp, Homo sapien
ggataaagaattaaagcgacctgtg

SEQ ID NO: 2054768 - DNA, 25 bp, Homo sapien
cattatctcctcgaattccattatc

SEQ ID NO: 2054769 - DNA, 25 bp, Homo sapien
tcttcattcacctcgctcttccact

SEQ ID NO: 2054770 - DNA, 25 bp, Homo sapien
tcaacggggtgttaccccatcatct

SEQ ID NO: 2054771 - DNA, 25 bp, Homo sapien
tcatctccttgagctccattatctc

SEQ ID NO: 2054772 - DNA, 25 bp, Homo sapien
tcttcatatttgaccgactgagggt

SEQ ID NO: 2054773 - DNA, 25 bp, Homo sapien
gactgagggtgcactatccctgagc

SEQ ID NO: 2054774 - DNA, 25 bp, Homo sapien
tctggcaatccagtttataaggctg

SEQ ID NO: 2054775 - DNA, 25 bp, Homo sapien
gctgtgggtagaaaaagatccgaaa

SEQ ID NO: 2054776 - DNA, 25 bp, Homo sapien
gagagggagtaacgctgagaatacc

SEQ ID NO: 2054777 - DNA, 25 bp, Homo sapien
tagagagggagtaacgctgagaata

SEQ ID NO: 2054778 - DNA, 25 bp, Homo sapien
gaagtagagagggagtaacgctgag

SEQ ID NO: 2054779 - DNA, 25 bp, Homo sapien
aagtagagagggagtaacgctgaga

SEQ ID NO: 2054780 - DNA, 25 bp, Homo sapien
tgtataacattgtctcttctcgttc

SEQ ID NO: 2054781 - DNA, 25 bp, Homo sapien
tataacattgtctcttctcgttctc

SEQ ID NO: 2054782 - DNA, 25 bp, Homo sapien
gaacttctatagctattatgaatct

SEQ ID NO: 2054783 - DNA, 25 bp, Homo sapien
ctttctcttatcagaacttctatag

SEQ ID NO: 2054784 - DNA, 25 bp, Homo sapien
gctagaaaagctaacccacaaagtc

SEQ ID NO: 2054785 - DNA, 25 bp, Homo sapien
gctaacattcctaacattttgcttt

SEQ ID NO: 2054786 - DNA, 25 bp, Homo sapien
gattgtttaattgcaagctagaaaa

SEQ ID NO: 2054787 - DNA, 25 bp, Homo sapien
aagaggtctttgttcccttgattgt

SEQ ID NO: 2054788 - DNA, 25 bp, Homo sapien
agcggaaaaccgcagctcatgctgc

SEQ ID NO: 2054789 - DNA, 25 bp, Homo sapien
tcatgctgccagattgggattcggc

SEQ ID NO: 2054790 - DNA, 25 bp, Homo sapien
gccaaactgggctagcgcatctgag

SEQ ID NO: 2054791 - DNA, 25 bp, Homo sapien
cctgttcttccggaagcagtttggg

SEQ ID NO: 2054792 - DNA, 25 bp, Homo sapien
gctgcagtggatagctgatcatttg

SEQ ID NO: 2054793 - DNA, 25 bp, Homo sapien
tgcagtggatagctgatcatttgca

SEQ ID NO: 2054794 - DNA, 25 bp, Homo sapien
agctgcagtggatagctgatcattt

SEQ ID NO: 2054795 - DNA, 25 bp, Homo sapien
ctgcagtggatagctgatcatttgc

SEQ ID NO: 2054796 - DNA, 25 bp, Homo sapien
tcctgggctttcaattcagtgacaa

SEQ ID NO: 2054797 - DNA, 25 bp, Homo sapien
ttccagagcaaatgagtttgcatga

SEQ ID NO: 2054798 - DNA, 25 bp, Homo sapien
tgcagggtaaaaatcttccgattgg

SEQ ID NO: 2054799 - DNA, 25 bp, Homo sapien
gggcagccttcagacctgagtaaga

SEQ ID NO: 2054800 - DNA, 25 bp, Homo sapien
tctgtgggctagtttattatggatc

SEQ ID NO: 2054801 - DNA, 25 bp, Homo sapien
gctagtttattatggatcagatcaa

SEQ ID NO: 2054802 - DNA, 25 bp, Homo sapien
ctattgtttctgtgggctagtttat

SEQ ID NO: 2054803 - DNA, 25 bp, Homo sapien
gtttctgtgggctagtttattatgg

SEQ ID NO: 2054804 - DNA, 25 bp, Homo sapien
tcctcttagtagatcaatcccagga

SEQ ID NO: 2054805 - DNA, 25 bp, Homo sapien
ccttgttgattaatgggcctttggg

SEQ ID NO: 2054806 - DNA, 25 bp, Homo sapien
tgatttttgattacttcttgcagga

SEQ ID NO: 2054807 - DNA, 25 bp, Homo sapien
taagtgttccatttcaccacaacca

SEQ ID NO: 2054808 - DNA, 25 bp, Homo sapien
catggtatgaagactgcgaaggaca

SEQ ID NO: 2054809 - DNA, 25 bp, Homo sapien
tggtatgaagactgcgaaggacaaa

SEQ ID NO: 2054810 - DNA, 25 bp, Homo sapien
gtcatggtatgaagactgcgaagga

SEQ ID NO: 2054811 - DNA, 25 bp, Homo sapien
gagtcatggtatgaagactgcgaag

SEQ ID NO: 2054812 - DNA, 25 bp, Homo sapien
gaataaactgtgctcaatataaaag

SEQ ID NO: 2054813 - DNA, 25 bp, Homo sapien
tagtataacctgacaccgggaagaa

SEQ ID NO: 2054814 - DNA, 25 bp, Homo sapien
gtgagctggcaatagagtgtaaaac

SEQ ID NO: 2054815 - DNA, 25 bp, Homo sapien
aactggtgagagtacaatgtgagct

SEQ ID NO: 2054816 - DNA, 25 bp, Homo sapien
taagtcccagtgaatgttggtggtg

SEQ ID NO: 2054817 - DNA, 25 bp, Homo sapien
gcttttccaagagccttcctgatat

SEQ ID NO: 2054818 - DNA, 25 bp, Homo sapien
tctttcccgtctccagctagcatca

SEQ ID NO: 2054819 - DNA, 25 bp, Homo sapien
gcttttcgtttctcaaacagatggg

SEQ ID NO: 2054820 - DNA, 25 bp, Homo sapien
tggcaatacactttactgatataat

SEQ ID NO: 2054821 - DNA, 25 bp, Homo sapien
ctcttgatccctgaagactaaatgg

SEQ ID NO: 2054822 - DNA, 25 bp, Homo sapien
gatccctgaagactaaatggcaata

SEQ ID NO: 2054823 - DNA, 25 bp, Homo sapien
taaatggcaatacactttactgata

SEQ ID NO: 2054824 - DNA, 25 bp, Homo sapien
gtggcactctattaacttatggaaa

SEQ ID NO: 2054825 - DNA, 25 bp, Homo sapien
ggcactctattaacttatggaaaac

SEQ ID NO: 2054826 - DNA, 25 bp, Homo sapien
ctttgtggcactctattaacttatg

SEQ ID NO: 2054827 - DNA, 25 bp, Homo sapien
ttgtggcactctattaacttatgga

SEQ ID NO: 2054828 - DNA, 25 bp, Homo sapien
caagggaaacctcattagagaggat

SEQ ID NO: 2054829 - DNA, 25 bp, Homo sapien
gattttcttagttagcagggcttcg

SEQ ID NO: 2054830 - DNA, 25 bp, Homo sapien
ccttttgttctttagcgcagtcaag

SEQ ID NO: 2054831 - DNA, 25 bp, Homo sapien
tgataatatatagtagtaatacccc

SEQ ID NO: 2054832 - DNA, 25 bp, Homo sapien
tccgtagaaacttttcttactcagc

SEQ ID NO: 2054833 - DNA, 25 bp, Homo sapien
gggacactttagaaatccacatagt

SEQ ID NO: 2054834 - DNA, 25 bp, Homo sapien
catagtacatgccagaagtttaaag

SEQ ID NO: 2054835 - DNA, 25 bp, Homo sapien
tcagtggcataagagtggtccgtag

SEQ ID NO: 2054836 - DNA, 25 bp, Homo sapien
ttggctaagccatgatgccatctta

SEQ ID NO: 2054837 - DNA, 25 bp, Homo sapien
gccatcttatttttgtggcattggc

SEQ ID NO: 2054838 - DNA, 25 bp, Homo sapien
ttatttttgtggcattggccacatt

SEQ ID NO: 2054839 - DNA, 25 bp, Homo sapien
tggctaagccatgatgccatcttat

SEQ ID NO: 2054840 - DNA, 25 bp, Homo sapien
gtagtcctcttcttaggatccccat

SEQ ID NO: 2054841 - DNA, 25 bp, Homo sapien
tgtagtcctcttcttaggatcccca

SEQ ID NO: 2054842 - DNA, 25 bp, Homo sapien
ctgtagtcctcttcttaggatcccc

SEQ ID NO: 2054843 - DNA, 25 bp, Homo sapien
aattttgtgcaaactttccatggaa

SEQ ID NO: 2054844 - DNA, 25 bp, Homo sapien
tactataaagcttataaaactggat

SEQ ID NO: 2054845 - DNA, 25 bp, Homo sapien
ttactataaagcttataaaactgga

SEQ ID NO: 2054846 - DNA, 25 bp, Homo sapien
tggaattttgtgcaaactttccatg

SEQ ID NO: 2054847 - DNA, 25 bp, Homo sapien
cagcaacatactaagcatcctaagt

SEQ ID NO: 2054848 - DNA, 25 bp, Homo sapien
taatattgtatgactgtatgttgta

SEQ ID NO: 2054849 - DNA, 25 bp, Homo sapien
cttgtgttgtagattcatgatgcac

SEQ ID NO: 2054850 - DNA, 25 bp, Homo sapien
agacatttgaatagtgaacattttt

SEQ ID NO: 2054851 - DNA, 25 bp, Homo sapien
actatttgaggcattttgaattgta

SEQ ID NO: 2054852 - DNA, 25 bp, Homo sapien
tgaggcattttgaattgtatctgtt

SEQ ID NO: 2054853 - DNA, 25 bp, Homo sapien
tattgtaatatggagttgtattgcc

SEQ ID NO: 2054854 - DNA, 25 bp, Homo sapien
tgtaatatggagttgtattgccatt

SEQ ID NO: 2054855 - DNA, 25 bp, Homo sapien
tggctctactcagttcctgaggtct

SEQ ID NO: 2054856 - DNA, 25 bp, Homo sapien
gtatccacagtagcacgtgcacatg

SEQ ID NO: 2054857 - DNA, 25 bp, Homo sapien
gaggtcttccattggtatccacagt

SEQ ID NO: 2054858 - DNA, 25 bp, Homo sapien
cagtagcacgtgcacatgagagctc

SEQ ID NO: 2054859 - DNA, 25 bp, Homo sapien
tgtggcccagaagtgaataattact

SEQ ID NO: 2054860 - DNA, 25 bp, Homo sapien
taaaaatactgtccatcagtctgga

SEQ ID NO: 2054861 - DNA, 25 bp, Homo sapien
tcttggtgaaataatgcctgtggcc

SEQ ID NO: 2054862 - DNA, 25 bp, Homo sapien
tctggaaaagtactgtcttggtgaa

SEQ ID NO: 2054863 - DNA, 25 bp, Homo sapien
gggtgctatagtcagagtctgtatc

SEQ ID NO: 2054864 - DNA, 25 bp, Homo sapien
gatgtcctctgaacttgtcgatggc

SEQ ID NO: 2054865 - DNA, 25 bp, Homo sapien
atactgtgcagtcctcaacccaggg

SEQ ID NO: 2054866 - DNA, 25 bp, Homo sapien
tcctacacatagaacacaaggtgag

SEQ ID NO: 2054867 - DNA, 25 bp, Homo sapien
ctttttccactcttcgcagcctttt

SEQ ID NO: 2054868 - DNA, 25 bp, Homo sapien
ccactcttcgcagccttttgattta

SEQ ID NO: 2054869 - DNA, 25 bp, Homo sapien
cagccttttgatttattgcctgcct

SEQ ID NO: 2054870 - DNA, 25 bp, Homo sapien
tccttttcaccatatgtctttttcc

SEQ ID NO: 2054871 - DNA, 25 bp, Homo sapien
cagattctttctgtagttctgtcat

SEQ ID NO: 2054872 - DNA, 25 bp, Homo sapien
ctcagattctttctgtagttctgtc

SEQ ID NO: 2054873 - DNA, 25 bp, Homo sapien
cagggactcagattctttctgtagt

SEQ ID NO: 2054874 - DNA, 25 bp, Homo sapien
gactcagattctttctgtagttctg

SEQ ID NO: 2054875 - DNA, 25 bp, Homo sapien
gatggggtccatagcagccatgtcc

SEQ ID NO: 2054876 - DNA, 25 bp, Homo sapien
aaagatggggtccatagcagccatg

SEQ ID NO: 2054877 - DNA, 25 bp, Homo sapien
agatggggtccatagcagccatgtc

SEQ ID NO: 2054878 - DNA, 25 bp, Homo sapien
tcaaagatggggtccatagcagcca

SEQ ID NO: 2054879 - DNA, 25 bp, Homo sapien
tgccatccagcctgctgctaagaat

SEQ ID NO: 2054880 - DNA, 25 bp, Homo sapien
gagcttcaaacttgtaaactacatg

SEQ ID NO: 2054881 - DNA, 25 bp, Homo sapien
tctcattttggatatataagaacat

SEQ ID NO: 2054882 - DNA, 25 bp, Homo sapien
tgctaagaatcattattggagtatt

SEQ ID NO: 2054883 - DNA, 25 bp, Homo sapien
gtttcccatggctaacaggtccctg

SEQ ID NO: 2054884 - DNA, 25 bp, Homo sapien
tgtgctgtaggcaaacgaccccatt

SEQ ID NO: 2054885 - DNA, 25 bp, Homo sapien
gcacaaagcgatggacttcttgcat

SEQ ID NO: 2054886 - DNA, 25 bp, Homo sapien
caggtccctgctgataaccagcaca

SEQ ID NO: 2054887 - DNA, 25 bp, Homo sapien
aaaagtagagggattgtcattatag

SEQ ID NO: 2054888 - DNA, 25 bp, Homo sapien
aaagtagagggattgtcattatagg

SEQ ID NO: 2054889 - DNA, 25 bp, Homo sapien
taaaagtagagggattgtcattata

SEQ ID NO: 2054890 - DNA, 25 bp, Homo sapien
cttgtcctttttcagctttgctgat

SEQ ID NO: 2054891 - DNA, 25 bp, Homo sapien
tgtcctttttcagctttgctgatgg

SEQ ID NO: 2054892 - DNA, 25 bp, Homo sapien
tcctttttcagctttgctgatggcc

SEQ ID NO: 2054893 - DNA, 25 bp, Homo sapien
ctttttcagctttgctgatggccat

SEQ ID NO: 2054894 - DNA, 25 bp, Homo sapien
catttcagcacttcatttgctgtcc

SEQ ID NO: 2054895 - DNA, 25 bp, Homo sapien
taatgacatcagactcatctgagat

SEQ ID NO: 2054896 - DNA, 25 bp, Homo sapien
ttttctagtaataatgacatcagac

SEQ ID NO: 2054897 - DNA, 25 bp, Homo sapien
gagatgtgaagtatcttccatttca

SEQ ID NO: 2054898 - DNA, 25 bp, Homo sapien
aatatcttccccttccttgatgtct

SEQ ID NO: 2054899 - DNA, 25 bp, Homo sapien
acaaatatcttccccttccttgatg

SEQ ID NO: 2054900 - DNA, 25 bp, Homo sapien
aaatatcttccccttccttgatgtc

SEQ ID NO: 2054901 - DNA, 25 bp, Homo sapien
tatcttccccttccttgatgtcttc

SEQ ID NO: 2054902 - DNA, 25 bp, Homo sapien
ggtcacaccttcagcatccagccac

SEQ ID NO: 2054903 - DNA, 25 bp, Homo sapien
tcacaccttcagcatccagccacat

SEQ ID NO: 2054904 - DNA, 25 bp, Homo sapien
gtcacaccttcagcatccagccaca

SEQ ID NO: 2054905 - DNA, 25 bp, Homo sapien
aggtgccagtgtggcagagggccag

SEQ ID NO: 2054906 - DNA, 25 bp, Homo sapien
ttcaggtgccagtgtggcagagggc

SEQ ID NO: 2054907 - DNA, 25 bp, Homo sapien
gtgccagtgtggcagagggccagcc

SEQ ID NO: 2054908 - DNA, 25 bp, Homo sapien
agagggccagcccaggaaagatgaa

SEQ ID NO: 2054909 - DNA, 25 bp, Homo sapien
gagattcactcttcattgaataagg

SEQ ID NO: 2054910 - DNA, 25 bp, Homo sapien
ggtcattaggccgagattcactctt

SEQ ID NO: 2054911 - DNA, 25 bp, Homo sapien
tctgccatctggtcattaggccgag

SEQ ID NO: 2054912 - DNA, 25 bp, Homo sapien
tcattgaataaggaccatctaccat

SEQ ID NO: 2054913 - DNA, 25 bp, Homo sapien
tccgaatggtatgattcagccaaat

SEQ ID NO: 2054914 - DNA, 25 bp, Homo sapien
gctctttcacagtatggttcatcaa

SEQ ID NO: 2054915 - DNA, 25 bp, Homo sapien
cttagtttcctaatccgaatggtat

SEQ ID NO: 2054916 - DNA, 25 bp, Homo sapien
aatgttcttctcaatcatgtctcca

SEQ ID NO: 2054917 - DNA, 25 bp, Homo sapien
ctttttcaggtatgcatcagccttc

SEQ ID NO: 2054918 - DNA, 25 bp, Homo sapien
catgcagggtacctgtccctctctt

SEQ ID NO: 2054919 - DNA, 25 bp, Homo sapien
taagatttacttcatgcagggtacc

SEQ ID NO: 2054920 - DNA, 25 bp, Homo sapien
tttttcaggtatgcatcagccttcc

SEQ ID NO: 2054921 - DNA, 25 bp, Homo sapien
tcctgcttgcaaagatgcagagaca

SEQ ID NO: 2054922 - DNA, 25 bp, Homo sapien
caataagacacttggataagccagt

SEQ ID NO: 2054923 - DNA, 25 bp, Homo sapien
gacaggattattgccacagctgcgc

SEQ ID NO: 2054924 - DNA, 25 bp, Homo sapien
tcacaatagtgcatgtggtgagacc

SEQ ID NO: 2054925 - DNA, 25 bp, Homo sapien
tgtggtcacctctgaaaaagcagga

SEQ ID NO: 2054926 - DNA, 25 bp, Homo sapien
cagggctccatacggtaggagacat

SEQ ID NO: 2054927 - DNA, 25 bp, Homo sapien
gaagcagggctccatacggtaggag

SEQ ID NO: 2054928 - DNA, 25 bp, Homo sapien
gtgtggtcacctctgaaaaagcagg

SEQ ID NO: 2054929 - DNA, 25 bp, Homo sapien
gaaggtgaccccaggcacgcagcag

SEQ ID NO: 2054930 - DNA, 25 bp, Homo sapien
cagtgcgggaaaccagcaggcagca

SEQ ID NO: 2054931 - DNA, 25 bp, Homo sapien
caggcagcatgaagggcagaaaggc

SEQ ID NO: 2054932 - DNA, 25 bp, Homo sapien
aatcaaccaactcagggacaggtgg

SEQ ID NO: 2054933 - DNA, 25 bp, Homo sapien
gaagggagaaccagaaggcaattag

SEQ ID NO: 2054934 - DNA, 25 bp, Homo sapien
aggcatgtgaccaggggaagggaga

SEQ ID NO: 2054935 - DNA, 25 bp, Homo sapien
tcaagcagaggttagcaggtaagaa

SEQ ID NO: 2054936 - DNA, 25 bp, Homo sapien
cagaggttagcaggtaagaagggtg

SEQ ID NO: 2054937 - DNA, 25 bp, Homo sapien
agcaggagggtaataataggaggca

SEQ ID NO: 2054938 - DNA, 25 bp, Homo sapien
agtagcaggagggtaataataggag

SEQ ID NO: 2054939 - DNA, 25 bp, Homo sapien
tagcaggagggtaataataggaggc

SEQ ID NO: 2054940 - DNA, 25 bp, Homo sapien
agagtagcaggagggtaataatagg

SEQ ID NO: 2054941 - DNA, 25 bp, Homo sapien
gaaaaagcattgagagaagaacctc

SEQ ID NO: 2054942 - DNA, 25 bp, Homo sapien
ctgggaaaaagcattgagagaagaa

SEQ ID NO: 2054943 - DNA, 25 bp, Homo sapien
aaagcattgagagaagaacctcacc

SEQ ID NO: 2054944 - DNA, 25 bp, Homo sapien
cattgagagaagaacctcaccaccc

SEQ ID NO: 2054945 - DNA, 25 bp, Homo sapien
aaacatattgttagtgatctctgca

SEQ ID NO: 2054946 - DNA, 25 bp, Homo sapien
cagtaagggttttggtcttcagcag

SEQ ID NO: 2054947 - DNA, 25 bp, Homo sapien
gcccgtatgaaaagcatactctttg

SEQ ID NO: 2054948 - DNA, 25 bp, Homo sapien
ctgattgagtggaggtactggacac

SEQ ID NO: 2054949 - DNA, 25 bp, Homo sapien
gaatctgttactccaaaattactca

SEQ ID NO: 2054950 - DNA, 25 bp, Homo sapien
tctgctgttcggtttccaggctttg

SEQ ID NO: 2054951 - DNA, 25 bp, Homo sapien
gaacacggtgtttaacatacctgaa

SEQ ID NO: 2054952 - DNA, 25 bp, Homo sapien
tcttctttgtacaccaagaacacgg

SEQ ID NO: 2054953 - DNA, 25 bp, Homo sapien
tacctgaaaaaccatatatcacgtg

SEQ ID NO: 2054954 - DNA, 25 bp, Homo sapien
tgcgtgtctctgttagacagggctt

SEQ ID NO: 2054955 - DNA, 25 bp, Homo sapien
taaacgtaactgagtagtgctcttt

SEQ ID NO: 2054956 - DNA, 25 bp, Homo sapien
cgtaactgagtagtgctcttttcat

SEQ ID NO: 2054957 - DNA, 25 bp, Homo sapien
gaaatgtaaacgtaactgagtagtg

SEQ ID NO: 2054958 - DNA, 25 bp, Homo sapien
tgtaaacgtaactgagtagtgctct

SEQ ID NO: 2054959 - DNA, 25 bp, Homo sapien
tactgtcctctagtgaaggtctagt

SEQ ID NO: 2054960 - DNA, 25 bp, Homo sapien
tgtcctctagtgaaggtctagtcat

SEQ ID NO: 2054961 - DNA, 25 bp, Homo sapien
ctttactgtcctctagtgaaggtct

SEQ ID NO: 2054962 - DNA, 25 bp, Homo sapien
ttactgtcctctagtgaaggtctag

SEQ ID NO: 2054963 - DNA, 25 bp, Homo sapien
tttcaccttgttacttgctcctttg

SEQ ID NO: 2054964 - DNA, 25 bp, Homo sapien
tgccttctaactcctggataagcct

SEQ ID NO: 2054965 - DNA, 25 bp, Homo sapien
tctaactcctggataagccttctgt

SEQ ID NO: 2054966 - DNA, 25 bp, Homo sapien
ggtcaatttcaccttgttacttgct

SEQ ID NO: 2054967 - DNA, 25 bp, Homo sapien
cgatctcctggcaatactgttcttt

SEQ ID NO: 2054968 - DNA, 25 bp, Homo sapien
cccctgcctcgatctcctggcaata

SEQ ID NO: 2054969 - DNA, 25 bp, Homo sapien
gcctcgatctcctggcaatactgtt

SEQ ID NO: 2054970 - DNA, 25 bp, Homo sapien
ctcctggcaatactgttctttcgtt

SEQ ID NO: 2054971 - DNA, 25 bp, Homo sapien
tcccaaacacagcacaatataattt

SEQ ID NO: 2054972 - DNA, 25 bp, Homo sapien
gctgtttaccccatcaagtttatct

SEQ ID NO: 2054973 - DNA, 25 bp, Homo sapien
gggtagtacaatagctgatctcagc

SEQ ID NO: 2054974 - DNA, 25 bp, Homo sapien
gctctcagagggttcatgctgagca

SEQ ID NO: 2054975 - DNA, 25 bp, Homo sapien
tgaggcattggtttatcccaccctg

SEQ ID NO: 2054976 - DNA, 25 bp, Homo sapien
ccctctgagagcaagtggatctgag

SEQ ID NO: 2054977 - DNA, 25 bp, Homo sapien
gtttatcccaccctgtctctggcag

SEQ ID NO: 2054978 - DNA, 25 bp, Homo sapien
cctctgagagcaagtggatctgaga

SEQ ID NO: 2054979 - DNA, 25 bp, Homo sapien
taatcagtctctctagacatccctg

SEQ ID NO: 2054980 - DNA, 25 bp, Homo sapien
gtgaacttccttgaataatcagtct

SEQ ID NO: 2054981 - DNA, 25 bp, Homo sapien
ttctcctttgggtgggggagtcatc

SEQ ID NO: 2054982 - DNA, 25 bp, Homo sapien
tagacatccctgtcattctttctcc

SEQ ID NO: 2054983 - DNA, 25 bp, Homo sapien
tttcctgacgtttatgctttatctc

SEQ ID NO: 2054984 - DNA, 25 bp, Homo sapien
ttatctcatctcctaaaatcctact

SEQ ID NO: 2054985 - DNA, 25 bp, Homo sapien
tatctcatctcctaaaatcctactt

SEQ ID NO: 2054986 - DNA, 25 bp, Homo sapien
ggtttcctgacgtttatgctttatc

SEQ ID NO: 2054987 - DNA, 25 bp, Homo sapien
tatctcaggcactgctgaagtctcc

SEQ ID NO: 2054988 - DNA, 25 bp, Homo sapien
atctcaggcactgctgaagtctcca

SEQ ID NO: 2054989 - DNA, 25 bp, Homo sapien
tctcaggcactgctgaagtctccat

SEQ ID NO: 2054990 - DNA, 25 bp, Homo sapien
ctgcaaggtaaaatttggagtcctt

SEQ ID NO: 2054991 - DNA, 25 bp, Homo sapien
tccacttccaatatactctgagaac

SEQ ID NO: 2054992 - DNA, 25 bp, Homo sapien
tttctataaggatgatgaattccac

SEQ ID NO: 2054993 - DNA, 25 bp, Homo sapien
tatttgcagattgccgtcctggctg

SEQ ID NO: 2054994 - DNA, 25 bp, Homo sapien
aaagctgaatcccggtgggtccctg

SEQ ID NO: 2054995 - DNA, 25 bp, Homo sapien
ctgaatcccggtgggtccctgtggt

SEQ ID NO: 2054996 - DNA, 25 bp, Homo sapien
gcacagatgcaagctattgttataa

SEQ ID NO: 2054997 - DNA, 25 bp, Homo sapien
tataaagctgaatcccggtgggtcc

SEQ ID NO: 2054998 - DNA, 25 bp, Homo sapien
tatggctggtctactggcttctgaa

SEQ ID NO: 2054999 - DNA, 25 bp, Homo sapien
cagtctgtgtatttgctcgaagcct

SEQ ID NO: 2055000 - DNA, 25 bp, Homo sapien
ctctatgtcctcaaataatgggcca

SEQ ID NO: 2055001 - DNA, 25 bp, Homo sapien
ttagtgttacattccaaaccagcag

SEQ ID NO: 2055002 - DNA, 25 bp, Homo sapien
caagtatgtggcacccaagggatag

SEQ ID NO: 2055003 - DNA, 25 bp, Homo sapien
aaaataagttgtggtgctgtctgcc

SEQ ID NO: 2055004 - DNA, 25 bp, Homo sapien
gaaaatcattgacacctcagcctgc

SEQ ID NO: 2055005 - DNA, 25 bp, Homo sapien
taagatcagatccatgcagggtggt

SEQ ID NO: 2055006 - DNA, 25 bp, Homo sapien
gattggaatggtactctgataacaa

SEQ ID NO: 2055007 - DNA, 25 bp, Homo sapien
ggcaaaatacaaacatagactttat

SEQ ID NO: 2055008 - DNA, 25 bp, Homo sapien
ctgcaagttaagagattggaatggt

SEQ ID NO: 2055009 - DNA, 25 bp, Homo sapien
tgctcaatcccccaatgaagatctt

SEQ ID NO: 2055010 - DNA, 25 bp, Homo sapien
cagctcctccaagtaaagcagtgtt

SEQ ID NO: 2055011 - DNA, 25 bp, Homo sapien
cacctctgagccatagagcaccttt

SEQ ID NO: 2055012 - DNA, 25 bp, Homo sapien
catacatacatcaagggcttatgca

SEQ ID NO: 2055013 - DNA, 25 bp, Homo sapien
agcacctttcttgaggaaacataca

SEQ ID NO: 2055014 - DNA, 25 bp, Homo sapien
ttacagctgcccacatcacatgccg

SEQ ID NO: 2055015 - DNA, 25 bp, Homo sapien
taatttgtcgacctatgctctctcc

SEQ ID NO: 2055016 - DNA, 25 bp, Homo sapien
ggcgacacagctgggtgaagccaat

SEQ ID NO: 2055017 - DNA, 25 bp, Homo sapien
aacacgtgggtccaaatcaactggc

SEQ ID NO: 2055018 - DNA, 25 bp, Homo sapien
tccgtagtcaggagatggcgacaca

SEQ ID NO: 2055019 - DNA, 25 bp, Homo sapien
cccaggagcttcccaccagtagtgc

SEQ ID NO: 2055020 - DNA, 25 bp, Homo sapien
aaaggacataagaagtctgagccca

SEQ ID NO: 2055021 - DNA, 25 bp, Homo sapien
tttgaaaaggacataagaagtctga

SEQ ID NO: 2055022 - DNA, 25 bp, Homo sapien
tgcgttttgaaaaggacataagaag

SEQ ID NO: 2055023 - DNA, 25 bp, Homo sapien
cacagtgggcgtacagtacactgca

SEQ ID NO: 2055024 - DNA, 25 bp, Homo sapien
ttcagccacagtgggcgtacagtac

SEQ ID NO: 2055025 - DNA, 25 bp, Homo sapien
gcccacttcagccacagtgggcgta

SEQ ID NO: 2055026 - DNA, 25 bp, Homo sapien
ttcaccccataaactgcccacttca

SEQ ID NO: 2055027 - DNA, 25 bp, Homo sapien
ctgaagcaccatatccccaagagaa

SEQ ID NO: 2055028 - DNA, 25 bp, Homo sapien
accatatccccaagagaaatttcct

SEQ ID NO: 2055029 - DNA, 25 bp, Homo sapien
tcagcagcatatgttcaatgaaaca

SEQ ID NO: 2055030 - DNA, 25 bp, Homo sapien
ctatatcagcagcatatgttcaatg

SEQ ID NO: 2055031 - DNA, 25 bp, Homo sapien
gcatatgttcaatgaaacaagacaa

SEQ ID NO: 2055032 - DNA, 25 bp, Homo sapien
gcagcatatgttcaatgaaacaaga

SEQ ID NO: 2055033 - DNA, 25 bp, Homo sapien
tcttccatattttgagtgttatttc

SEQ ID NO: 2055034 - DNA, 25 bp, Homo sapien
gagtgttatttctgacttttatgtt

SEQ ID NO: 2055035 - DNA, 25 bp, Homo sapien
tatttctgacttttatgttacaaag

SEQ ID NO: 2055036 - DNA, 25 bp, Homo sapien
cttttatgttacaaagattcctcat

SEQ ID NO: 2055037 - DNA, 25 bp, Homo sapien
cccagtcaacataacaaagacggca

SEQ ID NO: 2055038 - DNA, 25 bp, Homo sapien
tttcttcggtacttcactctctgcc

SEQ ID NO: 2055039 - DNA, 25 bp, Homo sapien
cggttgatcccagtcaacataacaa

SEQ ID NO: 2055040 - DNA, 25 bp, Homo sapien
cagcagagcggggattggaccaaat

SEQ ID NO: 2055041 - DNA, 25 bp, Homo sapien
aatacacccatgtgctgtccgttga

SEQ ID NO: 2055042 - DNA, 25 bp, Homo sapien
tagcataatgtttcatcagctgcag

SEQ ID NO: 2055043 - DNA, 25 bp, Homo sapien
acccatgtgctgtccgttgacaggg

SEQ ID NO: 2055044 - DNA, 25 bp, Homo sapien
tacacccatgtgctgtccgttgaca

SEQ ID NO: 2055045 - DNA, 25 bp, Homo sapien
gtttcttctgcatgcactaggcttg

SEQ ID NO: 2055046 - DNA, 25 bp, Homo sapien
ggtttcttctgcatgcactaggctt

SEQ ID NO: 2055047 - DNA, 25 bp, Homo sapien
tctgcatgcactaggcttgtataca

SEQ ID NO: 2055048 - DNA, 25 bp, Homo sapien
tcttctgcatgcactaggcttgtat

SEQ ID NO: 2055049 - DNA, 25 bp, Homo sapien
tttgcccctcttcctgattttccat

SEQ ID NO: 2055050 - DNA, 25 bp, Homo sapien
ttttgcccctcttcctgattttcca

SEQ ID NO: 2055051 - DNA, 25 bp, Homo sapien
tcccttgtagtgactatagtggttc

SEQ ID NO: 2055052 - DNA, 25 bp, Homo sapien
tgtagtgactatagtggttctttgc

SEQ ID NO: 2055053 - DNA, 25 bp, Homo sapien
tttgacatcccttgtagtgactata

SEQ ID NO: 2055054 - DNA, 25 bp, Homo sapien
agtgactatagtggttctttgcttg

SEQ ID NO: 2055055 - DNA, 25 bp, Homo sapien
tatttttgataagtgccaagcttaa

SEQ ID NO: 2055056 - DNA, 25 bp, Homo sapien
cctagggatagaagataataatttc

SEQ ID NO: 2055057 - DNA, 25 bp, Homo sapien
gataagtgccaagcttaataggaaa

SEQ ID NO: 2055058 - DNA, 25 bp, Homo sapien
aataaatcgaaatgatcctagggat

SEQ ID NO: 2055059 - DNA, 25 bp, Homo sapien
tagctgccaagcttcataagttcct

SEQ ID NO: 2055060 - DNA, 25 bp, Homo sapien
gctgccaagcttcataagttcctcc

SEQ ID NO: 2055061 - DNA, 25 bp, Homo sapien
caccatagctgccaagcttcataag

SEQ ID NO: 2055062 - DNA, 25 bp, Homo sapien
catagctgccaagcttcataagttc

SEQ ID NO: 2055063 - DNA, 25 bp, Homo sapien
agttcctccagacgctctcattaag

SEQ ID NO: 2055064 - DNA, 25 bp, Homo sapien
gagggtgccccttaagcagcactgg

SEQ ID NO: 2055065 - DNA, 25 bp, Homo sapien
tcttctaccagccatttcggagcat

SEQ ID NO: 2055066 - DNA, 25 bp, Homo sapien
actgcttgttcattaggagggtgcc

SEQ ID NO: 2055067 - DNA, 25 bp, Homo sapien
cagtgattgaaatctctcagcccca

SEQ ID NO: 2055068 - DNA, 25 bp, Homo sapien
taacgttgcagacatgttttccatg

SEQ ID NO: 2055069 - DNA, 25 bp, Homo sapien
ccctcactcactgacaatatcagtg

SEQ ID NO: 2055070 - DNA, 25 bp, Homo sapien
cccagaaaccggagctctccattaa

SEQ ID NO: 2055071 - DNA, 25 bp, Homo sapien
agctgatacagccagtaccacagag

SEQ ID NO: 2055072 - DNA, 25 bp, Homo sapien
gctgatacagccagtaccacagaga

SEQ ID NO: 2055073 - DNA, 25 bp, Homo sapien
tgatacagccagtaccacagagagc

SEQ ID NO: 2055074 - DNA, 25 bp, Homo sapien
ctgatacagccagtaccacagagag

SEQ ID NO: 2055075 - DNA, 25 bp, Homo sapien
ccaagcgaaaatacatttgaatctc

SEQ ID NO: 2055076 - DNA, 25 bp, Homo sapien
aaatgacatgtcaccactgtggctt

SEQ ID NO: 2055077 - DNA, 25 bp, Homo sapien
tccccatttttatatccaagcgaaa

SEQ ID NO: 2055078 - DNA, 25 bp, Homo sapien
tgcacagaatcaaaagctagggatc

SEQ ID NO: 2055079 - DNA, 25 bp, Homo sapien
cactattgttgaggaaccacttgag

SEQ ID NO: 2055080 - DNA, 25 bp, Homo sapien
ccacttgagaagtgatatgcatgac

SEQ ID NO: 2055081 - DNA, 25 bp, Homo sapien
ggaggtaggctcaaatctcattgct

SEQ ID NO: 2055082 - DNA, 25 bp, Homo sapien
tccgataaaagtagggcaaagcttg

SEQ ID NO: 2055083 - DNA, 25 bp, Homo sapien
ccttcaggtgcccactgctctcctt

SEQ ID NO: 2055084 - DNA, 25 bp, Homo sapien
cacagttgcatcactgtatttggca

SEQ ID NO: 2055085 - DNA, 25 bp, Homo sapien
tatttggcaggctgatctttggtac

SEQ ID NO: 2055086 - DNA, 25 bp, Homo sapien
ggtacattgtgaggtcagaagagct

SEQ ID NO: 2055087 - DNA, 25 bp, Homo sapien
ctgcttctcttagaggtatcatatc

SEQ ID NO: 2055088 - DNA, 25 bp, Homo sapien
cttagaggtatcatatctgcattct

SEQ ID NO: 2055089 - DNA, 25 bp, Homo sapien
ttctcttagaggtatcatatctgca

SEQ ID NO: 2055090 - DNA, 25 bp, Homo sapien
tctcttagaggtatcatatctgcat

SEQ ID NO: 2055091 - DNA, 25 bp, Homo sapien
caagagctcccatatgacagcttca

SEQ ID NO: 2055092 - DNA, 25 bp, Homo sapien
tggtgagcagaaatatatcgttcct

SEQ ID NO: 2055093 - DNA, 25 bp, Homo sapien
aaagagtcttgtggaagtaccaacg

SEQ ID NO: 2055094 - DNA, 25 bp, Homo sapien
tgttaactgctaattgggatgatcc

SEQ ID NO: 2055095 - DNA, 25 bp, Homo sapien
gacattgcttaaggttctggccata

SEQ ID NO: 2055096 - DNA, 25 bp, Homo sapien
taaagcagaccacaatgctctaggc

SEQ ID NO: 2055097 - DNA, 25 bp, Homo sapien
taagaaatgcctaggtctccgactc

SEQ ID NO: 2055098 - DNA, 25 bp, Homo sapien
agcatggtgcattgtaacgtccttg

SEQ ID NO: 2055099 - DNA, 25 bp, Homo sapien
cagctaaaaggcaagactcttagca

SEQ ID NO: 2055100 - DNA, 25 bp, Homo sapien
gcaagactcttagcactcagtttct

SEQ ID NO: 2055101 - DNA, 25 bp, Homo sapien
catcttcaaactgttgacagctaaa

SEQ ID NO: 2055102 - DNA, 25 bp, Homo sapien
gttgacagctaaaaggcaagactct

SEQ ID NO: 2055103 - DNA, 25 bp, Homo sapien
tttttcttgcaggattttctagtag

SEQ ID NO: 2055104 - DNA, 25 bp, Homo sapien
ctatttttcttgcaggattttctag

SEQ ID NO: 2055105 - DNA, 25 bp, Homo sapien
tgctttcataccccattccagtaat

SEQ ID NO: 2055106 - DNA, 25 bp, Homo sapien
gctttcataccccattccagtaata

SEQ ID NO: 2055107 - DNA, 25 bp, Homo sapien
aggtcttcgtaaggacactgaaata

SEQ ID NO: 2055108 - DNA, 25 bp, Homo sapien
attgtgctcaaaggtcttcgtaagg

SEQ ID NO: 2055109 - DNA, 25 bp, Homo sapien
gaaataaaaacgatgattcctggca

SEQ ID NO: 2055110 - DNA, 25 bp, Homo sapien
cactgaaataaaaacgatgattcct

SEQ ID NO: 2055111 - DNA, 25 bp, Homo sapien
tgatgaggaaaagtaaactccaaca

SEQ ID NO: 2055112 - DNA, 25 bp, Homo sapien
cttgtgatgaggaaaagtaaactcc

SEQ ID NO: 2055113 - DNA, 25 bp, Homo sapien
atgaggaaaagtaaactccaacatt

SEQ ID NO: 2055114 - DNA, 25 bp, Homo sapien
tgtgatgaggaaaagtaaactccaa

SEQ ID NO: 2055115 - DNA, 25 bp, Homo sapien
ctttgcttctattggcaactcctta

SEQ ID NO: 2055116 - DNA, 25 bp, Homo sapien
tttgcttctattggcaactccttac

SEQ ID NO: 2055117 - DNA, 25 bp, Homo sapien
gttgaatgatctggccttttgttgc

SEQ ID NO: 2055118 - DNA, 25 bp, Homo sapien
ctgatatctgagagaaacgctaatg

SEQ ID NO: 2055119 - DNA, 25 bp, Homo sapien
gacttgaggaagcataggttgaatg

SEQ ID NO: 2055120 - DNA, 25 bp, Homo sapien
tgctgctccatttcgtggaggaaaa

SEQ ID NO: 2055121 - DNA, 25 bp, Homo sapien
acttgccgttagtgccagtataagg

SEQ ID NO: 2055122 - DNA, 25 bp, Homo sapien
ggagacatgaaacaccacttgccgt

SEQ ID NO: 2055123 - DNA, 25 bp, Homo sapien
ttggagccaggactagagaaagttc

SEQ ID NO: 2055124 - DNA, 25 bp, Homo sapien
actttctggtgactgagagcttgga

SEQ ID NO: 2055125 - DNA, 25 bp, Homo sapien
gaataagggctttacattgcccaag

SEQ ID NO: 2055126 - DNA, 25 bp, Homo sapien
tcttcgcatttgaaccacactaaag

SEQ ID NO: 2055127 - DNA, 25 bp, Homo sapien
cactccttgatccattagacattgt

SEQ ID NO: 2055128 - DNA, 25 bp, Homo sapien
aaagaactctcggattctccaacca

SEQ ID NO: 2055129 - DNA, 25 bp, Homo sapien
cacgcatttgcccatatagagataa

SEQ ID NO: 2055130 - DNA, 25 bp, Homo sapien
tgagagcagctgattgaaattcagt

SEQ ID NO: 2055131 - DNA, 25 bp, Homo sapien
caactgagagcagctgattgaaatt

SEQ ID NO: 2055132 - DNA, 25 bp, Homo sapien
gaagctttctttttcgacaaagagc

SEQ ID NO: 2055133 - DNA, 25 bp, Homo sapien
cctgtaacataaaattccgctgtat

SEQ ID NO: 2055134 - DNA, 25 bp, Homo sapien
cataaaattccgctgtatctttgac

SEQ ID NO: 2055135 - DNA, 25 bp, Homo sapien
aattccgctgtatctttgactccac

SEQ ID NO: 2055136 - DNA, 25 bp, Homo sapien
tcctcttctgtgagtatttctagca

SEQ ID NO: 2055137 - DNA, 25 bp, Homo sapien
tcccttatgtttaacacagacctgg

SEQ ID NO: 2055138 - DNA, 25 bp, Homo sapien
ggtctcccttatgtttaacacagac

SEQ ID NO: 2055139 - DNA, 25 bp, Homo sapien
tctcccttatgtttaacacagacct

SEQ ID NO: 2055140 - DNA, 25 bp, Homo sapien
ctcccttatgtttaacacagacctg

SEQ ID NO: 2055141 - DNA, 25 bp, Homo sapien
catattctgcatgcccctcatctgg

SEQ ID NO: 2055142 - DNA, 25 bp, Homo sapien
tttcctcctgtcagacatctcatat

SEQ ID NO: 2055143 - DNA, 25 bp, Homo sapien
gatttgagtggaacttttgtagctt

SEQ ID NO: 2055144 - DNA, 25 bp, Homo sapien
tctttgatttgagtggaacttttgt

SEQ ID NO: 2055145 - DNA, 25 bp, Homo sapien
ctgctactctggcattatccatgag

SEQ ID NO: 2055146 - DNA, 25 bp, Homo sapien
tccatgagtcttcgcctaggtgtgc

SEQ ID NO: 2055147 - DNA, 25 bp, Homo sapien
tctggcattatccatgagtcttcgc

SEQ ID NO: 2055148 - DNA, 25 bp, Homo sapien
agaactgctactctggcattatcca

SEQ ID NO: 2055149 - DNA, 25 bp, Homo sapien
gagacatattgggagggctgctttc

SEQ ID NO: 2055150 - DNA, 25 bp, Homo sapien
cagaagctggcattcgatcttctag

SEQ ID NO: 2055151 - DNA, 25 bp, Homo sapien
gggctgctttcaagagatattgcag

SEQ ID NO: 2055152 - DNA, 25 bp, Homo sapien
gacaccagccaatcctcacataaaa

SEQ ID NO: 2055153 - DNA, 25 bp, Homo sapien
cttgaaagttcttacagtgtctata

SEQ ID NO: 2055154 - DNA, 25 bp, Homo sapien
cttgttgattcctcaggtgaacttg

SEQ ID NO: 2055155 - DNA, 25 bp, Homo sapien
gctcttaacctttcttgtgttataa

SEQ ID NO: 2055156 - DNA, 25 bp, Homo sapien
cactgagccttttagtcccttgaaa

SEQ ID NO: 2055157 - DNA, 25 bp, Homo sapien
cagaactgggttggacggtccatta

SEQ ID NO: 2055158 - DNA, 25 bp, Homo sapien
cctatctcttggcagcagaactggg

SEQ ID NO: 2055159 - DNA, 25 bp, Homo sapien
cctcatcgcgtcctggacaagagca

SEQ ID NO: 2055160 - DNA, 25 bp, Homo sapien
atgaaaaacctcatcgcgtcctgga

SEQ ID NO: 2055161 - DNA, 25 bp, Homo sapien
taaattgtcccctgtttagactgcc

SEQ ID NO: 2055162 - DNA, 25 bp, Homo sapien
gattcacaggcaagtaacggattct

SEQ ID NO: 2055163 - DNA, 25 bp, Homo sapien
ggtgaggctaggacatgaaatcttg

SEQ ID NO: 2055164 - DNA, 25 bp, Homo sapien
aataatgcccgttgagtgaacagtc

SEQ ID NO: 2055165 - DNA, 25 bp, Homo sapien
tgggtccagaagatgctgctcttca

SEQ ID NO: 2055166 - DNA, 25 bp, Homo sapien
ctgggtccagaagatgctgctcttc

SEQ ID NO: 2055167 - DNA, 25 bp, Homo sapien
tccagaagatgctgctcttcagatt

SEQ ID NO: 2055168 - DNA, 25 bp, Homo sapien
ggtccagaagatgctgctcttcaga

SEQ ID NO: 2055169 - DNA, 25 bp, Homo sapien
gctaagctattaagccagggcctca

SEQ ID NO: 2055170 - DNA, 25 bp, Homo sapien
tgatcacagtatgccgaaggtctcc

SEQ ID NO: 2055171 - DNA, 25 bp, Homo sapien
ggaatgccgactgaccgagagatca

SEQ ID NO: 2055172 - DNA, 25 bp, Homo sapien
tgcctagacccatacaggaatgccg

SEQ ID NO: 2055173 - DNA, 25 bp, Homo sapien
gaaattgccattgtagaaaataatg

SEQ ID NO: 2055174 - DNA, 25 bp, Homo sapien
aaaacaacttctgaaattgccattg

SEQ ID NO: 2055175 - DNA, 25 bp, Homo sapien
accatttcttcagactggcttttgt

SEQ ID NO: 2055176 - DNA, 25 bp, Homo sapien
gtaaccatttcttcagactggcttt

SEQ ID NO: 2055177 - DNA, 25 bp, Homo sapien
gagggctggaccataactggcctga

SEQ ID NO: 2055178 - DNA, 25 bp, Homo sapien
tgcagtgactgacccacaaggcagt

SEQ ID NO: 2055179 - DNA, 25 bp, Homo sapien
cattgggccttgtgactgttttcga

SEQ ID NO: 2055180 - DNA, 25 bp, Homo sapien
cactgggaagatgcatgggcaaact

SEQ ID NO: 2055181 - DNA, 25 bp, Homo sapien
gtttccatttgcctgtaatgcattc

SEQ ID NO: 2055182 - DNA, 25 bp, Homo sapien
catttgcctgtaatgcattcaaaag

SEQ ID NO: 2055183 - DNA, 25 bp, Homo sapien
ttcaaaagaattcctctgtggttcc

SEQ ID NO: 2055184 - DNA, 25 bp, Homo sapien
gtggagggtgccattccagtttcca

SEQ ID NO: 2055185 - DNA, 25 bp, Homo sapien
gctgggactggctgtccatcaatct

SEQ ID NO: 2055186 - DNA, 25 bp, Homo sapien
gatccctttcaagagctactgatga

SEQ ID NO: 2055187 - DNA, 25 bp, Homo sapien
tggagtgctaagagctgccttgcag

SEQ ID NO: 2055188 - DNA, 25 bp, Homo sapien
tctctggcagggtgatctgatccct

SEQ ID NO: 2055189 - DNA, 25 bp, Homo sapien
tattttcttcatgctcattggtgta

SEQ ID NO: 2055190 - DNA, 25 bp, Homo sapien
ttttattttcttcatgctcattggt

SEQ ID NO: 2055191 - DNA, 25 bp, Homo sapien
attttcttcatgctcattggtgtac

SEQ ID NO: 2055192 - DNA, 25 bp, Homo sapien
tttattttcttcatgctcattggtg

SEQ ID NO: 2055193 - DNA, 25 bp, Homo sapien
agtccaactcaagtcctaattttct

SEQ ID NO: 2055194 - DNA, 25 bp, Homo sapien
tccaactcaagtcctaattttctca

SEQ ID NO: 2055195 - DNA, 25 bp, Homo sapien
acacgtcatatcctttctgcctctc

SEQ ID NO: 2055196 - DNA, 25 bp, Homo sapien
acctggagacacacgtcatatcctt

SEQ ID NO: 2055197 - DNA, 25 bp, Homo sapien
ttataagtagcgaagtactggccta

SEQ ID NO: 2055198 - DNA, 25 bp, Homo sapien
tttggtaggaatcaaatagtcttcc

SEQ ID NO: 2055199 - DNA, 25 bp, Homo sapien
ttactgaaacaaaggcctaaatgta

SEQ ID NO: 2055200 - DNA, 25 bp, Homo sapien
cacaatcaataatgtaccaagcaga

SEQ ID NO: 2055201 - DNA, 25 bp, Homo sapien
gagctataactcaaaaggcggcaga

SEQ ID NO: 2055202 - DNA, 25 bp, Homo sapien
taagctagagccttgtgacagcgtc

SEQ ID NO: 2055203 - DNA, 25 bp, Homo sapien
aaagggcaagcccaccgagctataa

SEQ ID NO: 2055204 - DNA, 25 bp, Homo sapien
caaaatgggcctgcatctaacctca

SEQ ID NO: 2055205 - DNA, 25 bp, Homo sapien
gagtggctccctttccgctcagctt

SEQ ID NO: 2055206 - DNA, 25 bp, Homo sapien
tcaagggattgcagagtggctccct

SEQ ID NO: 2055207 - DNA, 25 bp, Homo sapien
tcccacttgatgaccggaagttggg

SEQ ID NO: 2055208 - DNA, 25 bp, Homo sapien
gttggggtcatctgcacagcgtcca

SEQ ID NO: 2055209 - DNA, 25 bp, Homo sapien
gggtctaagtagcagtgaagttcaa

SEQ ID NO: 2055210 - DNA, 25 bp, Homo sapien
tgggtctaagtagcagtgaagttca

SEQ ID NO: 2055211 - DNA, 25 bp, Homo sapien
ggtctaagtagcagtgaagttcaaa

SEQ ID NO: 2055212 - DNA, 25 bp, Homo sapien
gtctaagtagcagtgaagttcaaat

SEQ ID NO: 2055213 - DNA, 25 bp, Homo sapien
tcctgtcacccttagaataaagcat

SEQ ID NO: 2055214 - DNA, 25 bp, Homo sapien
gcataagacctctataagttttacg

SEQ ID NO: 2055215 - DNA, 25 bp, Homo sapien
atttctctccaaccaatcgcactag

SEQ ID NO: 2055216 - DNA, 25 bp, Homo sapien
tccttgtgatgtttgtagagaaaat

SEQ ID NO: 2055217 - DNA, 25 bp, Homo sapien
tcctccctagctgttctgtctatct

SEQ ID NO: 2055218 - DNA, 25 bp, Homo sapien
ggtggcagcattgaacacagctcct

SEQ ID NO: 2055219 - DNA, 25 bp, Homo sapien
cctaagagaagagtgttggagttcc

SEQ ID NO: 2055220 - DNA, 25 bp, Homo sapien
tcaactgatacttcaacttcaacct

SEQ ID NO: 2055221 - DNA, 25 bp, Homo sapien
tgttatctctcagattttggtcttc

SEQ ID NO: 2055222 - DNA, 25 bp, Homo sapien
tcctgttatctctcagattttggtc

SEQ ID NO: 2055223 - DNA, 25 bp, Homo sapien
cctgttatctctcagattttggtct

SEQ ID NO: 2055224 - DNA, 25 bp, Homo sapien
ttcctgttatctctcagattttggt

SEQ ID NO: 2055225 - DNA, 25 bp, Homo sapien
ggagagtgattccttccagaggagc

SEQ ID NO: 2055226 - DNA, 25 bp, Homo sapien
taccaccgttgcagctgaggctctg

SEQ ID NO: 2055227 - DNA, 25 bp, Homo sapien
ggagccgacgttatcagagcaccac

SEQ ID NO: 2055228 - DNA, 25 bp, Homo sapien
gctccaggaggagagtgattccttc

SEQ ID NO: 2055229 - DNA, 25 bp, Homo sapien
tcatccaccgaaactttacatgtca

SEQ ID NO: 2055230 - DNA, 25 bp, Homo sapien
atccaccgaaactttacatgtcatc

SEQ ID NO: 2055231 - DNA, 25 bp, Homo sapien
tccaccgaaactttacatgtcatct

SEQ ID NO: 2055232 - DNA, 25 bp, Homo sapien
ctcatccaccgaaactttacatgtc

SEQ ID NO: 2055233 - DNA, 25 bp, Homo sapien
ctgggctgtaatcatacaaatcaac

SEQ ID NO: 2055234 - DNA, 25 bp, Homo sapien
tcatctgggctgtaatcatacaaat

SEQ ID NO: 2055235 - DNA, 25 bp, Homo sapien
tctgggctgtaatcatacaaatcaa

SEQ ID NO: 2055236 - DNA, 25 bp, Homo sapien
catctgggctgtaatcatacaaatc

SEQ ID NO: 2055237 - DNA, 25 bp, Homo sapien
tcctccactcaggtaaagtcttggc

SEQ ID NO: 2055238 - DNA, 25 bp, Homo sapien
cctctggaccctgataatggctagt

SEQ ID NO: 2055239 - DNA, 25 bp, Homo sapien
tactgcccttttggtgaagatctgg

SEQ ID NO: 2055240 - DNA, 25 bp, Homo sapien
cattagcatttccagtgtaccacac

SEQ ID NO: 2055241 - DNA, 25 bp, Homo sapien
gaaagtctatcattgcagtgccaag

SEQ ID NO: 2055242 - DNA, 25 bp, Homo sapien
tgggcctctgtaagtaagaaagtga

SEQ ID NO: 2055243 - DNA, 25 bp, Homo sapien
caaaattgccaacgtatgctccaag

SEQ ID NO: 2055244 - DNA, 25 bp, Homo sapien
aagctgctgccttccctcaaaattg

SEQ ID NO: 2055245 - DNA, 25 bp, Homo sapien
gagagggccccggatataataccac

SEQ ID NO: 2055246 - DNA, 25 bp, Homo sapien
ctgtaagtgagagggccccggatat

SEQ ID NO: 2055247 - DNA, 25 bp, Homo sapien
gtgagagggccccggatataatacc

SEQ ID NO: 2055248 - DNA, 25 bp, Homo sapien
gcctgtaagtgagagggccccggat

SEQ ID NO: 2055249 - DNA, 25 bp, Homo sapien
taatagagggaataatgattatttt

SEQ ID NO: 2055250 - DNA, 25 bp, Homo sapien
ataatagagggaataatgattattt

SEQ ID NO: 2055251 - DNA, 25 bp, Homo sapien
tataatagagggaataatgattatt

SEQ ID NO: 2055252 - DNA, 25 bp, Homo sapien
ctataatagagggaataatgattat

SEQ ID NO: 2055253 - DNA, 25 bp, Homo sapien
atgggtcattgtgaaggcctagaca

SEQ ID NO: 2055254 - DNA, 25 bp, Homo sapien
tgaaggcctagacatgcaaagatga

SEQ ID NO: 2055255 - DNA, 25 bp, Homo sapien
ttatgggtcattgtgaaggcctaga

SEQ ID NO: 2055256 - DNA, 25 bp, Homo sapien
tatgggtcattgtgaaggcctagac

SEQ ID NO: 2055257 - DNA, 25 bp, Homo sapien
tctgttgccaagtggattagaagcc

SEQ ID NO: 2055258 - DNA, 25 bp, Homo sapien
gccaatacagttgtgatctcttgat

SEQ ID NO: 2055259 - DNA, 25 bp, Homo sapien
atcctgccttaggagtcaccaccat

SEQ ID NO: 2055260 - DNA, 25 bp, Homo sapien
tgtcacattgtgtatgataattcca

SEQ ID NO: 2055261 - DNA, 25 bp, Homo sapien
tctccaatgaatgactgagctcccc

SEQ ID NO: 2055262 - DNA, 25 bp, Homo sapien
cattaatagaaattggctcattgct

SEQ ID NO: 2055263 - DNA, 25 bp, Homo sapien
tggaaataaccagaattaagctatc

SEQ ID NO: 2055264 - DNA, 25 bp, Homo sapien
tattagccgtaaacatgagctcttc

SEQ ID NO: 2055265 - DNA, 25 bp, Homo sapien
ttgtaagcaggtctgatgatactca

SEQ ID NO: 2055266 - DNA, 25 bp, Homo sapien
ggacaggcccttctttaatgtacaa

SEQ ID NO: 2055267 - DNA, 25 bp, Homo sapien
taatgtaccagaactgaaatttcca

SEQ ID NO: 2055268 - DNA, 25 bp, Homo sapien
aactgaaatttccatctacttgatg

SEQ ID NO: 2055269 - DNA, 25 bp, Homo sapien
cacgctgttggggtccaaattaatt

SEQ ID NO: 2055270 - DNA, 25 bp, Homo sapien
catctccacgctgttggggtccaaa

SEQ ID NO: 2055271 - DNA, 25 bp, Homo sapien
ctccacgctgttggggtccaaatta

SEQ ID NO: 2055272 - DNA, 25 bp, Homo sapien
tctccacgctgttggggtccaaatt

SEQ ID NO: 2055273 - DNA, 25 bp, Homo sapien
ccactgctaagaattcaaggatcac

SEQ ID NO: 2055274 - DNA, 25 bp, Homo sapien
tctcattccgttcatatccttatgt

SEQ ID NO: 2055275 - DNA, 25 bp, Homo sapien
cattctgggccactatcatttaatc

SEQ ID NO: 2055276 - DNA, 25 bp, Homo sapien
caaggatcacttgtagtaaactcaa

SEQ ID NO: 2055277 - DNA, 25 bp, Homo sapien
tcttgtggatccatctacaggaatc

SEQ ID NO: 2055278 - DNA, 25 bp, Homo sapien
catctacaggaatccttctatgaga

SEQ ID NO: 2055279 - DNA, 25 bp, Homo sapien
tggggatagaggatccaagtgcctt

SEQ ID NO: 2055280 - DNA, 25 bp, Homo sapien
catttcccagctgactttgttctct

SEQ ID NO: 2055281 - DNA, 25 bp, Homo sapien
agcgggcagcaccaacgcgagtttt

SEQ ID NO: 2055282 - DNA, 25 bp, Homo sapien
accaacgcgagtttttgtcaacctg

SEQ ID NO: 2055283 - DNA, 25 bp, Homo sapien
ctgtccttgactctctagagcacaa

SEQ ID NO: 2055284 - DNA, 25 bp, Homo sapien
taaaaccagctaaagggcatcatga

SEQ ID NO: 2055285 - DNA, 25 bp, Homo sapien
aggccttttatggtttggccctgct

SEQ ID NO: 2055286 - DNA, 25 bp, Homo sapien
taatacgacagatgtacccagccgt

SEQ ID NO: 2055287 - DNA, 25 bp, Homo sapien
cctggagctaaactgaacaggcctt

SEQ ID NO: 2055288 - DNA, 25 bp, Homo sapien
tcagacagcccagtaatacgacaga

SEQ ID NO: 2055289 - DNA, 25 bp, Homo sapien
gcaatgtgctaagatagtgacagga

SEQ ID NO: 2055290 - DNA, 25 bp, Homo sapien
caagctttgtggttgcactgatgca

SEQ ID NO: 2055291 - DNA, 25 bp, Homo sapien
tggttgcactgatgcaatgtgctaa

SEQ ID NO: 2055292 - DNA, 25 bp, Homo sapien
gatagtgacaggattcatcacacaa

SEQ ID NO: 2055293 - DNA, 25 bp, Homo sapien
gagaaattcttggtcagcttgcttc

SEQ ID NO: 2055294 - DNA, 25 bp, Homo sapien
tttctcaaagcgaatagaaccatag

SEQ ID NO: 2055295 - DNA, 25 bp, Homo sapien
tagaaccataggcaagtttgcaact

SEQ ID NO: 2055296 - DNA, 25 bp, Homo sapien
caaagcgaatagaaccataggcaag

SEQ ID NO: 2055297 - DNA, 25 bp, Homo sapien
cataggcaagtttgcaactaggcat

SEQ ID NO: 2055298 - DNA, 25 bp, Homo sapien
cactggtgtttttgggatacagtcc

SEQ ID NO: 2055299 - DNA, 25 bp, Homo sapien
gtttttgggatacagtccaggccat

SEQ ID NO: 2055300 - DNA, 25 bp, Homo sapien
tctctcccactggtgtttttgggat

SEQ ID NO: 2055301 - DNA, 25 bp, Homo sapien
cctggccagtccacttgagtctctc

SEQ ID NO: 2055302 - DNA, 25 bp, Homo sapien
catccattggtttgccactcatcag

SEQ ID NO: 2055303 - DNA, 25 bp, Homo sapien
tgattgattgatattgggctgaaac

SEQ ID NO: 2055304 - DNA, 25 bp, Homo sapien
gttcatccattggtttgccactcat

SEQ ID NO: 2055305 - DNA, 25 bp, Homo sapien
actgattgattgatattgggctgaa

SEQ ID NO: 2055306 - DNA, 25 bp, Homo sapien
gcttgaaatgagatcgccaaagtaa

SEQ ID NO: 2055307 - DNA, 25 bp, Homo sapien
gctgggctcttcaataatatgattt

SEQ ID NO: 2055308 - DNA, 25 bp, Homo sapien
tggtggttccaaggaacaaatggct

SEQ ID NO: 2055309 - DNA, 25 bp, Homo sapien
acaggcagatgtaggagcactccca

SEQ ID NO: 2055310 - DNA, 25 bp, Homo sapien
tttaaagcttgccttattgaactga

SEQ ID NO: 2055311 - DNA, 25 bp, Homo sapien
aactgacccttctgatcttgacgca

SEQ ID NO: 2055312 - DNA, 25 bp, Homo sapien
tcttggggatcggaccaatggacct

SEQ ID NO: 2055313 - DNA, 25 bp, Homo sapien
ttgccttattgaactgacccttctg

SEQ ID NO: 2055314 - DNA, 25 bp, Homo sapien
cagtcccattgtgtctcagtaaagc

SEQ ID NO: 2055315 - DNA, 25 bp, Homo sapien
taaggagaactgatgggtcacttcc

SEQ ID NO: 2055316 - DNA, 25 bp, Homo sapien
caaaagatggtagagtcctgagttc

SEQ ID NO: 2055317 - DNA, 25 bp, Homo sapien
taaagcagaggtgtgtaaggagaac

SEQ ID NO: 2055318 - DNA, 25 bp, Homo sapien
ttggcaaaaactcctagagacagag

SEQ ID NO: 2055319 - DNA, 25 bp, Homo sapien
caagattctttccagcatgatcagg

SEQ ID NO: 2055320 - DNA, 25 bp, Homo sapien
tatgatatggcagatacttggccac

SEQ ID NO: 2055321 - DNA, 25 bp, Homo sapien
ggcttaactaggcaaccagttctgg

SEQ ID NO: 2055322 - DNA, 25 bp, Homo sapien
tgaatggttagtttaaaggctggtc

SEQ ID NO: 2055323 - DNA, 25 bp, Homo sapien
tatgaatggttagtttaaaggctgg

SEQ ID NO: 2055324 - DNA, 25 bp, Homo sapien
attgattaacttggcttccgttttg

SEQ ID NO: 2055325 - DNA, 25 bp, Homo sapien
cttttggtgttaaggtgaatactga

SEQ ID NO: 2055326 - DNA, 25 bp, Homo sapien
tccctggaagcaacatcgtataatg

SEQ ID NO: 2055327 - DNA, 25 bp, Homo sapien
acatcgtataatggctcctccacag

SEQ ID NO: 2055328 - DNA, 25 bp, Homo sapien
gttgacagcagtaatgttgcctcag

SEQ ID NO: 2055329 - DNA, 25 bp, Homo sapien
agtaatgttgcctcagggccaagcc

SEQ ID NO: 2055330 - DNA, 25 bp, Homo sapien
tccagggtgcccaacctctttcctg

SEQ ID NO: 2055331 - DNA, 25 bp, Homo sapien
tcctgcatttcagcaggccagaggt

SEQ ID NO: 2055332 - DNA, 25 bp, Homo sapien
cagcaggccagaggtgcttctctgc

SEQ ID NO: 2055333 - DNA, 25 bp, Homo sapien
tccaaacaagccctttccagggtgc

SEQ ID NO: 2055334 - DNA, 25 bp, Homo sapien
aacaaattggcaataccccatttgc

SEQ ID NO: 2055335 - DNA, 25 bp, Homo sapien
aaattggcaataccccatttgctcc

SEQ ID NO: 2055336 - DNA, 25 bp, Homo sapien
tctcattgtctaaaacaaattggca

SEQ ID NO: 2055337 - DNA, 25 bp, Homo sapien
tcctctcattgtctaaaacaaattg

SEQ ID NO: 2055338 - DNA, 25 bp, Homo sapien
cctcacggtcagcttccaagggagc

SEQ ID NO: 2055339 - DNA, 25 bp, Homo sapien
tcctcacggtcagcttccaagggag

SEQ ID NO: 2055340 - DNA, 25 bp, Homo sapien
atcctcacggtcagcttccaaggga

SEQ ID NO: 2055341 - DNA, 25 bp, Homo sapien
ccataactgcatccacaatgaattc

SEQ ID NO: 2055342 - DNA, 25 bp, Homo sapien
taactgcatccacaatgaattcttt

SEQ ID NO: 2055343 - DNA, 25 bp, Homo sapien
ataactgcatccacaatgaattctt

SEQ ID NO: 2055344 - DNA, 25 bp, Homo sapien
cataactgcatccacaatgaattct

SEQ ID NO: 2055345 - DNA, 25 bp, Homo sapien
tactcagtgtgcgacagggcattcg

SEQ ID NO: 2055346 - DNA, 25 bp, Homo sapien
gctgagacaggactctcagaggtca

SEQ ID NO: 2055347 - DNA, 25 bp, Homo sapien
tgtccctgaagacagcgttatcatt

SEQ ID NO: 2055348 - DNA, 25 bp, Homo sapien
ggcattcgagaagacgggtgacact

SEQ ID NO: 2055349 - DNA, 25 bp, Homo sapien
ttagacatttacagatgtggatcta

SEQ ID NO: 2055350 - DNA, 25 bp, Homo sapien
tagacatttacagatgtggatctag

SEQ ID NO: 2055351 - DNA, 25 bp, Homo sapien
ttctcttggtgaagataatacatca

SEQ ID NO: 2055352 - DNA, 25 bp, Homo sapien
tacatcataagaatgtgcacacaga

SEQ ID NO: 2055353 - DNA, 25 bp, Homo sapien
ggatacgatttgtagtgatccattt

SEQ ID NO: 2055354 - DNA, 25 bp, Homo sapien
tccaacaaaaggatacgatttgtag

SEQ ID NO: 2055355 - DNA, 25 bp, Homo sapien
tcgaccccagaccaatggctgtatt

SEQ ID NO: 2055356 - DNA, 25 bp, Homo sapien
ttcgaccccagaccaatggctgtat

SEQ ID NO: 2055357 - DNA, 25 bp, Homo sapien
cttcgaccccagaccaatggctgta

SEQ ID NO: 2055358 - DNA, 25 bp, Homo sapien
cgcacagcgagtagagcatgctgca

SEQ ID NO: 2055359 - DNA, 25 bp, Homo sapien
cgagtagagcatgctgcaggaccaa

SEQ ID NO: 2055360 - DNA, 25 bp, Homo sapien
atatccttccgtctctcttcactga

SEQ ID NO: 2055361 - DNA, 25 bp, Homo sapien
tccgtctctcttcactgattatctc

SEQ ID NO: 2055362 - DNA, 25 bp, Homo sapien
tgcagacaggccaccgtggactctt

SEQ ID NO: 2055363 - DNA, 25 bp, Homo sapien
cattggaagagcctaccacaccaag

SEQ ID NO: 2055364 - DNA, 25 bp, Homo sapien
tgtatcccataattatgagcgtatg

SEQ ID NO: 2055365 - DNA, 25 bp, Homo sapien
ctcttgcaatgcaaattgtatccca

SEQ ID NO: 2055366 - DNA, 25 bp, Homo sapien
tgtgcctgctatctaggacaccgta

SEQ ID NO: 2055367 - DNA, 25 bp, Homo sapien
tactgacagcattgatctagagtgc

SEQ ID NO: 2055368 - DNA, 25 bp, Homo sapien
cagtgcacatgtcgaacgtttctat

SEQ ID NO: 2055369 - DNA, 25 bp, Homo sapien
caaatttgtggtgggtgagtacatc

SEQ ID NO: 2055370 - DNA, 25 bp, Homo sapien
gaattttctgaaagcagccaaacag

SEQ ID NO: 2055371 - DNA, 25 bp, Homo sapien
gagtattcactatggtaagagctat

SEQ ID NO: 2055372 - DNA, 25 bp, Homo sapien
gatctcttatttcaagtaggcagaa

SEQ ID NO: 2055373 - DNA, 25 bp, Homo sapien
tatactgattatgtggtgctttcaa

SEQ ID NO: 2055374 - DNA, 25 bp, Homo sapien
gaacagtgcattgcatatcaaggga

SEQ ID NO: 2055375 - DNA, 25 bp, Homo sapien
taattgatgagcactttatttccag

SEQ ID NO: 2055376 - DNA, 25 bp, Homo sapien
tattcagaagtaagcatgttcgcag

SEQ ID NO: 2055377 - DNA, 25 bp, Homo sapien
gcattaattggtgaacacagcctgg

SEQ ID NO: 2055378 - DNA, 25 bp, Homo sapien
tactttatggatgcaaaattgtgac

SEQ ID NO: 2055379 - DNA, 25 bp, Homo sapien
ctactttatggatgcaaaattgtga

SEQ ID NO: 2055380 - DNA, 25 bp, Homo sapien
ctgtgctctcttgttccactgcagt

SEQ ID NO: 2055381 - DNA, 25 bp, Homo sapien
ctctcttgttccactgcagtcagca

SEQ ID NO: 2055382 - DNA, 25 bp, Homo sapien
tgctctcttgttccactgcagtcag

SEQ ID NO: 2055383 - DNA, 25 bp, Homo sapien
tgtgctctcttgttccactgcagtc

SEQ ID NO: 2055384 - DNA, 25 bp, Homo sapien
tattggagacttcagagtaaccagc

SEQ ID NO: 2055385 - DNA, 25 bp, Homo sapien
gaatttttgccttcctagtgctgga

SEQ ID NO: 2055386 - DNA, 25 bp, Homo sapien
gataagctacaggttttcacagcct

SEQ ID NO: 2055387 - DNA, 25 bp, Homo sapien
caccattaatagtgttggccccaaa

SEQ ID NO: 2055388 - DNA, 25 bp, Homo sapien
gctcagtattacatggcagggctat

SEQ ID NO: 2055389 - DNA, 25 bp, Homo sapien
taataacagtcaacatgatgtaggg

SEQ ID NO: 2055390 - DNA, 25 bp, Homo sapien
gatagttttagatgttccccagctc

SEQ ID NO: 2055391 - DNA, 25 bp, Homo sapien
ttgccaaataaagggtcatacagcc

SEQ ID NO: 2055392 - DNA, 25 bp, Homo sapien
tgcatacctccaggctttaaggcat

SEQ ID NO: 2055393 - DNA, 25 bp, Homo sapien
tgacaccgtgcatacctccaggctt

SEQ ID NO: 2055394 - DNA, 25 bp, Homo sapien
gctttaaggcatggcccatgatgac

SEQ ID NO: 2055395 - DNA, 25 bp, Homo sapien
ggctttaaggcatggcccatgatga

SEQ ID NO: 2055396 - DNA, 25 bp, Homo sapien
catacctacccatagtcctggcagt

SEQ ID NO: 2055397 - DNA, 25 bp, Homo sapien
tttcaatagtgagcctcttggacac

SEQ ID NO: 2055398 - DNA, 25 bp, Homo sapien
cctggcagttatccaagaatctatt

SEQ ID NO: 2055399 - DNA, 25 bp, Homo sapien
tctatttcaatagtgagcctcttgg

SEQ ID NO: 2055400 - DNA, 25 bp, Homo sapien
gagtgcacgtcttcagtcattattt

SEQ ID NO: 2055401 - DNA, 25 bp, Homo sapien
tttgtaaattcttcagtagagagtg

SEQ ID NO: 2055402 - DNA, 25 bp, Homo sapien
tcattaattcatgtggcatgttttg

SEQ ID NO: 2055403 - DNA, 25 bp, Homo sapien
aacaccttgctgtacttatcatctt

SEQ ID NO: 2055404 - DNA, 25 bp, Homo sapien
agtgaatgccaacaatcttcttttc

SEQ ID NO: 2055405 - DNA, 25 bp, Homo sapien
ctaattgctgctgctcaacatgatg

SEQ ID NO: 2055406 - DNA, 25 bp, Homo sapien
ctctccagggataagcagctgacag

SEQ ID NO: 2055407 - DNA, 25 bp, Homo sapien
gctgctcaacatgatggcattgttc

SEQ ID NO: 2055408 - DNA, 25 bp, Homo sapien
tcagtctggaatccctctccactcc

SEQ ID NO: 2055409 - DNA, 25 bp, Homo sapien
caagcactaaaacattgagagagta

SEQ ID NO: 2055410 - DNA, 25 bp, Homo sapien
gcactaaaacattgagagagtattt

SEQ ID NO: 2055411 - DNA, 25 bp, Homo sapien
cactaaaacattgagagagtatttc

SEQ ID NO: 2055412 - DNA, 25 bp, Homo sapien
agcactaaaacattgagagagtatt

SEQ ID NO: 2055413 - DNA, 25 bp, Homo sapien
gactgttgatcccaactatgttgag

SEQ ID NO: 2055414 - DNA, 25 bp, Homo sapien
gatcccaactatgttgagtgatgtg

SEQ ID NO: 2055415 - DNA, 25 bp, Homo sapien
agtgatgtggaaacaatgagggttt

SEQ ID NO: 2055416 - DNA, 25 bp, Homo sapien
aaatcctagactgttgatcccaact

SEQ ID NO: 2055417 - DNA, 25 bp, Homo sapien
tctgggccttcttaggattccacct

SEQ ID NO: 2055418 - DNA, 25 bp, Homo sapien
ctttggaagacaagtagagttggaa

SEQ ID NO: 2055419 - DNA, 25 bp, Homo sapien
gaaaggagtctctgtaatgactctg

SEQ ID NO: 2055420 - DNA, 25 bp, Homo sapien
tgggccttcttaggattccacctgg

SEQ ID NO: 2055421 - DNA, 25 bp, Homo sapien
ctgcttcatattcctttaagttctg

SEQ ID NO: 2055422 - DNA, 25 bp, Homo sapien
tgcttcatattcctttaagttctgc

SEQ ID NO: 2055423 - DNA, 25 bp, Homo sapien
ttctgcttcatattcctttaagttc

SEQ ID NO: 2055424 - DNA, 25 bp, Homo sapien
tctgcttcatattcctttaagttct

SEQ ID NO: 2055425 - DNA, 25 bp, Homo sapien
tgcttcactggaatgccgagctgcc

SEQ ID NO: 2055426 - DNA, 25 bp, Homo sapien
tgtatgcttcactggaatgccgagc

SEQ ID NO: 2055427 - DNA, 25 bp, Homo sapien
tatgcttcactggaatgccgagctg

SEQ ID NO: 2055428 - DNA, 25 bp, Homo sapien
cttcactggaatgccgagctgccat

SEQ ID NO: 2055429 - DNA, 25 bp, Homo sapien
caccaagtagcgtgggatacttagc

SEQ ID NO: 2055430 - DNA, 25 bp, Homo sapien
gatacttagcgaagggatggagaac

SEQ ID NO: 2055431 - DNA, 25 bp, Homo sapien
catgccaagttgagatgtgtcgagc

SEQ ID NO: 2055432 - DNA, 25 bp, Homo sapien
gagaacaattggtggagtaaaggaa

SEQ ID NO: 2055433 - DNA, 25 bp, Homo sapien
gatgatgtcgttgactgctataacc

SEQ ID NO: 2055434 - DNA, 25 bp, Homo sapien
tacatagttctcctctagtacaccc

SEQ ID NO: 2055435 - DNA, 25 bp, Homo sapien
tgctataaccaacgtttgcctctgt

SEQ ID NO: 2055436 - DNA, 25 bp, Homo sapien
ggctctaagcaagtcatgtcttcat

SEQ ID NO: 2055437 - DNA, 25 bp, Homo sapien
gaagtcctggttgaaaatgagttcc

SEQ ID NO: 2055438 - DNA, 25 bp, Homo sapien
tttgaagtcctggttgaaaatgagt

SEQ ID NO: 2055439 - DNA, 25 bp, Homo sapien
tcctggttgaaaatgagttccctca

SEQ ID NO: 2055440 - DNA, 25 bp, Homo sapien
agtcctggttgaaaatgagttccct

SEQ ID NO: 2055441 - DNA, 25 bp, Homo sapien
tgatataggagcctcggtggtctga

SEQ ID NO: 2055442 - DNA, 25 bp, Homo sapien
tcagctagtcaaatcgaggtcttga

SEQ ID NO: 2055443 - DNA, 25 bp, Homo sapien
gccacttgcactaggtttaaggcac

SEQ ID NO: 2055444 - DNA, 25 bp, Homo sapien
ggtctgagatttaacagtcctggct

SEQ ID NO: 2055445 - DNA, 25 bp, Homo sapien
ctgagagccaggtgtaaaagttctg

SEQ ID NO: 2055446 - DNA, 25 bp, Homo sapien
agcttgagtgtggacctagctgacc

SEQ ID NO: 2055447 - DNA, 25 bp, Homo sapien
ctagctgaccacctagcatttgcat

SEQ ID NO: 2055448 - DNA, 25 bp, Homo sapien
tgtggacctagctgaccacctagca

SEQ ID NO: 2055449 - DNA, 25 bp, Homo sapien
ctcagaatagctgagggtttccttt

SEQ ID NO: 2055450 - DNA, 25 bp, Homo sapien
cagaatagctgagggtttcctttct

SEQ ID NO: 2055451 - DNA, 25 bp, Homo sapien
agctgagggtttcctttcttatcat

SEQ ID NO: 2055452 - DNA, 25 bp, Homo sapien
gaatagctgagggtttcctttctta

SEQ ID NO: 2055453 - DNA, 25 bp, Homo sapien
ctgagtgacacgtgataatgaaagt

SEQ ID NO: 2055454 - DNA, 25 bp, Homo sapien
aatcatcaaatagtgtgccccaagg

SEQ ID NO: 2055455 - DNA, 25 bp, Homo sapien
taatgaaagtagcttcacaaagaac

SEQ ID NO: 2055456 - DNA, 25 bp, Homo sapien
aatggtcccataaactcttgtaact

SEQ ID NO: 2055457 - DNA, 25 bp, Homo sapien
ctgaggttttcaggcctaaaggaga

SEQ ID NO: 2055458 - DNA, 25 bp, Homo sapien
tttcaggcctaaaggagagaattac

SEQ ID NO: 2055459 - DNA, 25 bp, Homo sapien
gaggttttcaggcctaaaggagaga

SEQ ID NO: 2055460 - DNA, 25 bp, Homo sapien
taaaggagagaattacagagcccat

SEQ ID NO: 2055461 - DNA, 25 bp, Homo sapien
tcttggcctggatagcactccttga

SEQ ID NO: 2055462 - DNA, 25 bp, Homo sapien
ccactcccaactggccacatcttgg

SEQ ID NO: 2055463 - DNA, 25 bp, Homo sapien
ccacatcttggcctggatagcactc

SEQ ID NO: 2055464 - DNA, 25 bp, Homo sapien
ggcctggatagcactccttgaccat

SEQ ID NO: 2055465 - DNA, 25 bp, Homo sapien
aacatgacattttctagaagtgttg

SEQ ID NO: 2055466 - DNA, 25 bp, Homo sapien
tcctccatttccacagcaaggctgt

SEQ ID NO: 2055467 - DNA, 25 bp, Homo sapien
tagaagtgttgttggctgtttcctc

SEQ ID NO: 2055468 - DNA, 25 bp, Homo sapien
caaggctgtgcgttgcagctggctt

SEQ ID NO: 2055469 - DNA, 25 bp, Homo sapien
atgccaagtagtacagcacctccct

SEQ ID NO: 2055470 - DNA, 25 bp, Homo sapien
ctggaggtatgtagaacctcagacc

SEQ ID NO: 2055471 - DNA, 25 bp, Homo sapien
tggcctggaggtatgtagaacctca

SEQ ID NO: 2055472 - DNA, 25 bp, Homo sapien
tcagtggcctggaggtatgtagaac

SEQ ID NO: 2055473 - DNA, 25 bp, Homo sapien
cagtggcctggaggtatgtagaacc

SEQ ID NO: 2055474 - DNA, 25 bp, Homo sapien
tgttgtaacctaaaggcctctgagc

SEQ ID NO: 2055475 - DNA, 25 bp, Homo sapien
gagaggctaactgacatatactggt

SEQ ID NO: 2055476 - DNA, 25 bp, Homo sapien
caagtcatctgccacctcacatagt

SEQ ID NO: 2055477 - DNA, 25 bp, Homo sapien
gcctctgagcaggtaggcaagtcat

SEQ ID NO: 2055478 - DNA, 25 bp, Homo sapien
tcatgctgatggttagaacataaac

SEQ ID NO: 2055479 - DNA, 25 bp, Homo sapien
atctatcatgctgatggttagaaca

SEQ ID NO: 2055480 - DNA, 25 bp, Homo sapien
ctatcatgctgatggttagaacata

SEQ ID NO: 2055481 - DNA, 25 bp, Homo sapien
tatcatgctgatggttagaacataa

SEQ ID NO: 2055482 - DNA, 25 bp, Homo sapien
catcttgatgttataaaagtcactc

SEQ ID NO: 2055483 - DNA, 25 bp, Homo sapien
aaagtcactcaggttaggactctcg

SEQ ID NO: 2055484 - DNA, 25 bp, Homo sapien
cattacacagttggaacgtcatctt

SEQ ID NO: 2055485 - DNA, 25 bp, Homo sapien
ggttaggactctcgctgccctcatt

SEQ ID NO: 2055486 - DNA, 25 bp, Homo sapien
ctaaaagattgattggtctggcaaa

SEQ ID NO: 2055487 - DNA, 25 bp, Homo sapien
gagtaaatcttggactctgacatca

SEQ ID NO: 2055488 - DNA, 25 bp, Homo sapien
tggcaaataagggagtaaatcttgg

SEQ ID NO: 2055489 - DNA, 25 bp, Homo sapien
gattgattggtctggcaaataaggg

SEQ ID NO: 2055490 - DNA, 25 bp, Homo sapien
tggaatatggaggccagttgtcagc

SEQ ID NO: 2055491 - DNA, 25 bp, Homo sapien
gcttcaccatcaattcttaacctgg

SEQ ID NO: 2055492 - DNA, 25 bp, Homo sapien
cagttgtcagctttcaacctttgag

SEQ ID NO: 2055493 - DNA, 25 bp, Homo sapien
tccaaaagagtatctacccagacag

SEQ ID NO: 2055494 - DNA, 25 bp, Homo sapien
gggctgctttctagagacatgggtc

SEQ ID NO: 2055495 - DNA, 25 bp, Homo sapien
tgccagcttctctatactgctgggc

SEQ ID NO: 2055496 - DNA, 25 bp, Homo sapien
gctttctagagacatgggtctgctg

SEQ ID NO: 2055497 - DNA, 25 bp, Homo sapien
agcttctctatactgctgggccact

SEQ ID NO: 2055498 - DNA, 25 bp, Homo sapien
ccatagattcctgcctaaagaccat

SEQ ID NO: 2055499 - DNA, 25 bp, Homo sapien
cccatagattcctgcctaaagacca

SEQ ID NO: 2055500 - DNA, 25 bp, Homo sapien
cacccatagattcctgcctaaagac

SEQ ID NO: 2055501 - DNA, 25 bp, Homo sapien
tcacacccatagattcctgcctaaa

SEQ ID NO: 2055502 - DNA, 25 bp, Homo sapien
tgactccaaattctgctttccttaa

SEQ ID NO: 2055503 - DNA, 25 bp, Homo sapien
tccaagaaccagatgactccaaatt

SEQ ID NO: 2055504 - DNA, 25 bp, Homo sapien
caggtctgtccaagaaccagatgac

SEQ ID NO: 2055505 - DNA, 25 bp, Homo sapien
ctcaccaggtctgtccaagaaccag

SEQ ID NO: 2055506 - DNA, 25 bp, Homo sapien
tccaatgtatctttatctatgtctc

SEQ ID NO: 2055507 - DNA, 25 bp, Homo sapien
taatccaatgtatctttatctatgt

SEQ ID NO: 2055508 - DNA, 25 bp, Homo sapien
ttcccattctgtaccataaaccctg

SEQ ID NO: 2055509 - DNA, 25 bp, Homo sapien
ccattctgtaccataaaccctggaa

SEQ ID NO: 2055510 - DNA, 25 bp, Homo sapien
cagcatacacactgcagagcctgtg

SEQ ID NO: 2055511 - DNA, 25 bp, Homo sapien
ccttatgacaaactatcatgtaggg

SEQ ID NO: 2055512 - DNA, 25 bp, Homo sapien
tcagtttcccaaagcgccattgcca

SEQ ID NO: 2055513 - DNA, 25 bp, Homo sapien
ttccaggacaggttgcagcatacac

SEQ ID NO: 2055514 - DNA, 25 bp, Homo sapien
gattcaggaagtttctggcattttc

SEQ ID NO: 2055515 - DNA, 25 bp, Homo sapien
ttgtaaaagattcaggaagtttctg

SEQ ID NO: 2055516 - DNA, 25 bp, Homo sapien
aaagattcaggaagtttctggcatt

SEQ ID NO: 2055517 - DNA, 25 bp, Homo sapien
taaaagattcaggaagtttctggca

SEQ ID NO: 2055518 - DNA, 25 bp, Homo sapien
aagaactgtaagaatggtcctcaga

SEQ ID NO: 2055519 - DNA, 25 bp, Homo sapien
taaataagttccactagcataagca

SEQ ID NO: 2055520 - DNA, 25 bp, Homo sapien
gtaccttgcactctttgttgacact

SEQ ID NO: 2055521 - DNA, 25 bp, Homo sapien
cagagatgtcagtcaagattgtgca

SEQ ID NO: 2055522 - DNA, 25 bp, Homo sapien
cgggtcaaccacttggctcgcagat

SEQ ID NO: 2055523 - DNA, 25 bp, Homo sapien
ccgggtcaaccacttggctcgcaga

SEQ ID NO: 2055524 - DNA, 25 bp, Homo sapien
gggtcaaccacttggctcgcagatc

SEQ ID NO: 2055525 - DNA, 25 bp, Homo sapien
tgggcttgtcttcccgggtcaacca

SEQ ID NO: 2055526 - DNA, 25 bp, Homo sapien
gggcagaggcaaaatctgggtgagg

SEQ ID NO: 2055527 - DNA, 25 bp, Homo sapien
tggggcagaggcaaaatctgggtga

SEQ ID NO: 2055528 - DNA, 25 bp, Homo sapien
ggggcagaggcaaaatctgggtgag

SEQ ID NO: 2055529 - DNA, 25 bp, Homo sapien
ctggggcagaggcaaaatctgggtg

SEQ ID NO: 2055530 - DNA, 25 bp, Homo sapien
atgggatgtaaacccggtgttatat

SEQ ID NO: 2055531 - DNA, 25 bp, Homo sapien
ctaaacgtttagttgttcgtgtatg

SEQ ID NO: 2055532 - DNA, 25 bp, Homo sapien
tttagttgttcgtgtatgacctttc

SEQ ID NO: 2055533 - DNA, 25 bp, Homo sapien
tgtaaacccggtgttatatgtcatt

SEQ ID NO: 2055534 - DNA, 25 bp, Homo sapien
tcctttgatctaagcgcttgcctct

SEQ ID NO: 2055535 - DNA, 25 bp, Homo sapien
gcatgaatgagagactcttctaata

SEQ ID NO: 2055536 - DNA, 25 bp, Homo sapien
tcttctcttcaaatgtgcatgaatg

SEQ ID NO: 2055537 - DNA, 25 bp, Homo sapien
caatatagttggatctgttcacagc

SEQ ID NO: 2055538 - DNA, 25 bp, Homo sapien
gctgccaacatctgtgactgtagca

SEQ ID NO: 2055539 - DNA, 25 bp, Homo sapien
tgactgtagcattcccagttctctc

SEQ ID NO: 2055540 - DNA, 25 bp, Homo sapien
ttgagttgctgccaacatctgtgac

SEQ ID NO: 2055541 - DNA, 25 bp, Homo sapien
acatctgtgactgtagcattcccag

SEQ ID NO: 2055542 - DNA, 25 bp, Homo sapien
tgctgtattacatctcaataaaatt

SEQ ID NO: 2055543 - DNA, 25 bp, Homo sapien
ctgtattacatctcaataaaattat

SEQ ID NO: 2055544 - DNA, 25 bp, Homo sapien
gtattacatctcaataaaattatac

SEQ ID NO: 2055545 - DNA, 25 bp, Homo sapien
cttgatgctgtattacatctcaata

SEQ ID NO: 2055546 - DNA, 25 bp, Homo sapien
tgcttgaagacttgtgtttccataa

SEQ ID NO: 2055547 - DNA, 25 bp, Homo sapien
cagaaaaaagttcagggcccacact

SEQ ID NO: 2055548 - DNA, 25 bp, Homo sapien
tctcctctctgaaaggattggagtg

SEQ ID NO: 2055549 - DNA, 25 bp, Homo sapien
gactgcttgaagacttgtgtttcca

SEQ ID NO: 2055550 - DNA, 25 bp, Homo sapien
tgacccctgcttgaaattatgattt

SEQ ID NO: 2055551 - DNA, 25 bp, Homo sapien
gcacattcaggtagggacagtcttc

SEQ ID NO: 2055552 - DNA, 25 bp, Homo sapien
gccaggtacagttctcggtgcttgt

SEQ ID NO: 2055553 - DNA, 25 bp, Homo sapien
attggctcatgttttcgcaggctgt

SEQ ID NO: 2055554 - DNA, 25 bp, Homo sapien
ttggccagagggcatttgcctgata

SEQ ID NO: 2055555 - DNA, 25 bp, Homo sapien
cctggcttatttagccaaatgccgt

SEQ ID NO: 2055556 - DNA, 25 bp, Homo sapien
gagggcatttgcctgatatacagtt

SEQ ID NO: 2055557 - DNA, 25 bp, Homo sapien
ttaagttctgtggaagaacctggct

SEQ ID NO: 2055558 - DNA, 25 bp, Homo sapien
tacatggcggccagcaaaaagagaa

SEQ ID NO: 2055559 - DNA, 25 bp, Homo sapien
tattgtacacatcttttggtggcca

SEQ ID NO: 2055560 - DNA, 25 bp, Homo sapien
tatatgtctaggagtagaacttcca

SEQ ID NO: 2055561 - DNA, 25 bp, Homo sapien
aaagttacccatattgttgcatgca

SEQ ID NO: 2055562 - DNA, 25 bp, Homo sapien
cacagccgtgcattactgtgcctgg

SEQ ID NO: 2055563 - DNA, 25 bp, Homo sapien
gtctcaaaccatctcggctgcccaa

SEQ ID NO: 2055564 - DNA, 25 bp, Homo sapien
cttctttagacctcactcttatgtg

SEQ ID NO: 2055565 - DNA, 25 bp, Homo sapien
gggatcacagccgtgcattactgtg

SEQ ID NO: 2055566 - DNA, 25 bp, Homo sapien
tccccagtatagtatccttatggtg

SEQ ID NO: 2055567 - DNA, 25 bp, Homo sapien
tggtgtctttttgccctccattaaa

SEQ ID NO: 2055568 - DNA, 25 bp, Homo sapien
ccttatggtgtctttttgccctcca

SEQ ID NO: 2055569 - DNA, 25 bp, Homo sapien
cagtatagtatccttatggtgtctt

SEQ ID NO: 2055570 - DNA, 25 bp, Homo sapien
gagatctccactgcagaagagatgg

SEQ ID NO: 2055571 - DNA, 25 bp, Homo sapien
gaattccaggcattaatcaaaaggt

SEQ ID NO: 2055572 - DNA, 25 bp, Homo sapien
taagctaaaagaatgaagcaccagc

SEQ ID NO: 2055573 - DNA, 25 bp, Homo sapien
taaaagccatccatactgaactaca

SEQ ID NO: 2055574 - DNA, 25 bp, Homo sapien
gaagtgccgaattcatgtatcagga

SEQ ID NO: 2055575 - DNA, 25 bp, Homo sapien
gcgtgcaggccctgtatggatgcca

SEQ ID NO: 2055576 - DNA, 25 bp, Homo sapien
taagtatgtttggtccctggacagc

SEQ ID NO: 2055577 - DNA, 25 bp, Homo sapien
gcagtagcagcatcacttgagagct

SEQ ID NO: 2055578 - DNA, 25 bp, Homo sapien
ttcatttcctctgccgctaccatct

SEQ ID NO: 2055579 - DNA, 25 bp, Homo sapien
gactgaagcaaaggattagcacctt

SEQ ID NO: 2055580 - DNA, 25 bp, Homo sapien
atcatttctgactgaagcaaaggat

SEQ ID NO: 2055581 - DNA, 25 bp, Homo sapien
gccgctaccatctgctaattctaga

SEQ ID NO: 2055582 - DNA, 25 bp, Homo sapien
gcagtaccaaatacatgctgttggc

SEQ ID NO: 2055583 - DNA, 25 bp, Homo sapien
agctgcctttatcaaggtgtgggat

SEQ ID NO: 2055584 - DNA, 25 bp, Homo sapien
gggatgcccgtttggagagaactgc

SEQ ID NO: 2055585 - DNA, 25 bp, Homo sapien
taccaaatacatgctgttggctcca

SEQ ID NO: 2055586 - DNA, 25 bp, Homo sapien
gtgttattctttgcaacagatggca

SEQ ID NO: 2055587 - DNA, 25 bp, Homo sapien
tggaaggagtaccagcgtaccataa

SEQ ID NO: 2055588 - DNA, 25 bp, Homo sapien
ggaaggagtaccagcgtaccataac

SEQ ID NO: 2055589 - DNA, 25 bp, Homo sapien
gaaggagtaccagcgtaccataacc

SEQ ID NO: 2055590 - DNA, 25 bp, Homo sapien
aggagtaccagcgtaccataaccat

SEQ ID NO: 2055591 - DNA, 25 bp, Homo sapien
aagcagctagttcttcaggccatat

SEQ ID NO: 2055592 - DNA, 25 bp, Homo sapien
gttcttcaggccatatccgctgctg

SEQ ID NO: 2055593 - DNA, 25 bp, Homo sapien
ctgctgcattgaaatgtgttcagca

SEQ ID NO: 2055594 - DNA, 25 bp, Homo sapien
ctgcattgaaatgtgttcagcacct

SEQ ID NO: 2055595 - DNA, 25 bp, Homo sapien
acttttccttatgccctattctatc

SEQ ID NO: 2055596 - DNA, 25 bp, Homo sapien
ctattctatccaaacacatatgatt

SEQ ID NO: 2055597 - DNA, 25 bp, Homo sapien
cctattctatccaaacacatatgat

SEQ ID NO: 2055598 - DNA, 25 bp, Homo sapien
ttttccttatgccctattctatcca

SEQ ID NO: 2055599 - DNA, 25 bp, Homo sapien
aggatgttgataaaggtaggggttg

SEQ ID NO: 2055600 - DNA, 25 bp, Homo sapien
tgggaattgaccattttcaattgtt

SEQ ID NO: 2055601 - DNA, 25 bp, Homo sapien
tatgggaattgaccattttcaattg

SEQ ID NO: 2055602 - DNA, 25 bp, Homo sapien
atatgggaattgaccattttcaatt

SEQ ID NO: 2055603 - DNA, 25 bp, Homo sapien
atctgagagggattgaaatcggggt

SEQ ID NO: 2055604 - DNA, 25 bp, Homo sapien
ggacatctgagagggattgaaatcg

SEQ ID NO: 2055605 - DNA, 25 bp, Homo sapien
acatctgagagggattgaaatcggg

SEQ ID NO: 2055606 - DNA, 25 bp, Homo sapien
tggacatctgagagggattgaaatc

SEQ ID NO: 2055607 - DNA, 25 bp, Homo sapien
gactgacccattgagcagcgaatgg

SEQ ID NO: 2055608 - DNA, 25 bp, Homo sapien
catcattgttgcttgggtgtgcttc

SEQ ID NO: 2055609 - DNA, 25 bp, Homo sapien
gcttgggtgtgcttcttgccacttt

SEQ ID NO: 2055610 - DNA, 25 bp, Homo sapien
ttgccactttccataccgctgactg

SEQ ID NO: 2055611 - DNA, 25 bp, Homo sapien
gcaggaaattggcttgttccccaga

SEQ ID NO: 2055612 - DNA, 25 bp, Homo sapien
aggcaggaaattggcttgttcccca

SEQ ID NO: 2055613 - DNA, 25 bp, Homo sapien
gaaattggcttgttccccagaagca

SEQ ID NO: 2055614 - DNA, 25 bp, Homo sapien
ctagggaaggcaggaaattggcttg

SEQ ID NO: 2055615 - DNA, 25 bp, Homo sapien
taaacctagctgttccactagccaa

SEQ ID NO: 2055616 - DNA, 25 bp, Homo sapien
gccaacccatcacactactgtctcc

SEQ ID NO: 2055617 - DNA, 25 bp, Homo sapien
cactactgtctcctctatcagatga

SEQ ID NO: 2055618 - DNA, 25 bp, Homo sapien
ctctatcagatgattcatactccat

SEQ ID NO: 2055619 - DNA, 25 bp, Homo sapien
ctgtatccaccgtgcacttgctgtg

SEQ ID NO: 2055620 - DNA, 25 bp, Homo sapien
tgtatccaccgtgcacttgctgtgc

SEQ ID NO: 2055621 - DNA, 25 bp, Homo sapien
tgaagttgtcacttggcctctgtca

SEQ ID NO: 2055622 - DNA, 25 bp, Homo sapien
gaagttgtcacttggcctctgtcag

SEQ ID NO: 2055623 - DNA, 25 bp, Homo sapien
ctgctggaccgtgtaccctgggatc

SEQ ID NO: 2055624 - DNA, 25 bp, Homo sapien
tgtaaacgacacacacaggagggaa

SEQ ID NO: 2055625 - DNA, 25 bp, Homo sapien
tattcagaggctggcaagtggttca

SEQ ID NO: 2055626 - DNA, 25 bp, Homo sapien
ttcagcttggccatcagtaggtatt

SEQ ID NO: 2055627 - DNA, 25 bp, Homo sapien
ccacaaaagtgggaatagactctgt

SEQ ID NO: 2055628 - DNA, 25 bp, Homo sapien
tggagcagccacaaaagtgggaata

SEQ ID NO: 2055629 - DNA, 25 bp, Homo sapien
ccctggtcatcccagatatgttgca

SEQ ID NO: 2055630 - DNA, 25 bp, Homo sapien
gaatagactctgtactcggagcccc

SEQ ID NO: 2055631 - DNA, 25 bp, Homo sapien
cagatccttagtactcgtattcttc

SEQ ID NO: 2055632 - DNA, 25 bp, Homo sapien
gatccttagtactcgtattcttcac

SEQ ID NO: 2055633 - DNA, 25 bp, Homo sapien
gtactcgtattcttcacatctttaa

SEQ ID NO: 2055634 - DNA, 25 bp, Homo sapien
agtactcgtattcttcacatcttta

SEQ ID NO: 2055635 - DNA, 25 bp, Homo sapien
tatcttgtcagggacggctgtggaa

SEQ ID NO: 2055636 - DNA, 25 bp, Homo sapien
ctttctatcttgtcagggacggctg

SEQ ID NO: 2055637 - DNA, 25 bp, Homo sapien
tctatcttgtcagggacggctgtgg

SEQ ID NO: 2055638 - DNA, 25 bp, Homo sapien
gctgctttctatcttgtcagggacg

SEQ ID NO: 2055639 - DNA, 25 bp, Homo sapien
ctgccctgtactcccctggcctcat

SEQ ID NO: 2055640 - DNA, 25 bp, Homo sapien
tgggacattgtccttggctctttgc

SEQ ID NO: 2055641 - DNA, 25 bp, Homo sapien
taacttgtgaattaacaagggtggc

SEQ ID NO: 2055642 - DNA, 25 bp, Homo sapien
gctctttgcaaaacagcctgatcaa

SEQ ID NO: 2055643 - DNA, 25 bp, Homo sapien
caagggtggcattgatcaaagatct

SEQ ID NO: 2055644 - DNA, 25 bp, Homo sapien
catcatcagcttggtagtagtaata

SEQ ID NO: 2055645 - DNA, 25 bp, Homo sapien
tcagcttggtagtagtaatagcatc

SEQ ID NO: 2055646 - DNA, 25 bp, Homo sapien
catcaaaaggcttaattagagctat

SEQ ID NO: 2055647 - DNA, 25 bp, Homo sapien
taattagagctattaagtttgctgt

SEQ ID NO: 2055648 - DNA, 25 bp, Homo sapien
caaacaacctccatctactcttctc

SEQ ID NO: 2055649 - DNA, 25 bp, Homo sapien
tttcaaacaacctccatctactctt

SEQ ID NO: 2055650 - DNA, 25 bp, Homo sapien
tttttcaaacaacctccatctactc

SEQ ID NO: 2055651 - DNA, 25 bp, Homo sapien
acaacctccatctactcttctccat

SEQ ID NO: 2055652 - DNA, 25 bp, Homo sapien
gcaataaactctggccgtgcatgca

SEQ ID NO: 2055653 - DNA, 25 bp, Homo sapien
cccagcattgagaggtggcgatagg

SEQ ID NO: 2055654 - DNA, 25 bp, Homo sapien
gcttgtggacagcatgtctgagtca

SEQ ID NO: 2055655 - DNA, 25 bp, Homo sapien
tggcgataggatgaacgtagcttgt

SEQ ID NO: 2055656 - DNA, 25 bp, Homo sapien
aatgtagatggccttaagcttgtaa

SEQ ID NO: 2055657 - DNA, 25 bp, Homo sapien
gtagatggccttaagcttgtaactc

SEQ ID NO: 2055658 - DNA, 25 bp, Homo sapien
ctgggttccctaatatgagaactcc

SEQ ID NO: 2055659 - DNA, 25 bp, Homo sapien
cctaatatgagaactcccaatgtag

SEQ ID NO: 2055660 - DNA, 25 bp, Homo sapien
gatcttgctgaattcaactcctcct

SEQ ID NO: 2055661 - DNA, 25 bp, Homo sapien
tactggatcttgctgaattcaactc

SEQ ID NO: 2055662 - DNA, 25 bp, Homo sapien
tggatcttgctgaattcaactcctc

SEQ ID NO: 2055663 - DNA, 25 bp, Homo sapien
ctccttctccaaattctgtgtgcag

SEQ ID NO: 2055664 - DNA, 25 bp, Homo sapien
tagtcccttcagtggcaccaaatca

SEQ ID NO: 2055665 - DNA, 25 bp, Homo sapien
tgatccctaatggagcttccttcca

SEQ ID NO: 2055666 - DNA, 25 bp, Homo sapien
cactgctgatccctaatggagcttc

SEQ ID NO: 2055667 - DNA, 25 bp, Homo sapien
tgctgcaggaccataagggtttctt

SEQ ID NO: 2055668 - DNA, 25 bp, Homo sapien
gaaacaggcctgtgaaatagcccat

SEQ ID NO: 2055669 - DNA, 25 bp, Homo sapien
ggaaacaggcctgtgaaatagccca

SEQ ID NO: 2055670 - DNA, 25 bp, Homo sapien
ctctgggaaacaggcctgtgaaata

SEQ ID NO: 2055671 - DNA, 25 bp, Homo sapien
tgggaaacaggcctgtgaaatagcc

SEQ ID NO: 2055672 - DNA, 25 bp, Homo sapien
gacacaggttcttttagacttaata

SEQ ID NO: 2055673 - DNA, 25 bp, Homo sapien
tgacacaggttcttttagacttaat

SEQ ID NO: 2055674 - DNA, 25 bp, Homo sapien
cttgttccattgagtctcagcttca

SEQ ID NO: 2055675 - DNA, 25 bp, Homo sapien
ctgtctcaacttgttccattgagtc

SEQ ID NO: 2055676 - DNA, 25 bp, Homo sapien
tgcttgcagttaaacttgtcacatc

SEQ ID NO: 2055677 - DNA, 25 bp, Homo sapien
taaacttgtcacatcaggttctcga

SEQ ID NO: 2055678 - DNA, 25 bp, Homo sapien
gcagttaaacttgtcacatcaggtt

SEQ ID NO: 2055679 - DNA, 25 bp, Homo sapien
gtcacatcaggttctcgaatactca

SEQ ID NO: 2055680 - DNA, 25 bp, Homo sapien
ctagttcttgtcagcatcgtttatg

SEQ ID NO: 2055681 - DNA, 25 bp, Homo sapien
cagcatcgtttatgcgaggtgggtc

SEQ ID NO: 2055682 - DNA, 25 bp, Homo sapien
tttatgcgaggtgggtcatacggca

SEQ ID NO: 2055683 - DNA, 25 bp, Homo sapien
tcttgtcagcatcgtttatgcgagg

SEQ ID NO: 2055684 - DNA, 25 bp, Homo sapien
ctgtgccaaggatgtttatgtctgt

SEQ ID NO: 2055685 - DNA, 25 bp, Homo sapien
gaaaagcaagattattactgtcgta

SEQ ID NO: 2055686 - DNA, 25 bp, Homo sapien
tgttgccttgtaaacagatgaacaa

SEQ ID NO: 2055687 - DNA, 25 bp, Homo sapien
tgttttgttgccttgtaaacagatg

SEQ ID NO: 2055688 - DNA, 25 bp, Homo sapien
tttagttgctggcttcatgctttca

SEQ ID NO: 2055689 - DNA, 25 bp, Homo sapien
aaagtctctgtgatggccactgcct

SEQ ID NO: 2055690 - DNA, 25 bp, Homo sapien
ctgtgttatacctgtgctttctgtg

SEQ ID NO: 2055691 - DNA, 25 bp, Homo sapien
tagaacctgtccagttttggtccca

SEQ ID NO: 2055692 - DNA, 25 bp, Homo sapien
agaggtacagatatgcagagcttgc

SEQ ID NO: 2055693 - DNA, 25 bp, Homo sapien
aaaattcagagagcgtgaggaactc

SEQ ID NO: 2055694 - DNA, 25 bp, Homo sapien
cagagcttgcttttacctacaggca

SEQ ID NO: 2055695 - DNA, 25 bp, Homo sapien
gaatgctacatatggaattgtccaa

SEQ ID NO: 2055696 - DNA, 25 bp, Homo sapien
atggactccttcttgcgaatttccc

SEQ ID NO: 2055697 - DNA, 25 bp, Homo sapien
tcttgcgaatttccctcactaagcc

SEQ ID NO: 2055698 - DNA, 25 bp, Homo sapien
aagcatcatcaatacagaatctgag

SEQ ID NO: 2055699 - DNA, 25 bp, Homo sapien
tccttcttgcgaatttccctcacta

SEQ ID NO: 2055700 - DNA, 25 bp, Homo sapien
taataatcttccattattaaccaat

SEQ ID NO: 2055701 - DNA, 25 bp, Homo sapien
tccattattaaccaatatggtgatt

SEQ ID NO: 2055702 - DNA, 25 bp, Homo sapien
tattaaccaatatggtgatttttgg

SEQ ID NO: 2055703 - DNA, 25 bp, Homo sapien
taaccaatatggtgatttttggtga

SEQ ID NO: 2055704 - DNA, 25 bp, Homo sapien
caaccaaatgcaaggcagctggaca

SEQ ID NO: 2055705 - DNA, 25 bp, Homo sapien
aggcagctggacagaaatcatattt

SEQ ID NO: 2055706 - DNA, 25 bp, Homo sapien
caaatgcaaggcagctggacagaaa

SEQ ID NO: 2055707 - DNA, 25 bp, Homo sapien
tgcaaggcagctggacagaaatcat

SEQ ID NO: 2055708 - DNA, 25 bp, Homo sapien
ttgctgttctggagagatattgatt

SEQ ID NO: 2055709 - DNA, 25 bp, Homo sapien
tgctgttctggagagatattgattg

SEQ ID NO: 2055710 - DNA, 25 bp, Homo sapien
ttagactgctttgtacaggagacat

SEQ ID NO: 2055711 - DNA, 25 bp, Homo sapien
ttaaatggtgtagccagtcgttctg

SEQ ID NO: 2055712 - DNA, 25 bp, Homo sapien
actgctttgtacaggagacatttga

SEQ ID NO: 2055713 - DNA, 25 bp, Homo sapien
agacacgggatggtaatggctctag

SEQ ID NO: 2055714 - DNA, 25 bp, Homo sapien
tgctgctgcacaccaggtctagtga

SEQ ID NO: 2055715 - DNA, 25 bp, Homo sapien
ctgctgctgcacaccaggtctagtg

SEQ ID NO: 2055716 - DNA, 25 bp, Homo sapien
aggcaaatgcaagacccccaagatc

SEQ ID NO: 2055717 - DNA, 25 bp, Homo sapien
acaggcaaatgcaagacccccaaga

SEQ ID NO: 2055718 - DNA, 25 bp, Homo sapien
ggcaaatgcaagacccccaagatct

SEQ ID NO: 2055719 - DNA, 25 bp, Homo sapien
gcacaggcaaatgcaagacccccaa

SEQ ID NO: 2055720 - DNA, 25 bp, Homo sapien
gagctaggctgaaggaaatgacaca

SEQ ID NO: 2055721 - DNA, 25 bp, Homo sapien
gatatagtatcatcagcggctgagc

SEQ ID NO: 2055722 - DNA, 25 bp, Homo sapien
gcccatgtgtgtggaatagtcaaca

SEQ ID NO: 2055723 - DNA, 25 bp, Homo sapien
ctggaagtaaggatctacaatagat

SEQ ID NO: 2055724 - DNA, 25 bp, Homo sapien
gagcaaagaaagtattcggatttgg

SEQ ID NO: 2055725 - DNA, 25 bp, Homo sapien
cacagttctttagataagagaagca

SEQ ID NO: 2055726 - DNA, 25 bp, Homo sapien
aagagaagcaaaactacatgacagg

SEQ ID NO: 2055727 - DNA, 25 bp, Homo sapien
tagtcccagtttgagccattaagcc

SEQ ID NO: 2055728 - DNA, 25 bp, Homo sapien
gcagattaaataagctcaccaaagg

SEQ ID NO: 2055729 - DNA, 25 bp, Homo sapien
tagtgtatgcttatgccaagatctc

SEQ ID NO: 2055730 - DNA, 25 bp, Homo sapien
tctccgcaagaaagagtaaggtttc

SEQ ID NO: 2055731 - DNA, 25 bp, Homo sapien
tcaaggaggtcaaatgactcgtccc

SEQ ID NO: 2055732 - DNA, 25 bp, Homo sapien
tcacaaacataggtgccaaaatctt

SEQ ID NO: 2055733 - DNA, 25 bp, Homo sapien
tccagagcaaacatcatacttcaat

SEQ ID NO: 2055734 - DNA, 25 bp, Homo sapien
attcttgcttggtatggcatcagct

SEQ ID NO: 2055735 - DNA, 25 bp, Homo sapien
gaaaattagagtccaatctcacaaa

SEQ ID NO: 2055736 - DNA, 25 bp, Homo sapien
atcacaggggaagttgaaccaggta

SEQ ID NO: 2055737 - DNA, 25 bp, Homo sapien
tcaacacttgaagtactcacaccat

SEQ ID NO: 2055738 - DNA, 25 bp, Homo sapien
ttggaaagtttgaatcatcacaggg

SEQ ID NO: 2055739 - DNA, 25 bp, Homo sapien
tgttggttgccatgcctttctccct

SEQ ID NO: 2055740 - DNA, 25 bp, Homo sapien
tctgattgacaagagtccatatctt

SEQ ID NO: 2055741 - DNA, 25 bp, Homo sapien
caagagtccatatcttgtaactcat

SEQ ID NO: 2055742 - DNA, 25 bp, Homo sapien
ctgagcttcagtctgattgacaaga

SEQ ID NO: 2055743 - DNA, 25 bp, Homo sapien
gcttcagtctgattgacaagagtcc

SEQ ID NO: 2055744 - DNA, 25 bp, Homo sapien
ggaaagtgaatatccagggccatct

SEQ ID NO: 2055745 - DNA, 25 bp, Homo sapien
gaaagtgaatatccagggccatctc

SEQ ID NO: 2055746 - DNA, 25 bp, Homo sapien
gaggaaagtgaatatccagggccat

SEQ ID NO: 2055747 - DNA, 25 bp, Homo sapien
aaagtgaatatccagggccatctcc

SEQ ID NO: 2055748 - DNA, 25 bp, Homo sapien
gagaaggcatggattcaacgtccac

SEQ ID NO: 2055749 - DNA, 25 bp, Homo sapien
ttgtgagaaggcatggattcaacgt

SEQ ID NO: 2055750 - DNA, 25 bp, Homo sapien
gattcaacgtccacttcaaatttaa

SEQ ID NO: 2055751 - DNA, 25 bp, Homo sapien
ggcatggattcaacgtccacttcaa

SEQ ID NO: 2055752 - DNA, 25 bp, Homo sapien
tcttatcttcacagaaacaatctaa

SEQ ID NO: 2055753 - DNA, 25 bp, Homo sapien
tcattttgaagtgtcctgtttctta

SEQ ID NO: 2055754 - DNA, 25 bp, Homo sapien
tcctgtttcttatcttcacagaaac

SEQ ID NO: 2055755 - DNA, 25 bp, Homo sapien
cattttgaagtgtcctgtttcttat

SEQ ID NO: 2055756 - DNA, 25 bp, Homo sapien
aggaagaatccaacaatggaagtat

SEQ ID NO: 2055757 - DNA, 25 bp, Homo sapien
ttgatgccaaaatggacaggaagaa

SEQ ID NO: 2055758 - DNA, 25 bp, Homo sapien
cttgatgccaaaatggacaggaaga

SEQ ID NO: 2055759 - DNA, 25 bp, Homo sapien
caatggaagtataagcaaatcttac

SEQ ID NO: 2055760 - DNA, 25 bp, Homo sapien
ttatcgagtacagccagagcctaac

SEQ ID NO: 2055761 - DNA, 25 bp, Homo sapien
caaatgttagggtttgggcaggcaa

SEQ ID NO: 2055762 - DNA, 25 bp, Homo sapien
ccacaaatgttagggtttgggcagg

SEQ ID NO: 2055763 - DNA, 25 bp, Homo sapien
gagcctaactgctgagtgttgagga

SEQ ID NO: 2055764 - DNA, 25 bp, Homo sapien
ctccttgtccataagatgctactgc

SEQ ID NO: 2055765 - DNA, 25 bp, Homo sapien
taagaagcatgctagtatcttgaag

SEQ ID NO: 2055766 - DNA, 25 bp, Homo sapien
ccaactttgggctactactggctta

SEQ ID NO: 2055767 - DNA, 25 bp, Homo sapien
tactggcttatccatggcctggaac

SEQ ID NO: 2055768 - DNA, 25 bp, Homo sapien
caaatatgaaaagaagcagcttcaa

SEQ ID NO: 2055769 - DNA, 25 bp, Homo sapien
aaatatgaaaagaagcagcttcaac

SEQ ID NO: 2055770 - DNA, 25 bp, Homo sapien
atatgaaaagaagcagcttcaacca

SEQ ID NO: 2055771 - DNA, 25 bp, Homo sapien
aatatgaaaagaagcagcttcaacc

SEQ ID NO: 2055772 - DNA, 25 bp, Homo sapien
tcagaattcttcccttccaaactct

SEQ ID NO: 2055773 - DNA, 25 bp, Homo sapien
tcttcccttccaaactctttcagtg

SEQ ID NO: 2055774 - DNA, 25 bp, Homo sapien
cccttccaaactctttcagtgtagg

SEQ ID NO: 2055775 - DNA, 25 bp, Homo sapien
ttcccttccaaactctttcagtgta

SEQ ID NO: 2055776 - DNA, 25 bp, Homo sapien
tattttgtactatgcatcctcagag

SEQ ID NO: 2055777 - DNA, 25 bp, Homo sapien
gaggccaacacaatttaccatggga

SEQ ID NO: 2055778 - DNA, 25 bp, Homo sapien
tgggaccaccatgacttattagaaa

SEQ ID NO: 2055779 - DNA, 25 bp, Homo sapien
gcaaaagacagaagctaccagataa

SEQ ID NO: 2055780 - DNA, 25 bp, Homo sapien
aattttgttacccaccagcaccagg

SEQ ID NO: 2055781 - DNA, 25 bp, Homo sapien
cagcctcctgaaatgattgacggtc

SEQ ID NO: 2055782 - DNA, 25 bp, Homo sapien
ggcggacctgaaaaatgagctcttt

SEQ ID NO: 2055783 - DNA, 25 bp, Homo sapien
gtactgctcccgcatggctgtgaat

SEQ ID NO: 2055784 - DNA, 25 bp, Homo sapien
gtgccttcagacacattattcctca

SEQ ID NO: 2055785 - DNA, 25 bp, Homo sapien
tgtgccttcagacacattattcctc

SEQ ID NO: 2055786 - DNA, 25 bp, Homo sapien
tgccttcagacacattattcctcat

SEQ ID NO: 2055787 - DNA, 25 bp, Homo sapien
aaggcttgcatgtaccttcaccctc

SEQ ID NO: 2055788 - DNA, 25 bp, Homo sapien
tatggcttggcataaggactgcttt

SEQ ID NO: 2055789 - DNA, 25 bp, Homo sapien
tggactcagtatcggaagcctctct

SEQ ID NO: 2055790 - DNA, 25 bp, Homo sapien
gctgctggcaggactcaacttctat

SEQ ID NO: 2055791 - DNA, 25 bp, Homo sapien
tgtggcggttccaagttaactccca

SEQ ID NO: 2055792 - DNA, 25 bp, Homo sapien
agttaactcccagggcctgatctct

SEQ ID NO: 2055793 - DNA, 25 bp, Homo sapien
gggcctgatctctgatatttggtct

SEQ ID NO: 2055794 - DNA, 25 bp, Homo sapien
aactcccagggcctgatctctgata

SEQ ID NO: 2055795 - DNA, 25 bp, Homo sapien
tttcccacagctctacttcccatct

SEQ ID NO: 2055796 - DNA, 25 bp, Homo sapien
cacatagaccatggcttccaagcca

SEQ ID NO: 2055797 - DNA, 25 bp, Homo sapien
gaacttggagctctaattagatgcc

SEQ ID NO: 2055798 - DNA, 25 bp, Homo sapien
ccaaaaagatctgaactataccaca

SEQ ID NO: 2055799 - DNA, 25 bp, Homo sapien
aatagagagtgctgcagcaatactt

SEQ ID NO: 2055800 - DNA, 25 bp, Homo sapien
ggacacaggatcttcataaagggct

SEQ ID NO: 2055801 - DNA, 25 bp, Homo sapien
aaagggctacttttctcggcatcat

SEQ ID NO: 2055802 - DNA, 25 bp, Homo sapien
tctgtggtagattcccaaggacaca

SEQ ID NO: 2055803 - DNA, 25 bp, Homo sapien
tagcactgttcaagcttcactcttc

SEQ ID NO: 2055804 - DNA, 25 bp, Homo sapien
gagtgtaaaatcaaggtaggagtat

SEQ ID NO: 2055805 - DNA, 25 bp, Homo sapien
cacatttctctgaactagagtgtaa

SEQ ID NO: 2055806 - DNA, 25 bp, Homo sapien
ctgataactggctttcactcgtaac

SEQ ID NO: 2055807 - DNA, 25 bp, Homo sapien
gctttcactcgtaaccacacatttc

SEQ ID NO: 2055808 - DNA, 25 bp, Homo sapien
atgaggtaagattctccatctccag

SEQ ID NO: 2055809 - DNA, 25 bp, Homo sapien
cacccacaatgaggtaagattctcc

SEQ ID NO: 2055810 - DNA, 25 bp, Homo sapien
cacaatgaggtaagattctccatct

SEQ ID NO: 2055811 - DNA, 25 bp, Homo sapien
cacttcacccacaatgaggtaagat

SEQ ID NO: 2055812 - DNA, 25 bp, Homo sapien
tggccagcagtgtccaagatgtcca

SEQ ID NO: 2055813 - DNA, 25 bp, Homo sapien
cagtgtccaagatgtccaagtaagc

SEQ ID NO: 2055814 - DNA, 25 bp, Homo sapien
gtaagctggctcattgtcaatcctg

SEQ ID NO: 2055815 - DNA, 25 bp, Homo sapien
caagatgtccaagtaagctggctca

SEQ ID NO: 2055816 - DNA, 25 bp, Homo sapien
tgaaaaacacaagacaacatttaca

SEQ ID NO: 2055817 - DNA, 25 bp, Homo sapien
tacatttaaatgtgacaggaaaggc

SEQ ID NO: 2055818 - DNA, 25 bp, Homo sapien
tttacatttaaatgtgacaggaaag

SEQ ID NO: 2055819 - DNA, 25 bp, Homo sapien
aacacaagacaacatttacatttaa

SEQ ID NO: 2055820 - DNA, 25 bp, Homo sapien
ttgcatgtggacaaaagattttctt

SEQ ID NO: 2055821 - DNA, 25 bp, Homo sapien
gaatgcacataatctcacatgctgg

SEQ ID NO: 2055822 - DNA, 25 bp, Homo sapien
taaagcgtgacattgacacttccca

SEQ ID NO: 2055823 - DNA, 25 bp, Homo sapien
ggaagcttctttcacctctaatttg

SEQ ID NO: 2055824 - DNA, 25 bp, Homo sapien
catgtccccgtctgatgcagcgttg

SEQ ID NO: 2055825 - DNA, 25 bp, Homo sapien
tagggtcatgataatcagggaactg

SEQ ID NO: 2055826 - DNA, 25 bp, Homo sapien
taatcagggaactgatgactaataa

SEQ ID NO: 2055827 - DNA, 25 bp, Homo sapien
tcatgataatcagggaactgatgac

SEQ ID NO: 2055828 - DNA, 25 bp, Homo sapien
ctatagtagggtcatgataatcagg

SEQ ID NO: 2055829 - DNA, 25 bp, Homo sapien
tttcttataatcttccgctttttca

SEQ ID NO: 2055830 - DNA, 25 bp, Homo sapien
tattcatggctattgtgcttatatc

SEQ ID NO: 2055831 - DNA, 25 bp, Homo sapien
tcatggctattgtgcttatatctct

SEQ ID NO: 2055832 - DNA, 25 bp, Homo sapien
tataatcttccgctttttcactcat

SEQ ID NO: 2055833 - DNA, 25 bp, Homo sapien
cattggaactctttgaccacttgca

SEQ ID NO: 2055834 - DNA, 25 bp, Homo sapien
tagctaaatgctcccaaggcagagt

SEQ ID NO: 2055835 - DNA, 25 bp, Homo sapien
caacgctagattgtgcagctgggtc

SEQ ID NO: 2055836 - DNA, 25 bp, Homo sapien
tggcaggatttggacacattggaac

SEQ ID NO: 2055837 - DNA, 25 bp, Homo sapien
aagggccagtgccataaacctgtca

SEQ ID NO: 2055838 - DNA, 25 bp, Homo sapien
gacatctatgaatctcatgtttcaa

SEQ ID NO: 2055839 - DNA, 25 bp, Homo sapien
tcattccaaatagcactacatactt

SEQ ID NO: 2055840 - DNA, 25 bp, Homo sapien
caacacattcccaataacacaaacg

SEQ ID NO: 2055841 - DNA, 25 bp, Homo sapien
ttcttgccgtctgtactctgcattt

SEQ ID NO: 2055842 - DNA, 25 bp, Homo sapien
cttcttgccgtctgtactctgcatt

SEQ ID NO: 2055843 - DNA, 25 bp, Homo sapien
tcttgccgtctgtactctgcatttc

SEQ ID NO: 2055844 - DNA, 25 bp, Homo sapien
tctcagctgcatcaatcttctgtcc

SEQ ID NO: 2055845 - DNA, 25 bp, Homo sapien
ttaatcttcttctgagttgtttctc

SEQ ID NO: 2055846 - DNA, 25 bp, Homo sapien
ggatgaaaagatcatgctctatctg

SEQ ID NO: 2055847 - DNA, 25 bp, Homo sapien
tggatgaaaagatcatgctctatct

SEQ ID NO: 2055848 - DNA, 25 bp, Homo sapien
tctgagggcatttgtgtaactgctc

SEQ ID NO: 2055849 - DNA, 25 bp, Homo sapien
agttgctgaagttgctcggtggtcc

SEQ ID NO: 2055850 - DNA, 25 bp, Homo sapien
tccttggtgtggttgtctagaggcc

SEQ ID NO: 2055851 - DNA, 25 bp, Homo sapien
ccattcctgtattgaagttgctgaa

SEQ ID NO: 2055852 - DNA, 25 bp, Homo sapien
tttgataaagatattggcctttgtg

SEQ ID NO: 2055853 - DNA, 25 bp, Homo sapien
tatatggtaacgagcacagtggaca

SEQ ID NO: 2055854 - DNA, 25 bp, Homo sapien
gatatggaatacaacggaacgccca

SEQ ID NO: 2055855 - DNA, 25 bp, Homo sapien
cagtggacagtggttaagggcctca

SEQ ID NO: 2055856 - DNA, 25 bp, Homo sapien
gagtctaggttgttcccaagccaca

SEQ ID NO: 2055857 - DNA, 25 bp, Homo sapien
catttgaagatgtatgttgacaaca

SEQ ID NO: 2055858 - DNA, 25 bp, Homo sapien
cacatttgaagatgtatgttgacaa

SEQ ID NO: 2055859 - DNA, 25 bp, Homo sapien
gacttgcatagtgtttcatacatat

SEQ ID NO: 2055860 - DNA, 25 bp, Homo sapien
tcaatgacttgcatagtgtttcata

SEQ ID NO: 2055861 - DNA, 25 bp, Homo sapien
ctggacccgcctgatgcgctgcccg

SEQ ID NO: 2055862 - DNA, 25 bp, Homo sapien
cccctgctcccagcattaccacctt

SEQ ID NO: 2055863 - DNA, 25 bp, Homo sapien
tgctcccagcattaccaccttgtac

SEQ ID NO: 2055864 - DNA, 25 bp, Homo sapien
tggacccgcctgatgcgctgcccgg

SEQ ID NO: 2055865 - DNA, 25 bp, Homo sapien
gctcgagcgggtctcatagcaacca

SEQ ID NO: 2055866 - DNA, 25 bp, Homo sapien
cccgtgtcaggtgcttgctcgaata

SEQ ID NO: 2055867 - DNA, 25 bp, Homo sapien
taagaaccatcagcgtcgggctggc

SEQ ID NO: 2055868 - DNA, 25 bp, Homo sapien
gcaactctaaaactgtgtcaaagca

SEQ ID NO: 2055869 - DNA, 25 bp, Homo sapien
tcctcttgtctaagttagccaagaa

SEQ ID NO: 2055870 - DNA, 25 bp, Homo sapien
gaaacatatgggccatcagacttcc

SEQ ID NO: 2055871 - DNA, 25 bp, Homo sapien
ccaaaacattagattcctcttgtct

SEQ ID NO: 2055872 - DNA, 25 bp, Homo sapien
aaacatatgggccatcagacttccc

SEQ ID NO: 2055873 - DNA, 25 bp, Homo sapien
gatggcttttcggtcaccacagtca

SEQ ID NO: 2055874 - DNA, 25 bp, Homo sapien
caattcatgctcagatttgatggct

SEQ ID NO: 2055875 - DNA, 25 bp, Homo sapien
cttccaggaacaattcatgctcaga

SEQ ID NO: 2055876 - DNA, 25 bp, Homo sapien
tcaccacagtcaagtttctgggcat

SEQ ID NO: 2055877 - DNA, 25 bp, Homo sapien
cactcagcagtgacagacaattcat

SEQ ID NO: 2055878 - DNA, 25 bp, Homo sapien
atgcttgttcccgtgaaccaaccag

SEQ ID NO: 2055879 - DNA, 25 bp, Homo sapien
gcaaatcctgccaggtaattggaat

SEQ ID NO: 2055880 - DNA, 25 bp, Homo sapien
aaacatgcttgttcccgtgaaccaa

SEQ ID NO: 2055881 - DNA, 25 bp, Homo sapien
gcttgttcccgtgaaccaaccagga

SEQ ID NO: 2055882 - DNA, 25 bp, Homo sapien
taatctgtactcatttcggagacac

SEQ ID NO: 2055883 - DNA, 25 bp, Homo sapien
aataatctgtactcatttcggagac

SEQ ID NO: 2055884 - DNA, 25 bp, Homo sapien
ttataataatctgtactcatttcgg

SEQ ID NO: 2055885 - DNA, 25 bp, Homo sapien
ataataatctgtactcatttcggag

SEQ ID NO: 2055886 - DNA, 25 bp, Homo sapien
ggttactattcgatcctctgagaag

SEQ ID NO: 2055887 - DNA, 25 bp, Homo sapien
ttactggttactattcgatcctctg

SEQ ID NO: 2055888 - DNA, 25 bp, Homo sapien
cttctttactggttactattcgatc

SEQ ID NO: 2055889 - DNA, 25 bp, Homo sapien
ctggttactattcgatcctctgaga

SEQ ID NO: 2055890 - DNA, 25 bp, Homo sapien
tacatagggatttctcaggccacac

SEQ ID NO: 2055891 - DNA, 25 bp, Homo sapien
taagttccaactcacggctaggatg

SEQ ID NO: 2055892 - DNA, 25 bp, Homo sapien
gactctgggtacaaacgatggcctt

SEQ ID NO: 2055893 - DNA, 25 bp, Homo sapien
tctggctgccgtgaagaatacttag

SEQ ID NO: 2055894 - DNA, 25 bp, Homo sapien
tcacagagcacgtgccacttggcaa

SEQ ID NO: 2055895 - DNA, 25 bp, Homo sapien
ggcatggtacaggttcactttgaca

SEQ ID NO: 2055896 - DNA, 25 bp, Homo sapien
tgcacccaagactaactgcccgatt

SEQ ID NO: 2055897 - DNA, 25 bp, Homo sapien
ttatatcttcaaggccctcacaagg

SEQ ID NO: 2055898 - DNA, 25 bp, Homo sapien
tttaagacaaccacagttagagtgt

SEQ ID NO: 2055899 - DNA, 25 bp, Homo sapien
taggcagatgtcgagcttttaagac

SEQ ID NO: 2055900 - DNA, 25 bp, Homo sapien
ctgaaagtccggacacatcagattt

SEQ ID NO: 2055901 - DNA, 25 bp, Homo sapien
gcttttaagacaaccacagttagag

SEQ ID NO: 2055902 - DNA, 25 bp, Homo sapien
gagagagatcagtaactcaccccgt

SEQ ID NO: 2055903 - DNA, 25 bp, Homo sapien
gagagatcagtaactcaccccgtcc

SEQ ID NO: 2055904 - DNA, 25 bp, Homo sapien
gcagagagagatcagtaactcaccc

SEQ ID NO: 2055905 - DNA, 25 bp, Homo sapien
gatcagtaactcaccccgtcctgaa

SEQ ID NO: 2055906 - DNA, 25 bp, Homo sapien
tcatcgactgctcatccatggctgg

SEQ ID NO: 2055907 - DNA, 25 bp, Homo sapien
tgtaaaggtctcatcaaaagctgga

SEQ ID NO: 2055908 - DNA, 25 bp, Homo sapien
gccacgggcttccttgatattgacc

SEQ ID NO: 2055909 - DNA, 25 bp, Homo sapien
ccagatcagaaggactgccaggttt

SEQ ID NO: 2055910 - DNA, 25 bp, Homo sapien
tgaagatccccaccactgtggggat

SEQ ID NO: 2055911 - DNA, 25 bp, Homo sapien
aagatccccaccactgtggggattt

SEQ ID NO: 2055912 - DNA, 25 bp, Homo sapien
ctgaagatccccaccactgtgggga

SEQ ID NO: 2055913 - DNA, 25 bp, Homo sapien
gatccccaccactgtggggatttca

SEQ ID NO: 2055914 - DNA, 25 bp, Homo sapien
ttcttcccggctggtggtgatcgga

SEQ ID NO: 2055915 - DNA, 25 bp, Homo sapien
ttcccggctggtggtgatcggagcc

SEQ ID NO: 2055916 - DNA, 25 bp, Homo sapien
cccggctggtggtgatcggagccat

SEQ ID NO: 2055917 - DNA, 25 bp, Homo sapien
caaattcttcccggctggtggtgat

SEQ ID NO: 2055918 - DNA, 25 bp, Homo sapien
tttttactgcgtgttctgtccgagg

SEQ ID NO: 2055919 - DNA, 25 bp, Homo sapien
tactgcgtgttctgtccgaggtgct

SEQ ID NO: 2055920 - DNA, 25 bp, Homo sapien
ttactgcgtgttctgtccgaggtgc

SEQ ID NO: 2055921 - DNA, 25 bp, Homo sapien
tttactgcgtgttctgtccgaggtg

SEQ ID NO: 2055922 - DNA, 25 bp, Homo sapien
cctggatctcaagcgccggctttcg

SEQ ID NO: 2055923 - DNA, 25 bp, Homo sapien
ccggctttcggagcgctgaaaacaa

SEQ ID NO: 2055924 - DNA, 25 bp, Homo sapien
ttgcctggatctcaagcgccggctt

SEQ ID NO: 2055925 - DNA, 25 bp, Homo sapien
tcaagcgccggctttcggagcgctg

SEQ ID NO: 2055926 - DNA, 25 bp, Homo sapien
gcaaagagggaggtccactcgccct

SEQ ID NO: 2055927 - DNA, 25 bp, Homo sapien
agtgatttgccacctcggttcctgt

SEQ ID NO: 2055928 - DNA, 25 bp, Homo sapien
tcttctgagaagctcgtctccgaga

SEQ ID NO: 2055929 - DNA, 25 bp, Homo sapien
gtctccgagactccagacgtggctg

SEQ ID NO: 2055930 - DNA, 25 bp, Homo sapien
caaattactctttttaacatgcaaa

SEQ ID NO: 2055931 - DNA, 25 bp, Homo sapien
tttctgcttcaaattactcttttta

SEQ ID NO: 2055932 - DNA, 25 bp, Homo sapien
gaagtttctgcttcaaattactctt

SEQ ID NO: 2055933 - DNA, 25 bp, Homo sapien
tactctttttaacatgcaaaaacat

SEQ ID NO: 2055934 - DNA, 25 bp, Homo sapien
tcaaatgcgtaaagcaaaattgtga

SEQ ID NO: 2055935 - DNA, 25 bp, Homo sapien
atcaaatgcgtaaagcaaaattgtg

SEQ ID NO: 2055936 - DNA, 25 bp, Homo sapien
catcaaatgcgtaaagcaaaattgt

SEQ ID NO: 2055937 - DNA, 25 bp, Homo sapien
caaatgcgtaaagcaaaattgtgaa

SEQ ID NO: 2055938 - DNA, 25 bp, Homo sapien
gagatagtcctttatacacgttgca

SEQ ID NO: 2055939 - DNA, 25 bp, Homo sapien
catgactcataattgagagatagtc

SEQ ID NO: 2055940 - DNA, 25 bp, Homo sapien
tacacgttgcatcatctgatggctg

SEQ ID NO: 2055941 - DNA, 25 bp, Homo sapien
gaaagtgtctgtaacagtcaatgca

SEQ ID NO: 2055942 - DNA, 25 bp, Homo sapien
gttgctgtcgttcttcccctctttc

SEQ ID NO: 2055943 - DNA, 25 bp, Homo sapien
caggttgctgtcgttcttcccctct

SEQ ID NO: 2055944 - DNA, 25 bp, Homo sapien
tccaggttgctgtcgttcttcccct

SEQ ID NO: 2055945 - DNA, 25 bp, Homo sapien
aggttgctgtcgttcttcccctctt

SEQ ID NO: 2055946 - DNA, 25 bp, Homo sapien
ccaacaatgatgtatgatgtaagat

SEQ ID NO: 2055947 - DNA, 25 bp, Homo sapien
caccaacaatgatgtatgatgtaag

SEQ ID NO: 2055948 - DNA, 25 bp, Homo sapien
accaacaatgatgtatgatgtaaga

SEQ ID NO: 2055949 - DNA, 25 bp, Homo sapien
tcagcttgctcttggtgtgcgttta

SEQ ID NO: 2055950 - DNA, 25 bp, Homo sapien
tgtgcgtttatcacgcttaccagaa

SEQ ID NO: 2055951 - DNA, 25 bp, Homo sapien
tgagaccaaaaggttcctccactag

SEQ ID NO: 2055952 - DNA, 25 bp, Homo sapien
cctccactagagatgtattttggaa

SEQ ID NO: 2055953 - DNA, 25 bp, Homo sapien
tgatagtgacatcttgggaagtcgt

SEQ ID NO: 2055954 - DNA, 25 bp, Homo sapien
tggtagtccccttgatctgaagcat

SEQ ID NO: 2055955 - DNA, 25 bp, Homo sapien
ttgggaagtcgtgtctccaggcctc

SEQ ID NO: 2055956 - DNA, 25 bp, Homo sapien
tgtctccaggcctcacgctggtagt

SEQ ID NO: 2055957 - DNA, 25 bp, Homo sapien
cacaaggctttatgtttcaggttta

SEQ ID NO: 2055958 - DNA, 25 bp, Homo sapien
gcacaaggctttatgtttcaggttt

SEQ ID NO: 2055959 - DNA, 25 bp, Homo sapien
cagcacaaggctttatgtttcaggt

SEQ ID NO: 2055960 - DNA, 25 bp, Homo sapien
tcagcacaaggctttatgtttcagg

SEQ ID NO: 2055961 - DNA, 25 bp, Homo sapien
tgtgtatcataagggattccacagg

SEQ ID NO: 2055962 - DNA, 25 bp, Homo sapien
tatcataagggattccacagggcca

SEQ ID NO: 2055963 - DNA, 25 bp, Homo sapien
ataagggattccacagggccagctg

SEQ ID NO: 2055964 - DNA, 25 bp, Homo sapien
tattttgtgtatcataagggattcc

SEQ ID NO: 2055965 - DNA, 25 bp, Homo sapien
ttccctctcgtgctgtaataaataa

SEQ ID NO: 2055966 - DNA, 25 bp, Homo sapien
tagacaggaataactatgaaattct

SEQ ID NO: 2055967 - DNA, 25 bp, Homo sapien
tctttgtctaatcaaaacgtaacag

SEQ ID NO: 2055968 - DNA, 25 bp, Homo sapien
cagtttaaccttaatatagacagga

SEQ ID NO: 2055969 - DNA, 25 bp, Homo sapien
cattggatagcaacgctcagctgca

SEQ ID NO: 2055970 - DNA, 25 bp, Homo sapien
gacaagttgcgtgtgcacctttaga

SEQ ID NO: 2055971 - DNA, 25 bp, Homo sapien
caattatgatgaaggtgatgccgat

SEQ ID NO: 2055972 - DNA, 25 bp, Homo sapien
taagaaggctcagcatccatgtgct

SEQ ID NO: 2055973 - DNA, 25 bp, Homo sapien
cagggagtccccaaaataactctga

SEQ ID NO: 2055974 - DNA, 25 bp, Homo sapien
aataggcctcactacactttgctgt

SEQ ID NO: 2055975 - DNA, 25 bp, Homo sapien
gtctgcagtgaccaaataggcctca

SEQ ID NO: 2055976 - DNA, 25 bp, Homo sapien
gcagggagtccccaaaataactctg

SEQ ID NO: 2055977 - DNA, 25 bp, Homo sapien
aggttttccagcgttatctcttgga

SEQ ID NO: 2055978 - DNA, 25 bp, Homo sapien
cagcgttatctcttggacctcatga

SEQ ID NO: 2055979 - DNA, 25 bp, Homo sapien
aatttacagagttcaggttttccag

SEQ ID NO: 2055980 - DNA, 25 bp, Homo sapien
tgaaatttacagagttcaggttttc

SEQ ID NO: 2055981 - DNA, 25 bp, Homo sapien
tcatctccggtacggaaacttcact

SEQ ID NO: 2055982 - DNA, 25 bp, Homo sapien
tcttggtcatctccggtacggaaac

SEQ ID NO: 2055983 - DNA, 25 bp, Homo sapien
tgtgctcttggtcatctccggtacg

SEQ ID NO: 2055984 - DNA, 25 bp, Homo sapien
ggtcatctccggtacggaaacttca

SEQ ID NO: 2055985 - DNA, 25 bp, Homo sapien
gcttgatagagcttttctaccagaa

SEQ ID NO: 2055986 - DNA, 25 bp, Homo sapien
taccagaaacttgtagcatactaac

SEQ ID NO: 2055987 - DNA, 25 bp, Homo sapien
ttaagtgtgtctgccttcaaagaga

SEQ ID NO: 2055988 - DNA, 25 bp, Homo sapien
gaattggatgcttatcaacaggcac

SEQ ID NO: 2055989 - DNA, 25 bp, Homo sapien
accgaggcctcttgccgggcatctt

SEQ ID NO: 2055990 - DNA, 25 bp, Homo sapien
tactgtgtggcattggtgtttcttt

SEQ ID NO: 2055991 - DNA, 25 bp, Homo sapien
ctggtgttgagtaccgatagctgca

SEQ ID NO: 2055992 - DNA, 25 bp, Homo sapien
gagtaccgatagctgcactggactt

SEQ ID NO: 2055993 - DNA, 25 bp, Homo sapien
aattggcatccaggagatgaaaagc

SEQ ID NO: 2055994 - DNA, 25 bp, Homo sapien
gaattggcatccaggagatgaaaag

SEQ ID NO: 2055995 - DNA, 25 bp, Homo sapien
attggcatccaggagatgaaaagct

SEQ ID NO: 2055996 - DNA, 25 bp, Homo sapien
catgacctcatccagctgggagatc

SEQ ID NO: 2055997 - DNA, 25 bp, Homo sapien
tgggaaggtaagtgactgggcaaag

SEQ ID NO: 2055998 - DNA, 25 bp, Homo sapien
tgaccaatcccataatgccttctga

SEQ ID NO: 2055999 - DNA, 25 bp, Homo sapien
tgtaagctttgtctgcatgacctca

SEQ ID NO: 2056000 - DNA, 25 bp, Homo sapien
ccattgtttcccttgtaattacaga

SEQ ID NO: 2056001 - DNA, 25 bp, Homo sapien
tgtaattacagactcatattcagct

SEQ ID NO: 2056002 - DNA, 25 bp, Homo sapien
gagcactttgggctaatgctgctct

SEQ ID NO: 2056003 - DNA, 25 bp, Homo sapien
tgtttcccttgtaattacagactca

SEQ ID NO: 2056004 - DNA, 25 bp, Homo sapien
catgttccaggttttccgttgctgt

SEQ ID NO: 2056005 - DNA, 25 bp, Homo sapien
tgtgtttctcccatactcctccagg

SEQ ID NO: 2056006 - DNA, 25 bp, Homo sapien
gctgagttcttcctggtctagatgt

SEQ ID NO: 2056007 - DNA, 25 bp, Homo sapien
caggctgagttcttcctggtctaga

SEQ ID NO: 2056008 - DNA, 25 bp, Homo sapien
gggaaagccagagtacagttgagta

SEQ ID NO: 2056009 - DNA, 25 bp, Homo sapien
tgaccgtagtgtggagaagagattg

SEQ ID NO: 2056010 - DNA, 25 bp, Homo sapien
taagttagtgattcattgcagttca

SEQ ID NO: 2056011 - DNA, 25 bp, Homo sapien
tacagttgagtacataagttagtga

SEQ ID NO: 2056012 - DNA, 25 bp, Homo sapien
gacattttagtgctattcatcctag

SEQ ID NO: 2056013 - DNA, 25 bp, Homo sapien
aaacccaggatttaatgagcagaac

SEQ ID NO: 2056014 - DNA, 25 bp, Homo sapien
tcaggtcgaaatacttctcatcaaa

SEQ ID NO: 2056015 - DNA, 25 bp, Homo sapien
tgagcagaacagattatggaattac

SEQ ID NO: 2056016 - DNA, 25 bp, Homo sapien
aaggctgcataagctgcggggaaca

SEQ ID NO: 2056017 - DNA, 25 bp, Homo sapien
cttgtctaattgcttctgcatgaag

SEQ ID NO: 2056018 - DNA, 25 bp, Homo sapien
tataaccttgtctaattgcttctgc

SEQ ID NO: 2056019 - DNA, 25 bp, Homo sapien
agagaatcttataaccttgtctaat

SEQ ID NO: 2056020 - DNA, 25 bp, Homo sapien
ttaaaccagaccaatacagacagag

SEQ ID NO: 2056021 - DNA, 25 bp, Homo sapien
catcataggcttgaggtgctataca

SEQ ID NO: 2056022 - DNA, 25 bp, Homo sapien
cagagagattgctaaacatatgcca

SEQ ID NO: 2056023 - DNA, 25 bp, Homo sapien
tatatagtctcttctacgggtggtg

SEQ ID NO: 2056024 - DNA, 25 bp, Homo sapien
ttgcaatgttggcgtcagtacccaa

SEQ ID NO: 2056025 - DNA, 25 bp, Homo sapien
tgttggcgtcagtacccaaattaac

SEQ ID NO: 2056026 - DNA, 25 bp, Homo sapien
ttggcgtcagtacccaaattaacta

SEQ ID NO: 2056027 - DNA, 25 bp, Homo sapien
gcaatgttggcgtcagtacccaaat

SEQ ID NO: 2056028 - DNA, 25 bp, Homo sapien
taggtcatccacaagctgaggaact

SEQ ID NO: 2056029 - DNA, 25 bp, Homo sapien
tctgtggtagtaggcccgagagtcc

SEQ ID NO: 2056030 - DNA, 25 bp, Homo sapien
tgtcatatcaccacagacttctagg

SEQ ID NO: 2056031 - DNA, 25 bp, Homo sapien
gagggtgcttggtcttggttcaaaa

SEQ ID NO: 2056032 - DNA, 25 bp, Homo sapien
tccatgtctgttcattccctgcttc

SEQ ID NO: 2056033 - DNA, 25 bp, Homo sapien
cataaaaggcagtaggtggccatcc

SEQ ID NO: 2056034 - DNA, 25 bp, Homo sapien
aataaacagcagagtcatagtctac

SEQ ID NO: 2056035 - DNA, 25 bp, Homo sapien
agagtcatagtctacaggtctttcc

SEQ ID NO: 2056036 - DNA, 25 bp, Homo sapien
catcattaaagtcttcacccttgtt

SEQ ID NO: 2056037 - DNA, 25 bp, Homo sapien
tatatagtgctcagattaggcaaag

SEQ ID NO: 2056038 - DNA, 25 bp, Homo sapien
gcctgcaagattcccatgatgagaa

SEQ ID NO: 2056039 - DNA, 25 bp, Homo sapien
gaaaagaagtacattgacaggtctt

SEQ ID NO: 2056040 - DNA, 25 bp, Homo sapien
tttccagatagcctgcaagattccc

SEQ ID NO: 2056041 - DNA, 25 bp, Homo sapien
ggctttgatgtgttggggcaggtag

SEQ ID NO: 2056042 - DNA, 25 bp, Homo sapien
gctttgatgtgttggggcaggtagt

SEQ ID NO: 2056043 - DNA, 25 bp, Homo sapien
ccaatttcagtagatgtggtgccca

SEQ ID NO: 2056044 - DNA, 25 bp, Homo sapien
caatttcagtagatgtggtgcccaa

SEQ ID NO: 2056045 - DNA, 25 bp, Homo sapien
tccaatttcagtagatgtggtgccc

SEQ ID NO: 2056046 - DNA, 25 bp, Homo sapien
aaataataatggtaggatcaaattc

SEQ ID NO: 2056047 - DNA, 25 bp, Homo sapien
aattttcaaacctgaatttatgaag

SEQ ID NO: 2056048 - DNA, 25 bp, Homo sapien
aataatggtaggatcaaattcagac

SEQ ID NO: 2056049 - DNA, 25 bp, Homo sapien
agaattttcaaacctgaatttatga

SEQ ID NO: 2056050 - DNA, 25 bp, Homo sapien
aagcttatgcaccataatcacatcg

SEQ ID NO: 2056051 - DNA, 25 bp, Homo sapien
tatgcaccataatcacatcggcttc

SEQ ID NO: 2056052 - DNA, 25 bp, Homo sapien
gcttatgcaccataatcacatcggc

SEQ ID NO: 2056053 - DNA, 25 bp, Homo sapien
gcaccataatcacatcggcttcatc

SEQ ID NO: 2056054 - DNA, 25 bp, Homo sapien
ttagtggcatactggcatcttcctc

SEQ ID NO: 2056055 - DNA, 25 bp, Homo sapien
tgtcttcatttagtggcatactggc

SEQ ID NO: 2056056 - DNA, 25 bp, Homo sapien
tgtcagacgagccaaaatacttctg

SEQ ID NO: 2056057 - DNA, 25 bp, Homo sapien
aacttaaatatgatggtttgtacaa

SEQ ID NO: 2056058 - DNA, 25 bp, Homo sapien
aaaaggcaaatctggttgtatgcat

SEQ ID NO: 2056059 - DNA, 25 bp, Homo sapien
cagggtgtttgaattttcgatgaaa

SEQ ID NO: 2056060 - DNA, 25 bp, Homo sapien
tgtatgcataaagcgtaagtatgtt

SEQ ID NO: 2056061 - DNA, 25 bp, Homo sapien
ttttatgaagacacctctctctgct

SEQ ID NO: 2056062 - DNA, 25 bp, Homo sapien
cagacaagatgtaatggtgcaagct

SEQ ID NO: 2056063 - DNA, 25 bp, Homo sapien
ggagattgcagacaagatgtaatgg

SEQ ID NO: 2056064 - DNA, 25 bp, Homo sapien
ctagggagattgcagacaagatgta

SEQ ID NO: 2056065 - DNA, 25 bp, Homo sapien
gattgcagacaagatgtaatggtgc

SEQ ID NO: 2056066 - DNA, 25 bp, Homo sapien
gcaatggcagcaacagagttcctgg

SEQ ID NO: 2056067 - DNA, 25 bp, Homo sapien
caatggcagcaacagagttcctggc

SEQ ID NO: 2056068 - DNA, 25 bp, Homo sapien
cagtcttagtgttggtgccaaataa

SEQ ID NO: 2056069 - DNA, 25 bp, Homo sapien
agtcttagtgttggtgccaaataaa

SEQ ID NO: 2056070 - DNA, 25 bp, Homo sapien
acttcacaaaatccaacgctgaaaa

SEQ ID NO: 2056071 - DNA, 25 bp, Homo sapien
tttcagctgatgagcaagggtgtat

SEQ ID NO: 2056072 - DNA, 25 bp, Homo sapien
gatgagcaagggtgtatttcacaat

SEQ ID NO: 2056073 - DNA, 25 bp, Homo sapien
gcttgggagatccagtgttaataca

SEQ ID NO: 2056074 - DNA, 25 bp, Homo sapien
tgttccccctggatactagggcttc

SEQ ID NO: 2056075 - DNA, 25 bp, Homo sapien
tggatactagggcttcaatccagaa

SEQ ID NO: 2056076 - DNA, 25 bp, Homo sapien
gatactagggcttcaatccagaagg

SEQ ID NO: 2056077 - DNA, 25 bp, Homo sapien
cccctggatactagggcttcaatcc

SEQ ID NO: 2056078 - DNA, 25 bp, Homo sapien
tggaatcgagaagtttgatccgttc

SEQ ID NO: 2056079 - DNA, 25 bp, Homo sapien
tttgaaaaggtatagaggagctgga

SEQ ID NO: 2056080 - DNA, 25 bp, Homo sapien
tggctggtgaacttataactgaagc

SEQ ID NO: 2056081 - DNA, 25 bp, Homo sapien
gaacaaggtgattgccatggctggt

SEQ ID NO: 2056082 - DNA, 25 bp, Homo sapien
gcaggtgaggctgtattcccagtaa

SEQ ID NO: 2056083 - DNA, 25 bp, Homo sapien
gtcttcatggcttggttgacccacc

SEQ ID NO: 2056084 - DNA, 25 bp, Homo sapien
taacatagatagtggcaatggtcca

SEQ ID NO: 2056085 - DNA, 25 bp, Homo sapien
gtcattcacctaacacagagcatgt

SEQ ID NO: 2056086 - DNA, 25 bp, Homo sapien
ttctcttgtacaattcctcatattg

SEQ ID NO: 2056087 - DNA, 25 bp, Homo sapien
attcctcatattgtagttgtggatc

SEQ ID NO: 2056088 - DNA, 25 bp, Homo sapien
tgtacaattcctcatattgtagttg

SEQ ID NO: 2056089 - DNA, 25 bp, Homo sapien
tcatattgtagttgtggatcttcat

SEQ ID NO: 2056090 - DNA, 25 bp, Homo sapien
ttgcctaatagagttgctgcagcca

SEQ ID NO: 2056091 - DNA, 25 bp, Homo sapien
tttcttgcctaatagagttgctgca

SEQ ID NO: 2056092 - DNA, 25 bp, Homo sapien
tgcctaatagagttgctgcagccat

SEQ ID NO: 2056093 - DNA, 25 bp, Homo sapien
tcttgcctaatagagttgctgcagc

SEQ ID NO: 2056094 - DNA, 25 bp, Homo sapien
gcattgagctagaaattatgagacc

SEQ ID NO: 2056095 - DNA, 25 bp, Homo sapien
aatcatagtatcaagggcattgagc

SEQ ID NO: 2056096 - DNA, 25 bp, Homo sapien
tattttctccaacttagcctcgact

SEQ ID NO: 2056097 - DNA, 25 bp, Homo sapien
tatagacacgctattgtatctgaca

SEQ ID NO: 2056098 - DNA, 25 bp, Homo sapien
agcacatcttgacttggaagcagga

SEQ ID NO: 2056099 - DNA, 25 bp, Homo sapien
ccagcacatcttgacttggaagcag

SEQ ID NO: 2056100 - DNA, 25 bp, Homo sapien
gcgtggctccgaggcctcatgaaac

SEQ ID NO: 2056101 - DNA, 25 bp, Homo sapien
acaataatgacagaagggcaaagga

SEQ ID NO: 2056102 - DNA, 25 bp, Homo sapien
agcaatacacaaaccctgagtccca

SEQ ID NO: 2056103 - DNA, 25 bp, Homo sapien
gcaatacacaaaccctgagtcccag

SEQ ID NO: 2056104 - DNA, 25 bp, Homo sapien
atacacaaaccctgagtcccagggg

SEQ ID NO: 2056105 - DNA, 25 bp, Homo sapien
aatacacaaaccctgagtcccaggg

SEQ ID NO: 2056106 - DNA, 25 bp, Homo sapien
gaatcttttgtgggactaaatatgc

SEQ ID NO: 2056107 - DNA, 25 bp, Homo sapien
cttttgtgggactaaatatgcaata

SEQ ID NO: 2056108 - DNA, 25 bp, Homo sapien
tcttttgtgggactaaatatgcaat

SEQ ID NO: 2056109 - DNA, 25 bp, Homo sapien
gacaatcagcatagccagttcagcc

SEQ ID NO: 2056110 - DNA, 25 bp, Homo sapien
tttgactcatttgccggtcaactgg

SEQ ID NO: 2056111 - DNA, 25 bp, Homo sapien
tctgaggttgacaaggagggtgtgt

SEQ ID NO: 2056112 - DNA, 25 bp, Homo sapien
aaggcatctgtggtcacaaagctgc

SEQ ID NO: 2056113 - DNA, 25 bp, Homo sapien
tattctacaactcttattttcacat

SEQ ID NO: 2056114 - DNA, 25 bp, Homo sapien
tttcacataagaagccagtagctct

SEQ ID NO: 2056115 - DNA, 25 bp, Homo sapien
aatacaagcaagtaataacatttgt

SEQ ID NO: 2056116 - DNA, 25 bp, Homo sapien
taagaagccagtagctctgtcccca

SEQ ID NO: 2056117 - DNA, 25 bp, Homo sapien
agtggcaaagatagaaagctacccc

SEQ ID NO: 2056118 - DNA, 25 bp, Homo sapien
gtggcaaagatagaaagctaccccc

SEQ ID NO: 2056119 - DNA, 25 bp, Homo sapien
aaagtggcaaagatagaaagctacc

SEQ ID NO: 2056120 - DNA, 25 bp, Homo sapien
ggcaaagatagaaagctacccccat

SEQ ID NO: 2056121 - DNA, 25 bp, Homo sapien
ttgcacagagcctttgatgacccat

SEQ ID NO: 2056122 - DNA, 25 bp, Homo sapien
ctgagacatcatttgcacagagcct

SEQ ID NO: 2056123 - DNA, 25 bp, Homo sapien
tgagacatcatttgcacagagcctt

SEQ ID NO: 2056124 - DNA, 25 bp, Homo sapien
tccaatgtattgctctcagtctcca

SEQ ID NO: 2056125 - DNA, 25 bp, Homo sapien
cacacctggacaattgttttgcttt

SEQ ID NO: 2056126 - DNA, 25 bp, Homo sapien
caatcatctgaagtgagtatcactc

SEQ ID NO: 2056127 - DNA, 25 bp, Homo sapien
ttgcctctgctttgaatgaccttcc

SEQ ID NO: 2056128 - DNA, 25 bp, Homo sapien
tcatcagtttcaaacgtattaacag

SEQ ID NO: 2056129 - DNA, 25 bp, Homo sapien
attaacagtgtggattcttgctgcc

SEQ ID NO: 2056130 - DNA, 25 bp, Homo sapien
caaacgtattaacagtgtggattct

SEQ ID NO: 2056131 - DNA, 25 bp, Homo sapien
tacttctgaagtcatcagtttcaaa

SEQ ID NO: 2056132 - DNA, 25 bp, Homo sapien
ttatgaagaggatctcacagtccat

SEQ ID NO: 2056133 - DNA, 25 bp, Homo sapien
ggaaacttggccaggatttatgaag

SEQ ID NO: 2056134 - DNA, 25 bp, Homo sapien
ttggccaggatttatgaagaggatc

SEQ ID NO: 2056135 - DNA, 25 bp, Homo sapien
ccaggatttatgaagaggatctcac

SEQ ID NO: 2056136 - DNA, 25 bp, Homo sapien
gagtgagtcttcaaatccttgtaaa

SEQ ID NO: 2056137 - DNA, 25 bp, Homo sapien
aaattgcaccggtagaggaagacac

SEQ ID NO: 2056138 - DNA, 25 bp, Homo sapien
aaatccttgtaaattgcaccggtag

SEQ ID NO: 2056139 - DNA, 25 bp, Homo sapien
cttgtaaattgcaccggtagaggaa

SEQ ID NO: 2056140 - DNA, 25 bp, Homo sapien
ccttcagagagtacaattgactaaa

SEQ ID NO: 2056141 - DNA, 25 bp, Homo sapien
ggaacatctcagtactatgccaaat

SEQ ID NO: 2056142 - DNA, 25 bp, Homo sapien
gaaactagagggtggacatgatcct

SEQ ID NO: 2056143 - DNA, 25 bp, Homo sapien
gatcttcagtagtcgccttatgtcc

SEQ ID NO: 2056144 - DNA, 25 bp, Homo sapien
aaaagacttccttatactcatcttc

SEQ ID NO: 2056145 - DNA, 25 bp, Homo sapien
gaaaagacttccttatactcatctt

SEQ ID NO: 2056146 - DNA, 25 bp, Homo sapien
aaagacttccttatactcatcttca

SEQ ID NO: 2056147 - DNA, 25 bp, Homo sapien
ttcacatttataatagcagtttctg

SEQ ID NO: 2056148 - DNA, 25 bp, Homo sapien
ttataatagcagtttctgtcttgtt

SEQ ID NO: 2056149 - DNA, 25 bp, Homo sapien
acatttataatagcagtttctgtct

SEQ ID NO: 2056150 - DNA, 25 bp, Homo sapien
ctgtcttgtttttaccattgtccat

SEQ ID NO: 2056151 - DNA, 25 bp, Homo sapien
gtcccggaaaatgcaccacttattc

SEQ ID NO: 2056152 - DNA, 25 bp, Homo sapien
ccggaaaatgcaccacttattccag

SEQ ID NO: 2056153 - DNA, 25 bp, Homo sapien
gaaaatgcaccacttattccagtca

SEQ ID NO: 2056154 - DNA, 25 bp, Homo sapien
gtgtcccggaaaatgcaccacttat

SEQ ID NO: 2056155 - DNA, 25 bp, Homo sapien
gcatgctactactctgtctactgaa

SEQ ID NO: 2056156 - DNA, 25 bp, Homo sapien
gaaagggacaggatatagcatatac

SEQ ID NO: 2056157 - DNA, 25 bp, Homo sapien
tctactgaacccattgcagacagag

SEQ ID NO: 2056158 - DNA, 25 bp, Homo sapien
gcagacagagctaattgatgctatg

SEQ ID NO: 2056159 - DNA, 25 bp, Homo sapien
gcctctaaatcaagaagataatttg

SEQ ID NO: 2056160 - DNA, 25 bp, Homo sapien
cttagcctctaaatcaagaagataa

SEQ ID NO: 2056161 - DNA, 25 bp, Homo sapien
cctctaaatcaagaagataatttgt

SEQ ID NO: 2056162 - DNA, 25 bp, Homo sapien
tagcctctaaatcaagaagataatt

SEQ ID NO: 2056163 - DNA, 25 bp, Homo sapien
tttgttattatcgagtaacataggc

SEQ ID NO: 2056164 - DNA, 25 bp, Homo sapien
ttatcgagtaacataggccattcca

SEQ ID NO: 2056165 - DNA, 25 bp, Homo sapien
tattatcgagtaacataggccattc

SEQ ID NO: 2056166 - DNA, 25 bp, Homo sapien
tcgagtaacataggccattccaatg

SEQ ID NO: 2056167 - DNA, 25 bp, Homo sapien
gatccagctcacaccagtccattta

SEQ ID NO: 2056168 - DNA, 25 bp, Homo sapien
ggcatggacccatcactggcaaggt

SEQ ID NO: 2056169 - DNA, 25 bp, Homo sapien
tgcggagacctaggatccagctcac

SEQ ID NO: 2056170 - DNA, 25 bp, Homo sapien
caagaaggccgaatgggcatggacc

SEQ ID NO: 2056171 - DNA, 25 bp, Homo sapien
catcaatcaaagcatggcagtttac

SEQ ID NO: 2056172 - DNA, 25 bp, Homo sapien
tgagatgcaagatctccgaggtctt

SEQ ID NO: 2056173 - DNA, 25 bp, Homo sapien
tctccgaggtcttgcatcaacctgc

SEQ ID NO: 2056174 - DNA, 25 bp, Homo sapien
tgattttacatcaatcaaagcatgg

SEQ ID NO: 2056175 - DNA, 25 bp, Homo sapien
gtaagctgggcccacgaactccact

SEQ ID NO: 2056176 - DNA, 25 bp, Homo sapien
tggtggtaagctgggcccacgaact

SEQ ID NO: 2056177 - DNA, 25 bp, Homo sapien
aaatggtggtaagctgggcccacga

SEQ ID NO: 2056178 - DNA, 25 bp, Homo sapien
taagctgggcccacgaactccacta

SEQ ID NO: 2056179 - DNA, 25 bp, Homo sapien
tatatatagtttagtacgttctctg

SEQ ID NO: 2056180 - DNA, 25 bp, Homo sapien
tcctgctggaatacttcttcacaag

SEQ ID NO: 2056181 - DNA, 25 bp, Homo sapien
ctgtgatatagttcttttcctgctg

SEQ ID NO: 2056182 - DNA, 25 bp, Homo sapien
gtttagtacgttctctgtgatatag

SEQ ID NO: 2056183 - DNA, 25 bp, Homo sapien
gtatttaaatcttttagtacaatga

SEQ ID NO: 2056184 - DNA, 25 bp, Homo sapien
taaatcttttagtacaatgattttc

SEQ ID NO: 2056185 - DNA, 25 bp, Homo sapien
aatcttttagtacaatgattttcta

SEQ ID NO: 2056186 - DNA, 25 bp, Homo sapien
ccataggcagtagtatttaaatctt

SEQ ID NO: 2056187 - DNA, 25 bp, Homo sapien
aaacatggcactctgtggttagaag

SEQ ID NO: 2056188 - DNA, 25 bp, Homo sapien
gagtcttcatcttggctatatgcag

SEQ ID NO: 2056189 - DNA, 25 bp, Homo sapien
gagttcttcatgtatacaatgatgg

SEQ ID NO: 2056190 - DNA, 25 bp, Homo sapien
gcctttacctagtaggagtcttcat

SEQ ID NO: 2056191 - DNA, 25 bp, Homo sapien
tcaattataatcagagttgtctgcc

SEQ ID NO: 2056192 - DNA, 25 bp, Homo sapien
gagttgtctgccaaagtactgatca

SEQ ID NO: 2056193 - DNA, 25 bp, Homo sapien
caaagtactgatcagtccttggata

SEQ ID NO: 2056194 - DNA, 25 bp, Homo sapien
gatcagtccttggatatttaaaaag

SEQ ID NO: 2056195 - DNA, 25 bp, Homo sapien
ttagacaggctcactacagaggctg

SEQ ID NO: 2056196 - DNA, 25 bp, Homo sapien
aagcgtgataaggtgaagtaattac

SEQ ID NO: 2056197 - DNA, 25 bp, Homo sapien
gtaattacattatcagatgtctctg

SEQ ID NO: 2056198 - DNA, 25 bp, Homo sapien
tgtatgcttggcctctttagacagg

SEQ ID NO: 2056199 - DNA, 25 bp, Homo sapien
gatctggatcccatgttttataaca

SEQ ID NO: 2056200 - DNA, 25 bp, Homo sapien
ctatctcaggcgtttttccctctcc

SEQ ID NO: 2056201 - DNA, 25 bp, Homo sapien
tttccctctccatgatctccatcag

SEQ ID NO: 2056202 - DNA, 25 bp, Homo sapien
tatctcaggcgtttttccctctcca

SEQ ID NO: 2056203 - DNA, 25 bp, Homo sapien
ccatgatctccatcagctcagtctt

SEQ ID NO: 2056204 - DNA, 25 bp, Homo sapien
catgggttggtatatctgtagagag

SEQ ID NO: 2056205 - DNA, 25 bp, Homo sapien
catacacgattagacccctatatga

SEQ ID NO: 2056206 - DNA, 25 bp, Homo sapien
cttcctcatgggttggtatatctgt

SEQ ID NO: 2056207 - DNA, 25 bp, Homo sapien
gacccctatatgatctacatacaat

SEQ ID NO: 2056208 - DNA, 25 bp, Homo sapien
gcaatgctagagcacaggaaacttg

SEQ ID NO: 2056209 - DNA, 25 bp, Homo sapien
agagcccttcggctaagatgtggga

SEQ ID NO: 2056210 - DNA, 25 bp, Homo sapien
gaatccaaatcaagttgccagagcc

SEQ ID NO: 2056211 - DNA, 25 bp, Homo sapien
cccttcggctaagatgtgggaggtc

SEQ ID NO: 2056212 - DNA, 25 bp, Homo sapien
aaatcaagttgccagagcccttcgg

SEQ ID NO: 2056213 - DNA, 25 bp, Homo sapien
cttaactgtactaggaacacagtac

SEQ ID NO: 2056214 - DNA, 25 bp, Homo sapien
aactgtactaggaacacagtacggg

SEQ ID NO: 2056215 - DNA, 25 bp, Homo sapien
cagtacggggtgcatgtctctgctg

SEQ ID NO: 2056216 - DNA, 25 bp, Homo sapien
cctgaagaatgttcgagacagtggc

SEQ ID NO: 2056217 - DNA, 25 bp, Homo sapien
agaggtcctctcagtgttctctgaa

SEQ ID NO: 2056218 - DNA, 25 bp, Homo sapien
caaagcattaatatacagcagaggt

SEQ ID NO: 2056219 - DNA, 25 bp, Homo sapien
aagcattaatatacagcagaggtcc

SEQ ID NO: 2056220 - DNA, 25 bp, Homo sapien
gtgttctctgaaataatctgctttt

SEQ ID NO: 2056221 - DNA, 25 bp, Homo sapien
ttccaagtctacgtactcatcttca

SEQ ID NO: 2056222 - DNA, 25 bp, Homo sapien
tgtttccaagtctacgtactcatct

SEQ ID NO: 2056223 - DNA, 25 bp, Homo sapien
caagtctacgtactcatcttcaaac

SEQ ID NO: 2056224 - DNA, 25 bp, Homo sapien
ccaagtctacgtactcatcttcaaa

SEQ ID NO: 2056225 - DNA, 25 bp, Homo sapien
tgttctttagattacgatagacagc

SEQ ID NO: 2056226 - DNA, 25 bp, Homo sapien
attacgatagacagccagggccaca

SEQ ID NO: 2056227 - DNA, 25 bp, Homo sapien
tcactctgtgttctttagattacga

SEQ ID NO: 2056228 - DNA, 25 bp, Homo sapien
ttagattacgatagacagccagggc

SEQ ID NO: 2056229 - DNA, 25 bp, Homo sapien
ttctaaggacacttttggacacttg

SEQ ID NO: 2056230 - DNA, 25 bp, Homo sapien
tgaccttgtatccaagtgtcaatgc

SEQ ID NO: 2056231 - DNA, 25 bp, Homo sapien
tattttctaaggacacttttggaca

SEQ ID NO: 2056232 - DNA, 25 bp, Homo sapien
atgctagtcctatcagaaatgttga

SEQ ID NO: 2056233 - DNA, 25 bp, Homo sapien
ttaatccacaattatcttattagca

SEQ ID NO: 2056234 - DNA, 25 bp, Homo sapien
ccacaattatcttattagcaggaat

SEQ ID NO: 2056235 - DNA, 25 bp, Homo sapien
aatccacaattatcttattagcagg

SEQ ID NO: 2056236 - DNA, 25 bp, Homo sapien
tccacaattatcttattagcaggaa

SEQ ID NO: 2056237 - DNA, 25 bp, Homo sapien
cagccattaggtgcctaagaggtag

SEQ ID NO: 2056238 - DNA, 25 bp, Homo sapien
agccattaggtgcctaagaggtaga

SEQ ID NO: 2056239 - DNA, 25 bp, Homo sapien
gacagccattaggtgcctaagaggt

SEQ ID NO: 2056240 - DNA, 25 bp, Homo sapien
aagacagccattaggtgcctaagag

SEQ ID NO: 2056241 - DNA, 25 bp, Homo sapien
ccaccatttcttggatacttgtcat

SEQ ID NO: 2056242 - DNA, 25 bp, Homo sapien
tgctgatatgctggatgtttacttt

SEQ ID NO: 2056243 - DNA, 25 bp, Homo sapien
tcttgctgactctatgctgatatgc

SEQ ID NO: 2056244 - DNA, 25 bp, Homo sapien
ggagaagtggtataaaacattcttg

SEQ ID NO: 2056245 - DNA, 25 bp, Homo sapien
gtagagtggacagatgtctgaccac

SEQ ID NO: 2056246 - DNA, 25 bp, Homo sapien
cactgacaaatgagttccattatgc

SEQ ID NO: 2056247 - DNA, 25 bp, Homo sapien
ggacagatgtctgaccactgacaaa

SEQ ID NO: 2056248 - DNA, 25 bp, Homo sapien
tctgaccactgacaaatgagttcca

SEQ ID NO: 2056249 - DNA, 25 bp, Homo sapien
aacattctaggggagttgagaaact

SEQ ID NO: 2056250 - DNA, 25 bp, Homo sapien
gtcaacattctaggggagttgagaa

SEQ ID NO: 2056251 - DNA, 25 bp, Homo sapien
ttctaggggagttgagaaactctct

SEQ ID NO: 2056252 - DNA, 25 bp, Homo sapien
gtgtcaacattctaggggagttgag

SEQ ID NO: 2056253 - DNA, 25 bp, Homo sapien
tcttaggcagtatgtgttaacagca

SEQ ID NO: 2056254 - DNA, 25 bp, Homo sapien
catggaccttgtgatagtgctgact

SEQ ID NO: 2056255 - DNA, 25 bp, Homo sapien
tgaatcttcctatgctgcgtgaaca

SEQ ID NO: 2056256 - DNA, 25 bp, Homo sapien
gcaaaacctcaaattcctgtccagg

SEQ ID NO: 2056257 - DNA, 25 bp, Homo sapien
ggaagccccttagtctcattaggag

SEQ ID NO: 2056258 - DNA, 25 bp, Homo sapien
ttaggagtgttcttgcaagttccac

SEQ ID NO: 2056259 - DNA, 25 bp, Homo sapien
aaagccattgccatcagaaaccagg

SEQ ID NO: 2056260 - DNA, 25 bp, Homo sapien
acttggccaagcatctctcaccagg

SEQ ID NO: 2056261 - DNA, 25 bp, Homo sapien
cttcgtctttgtgtacatctttctt

SEQ ID NO: 2056262 - DNA, 25 bp, Homo sapien
gagcccgtgccagagctaatgctgg

SEQ ID NO: 2056263 - DNA, 25 bp, Homo sapien
cgtgccagagctaatgctggagccc

SEQ ID NO: 2056264 - DNA, 25 bp, Homo sapien
ccgtgccagagctaatgctggagcc

SEQ ID NO: 2056265 - DNA, 25 bp, Homo sapien
gcccgtgccagagctaatgctggag

SEQ ID NO: 2056266 - DNA, 25 bp, Homo sapien
agggccagcttaatgttcatcagct

SEQ ID NO: 2056267 - DNA, 25 bp, Homo sapien
gatctcaatgtccagggccagctta

SEQ ID NO: 2056268 - DNA, 25 bp, Homo sapien
gtccagggccagcttaatgttcatc

SEQ ID NO: 2056269 - DNA, 25 bp, Homo sapien
aatgtccagggccagcttaatgttc

SEQ ID NO: 2056270 - DNA, 25 bp, Homo sapien
cgcagctgccatgccatatcctgct

SEQ ID NO: 2056271 - DNA, 25 bp, Homo sapien
gccatgccatatcctgcttggcctg

SEQ ID NO: 2056272 - DNA, 25 bp, Homo sapien
actcacgcagctgccatgccatatc

SEQ ID NO: 2056273 - DNA, 25 bp, Homo sapien
agctgccatgccatatcctgcttgg

SEQ ID NO: 2056274 - DNA, 25 bp, Homo sapien
agatctccgtctttgcaggacgcgg

SEQ ID NO: 2056275 - DNA, 25 bp, Homo sapien
cgtctttgcaggacgcgggtcatcc

SEQ ID NO: 2056276 - DNA, 25 bp, Homo sapien
gtctttgcaggacgcgggtcatccc

SEQ ID NO: 2056277 - DNA, 25 bp, Homo sapien
tctccgtctttgcaggacgcgggtc

SEQ ID NO: 2056278 - DNA, 25 bp, Homo sapien
tggcaatctccttgtactgtgcctt

SEQ ID NO: 2056279 - DNA, 25 bp, Homo sapien
tgccttgacctcagagatgatactg

SEQ ID NO: 2056280 - DNA, 25 bp, Homo sapien
gtgccttgacctcagagatgatact

SEQ ID NO: 2056281 - DNA, 25 bp, Homo sapien
ctggctgcggttggcaatctccttg

SEQ ID NO: 2056282 - DNA, 25 bp, Homo sapien
gacagcaccacaggtgtgtccggaa

SEQ ID NO: 2056283 - DNA, 25 bp, Homo sapien
ggacagcaccacaggtgtgtccgga

SEQ ID NO: 2056284 - DNA, 25 bp, Homo sapien
acagcaccacaggtgtgtccggaac

SEQ ID NO: 2056285 - DNA, 25 bp, Homo sapien
atacagcggcctgagaaagttgatc

SEQ ID NO: 2056286 - DNA, 25 bp, Homo sapien
cggcctgagaaagttgatctcgtca

SEQ ID NO: 2056287 - DNA, 25 bp, Homo sapien
cagcggcctgagaaagttgatctcg

SEQ ID NO: 2056288 - DNA, 25 bp, Homo sapien
cttcatacagcggcctgagaaagtt

SEQ ID NO: 2056289 - DNA, 25 bp, Homo sapien
aaattcattctctatctctataggc

SEQ ID NO: 2056290 - DNA, 25 bp, Homo sapien
tctatctctataggcttattgatct

SEQ ID NO: 2056291 - DNA, 25 bp, Homo sapien
tatctctataggcttattgatctca

SEQ ID NO: 2056292 - DNA, 25 bp, Homo sapien
cattctctatctctataggcttatt

SEQ ID NO: 2056293 - DNA, 25 bp, Homo sapien
ctggatgcacatgccctggttgttg

SEQ ID NO: 2056294 - DNA, 25 bp, Homo sapien
tcctggatgcacatgccctggttgt

SEQ ID NO: 2056295 - DNA, 25 bp, Homo sapien
tctcctggatgcacatgccctggtt

SEQ ID NO: 2056296 - DNA, 25 bp, Homo sapien
tttctcctggatgcacatgccctgg

SEQ ID NO: 2056297 - DNA, 25 bp, Homo sapien
ccgtgatgtcagtgatggtcccata

SEQ ID NO: 2056298 - DNA, 25 bp, Homo sapien
cagtgatggtcccatactgctggcc

SEQ ID NO: 2056299 - DNA, 25 bp, Homo sapien
catactgctggccagccatagcatc

SEQ ID NO: 2056300 - DNA, 25 bp, Homo sapien
ttgaccgtgatgtcagtgatggtcc

SEQ ID NO: 2056301 - DNA, 25 bp, Homo sapien
cacagtaatagaaggcctagggctg

SEQ ID NO: 2056302 - DNA, 25 bp, Homo sapien
tgatggctggatttgcactgacact

SEQ ID NO: 2056303 - DNA, 25 bp, Homo sapien
tctgacctggcagtcaagcaggaca

SEQ ID NO: 2056304 - DNA, 25 bp, Homo sapien
caaagtgcagtcatatggcaacaca

SEQ ID NO: 2056305 - DNA, 25 bp, Homo sapien
acatgaatatgtggctctatggtca

SEQ ID NO: 2056306 - DNA, 25 bp, Homo sapien
cactgtcattgaaaatctgaaggga

SEQ ID NO: 2056307 - DNA, 25 bp, Homo sapien
gctctatggtcaggaaatcaaggga

SEQ ID NO: 2056308 - DNA, 25 bp, Homo sapien
gaaacccggatatctcctgaatcta

SEQ ID NO: 2056309 - DNA, 25 bp, Homo sapien
gcaaatgatatcgtctcaatccagg

SEQ ID NO: 2056310 - DNA, 25 bp, Homo sapien
tcaatccaggatattgctgggccag

SEQ ID NO: 2056311 - DNA, 25 bp, Homo sapien
cagtctagatggcaagggctggtcc

SEQ ID NO: 2056312 - DNA, 25 bp, Homo sapien
tccgcttgtagaggaaagcccaatg

SEQ ID NO: 2056313 - DNA, 25 bp, Homo sapien
tcagcctgacaatatcatattctcc

SEQ ID NO: 2056314 - DNA, 25 bp, Homo sapien
attttgtcatagcaatcttctcctg

SEQ ID NO: 2056315 - DNA, 25 bp, Homo sapien
tttgtcatagcaatcttctcctgtc

SEQ ID NO: 2056316 - DNA, 25 bp, Homo sapien
gaggctgccaaagatttcaccttct

SEQ ID NO: 2056317 - DNA, 25 bp, Homo sapien
ctttcgactcctgatttcttatcat

SEQ ID NO: 2056318 - DNA, 25 bp, Homo sapien
cataatgcctggcaggtccaaaatg

SEQ ID NO: 2056319 - DNA, 25 bp, Homo sapien
ccaaaatgtactggccacatgtcaa

SEQ ID NO: 2056320 - DNA, 25 bp, Homo sapien
tcaatattgttatccagatccaggg

SEQ ID NO: 2056321 - DNA, 25 bp, Homo sapien
tgtctagcatgagcataatgcctgg

SEQ ID NO: 2056322 - DNA, 25 bp, Homo sapien
cacttccccaatacactgaagaatt

SEQ ID NO: 2056323 - DNA, 25 bp, Homo sapien
gcacttccccaatacactgaagaat

SEQ ID NO: 2056324 - DNA, 25 bp, Homo sapien
tacactgaagaattcttgtaccaga

SEQ ID NO: 2056325 - DNA, 25 bp, Homo sapien
acactgaagaattcttgtaccagaa
